United States Patent Application Publication US 2018/0126003 A1 - sequence listing, part 172

SEQ ID NO: 303491 - DNA, 492 bp, Artificial Sequence
  derived and/or modified sequence
atgacagtgaagaccctgcacggccctgccatggtgaagtacctgctgctgagcatcctgggcctggccttcctgtctgaggccgccgccaggaagatccccaaggtgggccacaccttcttccagaagccagagagctgcccccctgtgcctgggggctccatgaagctggacatcggcatcatcaatgaaaaccagagggtgtccatgagcaggaacatcgagagccgcagcaccagcccctggaactacacagtgacctgggaccccaaccgctaccccagcgaggtggtgcaggcccagtgcaggaacctgggctgcatcaatgcccagggcaaggaggacatctccatgaacagcgtgcccatccagcaggagaccctggtggtgcggaggaagcaccagggctgcagcgtgtccttccagctggagaaggtgctggtgacagtgggctgcacctgtgtgacccctgtgatccaccacgtgcagtag

SEQ ID NO: 303492 - DNA, 492 bp, Artificial Sequence
  derived and/or modified sequence
atgaccgtgaagaccctgcacggccccgccatggtgaagtacctgttactctcaatcctggggctcgcctttctctccgaggcagcggccaggaagattcccaaggttggtcatactttctttcagaagcccgagtcttgccctcctgtgccagggggaagcatgaagcttgacatcggaattattaacgagaaccaaagggtgagtatgtcccgcaatatagaaagcaggtctacctccccatggaattacaccgtgacgtgggacccgaaccggtatccgagtgaggtcgtccaggcgcagtgtcggaaccttggctgtattaatgctcagggcaaggaggacatctccatgaactcagtccctatccaacaggaaacccttgtggtccggcgtaaacaccaaggatgctcagtgtcgtttcaactggaaaaggtcctggtgacggtcggctgcacatgcgttacgcccgtgattcaccacgtacaatag

SEQ ID NO: 303493 - DNA, 492 bp, Artificial Sequence
  derived and/or modified sequence
atgaccgttaaaactttgcatgggcctgctatggtgaagtatctgctattgtcaattctgggccttgcctttttgagtgaggccgcagccaggaagatcccaaaagtcggtcacacttttttccaaaaacccgaatcctgtccacccgttcctggaggatcaatgaaactggatattggtatcattaacgagaatcaacgggtaagcatgtcacgaaatatagaaagcagaagcaccagcccttggaactatacagtaacgtgggaccctaacaggtatccgagtgaagtggtgcaggcgcagtgtcgcaatctgggttgtattaacgcccagggcaaggaggacatttctatgaactctgttccgatccagcaggagactctggtcgttcggcgaaagcaccagggatgcagcgtgagcttccagctagaaaaagtcctggtaacagtggggtgtacatgtgtgacccccgttatccatcacgtccagtag

SEQ ID NO: 303494 - DNA, 850 bp, Artificial Sequence
  derived and/or modified sequence
atgattgctataaaactaacaggtactctcattgatagaacacaggcatacacaggaagatacattcacagaaagagcttcctgcacaaagtaagccaccagcgcaacatgacagtgaagaccctgcatggcccagccatggtcaagtacttgctgctgtcgatattggggcttgcctttctgagtgaggcggcagctcggaaaatccccaaagtaggacatacttttttccaaaagcctgagagttgcccgcctgtgccaggaggtagtatgaagcttgacattggcatcatcaatgaaaaccagcgcgtttccatgtcacgtaacatcgagagccgctccacctccccctggaattacactgtcacttgggaccccaaccggtacccctcggaagttgtacaggcccagtgtaggaacttgggctgcatcaatgctcaaggaaaggaagacatctccatgaattccgttcccatccagcaagagaccctggtcgtccggaggaagcaccaaggctgctctgtttctttccagttggagaaggtgctggtgactgttggctgcacctgcgtcacccctgtcatccaccatgtgcagtaagaggtgcatatccactcagctgaagaagctgtagaaatgccactccttacccagtgctctgcaacaagtcctgtctgacccccaattccctccacttcacaggactcttaataagacctgcacggatggaaacagaaaatattcacaatgtatgtgtgtatgtactacactttatatttgatatctaaaatgttaggagaaaaattaatatattcagtgctaatataataaagtattaataatttaaaaa

SEQ ID NO: 303495 - DNA, 279 bp, Artificial Sequence
  derived and/or modified sequence
atgagcaactcccacccgctgaggccattcaccgccgtgggggagatcgatcatgttcacatattatctgagcatattggcgcgttgctgattggcgaagagtatggggatgtgacgttcgtagttgagaaaaagagatttcctgcccaccgggtgatcctggccgccagatgtcagtatttcagagccctcctgtacggaggaatgagggaaagccagcctgaggcagagatccccctccaggacaccaccgctgaagcatttactatgctgctctag

SEQ ID NO: 303496 - DNA, 279 bp, Artificial Sequence
  derived and/or modified sequence
atgagcaacagccaccccctgcggcccttcaccgctgtgggggagattgaccacgtgcacatcctgtctgagcacatcggggccctgctgattggagaggagtatggagatgtgacctttgtggtggagaagaagcgcttccctgcccacagggtcatcctggccgcccgctgccagtacttccgggccctgctgtatggaggcatgagggagagccagcctgaggccgagatccccctgcaggacaccacagctgaggccttcaccatgctgctgtag

SEQ ID NO: 303497 - DNA, 279 bp, Artificial Sequence
  derived and/or modified sequence
atgagcaacagccaccccctgcggcccttcaccgccgtgggcgagattgaccacgtccacattctcagtgaacatattggtgcgctcctgattggtgaggagtacggagatgtcacatttgtggttgagaaaaagagatttccagctcatcgggtcattctggctgccagatgccagtattttagagcactgctctatggaggaatgagagagtcccagcccgaagcagaaatccctcttcaggacacgactgccgaggctttcaccatgttattgtag

SEQ ID NO: 303498 - DNA, 279 bp, Artificial Sequence
  derived and/or modified sequence
atgtccaacagccaccctcttcggccattcacagccgttggagaaattgatcacgtgcatatcctatcagaacatattggagcactgctcattggagaggagtatggcgacgtcacatttgtggtcgaaaaaaagcgctttcccgctcacagggtgatcctcgccgctaggtgccagtattttagggccctgctgtacggcggaatgcgggagtcccaacctgaggcagagattcccttgcaagataccacagctgaagcttttacaatgctcctgtag

SEQ ID NO: 303499 - DNA, 573 bp, Artificial Sequence
  derived and/or modified sequence
agagaggggtgcggagcgggcggaagaggcgtctgtgtcgcagcttggtctcagaggagcatcgctgggctcgtctcaatttggccctgctgtatttcaagtgctcggtagccacatgtggcaagtggccatcactgtggccattgcagctccaaagggacaggagagttgatggaaattagacactgcattctacagcctcatgagcccaagagagcaaaccttggtttgctgaaaatcagcagataaggcaattgaaagggaagaagaacaacgactatcgtctattccacaagatgagtaacagccaccctcttcgcccctttactgcagtgggggaaattgatcatgtgcacattttgtctgaacatattggtgccttgttgattggggaagaatatggcgacgtcacattcgtggtggaaaagaaacgttttcctgcccacagggtaattttagcagccaggtgccaatattttcgagcattattatatggtggaatgcgagagtctcagcctgaagcagaaattcctctccaagacaccactgcagaagcattcacaatgctactca

SEQ ID NO: 303500 - DNA, 279 bp, Artificial Sequence
  derived and/or modified sequence
atgagcaacagccaccccctgagacccttcaccgccgtgggcgagatcgaccacgtgcacatcctgagcgagcacatcggcgccctgctgatcggcgaggagtacggcgacgtgaccttcgtggtggagaagaagagattccccgcccacagagtgatcctggccgccagatgccagtacttcagagccctgctgtacggcggcatgagagagagccagcccgaggccgagatccccctgcaggacaccaccgccgaggccttcaccatgctgctgtag

SEQ ID NO: 303501 - protein, 338 aa, Artificial Sequence
  derived and/or modified sequence
MADAAATAGAGGSGTRSGSKQSTNPADNYHLARRRTLQVVVSSLLTEAGFESAEKASVETLTEMLQSYISEIGRSAKSYCEHTARTQPTLSDIVVTLVEMGFNVDTLPAYAKRSQRMVITAPPVTNQPVTPKALTAGQNRPHPPHIPSHFPEFPDPHTYIKTPTYREPVSDYQVLREKAASQRRDVERALTRFMAKTGETQSLFKDDVSTFPLIAARPFTIPYLTALLPSELEMQQMEETDSSEQDEQTDTENLALHISMIESRSVTQAGVQWQDLGSLQPPPPGFKRFSSLSLLSSWNYRRILEPRRRTPLSCSRTPPCRVAGMGRRTSSITLICGR

SEQ ID NO: 303502 - DNA, 1017 bp, Artificial Sequence
  derived and/or modified sequence
atggccgacgccgccgccaccgccggcgccggcggcagcggcaccagaagcggcagcaagcagagcaccaaccccgccgacaactaccacctggccagaagaagaaccctgcaggtggtggtgagcagcctgctgaccgaggccggcttcgagagcgccgagaaggccagcgtggagaccctgaccgagatgctgcagagctacatcagcgagatcggcagaagcgccaagagctactgcgagcacaccgccagaacccagcccaccctgagcgacatcgtggtgaccctggtggagatgggcttcaacgtggacaccctgcccgcctacgccaagagaagccagagaatggtgatcaccgccccccccgtgaccaaccagcccgtgacccccaaggccctgaccgccggccagaacagaccccaccccccccacatccccagccacttccccgagttccccgacccccacacctacatcaagacccccacctacagagagcccgtgagcgactaccaggtgctgagagagaaggccgccagccagagaagagacgtggagagagccctgaccagattcatggccaagaccggcgagacccagagcctgttcaaggacgacgtgagcaccttccccctgatcgccgccagacccttcaccatcccctacctgaccgccctgctgcccagcgagctggagatgcagcagatggaggagaccgacagcagcgagcaggacgagcagaccgacaccgagaacctggccctgcacatcagcatgatcgagagcagaagcgtgacccaggccggcgtgcagtggcaggacctgggcagcctgcagccccccccccccggcttcaagagattcagcagcctgagcctgctgagcagctggaactacagaagaatcctggagcccagaagaagaacccccctgagctgcagcagaacccccccctgcagagtggccggcatgggcagaagaaccagcagcatcaccctgatctgcggcagatag

SEQ ID NO: 303503 - DNA, 1017 bp, Artificial Sequence
  derived and/or modified sequence
atggccgatgccgccgcaacggctggcgccggcgggtcaggtactcggtctggatcaaaacagagtaccaaccccgcggacaactatcacctggcgcggagacggaccctccaggttgtggtgtcctctctgctcaccgaagcaggattcgagagcgccgagaaagcgagcgtagagactctgactgagatgttgcagagctatatttcggagataggtagatccgccaagtcatattgcgaacatacagcccgaacccagcctaccctctctgatattgtggtaacactggtggaaatgggatttaacgtggacacgctgccagcctacgccaaaagatctcagcggatggtgattactgctcccccggtcacaaaccaaccagtgacgcccaaggcacttaccgcgggccaaaacaggccccatcctccgcacatccccagtcattttcccgaattcccagatccccatacatatataaaaacgcctacctacagagaaccggtatcagattatcaggtcctccgggaaaaagccgctagtcaacgacgcgacgttgaacgcgcactcacgcgttttatggccaaaaccggtgagacacaaagtctgtttaaggacgacgtgtccacctttccactgattgcagcgcgtccctttaccatcccctacttgacagccctcttgccaagcgaactggaaatgcaacagatggaggagaccgatagtagcgaacaagatgaacagacggatactgagaatctggccctgcatatctccatgatcgaatctcggagtgttacgcaagccggggttcagtggcaggatctgggcagcctgcaaccgccaccccccggattcaagaggttctctagtctgagtctgttgagcagctggaactaccgtagaatccttgagccccgcaggcgcactccgctgtcctgtagtaggactccgccctgtcgtgtcgcggggatgggcagacgtacatctagcataacattgatctgcggaagatag

SEQ ID NO: 303504 - DNA, 1017 bp, Artificial Sequence
  derived and/or modified sequence
atggccgacgccgcagccaccgctggcgccggtgggtcaggcacacgctcagggagtaagcaaagcacaaaccctgccgacaactatcacctcgcccgcaggagaacgctgcaggtcgttgtcagctcactgttgactgaggctggatttgagtcagcggaaaaagcatctgtggagactctaaccgagatgctgcagtcgtatattagcgagatcggcagatccgcaaagtcctattgcgaacacactgctcggacacagccaactctcagcgacatcgtggtaaccctcgtagagatgggattcaacgtcgacacgctccctgcctacgcaaagaggagtcaacggatggtaatcaccgcaccccctgtgactaatcagcctgttacacctaaggcgttgacagcagggcaaaacagacctcatcctccacatatcccaagtcacttccctgaatttcctgatccccacacctacattaagacacctacttaccgggagcccgtgtcagactatcaggtcctgcgagagaaagccgccagtcagcgtagggacgtggaaagagctctgactcggtttatggccaaaacaggcgagactcagtcccttttcaaagacgacgtgagtacttttcctctgattgcagctcgcccatttaccattccctatctgactgctcttttacctagtgagctagaaatgcaacaaatggaggaaactgattccagtgaacaggatgaacaaactgatacagagaacctggcactgcatataagcatgattgagtcaagaagcgtgacccaggctggagtacagtggcaagatcttgggtctctccaacctccaccacccggtttcaaaaggttcagctctctgtctctgctgtccagctggaactatcgccgcatcctggagccaaggcggcggactcccctgtcgtgctctcgcactccaccctgtcgcgtagctggaatgggccgtagaactagtagcattaccctgatttgtggtagatag

SEQ ID NO: 303505 - DNA, 1017 bp, Artificial Sequence
  derived and/or modified sequence
atggctgatgctgctgccacagctggggccggcggcagcggcaccaggagcggcagcaagcagagcaccaacccagctgacaactaccacctggcccggcggaggaccctgcaggtggtggtgagcagcctgctgacagaggccggctttgagagcgctgagaaggcctctgtggagaccctgacagagatgctgcagagctacatcagcgagatcggccgcagcgccaagagctactgtgagcacacagcccggacccagcccaccctgagtgacatcgtggtgaccctggtggagatgggcttcaacgtggacaccctgcctgcctatgccaagaggagccagaggatggtgatcacagcccctcctgtgaccaaccagcctgtgacccccaaggccctgacagctggccagaaccggccccaccccccccacatccccagccacttccctgagttcccagacccccacacctacatcaagacccccacctaccgggagcctgtgtctgactaccaggtgctgcgggagaaggccgccagccagaggagagatgtggagcgggccctgacccgcttcatggccaagacaggagagacccagagcctcttcaaggatgatgtgtccaccttccccctgattgctgcccggcccttcaccatcccctacctgacagccctgctgcccagcgagctggagatgcagcagatggaggagacagacagcagcgagcaggatgagcagacagacacagagaacctggccctgcacatctccatgattgagagccgctctgtgacccaggccggcgtgcagtggcaggacctgggcagcctgcagcccccacctcctggcttcaagcgcttcagcagcctgagcctgctgagctcctggaactaccgccgcatcctggagcccaggaggaggacccccctgagctgcagcaggaccccaccctgccgggtggccggcatgggccgccgcaccagcagcatcaccctcatctgtggccgctag

SEQ ID NO: 303506 - DNA, 1017 bp, Artificial Sequence
  derived and/or modified sequence
atggccgacgccgccgccaccgccggcgccggcggcagcggcaccaggagcggctctaagcagtcgacaaaccctgccgacaattatcatttggcacgaagaagaacgcttcaagtggtggtgtcctctctgctcaccgaagccggtttcgaatcagccgagaaggcgagtgtggaaacgctgaccgaaatgctccagtcttacattagcgagattggtaggagtgcgaagtcttactgtgaacataccgctagaacacagcccaccctctccgacatcgtggtgactttggtagagatgggatttaacgtggatacgttgcctgcctatgcaaaaaggagtcaacggatggtgattaccgccccccccgtgacgaatcaaccggttacccccaaggcccttacagccggccagaatcggccacatcctccacatattccaagtcacttccctgagtttcccgatccccatacatacattaagacacctacatacagggagcccgtgtctgactaccaggtccttcgggaaaaggcggctagccagcgacgggatgtggagcgggccttgacccgcttcatggctaagaccggggagacacagtcgctgttcaaagacgatgttagtacctttcctctgatcgccgcccgccccttcaccattccctatttaaccgccctccttcctagtgaactggaaatgcagcagatggaagaaacagattcatctgagcaggatgagcagaccgatacagaaaatctcgcactgcatatttctatgatcgagtccagatcagttacccaggccggcgtccagtggcaggacttgggctcattgcagccccctcctcccggattcaagcgattttcttccttaagcctcctgtcttcatggaattaccggcggatactagaaccaagaagacggactccccttagttgtagccgtacaccaccatgtagggtggccggaatgggtagaaggacctcctctattactctcatttgcggccgatag

SEQ ID NO: 303507 - DNA, 1017 bp, Artificial Sequence
  derived and/or modified sequence
atggccgacgccgccgccaccgccggcgccggcggcagcggcaccaggtccgggtcaaaacagagcaccaaccccgcagacaactaccacctggctcggagacgcactctgcaggttgtggtgtcatcactgctcaccgaagctggattcgagagcgccgagaaggcctccgtggaaacattgactgaaatgttgcagagttatatctccgaaatcggcaggtctgccaaaagctattgcgagcatacagctagaacccagccaaccctatctgatatagttgtgacattggtggagatgggctttaatgtggatacactacctgcttatgcaaagcgttcacagaggatggttatcaccgcaccacctgttacaaaccaacccgtcactcctaaagctctcacagctggtcagaatcgcccgcatccccctcacatcccctctcactttcctgagttcccggacccccatacatatatcaaaactcccacttacagagagccagtctcggactaccaggtgttacgcgaaaaagccgcatctcagaggagggatgtggagagggccttgaccagattcatggcaaagacaggagagacccagtctttattcaaagacgatgtttctacctttccgcttatcgccgcacgcccattcacgatcccttatttgaccgccctcttgcccagcgagttagaaatgcaacagatggaagaaaccgacagcagtgaacaagacgagcagactgataccgaaaacctcgcactccatatttcaatgatcgaaagccgctccgtaacccaggccggagtccagtggcaggaccttggttccctacagccgccaccccctgggttcaagagatttagctctctttctctgttgtccagctggaactatagacggatcctcgaacccagaagaaggaccccactgtcctgctcccgcacccctccatgccgggttgccgggatgggacgaaggactagctcaataaccctgatttgcggccgctag

SEQ ID NO: 303508 - DNA, 1017 bp, Artificial Sequence
  derived and/or modified sequence
atggctgatgcggctgcaactgcgggtgccggaggttccgggactcggtcgggctcaaaacagtcaactaacccagcggacaattatcacctggccaggagaaggacactccaagtagtggtcagctcattgttaaccgaggctggattcgagagcgcagagaaagcaagtgtagaaaccctcaccgaaatgctgcagtcctacatcagtgagattggacgcagcgcaaagagctactgcgagcacacggctaggactcagccaaccctctccgatatcgtagtgacattagtggagatgggctttaacgtggacacactgcctgcctacgcaaaacgtagccagagaatggtgattacagctccaccagtaaccaatcagcccgttaccccgaaagctttgaccgctgggcagaatcgaccacatcctcctcatataccttcgcattttccggaattcccagatcctcacacatacataaagacaccaacttatagagagcctgtgtcggattaccaggtgcttcgggagaaggccgctagccaacgtcgggacgtagaaagagctctgaccagattcatggctaaaacaggggagacccagagtctcttcaaagacgacgtttccacattcccactgatcgctgccaggcctttcactattccatatttaactgccctgttgccctctgaattagaaatgcaacaaatggaagaaacagactcctcagagcaagacgaacaaaccgacaccgagaacctggccctccacatatctatgatcgaatcgcgcagcgtaacacaagctggtgtgcagtggcaagacctcggaagtttacaacccccacctcccggattcaagagattcagctccctgagtctgttatccagttggaactacaggcgcatcctcgagcccagaagaaggacgccgctatcttgcagcaggacccctccgtgccgggttgccggaatggggagaagaacaagctccatcaccttgatttgtggccgttag

SEQ ID NO: 303509 - DNA, 1017 bp, Artificial Sequence
  derived and/or modified sequence
atggccgatgcagccgcaactgcaggggcaggcggatctggcaccagatctggaagcaagcagtctaccaaccctgccgacaactatcacctggcgagacggagaactctgcaggtggtggtcagctctcttctgacagaggccggattcgaatctgccgaaaaagcaagtgtagagaccctcactgagatgctccagtcttatatttcagagatcggtagatccgccaaatcctactgcgagcacacagctaggacccaacctaccctttccgatattgtcgtgacgctggttgagatgggattcaacgtcgacacactgcccgcatacgctaagaggagtcagcggatggtgataactgcacccccagtcaccaatcaacctgtgaccccaaaggcattaacagccggtcagaatagaccacacccaccacacattccttcacactttcctgagtttcccgacccgcacacttatatcaagacccctacttatagggagccagttagcgactaccaggtgctgcgggaaaaggccgcaagccagcgaagggacgtggaaagagctctgactcggtttatggctaagaccggcgagacccagtcactgtttaaggacgatgtttccactttccctcttatcgccgctaggccattcaccatcccctacctgacggcccttctacccagtgagctggagatgcagcaaatggaagagacggacagctctgaacaggatgagcagacggatactgagaatctcgccctgcatatctctatgatcgagagtcggtccgtcacacaggctggcgtgcagtggcaagaccttggttcacttcagccacccccaccgggattcaagcggtttagcagtttgagcctgctgtcgagctggaattacaggcgtatcctggagccgcgacggaggactcctctgtcttgctctcgcactccgccttgccgagtcgctggtatgggaagaagaacgtcctctatcactctcatatgcggcaggtag

SEQ ID NO: 303510 - DNA, 1805 bp, Artificial Sequence
  derived and/or modified sequence
gcacactacgccagaacaagatggccgacgcggcggccacagctggggccggtggctccggaacgagatcgggaagtaaacagtccactaaccctgccgataactatcatctggcccggaggagaaccctgcaggtggttgtgagctccttgctgacagaggcagggtttgagagtgccgagaaagcatccgtggaaacgctgacagagatgctgcagagctacatttcagaaattgggagaagtgccaagtcttactgtgagcacacagccaggacccagcccacactgtccgatatcgtggtcacacttgttgagatgggtttcaatgtggacactctccctgcttatgcaaaacggtctcagaggatggtcatcactgctcctccggtgaccaatcagccagtgacccccaaggccctcactgcagggcagaaccgaccccacccgccgcacatccccagccattttcctgagttccctgatccccacacctacatcaaaactccgacgtaccgtgagcccgtgtcagactaccaggtcctgcgggagaaggctgcatcccagaggcgcgatgtggagcgggcacttacccgtttcatggccaagacaggcgagactcagagtcttttcaaagatgacgtcagcacatttccattgattgctgccagacctttcaccatcccctacctgacagctcttcttccgtctgaactggagatgcaacaaatggaagagacagattcctcggagcaggatgaacagacagacacagagaaccttgctcttcatatcagcatgatagagtctcgctccgtcacccaggctggagtgcagtggcaagatcttggctcactgcaacctccgcctcctgggttcaagcgattctccagcctcagcctcctgagtagctggaattacaggaggattctggagccgagaaggagaacacctctgtcctgcagcagaacccctccttgtcgggtagccggaatggggaggagaacatcatcgataacccttatctgcggccggtgaagaagcccaagatccgcaggaagaagccagatacattctagagaattgtgagactttgccctaagctgccaagtgctccccaaggagatcggtcaccaggagagcagccacaaaggtcaagaaagacacacacggaagcaaacccaggctctgtgctccttccagcccttgctggtgcagatgctaccccacaagcttgtcagatcgcccaggtgacgggccaggcgcagccatcgggaaggtcattcagccaacccagaggatgtagaccctgtcctcaagaagtgcagggcgagttctgccgtgccctctgaaatactctccctcctctcagagccctccctcgagagcctgagtgcaccatgtcttgtggcctcgcctgaagccttcctctggcttcacagaatgctctggaactctggggtctggtcagggagtgtgtcctcagcttgtctggaggaggcctgcatccctcctgagctcttggaggtgcccaggaaccctgcttctcctcacagggcctggccatatagccagctccaacccaaagccctgcacagtgcctcacccactcccttctcctggtctctcctcaaaagaattttacatgattttaaaataataatagctttcatttacatagtgcttacatttatatagcacttactatgtgcgatgtactaatttaagtactttatattaactcatataataaatggacacaacacaaaactcaaaaggtacaaaagaataaaacagttaaaaact

SEQ ID NO: 303511 - DNA, 2402 bp, Artificial Sequence
  derived and/or modified sequence
gcacactacgccagaacaagatggccgacgcggcggccacagctggggccggtggctccggaacgagatcgggaagtaaacagtccactaaccctgccgataactatcatctggcccggaggagaaccctgcaggtggttgtgagctccttgctgacagaggcagggtttgagagtgccgagaaagcatccgtggaaacgctgacagagatgctgcagagctacatttcagaaattgggagaagtgccaagtcttactgtgagcacacagccaggacccagcccacactgtccgatatcgtggtcacacttgttgagatgggtttcaatgtggacactctccctgcttatgcaaaacggtctcagaggatggtcatcactgctcctccggtgaccaatcagccagtgacccccaaggccctcactgcagggcagaaccgaccccacccgccgcacatccccagccattttcctgagttccctgatccccacacctacatcaaaactccgacgtaccgtgagcccgtgtcagactaccaggtcctgcgggagaaggctgcatcccagaggcgcgatgtggagcgggcacttacccgtttcatggccaagacaggcgagactcagagtcttttcaaagatgacgtcagcacatttccattgattgctgccagacctttcaccatcccctacctgacagctcttcttccgtctgaactggagatgcaacaaatggaagagacagattcctcggagcaggatgaacagacagacacagagaaccttgctcttcatatcagcatgatagagtctcgctccgtcacccaggctggagtgcagtggcaagatcttggctcactgcaacctccgcctcctgggttcaagcgattctccagcctcagcctcctgagtagctggaattacaggaggattctggagccgagaaggagaacacctctgtcctgcagcagaacccctccttgtcgggtagccggaatggggaggagaacatcatcgataacccttatctgcggccggtgaagaagcccaagatccgcaggaagaagtccctctcctgagctgagaaggaaacctggcttgtacaggggcgcagattccaccctcccggggagttaaagccactcaagggaagaagagggtgacctcctcatggccaagccgaggctgcagggtgtgatcggacatgattttcatggcaaaccgtcttattaagatgacctattttcactggatgtttgggttgaggaagatatgaacagaataatgagaatttttttttttattttgagatggagtcttactctatcacccaggctggaatgcagtggtgtgatctcagctcactgcagtctcagcaaccctgggtccaagtgattctcctgccttggcctcccgagtagctgggactagaggcaagcgccaccatgctggctaatttttgtattttgagtagagatagggtttcgccatgttggccaggctggtcttgaactcctgacctcaagtgatccacccgcattggcctcccaaagagttgcgattacaggtgtgagccaccacgcccagctaatttttgtatttttaatagagataaggtttcgccatgttggccaggctggtcttgaactcctgacctcaagtgataacccgcctcggcctcccaaagtgctgagattacaggcgtgagccaccgcaccccaccagagactttcttaatcaatcaggctatgtggtggggcatagcagcagccagtgacttcgttcattatcacaggatttgattcctttgaaactcaagagaccagggaaagtgacaggaaggaaagggctctttgctgctgtgcttattacaaggaagactgtttgtccagcgtgtatttcaggatatctggatcccttttattgactcacaatttgtggcaccactttctcatcccagaacttcattcttatttctctcctcatctggcctcccaagtgctccgttgagctgatgaaaagttctttgtactccctcaacgtgtcggaaacaggaggccacacagcacagctttgtttggggtgggcaggagtcaggagtcttgagcagatgcatcactgtgaagaagaacgacatgtcggggctgcacctgtcctcccgtcggcatttgacgaaagctccctgaagcggggcagcactctcctcctgagagatttaccatttattgcccctgtgaggaatgtgtgcttgggaactgccaagtcttaccccttctggaagaagaggttttctctgacaagagcctagagcgtcggctctattatgctgggacttgacagaggagccatggggtttaaacagtaggaaagaggggctacgcgcagtggctcacgcctgtaatccca

SEQ ID NO: 303512 - protein, 311 aa, Artificial Sequence
  derived and/or modified sequence
MADAAATAGAGGSGTRSGSKQSTNPADNYHLARRRTLQVVVSSLLTEAGFESAEKASVETLTEMLQSYISEIGRSAKSYCEHTARTQPTLSDIVVTLVEMGFNVDTLPAYAKRSQRMVITAPPVTNQPVTPKALTAGQNRPHPPHIPSHFPEFPDPHTYIKTPTYREPVSDYQVLREKAASQRRDVERALTRFMAKTGETQSLFKDDVSTFPLIAARPFTIPYLTALLPSELEMQQMEETDSSEQDEQTDTENLALHISMEDSGAEKENTSVLQQNPSLSGSRNGEENIIDNPYLRPVKKPKIRRKKPDTF

SEQ ID NO: 303513 - DNA, 936 bp, Artificial Sequence
  derived and/or modified sequence
atggccgacgccgccgccaccgccggcgccggcggcagcggcaccagaagcggcagcaagcagagcaccaaccccgccgacaactaccacctggccagaagaagaaccctgcaggtggtggtgagcagcctgctgaccgaggccggcttcgagagcgccgagaaggccagcgtggagaccctgaccgagatgctgcagagctacatcagcgagatcggcagaagcgccaagagctactgcgagcacaccgccagaacccagcccaccctgagcgacatcgtggtgaccctggtggagatgggcttcaacgtggacaccctgcccgcctacgccaagagaagccagagaatggtgatcaccgccccccccgtgaccaaccagcccgtgacccccaaggccctgaccgccggccagaacagaccccaccccccccacatccccagccacttccccgagttccccgacccccacacctacatcaagacccccacctacagagagcccgtgagcgactaccaggtgctgagagagaaggccgccagccagagaagagacgtggagagagccctgaccagattcatggccaagaccggcgagacccagagcctgttcaaggacgacgtgagcaccttccccctgatcgccgccagacccttcaccatcccctacctgaccgccctgctgcccagcgagctggagatgcagcagatggaggagaccgacagcagcgagcaggacgagcagaccgacaccgagaacctggccctgcacatcagcatggaggacagcggcgccgagaaggagaacaccagcgtgctgcagcagaaccccagcctgagcggcagcagaaacggcgaggagaacatcatcgacaacccctacctgagacccgtgaagaagcccaagatcagaagaaagaagcccgacaccttctag

SEQ ID NO: 303514 - DNA, 936 bp, Artificial Sequence
  derived and/or modified sequence
atggccgacgcagccgcaacagcaggagccggagggagcgggactagaagcgggtcgaagcagagtaccaacccagcggacaattaccacctagctagacgcagaacacttcaggtggtggtaagtagcctgctcacagaggcgggctttgagtcggcggagaaggcgagtgtagaaaccttgaccgagatgctgcagtcctacatcagcgagattggccggtccgcaaaaagttattgtgagcacactgcacgtactcaacccacactatcagatatagttgtaaccctcgtcgagatgggctttaatgttgacacccttcctgcgtatgccaaacgctcccagagaatggtaatcacagccccacccgttactaaccagccagtgacaccgaaagccctgacagcagggcagaacagaccacaccctccccatatcccgtctcacttccccgaattccccgatccccacacctacatcaagacacccacctaccgggaaccagttagtgactatcaggtcctgcgggagaaagccgcaagccaaaggagggacgttgaaagagcactgacgcgctttatggcaaaaaccggagaaacccagtcgttgttcaaagatgatgtgtctactttcccactgattgccgctcgccctttcactatcccctacttaacagcactcctaccgagcgagttggagatgcagcagatggaggagaccgacagttcagaacaagatgaacagacagacacagaaaatttggccctccacatttccatggaggattcgggagctgagaaggagaatacaagcgtgctacagcaaaatccctccctgagtgggagtaggaatggggaggagaacataatagacaatccctatctgcgccctgtgaagaaacctaagatacgtaggaagaagccagacacattctag

SEQ ID NO: 303515 - DNA, 936 bp, Artificial Sequence
  derived and/or modified sequence
atggctgatgctgctgccacagctggggccggcggcagcggcaccaggagcggcagcaagcagagcaccaacccagctgacaactaccacctggcccggcggaggaccctgcaggtggtggtgagcagcctgctgacagaggccggctttgagagcgctgagaaggcctctgtggagaccctgacagagatgctgcagagctacatcagcgagatcggccgcagcgccaagagctactgtgagcacacagcccggacccagcccaccctgagtgacatcgtggtgaccctggtggagatgggcttcaacgtggacaccctgcctgcctatgccaagaggagccagaggatggtgatcacagcccctcctgtgaccaaccagcctgtgacccccaaggccctgacagctggccagaaccggccccaccccccccacatccccagccacttccctgagttcccagacccccacacctacatcaagacccccacctaccgggagcctgtgtctgactaccaggtgctgcgggagaaggccgccagccagaggagagatgtggagcgggccctgacccgcttcatggccaagacaggagagacccagagcctcttcaaggatgatgtgtccaccttccccctgattgctgcccggcccttcaccatcccctacctgacagccctgctgcccagcgagctggagatgcagcagatggaggagacagacagcagcgagcaggatgagcagacagacacagagaacctggccctgcacatctccatggaggacagcggggctgagaaggagaacacctctgtgctgcagcagaaccccagcctgagcggcagcagaaatggagaggagaacatcatcgacaacccctacctgcggcctgtgaagaagcccaagatccggaggaagaagccagacaccttctag

SEQ ID NO: 303516 - DNA, 936 bp, Artificial Sequence
  derived and/or modified sequence
atggccgacgccgccgccaccgccggcgccggcggcagcggcaccaggtccgggtccaagcagagcaccaaccccgccgacaattatcaccttgcccgccggcgcacactccaagtggtagtgtcatcactactgacggaagctggtttcgagtccgcggaaaaggcatctgtggaaaccttaaccgagatgctgcagtcatacatttcagagattggcaggtcagccaagagttactgtgagcacaccgcccgaacacagccaaccttgtctgacatagtggtgactttagtcgagatgggttttaacgtggacaccctccccgcttacgcgaaaagatctcagcgcatggtgatcacagcacctcctgtgaccaaccagccagtgaccccaaaggctctgacagctgggcagaaccgcccacaccccccccacatcccttctcactttcccgagtttcctgaccctcacacatatatcaaaacacccacctatagagaaccagtctctgactaccaggtgctgcgggaaaaagcagcttcgcagaggcgggacgtggaacgtgcattgacccgctttatggcaaagactggcgaaacccagagcctgttcaaagacgacgtgtccaccttcccattgatcgctgcccgcccatttacaatcccatatttgaccgcccttttgcctagtgagctcgaaatgcagcagatggaggaaactgactcttcagaacaggacgagcaaactgatactgaaaacttggctctccacatcagtatggaagactccggtgccgaaaaagagaatacctcggttctgcagcaaaacccgtccctgtcaggctcccggaacggggaggagaacatcattgacaatccatacctcagaccagtgaaaaaacctaagattcgaaggaaaaagccagacacattttag

SEQ ID NO: 303517 - DNA, 936 bp, Artificial Sequence
  derived and/or modified sequence
atggccgatgcagcagcaaccgcaggtgcaggaggttcaggcactagatccgggtccaagcagtctaccaatcccgctgacaactatcaccttgcacgccgacgcactctccaggtggtcgtttccagccttttaaccgaagccggattcgagtcagctgagaaggctagcgtcgaaaccttaacggagatgctacagtcttatatcagcgaaattggacggagcgctaagtcctactgcgaacacactgccagaacccaacctaccctgtctgatattgttgtgacccttgtagaaatggggtttaacgtcgacacgctccctgcttacgccaagaggagccaacggatggtgattaccgcccctcccgtgaccaaccaaccagtgaccccaaaggctctaaccgccggacagaacagacctcaccccccacacattcctagccattttccagagttcccagatccacatacttacatcaaaacgcccacatacagagaacccgtgagtgactaccaggtgctccgcgaaaaggcagcgagccaacgcagagatgtggagagagccctgaccagatttatggccaaaactggtgaaactcagtcgctgtttaaggatgacgtgtctacctttccattaatagctgctcggccttttacaatcccatatctgacagctcttctccccagtgagctggagatgcagcagatggaagaaacggactcatcagaacaagacgaacaaaccgacacggagaaccttgccctgcacatatctatggaggatagtggagcagagaaggagaatacaagcgtgctgcagcaaaatccaagcctttccggaagcaggaatggggaagagaatatcattgataatccttatctccggccagtaaaaaaacctaagatccgcaggaagaagcctgacaccttctag

SEQ ID NO: 303518 - DNA, 1293 bp, Artificial Sequence
  derived and/or modified sequence
gcacactacgccagaacaagatggccgacgcggcggccacagctggggccggtggctccggaacgagatcgggaagtaaacagtccactaaccctgccgataactatcatctggcccggaggagaaccctgcaggtggttgtgagctccttgctgacagaggcagggtttgagagtgccgagaaagcatccgtggaaacgctgacagagatgctgcagagctacatttcagaaattgggagaagtgccaagtcttactgtgagcacacagccaggacccagcccacactgtccgatatcgtggtcacacttgttgagatgggtttcaatgtggacactctccctgcttatgcaaaacggtctcagaggatggtcatcactgctcctccggtgaccaatcagccagtgacccccaaggccctcactgcagggcagaaccgaccccacccgccgcacatccccagccattttcctgagttccctgatccccacacctacatcaaaactccgacgtaccgtgagcccgtgtcagactaccaggtcctgcgggagaaggctgcatcccagaggcgcgatgtggagcgggcacttacccgtttcatggccaagacaggcgagactcagagtcttttcaaagatgacgtcagcacatttccattgattgctgccagacctttcaccatcccctacctgacagctcttcttccgtctgaactggagatgcaacaaatggaagagacagattcctcggagcaggatgaacagacagacacagagaaccttgctcttcatatcagcatggaggattctggagccgagaaggagaacacctctgtcctgcagcagaacccctccttgtcgggtagccggaatggggaggagaacatcatcgataacccttatctgcggccggtgaagaagcccaagatccgcaggaagaagccagatacattctagagaattgtgagactttgccctaagctgccaagtgctccccaaggagatcggtcaccaggagagcagccacaaaggtcaagaaagacacacacggaagcaaacccaggctctgtgctccttccagcccttgctggtgcagatgctaccccacaagcttgtcagatcgcccaggtgacgggccaggcgcagccatcgggaaggtcattcagccaacccagaggatgtagaccctgtcctcaagaagtgcagggcgagttctgccgtgccctctgaaatactctccctcctctcagagccctccctcgagagcctgagtgcaccatgtcttgtggcctcg

SEQ ID NO: 303519 - protein, 1710 aa, Artificial Sequence
  derived and/or modified sequence
MERCSRCHRLLLLLPLVLGLSAAPGWAGAPPVDVLRALRFPSLPDGVRRAKGICPADVAYRVARPAQLSAPTRQLFPGGFPKDFSLLTVVRTRPGLQAPLLTLYSAQGVRQLGLELGRPVRFLYEDQTGRPQPPSQPVFRGLSLADGKWHRVAVAVKGQSVTLIVDCKKRVTRPLPRSARPVLDTHGVIIFGARILDEEVFEGDVQELAIVPGVQAAYESCEQKELECEGGQRERPQNQQPHRAQRSPQQQPSRLHRPQNQEPQSQDPTPGEEEEILESSLLPPLEEEQTDLQVPPTADRFQAEEYGEGGTDPPEGPYDYTYGYGDDYREETELGPALSAETAHSGAAAHGPRGLKGEKGEPAVLEPGMLVEGPPGPEGPAGLIGPPGIQGNPGPVGDPGERGPPGRAGLPGSDGAPGPPGTSLMLPFRFGSGGGDKGPVVAAQEAQAQAILQQARLALRGPPGPMGYTGRPGPLGQPGSPGLKGESGDLGPQGPRGPQGLTGPPGKAGRRGRAGADGARGMPGDPGVKGDRGFDGLPGLPGEKGHRGDTGAQGLPGPPGEDGERGDDGEIGPRGLPGESGPRGLLGPKGPPGIPGPPGVRGMDGPQGPKGSLGPQGEPGPPGQQGTPGTQGLPGPQGAIGPHGEKGPQGKPGLPGMPGSDGPPGHPGKEGPPGTKGNQGPSGPQGPLGYPGPRGVKGVDGIRGLKGHKGEKGEDGFPGFKGDIGVKGDRGEVGVPGSRGEDGPEGPKGRTGPTGDPGPPGLMGEKGKLGVPGLPGYPGRQGPKGSLGFPGFPGASGEKGARGLSGKSGPRGERGPTGPRGQRGPRGATGKSGAKGTSGGDGPHGPPGERGLPGPQGPNGFPGPKGPPGPPGKDGLPGHPGQRGEVGFQGKTGPPGPPGVVGPQGAAGETGPMGERGHPGPPGPPGEQGLPGTAGKEGTKGDPGPPGAPGKDGPAGLRGFPGERGLPGTAGGPGLKGNEGPSGPPGPAGSPGERGAAGSGGPIGPPGRPGPQGPPGAAGEKGVPGEKGPIGPTGRDGVQGPVGLPGPAGPPGVAGEDGDKGEVGDPGQKGTKGNKGEHGPPGPPGPIGPVGQPGAAGADGEPGARGPQGHFGAKGDEGTRGFNGPPGPIGLQGLPGPSGEKGETGDVGPMGPPGPPGPRGPAGPNGADGPQGPPGGVGNLGPPGEKGEPGESGSPGIQGEPGVKGPRGERGEKGESGQPGEPGPPGPKGPTGDDGPKGNPGPVGFPGDPGPPGEGGPRGQDGAKGDRGEDGEPGQPGSPGPTGENGPPGPLGKRGPAGSPGSEGRQGGKGAKGDPGAIGAPGKTGPVGPAGPAGKPGPDGLRGLPGSVGQQGRPGATGQAGPPGPVGPPGLPGLRGDAGAKGEKGHPGLIGLIGPPGEQGEKGDRGLPGPQGSPGQKGEMGIPGASGPIGPGGPPGLPGPAGPKGAKGATGPGGPKGEKGVQGPPGHPGPPGEVIQPLPIQMPKKTRRSVDGSRLMQEDEAIPTGGAPGSPGGLEEIFGSLDSLREEIEQMRRPTGTQDSPARTCQDLKLCHPELPDGEYWVDPNQGCARDAFRVFCNFTAGGETCVTPRDDVTQFSYVDSEGSPVGVVQLTFLRLLSVSAHQDVSYPCSGAARDGPLRLRGANEDELSPETSPYVKEFRDGCQTQQGRTVLEVRTPVLEQLPVLDASFSDLGAPPRRGGVLLGPVCFMG

SEQ ID NO: 303520 - protein, 1710 aa, Artificial Sequence
  derived and/or modified sequence
MERCSRCHRLLLLLPLVLGLSAAPGWAGAPPVDVLRALRFPSLPDGVRRAKGICPADVAYRVARPAQLSAPTRQLFPGGFPKDFSLLTVVRTRPGLQAPLLTLYSAQGVRQLGLELGPPVRFLYEDQTGRPQPPSQPVFRGLSLADGKWHRVAVAVKGQSVTLIVDCKKRVTRPLPRSARPVLDTHGVIIFGARILDEEVFEGDVQELAIVPGVQAAYESCEQKELECEGGQRERPQNQQPHRAQRSPQQQPSRLHRPQNQEPQSQDPTPGEEEEILESSLLPPLEEEQTDLQVPPTADRFQAEEYGEGGTDPPEGPYDYTYGYGDDYREETELGPALSAETAHSGAAAHGPRGLKGEKGEPAVLEPGMLVEGPPGPEGPAGLIGPPGIQGNPGPVGDPGERGPPGRAGLPGSDGAPGPPGTSLMLPFRFGSGGGDKGPVVAAQEAQAQAILQQARLALRGPPGPMGYTGRPGPLGQPGSPGLKGESGDLGPQGPRGPQGLTGPPGKAGRRGRAGADGARGMPGDPGVKGDRGFDGLPGLPGEKGHRGDTGAQGLPGPPGEDGERGDDGEIGPRGLPGESGPRGLLGPKGPPGIPGPPGVRGMDGPQGPKGSLGPQGEPGPPGQQGTPGTQGLPGPQGAIGPHGEKGPQGKPGLPGMPGSDGPPGHPGKEGPPGTKGNQGPSGPQGPLGYPGPRGVKGVDGIRGLKGHKGEKGEDGFPGFKGDIGVKGDRGEVGVPGSRGEDGPEGPKGRTGPTGDPGPPGLMGEKGKLGVPGLPGYPGRQGPKGSLGFPGFPGASGEKGARGLSGKSGPRGERGPTGPRGQRGPRGATGKSGAKGTSGGDGPHGPPGERGLPGPQGPNGFPGPKGPPGPPGKDGLPGHPGQRGEVGFQGKTGPPGPPGVVGPQGAAGETGPMGERGHPGPPGPPGEQGLPGTAGKEGTKGDPGPPGAPGKDGPAGLRGFPGERGLPGTAGGPGLKGNEGPSGPPGPAGSPGERGAAGSGGPIGPPGRPGPQGPPGAAGEKGVPGEKGPIGPTGRDGVQGPVGLPGPAGPPGVAGEDGDKGEVGDPGQKGTKGNKGEHGPPGPPGPIGPVGQPGAAGADGEPGARGPQGHFGAKGDEGTRGFNGPPGPIGLQGLPGPSGEKGETGDVGPMGPPGPPGPRGPAGPNGADGPQGPPGGVGNLGPPGEKGEPGESGSPGIQGEPGVKGPRGERGEKGESGQPGEPGPPGPKGPTGDDGPKGNPGPVGFPGDPGPPGEGGPRGQDGAKGDRGEDGEPGQPGSPGPTGENGPPGPLGKRGPAGSPGSEGRQGGKGAKGDPGAIGAPGKTGPVGPAGPAGKPGPDGLRGLPGSVGQQGRPGATGQAGPPGPVGPPGLPGLRGDAGAKGEKGHPGLIGLIGPPGEQGEKGDRGLPGPQGSPGQKGEMGIPGASGPIGPGGPPGLPGPAGPKGAKGATGPGGPKGEKGVQGPPGHPGPPGEVIQPLPIQMPKKTRRSVDGSRLMQEDEAIPTGGAPGSPGGLEEIFGSLDSLREEIEQMRRPTGTQDSPARTCQDLKLCHPELPDGEYWVDPNQGCARDAFRVFCNFTAGGETCVTPRDDVTQFSYVDSEGSPVGVVQLTFLRLLSVSAHQDVSYPCSGAARDGPLRLRGANEDELSPETSPYVKEFRDGCQTQQGRTVLEVRTPVLEQLPVLDASFSDLGAPPRRGGVLLGPVCFMG

SEQ ID NO: 303521 - protein, 1683 aa, Artificial Sequence
  derived and/or modified sequence
GAPPVDVLRALRFPSLPDGVRRAKGICPADVAYRVARPAQLSAPTRQLFPGGFPKDFSLLTVVRTRPGLQAPLLTLYSAQGVRQLGLELGRPVRFLYEDQTGRPQPPSQPVFRGLSLADGKWHRVAVAVKGQSVTLIVDCKKRVTRPLPRSARPVLDTHGVIIFGARILDEEVFEGDVQELAIVPGVQAAYESCEQKELECEGGQRERPQNQQPHRAQRSPQQQPSRLHRPQNQEPQSQDPTPGEEEEILESSLLPPLEEEQTDLQVPPTADRFQAEEYGEGGTDPPEGPYDYTYGYGDDYREETELGPALSAETAHSGAAAHGPRGLKGEKGEPAVLEPGMLVEGPPGPEGPAGLIGPPGIQGNPGPVGDPGERGPPGRAGLPGSDGAPGPPGTSLMLPFRFGSGGGDKGPVVAAQEAQAQAILQQARLALRGPPGPMGYTGRPGPLGQPGSPGLKGESGDLGPQGPRGPQGLTGPPGKAGRRGRAGADGARGMPGDPGVKGDRGFDGLPGLPGEKGHRGDTGAQGLPGPPGEDGERGDDGEIGPRGLPGESGPRGLLGPKGPPGIPGPPGVRGMDGPQGPKGSLGPQGEPGPPGQQGTPGTQGLPGPQGAIGPHGEKGPQGKPGLPGMPGSDGPPGHPGKEGPPGTKGNQGPSGPQGPLGYPGPRGVKGVDGIRGLKGHKGEKGEDGFPGFKGDIGVKGDRGEVGVPGSRGEDGPEGPKGRTGPTGDPGPPGLMGEKGKLGVPGLPGYPGRQGPKGSLGFPGFPGASGEKGARGLSGKSGPRGERGPTGPRGQRGPRGATGKSGAKGTSGGDGPHGPPGERGLPGPQGPNGFPGPKGPPGPPGKDGLPGHPGQRGEVGFQGKTGPPGPPGVVGPQGAAGETGPMGERGHPGPPGPPGEQGLPGTAGKEGTKGDPGPPGAPGKDGPAGLRGFPGERGLPGTAGGPGLKGNEGPSGPPGPAGSPGERGAAGSGGPIGPPGRPGPQGPPGAAGEKGVPGEKGPIGPTGRDGVQGPVGLPGPAGPPGVAGEDGDKGEVGDPGQKGTKGNKGEHGPPGPPGPIGPVGQPGAAGADGEPGARGPQGHFGAKGDEGTRGFNGPPGPIGLQGLPGPSGEKGETGDVGPMGPPGPPGPRGPAGPNGADGPQGPPGGVGNLGPPGEKGEPGESGSPGIQGEPGVKGPRGERGEKGESGQPGEPGPPGPKGPTGDDGPKGNPGPVGFPGDPGPPGEGGPRGQDGAKGDRGEDGEPGQPGSPGPTGENGPPGPLGKRGPAGSPGSEGRQGGKGAKGDPGAIGAPGKTGPVGPAGPAGKPGPDGLRGLPGSVGQQGRPGATGQAGPPGPVGPPGLPGLRGDAGAKGEKGHPGLIGLIGPPGEQGEKGDRGLPGPQGSPGQKGEMGIPGASGPIGPGGPPGLPGPAGPKGAKGATGPGGPKGEKGVQGPPGHPGPPGEVIQPLPIQMPKKTRRSVDGSRLMQEDEAIPTGGAPGSPGGLEEIFGSLDSLREEIEQMRRPTGTQDSPARTCQDLKLCHPELPDGEYWVDPNQGCARDAFRVFCNFTAGGETCVTPRDDVTQFSYVDSEGSPVGVVQLTFLRLLSVSAHQDVSYPCSGAARDGPLRLRGANEDELSPETSPYVKEFRDGCQTQQGRTVLEVRTPVLEQLPVLDASFSDLGAPPRRGGVLLGPVCFMG

SEQ ID NO: 303522 - protein, 1710 aa, Artificial Sequence
  derived and/or modified sequence
MERCSRCHRLLLLLPLVLGLSAAPGWAGAPPVDVLRALRFPSLPDGVRRAKGICPADVAYRVARPAQLSAPTRQLFPGGFPKDFSLLTVVRTRPGLQAPLLTLYSAQGVRQLGLELGRPVRFLYEDQTGRPQPPSQPVFRGLSLADGKWHRVAVAVKGQSVTLIVDCKKRVTRPLPRSARPVLDTHGVIIFGARILDEEVFEGDVQELAIVPGVQAAYESCEQKELECEGGQRERPQNQQPHRAQRSPQQQPSRLHRPQNQEPQSQDPTPGEEEEILESSLLPPLEEEQTDLQVPPTADRFQAEEYGEGGTDPPEGPYDYTYGYGDDYREETELGPALSAETAHSGAAAHGPRGLKGEKGEPAVLEPGMLVEGPPGPEGPAGLIGPPGIQGNPGPVGDPGERGPPGRAGLPGSDGAPGPPGTSLMLPFRFGSGGGDKGPVVAAQEAQAQAILQQARLALRGPPGPMGYTGRPGPLGQPGSPGLKGESGDLGPQGPRGPQGLTGPPGKAGRRGRAGADGARGMPGDPGVKGDRGFDGLPGLPGEKGHRGDTGAQGLPGPPGEDGERGDDGEIGPRGLPGESGPRGLLGPKGPPGIPGPPGVRGMDGPQGPKGSLGPQGEPGPPGQQGTPGTQGLPGPQGAIGPHGEKGPQGKPGLPGMPGSDGPPGHPGKEGPPGTKGNQGPSGPQGPLGYPGPRGVKGVDGIRGLKGHKGEKGEDGFPGFKGDIGVKGDRGEVGVPGSRGEDGPEGPKGRTGPTGDPGPPGLMGEKGKLGVPGLPGYPGRQGPKGSLGFPGFPGASGEKGARGLSGKSGPRGERGPTGPRGQRGPRGATGKSGAKGTSGGDGPHGPPGERGLPGPQGPNGFPGPKGPLGPPGKDGLPGHPGQRGEVGFQGKTGPPGPPGVVGPQGAAGETGPMGERGHPGPPGPPGEQGLPGTAGKEGTKGDPGPPGAPGKDGPAGLRGFPGERGLPGTAGGPGLKGNEGPSGPPGPAGSPGERGAAGSGGPIGPPGRPGPQGPPGAAGEKGVPGEKGPIGPTGRDGVQGPVGLPGPAGPPGVAGEDGDKGEVGDPGQKGTKGNKGEHGPPGPPGPIGPVGQPGAAGADGEPGARGPQGHFGAKGDEGTRGFNGPPGPIGLQGLPGPSGEKGETGDVGPMGPPGPPGPRGPAGPNGADGPQGPPGGVGNLGPPGEKGEPGESGSPGIQGEPGVKGPRGERGEKGESGQPGEPGPPGPKGPTGDDGPKGNPGPVGFPGDPGPPGEGGPRGQDGAKGDRGEDGEPGQPGSPGPTGENGPPGPLGKRGPAGSPGSEGRQGGKGAKGDPGAIGAPGKTGPVGPAGPAGKPGPDGLRGLPGSVGQQGRPGATGQAGPPGPVGPPGLPGLRGDAGAKGEKGHPGLIGLIGPPGEQGEKGDRGLPGPQGSPGQKGEMGIPGASGPIGPGGPPGLPGPAGPKGAKGATGPGGPKGEKGVQGPPGHPGPPGEVIQPLPIQMPKKTRRSVDGSRLMQEDEAIPTGGAPGSPGGLEEIFGSLDSLREEIEQMRRPTGTQDSPARTCQDLKLCHPELPDGEYWVDPNQGCARDAFRVFCNFTAGGETCVTPRDDVTQFSYVDSEGSPVGVVQLTFLRLLSVSAHQDVSYPCSGAARDGPLRLRGANEDELSPETSPYVKEFRDGCQTQQGRTVLEVRTPVLEQLPVLDASFSDLGAPPRRGGVLLGPVCFMG

SEQ ID NO: 303523 - protein, 1689 aa, Artificial Sequence
  derived and/or modified sequence
MERCSRCHRLLLLLPLVLGLSAAPGWAGAPPVDVLRALRFPSLPDGVRRAKGICPADVAYRVARPAQLSAPTRQLFPGGFPKDFSLLTVVRTRPGLQAPLLTLYSAQGVRQLGLELGRPVRFLYEDQTGRPQPPSQPVFRGLSLADGKWHRVAVAVKGQSVTLIVDCKKRVTRPLPRSARPVLDTHGVIIFGARILDEEVFEGDVQELAIVPGVQAAYESCEQKELECEGGQRERPQNQQPHRAQRSPQQQPSRLHRPQNQEPQSQEQTDLQVPPTADRFQAEEYGEGGTDPPEGPYDYTYGYGDDYREETELGPALSAETAHSGAAAHGPRGLKGEKGEPAVLEPGMLVEGPPGPEGPAGLIGPPGIQGNPGPVGDPGERGPPGRAGLPGSDGAPGPPGTSLMLPFRFGSGGGDKGPVVAAQEAQAQAILQQARLALRGPPGPMGYTGRPGPLGQPGSPGLKGESGDLGPQGPRGPQGLTGPPGKAGRRGRAGADGARGMPGDPGVKGDRGFDGLPGLPGEKGHRGDTGAQGLPGPPGEDGERGDDGEIGPRGLPGESGPRGLLGPKGPPGIPGPPGVRGMDGPQGPKGSLGPQGEPGPPGQQGTPGTQGLPGPQGAIGPHGEKGPQGKPGLPGMPGSDGPPGHPGKEGPPGTKGNQGPSGPQGPLGYPGPRGVKGVDGIRGLKGHKGEKGEDGFPGFKGDIGVKGDRGEVGVPGSRGEDGPEGPKGRTGPTGDPGPPGLMGEKGKLGVPGLPGYPGRQGPKGSLGFPGFPGASGEKGARGLSGKSGPRGERGPTGPRGQRGPRGATGKSGAKGTSGGDGPHGPPGERGLPGPQGPNGFPGPKGPPGPPGKDGLPGHPGQRGEVGFQGKTGPPGPPGVVGPQGAAGETGPMGERGHPGPPGPPGEQGLPGTAGKEGTKGDPGPPGAPGKDGPAGLRGFPGERGLPGTAGGPGLKGNEGPSGPPGPAGSPGERGAAGSGGPIGPPGRPGPQGPPGAAGEKGVPGEKGPIGPTGRDGVQGPVGLPGPAGPPGVAGEDGDKGEVGDPGQKGTKGNKGEHGPPGPPGPIGPVGQPGAAGADGEPGARGPQGHFGAKGDEGTRGFNGPPGPIGLQGLPGPSGEKGETGDVGPMGPPGPPGPRGPAGPNGADGPQGPPGGVGNLGPPGEKGEPGESGSPGIQGEPGVKGPRGERGEKGESGQPGEPGPPGPKGPTGDDGPKGNPGPVGFPGDPGPPGEGGPRGQDGAKGDRGEDGEPGQPGSPGPTGENGPPGPLGKRGPAGSPGSEGRQGGKGAKGDPGAIGAPGKTGPVGPAGPAGKPGPDGLRGLPGSVGQQGRPGATGQAGPPGPVGPPGLPGLRGDAGAKGEKGHPGLIGLIGPPGEQGEKGDRGLPGPQGSPGQKGEMGIPGASGPIGPGGPPGLPGPAGPKGAKGATGPGGPKGEKGVQGPPGHPGPPGEVIQPLPIQMPKKTRRSVDGSRLMQEDEAIPTGGAPGSPGGLEEIFGSLDSLREEIEQMRRPTGTQDSPARTCQDLKLCHPELPDGEYWVDPNQGCARDAFRVFCNFTAGGETCVTPRDDVTQFSYVDSEGSPVGVVQLTFLRLLSVSAHQDVSYPCSGAARDGPLRLRGANEDELSPETSPYVKEFRDGCQTQQGRTVLEVRTPVLEQLPVLDASFSDLGAPPRRGGVLLGPVCFMG

SEQ ID NO: 303524 - protein, 1689 aa, Artificial Sequence
  derived and/or modified sequence
MERCSRCHRLLLLLPLVLGLSAAPGWAGAPPVDVLRALRFPSLPDGVRRAKGICPADVAYRVARPAQLSAPTRQLFPGGFPKDFSLLTVVRTRPGLQAPLLTLYSAQGVRQLGLELGPPVRFLYEDQTGRPQPPSQPVFRGLSLADGKWHRVAVAVKGQSVTLIVDCKKRVTRPLPRSARPVLDTHGVIIFGARILDEEVFEGDVQELAIVPGVQAAYESCEQKELECEGGQRERPQNQQPHRAQRSPQQQPSRLHRPQNQEPQSQEQTDLQVPPTADRFQAEEYGEGGTDPPEGPYDYTYGYGDDYREETELGPALSAETAHSGAAAHGPRGLKGEKGEPAVLEPGMLVEGPPGPEGPAGLIGPPGIQGNPGPVGDPGERGPPGRAGLPGSDGAPGPPGTSLMLPFRFGSGGGDKGPVVAAQEAQAQAILQQARLALRGPPGPMGYTGRPGPLGQPGSPGLKGESGDLGPQGPRGPQGLTGPPGKAGRRGRAGADGARGMPGDPGVKGDRGFDGLPGLPGEKGHRGDTGAQGLPGPPGEDGERGDDGEIGPRGLPGESGPRGLLGPKGPPGIPGPPGVRGMDGPQGPKGSLGPQGEPGPPGQQGTPGTQGLPGPQGAIGPHGEKGPQGKPGLPGMPGSDGPPGHPGKEGPPGTKGNQGPSGPQGPLGYPGPRGVKGVDGIRGLKGHKGEKGEDGFPGFKGDIGVKGDRGEVGVPGSRGEDGPEGPKGRTGPTGDPGPPGLMGEKGKLGVPGLPGYPGRQGPKGSLGFPGFPGASGEKGARGLSGKSGPRGERGPTGPRGQRGPRGATGKSGAKGTSGGDGPHGPPGERGLPGPQGPNGFPGPKGPPGPPGKDGLPGHPGQRGEVGFQGKTGPPGPPGVVGPQGAAGETGPMGERGHPGPPGPPGEQGLPGTAGKEGTKGDPGPPGAPGKDGPAGLRGFPGERGLPGTAGGPGLKGNEGPSGPPGPAGSPGERGAAGSGGPIGPPGRPGPQGPPGAAGEKGVPGEKGPIGPTGRDGVQGPVGLPGPAGPPGVAGEDGDKGEVGDPGQKGTKGNKGEHGPPGPPGPIGPVGQPGAAGADGEPGARGPQGHFGAKGDEGTRGFNGPPGPIGLQGLPGPSGEKGETGDVGPMGPPGPPGPRGPAGPNGADGPQGPPGGVGNLGPPGEKGEPGESGSPGIQGEPGVKGPRGERGEKGESGQPGEPGPPGPKGPTGDDGPKGNPGPVGFPGDPGPPGEGGPRGQDGAKGDRGEDGEPGQPGSPGPTGENGPPGPLGKRGPAGSPGSEGRQGGKGAKGDPGAIGAPGKTGPVGPAGPAGKPGPDGLRGLPGSVGQQGRPGATGQAGPPGPVGPPGLPGLRGDAGAKGEKGHPGLIGLIGPPGEQGEKGDRGLPGPQGSPGQKGEMGIPGASGPIGPGGPPGLPGPAGPKGAKGATGPGGPKGEKGVQGPPGHPGPPGEVIQPLPIQMPKKTRRSVDGSRLMQEDEAIPTGGAPGSPGGLEEIFGSLDSLREEIEQMRRPTGTQDSPARTCQDLKLCHPELPDGEYWVDPNQGCARDAFRVFCNFTAGGETCVTPRDDVTQFSYVDSEGSPVGVVQLTFLRLLSVSAHQDVSYPCSGAARDGPLRLRGANEDELSPETSPYVKEFRDGCQTQQGRTVLEVRTPVLEQLPVLDASFSDLGAPPRRGGVLLGPVCFMG

SEQ ID NO: 303525 - protein, 1689 aa, Artificial Sequence
  derived and/or modified sequence
MERCSRCHRLLLLLPLVLGLSAAPGWAGAPPVDVLRALRFPSLPDGVRRAKGICPADVAYRVARPAQLSAPTRQLFPGGFPKDFSLLTVVRTRPGLQAPLLTLYSAQGVRQLGLELGRPVRFLYEDQTGRPQPPSQPVFRGLSLADGKWHRVAVAVKGQSVTLIVDCKKRVTRPLPRSARPVLDTHGVIIFGARILDEEVFEGDVQELAIVPGVQAAYESCEQKELECEGGQRERPQNQQPHRAQRSPQQQPSRLHRPQNQEPQSQEQTDLQVPPTADRFQAEEYGEGGTDPPEGPYDYTYGYGDDYREETELGPALSAETAHSGAAAHGPRGLKGEKGEPAVLEPGMLVEGPPGPEGPAGLIGPPGIQGNPGPVGDPGERGPPGRAGLPGSDGAPGPPGTSLMLPFRFGSGGGDKGPVVAAQEAQAQAILQQARLALRGPPGPMGYTGRPGPLGQPGSPGLKGESGDLGPQGPRGPQGLTGPPGKAGRRGRAGADGARGMPGDPGVKGDRGFDGLPGLPGEKGHRGDTGAQGLPGPPGEDGERGDDGEIGPRGLPGESGPRGLLGPKGPPGIPGPPGVRGMDGPQGPKGSLGPQGEPGPPGQQGTPGTQGLPGPQGAIGPHGEKGPQGKPGLPGMPGSDGPPGHPGKEGPPGTKGNQGPSGPQGPLGYPGPRGVKGVDGIRGLKGHKGEKGEDGFPGFKGDIGVKGDRGEVGVPGSRGEDGPEGPKGRTGPTGDPGPPGLMGEKGKLGVPGLPGYPGRQGPKGSLGFPGFPGASGEKGARGLSGKSGPRGERGPTGPRGQRGPRGATGKSGAKGTSGGDGPHGPPGERGLPGPQGPNGFPGPKGPLGPPGKDGLPGHPGQRGEVGFQGKTGPPGPPGVVGPQGAAGETGPMGERGHPGPPGPPGEQGLPGTAGKEGTKGDPGPPGAPGKDGPAGLRGFPGERGLPGTAGGPGLKGNEGPSGPPGPAGSPGERGAAGSGGPIGPPGRPGPQGPPGAAGEKGVPGEKGPIGPTGRDGVQGPVGLPGPAGPPGVAGEDGDKGEVGDPGQKGTKGNKGEHGPPGPPGPIGPVGQPGAAGADGEPGARGPQGHFGAKGDEGTRGFNGPPGPIGLQGLPGPSGEKGETGDVGPMGPPGPPGPRGPAGPNGADGPQGPPGGVGNLGPPGEKGEPGESGSPGIQGEPGVKGPRGERGEKGESGQPGEPGPPGPKGPTGDDGPKGNPGPVGFPGDPGPPGEGGPRGQDGAKGDRGEDGEPGQPGSPGPTGENGPPGPLGKRGPAGSPGSEGRQGGKGAKGDPGAIGAPGKTGPVGPAGPAGKPGPDGLRGLPGSVGQQGRPGATGQAGPPGPVGPPGLPGLRGDAGAKGEKGHPGLIGLIGPPGEQGEKGDRGLPGPQGSPGQKGEMGIPGASGPIGPGGPPGLPGPAGPKGAKGATGPGGPKGEKGVQGPPGHPGPPGEVIQPLPIQMPKKTRRSVDGSRLMQEDEAIPTGGAPGSPGGLEEIFGSLDSLREEIEQMRRPTGTQDSPARTCQDLKLCHPELPDGEYWVDPNQGCARDAFRVFCNFTAGGETCVTPRDDVTQFSYVDSEGSPVGVVQLTFLRLLSVSAHQDVSYPCSGAARDGPLRLRGANEDELSPETSPYVKEFRDGCQTQQGRTVLEVRTPVLEQLPVLDASFSDLGAPPRRGGVLLGPVCFMG

SEQ ID NO: 303526 - protein, 1676 aa, Artificial Sequence
  derived and/or modified sequence
MERCSRCHRLLLLLPLVLGLSAAPGWAGAPPVDVLRALRFPSLPDGVRRAKGICPADVAYRVARPAQLSAPTRQLFPGGFPKDFSLLTVVRTRPGLQAPLLTLYSAQGVRQLGLELGRPVRFLYEDQTGRPQPPSQPVFRGLSLADGKWHRVAVAVKGQSVTLIVDCKKRVTRPLPRSARPVLDTHGVIIFGARILDEEVFEGDVQELAIVPGVQAAYESCEQKELECEGGQRERPQNQQPHRAQRSPQQQPSRLHRPQNQEPQSQPTESLYYDYEPPYYDVMTTGTTPDYQDPTPGEEEEILESSLLPPLEEAAHGPRGLKGEKGEPAVLEPGMLVEGPPGPEGPAGLIGPPGIQGNPGPVGDPGERGPPGRAGLPGSDGAPGPPGTSLMLPFRFGSGGGDKGPVVAAQEAQAQAILQQARLALRGPPGPMGYTGRPGPLGQPGSPGLKGESGDLGPQGPRGPQGLTGPPGKAGRRGRAGADGARGMPGDPGVKGDRGFDGLPGLPGEKGHRGDTGAQGLPGPPGEDGERGDDGEIGPRGLPGESGPRGLLGPKGPPGIPGPPGVRGMDGPQGPKGSLGPQGEPGPPGQQGTPGTQGLPGPQGAIGPHGEKGPQGKPGLPGMPGSDGPPGHPGKEGPPGTKGNQGPSGPQGPLGYPGPRGVKGVDGIRGLKGHKGEKGEDGFPGFKGDIGVKGDRGEVGVPGSRGEDGPEGPKGRTGPTGDPGPPGLMGEKGKLGVPGLPGYPGRQGPKGSLGFPGFPGASGEKGARGLSGKSGPRGERGPTGPRGQRGPRGATGKSGAKGTSGGDGPHGPPGERGLPGPQGPNGFPGPKGPPGPPGKDGLPGHPGQRGEVGFQGKTGPPGPPGVVGPQGAAGETGPMGERGHPGPPGPPGEQGLPGTAGKEGTKGDPGPPGAPGKDGPAGLRGFPGERGLPGTAGGPGLKGNEGPSGPPGPAGSPGERGAAGSGGPIGPPGRPGPQGPPGAAGEKGVPGEKGPIGPTGRDGVQGPVGLPGPAGPPGVAGEDGDKGEVGDPGQKGTKGNKGEHGPPGPPGPIGPVGQPGAAGADGEPGARGPQGHFGAKGDEGTRGFNGPPGPIGLQGLPGPSGEKGETGDVGPMGPPGPPGPRGPAGPNGADGPQGPPGGVGNLGPPGEKGEPGESGSPGIQGEPGVKGPRGERGEKGESGQPGEPGPPGPKGPTGDDGPKGNPGPVGFPGDPGPPGEGGPRGQDGAKGDRGEDGEPGQPGSPGPTGENGPPGPLGKRGPAGSPGSEGRQGGKGAKGDPGAIGAPGKTGPVGPAGPAGKPGPDGLRGLPGSVGQQGRPGATGQAGPPGPVGPPGLPGLRGDAGAKGEKGHPGLIGLIGPPGEQGEKGDRGLPGPQGSPGQKGEMGIPGASGPIGPGGPPGLPGPAGPKGAKGATGPGGPKGEKGVQGPPGHPGPPGEVIQPLPIQMPKKTRRSVDGSRLMQEDEAIPTGGAPGSPGGLEEIFGSLDSLREEIEQMRRPTGTQDSPARTCQDLKLCHPELPDGEYWVDPNQGCARDAFRVFCNFTAGGETCVTPRDDVTQFSYVDSEGSPVGVVQLTFLRLLSVSAHQDVSYPCSGAARDGPLRLRGANEDELSPETSPYVKEFRDGCQTQQGRTVLEVRTPVLEQLPVLDASFSDLGAPPRRGGVLLGPVCFMG

SEQ ID NO: 303527 - protein, 1676 aa, Artificial Sequence
  derived and/or modified sequence
MERCSRCHRLLLLLPLVLGLSAAPGWAGAPPVDVLRALRFPSLPDGVRRAKGICPADVAYRVARPAQLSAPTRQLFPGGFPKDFSLLTVVRTRPGLQAPLLTLYSAQGVRQLGLELGPPVRFLYEDQTGRPQPPSQPVFRGLSLADGKWHRVAVAVKGQSVTLIVDCKKRVTRPLPRSARPVLDTHGVIIFGARILDEEVFEGDVQELAIVPGVQAAYESCEQKELECEGGQRERPQNQQPHRAQRSPQQQPSRLHRPQNQEPQSQPTESLYYDYKPPYYDVMTTGTTPDYQDPTPGEEEEILESSLLPPLEEAAHGPRGLKGEKGEPAVLEPGMLVEGPPGPEGPAGLIGPPGIQGNPGPVGDPGERGPPGRAGLPGSDGAPGPPGTSLMLPFRFGSGGGDKGPVVAAQEAQAQAILQQARLALRGPPGPMGYTGRPGPLGQPGSPGLKGESGDLGPQGPRGPQGLTGPPGKAGRRGRAGADGARGMPGDPGVKGDRGFDGLPGLPGEKGHRGDTGAQGLPGPPGEDGERGDDGEIGPRGLPGESGPRGLLGPKGPPGIPGPPGVRGMDGPQGPKGSLGPQGEPGPPGQQGTPGTQGLPGPQGAIGPHGEKGPQGKPGLPGMPGSDGPPGHPGKEGPPGTKGNQGPSGPQGPLGYPGPRGVKGVDGIRGLKGHKGEKGEDGFPGFKGDIGVKGDRGEVGVPGSRGEDGPEGPKGRTGPTGDPGPPGLMGEKGKLGVPGLPGYPGRQGPKGSLGFPGFPGASGEKGARGLSGKSGPRGERGPTGPRGQRGPRGATGKSGAKGTSGGDGPHGPPGERGLPGPQGPNGFPGPKGPPGPPGKDGLPGHPGQRGEVGFQGKTGPPGPPGVVGPQGAAGETGPMGERGHPGPPGPPGEQGLPGTAGKEGTKGDPGPPGAPGKDGPAGLRGFPGERGLPGTAGGPGLKGNEGPSGPPGPAGSPGERGAAGSGGPIGPPGRPGPQGPPGAAGEKGVPGEKGPIGPTGRDGVQGPVGLPGPAGPPGVAGEDGDKGEVGDPGQKGTKGNKGEHGPPGPPGPIGPVGQPGAAGADGEPGARGPQGHFGAKGDEGTRGFNGPPGPIGLQGLPGPSGEKGETGDVGPMGPPGPPGPRGPAGPNGADGPQGPPGGVGNLGPPGEKGEPGESGSPGIQGEPGVKGPRGERGEKGESGQPGEPGPPGPKGPTGDDGPKGNPGPVGFPGDPGPPGEGGPRGQDGAKGDRGEDGEPGQPGSPGPTGENGPPGPLGKRGPAGSPGSEGRQGGKGAKGDPGAIGAPGKTGPVGPAGPAGKPGPDGLRGLPGSVGQQGRPGATGQAGPPGPVGPPGLPGLRGDAGAKGEKGHPGLIGLIGPPGEQGEKGDRGLPGPQGSPGQKGEMGIPGASGPIGPGGPPGLPGPAGPKGAKGATGPGGPKGEKGVQGPPGHPGPPGEVIQPLPIQMPKKTRRSVDGSRLMQEDEAIPTGGAPGSPGGLEEIFGSLDSLREEIEQMRRPTGTQDSPARTCQDLKLCHPELPDGEYWVDPNQGCARDAFRVFCNFTAGGETCVTPRDDVTQFSYVDSEGSPVGVVQLTFLRLLSVSAHQDVSYPCSGAARDGPLRLRGANEDELSPETSPYVKEFRDGCQTQQGRTVLEVRTPVLEQLPVLDASFSDLGAPPRRGGVLLGPVCFMG

SEQ ID NO: 303528 - protein, 1676 aa, Artificial Sequence
  derived and/or modified sequence
MERCSRCHRLLLLLPLVLGLSAAPGWAGAPPVDVLRALRFPSLPDGVRRAKGICPADVAYRVARPAQLSAPTRQLFPGGFPKDFSLLTVVRTRPGLQAPLLTLYSAQGVRQLGLELGRPVRFLYEDQTGRPQPPSQPVFRGLSLADGKWHRVAVAVKGQSVTLIVDCKKRVTRPLPRSARPVLDTHGVIIFGARILDEEVFEGDVQELAIVPGVQAAYESCEQKELECEGGQRERPQNQQPHRAQRSPQQQPSRLHRPQNQEPQSQPTESLYYDYKPPYYDVMTTGTTPDYQDPTPGEEEEILESSLLPPLEEAAHGPRGLKGEKGEPAVLEPGMLVEGPPGPEGPAGLIGPPGIQGNPGPVGDPGERGPPGRAGLPGSDGAPGPPGTSLMLPFRFGSGGGDKGPVVAAQEAQAQAILQQARLALRGPPGPMGYTGRPGPLGQPGSPGLKGESGDLGPQGPRGPQGLTGPPGKAGRRGRAGADGARGMPGDPGVKGDRGFDGLPGLPGEKGHRGDTGAQGLPGPPGEDGERGDDGEIGPRGLPGESGPRGLLGPKGPPGIPGPPGVRGMDGPQGPKGSLGPQGEPGPPGQQGTPGTQGLPGPQGAIGPHGEKGPQGKPGLPGMPGSDGPPGHPGKEGPPGTKGNQGPSGPQGPLGYPGPRGVKGVDGIRGLKGHKGEKGEDGFPGFKGDIGVKGDRGEVGVPGSRGEDGPEGPKGRTGPTGDPGPPGLMGEKGKLGVPGLPGYPGRQGPKGSLGFPGFPGASGEKGARGLSGKSGPRGERGPTGPRGQRGPRGATGKSGAKGTSGGDGPHGPPGERGLPGPQGPNGFPGPKGPPGPPGKDGLPGHPGQRGEVGFQGKTGPPGPPGVVGPQGAAGETGPMGERGHPGPPGPPGEQGLPGTAGKEGTKGDPGPPGAPGKDGPAGLRGFPGERGLPGTAGGPGLKGNEGPSGPPGPAGSPGERGAAGSGGPIGPPGRPGPQGPPGAAGEKGVPGEKGPIGPTGRDGVQGPVGLPGPAGPPGVAGEDGDKGEVGDPGQKGTKGNKGEHGPPGPPGPIGPVGQPGAAGADGEPGARGPQGHFGAKGDEGTRGFNGPPGPIGLQGLPGPSGEKGETGDVGPMGPPGPPGPRGPAGPNGADGPQGPPGGVGNLGPPGEKGEPGESGSPGIQGEPGVKGPRGERGEKGESGQPGEPGPPGPKGPTGDDGPKGNPGPVGFPGDPGPPGEGGPRGQDGAKGDRGEDGEPGQPGSPGPTGENGPPGPLGKRGPAGSPGSEGRQGGKGAKGDPGAIGAPGKTGPVGPAGPAGKPGPDGLRGLPGSVGQQGRPGATGQAGPPGPVGPPGLPGLRGDAGAKGEKGHPGLIGLIGPPGEQGEKGDRGLPGPQGSPGQKGEMGIPGASGPIGPGGPPGLPGPAGPKGAKGATGPGGPKGEKGVQGPPGHPGPPGEVIQPLPIQMPKKTRRSVDGSRLMQEDEAIPTGGAPGSPGGLEEIFGSLDSLREEIEQMRRPTGTQDSPARTCQDLKLCHPELPDGEYWVDPNQGCARDAFRVFCNFTAGGETCVTPRDDVTQFSYVDSEGSPVGVVQLTFLRLLSVSAHQDVSYPCSGAARDGPLRLRGANEDELSPETSPYVKEFRDGCQTQQGRTVLEVRTPVLEQLPVLDASFSDLGAPPRRGGVLLGPVCFMG

SEQ ID NO: 303529 - protein, 1676 aa, Artificial Sequence
  derived and/or modified sequence
MERCSRCHRLLLLLPLVLGLSAAPGWAGAPPVDVLRALRFPSLPDGVRRAKGICPADVAYRVARPAQLSAPTRQLFPGGFPKDFSLLTVVRTRPGLQAPLLTLYSAQGVRQLGLELGRPVRFLYEDQTGRPQPPSQPVFRGLSLADGKWHRVAVAVKGQSVTLIVDCKKRVTRPLPRSARPVLDTHGVIIFGARILDEEVFEGDVQELAIVPGVQAAYESCEQKELECEGGQRERPQNQQPHRAQRSPQQQPSRLHRPQNQEPQSQPTESLYYDYEPPYYDVMTTGTTPDYQDPTPGEEEEILESSLLPPLEEAAHGPRGLKGEKGEPAVLEPGMLVEGPPGPEGPAGLIGPPGIQGNPGPVGDPGERGPPGRAGLPGSDGAPGPPGTSLMLPFRFGSGGGDKGPVVAAQEAQAQAILQQARLALRGPPGPMGYTGRPGPLGQPGSPGLKGESGDLGPQGPRGPQGLTGPPGKAGRRGRAGADGARGMPGDPGVKGDRGFDGLPGLPGEKGHRGDTGAQGLPGPPGEDGERGDDGEIGPRGLPGESGPRGLLGPKGPPGIPGPPGVRGMDGPQGPKGSLGPQGEPGPPGQQGTPGTQGLPGPQGAIGPHGEKGPQGKPGLPGMPGSDGPPGHPGKEGPPGTKGNQGPSGPQGPLGYPGPRGVKGVDGIRGLKGHKGEKGEDGFPGFKGDIGVKGDRGEVGVPGSRGEDGPEGPKGRTGPTGDPGPPGLMGEKGKLGVPGLPGYPGRQGPKGSLGFPGFPGASGEKGARGLSGKSGPRGERGPTGPRGQRGPRGATGKSGAKGTSGGDGPHGPPGERGLPGPQGPNGFPGPKGPLGPPGKDGLPGHPGQRGEVGFQGKTGPPGPPGVVGPQGAAGETGPMGERGHPGPPGPPGEQGLPGTAGKEGTKGDPGPPGAPGKDGPAGLRGFPGERGLPGTAGGPGLKGNEGPSGPPGPAGSPGERGAAGSGGPIGPPGRPGPQGPPGAAGEKGVPGEKGPIGPTGRDGVQGPVGLPGPAGPPGVAGEDGDKGEVGDPGQKGTKGNKGEHGPPGPPGPIGPVGQPGAAGADGEPGARGPQGHFGAKGDEGTRGFNGPPGPIGLQGLPGPSGEKGETGDVGPMGPPGPPGPRGPAGPNGADGPQGPPGGVGNLGPPGEKGEPGESGSPGIQGEPGVKGPRGERGEKGESGQPGEPGPPGPKGPTGDDGPKGNPGPVGFPGDPGPPGEGGPRGQDGAKGDRGEDGEPGQPGSPGPTGENGPPGPLGKRGPAGSPGSEGRQGGKGAKGDPGAIGAPGKTGPVGPAGPAGKPGPDGLRGLPGSVGQQGRPGATGQAGPPGPVGPPGLPGLRGDAGAKGEKGHPGLIGLIGPPGEQGEKGDRGLPGPQGSPGQKGEMGIPGASGPIGPGGPPGLPGPAGPKGAKGATGPGGPKGEKGVQGPPGHPGPPGEVIQPLPIQMPKKTRRSVDGSRLMQEDEAIPTGGAPGSPGGLEEIFGSLDSLREEIEQMRRPTGTQDSPARTCQDLKLCHPELPDGEYWVDPNQGCARDAFRVFCNFTAGGETCVTPRDDVTQFSYVDSEGSPVGVVQLTFLRLLSVSAHQDVSYPCSGAARDGPLRLRGANEDELSPETSPYVKEFRDGCQTQQGRTVLEVRTPVLEQLPVLDASFSDLGAPPRRGGVLLGPVCFMG

SEQ ID NO: 303530 - protein, 306 aa, Artificial Sequence [sequence omitted]

SEQ ID NO: 303531 - protein, 333 aa, Artificial Sequence
  derived and/or modified sequence
  misc_feature (1)..(1): Xaa can be any naturally occurring amino acid
XNQSPQAHRSTVPHTAGLGQLCLLGFGMDWRASEAWMVPRAPKGAWDPRESQDLLDNRAPLGPRVFPGPRVPSALMERRVLKGSQGSPACLGPPGEVIQPLPIQMPKKTRRSVDGSRLMQEDEAIPTGGAPGSPGGLEEIFGSLDSLREEIEQMRRPTGTQDSPARTCQDLKLCHPELPDGEYWVDPNQGCARDAFRVFCNFTAGGETCVTPRDDVTQFSYVDSEGSPVGVVQLTFLRLLSVSAHQDVSYPCSGAARDGPLRLRGANEDELSPETSPYVKEFRDGCQTQQGRTVLEVRTPVLEQLPVLDASFSDLGAPPRRGGVLLGPVCFMG

SEQ ID NO: 303532 - DNA, 921 bp, Artificial Sequence
  derived and/or modified sequence
atggactggagagccagcgaggcctggatggtgcccagagcccccaagggcgcctgggaccccagagagagccaggacctgctggacaacagagcccccctgggccccagagtgttccccggccccagagtgcccagcgccctgatggagagaagagtgctgaagggcagccagggcagccccgcctgccccggcccccccggcgaggtgatccagcccctgcccatccagatgcccaagaagaccagaagaagcgtggacggcagcagactgatgcaggaggacgaggccatccccaccggcggcgcccccggcagccccggcggcctggaggagatcttcggcagcctggacagcctgagagaggagatcgagcagatgagaagacccaccggcacccaggacagccccgccagaacctgccaggacctgaagctgtgccaccccgagctgcccgacggcgagtactgggtggaccccaaccagggctgcgccagagacgccttcagagtgttctgcaacttcaccgccggcggcgagacctgcgtgacccccagagacgacgtgacccagttcagctacgtggacagcgagggcagccccgtgggcgtggtgcagctgaccttcctgagactgctgagcgtgagcgcccaccaggacgtgagctacccctgcagcggcgccgccagagacggccccctgagactgagaggcgccaacgaggacgagctgagccccgagaccagcccctacgtgaaggagttcagagacggctgccagacccagcagggcagaaccgtgctggaggtgagaacccccgtgctggagcagctgcccgtgctggacgccagcttcagcgacctgggcgccccccccagaagaggcggcgtgctgctgggccccgtgtgcttcatgggctag

SEQ ID NO: 303533 - DNA, 1002 bp, Artificial Sequence
  derived and/or modified sequence
tgaaaccagagcccccaggcccacagaagcaccgtgccccacaccgccggcctgggccagctgtgcctgctgggcttcggcatggactggagagccagcgaggcctggatggtgcccagagcccccaagggcgcctgggaccccagagagagccaggacctgctggacaacagagcccccctgggccccagagtgttccccggccccagagtgcccagcgccctgatggagagaagagtgctgaagggcagccagggcagccccgcctgcctgggcccccccggcgaggtgatccagcccctgcccatccagatgcccaagaagaccagaagaagcgtggacggcagcagactgatgcaggaggacgaggccatccccaccggcggcgcccccggcagccccggcggcctggaggagatcttcggcagcctggacagcctgagagaggagatcgagcagatgagaagacccaccggcacccaggacagccccgccagaacctgccaggacctgaagctgtgccaccccgagctgcccgacggcgagtactgggtggaccccaaccagggctgcgccagagacgccttcagagtgttctgcaacttcaccgccggcggcgagacctgcgtgacccccagagacgacgtgacccagttcagctacgtggacagcgagggcagccccgtgggcgtggtgcagctgaccttcctgagactgctgagcgtgagcgcccaccaggacgtgagctacccctgcagcggcgccgccagagacggccccctgagactgagaggcgccaacgaggacgagctgagccccgagaccagcccctacgtgaaggagttcagagacggctgccagacccagcagggcagaaccgtgctggaggtgagaacccccgtgctggagcagctgcccgtgctggacgccagcttcagcgacctgggcgccccccccagaagaggcggcgtgctgctgggccccgtgtgcttcatgggctag

SEQ ID NO: 303534 - DNA, 921 bp, Artificial Sequence
  derived and/or modified sequence
atggattggcgagcgtctgaggcatggatggtgccacgggcccctaagggcgcttgggatccaagagaatctcaggatcttctggacaacagagcaccacttggaccacgagtctttcccgggccacgcgtcccgtccgctcttatggagcgtcgagtcctgaaagggtctcagggatctccggcctgtccaggtccacctggggaagtgatccagcctctgccaattcagatgccaaaaaaaacaagacgatcggtagacggttccaggctcatgcaggaggacgaagcgatccctaccggaggtgcgcccggctctcctggcggactcgaagagatattcggaagcctagatagtctgagagaggagatcgaacagatgagaagacctactggtactcaggactctcctgcgaggacctgccaggatttaaaattatgtcatcctgagctgccagatggggaatactgggtggatcctaaccagggatgcgcgcgcgatgcattccgggttttttgtaacttcaccgctggtggggagacctgcgtcactccgcgggatgatgtgactcaattctcatacgtggactccgagggaagccctgtgggggtggtgcagcttactttccttcggctgctgtccgtgtcagctcaccaggacgtgagctacccgtgctcaggcgctgcacgagatgggcctctacgactgaggggtgccaacgaggacgagttgtctcctgaaacttccccctatgtgaaggagttccgcgatgggtgccagacccagcaaggaagaacagtgcttgaagtccggacccctgttcttgaacagcttcctgtgctcgatgccagcttctcagatctgggggccccaccacgacgcggcggggtgctgttggggcccgtctgctttatgggttag

SEQ ID NO: 303535 - DNA, 1002 bp, Artificial Sequence
  derived and/or modified sequence
tagaatcagtctccgcaggctcatcgttccacagttccgcatactgcggggctgggccagctgtgcttgcttggcttcgggatggattggagggcatctgaagcttggatggttcccagggcacccaaaggggcctgggaccctagggaatcgcaggacttactcgataatcgggctccccttggccctagggtttttccaggacctcgagtaccctccgcattgatggaaagacgggtgctgaaggggtcccaggggagtcctgcttgtttaggccctccgggcgaggtgatccagcctctgcctattcaaatgcctaaaaagacccgtaggtctgtggacggtagtcgtctcatgcaggaggacgaagccattccaactgggggggcaccaggatccccagggggactcgaagagatcttcggctctctggactccctgagggaggagatcgagcagatgcggagacctactggcactcaggattctcctgcgcggacctgtcaggatctgaaactgtgccacccggaacttccagacggggagtattgggtagacccaaaccagggctgcgcgagggacgccttcagagtcttttgtaactttactgccggaggcgagacatgcgtcacacctagggatgacgtcacacagttcagctatgtcgattcagagggaagtcccgtgggcgttgtacagttgacctttctgaggttactctcagtgtcagctcaccaagatgttagctatccctgtagcggcgccgcccgtgacggacccctcagactgcggggggccaatgaagacgaactcagcccggaaacttctccttacgtgaaagaattcagagatggttgtcagacgcagcaaggccggacagttctggaagtccgcacacccgtcttggagcagctgccagtgctcgatgccagtttcagcgatttaggtgctccgccacgacggggcggagttctgctcggcccggtctgttttatgggctag

SEQ ID NO: 303536 - DNA, 1002 bp, Artificial Sequence
  derived and/or modified sequence
taaaaccagtctccgcaggcacaccgcagtacagtcccccacactgctggcctggggcagctatgcttgctggggttcgggatggactggagagccagcgaagcctggatggtgccgagggcccccaaaggcgcttgggaccctagggagtcccaggacctgctggataaccgggcccctttgggcccccgggtgttccctggtccaagggtcccatctgcactcatggaaagaagagtcctaaagggaagtcagggcagccccgcctgtctcggacctccgggcgaggtgattcagcccctcccaattcagatgccaaagaaaactcgccgatcggttgacggcagccgcctgatgcaggaggacgaggcgatcccaaccgggggggctccaggatctcctggcgggctggaggagatcttcggttcactggacagcctgcgggaagagatcgaacaaatgcgccgccctaccggcactcaggactcccccgcgagaacgtgccaggacttgaagctttgccatccagaattgcccgacggggaatattgggtggatccaaaccaggggtgcgcccgcgacgcgttcagggtcttttgtaactttaccgcaggcggtgagacctgtgtgaccccaagggatgacgtgacccagtttagctacgtagattccgagggcagccctgtcggcgtcgttcagctaacattcttaagactgttatccgttagcgctcatcaagatgtcagttatccttgttcaggggcagcccgcgacggtcccctgagattgcgcggtgcaaacgaagacgagctgtctcccgaaaccagtccatacgtgaaggaatttagagatgggtgtcaaacacaacagggaaggactgtactggaagtgcgaacacccgtcctagagcagctgcctgtgctcgacgcaagcttttccgatctgggcgccccaccacggcggggcggggtcctgctgggcccagtgtgcttcatggggtag

SEQ ID NO: 303537 - DNA, 921 bp, Artificial Sequence
  derived and/or modified sequence
atggactggcgggcgagtgaggcttggatggtcccgcgggctcctaagggagcctgggatcctcgcgagagccaggacctgctcgacaatcgggcacccttaggacctcgggtttttcccgggcctcgggttcccagcgccttgatggagaggagagtgctgaaaggtagccagggctcacctgcctgtcctggcccacccggagaggttatccagcccctgccaatccaaatgcccaagaagaccaggcggtccgttgacgggagccggctgatgcaagaggacgaggccattcctaccggcggggctcccgggtcccccgggggactggaggaaattttcggaagcctcgattcactgcgcgaggagattgagcagatgagaaggcccacagggacacaagactcccccgctcgcacctgtcaggacctgaaactgtgccaccccgaactgccagacggggagtactgggtcgaccctaatcaaggatgtgctagggacgcgtttcgtgtcttctgtaactttaccgcgggcggggagacatgtgttacccccagggacgatgtgactcagttctcctacgtggactctgaggggtccccagtgggcgttgtccaactgacctttctgaggctgttaagtgtgtctgctcatcaggacgtgtcttacccttgtagtggtgcagcacgggatggacccctgcgactgagaggcgcaaacgaagacgagctgagccccgagacttcaccgtatgttaaggaatttcgggatggctgccaaacgcaacaaggtcgtaccgtcctggaagttcgaactcctgtgctggagcagctacctgttttggacgcgtcattctccgatctgggcgcccccccacgtcgtgggggcgtcttgctggggccggtgtgctttatgggctag

SEQ ID NO: 303538 - DNA, 921 bp, Artificial Sequence
  derived and/or modified sequence
atggattggagagcctctgaggcctggatggtgcctcgcgccccgaaaggagcctgggatccgagagagtctcaggacctccttgacaatcgtgcacctctgggacctcgagtgtttccagggcctcgcgtcccatccgcgctaatggaaagacgagtactgaaggggagccaggggagtcccgcttgcccaggcccgccgggtgaggtgatccagccgctgcctatccagatgcccaaaaaaactcgacgcagcgtagatggcagccgcctaatgcaggaggacgaagccattccaactgggggcgctcccgggagccccggaggtcttgaggaaattttcggatctcttgactcccttcgagaggagattgaacagatgcgcaggcccacggggacccaggacagccctgcaagaacctgtcaagatttgaagctctgtcaccccgaactgcccgatggggagtattgggtggaccctaatcagggctgcgctcgtgatgcttttcgcgttttttgcaatttcacggccgggggcgagacttgtgtgacccctcgtgatgatgtgactcagtttagttatgtggatagtgaggggagccccgtgggggtggtccagctgacctttctgcgcctcctaagcgtctctgcacatcaggacgtctcttatccatgttcaggtgccgcccgcgatgggccactgcgccttaggggggcaaatgaagacgaattgagccccgaaactagcccctacgtgaaggaatttcgggacggttgccaaacccaacaaggacgaaccgtgctggaagttagaactccagtcctggaacagctgccagtgttggacgcctcgttttcggatcttggggccccaccccgcaggggaggggtgctgctcggccctgtgtgttttatgggctag

SEQ ID NO: 303539 - DNA, 921 bp, Artificial Sequence
  derived and/or modified sequence
atggactggcgggcctcagaggcttggatggtgccccgggctccaaagggtgcgtgggaccccagagagagccaagaccttttggacaaccgcgcccctcttggtccccgcgtattcccaggtccaagagtgcctagcgctctgatggaaaggcgtgttctaaaagggtcccaagggtcaccggcatgtccaggaccccctggcgaggtgatccagcctctgcctatacagatgcccaagaagacaaggcgctcagtggacggctcacggctgatgcaggaggatgaagcaatccctactgggggagctccagggagccctggcggtctcgaagagatctttggcagcctggattcgctgagagaggagatcgagcagatgcgacgacccacaggcactcaggactctccagctagaacatgccaggacctaaagctgtgccatccagaactccctgatggagagtactgggtggaccctaaccagggctgcgcaagggatgcctttcgtgtcttttgcaatttcacagccggcggggaaacttgcgtgactcccagagatgatgtaactcagtttagctacgtggacagtgaagggtcccccgtgggtgtggtacagctgaccttcctgcggttactgtcagtctctgctcaccaggacgtttcctatccctgctcaggcgctgcccgggatggccctttgcggctacggggcgcaaacgaggatgaactgagtcctgaaacaagtccatatgttaaagagttccgtgacggatgtcagactcagcaggggcgcactgtgctggaggttcgcactccggtcctggaacagctccccgtgctagacgccagctttagcgacctcggcgcaccaccaaggaggggcggagtgctgctggggccagtttgtttcatgggctag

SEQ ID NO: 303540 - DNA, 921 bp, Artificial Sequence
  derived and/or modified sequence
atggactggagagcctccgaggcatggatggtgcccagagccccaaaaggggcttgggatccccgcgaatctcaggacctgttagataatagggcccctctcggcccacgtgtatttcccggccccagagtgccgagtgctctcatggaacggcgtgtactgaagggctctcaaggatcacccgcttgccccggacctcctggagaggtgatccagcctctgcccatccaaatgccaaagaagacccgacggtcagtggatgggtcacggctcatgcaagaagacgaggccatccctacaggcggggcacctggttccccaggcggtctggaggagatctttgggtcactagactccttgcgggaggagattgaacaaatgcgaaggccaaccggcacccaagattcacctgcgcggacatgtcaggatctgaaactatgtcacccggaactgcccgacggggagtactgggtcgatccaaaccagggatgtgcccgggatgccttcagggtgttttgcaactttactgccggcggagagacatgcgtgactccgagagatgatgtaacccaatttagttatgttgattcagagggaagccccgttggggtggttcaattaacattcctgagattgctctcagtgtcagcccaccaggatgttagttatccgtgcagcggggccgctagggatggccccctgagactgcggggggccaatgaagacgaattatctcccgagacatctccttatgtgaaagagtttcgagatgggtgccagacacagcaggggcgcaccgtgctggaagttcgaacacccgtccttgagcagctgcccgtgttagacgcctcattttctgacctgggggcacctcctaggaggggcggcgtcctcctaggacccgtttgtttcatgggctag

SEQ ID NO: 303541 - DNA, 921 bp, Artificial Sequence
  derived and/or modified sequence
atggattggagggctagcgaggcctggatggtgccacgcgctccaaagggcgcctgggatcctcgtgaatcccaggacctcctcgataaccgcgccccactgggcccccgcgtgtttcccgggccccgggtcccttccgcgctgatggaacgccgcgtcttgaaaggctcgcagggctcaccagcctgtcctggacccccaggtgaggttatccagcctcttcccatccagatgccgaagaaaacacgtagaagtgtggatgggagtaggttgatgcaagaggacgaggccattcccaccggaggcgctcctggctcccctggcggactggaggaaatctttggctcattggatagcctgagagaggagatcgagcagatgagacggccaacaggcacacaggacagtcccgcgcgtacttgtcaggacctaaagctatgccatccggagctacccgatggcgagtactgggtagatccaaaccaggggtgtgcccgcgacgcgttccgcgtcttctgtaacttcacggccggaggtgagacctgcgtgacaccccgagacgacgtcacgcagttcagctatgtggactcggaaggctcccccgtaggagttgtgcagcttactttcttgaggcttcttagcgtcagcgcacaccaggatgtgtcatatccttgctctggagctgctcgtgacggacctctgcggctaagaggtgccaatgaggatgaattgtcaccagagaccagcccctacgtcaaggagttccgggatggctgccagactcagcagggtaggactgttctggaagttaggaccccagtgctggagcaattaccagtgctagacgctagcttctcggatctcggagcccctcctcgaaggggaggtgttttacttggacccgtgtgttttatggggtag

SEQ ID NO: 303542 - DNA, 921 bp, Artificial Sequence
  derived and/or modified sequence
atggattggagagcatcagaggcttggatggtgcccagagctccgaagggggcctgggacccacgggagagccaggaccttcttgacaacagggctcccctgggccctagagttttccccgggccgagggttcccagcgccctgatggagcggagggtcctaaaggggagtcaaggcagcccggcgtgcccggggcccccaggcgaggtgattcagccactaccaattcagatgccaaaaaagacacggcggtctgtggatgggagcagactcatgcaggaggatgaggcaattcctacagggggagctccggggtctcccgggggtctggaggaaatctttggtagtctcgactctctgcgagaagaaatcgagcagatgagacggccaaccggtacacaggatagcccagcacggacgtgccaggatctgaaactatgccaccctgaactgcctgacggggagtactgggtggaccccaatcaggggtgcgcgcgcgacgcttttagggtgttttgcaatttcacggcggggggagaaacatgcgtgaccccaagagatgacgtgactcagtttagctatgtggatagtgagggctcaccagtgggcgtggtccagctcaccttcctgcgcctcctgtcagtgtcggcccaccaggatgtatcttacccctgcagtggcgccgcaagagatggaccccttaggctcagaggtgcaaacgaggacgagctaagccctgagacatctccatacgtgaaggagttccgggacggatgccagacccaacaggggcggaccgttctcgaagtgcgcacacctgtgctggagcagctgcccgtgttggatgcaagtttcagcgatctgggagcacctccacggcgcggtggcgtattactgggccccgtgtgcttcatggggtag

SEQ ID NO: 303543 - DNA, 921 bp, Artificial Sequence
  derived and/or modified sequence
atggactggagggccagcgaggcctggatggtgccccgggcccccaagggggcctgggacccccgggagagccaggacctgctggacaacagagcccccctgggccccagggtcttccctggcccccgggtgcccagcgccctgatggagaggagagtgctgaagggcagccagggcagccctgcctgccccggccccccaggagaggtgatccagcccctgcccatccagatgcccaagaagaccaggagatctgtggatggcagccggctgatgcaggaggatgaggccatccccaccggcggggcccctggcagccctgggggcctggaggagatcttcggcagcctggacagcctgcgggaggagattgagcagatgaggcggcccaccggcacccaggacagccctgcccggacctgccaggacctgaagctgtgccaccctgagctgcctgatggagagtactgggtggaccccaaccagggctgtgccagagatgccttccgggtcttctgcaacttcaccgctggaggagagacctgtgtgaccccaagagatgatgtgacccagttctcctatgtggacagcgagggcagccctgtgggcgtggtgcagctgaccttcctgcggctgctgtctgtgtctgcccaccaggatgtgtcctacccctgcagcggggccgccagagatggccccctgcggctgcggggggccaatgaagatgagctgagccctgagaccagcccctacgtgaaggagttcagagatggctgccagacccagcagggccgcacagtgctggaggtgaggacccctgtgctggagcagctgcctgtgctggatgccagcttcagtgacctgggcgcccccccaagaagaggaggagtgctgctgggccctgtgtgcttcatgggctag

SEQ ID NO: 303544 - DNA, 1002 bp, Artificial Sequence
  derived and/or modified sequence
tgaaaccagagcccccaggcccacaggagcacagtgccccacacagctggcctgggccagctgtgcctgctgggcttcggcatggactggagggccagcgaggcctggatggtgccccgggcccccaagggggcctgggacccccgggagagccaggacctgctggacaacagagcccccctgggccccagggtcttccctggcccccgggtgcccagcgccctgatggagcggcgggtgctgaagggcagccagggcagccctgcctgcctgggccccccaggagaggtgatccagcccctgcccatccagatgcccaagaagacccggcgctctgtggatggcagccggctgatgcaggaggatgaggccatccccactggaggagcccctggcagccctgggggcctggaggagatcttcggcagcctggacagcctgcgggaggagattgagcagatgagaagacccaccggcacccaggacagccctgcccggacctgccaggacctgaagctgtgccaccctgagctgcctgatggagagtactgggtggaccccaaccagggctgtgccagagatgccttccgggtcttctgcaacttcaccgctggaggagagacctgtgtgaccccaagagatgatgtgacccagttctcctatgtggacagcgagggcagccctgtgggcgtggtgcagctgaccttcctgcggctgctgtctgtgtctgcccaccaggatgtgtcctacccctgcagcggggccgccagagatggccccctgcggctgcggggggccaatgaagatgagctgagccctgagaccagcccctacgtgaaggagttcagagatggctgccagacccagcagggccgcacagtgctggaggtgaggacccctgtgctggagcagctgcctgtgctggatgccagcttcagtgacctgggcgccccaccccggcggggcggcgtgctgctgggccctgtgtgcttcatgggctag

SEQ ID NO: 303545 - DNA, 1907 bp, Artificial Sequence
  derived and/or modified sequence
atggattggagggcgtccgaggcatggatggtccccagggccccaaagggagcttgggaccccagggagagccaggacctcctggacaacagggcacccctgggacccagggtcttcccgggccccagggtgccatcggccctcatggagagaagggtcctcaagggaagccagggctccccggcatgcccaggtcccccaggcgaggtgatccagccactgcccattcagatgcccaagaagactcggcgctcggtggatggaagccgtctgatgcaggaagatgaggccataccgaccgggggagcccccggcagtcctggggggctggaggagatctttggctcactcgactccctgcgggaggagatcgagcagatgaggcggccaacagggacccaggacagccctgctcgcacctgccaggacctgaagctgtgccacccagagcttcccgatggagagtactgggtcgaccccaaccagggctgtgctcgggatgccttccgagttttctgcaacttcacagcagggggtgagacctgtgtgacgcctagggatgacgtcacgcagttctcttacgtggactcagagggctccccagtgggtgtggtccagctcaccttcctgcggctgctcagcgtctcagcccaccaggacgtctcctacccctgctctggagcagcccgtgacggtcccctgagactccgtggggccaatgaggatgagctgagcccggagactagcccctatgtcaaagaattcagagatggctgccagacacagcaaggccggacggtgctggaggtgcgaacgcctgtgctggagcagctgccagtgctggatgcctccttctcagacctgggagccccaccgaggcggggaggggtgctgctggggcctgtctgcttcatgggataggaccgtctctgtctgatcctgtccattcggaaccaggcccacctggaatcccacaacatcagctctgtgccacctcccaagagggctcctcactatctagggagccctgggccagggcgtggagagccctcagtcggggcaggccaggggaggggtgaagtggttgcctggacaccccacgggaggagtggcatctggggctcttggccctcccacctggagcctgttacccgttagagagctgagacccttatttaaaactcacctcccaatcaccccaaacaaatggaagagaagagaaaggacatggcgtattttgtatttaaaagtaattgtattaattatttaaagtgtggaaagcaaaataacaaaaaagagaaacgccaacaaaaatcagcagatgttgaagacaggggtctcgggggtgggctccggcacccacatcctggagtcaggactttcctcagtgactgtgtgtaggggggtttcagggctgaaccccacctccctcccaccttcctcccacctcacctgtcgcacccactgtgaaagttggaatatgtggtctccctggcctcagggctctgactctgccagggtggggctctctaacccacaggtgttggctgcctggcccatgtgcccactgtctcttccacttggtctgggtttggcaggcactgcctgctacttgagggccaggatgctcccccagggaagaaacggaatagtgtggggtgtgtgcagggctgcatcccgcagatggctggaatattaaaattcttctatattggctggtaaattgccatggccctgagccactgagtatgttcattgccacccctgtccctcccctgggcacccctcactttccctgatcctgcaattaaagggttaatgtgtggcatatggaagggactcccaggaccctgtgcccagcttccatgctgactgatggttaaataatgtgattgtctcctcccagg

SEQ ID NO: 303546 - DNA, 1984 bp, Artificial Sequence
  derived and/or modified sequence
aaaaccaaagcccacaagcccacagatccacagtcccacacactgcaggcctgggccagctgtgtttgcttgggtttgggatggattggagggcgtccgaggcatggatggtccccagggccccaaagggagcttgggaccccagggagagccaggacctcctggacaacagggcacccctgggacccagggtcttcccgggccccagggtgccatcggccctcatggagagaagggtcctcaagggaagccagggctccccggcatgcctgggtcccccaggcgaggtgatccagccactgcccattcagatgcccaagaagactcggcgctcggtggatggaagccgtctgatgcaggaagatgaggccataccgaccgggggagcccccggcagtcctggggggctggaggagatctttggctcactcgactccctgcgggaggagatcgagcagatgaggcggccaacagggacccaggacagccctgctcgcacctgccaggacctgaagctgtgccacccagagcttcccgatggagagtactgggtcgaccccaaccagggctgtgctcgggatgccttccgagttttctgcaacttcacagcagggggtgagacctgtgtgacgcctagggatgacgtcacgcagttctcttacgtggactcagagggctccccagtgggtgtggtccagctcaccttcctgcggctgctcagcgtctcagcccaccaggacgtctcctacccctgctctggagcagcccgtgacggtcccctgagactccgtggggccaatgaggatgagctgagcccggagactagcccctatgtcaaagaattcagagatggctgccagacacagcaaggccggacggtgctggaggtgcgaacgcctgtgctggagcagctgccagtgctggatgcctccttctcagacctgggagccccaccgaggcggggaggggtgctgctggggcctgtctgcttcatgggataggaccgtctctgtctgatcctgtccattcggaaccaggcccacctggaatcccacaacatcagctctgtgccacctcccaagagggctcctcactatctagggagccctgggccagggcgtggagagccctcagtcggggcaggccaggggaggggtgaagtggttgcctggacaccccacgggaggagtggcatctggggctcttggccctcccacctggagcctgttacccgttagagagctgagacccttatttaaaactcacctcccaatcaccccaaacaaatggaagagaagagaaaggacatggcgtattttgtatttaaaagtaattgtattaattatttaaagtgtggaaagcaaaataacaaaaaagagaaacgccaacaaaaatcagcagatgttgaagacaggggtctcgggggtgggctccggcacccacatcctggagtcaggactttcctcagtgactgtgtgtaggggggtttcagggctgaaccccacctccctcccaccttcctcccacctcacctgtcgcacccactgtgaaagttggaatatgtggtctccctggcctcagggctctgactctgccagggtggggctctctaacccacaggtgttggctgcctggcccatgtgcccactgtctcttccacttggtctgggtttggcaggcactgcctgctacttgagggccaggatgctcccccagggaagaaacggaatagtgtggggtgtgtgcagggctgcatcccgcagatggctggaatattaaaattcttctatattggctggtaaattgccatggccctgagccactgagtatgttcattgccacccctgtccctcccctgggcacccctcactttccctgatcctgcaattaaagggttaatgtgtggcatatggaagggactcccaggaccctgtgcccagcttccatgctgactgatggttaaataatgtgattgtctcctccc

SEQ ID NO: 303547 - DNA, 921 bp, Artificial Sequence
  derived and/or modified sequence
atggactggcgggccagcgaggcctggatggtgccccgggcccccaagggcgcctgggaccctcgggaatcacaggatcttctcgataacagggctcctttaggtccccgggttttccctgggccgagggtcccctcagctctaatggagcggcgggttctgaagggctcacaaggctcccccgcatgtcctggaccaccaggagaggtaattcagccactgcccattcagatgccaaaaaagaccagaagaagtgtcgatggctcaagattaatgcaagaggacgaggctatacccacaggcggggcaccaggcagcccgggtgggctcgaggagatcttcggcagcttggactcccttcgtgaggagatcgaacagatgagaaggcctactggaacacaggactccccggcaaggacctgccaggatctgaaactttgtcatcctgagctgcctgatggcgaatattgggtggacccgaaccaggggtgcgcgcgggacgccttcagagtattttgcaattttactgctggtggggaaacctgtgttacgccgagggacgatgtgacccagtttagttatgtggatagcgaaggatcccctgtaggcgtcgttcagctgactttcttaaggctcttaagcgtttcagcacatcaagacgtgtcttacccttgttcaggcgctgcaagggacggcccgctccgactccgtggagccaacgaagatgagctcagcccagagactagcccgtacgtcaaagagtttcgagacgggtgtcaaactcagcaaggacggaccgtcctggaggtgcgcacacccgtgttggagcagcttcccgtcttggatgcctccttttctgatctgggcgctcctccgcgaaggggtggcgtcctgctgggtcccgtttgttttatgggttag

SEQ ID NO: 303548 - DNA, 1002 bp, Artificial Sequence
  derived and/or modified sequence
tgaaaccagagcccccaggcccaccggagcaccgtgccccacaccgcgggtttggggcagctgtgtttgctgggcttcggcatggattggagggcctccgaagcatggatggtgcccagagctcccaagggggcgtgggacccccgcgagagccaggatctgctggataacagggcaccactgggtccccgggtttttccaggcccgcgggtgccctccgcacttatggagcggcgagtgttgaaggggtcacaaggctctccagcttgcctggggccgcccggagaggtgatccaacctttacctatacagatgcccaagaaaactcgtagatcagtggatggaagccgcctgatgcaggaagacgaagctattcccaccggaggggctcccggctcccccgggggccttgaggagatcttcggtagcctggactctctacgagaggagattgaacagatgagacgtccaaccggcacacaagattctcctgccaggacgtgtcaggatctcaagctctgccaccctgagctgccagatggcgaatactgggtggacccaaaccaaggttgtgccagagacgccttccgggtgttctgcaacttcacagccggtggcgagacctgcgtgacgcctagggacgacgtgacacaattttcttacgtggactcagaggggtcacctgtgggggtcgtccaactcacctttctgcgcctgttgtctgtgagtgcccaccaggatgttagctacccctgctcaggcgctgcaagggatggccccctgcgtcttaggggcgcaaacgaggacgaactctcaccggaaacttctccatacgtgaaggagttcagggatgggtgccagacacagcaagggaggactgttctggaggtgcgaacccccgtgttggaacagctgcctgtgttagacgcaagctttagcgacttgggagcacccccccgccggggcggcgtgctgctcggtccagtttgtttcatgggatag

SEQ ID NO: 303549 - DNA, 1002 bp, Artificial Sequence
  derived and/or modified sequence
tgaaaccagagcccccaggcccaccggagcaccgtgccccacaccgctggtctagggcagctgtgccttctgggtttcgggatggattggcgggccagtgaagcctggatggtacctagggctcctaagggcgcctgggacccgagggagagccaggacttgttagataaccgtgcacccttggggccacgcgtgtttccgggtccgcgggttccatctgctctcatggaacgtcgggtgttgaagggctcccagggatcgccggcttgcctgggaccacctggcgaagtgatccagccattacctattcaaatgcccaagaaaacgcggaggagcgtggatggatcccgactaatgcaagaggacgaggccatccctactggcggggcgcctggctctccaggcggtctggaggagatattcggtagcctggattcactaagggaggagattgaacaaatgcggcggccgacaggtacacaagacagccccgctaggacttgccaggacctgaagctctgtcaccctgagctgccagatggcgagtactgggtggacccgaaccaggggtgcgccagagatgccttccgtgtgttttgcaatttcacggcaggcggagaaacgtgtgtaacaccccgcgatgatgtgacccagttctcttacgtggattcggagggaagccccgttggtgtagtgcaattgaccttcttgagactcctgagcgtgagtgcccatcaggacgtgtcctatccttgttccggtgcagcccgtgacggaccgcttagactgcggggagccaacgaggacgaactgtcacccgagacctcgccttatgtcaaagaatttagagacggatgtcaaactcaacaaggtcgcaccgtacttgaagttcgtacacctgttctggagcagctcccagtgctggatgcctccttttcagacttgggagccccaccgcggcggggaggcgtgctgctgggtcccgtttgcttcatgggctag

SEQ ID NO: 303550 - DNA, 921 bp, Artificial Sequence
  derived and/or modified sequence
atggactggcgggccagcgaggcctggatggtgccccgggcccccaaaggagcatgggacccccgtgagtctcaggacctgctggataaccgggcacctctcggccctcgagtctttcccggcccccgcgtgccgagcgcgttgatggagaggagggtgctcaagggcagccaaggctccccagcttgcccaggcccacctggagaggtcattcagccgctgcccatccagatgcctaagaagacgaggaggagcgtggacggcagtaggcttatgcaggaggatgaggcaatcccaacaggaggcgcaccagggtctccaggcggcctcgaggagattttcgggtcacttgactcactacgcgaggagatcgaacagatgcggagaccaactggtactcaagacagtccagccaggacgtgtcaagatctgaaactgtgccaccccgagttgccagatggagaatactgggtagaccctaatcaaggctgcgcacgtgatgccttcagggtgttctgcaactttactgcaggaggggaaacgtgtgttacaccaagagatgacgtaactcagttctcttacgtggactcggagggatcacctgttggcgtggtgcagctcacattcttgcgcctactctccgtttcagcccaccaggacgtcagctacccatgcagcggggctgcccgagacggaccactgcgattgcggggagcaaatgaagacgagctttcccccgagacaagtccctatgtcaaggagtttcgagacgggtgccagacacagcaaggaagaaccgtgctcgaagtcagaacacctgtacttgaacaattgcctgtcctcgacgccagcttcagcgacctgggggcacccccgcgacgagggggggtgctgctgggccccgtctgctttatgggctag

SEQ ID NO: 303551 - DNA, 921 bp, Artificial Sequence
  derived and/or modified sequence
atggactggcgggccagcgaggcctggatggtgccccgggcccccaagggcgcttgggatcctcgagagagtcaggacctcctggacaaccgagccccattgggcccacgtgtgttccccggcccccgcgtgcctagtgccctcatggagaggcgagtactaaaggggagtcaagggtccccagcctgccctgggcctcctggagaggtcatccagcctcttcctatacagatgccaaaaaaaacacgcaggagcgtcgacggctcaaggctcatgcaggaggacgaagcaatcccaacgggaggagctccaggctcccccggtgggcttgaggagatatttggaagtctggactctctgcgggaagaaattgaacagatgagacggccaaccggtacccaggatagtccagcacggacatgccaggacctaaagttatgccacccggagctcccagacggggaatattgggtggacccaaatcaaggttgcgcaagagacgccttccgtgtgttctgcaacttcaccgctgggggtgagacctgcgtcacaccacgggatgacgtgacccagttttcgtacgtcgatagtgaaggctctcctgtgggggttgttcagttgactttcttgcggttattgtccgtgtcagcacaccaggacgtctcatatccttgttcaggggcagcgcgggacgggcctctacgactgagaggggccaatgaagatgagctcagccccgagacaagtccctatgttaaggagtttcgtgacgggtgccaaactcagcaggggaggacggttttggaggtccgtacccccgtgctggaacagctaccggtgctggacgcttctttcagtgatctaggcgctccgccgcgcagaggcggcgtattgctcggacccgtctgcttcatgggctag

SEQ ID NO: 303552 - DNA, 921 bp, Artificial Sequence
  derived and/or modified sequence
atggactggcgggccagcgaggcctggatggtgccccgggcccccaagggggcttgggacccccgggagtctcaggacctgctggataatagggccccactaggccccagagttttcccgggaccccgcgtgccaagtgcactaatggagcggcgtgttctgaaaggcagccagggcagccctgcctgtcccggtccccccggggaggtgattcagcctctgcccatacagatgccaaaaaagactcgccggtcagtggacgggtccaggctaatgcaggaggatgaggccatccctactgggggagcccccgggtcccccggtggtctagaagagatttttggatccctcgactccctgagggaagagattgagcaaatgaggcgccccacagggacacaggactcaccagcccgcacatgccaggacctgaagttgtgccatccggagctccccgatggcgaatactgggttgatcccaaccagggttgcgcgagagacgcctttagggtcttctgcaattttactgctggcggtgagacatgtgttacacctcgagatgatgtgacacagtttagttacgttgacagtgaagggtcgcccgtcggcgttgtccaactgacgtttctcaggttgctctcggtgagcgcccaccaggacgtgagctacccatgctcaggtgccgcccgagatggtcccctgaggttaaggggagccaatgaagatgaactgagccctgaaacatcaccgtatgtgaaggaattccgggatggctgtcaaacccagcaaggtaggaccgtcctggaagtcaggacacccgtcctagaacagcttccagtgctggatgcatccttttctgacctgggggcaccccccagaaggggaggcgtattgctgggacccgtttgctttatgggttag

SEQ ID NO: 303553 - DNA, 921 bp, Artificial Sequence
  derived and/or modified sequence
atggactggcgggccagcgaggcctggatggtgccccgggcccccaagggcgcctgggatccacgcgagtcccaggatctcctcgataatcgtgctccccttggacctagggtgtttcctggacctcgagtacccagcgcgctgatggagaggagggtcttgaaggggtcacaaggctcacccgcctgcccaggtccccctggtgaggtcattcaaccgctgccaatccagatgccaaaaaagacacgccgctcagtagacgggagccgactgatgcaggaagacgaagccattcccacaggcggggctcctggttcaccaggggggctggaagagatcttcgggagccttgactcacttagggaagagatcgaacagatgcgaaggccaacaggtacacaggatagcccagctcgaacctgtcaagacctgaagctctgccatcccgagctgcctgacggagagtactgggtcgatccaaaccagggatgtgcccgtgacgcttttcgcgtgttttgcaattttaccgctggcggggagacatgcgtcacccccagggacgacgtcacacagttcagctatgtggactctgaagggagcccagtaggcgtggtgcaattaactttcctgaggctgctatccgtgagcgcacaccaggatgtatcctacccttgtagcggggccgccagggacggacctctgcggctgcgaggagccaacgaggatgagctcagcccggaaactagtccctacgtgaaagaattccgcgatggatgtcagacgcagcaagggaggaccgtgttggaggtcaggacccctgtgctggaacagttaccagtgttggatgcgtcgttttccgacctcggggctcccccaagacgcggcggagtattgctgggtccggtatgttttatgggatag

SEQ ID NO: 303554 - DNA, 921 bp, Artificial Sequence
  derived and/or modified sequence
atggactggcgggccagcgaggcctggatggtgccccgggcccccaagggcgcatgggacccacgggagagtcaggatctgctcgacaatagggcccccctcggaccgcgtgtgtttccgggcccccgcgttccttcagcgctgatggaacgcagggtgctgaagggctctcaggggagcccagcttgccctgggcctccaggagaggttatacagcctcttccaatacaaatgcccaagaaaaccaggagatctgtggacggaagtcgtctgatgcaggaggatgaggcaattcccaccgggggagctcccggctcgccagggggcttggaagagattttcggttccctggacagtttgcgggaggagatcgaacagatgaggcgccctactgggacccaagattcccccgccagaacatgtcaggacctgaaactctgccacccggagttgcccgacggggagtattgggtggacccaaaccaagggtgtgccagggacgcctttcgtgtgttttgtaacttcaccgccggcggtgagacatgcgtgactccgagagacgatgtgacccagtttagttacgttgactctgaaggtagtcccgtgggggtggtgcagctgactttcttgcggcttctgagtgtttccgcacaccaagatgtatcttatccgtgctctggcgcggctcgagatgggcctctgaggctgcgaggcgccaatgaggacgaattgagcccagagacgagcccatacgtgaaggagtttcgggacggatgccagactcaacaaggcagaacggtccttgaagtccgtacgcccgtgctggagcagttgccagtgctcgatgccagtttcagcgatctgggagcgcccccgagacgtggaggcgttttgctggggcctgtctgttttatggggtag

SEQ ID NO: 303555 - DNA, 921 bp, Artificial Sequence
  derived and/or modified sequence
atggactggcgggccagcgaggcctggatggtgccccgggcccccaagggcgcctgggatccacgcgagtctcaggatctgctcgataaccgagctccgctgggccctcgagtttttcctgggcctagagtgccctctgcccttatggaaagaagagtccttaagggaagtcaaggatccccagcctgtccaggaccaccgggagaggtgatccagcccttaccaattcagatgcctaagaagacccgccggagcgtggacggctcacggcttatgcaggaggatgaggccataccaacaggcggggcacctggctctcctggcggactggaggaaatattcggaagccttgattcgttgcgggaggaaatcgaacaaatgcggaggcctacgggcacccaggattctccggccagaacctgccaggatttgaaactgtgccatccggagctgcctgatggtgagtactgggtcgatcccaatcagggttgcgctagagacgctttcagggttttttgcaactttaccgccggaggagagacatgcgttactccaagggatgacgtgacccagttttcttacgtggattccgagggttcccctgtaggtgtagtacagttgacctttctccgtttgctttcagtaagcgcacatcaggacgtgtcctacccatgcagcggagctgccagagatggccctttgaggctgcggggtgccaacgaggatgagctgtcgcctgaaaccagtccatatgtaaaagagttcagggacgggtgtcagacccaacaggggcgcacagtcctagaagttcgaacacccgtgttggaacagctgcctgtgctagacgcatcttttagcgacttgggggcaccccctcggagaggcggcgttcttctgggcccggtgtgtttcatggggtag

SEQ ID NO: 303556 - DNA, 1984 bp, Artificial Sequence
  derived and/or modified sequence
aaaaccaaagcccacaagcccacagatccacagtcccacacactgcaggcctgggccagctgtgtttgcttgggtttgggatggattggagggcgtccgaggcatggatggtccccagggccccaaagggagcttgggaccccagggagagccaggacctcctggacaacagggcacccctgggacccagggtcttcccgggccccagggtgccatcggccctcatggagagaagggtcctcaagggaagccagggctccccggcatgcccaggtcccccaggcgaggtgatccagccactgcccattcagatgcccaagaagactcggcgctcggtggatggaagccgtctgatgcaggaagatgaggccataccgaccgggggagcccccggcagtcctggggggctggaggagatctttggctcactcgactccctgcgggaggagatcgagcagatgaggcggccaacagggacccaggacagccctgctcgcacctgccaggacctgaagctgtgccacccagagcttcccgatggagagtactgggtcgaccccaaccagggctgtgctcgggatgccttccgagttttctgcaacttcacagcagggggtgagacctgtgtgacgcctagggatgacgtcacgcagttctcttacgtggactcagagggctccccagtgggtgtggtccagctcaccttcctgcggctgctcagcgtctcagcccaccaggacgtctcctacccctgctctggagcagcccgtgacggtcccctgagactccgtggggccaatgaggatgagctgagcccggagactagcccctatgtcaaagaattcagagatggctgccagacacagcaaggccggacggtgctggaggtgcgaacgcctgtgctggagcagctgccagtgctggatgcctccttctcagacctgggagccccaccgaggcggggaggggtgctgctggggcctgtctgcttcatgggataggaccgtctctgtctgatcctgtccattcggaaccaggcccacctggaatcccacaacatcagctctgtgccacctcccaagagggctcctcactatctagggagccctgggccagggcgtggagagccctcagtcggggcaggccaggggaggggtgaagtggttgcctggacaccccacgggaggagtggcatctggggctcttggccctcccacctggagcctgttacccgttagagagctgagacccttatttaaaactcacctcccaatcaccccaaacaaatggaagagaagagaaaggacatggcgtattttgtatttaaaagtaattgtattaattatttaaagtgtggaaagcaaaataacaaaaaagagaaacgccaacaaaaatcagcagatgttgaagacaggggtctcgggggtgggctccggcacccacatcctggagtcaggactttcctcagtgactgtgtgtaggggggtttcagggctgaaccccacctccctcccaccttcctcccacctcacctgtcgcacccactgtgaaagttggaatatgtggtctccctggcctcagggctctgactctgccagggtggggctctctaacccacaggtgttggctgcctggcccatgtgcccactgtctcttccacttggtctgggtttggcaggcactgcctgctacttgagggccaggatgctcccccagggaagaaacggaatagtgtggggtgtgtgcagggctgcatcccgcagatggctggaatattaaaattcttctatattggctggtaaattgccatggccctgagccactgagtatgttcattgccacccctgtccctcccctgggcacccctcactttccctgatcctgcaattaaagggttaatgtgtggcatatggaagggactcccaggaccctgtgcccagcttccatgctgactgatggttaaataatgtgattgtctcctccc

SEQ ID NO: 303557 - DNA, 921 bp, Artificial Sequence
  derived and/or modified sequence
atggattggagagcctcagaggcctggatggttcctagggccccaaagggggcttgggaccctagggaatcccaggatctgctcgataaccgggctcctctgggtcccagggtattcccaggccctcgcgtgccgagtgcactcatggaacgccgagtactgaaaggttcacagggttcgcctgcctgtccaggtccacccggtgaagtaattcagccactgccaatccaaatgccgaagaagacgcggcgatctgttgatgggagccggctaatgcaggaggatgaagcgatcccgacagggggagctcccggaagtccaggcggattggaagagatctttggctcactcgatagtttaagggaggagatcgagcagatgcgcaggcctacaggtacacaggattctccagcaagaacatgccaggacctgaagctgtgccaccctgaattgcctgatggggaatactgggttgatcccaatcaggggtgtgccagagacgcctttcgagtattctgtaattttacggccggtggcgagacctgtgtgacgcctagggacgacgtgacccagttttcctatgtcgactccgaggggagccccgtgggcgtcgtccagctgacattcctcagactgctgtccgtttctgctcatcaggacgtcagctatccctgtagcggagctgctcgcgacggacctctccggttgcgcggtgccaacgaggatgaactgtccccagaaacatccccctatgtgaaggagttccgagatggctgccagacccagcaggggcgaaccgtgctggaggtccgaactcctgtgcttgagcaacttcccgtgcttgatgcttcattcagcgacctcggggctccgccaaggcgcggaggtgttctcctgggacctgtatgttttatgggctag

SEQ ID NO: 303558 - DNA, 1002 bp, Artificial Sequence
  derived and/or modified sequence
taaaaccagtcaccacaggcacaccgtagtacggtcccccacactgcaggccttgggcagctctgtctcctgggctttggcatggactggagagcttccgaggcctggatggtcccgagagcccctaagggcgcatgggacccccgagagagtcaggatctcctcgataatagagccccactaggtccacgggtgtttcccggaccccgtgttccctccgcccttatggagaggagagtcctgaaagggagtcagggcagccccgcatgtctggggcctcccggtgaagtgatacagccactgcccattcaaatgcccaagaagacacggaggagcgttgatgggtcgcgacttatgcaggaagatgaggcaattccgacgggaggtgctccaggatcacccggaggcctggaagaaatttttggttcgctcgactcactacgcgaagagattgagcaaatgcgccgtccaaccgggacccaggacagtcctgcgaggacgtgccaggacttaaaactgtgccacccagaactccccgacggtgagtactgggtggatcccaaccagggatgtgccagagatgccttccgagtgttctgcaatttcacagctgggggagaaacctgtgtgacccctagggatgacgttactcagttcagttatgtggattctgagggtagcccagtgggggtcgtccagctgaccttccttaggcttctaagcgtctctgcacaccaggacgtgtcctatccctgctcgggcgcagcgagggacggccctctgagactgcggggagctaatgaagacgagctaagccctgaaacgagtccgtacgtaaaagagttcagggacggctgccagactcagcaggggagaaccgtgctggaagtgcggactcctgttctggaacagctccccgtgctggacgcatccttttcggatttgggagcccctccccgacgcggaggcgtactgctgggccctgtgtgctttatgggttag

SEQ ID NO: 303559 - DNA, 1002 bp, Artificial Sequence
  derived and/or modified sequence
tgaaaccaaagtcctcaagctcaccgaagcacagtgccgcacactgccggactgggacagctgtgtctgcttggttttggcatggactggagagctagcgaagcatggatggtgccgcgagccccaaaaggagcctgggatccccgtgagagtcaagatctcctggacaatagagcacccctgggtcctcgagtgtttcccggacctcgcgttccttcggcactgatggaaaggcgagtgcttaagggctcccaaggatccccagcctgcctgggaccgcctggcgaggtaatacaacccttgcctattcagatgcccaaaaaaactcgcagatccgttgatggttctaggttgatgcaggaggatgaggccatcccaacaggcggagcacccggtagcccaggcggactggaggaaatctttgggtcactggattcgctacgggaggaaatcgaacagatgcggagaccaaccggcactcaggattcaccagccagaacctgccaggaccttaaactttgccaccctgagttgcctgacggagaatactgggtggatcctaaccagggttgcgcacgcgacgccttcagagttttctgtaattttaccgccggaggggaaacctgcgtgacccctcgggacgacgtgacacagtttagctacgtggatagcgagggcagcccggttggcgtggtgcaacttactttcttgaggttgctctccgtatccgctcaccaagacgtgtcctacccctgctccggcgcagctagggatgggcctctccgcctgcgcggagctaacgaagatgaactgagccctgagacatctccttatgtgaaggaattccgcgatgggtgtcagactcagcagggccgaaccgttttagaagtcaggaccccagttctggagcagctacccgttctggacgctagctttagcgatctgggtgcacctcccagacggggtggggtcctgctcgggcctgtgtgctttatgggatag

SEQ ID NO: 303560 - DNA, 921 bp, Artificial Sequence
  derived and/or modified sequence
atggattggcgcgcaagcgaagcgtggatggttcctagggcccctaaaggtgcctgggatccaagagagtctcaggacctactcgataatagagccccacttgggcctcgcgtattccccggaccgagagttccaagcgccctgatggagcgtagagtactgaagggctcgcaaggatcgcctgcttgtcccggtccccctggagaagtcattcagcccctgcccatccagatgccaaagaagacccggagaagtgtggatggctctagattaatgcaggaggatgaggctattcccactggcggtgctccaggatcacctggcggtttagaggaaattttcggcagtctggatagccttagagaagagattgagcagatgcgccgacccacagggacccaagacagtcccgcaaggacttgccaagatctcaagctttgccatccagagcttcccgacggcgaatattgggtcgaccccaatcaaggctgtgctcgcgatgcatttcgggtcttctgcaacttcaccgccggaggggaaacttgcgttactccgcgagacgacgtcacccagttctcttacgtagactccgagggctctcctgttggagtcgtgcagctgacatttctccgccttcttagcgtcagcgcgcatcaggatgtttcatacccttgttctggcgcagccagggacggcccacttcgcctccgaggggcaaatgaggacgagttgtctcccgagacctccccctatgtcaaagaattcagggacggatgccagacccagcagggtaggacggtcttggaggtgagaactcccgtgttggagcagctgcccgttttagatgcttctttcagtgacctgggagcccctccccgtcgaggtggagtgttattgggacccgtgtgcttcatgggctag

SEQ ID NO: 303561 - DNA, 921 bp, Artificial Sequence
  derived and/or modified sequence
atggactggcgggcttccgaggcttggatggtgccacgcgctcctaagggcgcatgggatccccgagagagccaagacctgctggataacagagctccccttggaccacgggttttccctggacccagggttcccagcgcattgatggagagacgggtgctgaaagggagccaaggttcgccagcctgccctgggcctcccggagaggtgattcaacctctccccatacaaatgccgaaaaagactagaaggtccgtggatggctctcgactcatgcaggaagacgaggccataccaacagggggagccccagggagtccgggtggcctcgaagagatcttcggaagccttgattcactccgggaggagatcgagcaaatgcgcagacccactggtactcaagactcgcccgctagaacatgccaggaccttaagctctgccacccagaattacccgatggcgaatactgggtggaccccaatcaggggtgcgcaagagacgcattccgtgtgttctgcaatttcactgccggaggagaaacttgcgtgacgcctcgggacgacgttacacaattctcttatgtggacagcgagggctcccctgtgggcgtggtgcagctgactttcctgagacttctgagcgtcagcgcgcaccaggacgtaagttatccttgctcgggtgccgctagagacggcccactgcggctcagaggggctaacgaggacgagctgagccctgaaacaagtccttacgttaaggagttccgggatggctgccagacccagcagggtcgtacagtgctggaagtccgaacacctgtcctggagcagctgcccgtgctcgatgcaagcttttccgacctcggagctccccctcgtagaggcggagtgcttctggggcctgtttgcttcatgggctag

SEQ ID NO: 303562 - DNA, 921 bp, Artificial Sequence
  derived and/or modified sequence
atggattggcgagcgtcagaggcctggatggtcccccgagctcccaaaggtgcctgggaccctagggaatcgcaggacctgttggataacagggctccacttggccctcgagtttttcctggtccccgtgttccttccgccttgatggaaagacgggtgctaaaaggatcgcaagggagcccggcttgcccagggccacctggagaagtaatccagccccttccaatccaaatgcctaagaaaacccgtcggagtgtcgatggcagtaggcttatgcaagaggacgaagccatccctacagggggagccccaggctcgccaggtggcctggaggaaatctttgggagtcttgactcactccgtgaggagatcgaacaaatgcgcagaccaaccggcacacaggactcgcccgcacgtacttgccaggacttgaagctgtgtcaccccgaactcccagacggtgaatattgggtagatcccaatcaaggatgtgccagagacgcattccgcgtgttctgcaactttactgctggtggcgagacatgcgtgaccccacgcgatgacgttacccagttcagctatgttgactccgaagggagccctgtcggtgtggtgcagctcacatttctgcggttgttgagtgttagcgcccaccaggatgttagctatccttgctctggcgctgcacgcgatggacctctccgtctcaggggcgcaaacgaagatgagctgtcgcccgagacatccccctatgtgaaagaattccgtgatggctgccagacacaacaggggagaactgtgttagaggtccgtaccccagtgctggagcagctacctgttttggatgctagcttctcagacctgggcgcacctcctaggagaggtggtgtcctcctggggcctgtgtgcttcatgggatag

SEQ ID NO: 303563 - DNA, 921 bp, Artificial Sequence
  derived and/or modified sequence
atggattggcgggcatccgaagcctggatggttcccagagcgccaaaaggagcatgggacccacgtgagtctcaagacctgttggataacagggctccgttggggccacgagtgttcccaggccctagagtgccttctgcactgatggaaaggcgagtactgaaaggatcacaggggtctcccgcttgtccgggacctcctggggaagttatccagccgcttccgattcagatgcctaagaagacacggcgatctgtcgacggatctaggctgatgcaggaagacgaagctatccccactggcggagctcctggatcgccagggggtcttgaggagatttttggatccctggactccttgcgtgaagagatcgagcagatgcggaggcccacaggcacccaggatagtccagccagaacgtgtcaggacctgaagctctgccacccggagctaccggacggggagtattgggttgaccccaatcaggggtgtgcgagggatgctttccgcgtgttttgtaattttaccgcaggaggtgagacctgcgtaacacctagggacgacgttacacagttctcttatgtagactccgaagggtcacctgtaggggtggtccaactgacattcttgagactcttgagcgttagcgctcatcaggatgtaagctatccgtgctccggagctgccagagacggtcccctgagactgcggggagccaacgaagatgaactgtctcccgagacctctccttatgtgaaggagtttcgcgatggatgccagacgcagcagggcagaactgttcttgaagtgcgcactcccgttttagagcaactacctgtgttagacgccagctttagcgatctcggggcacctcccagacgtggcggagtccttctgggacccgtatgtttcatgggatag

SEQ ID NO: 303564 - DNA, 921 bp, Artificial Sequence
  derived and/or modified sequence
atggattggcgagcaagcgaggcctggatggtgcctcgagccccaaagggtgcgtgggatcccagagagtcccaggacctgctggataatagggcgccattaggcccacgggtgtttccagggcctagagtacccagcgccctgatggagcgcagggtgcttaagggatcgcaggggtccccagcttgccccggaccacccggagaagtgattcagccactacctatccagatgccgaagaagactcgtcggagcgtcgacggttccaggcttatgcaggaggatgaggcgatccccacgggcggagctccaggcagtcctggagggctagaagagatcttcggatctcttgactctttgcgggaggaaattgaacaaatgcgccgacccactgggacacaagacagtcctgcacgaacctgccaggatctcaagctgtgtcacccagagctgccagatggagagtattgggtcgaccctaaccagggatgtgcaagagacgcctttagagtgttttgcaacttcacggccggaggtgagacctgcgttactccaagagacgacgttactcagtttagttacgtggattctgagggctctccagtgggagtggtgcagttgacctttctaaggctgctgtccgtgtctgctcatcaagacgtaagctacccatgttccggagcagcaagggacggtccgctgcgattacgaggggcaaacgaggacgagttaagtcccgagacttcaccctacgtgaaggaattccgggatggctgccaaacacagcaaggccgaacggtgttagaggtgcggacaccggtcctggagcagctacctgttctagacgcgagcttctctgacctgggtgctcccccaagacggggaggagtgctgctcggccctgtctgcttcatgggatag

SEQ ID NO: 303565 - DNA, 921 bp, Artificial Sequence
  derived and/or modified sequence
atggattggcgcgcatccgaggcgtggatggtgcctagggccccaaaaggtgcctgggaccccagagaatcacaggatctcctagacaatcgcgctcctctggggccacgcgtctttcctgggccacgggtgccttcagccctgatggaacgcagggtgctgaagggatctcaggggtctcctgcgtgcccaggtccaccaggcgaggttatccagccacttcctattcagatgcctaagaaaacgaggaggtccgtggatgggtctcgcctgatgcaagaggacgaagctattccgacaggtggggctcctggttctccaggcggactggaagaaatcttcggttcactcgattctttacgcgaggagatcgagcagatgcgacgcccaaccgggacacaggattccccagccagaacctgccaggatctcaagctgtgtcatcccgagctccccgatggcgaatattgggtcgacccgaaccaggggtgcgctcgcgacgctttccgagtcttctgcaatttcactgccggtggcgaaacctgcgtgactcccagagacgatgtgactcaattcagttatgttgactccgagggatctccagtaggggtggtgcaactgacatttctccgcttgcttagtgttagcgctcaccaagatgtttcctacccatgctctggagcagcgagggacggacctttgcgactgaggggcgctaatgaggatgaacttagcccggaaacaagtccatacgtcaaggagttccgggacgggtgccagacccaacagggcagaactgttttagaggttaggacacccgttttggagcagctccccgttttggatgcgtctttctctgatctaggagctcctccccgtcggggaggagtactgcttggtcccgtttgcttcatgggctag

SEQ ID NO: 303566 - DNA, 921 bp, Artificial Sequence
  derived and/or modified sequence
atggactggcgcgctagtgaagcgtggatggtgccacgggctcccaaaggcgcctgggatccccgcgaaagccaagacttgctggacaatagagccccactgggtccccgagtctttcccggtcctagagttccctccgcgctcatggagcggcgggtgcttaagggaagtcagggaagtcctgcctgccccggaccgcccggtgaggtgatccagccgctcccgatccaaatgccaaaaaaaacaagaagatctgtggacgggtctcgtctgatgcaggaggatgaggccatccccaccggcggcgccccaggcagcccaggtggactggaagaaatttttgggtcattagatagtctgagagaagagattgagcaaatgagacgtcccaccggcacgcaggatagtccagctaggacttgccaggatttgaagttgtgtcatcctgagctgccagatggcgagtattgggtagacccaaatcaaggttgtgcaagggatgccttccgggtgttttgcaacttcactgcaggtggagagacgtgtgtaactccacgggacgatgtcacgcagttcagctacgtggatagcgaagggtcccctgtcggcgttgtgcaactgacgttcttacggttactcagtgtgtccgcacatcaggatgtttcttatccatgcagcggtgccgcccgagatggtccgctccgactgcgaggggcgaacgaggacgaactgtcacccgaaacatcaccctacgtgaaggaatttagagatgggtgtcaaacgcagcagggccgtacagtacttgaggtgcgaacccccgtgctcgaacagcttcccgtactggatgcttctttctccgacctcggtgctcctcccagaagaggtggcgtgcttctggggcctgtgtgtttcatgggctag

SEQ ID NO: 303567 - DNA, 921 bp, Artificial Sequence
  derived and/or modified sequence
atggattggcgcgcttcagaggcttggatggttccaagggccccgaagggcgcctgggacccacgggaatcccaagacctgcttgacaatcgtgctcctttgggacctagagtgttccctggaccccgcgtgccctccgcactgatggaaagaagagtgctgaaggggtcacaaggatctcctgcctgcccaggccctccaggcgaagttattcagcctctgcccatccaaatgcccaaaaagacccggcgcagcgttgacgggagtcggctcatgcaggaagacgaagccatcccgacaggaggggcccctggaagccccgggggactggaggagatctttggatccctcgattccctgcgcgaggaaatcgaacagatgcgaagaccaaccggcacacaagactcgcccgcccgcacctgtcaagacctgaaactctgccaccctgaactccctgatggtgaatactgggtagatcctaaccaaggctgcgctagggacgccttccgcgtgttctgcaattttaccgctggcggtgaaacatgcgtgacaccaagggacgacgttactcagtttagctatgtggactcagagggatcacctgtcggcgtggtgcagcttacttttcttagactcctttctgtaagtgcccatcaagacgtttcgtacccttgttccggtgcggcccgagacggaccccttcggctgagaggtgctaatgaagatgaattgtctccagagacctctccttatgtgaaagagttccgtgacggctgtcaaacccaacagggccgtaccgtcttagaagttagaacaccagttctcgaacagctacctgtgcttgacgcctcctttagtgacctcggggctcctccccgcagaggcggtgtgttgttgggtcctgtgtgtttcatgggatag

SEQ ID NO: 303568 - DNA, 921 bp, Artificial Sequence
  derived and/or modified sequence
atggattggagagcatctgaagcctggatggtcccgcgcgcccctaaaggagcctgggatccccgcgagagtcaagatctcctcgacaatcgggcaccgctgggaccacgtgtatttccagggccaagagtcccgtccgcactgatggagaggagggtgcttaaaggatctcaggggtcccctgcatgtccaggaccccccggcgaagtcatccaaccactacctatccagatgccaaaaaaaacccgaagatcagttgacgggagccggctgatgcaagaagatgaagctatcccaacagggggcgcccccggcagtcctggaggccttgaagaaatatttggctccttagatagcctgcgcgaagaaattgagcaaatgcgccgccctactggaactcaggattcacccgccagaacgtgccaggacctcaagttatgtcaccccgagctccccgacggagagtattgggtagaccccaaccaaggatgtgccagggatgcattccgggtattttgcaactttaccgcaggtggtgaaacatgcgtgacaccacgtgatgatgtcactcaattctcatacgtggattccgagggatcgcctgtaggtgtggtacagctaaccttcctcagacttctatctgtgtccgcgcatcaagacgtaagctacccttgctccggcgccgcgagagatggtcccctgagactgcgtggagctaacgaggatgagctctcacccgagacaagtccctatgttaaggaatttcgcgatggctgtcagacgcagcaaggacgcacagtgctggaggtccgaacgcctgtgcttgaacaactgcccgtgctggatgcctctttctccgacctcggagcccctcctaggagaggcggggtcctcttggggccggtttgtttcatggggtag

SEQ ID NO: 303569 - DNA, 921 bp, Artificial Sequence
  derived and/or modified sequence
atggattggagagcgtccgaagcttggatggtgcccagagcccctaagggagcttgggatcctagggaaagccaagacttacttgacaatagagcacccctggggcctagggtctttccgggcccacgtgtgcctagcgctttgatggaaaggcgagtactcaaaggctcccagggatcccccgcttgtcctgggccacccggggaagtgatacagcctttacccatacagatgcccaagaagacccggagatcagtggacggctcacgcctgatgcaggaagacgaggccatcccaactggcggagcacccggttctcccggaggccttgaggagattttcggatctctggattcactgagagaagagatcgaacagatgaggcgccctactggcacacaggactcacccgctagaacctgccaagacttaaaactctgtcatcccgaactacctgacggcgagtactgggtggacccaaatcagggttgtgctcgcgatgcctttcgagtgttttgcaacttcaccgcaggtggtgagacttgcgtcacaccgcgcgatgacgttacccagtttagttatgtggatagcgaaggaagtcctgtcggcgtggtgcagcttacttttcttagactcctttctgtaagtgcccatcaagacgtttcgtacccttgttccggtgcggcccgagacggaccccttcggctgagaggtgctaatgaagatgaattgtctccagagacctctccttatgtgaaagagttccgtgacggctgtcaaacccaacagggccgtaccgtcttagaagttagaacaccagttctcgaacagctacctgtgcttgacgcctcctttagtgacctcggggctcctccccgcagaggcggtgtgttgttgggtccggtctgttttatgggttag

SEQ ID NO: 303570 - DNA, 183 bp, Artificial Sequence
  derived and/or modified sequence
atggccctgccctgcggcatgggcaccgcctggtacctggacagcaccgagaacgccctgaccgtgaacgtgcccagagcccagaaccacaaggccagccacaacagcatgtggaagctgggcagccacttctactgcatcctgctggtgaccaaggacccccccggcttcaccatggtgtag

SEQ ID NO: 303571 - DNA, 795 bp, Artificial Sequence
  derived and/or modified sequence
atgcccagaagcctgaagagagcccagctgagaagcctgctgcccagaccccccgccgtgagccacacccagccctggtacagagccgcccaccccaccaccagccccaccgccgccagcagagacgtgcaccccgccagcggcgccgtgcccggcccctggctggtggagggcaccgccgtgagagagggcccccagctgcaggacgccgtgccccagagacccaccagacccagcaaggccctgtggcccgcccagatgagcgccgcccccgccatcagactgggccagatggtgcccggcgacaccagaggcctgtggggcccccagggcaccctgctgacctggacctacagaggcggccagggcggcagatggaccagaagagccgagggccccagagagggcaccttcgccgagcagagaccccacttccagagcagcggcgcccagcaggagagcagactggccatgggccccccccccctgggcctgggcgacgccgccggcgacggcagaggccagaccggccaggagaagggcagagccgagggcagacaggccagaaagagcgcctgcaagtgccccagaaagggccccaaccccggcccctggaccagagccgccgcctggtggggcagactggagggcgccaaggccagcgccaagggcgagcaggtgagagaccccggcggccacctgtgggagcagggccacgtgagcccctgcgccagattcaaccagggccacagctgcggcagccccaaggtgagccacaccacctgggtgagctag

SEQ ID NO: 303572 - DNA, 153 bp, Artificial Sequence
  derived and/or modified sequence
atgaagctgctgagcgagcagcaggagctgcggaccgtgagcatgacagcctggaagccccgtatgaatcggaagagtcgtagcagaatgagtcccatcgatccaaggcactccgggactcccaatagtaatcggatcggacttagtacatag

SEQ ID NO: 303573 - RNA, 921 nt, Artificial Sequence
  derived and/or modified sequence
auggacuggcgcgcuagugaagcguggauggugccacgggcucccaaaggcgccugggauccccgcgaaagccaagacuugcuggacaauagagccccacuggguccccgagucuuucccgguccuagaguucccuccgcgcucauggagcggcgggugcuuaagggaagucagggaaguccugccugccccggaccgcccggugaggugauccagccgcucccgauccaaaugccaaaaaaaacaagaagaucuguggacgggucucgucugaugcaggaggaugaggccauccccaccggcggcgccccaggcagcccagguggacuggaagaaauuuuugggucauuagauagucugagagaagagauugagcaaaugagacgucccaccggcacgcaggauaguccagcuaggacuugccaggauuugaaguugugucauccugagcugccagauggcgaguauuggguagacccaaaucaagguugugcaagggaugccuuccggguguuuugcaacuucacugcagguggagagacguguguaacuccacgggacgaugucacgcaguucagcuacguggauagcgaaggguccccugucggcguugugcaacugacguucuuacgguuacucaguguguccgcacaucaggauguuucuuauccaugcagcggugccgcccgagaugguccgcuccgacugcgaggggcgaacgaggacgaacugucacccgaaacaucacccuacgugaaggaauuuagagaugggugucaaacgcagcagggccguacaguacuugaggugcgaacccccgugcucgaacagcuucccguacuggaugcuucuuucuccgaccucggugcuccucccagaagagguggcgugcuucuggggccuguguguuucaugggcuag

SEQ ID NO: 303574 - RNA, 921 nt, Artificial Sequence
  derived and/or modified sequence
auggauuggcgcgcuucagaggcuuggaugguuccaagggccccgaagggcgccugggacccacgggaaucccaagaccugcuugacaaucgugcuccuuugggaccuagaguguucccuggaccccgcgugcccuccgcacugauggaaagaagagugcugaaggggucacaaggaucuccugccugcccaggcccuccaggcgaaguuauucagccucugcccauccaaaugcccaaaaagacccggcgcagcguugacgggagucggcucaugcaggaagacgaagccaucccgacaggaggggccccuggaagccccgggggacuggaggagaucuuuggaucccucgauucccugcgcgaggaaaucgaacagaugcgaagaccaaccggcacacaagacucgcccgcccgcaccugucaagaccugaaacucugccacccugaacucccugauggugaauacuggguagauccuaaccaaggcugcgcuagggacgccuuccgcguguucugcaauuuuaccgcuggcggugaaacaugcgugacaccaagggacgacguuacucaguuuagcuauguggacucagagggaucaccugucggcguggugcagcuuacuuuucuuagacuccuuucuguaagugcccaucaagacguuucguacccuuguuccggugcggcccgagacggaccccuucggcugagaggugcuaaugaagaugaauugucuccagagaccucuccuuaugugaaagaguuccgugacggcugucaaacccaacagggccguaccgucuuagaaguuagaacaccaguucucgaacagcuaccugugcuugacgccuccuuuagugaccucggggcuccuccccgcagaggcgguguguuguuggguccuguguguuucaugggauag

SEQ ID NO: 303575 - RNA, 921 nt, Artificial Sequence
  derived and/or modified sequence
auggauuggagagcaucugaagccuggauggucccgcgcgccccuaaaggagccugggauccccgcgagagucaagaucuccucgacaaucgggcaccgcugggaccacguguauuuccagggccaagagucccguccgcacugauggagaggagggugcuuaaaggaucucagggguccccugcauguccaggaccccccggcgaagucauccaaccacuaccuauccagaugccaaaaaaaacccgaagaucaguugacgggagccggcugaugcaagaagaugaagcuaucccaacagggggcgcccccggcaguccuggaggccuugaagaaauauuuggcuccuuagauagccugcgcgaagaaauugagcaaaugcgccgcccuacuggaacucaggauucacccgccagaacgugccaggaccucaaguuaugucaccccgagcuccccgacggagaguauuggguagaccccaaccaaggaugugccagggaugcauuccggguauuuugcaacuuuaccgcagguggugaaacaugcgugacaccacgugaugaugucacucaauucucauacguggauuccgagggaucgccuguaggugugguacagcuaaccuuccucagacuucuaucuguguccgcgcaucaagacguaagcuacccuugcuccggcgccgcgagagaugguccccugagacugcguggagcuaacgaggaugagcucucacccgagacaagucccuauguuaaggaauuucgcgauggcugucagacgcagcaaggacgcacagugcuggagguccgaacgccugugcuugaacaacugcccgugcuggaugccucuuucuccgaccucggagccccuccuaggagaggcgggguccucuuggggccgguuuguuucaugggguag

SEQ ID NO: 303576 - RNA, 921 nt, Artificial Sequence
  derived and/or modified sequence
auggauuggagagcguccgaagcuuggauggugcccagagccccuaagggagcuugggauccuagggaaagccaagacuuacuugacaauagagcaccccuggggccuagggucuuuccgggcccacgugugccuagcgcuuugauggaaaggcgaguacucaaaggcucccagggaucccccgcuuguccugggccacccggggaagugauacagccuuuacccauacagaugcccaagaagacccggagaucaguggacggcucacgccugaugcaggaagacgaggccaucccaacuggcggagcacccgguucucccggaggccuugaggagauuuucggaucucuggauucacugagagaagagaucgaacagaugaggcgcccuacuggcacacaggacucacccgcuagaaccugccaagacuuaaaacucugucaucccgaacuaccugacggcgaguacuggguggacccaaaucaggguugugcucgcgaugccuuucgaguguuuugcaacuucaccgcagguggugagacuugcgucacaccgcgcgaugacguuacccaguuuaguuauguggauagcgaaggaaguccugucggcguggugcagcuuacuuuucuuagacuccuuucuguaagugcccaucaagacguuucguacccuuguuccggugcggcccgagacggaccccuucggcugagaggugcuaaugaagaugaauugucuccagagaccucuccuuaugugaaagaguuccgugacggcugucaaacccaacagggccguaccgucuuagaaguuagaacaccaguucucgaacagcuaccugugcuugacgccuccuuuagugaccucggggcuccuccccgcagaggcgguguguuguuggguccggucuguuuuauggguuag

SEQ ID NO: 303577 - protein, 283 aa, Artificial Sequence
  derived and/or modified sequence
MKHENVIGLLDVFTPARSLEEFNDVYLVTHLMGADLNNIVKCQKLTDDHVQFLIYQILRGLKYIHSADIIHRDLKPSNLAVNEDCELKILDFGLARHTDDEMTGYVATRWYRAPEIMLNWMHYNQTVDIWSVGCIMAELLTGRTLFPGTDHIDQLKLILRLVGTPGAELLKKISSESARNYIQSLTQMPKMNFANVFIGANPLAVDLLEKMLVLDSDKRITAAQALAHAYFAQYHDPDDEPVADPYDQSFESRDLLIDEWKSLTYDEVISFVPPPLDQEEMES

SEQ ID NO: 303578 - protein, 241 aa, Artificial Sequence
  derived and/or modified sequence
MAAEPQPSSLSYRTTGSTYLHPLSELLGIPLDQVNFVVCQLVALFAAFWFRIYLRPGTTSSDVRHAVATIFGIYFVIFCFGWYSVHLFVLVLMCYAIMVTASVSNIHRYSFFVAMGYLTICHISRIYIFHYGILTTDFSGPLMIVTQKITTLAFQVHDGLGRRAEDLSAEQHRLAIKVKPSFLEYLSYLLNFMSVIAGPCNNFKDYIAFIEGKHIHMKLLEVNWKRKGFHSLPEPSPTGHL

SEQ ID NO: 303579 - DNA, 726 bp, Artificial Sequence
  derived and/or modified sequence
atggccgctgaaccccaacctagttccctaagctatagaaccacaggctctacctacctgcacccactatccgaacttctcggcataccgctggatcaggtcaattttgttgtgtgccagttggttgccctgtttgccgcattctggtttaggatatacttgcgccctggaaccacctcctctgatgtaaggcacgcggtagcgaccatattcgggatctactttgtcattttttgcttcgggtggtattcagttcacttgttcgtgttggtcctgatgtgttacgccatcatggtgactgcttctgtgtctaacattcatcgatatagtttctttgtggctatggggtacctcactatctgtcatatcagcagaatttatatcttccactacggtattttgacaacagactttagcggccccctgatgatagtgacacagaaaatcacaaccctggcctttcaggttcacgacggactcggacgaagggccgaggacctctctgctgaacagcataggcttgctattaaggtgaaaccttcattcttagaatatctctcatatttactgaactttatgtccgtaattgcggggccatgtaataatttcaaggattatatcgcgtttattgaaggaaaacacatccatatgaaattactcgaggtaaactggaaaaggaaggggttccattctttacctgaaccttctccgactgggcatctctag

SEQ ID NO: 303580 - DNA, 726 bp, Artificial Sequence
  derived and/or modified sequence
atggctgctgagccccagcccagcagcctgagctaccgcaccaccggcagcacctacctgcaccccctgtctgagctgctgggcatccccctggaccaggtgaactttgtggtgtgccagctggtggccctgtttgctgccttctggttccgcatctacctgcggcccggcaccaccagcagtgatgtgagacatgctgtggccaccatcttcggcatctactttgtgatcttctgcttcggctggtacagcgtgcacctgtttgtgctggtgctgatgtgctacgccatcatggtgacagcctctgtgagcaacatccaccgctacagcttctttgtggccatgggctacctgaccatctgccacatcagccgcatctacatcttccactacggcatcctgaccacagacttcagcggccccctgatgattgtgacccagaagatcaccaccctggccttccaggtgcatgatggcctgggccggcgggcagaggacctgtctgctgagcagcaccggctggccatcaaggtgaagcccagcttcctggagtacctgagctacctgctgaacttcatgtctgtgattgctggcccctgcaacaacttcaaggactacatcgccttcatcgagggcaagcacatccacatgaagctgctggaggtgaactggaagaggaagggcttccacagcctgcctgagcccagccccaccggccacctgtag

SEQ ID NO: 303581 - DNA, 931 bp, Artificial Sequence
  derived and/or modified sequence
agcgccaaagccaagtttgcgcctcgagagtttgcgcctcgagagtttgcgccggttcgcattccccggcctcccgttcgctcccccgcgaaccaggcggccgtgcgcctctcggggcaaccacccaagagcacccgggcgggaggacgccgagcagggggtgttgcgggctgggacaggggcagccacctcccgaagatgcaggatggcagcagagccgcagccgtccagcctttcctaccgcaccacgggctccacctacctgcacccgctcagcgagctcctgggcatcccgctggaccaggtgaattttgtggtatgccagcttgttgctctgtttgctgctttctggtttcgcatctacttacgtcctggtacaaccagctctgatgtccggcatgcggttgccaccatttttggcatctattttgtcatcttttgtttcggctggtactctgtgcatctttttgtgctggtgttaatgtgctatgcaatcatggtcactgctagtgtatccaatattcacagatattccttttttgtagcaatgggatatcttacaatatgccacatcagccgaatatacatcttccactatggaattctcactacggatttttctgggcctctgatgattgtcactcagaagatcacaaccttggcattccaggttcatgatggattaggtcgaagagctgaagacctttctgctgaacaacatcgacttgctatcaaagtgaaaccctcttttttggaatacttaagttaccttctcaatttcatgagtgtcatagctggtccttgtaacaatttcaaggactacatagccttcattgaggggaagcatatacacatgaagttgctggaggtgaactggaagcgaaaaggtttccacagcttgccagaaccttctcccacaggacatttgtaa

SEQ ID NO: 303582 - DNA, 726 bp, Artificial Sequence
  derived and/or modified sequence
atggccgccgagccccagcccagcagcctgagctaccggaccaccgggtcaacctaccttcatcctttatccgagttgttaggaatcccacttgaccaagttaattttgttgtctgccagctggtcgccctcttcgctgccttttggttccgcatctatctgaggcctggcaccacctcatccgatgttcgccacgctgtagccacaatatttggcatatactttgttatcttctgcttcggatggtattccgtgcatctgttcgttttagtgctaatgtgctatgctatcatggtgaccgcatcagtctctaacatccacagatactccttcttcgttgccatggggtatcttaccatttgtcatataagtcgtatatatatttttcactacggcatcctcactacggacttctctggaccattgatgatcgtgacgcagaagattaccaccctggctttccaggtgcacgatggcttgggtagaagagctgaagatttatctgccgaacagcatcgattggctattaaggtgaagccttcttttctcgaatacctcagttatctgctgaattttatgtctgtgatagcaggtccctgtaataacttcaaggactacatagccttcatcgaagggaagcacatacatatgaaattattagaagttaattggaaaagaaaaggctttcactcgctgcctgagccgtcacctactggacatctctag

SEQ ID NO: 303583 - DNA, 726 bp, Artificial Sequence
  derived and/or modified sequence
atggcagcagaacctcagccctcttcactgtcttacagaacaacagggtcaacttatctgcaccccttaagtgagttgctcggaattccccttgaccaggtgaattttgtagtgtgtcagttggtggccctttttgcagcgttttggtttcgcatttatctcagacctggaactacaagttctgacgttcggcatgccgtcgcgacaatattcggaatttattttgtgatattttgcttcggttggtacagtgtccacttatttgtgctcgtcttaatgtgctatgccattatggtgaccgcctccgtgtctaatatccacaggtactcattttttgtggctatggggtatctgactatttgtcatatcagcaggatctacatatttcattatggaattctgactaccgacttttcaggccctctgatgattgtaacccaaaagattaccacccttgcctttcaagtgcacgacgggttgggccgaagagccgaggacctctcagcagagcagcacaggctcgcaattaaagtcaagccctcgttcctcgagtaccttagttacctgctgaactttatgtccgtgatagccggaccatgcaataacttcaaggactatatagcctttattgagggcaagcatatacacatgaaactgctggaggtgaactggaagcggaaggggttccactccctgcccgagccctcacccactggtcacctgtag

SEQ ID NO: 303584 - DNA, 726 bp, Artificial Sequence
  derived and/or modified sequence
atggccgccgagccccagcccagcagcctgagctacagaaccaccggcagcacctacctgcaccccctgagcgagctgctgggcatccccctggaccaggtgaacttcgtggtgtgccagctggtggccctgttcgccgccttctggttcagaatctacctgagacccggcaccaccagcagcgacgtgagacacgccgtggccaccatcttcggcatctacttcgtgatcttctgcttcggctggtacagcgtgcacctgttcgtgctggtgctgatgtgctacgccatcatggtgaccgccagcgtgagcaacatccacagatacagcttcttcgtggccatgggctacctgaccatctgccacatcagcagaatctacatcttccactacggcatcctgaccaccgacttcagcggccccctgatgatcgtgacccagaagatcaccaccctggccttccaggtgcacgacggcctgggcagaagagccgaggacctgagcgccgagcagcacagactggccatcaaggtgaagcccagcttcctggagtacctgagctacctgctgaacttcatgagcgtgatcgccggcccctgcaacaacttcaaggactacatcgccttcatcgagggcaagcacatccacatgaagctgctggaggtgaactggaagagaaagggcttccacagcctgcccgagcccagccccaccggccacctgtag

SEQ ID NO: 303585 - protein, 127 aa, Artificial Sequence
  derived and/or modified sequence
MAATSPGPWVSSPTHRSCFLPFLTRGCHNRVWAAHPFLLWPHQSCCWWMESSRWWWSAWSLMLHPLALTAPGRKPGSPVWGEGSYLSSYPTCPAQAWCSRSALRAPSSSLGAFFAGDLPPPLQAGAA

SEQ ID NO: 303586 - protein, 4454 aa, Artificial Sequence
  derived and/or modified sequence
MMKLYIDNAAPDKLKGLCIFFVRCRNDVAINVKTIQEEALFTVLDASKGLLNGIRDMLANIFLPAVLATNNWGALNQSKQGESEKHIFTETINRYLSFLDGARISIEGTVKLKTIDNVNFSKLHTFEEVTAAASNSETVHQLEEVLMVWYKQIEQVLIESEQMRKEAGDSGPLTELEHWKRMSAKFNYIIEQIKGPSCKAVINVLNVAHSKLLKNWRDLDARITDTANESKDNVRYLYTLEKVCQPLYNHDLVSMAHGIQNLINAIRMIHGVSRYYNTSERMTSLFIKVTNQMVTACKAYITDGGLNHVWDQETPVVLKKIQDCIFLFKEYQASFHKTRKLISESSGEKSFEVSEMYIFGKFEAFCKRLEKITEMITVVQTYSTLSNSTIEGIDIMAIKFRNIYQGVKKKQYDILDPRRTEFDTDFLDFMTKINGLEVQIQAFMNSSFGKILSSQQALQLLQRFQKLNIPCLGLEINHTIERILQYYVAELDATKKLYHSQKDDPPLARNMPPIAGKILWVRQLYRRISEPINYFFKNSDILSSPDGKAVIRQYNKISYVLVEFEVVYHTAWIREISQLHYALQATLFVRHPETGKLLVNFDPKILEVVRETKCMIKMKLDVPEQAKRLLKLESKLKADKLYLQGLLQYYDELCQEVPSVFVNLMTPKMKKVESVLRQGLTVLTWSSLTLESFFQEVELVLDMFNQLLKKISDLCEMHIDTVLKEIAKTVLISLPESGATKVEDMLTLNETYTKEWADILNHKSKHVEEAVRELISIFEQIYEVKYTGKVGKQSEQRKHVVFGSETGEGENNDYEANIVNEFDTHDKEDEFKKECKEVFAFFSHQLLDSLQKATRLSLDTMKRRIFVASLYGRKQSEDIISFIKSEVHLAIPNVVMIPSLDDIQQAINRMIQLTLEVSRGVAHWGQQQIRPIKSVIPSPTTTDVTHQNTGKLLKKEERSFEEAIPARKLKNFYPGVAEHKDISKLVLLLSSSVNSLRKAAHEALQDFQKYKTLWTEDRDVKVKEFLANNPSLTEIRSEILHYATFEQEIDELKPIIVVGALELHTEPMKLALSIEAKAWKMLLCRYLNEEYKKKMSYMIAFINEYLKKLSRPIRDLDDVRFAMEALSCIRDNEIQMDMTLGPIEEAYAILNRFEVEVTKEESEAVDTLRYSFNKLQSKAVSVQEDLVQVQPKFKSNLLESVEVFREDVINFAEAYELEGPMVPNIPPQEASNRLQIFQASFDDLWRKFVTYSSGEQLFGLPVTDYEVLHKTRKELNLLQKLYGLYDTVMSSISGYYEILWGDVDIEKINAELLEFQNRCRKLPKGLKDWQAFLDLKKRIDDFSESCPLLEMMTNKAMKQRHWDRISELTGTPFDVESDSFCLRNIMEAPLLKHKDDIEDICISAIKEKDIEAKLTQVIENWTNQNLSFAAFKGKGELLLKGTESGEIITLMEDSLMVLGSLLSNRYNAPFKKNIQNWVYKLSTSSDIIEEWLVVQNLWVYLEAVFVGGDIAKQLPQEAKRFQNIDKSWIKIMQRAHENPNVINCCVGDETMGQLLPHLHEQLEVCQKSLTGYLEKKRLLFPRFFFVSDPVLLEILGQASDSHTIQPHLPAVSDNINEVTFHAKDYDRIMAVISREGEKIVLDNSVMAKGPVEIWLLDLLKMQMSSLHNIIRSAFYQISDSGFQLLPFLSHFPAQVGLLGIQMLWTHDSEEALRNAKDDRKIMQVTNQKFLDILNTLISQTTHDLSKFDRVKFETLITIHVHQRDIFDDLVKMHIKSPTDFEWLKQSRFYFKEDLDQTVVSITDVDFIYQNEFLGCTDRLVITPLTDRCYITLAQALGMNMGGAPAGPAGTGKTETTKDMGRCLGKYVVVFNCSDQMDFRGLGRIFKGLAQSGSWGCFDEFNRIELPVLSVAAQQIYIVLTARKERKKQFIFSDGDCVDLNPEFGIFLTMNPGYAGRQELPENLKIQFRTVAMMVPDRQVHYDFGLRNILSVLRTLGSQKRARPEDSELSIVMRGLRDMNLSKLVDEDEPLFLSLINDLFPGLQLDSNTYAELQNAVAHQVQIEGLINHPPWNLKLVQLYETSLVRHGLMTLGPSGSGKTTVITILMKAQTECGRPHREMRMNPKAITAPQMFGRLDTATNDWTDGIFSTLWRKTLKAKKGENIFLILDGPVDAIWIENLNSVLDDNKTLTLANGDRIPMAPSCKLLFEVHNIENASPATVSRMGMVYISSSALSWRPILQAWLKKRTAQEAAVFLTLYEKVFEDTYTYMKLNLNPKMQLLECNYIVQSLNLLEGLIPSKEEGGVSCVEHLHKLFVFGLMWSLGALLELESREKLEAFLRQHESKLDLPEIPKGSNQTMYEFYVTDYGDWEHWNKKLQPYYYPTDSIPEYSSILVPNVDNIRTNFLIDTIAKQHKAVLLTGEQGTAKTVMVKAYLKKYDPEVQLSKSLNFSSATEPMMFQRTIESYVDKRIGSTYGPPGGRKMTVFIDDINMPVINEWGDQITNEIVRQMMEMEGMYSLDKPGDFTTIVDVQLIAAMIHPGGGRNDIPQRLKRQFTVFNCTLPSNASIDKIFGIIGCGYFDPCRSFKPQICEMIVNLVSVGRVLWQWTKVKMLPTPSKFHYIFNLRDLSRIWQGMLTIKAEECASIPTLLSLFKHECSRVIADRFITPEDEQWFNAHLTRAVEENIGSDAASCILPEPYFVDFLREMPEPTGDEPEDSVFEVPKIYELMPSFDFLAEKLQFYQRQFNEIIRGTSLDLVFFKDAMTHLIKISRIIRTSCGNALLVGVGGSGKQSLSRLASFIAGYQIFQITLTRSYNVTNLTDDLKALYKVAGADGKGITFIFTDSEIKDEAFLEYLNNLLSSGEISNLFARDEMDEITQGLISVMKRELPRHPPTFDNLYEYFISRSRKNLHVVLCFSPVGEKFRARSLKFPGLISGCTMDWFSRWPREALIAVASYFLSDYNIVCSSEIKRQVVETMGLFHDMVSESCESYFQRYRRRAHVTPKSYLSFINGYKNIYAEKVKFINEQAERMNIGLDKLMEASESVAKLSQDLAVKEKELAVASIKADEVLAEVTVSAQASAKIKNEVQEVKDKAQKIVDEIDSEKVKAESKLEAAKPALEEAEAALNTIKPNDIATVRKLAKPPHLIMRIMDCVLLLFQKKIDPVTMDPEKSCCKPSWGESLKLMSATGFLWSLQQFPKDTINEETVELLQPYFNMDDYTFESAKKVCGNVAGLLSWTLAMAIFYGINREVLPLKANLAKQEGRLAVANAELGKAQALLDEKQAELDKVQAKFDAAMNEKMDLLNDADTCRKKMQAASTLIDGLSGEKIRWTQQSKEFKAQINRLVGDILLCTGFLSYLGPFNQIFRNYLLKDQWEMELRARKIPFTENLNLISMLVDPPTIGEWGLQGLPGDDLSIQNGIIVTKATRYPLLIDPQTQGKTWIKSKEKENDLQVTSLNHKYFRTHLEDSLSLGRPLLIEDIHEELDPALDNVLEKNFIKSGTTFKVKVGDKECDIMDTFKLYITTKLPNPAFTPEINAKTSVIDFTVTMKGLENQLLRRVILTEKQELEAERVKLLEDVTFNKRKMKELEDNLLYKLSATKGSLVDDESLIGVLRTTKQTAAEVSEKLHVAAETEIKINAAQEEFRPAATRGSILYFLITEMSMVNIMYQTSLAQFLKLFDQSMARSEKSPLPQKRITNIIEYLTYEVFTYSVRGLYENHKFLFVLLMTLKIDLQRGTVKHREFQALIKGGAALDLKACPPKPYRWILDMTWLNLVELSKLPQFAEIMNQISRNEKGWKSWFDKDAPEEEIIPDGYNDSLDTCHKLLLIRSWCPDRTVFQARKYIADSLEEKYTEPVILNLEKTWEESDTRTPLICFLSMGSDPTNQIDALAKKLKLECRTISMGQGQEVHARKLIQMSMQQGGWVLLQNCHLGLEFMEELLETLITTEASDDSFRVWITTEPHDRFPITLLQTSLKFTNEPPQGVRAGLKRTFAGINQDLLDISNLPMWKPMLYTVAFLHSTVQERRKFGPLGWNIPYEFNSADFSASVQFIQNHLDECDIKKGVSWNTVRYMIGEVQYGGRVTDDFDKRLLNCFARVWFSEKMFEPSFCFYTGYKIPLCKTLDQYFEYIQSLPSLDNPEVFGLHPNADITYQSNTASAVLETITNIQPKESGGGVGETREAIVYRLSEDMLSKLPPDYIPHEVKSRLIKMGHLNSMNIFLRQEIDRMQRVISILRSSLSDLKLAIEGTIIMSENLRDALDNMYDARIPQLWKRVSWDSSTLGFWFTELLERNAQFSTWIFEGRPNVFWMTGFFNPQGFLTAMRQEVTRAHKGWALDTVTIHNEVLRQTKEEITSPPGEGVYIYGLYMDGAAWDRRNGKLMESTPKVLFTQLPVLHIFAINSTAPKDPKLYVCPIYKKPRRTDLTFITVVYLRTVLSPDHWILRGVALLCDIK

SEQ ID NO: 303587 - DNA, 13365 bp, Artificial Sequence
  derived and/or modified sequence
atgatgaaactctacatcgataacgcagcccccgataagttaaagggattgtgtattttcttcgtgcggtgtaggaatgatgtggccattaatgtgaaaaccattcaggaggaagcgctcttcacagtgctggacgctagcaagggtctgctcaatggaattagagatatgctagcaaacatcttcctccctgcggtactagccaccaataactggggcgccctgaaccagtcaaagcagggtgagagcgagaagcacatatttacggaaactatcaacaggtacctctctttcctggatggcgcccgcattagtatagaaggaacagtgaagctgaagactatcgacaacgtgaacttctctaagctgcatacctttgaggaggtaactgctgccgcaagcaacagtgaaacggtccatcagctggaggaggtcctcatggtttggtataagcagatcgagcaagtgcttatcgagagcgaacagatgcgcaaggaagctggtgacagtgggcccctgacggagctggaacactggaagaggatgagcgctaagttcaactatattatcgagcagatcaaaggccccagctgcaaagcagttattaatgtactgaatgtggcgcactcgaagctcttaaaaaactggcgggatcttgatgcgaggatcacagacaccgccaacgagagtaaagacaacgtaaggtacctgtacacacttgaaaaggtatgtcaacctctgtacaaccacgatcttgttagtatggcacatggtatccagaacctaattaacgctatccgcatgatccacggggtttcacgctattacaatacctccgagaggatgacaagcttgtttattaaagtcactaatcaaatggtcaccgcgtgcaaagcctacatcaccgacggaggactgaaccacgtctgggaccaggagactccagtcgtgctgaaaaagatccaagattgtatctttcttttcaaggagtatcaggcctcattccacaagacaaggaaactgatcagcgaatcctccggagaaaagtcattcgaggtcagtgagatgtatatcttcggcaaattcgaggctttttgcaagaggctcgagaaaatcacagagatgatcacagtagtccagacgtactcaacactgagcaatagtacgatcgagggcattgacattatggcaattaagtttaggaacatttatcagggcgtgaaaaagaagcaatatgatatcctggatccccgtagaaccgaattcgacaccgattttctcgattttatgaccaagatcaatggattagaggtgcagattcaggctttcatgaattcaagcttcggtaaaattctctcaagccaacaggctctgcagcttctccaaaggttccaaaaactcaacattccttgcctgggcttagagatcaatcacactatcgagcgcattcttcagtattatgttgcggagttagacgccacgaagaagctgtaccattctcagaaagatgatcccccgcttgcaagaaatatgcctcctatcgctggaaagattttgtgggtccggcaactctatcgccggatctcagagcccatcaactacttctttaaaaactccgatattctgtcctcacctgatgggaaagccgttatcagacagtataacaaaatctcttacgtgctcgtcgagtttgaggtcgtttatcacacagcatggatcagagaaatcagccagttgcactatgcacttcaggctacactgttcgtgaggcaccccgagaccgggaaactgctagtcaatttcgacccaaaaattcttgaagtggtgagggaaactaagtgtatgattaagatgaaactggatgtccctgagcaggccaaaagattattgaagcttgagtctaaactcaaggctgacaagctgtacctgcagggtctgcttcagtactatgatgagctctgccaggaggtcccctccgtattcgtgaatctgatgaccccgaaaatgaaaaaggtcgagagcgtcctgaggcagggcctgactgtactgacttggagttctctcacactcgagtcatttttccaggaagtagaattggtgctcgacatgttcaatcagttattaaaaaaaatctctgacctctgcgagatgcatattgacacagtcctaaaagagatcgctaagactgtgctgatctctctgccggagtctggagcgaccaaggttgaagatatgctgaccctgaatgagacttacaccaaggaatgggccgacatcctcaatcacaagagcaaacatgttgaggaagcagtgagggagctaatcagcatctttgaacagatctatgaggtgaaatatacaggcaaagtgggcaaacagagcgagcaaagaaaacacgtggtctttgggagtgaaaccggggaaggcgaaaacaacgactacgaagccaatattgttaacgagtttgatacacacgacaaagaggacgaatttaagaaggaatgcaaggaagtcttcgcattcttctcccaccagttgctcgattcactgcagaaggctacacgcctgtcgttggatactatgaaacgtcggatttttgtcgccagcttatatggcaggaagcagtcagaggacataattagtttcatcaaatctgaggtgcaccttgccattcccaatgtagtaatgataccctcactcgacgatatccagcaggcaattaatcgaatgatccagctgaccctggaggtgtcccggggcgtagctcactggggccagcagcagatcagacccattaagtctgtcatcccgagccccaccactacagatgttactcatcagaatacaggtaaactgcttaagaaagaggagagaagcttcgaggaagccattcctgctaggaagctgaaaaatttttacccaggagtggcggagcataaagacatctcaaaattggttctcctgctttccagttctgttaactccctgagaaaggccgcccacgaagcactacaagactttcagaagtacaaaaccctttggactgaggacagagacgtgaaggtcaaggagttcctggcaaataatccaagtttgacagagattaggtctgagatcctgcactatgctactttcgagcaggagatcgacgagctcaaaccgatcattgtcgtgggagccctcgagctgcatactgaacccatgaagctggctctttctatcgaagctaaagcctggaaaatgttgctctgcaggtatttgaacgaggaatacaagaagaaaatgtcttatatgatagctttcatcaatgaatatctcaaaaagctatccagacccatacgcgatttggacgatgtcaggttcgccatggaggccctctcgtgtatacgcgataatgagatccagatggacatgaccttaggacctatcgaagaagcttatgccatcctgaacaggttcgaagtcgaggtcaccaaggaggaaagcgaagctgtcgacacactcaggtactcattcaataaactgcagtctaaggcggtgagcgtccaggaggacttggtgcaagtgcagccaaagttcaagagtaatctgttggagagtgtggaggtgttcagggaggatgtcatcaatttcgccgaggcctacgagctcgagggacctatggtcccaaacattcctcctcaagaggctagcaacaggctgcagatattccaggcttccttcgacgacttgtggcgcaagttcgtcacctatagttcaggggagcagctgtttggtcttccagtcacagattacgaggtgctgcataagacccggaaggaactaaatctcctccagaagctctacggactttacgacactgtcatgagcagcatctctggttactatgaaatcctctggggagacgtagatatcgaaaagattaacgctgagctcctggagtttcaaaaccgatgcagaaaacttcccaagggactcaaggactggcaagcgttccttgacttaaaaaagcgcatcgatgacttctccgagtcatgccccctgctcgagatgatgaccaacaaggcaatgaagcaacggcactgggatcgcatcagtgagctcacgggaacaccattcgacgttgagagcgattctttctgtctgcggaatataatggaggccccattactgaagcataaagacgacatcgaggatatatgtatcagcgccattaaggaaaaggacatcgaagccaaactgacccaggtgattgagaattggacaaatcaaaatctgagcttcgcagcctttaaggggaaaggcgaactgttactaaagggaaccgaaagtggagaaatcattacactcatggaggatagcctgatggtgctgggctcactgttgagtaaccggtataacgccccttttaagaaaaacattcagaactgggtctacaagctgtcaaccagctccgacattattgaggagtggctcgtggttcagaatctgtgggtgtacctggaagctgtatttgtggggggagatatagctaaacagctacctcaggaagcgaagagatttcagaatatcgacaaaagctggatcaaaatcatgcagcgggcacatgagaatcctaacgtaatcaattgctgtgttggcgatgagacaatgggccaactcctgccacacttgcatgaacagctggaagtgtgccagaagagtctgaccgggtacttagagaagaaacggctgttgttcccacgatttttttttgtttccgacccagttctcctggagattctcgggcaggccagcgatagccataccattcagcctcacctgccagccgtttccgataatattaacgaggttacatttcacgcaaaagactacgaccggattatggccgtgatcagccgggagggcgagaaaatcgtgcttgacaacagcgtgatggcaaagggcccggtagaaatctggctgctggatctgttaaagatgcagatgtcgagtctccataacattattagatctgctttctaccagatctcagacagcgggtttcagctcttacctttcctgtcacattttcccgcccaggtgggtctgttgggcatacaaatgttatggactcatgacagtgaagaggcgcttaggaacgccaaagacgataggaaaatcatgcaggtgacaaatcagaaatttttggacatacttaatactctaatcagccagacaacccacgacttatcgaagtttgaccgtgttaaattcgagactctcattaccattcatgtccaccaacgggacatattcgatgacctggtcaaaatgcacatcaaatcccctacggattttgaatggcttaagcaatcacgtttctacttcaaggaagatcttgaccagaccgtggtgtccataaccgacgtggactttatctaccagaatgagttcctagggtgcaccgatagactagtcattacccccttaaccgatcgctgctatataacccttgcccaagccttaggcatgaatatggggggagcacccgccggacctgctggaaccgggaagaccgaaaccactaaggacatgggacgctgccttggaaaatacgtggtggtgttcaattgctctgatcaaatggatttccgggggctcggtaggatcttcaaaggattggctcagtcagggagctgggggtgcttcgatgaattcaaccgcatagaactgccagtgctgagtgtggcggcccagcagatctacatagtcctgaccgctaggaaggaacgtaaaaaacagtttattttctctgatggcgactgcgtagatctaaatcccgagtttggtatattcctaaccatgaaccccggctacgcgggccgtcaggagttacccgaaaacctgaagatccagtttcgcaccgtggccatgatggttcccgatcggcaggttcactacgactttggactgagaaacattctgtccgtgcttaggacattaggcagtcaaaaacgggccaggccagaggattccgagctgagcatcgtgatgcgaggtctccgtgatatgaacttgtccaaactggtagacgaggacgagccgctttttcttagcctgattaatgatttgtttccaggcctgcaactagactctaacacctacgctgaactccagaacgccgtcgcgcaccaggtgcagattgagggtctaattaatcatccaccatggaacctgaaactggtgcagctgtacgaaacctcccttgttcggcacggactgatgacccttgggccatcaggtagtggcaagacgacagtgatcaccatactgatgaaggcccaaactgagtgcggaaggccgcatcgcgagatgcgcatgaaccctaaagctattaccgctccgcagatgttcggccggctcgatactgccactaatgattggaccgatggaatcttttccactctgtggcgaaagactcttaaagccaagaagggagagaatatcttcctgatccttgacggccccgttgacgccatttggatcgagaacctgaattctgtactggatgataacaaaacccttacactggcaaatggtgatagaataccgatggctccctcttgcaagctgctctttgaggtccacaatattgaaaacgcaagcccagccactgtctcccgaatggggatggtgtacattagtagctccgccctctcctggcgacccatactccaggcatggctaaaaaagcgcaccgcccaggaggctgcagtcttcctaaccctgtacgaaaaggtgttcgaggacacgtatacctacatgaagcttaatctgaatcccaaaatgcagttgctggaatgcaactacatagtccagagcctgaacttactagaaggtttaattcctagtaaagaggaaggaggtgtgtcgtgcgtggagcacctccacaaacttttcgtttttggtctcatgtggagcctgggagctctcctggagttggagtcccgtgagaagctcgaggcctttttacgtcagcacgagagcaagctggacctccccgaaattccaaagggttcaaaccagaccatgtacgagttctatgtgacagactacggcgattgggagcactggaataagaaacttcagccatactattacccgaccgatagcattcccgagtactcctcaatcttagtccctaatgtggataacattagaacaaattttttgattgacacaatcgccaagcagcataaggcagtcttgctgaccggggaacagggtacagccaagacggtcatggtgaaggcttatctgaagaagtacgatccagaggttcaactgtcgaagagcttaaactttagctctgccaccgagccaatgatgtttcagaggactatagaatcttatgtcgataaacgcatcggttctacctacgggcccccgggcggaaggaagatgacggtctttattgatgacattaacatgccggtcatcaacgagtggggggatcagataacaaacgaaattgtgcggcagatgatggaaatggaaggcatgtactccctagataagcctggggacttcacaactattgtggacgtgcagctcattgccgccatgattcaccctggggggggccgcaacgatatcccccagagactgaagaggcaatttacagtcttcaactgtacgctgcctagcaacgccagcatagataagatcttcggtatcattggatgcggctatttcgacccctgcaggtcttttaaaccacagatctgcgaaatgatcgtaaacttagtaagtgttggcagggttctgtggcagtggacgaaggtgaagatgctgcctacccccagtaaatttcactatattttcaatcttcgcgacctaagccgcatctggcagggaatgctgaccattaaggccgaggagtgcgcttctattcccaccctcctgtccttgttcaagcacgagtgttcccgggtcattgccgatcggttcatcacccctgaagatgagcaatggtttaatgcccatctcacacgcgccgtggaggaaaacatcggcagcgatgctgcttcctgtattcttcccgagccttattttgttgatttcttaagagagatgccggaaccgaccggggatgagcctgaggacagtgtttttgaagtgccaaaaatatacgagctgatgcctagtttcgacttcctcgctgagaaactacagttctaccaaaggcagttcaacgagataatcagaggtaccagcctggacctggtgttctttaaggatgcaatgacacatcttatcaaaatctcccggattattagaacttcatgcggcaatgccctccttgtgggcgtcgggggtagtggaaaacagagcctgtcacggttggctagctttatcgccgggtatcagattttccagatcactctgacaagatcatataatgtgactaacctcacggacgaccttaaagccctctacaaagtagctggggcggacggaaaaggaatcacttttatctttactgattcagagattaaggatgaggctttcctcgaatacctgaacaacttactctcaagcggcgaaatatcaaacctttttgcccgggatgagatggacgagattacccagggcctaatatcggtgatgaaacgagagctccccagacatcctccgacattcgacaatctttacgagtactttatctctagatcccgcaagaatctgcacgttgttctctgcttcagccctgtcggggaaaagtttagagcacgcagcctgaaattccctggattgatctccgggtgtaccatggattggtttagtcggtggccacgggaagctctgattgctgtcgcctcttactttctcagcgactataatatcgtctgtagctctgaaattaagcggcaagtcgttgaaaccatgggactgttccacgacatggtttccgaaagttgcgaatcctatttccagcggtacaggcgaagagcacatgtcacgcccaaatcttatttgtcctttatcaatgggtataagaatatctacgccgaaaaggtcaagtttatcaatgagcaggccgagagaatgaacatcggactggacaagttgatggaggccagtgaatcagtggcaaagttaagccaggatctggctgtgaaggagaaagagttggccgtggcttcaatcaaggccgatgaagtcttggccgaggttaccgtctctgctcaggccagcgcaaaaattaaaaacgaggtgcaggaggtgaaagacaaggcgcagaagattgtcgatgaaatcgactctgagaaagttaaggccgaatctaagctcgaagctgcaaaacccgcgcttgaggaggctgaggctgccctaaatacgataaaacctaatgacatagcaacagtacggaagctggctaagcccccccacttgatcatgcggattatggattgcgtcctgctattgttccaaaaaaagatcgaccctgtgacaatggaccccgagaagagctgttgcaagccttcatggggcgaatccctgaaactcatgagcgccacaggctttctgtggtctctgcagcagttccccaaagataccattaacgaagagacagtggagctccttcaaccctacttcaacatggacgactacacttttgagtctgctaaaaaggtgtgcgggaatgtggccggtcttctgtcttggacactggccatggctattttctacggcattaatcgagaagtgttgccactgaaagcaaacttagcaaagcaggaaggccgcctagcagtagctaatgctgaactgggtaaggcccaggctctattggacgagaagcaggcagaactcgataaggtgcaagctaagttcgatgccgccatgaacgaaaagatggatttactaaatgatgctgacacatgtcgcaaaaagatgcaggctgcttccaccctgattgacggcctgtcaggcgagaagattcgctggacccagcagagcaaggagttcaaagcccagattaaccgtctggtcggagacatccttttgtgtactggctttcttagctatcttggcccttttaatcagatcttccgaaattacctgctgaaggatcagtgggaaatggagcttagagccaggaaaattcccttcactgagaatctgaacctgatttctatgctggtggatcctccaacaatcggagagtggggcctccagggcctccctggggacgatcttagtatccagaacggtatcattgtgacgaaggccacacgttacccccttctgatagaccctcagacacaggggaagacatggatcaagtccaaggagaaagaaaatgacctgcaagtgacaagtctcaatcacaagtactttagaacacacctcgaagattcgctttcactgggccggccgttactgatcgaagacatacacgaagagctggatccagcgctggataacgtacttgaaaagaatttcatcaaaagtggcacaacattcaaggtaaaagttggcgataaggagtgtgacattatggacacgtttaaactgtacataaccaccaagctccctaacccggctttcactcctgagattaatgccaagacctccgtcattgattttacagtgacgatgaaaggactggagaaccaactgctgagacgcgtgattctgaccgagaaacaggagctggaagctgagagggtgaagctattagaagatgtgacatttaacaaaagaaaaatgaaggaactcgaggacaatctgctttataaattatccgcaaccaagggttccttggtggacgatgagtctctgatcggggtcttacgcaccaccaagcagacagcagctgaggtctctgagaaactgcatgtcgccgccgagaccgagattaagattaatgccgcccaggaggagtttaggccagctgcaactagaggctctatcttatattttctgatcaccgagatgtccatggttaacatcatgtatcagacctctctggctcaattccttaagctgtttgatcaaagcatggctcgaagtgagaagtccccactgccccaaaagagaatcactaacatcatcgaatatctgacctacgaggtgtttacttactctgtcaggggactctatgagaaccataaatttttgtttgtcttattgatgacattaaaaatcgacctgcagaggggcaccgtaaaacatcgcgagttccaagcactgattaaagggggggctgccctcgacttaaaagcctgtccaccaaaaccatatcggtggatccttgacatgacatggttgaacctcgtggagctgagcaaactgccacaatttgccgagatcatgaatcagattagccgtaatgaaaagggctggaagtcctggttcgacaaagacgcccccgaggaggaaattattcccgatgggtacaacgattctcttgatacctgtcacaagctgctcctgatcagatcatggtgccccgacaggacagtatttcaggcccgcaaatacattgctgactctctcgaggagaagtatacagagccagtgatcctcaacctcgagaagacttgggaggagtctgacactcgcacccccctcatctgctttctgagtatgggcagcgatcccaccaaccagatcgatgcactagctaagaagctgaaattggagtgccgaaccatatcgatgggtcagggccaggaagtccatgcgcggaagctgattcagatgtccatgcagcaggggggctgggtgttgctccagaattgccaccttggtttggagttcatggaggagctgctggaaaccctgatcactaccgaagcttcagacgacagtttccgagtttggattacaaccgaaccacacgacagattccctatcacgctgctgcagaccagcctgaagtttactaacgagccaccacaaggagtgcgagccgggctcaagcgaacattcgctggcattaaccaagacttgttagatatcagcaacttgcctatgtggaagcccatgctctatactgtggctttccttcattccacggtccaggagcggcgcaagttcggtcctctgggctggaacatcccgtacgagttcaactcagccgacttctccgcctcggtgcaatttatccaaaaccacttggatgaatgcgatattaaaaaaggagtaagctggaacaccgtgaggtatatgatcggcgaggtccagtacggtggacgagtcaccgacgactttgacaagagattactgaactgtttcgccagagtgtggttctccgagaaaatgttcgaaccgagcttctgtttctacacagggtacaaaattcctttgtgcaagaccctggatcagtactttgagtatattcaaagcttgccatctctagataaccccgaagtgttcggcctccatccaaacgccgacataacctaccagagtaacaccgcgtctgctgttcttgaaacaattactaacattcagcccaaagaaagcggcggaggggtaggagagacccgtgaagctattgtgtaccggttgagcgaggatatgctgtctaagctccctcctgactacatcccacatgaagtaaagagtcggctgatcaaaatgggccatttgaactctatgaatatatttctgaggcaggaaatcgatcgaatgcagcgggtgatctccatactccgaagctcgctttctgatctcaaattggcaattgagggaactatcattatgagtgaaaatctgagagacgccctcgacaatatgtacgatgcacggatcccacagctctggaaacgcgtgtcttgggactcctccaccctcggattctggttcactgaactcctcgaacgcaacgcacaatttagcacatggattttcgagggcagacccaatgtcttctggatgacaggcttcttcaacccccagggcttcttaaccgctatgcggcaggaagtcacgcgtgcccataaaggctgggccctggatacggtgacaatccacaatgaggttctcagacagaccaaggaggagattacgagccctccaggagaaggggtgtatatctatggcctttacatggacggcgcagcttgggatcgccgcaatggcaaactcatggaaagcacccctaaggtgctttttacacagctgcctgttttacacatcttcgctattaactctacagcgcccaaggacccgaagctttacgtgtgtccgatttataaaaaacctaggcggaccgatctgacttttatcaccgttgtctatctgcgcaccgttttgtccccagaccactggattttacgaggtgtagctctgctgtgtgatatcaagtag

SEQ ID NO: 303588 - DNA, 13365 bp, Artificial Sequence
  derived and/or modified sequence
atgatgaagctgtacatcgacaatgctgccccagacaagctgaagggcctgtgcatcttctttgtgcgctgcagaaatgatgtggccatcaacgtgaagaccatccaggaggaggccctcttcaccgtgctggatgccagcaagggcctgctgaatggcatccgggacatgctggccaacatcttcctgcctgctgtgctggccaccaacaactggggcgccctgaaccagagcaagcagggcgagagcgagaagcacatcttcacagagaccatcaaccgctacctgtccttcctggatggagcccgcatcagcattgagggcaccgtgaagctgaagaccatcgacaacgtgaacttcagcaagctgcacacctttgaggaggtgacagctgctgccagcaacagcgagaccgtgcaccagctggaggaggtgctgatggtgtggtacaagcagatcgagcaggtgctgattgagagcgagcagatgaggaaggaggccggggacagcggccccctgacagagctggagcactggaagaggatgtctgccaagttcaactacatcatcgagcagatcaagggccccagctgcaaggccgtcatcaacgtgctgaatgtggcccacagcaagctgctgaagaactggagggacctggatgcccgcatcacagacacagccaatgaaagcaaggacaacgtgcgctacctgtacaccctggagaaggtgtgccagcccctgtacaaccacgacctggtgtccatggcccacggcatccagaacctgatcaatgccatccgcatgatccacggcgtgagccgctactacaacaccagcgagaggatgaccagcctcttcatcaaggtgaccaaccagatggtgacagcctgcaaggcctacatcacagatggcggcctgaaccacgtgtgggaccaggagacccctgtggtgctgaagaagatccaggactgcatcttcctgttcaaggagtaccaggccagcttccacaagaccaggaagctgatcagcgagagcagcggggagaagagctttgaggtgtctgagatgtacatctttgggaagtttgaggccttctgcaagaggctggagaagatcacagagatgatcaccgtggtgcagacctacagcaccctgagcaacagcaccatcgagggcatcgacatcatggccatcaagttcaggaacatctaccagggcgtgaagaagaagcagtatgacatcctggaccccaggagaacagaatttgacacagacttcctggacttcatgaccaagatcaatggcctggaggtgcagatccaggccttcatgaacagcagctttgggaagatcctgagcagccagcaggccctgcagctgctgcagcgcttccagaagctgaacatcccctgcctgggcctggagatcaaccacaccatcgagcgcatcctgcagtactacgtggccgagctggatgccaccaagaagctgtaccacagccagaaggatgatcctcccctggccaggaacatgccacccatcgccggcaagatcctgtgggtgcggcagctgtaccgccgcatcagcgagcccatcaactacttcttcaagaacagcgacatcctgagcagcccagatggcaaggctgtgatccggcagtacaacaagatctcctatgtgctggtggagtttgaggtggtgtaccacacagcctggatccgggagatcagccagctgcactacgccctgcaggccaccctgtttgtgcgccaccctgagaccgggaagctgctggtgaactttgaccccaagatcctggaggtggtgcgggagaccaagtgcatgatcaagatgaagctggatgtgcctgagcaggccaagaggctgctgaagctggagagcaagctgaaggctgacaagctgtacctgcagggcctgctgcagtactatgatgagctgtgccaggaggtgcccagcgtgtttgtgaacctgatgacccccaagatgaagaaggtggagagcgtgctgcggcagggcctgactgtgctgacctggagcagcctgaccctggagagcttcttccaggaggtggagctggtgctggacatgttcaaccagctgctgaagaagatcagtgacctgtgtgagatgcacatcgacacagtgctgaaggagatcgccaagacagtgctgatcagcctgcctgagagcggggccaccaaggtggaggacatgctgaccctgaatgagacctacaccaaggagtgggccgacatcctgaaccacaagagcaagcacgtggaggaggccgtgcgggagctgatcagcatctttgagcagatctatgaggtgaagtacacaggcaaggtgggcaagcagagcgagcagaggaagcacgtggtgtttggcagcgagaccggggagggggagaacaatgactatgaggccaacatcgtgaatgaatttgacacccatgacaaggaggatgagttcaagaaggagtgcaaggaggtgtttgccttcttcagccaccagctgctggacagcctgcagaaggccacccggctgagcctggacaccatgaagaggcgcatctttgtggccagcctgtatggcaggaagcagagcgaggacatcatctccttcatcaagtctgaggtgcacctggccatccccaacgtggtgatgatccccagcctggatgacatccagcaggccatcaacaggatgatccagctgaccctggaggtgtcccggggcgtggcccactggggccagcagcagatccggcccatcaagagcgtcatccccagccccaccaccacagatgtgacccaccagaacacaggcaagctgctgaagaaggaggagaggagctttgaggaggccatcccagccaggaagctgaagaacttctacccaggagtggccgagcacaaggacatcagcaagctggtgctgctgctgagcagctctgtgaacagcctgaggaaggccgcccacgaggccctgcaggacttccagaagtacaagaccctgtggacagaggacagagatgtgaaggtgaaggagttcctggccaacaaccccagcctgacagagatccgctctgagatcctgcactacgccacctttgagcaggagattgatgagctgaagcccatcatcgtggtgggcgccctggagctgcacacagagcccatgaagctggccctgagcattgaggccaaggcctggaagatgctgctgtgccgctacctgaatgaggagtacaagaagaagatgagctacatgattgccttcatcaatgagtacctgaagaagctgagccggcccatccgggacctggatgatgtgcgctttgccatggaggccctgagctgcatccgggacaatgagatccagatggacatgaccctgggccccatcgaggaggcctatgccatcctgaacagatttgaggtggaggtgaccaaggaggagagcgaggccgtggacaccctgcgctacagcttcaacaagctgcagagcaaggctgtgtctgtgcaggaggacctggtgcaggtgcagcccaagttcaagagcaacctgctggagagcgtggaggtgttccgggaggatgtgatcaactttgctgaggcctatgagctggagggccccatggtgcccaacatccccccccaggaggccagcaaccggctgcagatcttccaggccagctttgatgacctgtggaggaagtttgtgacctacagcagtggagagcagctgtttggcctgcctgtgacagattatgaggtgctgcacaagaccaggaaggagctgaacctgctgcagaagctgtatggcctgtatgacacagtgatgagcagcatcagcggctactatgagatcctgtggggagatgtggacatcgagaagatcaatgctgagctgctggagttccagaaccgctgcaggaagctgcccaagggcctgaaggactggcaggccttcctggacctgaagaagagaattgatgacttcagcgagagctgccccctgctggagatgatgaccaacaaggccatgaagcagaggcactgggaccgcatcagcgagctgaccggcaccccatttgatgtggagagtgacagcttctgcctgaggaacatcatggaggcccccctgctgaagcacaaggatgacatcgaggacatctgcatcagcgccatcaaggagaaggacatcgaggccaagctgacccaggtgattgagaactggaccaaccagaacctgagctttgctgccttcaagggcaagggggagctgctgctgaagggcacagagagcggggagatcatcaccctgatggaggacagcctgatggtgctgggcagcctgctgagcaaccgctacaatgcccccttcaagaagaacatccagaactgggtgtacaagctgagcaccagcagtgacatcatcgaggagtggctggtggtgcagaacctgtgggtgtacctggaggccgtgtttgtgggcggggacatcgccaagcagctgccccaggaggccaagcgcttccagaacatcgacaagtcctggatcaagatcatgcagagggcccacgagaaccccaacgtcatcaactgctgcgtgggagatgagaccatgggccagctgctgccccacctgcacgagcagctggaggtgtgccagaagagcctgaccggctacctggagaagaagaggctgctcttcccccgcttcttctttgtgtctgaccctgtgctgctggagatcctgggccaggccagtgacagccacaccatccagccccacctgcctgctgtgtctgacaacatcaatgaggtgaccttccacgccaaggactatgaccgcatcatggccgtcatcagccgggagggggagaagatcgtgctggacaacagcgtgatggccaagggccctgtggagatctggctgctggacctgctgaagatgcagatgagcagcctgcacaacatcatccgcagcgccttctaccagatcagtgacagcggcttccagctgctgcccttcctgagccacttccctgcccaggtgggcctgctgggcatccagatgctgtggacccatgacagcgaggaggccctgagaaatgccaaggatgacaggaagatcatgcaggtgaccaaccagaagttcctggacatcctgaacaccctcatcagccagaccacccatgacctgagcaagtttgacagagtgaagtttgagaccctcatcaccatccacgtgcaccagagggacatctttgatgacctggtgaagatgcacatcaagagccccacagactttgagtggctgaagcagagccgcttctacttcaaggaggacctggaccagacagtggtgtccatcacagatgtggacttcatctaccagaatgagttcctgggctgcacagaccggctggtgatcacccccctgacagaccgctgctacatcaccctggcccaggccctgggcatgaacatgggcggggccccagctggccctgctggcaccgggaagacagagaccaccaaggacatgggccgctgcctgggcaagtatgtggtggtgttcaactgcagcgaccagatggacttccggggcctgggccgcatcttcaagggcctggcccagagcggctcctggggctgctttgatgagttcaacagaattgagctgcctgtgctgtctgtggccgcccagcagatctacatcgtgctgacagccaggaaggagaggaagaagcagttcatcttcagtgatggagactgtgtggacctgaaccctgagtttggcatcttcctgaccatgaaccctggctacgccggccggcaggagctgcctgagaacctgaagatccagttcagaacagtggccatgatggtgcctgaccggcaggtgcactatgactttggcctgaggaacatcctgtctgtgctgcggaccctgggcagccagaagagggcccggcctgaggacagcgagctgagcatcgtgatgaggggcctgcgggacatgaacctgagcaagctggtggatgaagatgagcccctcttcctgagcctcatcaatgacctcttccctggcctgcagctggacagcaacacctacgccgagctgcagaatgctgtggcccaccaggtgcagatcgagggcctcatcaaccaccccccctggaacctgaagctggtgcagctgtatgagaccagcctggtgcgccacggcctgatgaccctgggccccagcggcagcggcaagaccaccgtcatcaccatcctgatgaaggcccagacagaatgtggccggccccaccgggagatgaggatgaaccccaaggccatcacagccccccagatgtttggccgcctggacacagccaccaatgactggacagatggcatcttcagcaccctgtggaggaagaccctgaaggccaagaagggggagaacatcttcctgatcctggatggccctgtggatgccatctggattgagaacctgaacagcgtgctggatgacaacaagaccctgaccctggccaatggagaccgcatccccatggcccccagctgcaagctgctgtttgaggtgcacaacattgaaaatgccagccctgccaccgtgtccaggatgggcatggtgtacatcagcagcagcgccctgtcctggaggcccatcctgcaggcctggctgaagaagaggacagcccaggaggccgctgtgttcctgaccctgtatgagaaggtgtttgaggacacctacacctacatgaagctgaacctgaaccccaagatgcagctgctggagtgcaactacatcgtgcagagcctgaacctgctggagggcctcatccccagcaaggaggagggcggcgtgtcctgtgtggagcacctgcacaagctgtttgtgtttggcctgatgtggagcctgggcgccctgctggagctggagagccgggagaagctggaggccttcctgcggcagcacgagagcaagctggacctgcctgagatccccaagggcagcaaccagaccatgtatgagttctacgtgacagattatggagactgggagcactggaacaagaagctgcagccctactactaccccacagacagcatccctgagtacagcagcatcctggtgcccaacgtggacaacatccgcaccaacttcctgattgacaccatcgccaagcagcacaaggctgtgctgctgactggagagcagggcacagccaagacagtgatggtgaaggcctacctgaagaagtatgaccctgaggtgcagctgagcaagagcctgaacttcagcagcgccacagagcccatgatgttccagaggaccatcgagagctatgtggacaagagaattggcagcacctacggccccccaggcggcaggaagatgacagtgttcattgatgacatcaacatgcctgtgatcaatgagtggggagaccagatcaccaatgaaattgtgcggcagatgatggagatggagggcatgtacagcctggacaagccaggggacttcaccaccatcgtggatgtgcagctgattgctgccatgatccaccctgggggcggcagaaatgacatcccccagaggctgaagaggcagttcaccgtcttcaactgcaccctgcccagcaatgccagcattgacaagatcttcggcatcatcggctgcggctactttgacccctgccgctccttcaagccccagatctgtgagatgattgtgaacctggtgtctgtgggccgggtgctgtggcagtggaccaaggtgaagatgctgcccacccccagcaagttccactacatcttcaacctgcgggacctgagccgcatctggcagggcatgctgaccatcaaggccgaggagtgtgccagcatccccaccctgctgagcctcttcaagcatgaatgttcccgggtgattgctgaccgcttcatcaccccagaagatgagcagtggttcaatgcccacctgaccagggctgtggaggagaacattggaagtgatgctgccagctgcatcctgcctgagccctactttgtggacttcctgcgggagatgcctgagcccactggagatgagccagaagattctgtgtttgaggtgcccaagatctatgagctgatgcccagctttgacttcctggccgagaagctgcagttctaccagaggcagttcaatgagatcatccggggcaccagcctggacctggtgttcttcaaggatgccatgacccacctgatcaagatcagccgcatcatccgcaccagctgtggaaatgccctgctggtgggcgtgggcggcagcggcaagcagagcctgagccggctggccagcttcatcgccggctaccagatcttccagatcaccctgaccaggagctacaacgtgaccaacctgacagatgacctgaaggccctgtacaaggtggccggggctgatggcaagggcatcaccttcatcttcacagacagcgagatcaaggatgaggccttcctggagtacctgaacaacctgctgagcagtggagagatcagcaacctgtttgccagagatgagatggatgagatcacccagggcctcatctctgtgatgaagcgggagctgcccaggcacccccccacctttgacaacctgtatgagtacttcatcagccgcagcaggaagaacctgcacgtggtgctgtgcttcagccctgtgggggagaagttccgggcccggagcctgaagtttcctggcctcatcagcggctgcaccatggactggttcagccgctggccccgggaggccctgattgctgtggccagctacttcctgagtgactacaacatcgtgtgcagcagcgagatcaagaggcaggtggtggagaccatgggcctcttccatgacatggtgtctgagagctgtgagagctacttccagcgctacagaagaagagcccacgtgacccccaagagctacctgtccttcatcaatggctacaagaacatctatgcagagaaggtgaagttcatcaatgagcaggccgagaggatgaacatcggcctggacaagctgatggaggccagcgagagcgtggccaagctgagccaggacctggccgtgaaggagaaggagctggccgtggccagcatcaaggcagatgaggtgctggccgaggtgacagtgtctgcccaggccagcgccaagatcaagaatgaggtgcaggaggtgaaggacaaggcccagaagatcgtggatgaaattgattctgagaaggtgaaggccgagagcaagctggaggccgccaagccagccctggaggaggccgaggccgccctgaacaccatcaagcccaatgacatcgccaccgtgaggaagctggccaagccaccccacctgatcatgaggatcatggactgtgtgctgctgctcttccagaagaagattgatcctgtgaccatggaccctgagaagagctgctgcaagcccagctggggcgagagcctgaagctgatgtctgccaccggcttcctgtggagcctgcagcagttccccaaggacaccatcaatgaggagaccgtggagctgctgcagccctacttcaacatggatgactacacctttgaaagtgccaagaaggtgtgtggaaatgtggccggcctgctgtcctggaccctggccatggccatcttctacggcatcaaccgggaggtgctgcccctgaaggccaacctggccaagcaggagggccgcctggccgtggccaatgctgagctgggcaaggcccaggccctgctggatgagaagcaggccgagctggacaaggtgcaggccaagtttgatgctgccatgaatgagaagatggacctgctgaatgatgctgacacctgcaggaagaagatgcaggccgccagcaccctgattgatggcctgtctggagagaagatccgctggacccagcagagcaaggagttcaaggcccagatcaaccggctggtgggggacatcctgctgtgcaccggcttcctgagctacctgggccccttcaaccagatcttcaggaactacctgctgaaggaccagtgggagatggagctgcgggccaggaagatccccttcacagagaacctgaacctgatctccatgctggtggacccccccaccatcggggagtggggcctgcagggcctgcctggagatgacctgagcatccagaatggcatcatcgtgaccaaggccacccgctaccccctgctgattgacccccagacccagggcaagacctggatcaagagcaaggagaaggaaaatgacctgcaggtgaccagcctgaaccacaagtacttccgcacccacctggaggacagcctgagcctgggccggcccctgctgattgaggacatccacgaggagctggaccctgccctggacaacgtgctggagaagaacttcatcaagagcggcaccaccttcaaggtgaaggtgggggacaaggaatgtgacatcatggacaccttcaagctgtacatcaccaccaagctgcccaacccagccttcaccccagagatcaatgccaagacctctgtgattgacttcaccgtgaccatgaagggcctggagaaccagctgctgcggcgggtcatcctgacagagaagcaggagctggaggccgagcgggtgaagctgctggaggatgtgaccttcaacaagaggaagatgaaggagctggaggacaacctgctgtacaagctgagcgccaccaagggcagcctggtggatgatgagagcctgattggagtgctgcggaccaccaagcagacagctgctgaggtgtctgagaagctgcacgtggccgctgagacagagatcaagatcaatgctgcccaggaggagttccggcctgctgccacccggggcagcatcctgtacttcctgatcacagagatgtccatggtgaacatcatgtaccagaccagcctggcccagttcctgaagctgtttgaccagagcatggcccggtctgagaagagccccctgccccagaagaggatcaccaacatcatcgagtacctgacctatgaggtgttcacctacagcgtgcggggcctgtatgagaaccacaagttcctgtttgtgctgctgatgaccctgaagattgacctgcagaggggcaccgtgaagcaccgggagttccaggccctgatcaagggcggggccgccctggacctgaaggcctgcccccccaagccctaccgctggatcctggacatgacctggctgaacctggtggagctgagcaagctgccccagtttgctgagatcatgaaccagatcagcagaaatgagaagggctggaagtcctggtttgacaaggatgcccctgaggaggagatcatcccagatggctacaatgacagcctggacacctgccacaagctgctgctgatccgctcctggtgcccagacagaacagtgttccaggccaggaagtacatcgctgacagcctggaggagaagtacacagagcccgtcatcctgaacctggagaagacctgggaggagagtgacaccaggacccccctcatctgcttcctgtccatgggcagtgaccccaccaaccagattgatgccctggccaagaagctgaagctggagtgcaggaccatctccatgggccagggccaggaggtgcacgccaggaagctgatccagatgtccatgcagcagggcggctgggtgctgctgcagaactgccacctgggcctggagttcatggaggagctgctggagaccctcatcaccacagaggccagtgatgacagcttccgggtgtggatcaccacagagccccatgaccgcttccccatcaccctgctgcagaccagcctgaagttcaccaatgagcccccccagggcgtgcgggccggcctgaagaggacctttgctggcatcaaccaggacctgctggacatcagcaacctgcccatgtggaagcccatgctgtacacagtggccttcctgcacagcacagtgcaggagaggaggaagtttggccccctgggctggaacatcccctatgagttcaacagcgctgacttcagcgcctctgtgcagttcatccagaaccacctggatgaatgtgacatcaagaagggcgtgtcctggaacacagtgcgctacatgattggagaggtgcagtatggaggccgggtgacagatgactttgacaagaggctgctgaactgctttgcccgggtgtggttcagcgagaagatgtttgagcccagcttctgcttctacacaggctacaagatccccctgtgcaagaccctggaccagtactttgagtacatccagagcctgcccagcctggacaaccctgaggtgtttggcctgcaccccaatgctgacatcacctaccagagcaacacagccagcgctgtgctggagaccatcaccaacatccagcccaaggagagcggcggcggcgtgggggagacccgggaggccatcgtgtaccgcctgtctgaggacatgctgagcaagctgcccccagactacatcccccatgaggtgaagagccgcctcatcaagatgggccacctgaacagcatgaacatcttcctgcggcaggagattgacaggatgcagagggtcatcagcatcctgcggagcagcctgagtgacctgaagctggccatcgagggcaccatcatcatgtctgagaacctgagagatgccctggacaacatgtatgatgcccgcatcccccagctgtggaagagggtgtcctgggacagcagcaccctgggcttctggttcacagagctgctggagagaaatgcccagttcagcacctggatctttgagggccggcccaacgtgttctggatgacaggcttcttcaacccccagggcttcctgacagccatgaggcaggaggtgacccgggcccacaagggctgggccctggacacagtgaccatccacaatgaggtgctgcggcagaccaaggaggagatcaccagccccccaggagaaggagtgtacatctacggcctgtacatggatggagctgcctgggacagaagaaatggcaagctgatggagagcacccccaaggtgctcttcacccagctgcctgtgctgcacatctttgccatcaacagcacagcccccaaggaccccaagctgtatgtgtgccccatctacaagaagcccaggagaacagacctgaccttcatcaccgtggtgtacctgaggacagtgctgagcccagaccactggatcctgcggggcgtggccctgctgtgtgacatcaagtag

SEQ ID NO: 303589 - DNA, 13365 bp, Artificial Sequence
  derived and/or modified sequence
atgatgaagctgtacatcgacaacgccgcccccgacaagctgaagggactgtgtatcttcttcgtgagatgtcggaatgacgtcgctatcaacgtaaagactattcaggaggaggccctcttcacagtgctggacgctagtaaaggtctactaaatgggatcagagacatgctggccaacatttttcttcccgctgtgttggccaccaataactggggagctctgaaccagtccaaacagggcgagagtgaaaagcacattttcactgagaccattaaccgatacctgtcattcctggacggggcaagaatatccatcgaggggacggtgaagctgaagactattgataatgtgaatttcagtaagctgcatacatttgaggaggtaaccgccgccgcctcaaactccgagaccgtgcatcagctagaggaggtcctgatggtgtggtataagcagattgagcaggtgcttatcgagtcggagcagatgagaaaggaggctggtgactcgggaccgcttactgagctggagcactggaaacgaatgagcgccaagtttaactacatcatcgaacagatcaaaggaccttcttgtaaagccgtgatcaacgtactcaacgtggcccactctaagctcctcaaaaactggagagacctcgatgctaggataaccgataccgcgaatgagtcaaaagacaacgtccgttatctctataccttggaaaaggtgtgtcagcccctgtacaaccatgacctggtttctatggcacacggtattcagaacctgatcaatgctatcaggatgatccacggcgttagccggtactataacacctctgagcgcatgacatctctcttcatcaaggtaacaaatcagatggttactgcttgtaaagcgtatatcactgatggtggcctgaatcacgtgtgggaccaggagacaccagtagtacttaaaaagatccaggattgtatctttttattcaaagaatatcaggccagcttccacaaaactcggaaactcataagcgaatcatctggggagaagagtttcgaagtgagcgagatgtacatcttcggcaagttcgaagcattttgcaaacgcctcgagaagattacagagatgatcaccgtggtgcagacatacagtacactgtccaattcaaccattgaaggaattgacattatggccataaaattcagaaacatttatcagggggtaaaaaaaaaacagtatgatattctggatccccggaggaccgagtttgacaccgattttcttgactttatgaccaagataaacggtttggaggtgcagatccaggccttcatgaactccagctttggaaagatcttatcttctcaacaggccctgcagctgctgcaacgttttcagaagctgaacattccatgtcttggcctggaaataaaccacaccatcgagcggatcctccagtattatgtcgccgaactggatgcaaccaaaaaactgtaccatagccagaaggacgacccacctctggcccgtaatatgcccccaattgctggcaagatcctctgggttagacagctctaccggagaatctctgagccaatcaactatttctttaagaatagcgacatcctgagcagtccggacggtaaagccgtcatcagacagtacaacaagatcagttatgtcttagtggaattcgaagtcgtctaccatacagcttggatccgtgaaatcagccagctgcattacgccctccaggcaaccttatttgtgcgtcatcccgagaccggcaaactactggtgaactttgaccccaagatcctggaagtggtaagagaaacaaagtgtatgattaagatgaagctggacgtcccagagcaggccaaaaggctgctgaaattggaatcgaaattgaaggcagataaattgtatcttcagggcctcctgcaatattatgacgagctgtgtcaggaggtccccagcgtttttgtgaatctgatgacccccaaaatgaagaaggtcgagtccgttttgcggcagggtctcacagtgttgacatggagctccctgaccttggagtccttcttccaggaagtagaattggtcctggacatgttcaaccagttgcttaagaagatcagtgacttgtgcgagatgcacattgacaccgtcttaaaggaaatcgccaaaaccgtcttaatctcattaccagagagcggggcgaccaaagtagaggatatgctgactctcaacgagacctacaccaaggaatgggccgatatccttaaccacaaaagtaagcacgtcgaggaggccgtgcgagagcttatttcaatattcgagcagatttatgaggtgaagtacactgggaaggtgggcaagcaatccgaacaacgaaagcacgtagtctttgggagcgaaaccggcgaaggcgaaaacaatgactacgaagctaatattgtgaacgaatttgatacgcatgacaaggaggatgaatttaaaaaggagtgtaaggaggtgttcgcgtttttcagccatcagctgctagactctctgcaaaaagctacccgattgtccctggacaccatgaagcggcgcatctttgtagcatcactctatggcagaaaacagagtgaggacatcatctcctttatcaaaagcgaagtgcacctagctattccaaacgtcgtgatgatcccctcactcgatgatatccaacaggcaataaatcgtatgatacagctgaccctggaagtatcacgaggggtggctcactgggggcagcagcagatccgtcctattaagagcgtgattccctcccctaccacaaccgacgtgacccaccaaaacaccggaaagctgttgaagaaggaagagaggagtttcgaagaagctattcctgcgcggaaactgaaaaacttctacccgggagtcgctgaacacaaggatattagcaaactcgtgctgctcctgagctcaagcgttaactctctgcggaaggccgcacatgaggcgctacaggatttccagaaatacaagactttgtggaccgaggatcgtgacgtgaaagtcaaagagttcctggctaataacccgagcttaacagagattcggtccgagatcctgcactacgcaaccttcgaacaagaaatagacgagctgaaacccatcatcgtggtgggcgctctcgaactccacacagaacccatgaaactggcgctgagcatcgaggccaaggcctggaagatgctactgtgccggtatcttaacgaagagtataagaaaaagatgagctatatgatagcatttattaacgaatacctgaagaagctctctaggccgatcagagacctggatgatgttcgctttgcaatggaggcgctgtcttgcattagagacaacgagatacaaatggatatgactctgggcccaattgaggaggcgtacgcgatcctgaatcgttttgaggtggaggtcactaaagaggagtccgaagcagtggacaccctgcggtattcttttaataagctgcagtctaaggcagtgtccgtccaggaggaccttgtgcaggtacagcccaaatttaaatcaaatttgctggaatccgtggaagtgtttagggaggatgtcattaactttgccgaggcctatgaattggaaggcccaatggttcctaatattcctcctcaggaagctagtaaccggctgcagatattccaggccagcttcgatgatttgtggagaaagtttgtgacatacagcagtggggaacagctttttgggctacccgtgaccgattatgaggtgctccacaaaacccggaaggaactgaatctgctgcaaaaactctacggactctacgatactgtaatgtcctcaatctccggatattacgaaatcctgtggggcgacgtggatatagaaaaaatcaatgccgagctcctagaattccagaatcggtgcagaaagttgccaaaaggacttaaggactggcaggcctttttggacttgaagaagcggattgacgacttctctgaatcttgcccgctgttggagatgatgacaaacaaggccatgaagcagagacattgggatcgcatttctgagctcaccggcaccccattcgacgtagagtctgatagtttctgcctgagaaacataatggaggctccactgctcaaacacaaggacgacatcgaggacatatgcatctcagccattaaggagaaagacattgaggcaaaacttacacaggtgatcgaaaattggacaaatcaaaacctgtcctttgcagcttttaaggggaaaggcgaacttctgctgaaaggcaccgagtctggggagatcatcactctaatggaagacagcctgatggtgctcgggtccttattatcaaacaggtataatgcaccctttaaaaaaaacatccagaattgggtctataagctctccacatcatcagacattatcgaggagtggctggtggtgcagaacctctgggtgtacctcgaagcagtcttcgttggaggggatatcgccaagcagctcccacaggaagccaaacggtttcagaacatagataaatcctggattaagataatgcaaagagcccacgagaaccctaacgtcattaattgttgtgtcggagatgaaacgatgggtcagctcttgcctcacctccacgaacagctggaggtttgtcagaagtcactcactggatacctggagaagaagaggctgttgttcccacgattcttctttgtgtctgacccggtgttgctcgaaatactcggtcaggccagcgactcccatacaatacagccccatcttcccgctgtgagcgataatatcaacgaagtgacatttcatgctaaagactatgaccggatcatggcagtcatctctcgcgaaggggagaagattgttctggacaactccgtgatggcaaaagggcccgttgagatctggctgcttgacctattaaagatgcaaatgtctagccttcacaatattattaggagcgctttctatcaaatctcagattcgggctttcagctcctgcctttcctctctcacttccccgcccaggtcggtctgctagggatacagatgctttggacacatgattcagaggaggccctacgcaatgcgaaagatgaccgtaagattatgcaggtgaccaatcagaagttcttggacatcctgaataccctgatttcccagacaactcacgacctttctaaattcgatcgggtaaaattcgaaaccctcattaccatccatgtccatcagagggatatctttgatgacttggtgaaaatgcacataaagtctcctactgatttcgaatggctaaagcagagtcgcttctacttcaaggaagatctcgatcaaaccgtggtttctatcactgatgtcgattttatttaccagaatgaatttctcggatgcaccgatcggttggttattacccctctcacagataggtgctacatcacactggcacaggctctcggaatgaacatggggggtgcgccagctggcccagccggtacagggaaaacagaaacaacaaaagacatggggaggtgcctgggaaagtatgtggtggttttcaattgcagtgatcaaatggattttcggggcctgggacggatctttaagggccttgcccagagtgggagttggggatgtttcgatgaatttaataggatcgagcttcccgtgctgtcagtagcagcccagcagatctatattgtcctgacagctagaaaggagcgcaagaagcagttcatcttctcggatggcgactgtgtcgatctgaatccagagttcggcattttcctgacaatgaatccagggtacgcggggaggcaggaattaccagaaaacctgaagattcagtttcgaaccgtcgccatgatggtccccgataggcaggttcactacgacttcggcctgcgcaacatcctgtccgtgctccggacactcggcagtcagaagagggcccggccagaggatagcgagttgagtattgtgatgcgggggcttcgcgacatgaatctgtcaaaactagtggatgaggacgagccactttttctgtctctcattaatgatcttttccctggactgcagctggattccaacacctacgcggaattgcagaacgctgttgcccatcaggtgcagatcgaaggcttgataaaccacccaccttggaacctgaagctcgtgcagctctatgaaacctcactggtaaggcatgggctcatgaccctcgggcccagcggctcagggaaaactacagtcatcaccatcctcatgaaggcacagactgagtgcggtagaccacatagggaaatgaggatgaatccgaaggcgatcaccgcaccccaaatgtttgggaggttggacaccgcaaccaatgactggacagacggcatcttctcaacactgtggcgaaagacacttaaagccaaaaaaggggagaatatttttctgatcttggacggcccagtggacgccatttggattgagaatctgaactcagtgttagacgacaataaaactctgacgcttgcgaatggagatcgcatacccatggcaccatcctgcaaacttttatttgaggtgcacaacattgaaaacgcttccccagccacagtgagcagaatgggcatggtgtacatctcttccagcgcactgtcttggagacccatccttcaagcttggctcaagaagaggacagcgcaggaagccgccgtgttcctcaccctttacgaaaaggtgtttgaagacacctacacgtacatgaaactgaatctgaatcccaaaatgcaactgcttgagtgtaattatatcgtacagtctctgaacctgctcgaaggactgattccgtctaaggaggaagggggagtgagctgcgttgagcatctgcataaacttttcgtgtttggcctcatgtggagtctgggtgcactgttggagttagagtccagagagaagctggaagcttttcttaggcagcatgaaagcaaactcgacctacccgagatccctaagggtagcaaccagaccatgtacgagttctacgtaaccgattacggggactgggaacactggaacaaaaaactgcagccctattattatcctaccgactcaattcctgaatatagcagcatactggtccccaacgtggacaatatccgtaccaacttcctcatagatactattgcgaaacagcataaagctgttctactgactggtgagcaggggacagccaagaccgtgatggtgaaagcttaccttaaaaagtatgaccccgaggtgcaactatccaagtccttgaactttagtagtgccaccgaaccaatgatgtttcagcggacaatcgagagttacgtcgacaagcgcataggctcgacatacgggccaccggggggccggaaaatgaccgtgtttattgacgacatcaatatgcccgtcattaatgaatggggagaccagattaccaatgaaattgttcgacagatgatggagatggagggcatgtacagcctggataaaccaggggatttcaccactattgtggacgttcagctcattgctgctatgattcacccaggtggtggtcggaatgatattccacagcggttgaagcggcagtttacggtttttaactgtactctccccagcaatgcctctattgacaaaattttcggaatcataggctgtggttatttcgacccgtgccgctcttttaagccccagatctgcgaaatgatcgttaacctcgtgagcgtaggaagagtgctgtggcaatggaccaaggtgaaaatgctgcccaccccctctaaattccattatatatttaatcttagagatttgtcccggatctggcagggcatgctcaccataaaggccgaagagtgcgccagtattcctactctgctgtccctcttcaaacatgagtgctcccgggtcatagctgaccggttcatcacacccgaagatgaacagtggtttaacgctcacttaacgagggcagtcgaggagaacatcggttccgacgccgcttcctgtatcttaccagaaccatatttcgtggacttcctacgcgaaatgcccgagcctactggcgacgaacccgaagatagcgtgtttgaagtccctaagatttatgaactcatgcctagttttgacttcctggctgagaaattgcagttctaccagaggcagttcaatgagattatccgcgggacaagtttggacctggtgtttttcaaggatgccatgactcacttaatcaagatatcccgaatcatcagaaccagttgcggaaatgccctattagttggcgttgggggctctggcaagcagagcctcagtagactcgcaagcttcattgctggttaccagatttttcagataaccttaacacgctcttataacgtgactaacctcaccgacgatcttaaggccctgtataaggttgctggagcggacggcaaaggcataacctttatatttactgactccgagatcaaggatgaggccttcctggagtatttgaataatcttcttagttcaggggagattagcaatttattcgcaagagacgagatggacgagatcacgcaaggcctgattagcgtgatgaagcgggagctgcctcgtcatcccccgacctttgataatttatatgaatatttcatctcccgttctaggaaaaatttacacgttgttctgtgcttttccccagtgggtgaaaagtttagggcgcgctcactgaagttccccggcttgatatctggttgcactatggactggttttctcggtggccaagagaggccctgatcgctgtggccagttacttcttgagcgactacaatatcgtgtgcagctcagaaattaagcgacaggtcgtcgaaacaatggggttgtttcatgacatggtttcggagtcttgtgagagctactttcagaggtatcggcgtagagcacacgtgacaccgaaatcatatttatctttcattaacggatataagaacatctatgccgaaaaagtaaaatttatcaacgagcaggctgagcgaatgaatattggcctcgacaagctgatggaggccagcgaatcagtcgcgaaactctctcaggacctcgctgttaaggagaaagagctcgccgttgcttctattaaagcggatgaggttcttgcagaggttacggtcagtgcacaggccagcgctaagatcaaaaacgaagtgcaagaggtgaaggacaaggcccagaaaatcgtggacgaaatcgactcagagaaggtgaaggcagagtcaaagctggaggcagctaagccggcactggaagaagcagaggctgccctcaacacaatcaagccgaatgacattgccaccgtgaggaaactggccaaaccaccacatctgatcatgaggatcatggactgtgtgctgcttctgtttcagaaaaaaatcgatcctgtgactatggaccccgaaaaatcttgttgcaagccttcgtggggtgagagcctgaagctaatgtcggccaccggattcctatggtctttacagcagttccctaaagacacaatcaatgaagaaactgtggaattgctccagccgtacttcaacatggacgattatactttcgagagcgccaagaaggtgtgcggcaacgtggctgggctcctcagttggactctggctatggctatattctatggaattaatagggaggtactacctctgaaggccaatttggctaaacaagaggggcgtctggcagtggccaatgctgaactggggaaggcccaagccctgctcgacgaaaagcaagccgagttggacaaggtccaggccaaattcgatgcggccatgaatgaaaagatggatcttctcaatgacgctgatacatgcaggaagaaaatgcaggctgccagcaccctaattgacggtctgtccggagagaaaattagatggacccagcagtcaaaagagttcaaagcccagataaatcgcttagtgggcgacatacttttgtgtaccgggttcctgtcttaccttggcccattcaatcagattttcaggaattacctgctgaaggatcagtgggaaatggagctcagagcacgcaagattccattcaccgagaatctcaatttaatttccatgctcgttgacccgcccaccataggagagtgggggctccaaggtctccccggagacgatctttcaatccagaacggaataatcgtgactaaagcaacacgctaccccctgttgatcgatccccaaacacaagggaaaacctggatcaaatcaaaggagaaggagaacgatctacaggtgacatcattgaatcacaagtactttagaacccatctggaggattccctcagcctggggcgccccttgctaattgaagatattcatgaggagctggatcccgcgttggacaacgtgctggagaagaacttcataaaatcgggcaccacatttaaggtgaaagtgggggacaaggaatgcgatatcatggacacattcaaactatacattaccacaaagctgcctaaccccgcattcacccccgagattaatgccaaaacaagtgtgattgatttcaccgttaccatgaagggtctcgaaaatcaactcctaagaagggttattctgacggaaaaacaggagttagaggccgagcgggtgaagctgctggaagacgttacttttaacaagagaaaaatgaaggaattggaggataatcttctgtacaaattaagcgccactaaggggagcttggtggatgatgagtctctgattggggtcttgcgcactacaaagcagacggccgctgaagtgtcagagaaattgcatgtggccgctgagaccgagatcaagattaatgccgcccaggaagagtttcgacccgccgcaacacgtggctctatcctgtattttctgattactgaaatgtccatggttaacattatgtaccagaccagtctcgctcagttcttgaaattatttgaccagagtatggcacgttccgaaaaatctcctctcccccaaaagcggatcaccaatatcattgagtatctgacgtacgaggttttcacttactccgtccgaggtctgtacgagaaccacaagtttctgttcgtcctgctgatgactctgaaaatcgacctgcaacgcggaacggtgaaacaccgtgagtttcaggccctgatcaaagggggcgccgctcttgacctgaaggcctgtccacctaaaccctatcgttggatactagatatgacgtggttaaatctggtagagctgtctaaattgccgcagtttgctgagatcatgaaccaaattagccgtaatgagaagggctggaagtcatggttcgataaggatgcccccgaggaggagatcatccctgatgggtataacgattctctggacacatgtcacaagcttctccttattaggagctggtgcccagaccgcacagtattccaagcacgaaaatatatcgccgactctctggaggagaagtacacagagcccgtcatcttgaacctcgagaagacctgggaagagagcgataccaggaccccactgatttgtttcttgtccatgggctccgaccccacaaatcagattgatgctttggctaagaagctgaagttagagtgtcgaaccatttccatggggcaagggcaggaagtccacgctcggaagctcatccagatgagcatgcagcagggcggctgggtgctcctccaaaactgtcacctcggcctggaatttatggaggagcttctagaaacactcataacgactgaggcttctgacgattcatttagggtttggatcacaactgaacctcatgataggttccccatcacacttttgcagacttcactgaaattcactaatgaaccaccacaaggcgtgcgcgctggcctgaaacggaccttcgccgggataaatcaggacttactcgacatttccaatctgccgatgtggaaacccatgctttatactgttgctttcctgcacagcacagtgcaggagcggcgtaaattcgggccattaggctggaatattccctatgaatttaactccgccgattttagtgcatcagtgcagtttatccagaaccacttggacgaatgtgatataaagaaaggggtgtcatggaatacggtgaggtatatgatcggcgaggtgcagtatggaggtagagtgaccgatgacttcgacaaacgcctcctgaattgcttcgcccgtgtgtggttctctgaaaagatgtttgaacccagtttttgtttttacacaggctacaagatacccttgtgcaagacgttggatcaatactttgaatatattcagtcactgccatccctagacaaccctgaggtgtttgggctccatccgaatgcagacattacctaccaatctaatacagccagcgccgtcctcgagactattaccaacatacaacccaaagagtccggcggcggcgtgggggaaaccagagaggctatcgtctaccgtctttcagaggacatgcttagcaagctgcctcccgactacatcccgcacgaagttaagtctaggttaattaaaatgggccatctgaactccatgaacatattccttcgacaggagatcgataggatgcagcgggtgattagtattcttaggtcctcccttagcgacctgaagttagccattgagggcacaataatcatgagtgaaaacctgagagacgctctagataatatgtacgatgcaagaattccccagttgtggaagcgggtaagttgggattcatcgacccttgggttttggtttactgagctccttgagcggaatgcccagttctctacttggattttcgaggggcgaccaaatgttttctggatgacgggtttctttaacccccagggcttcctgactgccatgcgtcaggaagttacacgcgcccacaaggggtgggccctggatacggtaacaatccataacgaagtattaaggcaaaccaaggaggagatcacttcccccccaggggaaggtgtctacatctacggcctttatatggatggggctgcctgggatagacggaacggaaagctcatggagtctacacccaaggtcctgtttactcagcttcccgtgctgcacatttttgccataaattctactgcgccgaaagatcccaagctgtatgtatgtcccatctataaaaaacccagacgaaccgacctcacattcattaccgtggtgtatctgagaacggtgctgtcacctgaccactggatcctgcgcggagtcgcgctcttgtgcgacatcaaatag

SEQ ID NO: 303590 - DNA, 13365 bp, Artificial Sequence
  derived and/or modified sequence
atgatgaaactctacatcgacaacgcagcaccggacaaactaaaggggctgtgcatcttcttcgtgcgctgtagaaatgatgttgccataaatgtaaaaacaattcaggaagaggcattatttaccgtactggacgcctcaaaaggactcctcaatggcatacgggacatgctggctaacattttcctgccagccgtattggctactaataattggggagctttgaaccagtccaagcagggcgaatctgagaaacacatctttaccgaaacgatcaaccgatacctgagcttcctggacggggctaggatcagtatcgaaggaaccgtgaagctgaagaccatcgacaacgtcaatttttccaagctgcataccttcgaggaggtcacagcggcagctagcaatagtgagacagtgcaccagcttgaggaggtccttatggtttggtataaacaaatagaacaagtcttgatcgagagtgaacagatgagaaaagaggctggtgacagtggacctctgacggagctagagcactggaaacgaatgagtgctaaattcaattatattattgagcagattaaagggccatcctgcaaagccgtgattaacgtgcttaatgtggcccactctaaattgcttaaaaactggcgggatctcgacgccagaatcactgacacagcaaacgaatcaaaagacaacgttcggtatttatataccctcgagaaggtctgccagcccctatacaaccacgatttagtgtccatggcgcatggtattcagaaccttattaacgccatccgtatgatccacggggtgagcagatactataatacgtctgagcggatgacaagtctgtttatcaaagtgaccaaccagatggtgacagcttgcaaggcttatattaccgatggaggcctaaatcacgtgtgggaccaggaaacaccagtggtactgaaaaaaatccaagattgcatctttttattcaaggaatatcaagccagcttccacaagacgaggaagctgatatccgagtcaagcggcgaaaagagctttgaggtgagcgaaatgtatatatttggtaagtttgaggctttctgtaagaggttggaaaagattaccgagatgatcaccgtggtccagacatattcgacattgtctaacagcaccatcgaaggaatagatatcatggctatcaagtttagaaatatttaccaaggtgtcaagaagaaacagtatgatatcctggatccgcgtcgaacagaattcgacaccgacttccttgactttatgaccaaaatcaatgggttggaggtgcagatccaggcctttatgaattcttccttcgggaaaatcctgtcatctcagcaggcactgcaattgctgcagaggttccaaaagctcaatattccgtgtctgggcttggaaattaatcatacaatagagcgcattctgcagtattatgtggccgaattggacgctacgaagaaattataccactcccagaaggacgacccccctctcgccagaaacatgccaccaatagctggaaagattctgtgggttcgccagctgtaccgcagaatttcagaacccattaactacttcttcaaaaacagcgacattctgagttcacccgacggaaaagcagtgatccggcagtacaataaaatctcttatgtgctagtagaatttgaagtggtgtatcataccgcctggatcagagagatatcccagttgcattatgccctgcaggccactctatttgtgcgtcaccccgagaccggaaaactgctggtaaacttcgaccccaaaatactagaggtcgttagagaaaccaaatgtatgatcaaaatgaaactcgacgtccctgagcaggccaagcggcttttaaagctggagagtaaactgaaggccgacaagctctacctacaaggactcttacaatactatgacgagctgtgtcaggaggtgcctagcgtgtttgtgaatttgatgacgcccaagatgaaaaaggttgaaagtgttctacgacaggggctaacagtcctgacctggtccagcttaaccctggagtctttcttccaggaagtggagcttgtccttgacatgtttaatcagctcctcaaaaagatctctgacctgtgtgagatgcacatcgacacggtgctcaaagaaatagccaaaactgtcttaataagcttgccggagagcggagccacgaaagtggaggacatgctcacacttaacgagacctataccaaagaatgggcagatattctgaatcacaaaagcaagcatgtggaggaggcagtgagagagttaatttcgatctttgagcaaatctacgaagttaagtatacaggaaaagtcggcaaacaaagcgaacagagaaaacatgtggtgttcggatccgaaacaggtgagggtgaaaataatgattatgaggcaaatatcgtgaatgaattcgatactcatgacaaggaagatgagtttaagaaggaatgtaaagaagtgtttgcctttttcagccaccagctccttgactccttgcagaaggcaacaagattatccctagacaccatgaaacgcaggattttcgtggcgtctctgtatgggaggaagcagtcagaagacatcatcagtttcataaaatccgaagtgcacctcgctatccctaacgtggtgatgataccttccctggacgacatccaacaagcgataaacaggatgatacagctgaccttggaagtttcccggggtgtggcccactggggtcagcagcaaatacgtccaattaaaagtgtcatcccatctcctacgacgaccgatgtcacacatcagaacaccgggaagctgctgaagaaggaggagcgttcgtttgaggaagccatacccgcaagaaagctgaagaacttctacccaggagtcgcagagcacaaggatatctccaagctggtcttgctgctctccagcagtgttaactctctcagaaaggccgctcacgaggcccttcaggatttccagaagtataagactctgtggaccgaagaccgcgacgttaaagtgaaggagtttctcgcgaacaatcccagtctcactgaaataagaagcgaaatactgcattacgcaacgtttgagcaggagattgacgaacttaagccaattattgtcgtaggcgcacttgaactgcacaccgagcccatgaaactggctctctcaattgaagccaaggcgtggaaaatgctcctgtgtaggtacctgaatgaagaatacaaaaagaaaatgagctacatgatcgcttttatcaacgaatacctaaaaaaactgtccagacctataagggacctagatgacgtccgctttgcgatggaggccctctcatgtatacgcgataacgaaatccagatggacatgactctcggaccgatagaggaggcttacgcaattctcaacagatttgaagtagaggtcactaaagaagaatctgaggcagttgataccctgcgatatagcttcaataaactacagtccaaggcggtgtctgtccaggaggacctagtccaggtgcaacccaaattcaaatctaatttgttagagtctgtggaagtttttcgcgaggatgtcatcaacttcgccgaagcgtacgagctcgagggaccgatggtgcctaacattcctccccaggaggcaagcaatcgtctccagatctttcaggcgtcctttgatgacctgtggagaaagttcgtgacctacagtagtggcgaacagctgtttggtctgcccgtgacggactacgaggttctgcacaagactcggaaggaactgaatctgctgcagaagctttatgggctctatgacaccgtgatgtcttcaatttcagggtactatgaaatcctgtggggcgacgttgacatcgagaaaataaacgccgaactgttggaatttcagaaccggtgtaggaaactcccaaagggcctgaaggattggcaggcgtttctcgatctcaagaaacgtattgacgacttcagtgagtcgtgtcccttactggagatgatgaccaataaggcgatgaaacagaggcactgggatagaatcagcgagctgacaggaacaccgtttgacgtggagagtgacagcttctgtttgcgaaatatcatggaggctcctttactcaagcataaggatgacatcgaagacatttgcatctccgctattaaagaaaaggacatcgaagccaaactcacacaagtgatcgaaaactggacaaatcagaatctgtcattcgcagccttcaaaggcaagggagaacttctcttgaaggggactgagagcggtgagatcattacgctgatggaggattcactgatggtgctgggatcccttctgagcaaccgctacaatgcaccgttcaaaaagaacatccagaactgggtttataaactctctacctccagcgacattattgaggaatggctcgtggtacaaaatctgtgggtctacctcgaggcggtgtttgtgggaggtgacattgctaagcagttgccccaagaagctaaaaggtttcagaacatcgacaagagttggatcaaaattatgcagcgggctcacgagaaccctaacgttattaattgttgcgttggtgatgaaacaatggggcagctcctgccccaccttcacgagcagctggaggtgtgtcagaagtctttgaccggctacttagaaaagaagcggctcctgtttccacgattcttttttgtgtccgatccagtcttgctggaaatcctcggccaggcctctgactcgcacacgatccagccacacctacctgcagttagcgacaatatcaacgaagtgacatttcacgctaaggactacgataggattatggccgtcatttcaagggaaggtgaaaaaatcgtcctagataatagcgtgatggcaaagggaccagtcgagatatggctcctggaccttctgaaaatgcaaatgtcatcgcttcacaatattattcggagcgccttctatcagatttcagacagtggttttcagctgcttccattcctctcccactttcccgctcaggtgggattgttgggaatccagatgctttggacgcacgactcagaggaagccttgcgaaatgccaaagatgaccgcaagataatgcaagtgacaaatcagaaattccttgatatcctgaacacgctgatatcgcagaccacgcacgatctgtccaagtttgacagagtgaagttcgagacacttattaccatccacgtgcaccagagggatatctttgacgatctggttaaaatgcacatcaagagcccaacagacttcgagtggctcaaacaaagccgcttttattttaaggaggacctggaccagaccgttgtctccattaccgatgtggactttatatatcagaatgagtttctcggttgcactgatcgactggtcatcacccctctcactgataggtgttatatcacgctcgctcaggctctgggcatgaacatggggggagccccagctggacccgcaggcactgggaaaacagagaccactaaagacatgggcagatgcttggggaaatatgtcgttgtttttaactgcagcgaccagatggactttcggggactggggaggatctttaagggcctggcgcagtctggatcctggggctgttttgacgaatttaaccggattgaactgccagttttgagtgtagctgctcaacaaatctacatcgtgctcaccgcacggaaagagagaaagaaacagtttatctttagcgatggcgattgtgtggacctcaacccagagttcggaattttcctcactatgaaccctggatatgcaggccgtcaggagttgccagagaatctcaagatccaattcaggactgttgccatgatggttcctgataggcaggtgcattatgacttcggcttgagaaacatccttagtgttctccgtacattaggaagtcagaaacgtgctaggcccgaggattcagaactctctatcgtgatgcgcggactgcgagacatgaacctttcgaaactagttgatgaggacgagccgctgttcctctctctgattaacgacctgtttcctggcctccagcttgatagtaacacatacgccgagctgcagaacgctgtggctcaccaggtccagatcgaaggtctgattaatcatccaccctggaacttgaaattagttcagctgtacgagaccagccttgtcagacatggccttatgactttggggccttccggttcaggtaaaacgacggtgattacgattctcatgaaggcacagacagaatgtgggaggcctcatagggagatgagaatgaacccaaaggctattaccgctccacagatgttcggacggcttgacaccgctactaatgactggaccgacggcattttctccactctctggcggaaaactcttaaagccaaaaagggggaaaacatctttctcattctagacggacccgtcgacgctatttggatcgaaaacctgaattctgtgttggacgacaacaaaaccctcaccctggcgaatggggataggattcccatggctccttcctgcaaattactgttcgaggttcacaacattgagaatgcaagcccggctacggtttctcggatggggatggtttacataagcagctccgctctgtcctggagacccatactgcaggcctggcttaagaagcgcaccgctcaagaggccgcagtgttcctcacgctgtacgagaaagtgtttgaggatacgtacacatatatgaagctcaatctgaacccaaagatgcagcttctcgaatgtaactatattgtgcagtccctcaatctgctagagggcctgattccttctaaggaggaaggcggagtgagttgcgtggagcatcttcacaagctttttgtcttcggcctcatgtggtccttgggcgctttattggaactcgagagccgtgagaagctggaggcctttctgcgccagcatgaatctaaactcgatcttccggagatacctaaggggtcgaaccagacgatgtacgaattctacgttaccgattacggcgactgggagcattggaacaagaaactgcagccgtactactatccaaccgactccataccagaatactcaagcatcctggtacccaatgtagacaatatcaggactaactttctgatagatactattgccaagcagcacaaggcagtgctacttacaggcgagcagggcactgccaagactgtgatggtgaaggcctatttgaagaagtacgatcccgaagtgcagctgagcaagtcattgaacttttcctccgctaccgaacctatgatgtttcagagaactatcgaaagctacgtcgataaaaggatcggctctacctacgggcctcctggaggcagaaagatgacggtgttcattgatgatatcaacatgccagtgatcaacgagtggggagatcagattacaaatgaaattgtcaggcagatgatggaaatggaagggatgtactcccttgataagccaggtgacttcactaccatagtcgatgtacagctcattgccgctatgattcaccctggcggaggtcgcaacgacattccccagcggttgaagagacaattcactgtgttcaactgcactctgccctccaacgctagtatagataagatatttggcattatcggctgtggttactttgacccctgtcgcagcttcaagccgcagatctgtgaaatgattgtgaatctcgtctcagtcggccgtgttttgtggcagtggaccaaggtgaagatgctgccaactccctcaaagttccattatatttttaatttgagggacctctctaggatttggcaggggatgctcaccatcaaagcggaggagtgtgcatctattcccacactgctatccctatttaagcatgagtgctcccgcgtgatagccgacaggttcatcacccctgaggacgagcagtggttcaatgcccaccttacccgagccgtggaagaaaatattggatctgatgccgcatcttgcatacttcccgaaccttattttgttgatttcctaagggagatgccggagcccacaggtgatgagcccgaggacagcgtgttcgaggtccccaaaatctatgagctgatgcccagcttcgatttcctggcagaaaagctgcaattttaccaacgccaattcaacgagatcatcagagggacttccctggatctcgtgttcttcaaagacgcgatgacacacttgatcaagatttcccggatcattaggacgtcttgtggcaatgccttattagtgggagtcgggggaagcgggaaacagtctttaagtcgcttggcttcatttatcgccggatatcaaattttccaaatcacattaactcgttcgtataatgttaccaatttgaccgacgacctgaaagcactttacaaggtagccggtgcagacggcaaaggcattacattcatctttaccgatagtgagatcaaagatgaagcattcttagagtacttgaacaacctactgagctcaggggaaataagcaatctgttcgccagagacgaaatggacgaaattacccaggggctaatatcggttatgaaaagagagctgccacgccacccaccgacttttgacaatttgtatgagtacttcatttctcgcagtagaaagaatctccatgttgtcctgtgctttagccctgtgggggagaagtttagagctcggtccctcaaatttcccggactgataagcggatgcaccatggactggttctctaggtggcctagagaggcgcttatcgcggtcgcgtcgtactttctgagtgactacaacattgtttgcagtagtgaaatcaaaagacaagtggttgagactatgggattgttccatgacatggtctctgagtcttgtgagtcttacttccagcggtatcgcagacgtgctcacgtgacacccaagagctacctctcattcatcaacggctataaaaacatctatgccgaaaaagttaagtttataaatgaacaggccgagaggatgaacatcggactcgataaactcatggaagccagtgaaagcgtggctaagctgtcccaggatcttgccgtgaaggaaaaagaactcgccgtggccagcatcaaggcagatgaagtcctggccgaagtcacagtctctgcacaggcctccgcaaagattaagaatgaggtgcaggaggtgaaggacaaggctcagaaaatagtagatgagatcgactctgaaaaagtgaaagccgagagtaaactggaggcagccaagcccgcacttgaggaggccgaggccgcattgaacacgattaaacccaatgacattgcaacagttcgcaaactggccaagccaccgcacttgatcatgaggataatggactgcgtactactgttgttccagaagaagatcgacccagtgactatggaccctgagaagtcttgctgcaaaccttcctggggcgagagtcttaagctcatgtccgccaccggattcctctggtccctccaacaatttcccaaggacacaattaacgaagaaaccgttgagcttctgcagccttacttcaacatggacgactatacctttgagtccgccaagaaggtttgtgggaacgtcgccggactcctcagctggacacttgcaatggcaattttttacggcatcaacagagaggtgttacctttgaaagctaatctggcaaagcaggagggacggctagctgtggcgaatgctgaactggggaaagcacaagccctgctggatgagaagcaagcagaactggataaggttcaggctaaatttgatgccgctatgaacgagaaaatggaccttttgaacgatgctgacacctgtcgaaaaaaaatgcaggcggcatcgacacttattgacgggctgtctggggaaaagatccgttggacccaacaatcaaaggagttcaaagcccagatcaaccggctcgtgggcgacatcctgctgtgtaccgggttcttgtcttacctgggtcccttcaaccagatcttcaggaactatctgctgaaggaccaatgggaaatggagctccgtgcaagaaaaataccatttaccgagaatttaaatttgataagcatgctggtcgatccaccaacaatcggggagtggggactgcagggcctgccaggtgatgacctgagcatccagaatgggatcatcgttacaaaggctactaggtaccctctcctgatcgacccccaaacacagggcaagacctggataaaatcaaaagaaaaggaaaacgatcttcaggtgacttcactgaaccacaaatacttccggacccacctggaggatagtctaagcttgggacgacccttgcttatagaggacattcacgaagagttagaccccgctttagataatgtcctagaaaagaactttatcaaaagcggtacgacatttaaggtgaaagttggcgataaagaatgtgatattatggacacctttaagttatacatcacgaccaaactgcccaatcccgcattcactcccgagattaatgctaagacctcagtgatcgactttaccgtaaccatgaaagggctcgaaaatcagttactgagaagagtaatcttaacggaaaagcaagagttagaggccgagcgagtcaagctgctggaggacgtcacctttaacaaacggaagatgaaagaacttgaagacaacctactgtataaactgagcgcaaccaaaggctcgctggtggatgatgaatctctcattggggtcctgaggactacaaagcagacagcagctgaagtgtctgagaagctgcatgttgctgctgagacagagatcaaaattaacgctgcccaagaagaatttagacctgccgcaacacgcggaagcatcctgtacttcctgatcactgaaatgtcaatggtgaacataatgtatcagacatcccttgcccagttcctgaagctctttgaccaatcaatggccagatccgagaagagtccgctgccccagaagcggatcaccaacatcattgaatatctgacatacgaggtctttacctatagcgtccggggactttatgagaatcacaaattcctatttgtccttctgatgacgctcaaaattgatctgcaaagaggcactgtaaagcaccgggaatttcaagcattaattaagggaggcgctgccctcgacttaaaagcctgcccaccaaagccttaccgatggatcctggacatgacctggctgaacctggtcgagctcagcaaacttcctcaatttgcagagatcatgaaccagatctctagaaacgagaagggttggaaaagttggttcgacaaagatgctccggaggaggaaatcatccctgatggctacaacgacagcctggatacctgccacaagttgttgcttataaggtcttggtgtccagatagaacagtctttcaagccaggaagtatatagctgacagcttggaggagaagtacactgagcccgtcattctgaatctcgagaagacctgggaagaatcggacacccgcacaccattgatatgtttcctcagtatggggagcgaccccacaaaccaaatcgacgccctcgccaagaaactgaagctggaatgccgtactatcagcatgggccagggccaggaggtccatgccagaaagttgatccagatgagcatgcagcagggtggatgggtgctactccagaattgtcatttgggactagaattcatggaggagttgctcgagacactcattacgactgaggcatccgacgactcctttcgggtttggattactaccgaacctcacgacagatttcccatcaccctattgcagacctccctgaagttcaccaatgagccacctcagggtgttagagctggactgaagcgcacatttgctggaatcaaccaagatctgctagatatcagcaatctccctatgtggaagccaatgttgtacactgtggccttcctgcatagcactgttcaggagcggcgtaagttcggaccgttaggctggaacataccttacgagttcaacagcgctgacttctcagcctcagtccagtttattcagaatcacctggatgagtgtgacattaaaaagggcgtttcatggaacaccgtgcgctacatgatcggtgaggtacaatacggcggaagggtgactgacgatttcgataagagactactgaactgttttgctagggtgtggttcagcgaaaagatgttcgagccctctttctgcttctacaccggttataagatccctctgtgcaagacactggaccagtactttgaatatatccagtctctgccgtctttggacaatcctgaggttttcggattgcacccaaatgctgatataacataccagtccaacactgcctcagcggtgctggagaccatcaccaatattcaacccaaagagtcaggagggggagtcggagaaacgagagaagctatcgtgtaccgcttgtccgaagatatgctatcaaaactgcctccagattatatcccacatgaggtcaagtcacggctcattaaaatgggacacctgaattccatgaacattttcttacgccaggaaatagataggatgcaaagggtgattagcatcctacgcagtagcttgtcagacctgaaactcgccatagaaggcaccattattatgtcggaaaatctcagagatgcactggataatatgtatgacgccagaattccacagttgtggaagagggtgtcttgggactccagcacgctcggcttttggtttacagaactgcttgagcggaacgcacaattctcaacttggatcttcgagggccgtccaaacgtcttttggatgacgggctttttcaacccacagggcttccttaccgctatgcgccaggaagtcacccgagcacacaagggctgggctctcgacaccgtgacaatccacaatgaagttctcagacagacaaaggaagagatcacgagtcctccaggagagggagtgtacatttacggcctgtatatggacggcgcagcatgggaccggagaaatggcaagttgatggagagcactcctaaagtcctgttcactcaattgccggtgctccacatcttcgctatcaattctaccgctcctaaagacccgaagctatacgtatgtcccatctacaaaaagcctagaaggacagatctgactttcataaccgttgtgtacctcagaacagtactgtctcccgatcactggatcctgcgtggggtggccttgttatgcgatatcaaataa

SEQ ID NO: 303591 - DNA, 13365 bp, Artificial Sequence
  derived and/or modified sequence
atgatgaagctgtacatcgacaacgccgcccccgacaagctgaagggcctgtgcatcttcttcgtgagatgcagaaacgacgtggccatcaacgtgaagaccatccaggaggaggccctgttcaccgtgctggacgccagcaagggcctgctgaacggcatcagagacatgctggccaacatcttcctgcccgccgtgctggccaccaacaactggggcgccctgaaccagagcaagcagggcgagagcgagaagcacatcttcaccgagaccatcaacagatacctgagcttcctggacggcgccagaatcagcatcgagggcaccgtgaagctgaagaccatcgacaacgtgaacttcagcaagctgcacaccttcgaggaggtgaccgccgccgccagcaacagcgagaccgtgcaccagctggaggaggtgctgatggtgtggtacaagcagatcgagcaggtgctgatcgagagcgagcagatgagaaaggaggccggcgacagcggccccctgaccgagctggagcactggaagagaatgagcgccaagttcaactacatcatcgagcagatcaagggccccagctgcaaggccgtgatcaacgtgctgaacgtggcccacagcaagctgctgaagaactggagagacctggacgccagaatcaccgacaccgccaacgagagcaaggacaacgtgagatacctgtacaccctggagaaggtgtgccagcccctgtacaaccacgacctggtgagcatggcccacggcatccagaacctgatcaacgccatcagaatgatccacggcgtgagcagatactacaacaccagcgagagaatgaccagcctgttcatcaaggtgaccaaccagatggtgaccgcctgcaaggcctacatcaccgacggcggcctgaaccacgtgtgggaccaggagacccccgtggtgctgaagaagatccaggactgcatcttcctgttcaaggagtaccaggccagcttccacaagaccagaaagctgatcagcgagagcagcggcgagaagagcttcgaggtgagcgagatgtacatcttcggcaagttcgaggccttctgcaagagactggagaagatcaccgagatgatcaccgtggtgcagacctacagcaccctgagcaacagcaccatcgagggcatcgacatcatggccatcaagttcagaaacatctaccagggcgtgaagaagaagcagtacgacatcctggaccccagaagaaccgagttcgacaccgacttcctggacttcatgaccaagatcaacggcctggaggtgcagatccaggccttcatgaacagcagcttcggcaagatcctgagcagccagcaggccctgcagctgctgcagagattccagaagctgaacatcccctgcctgggcctggagatcaaccacaccatcgagagaatcctgcagtactacgtggccgagctggacgccaccaagaagctgtaccacagccagaaggacgacccccccctggccagaaacatgccccccatcgccggcaagatcctgtgggtgagacagctgtacagaagaatcagcgagcccatcaactacttcttcaagaacagcgacatcctgagcagccccgacggcaaggccgtgatcagacagtacaacaagatcagctacgtgctggtggagttcgaggtggtgtaccacaccgcctggatcagagagatcagccagctgcactacgccctgcaggccaccctgttcgtgagacaccccgagaccggcaagctgctggtgaacttcgaccccaagatcctggaggtggtgagagagaccaagtgcatgatcaagatgaagctggacgtgcccgagcaggccaagagactgctgaagctggagagcaagctgaaggccgacaagctgtacctgcagggcctgctgcagtactacgacgagctgtgccaggaggtgcccagcgtgttcgtgaacctgatgacccccaagatgaagaaggtggagagcgtgctgagacagggcctgaccgtgctgacctggagcagcctgaccctggagagcttcttccaggaggtggagctggtgctggacatgttcaaccagctgctgaagaagatcagcgacctgtgcgagatgcacatcgacaccgtgctgaaggagatcgccaagaccgtgctgatcagcctgcccgagagcggcgccaccaaggtggaggacatgctgaccctgaacgagacctacaccaaggagtgggccgacatcctgaaccacaagagcaagcacgtggaggaggccgtgagagagctgatcagcatcttcgagcagatctacgaggtgaagtacaccggcaaggtgggcaagcagagcgagcagagaaagcacgtggtgttcggcagcgagaccggcgagggcgagaacaacgactacgaggccaacatcgtgaacgagttcgacacccacgacaaggaggacgagttcaagaaggagtgcaaggaggtgttcgccttcttcagccaccagctgctggacagcctgcagaaggccaccagactgagcctggacaccatgaagagaagaatcttcgtggccagcctgtacggcagaaagcagagcgaggacatcatcagcttcatcaagagcgaggtgcacctggccatccccaacgtggtgatgatccccagcctggacgacatccagcaggccatcaacagaatgatccagctgaccctggaggtgagcagaggcgtggcccactggggccagcagcagatcagacccatcaagagcgtgatccccagccccaccaccaccgacgtgacccaccagaacaccggcaagctgctgaagaaggaggagagaagcttcgaggaggccatccccgccagaaagctgaagaacttctaccccggcgtggccgagcacaaggacatcagcaagctggtgctgctgctgagcagcagcgtgaacagcctgagaaaggccgcccacgaggccctgcaggacttccagaagtacaagaccctgtggaccgaggacagagacgtgaaggtgaaggagttcctggccaacaaccccagcctgaccgagatcagaagcgagatcctgcactacgccaccttcgagcaggagatcgacgagctgaagcccatcatcgtggtgggcgccctggagctgcacaccgagcccatgaagctggccctgagcatcgaggccaaggcctggaagatgctgctgtgcagatacctgaacgaggagtacaagaagaagatgagctacatgatcgccttcatcaacgagtacctgaagaagctgagcagacccatcagagacctggacgacgtgagattcgccatggaggccctgagctgcatcagagacaacgagatccagatggacatgaccctgggccccatcgaggaggcctacgccatcctgaacagattcgaggtggaggtgaccaaggaggagagcgaggccgtggacaccctgagatacagcttcaacaagctgcagagcaaggccgtgagcgtgcaggaggacctggtgcaggtgcagcccaagttcaagagcaacctgctggagagcgtggaggtgttcagagaggacgtgatcaacttcgccgaggcctacgagctggagggccccatggtgcccaacatccccccccaggaggccagcaacagactgcagatcttccaggccagcttcgacgacctgtggagaaagttcgtgacctacagcagcggcgagcagctgttcggcctgcccgtgaccgactacgaggtgctgcacaagaccagaaaggagctgaacctgctgcagaagctgtacggcctgtacgacaccgtgatgagcagcatcagcggctactacgagatcctgtggggcgacgtggacatcgagaagatcaacgccgagctgctggagttccagaacagatgcagaaagctgcccaagggcctgaaggactggcaggccttcctggacctgaagaagagaatcgacgacttcagcgagagctgccccctgctggagatgatgaccaacaaggccatgaagcagagacactgggacagaatcagcgagctgaccggcacccccttcgacgtggagagcgacagcttctgcctgagaaacatcatggaggcccccctgctgaagcacaaggacgacatcgaggacatctgcatcagcgccatcaaggagaaggacatcgaggccaagctgacccaggtgatcgagaactggaccaaccagaacctgagcttcgccgccttcaagggcaagggcgagctgctgctgaagggcaccgagagcggcgagatcatcaccctgatggaggacagcctgatggtgctgggcagcctgctgagcaacagatacaacgcccccttcaagaagaacatccagaactgggtgtacaagctgagcaccagcagcgacatcatcgaggagtggctggtggtgcagaacctgtgggtgtacctggaggccgtgttcgtgggcggcgacatcgccaagcagctgccccaggaggccaagagattccagaacatcgacaagagctggatcaagatcatgcagagagcccacgagaaccccaacgtgatcaactgctgcgtgggcgacgagaccatgggccagctgctgccccacctgcacgagcagctggaggtgtgccagaagagcctgaccggctacctggagaagaagagactgctgttccccagattcttcttcgtgagcgaccccgtgctgctggagatcctgggccaggccagcgacagccacaccatccagccccacctgcccgccgtgagcgacaacatcaacgaggtgaccttccacgccaaggactacgacagaatcatggccgtgatcagcagagagggcgagaagatcgtgctggacaacagcgtgatggccaagggccccgtggagatctggctgctggacctgctgaagatgcagatgagcagcctgcacaacatcatcagaagcgccttctaccagatcagcgacagcggcttccagctgctgcccttcctgagccacttccccgcccaggtgggcctgctgggcatccagatgctgtggacccacgacagcgaggaggccctgagaaacgccaaggacgacagaaagatcatgcaggtgaccaaccagaagttcctggacatcctgaacaccctgatcagccagaccacccacgacctgagcaagttcgacagagtgaagttcgagaccctgatcaccatccacgtgcaccagagagacatcttcgacgacctggtgaagatgcacatcaagagccccaccgacttcgagtggctgaagcagagcagattctacttcaaggaggacctggaccagaccgtggtgagcatcaccgacgtggacttcatctaccagaacgagttcctgggctgcaccgacagactggtgatcacccccctgaccgacagatgctacatcaccctggcccaggccctgggcatgaacatgggcggcgcccccgccggccccgccggcaccggcaagaccgagaccaccaaggacatgggcagatgcctgggcaagtacgtggtggtgttcaactgcagcgaccagatggacttcagaggcctgggcagaatcttcaagggcctggcccagagcggcagctggggctgcttcgacgagttcaacagaatcgagctgcccgtgctgagcgtggccgcccagcagatctacatcgtgctgaccgccagaaaggagagaaagaagcagttcatcttcagcgacggcgactgcgtggacctgaaccccgagttcggcatcttcctgaccatgaaccccggctacgccggcagacaggagctgcccgagaacctgaagatccagttcagaaccgtggccatgatggtgcccgacagacaggtgcactacgacttcggcctgagaaacatcctgagcgtgctgagaaccctgggcagccagaagagagccagacccgaggacagcgagctgagcatcgtgatgagaggcctgagagacatgaacctgagcaagctggtggacgaggacgagcccctgttcctgagcctgatcaacgacctgttccccggcctgcagctggacagcaacacctacgccgagctgcagaacgccgtggcccaccaggtgcagatcgagggcctgatcaaccaccccccctggaacctgaagctggtgcagctgtacgagaccagcctggtgagacacggcctgatgaccctgggccccagcggcagcggcaagaccaccgtgatcaccatcctgatgaaggcccagaccgagtgcggcagaccccacagagagatgagaatgaaccccaaggccatcaccgccccccagatgttcggcagactggacaccgccaccaacgactggaccgacggcatcttcagcaccctgtggagaaagaccctgaaggccaagaagggcgagaacatcttcctgatcctggacggccccgtggacgccatctggatcgagaacctgaacagcgtgctggacgacaacaagaccctgaccctggccaacggcgacagaatccccatggcccccagctgcaagctgctgttcgaggtgcacaacatcgagaacgccagccccgccaccgtgagcagaatgggcatggtgtacatcagcagcagcgccctgagctggagacccatcctgcaggcctggctgaagaagagaaccgcccaggaggccgccgtgttcctgaccctgtacgagaaggtgttcgaggacacctacacctacatgaagctgaacctgaaccccaagatgcagctgctggagtgcaactacatcgtgcagagcctgaacctgctggagggcctgatccccagcaaggaggagggcggcgtgagctgcgtggagcacctgcacaagctgttcgtgttcggcctgatgtggagcctgggcgccctgctggagctggagagcagagagaagctggaggccttcctgagacagcacgagagcaagctggacctgcccgagatccccaagggcagcaaccagaccatgtacgagttctacgtgaccgactacggcgactgggagcactggaacaagaagctgcagccctactactaccccaccgacagcatccccgagtacagcagcatcctggtgcccaacgtggacaacatcagaaccaacttcctgatcgacaccatcgccaagcagcacaaggccgtgctgctgaccggcgagcagggcaccgccaagaccgtgatggtgaaggcctacctgaagaagtacgaccccgaggtgcagctgagcaagagcctgaacttcagcagcgccaccgagcccatgatgttccagagaaccatcgagagctacgtggacaagagaatcggcagcacctacggcccccccggcggcagaaagatgaccgtgttcatcgacgacatcaacatgcccgtgatcaacgagtggggcgaccagatcaccaacgagatcgtgagacagatgatggagatggagggcatgtacagcctggacaagcccggcgacttcaccaccatcgtggacgtgcagctgatcgccgccatgatccaccccggcggcggcagaaacgacatcccccagagactgaagagacagttcaccgtgttcaactgcaccctgcccagcaacgccagcatcgacaagatcttcggcatcatcggctgcggctacttcgacccctgcagaagcttcaagccccagatctgcgagatgatcgtgaacctggtgagcgtgggcagagtgctgtggcagtggaccaaggtgaagatgctgcccacccccagcaagttccactacatcttcaacctgagagacctgagcagaatctggcagggcatgctgaccatcaaggccgaggagtgcgccagcatccccaccctgctgagcctgttcaagcacgagtgcagcagagtgatcgccgacagattcatcacccccgaggacgagcagtggttcaacgcccacctgaccagagccgtggaggagaacatcggcagcgacgccgccagctgcatcctgcccgagccctacttcgtggacttcctgagagagatgcccgagcccaccggcgacgagcccgaggacagcgtgttcgaggtgcccaagatctacgagctgatgcccagcttcgacttcctggccgagaagctgcagttctaccagagacagttcaacgagatcatcagaggcaccagcctggacctggtgttcttcaaggacgccatgacccacctgatcaagatcagcagaatcatcagaaccagctgcggcaacgccctgctggtgggcgtgggcggcagcggcaagcagagcctgagcagactggccagcttcatcgccggctaccagatcttccagatcaccctgaccagaagctacaacgtgaccaacctgaccgacgacctgaaggccctgtacaaggtggccggcgccgacggcaagggcatcaccttcatcttcaccgacagcgagatcaaggacgaggccttcctggagtacctgaacaacctgctgagcagcggcgagatcagcaacctgttcgccagagacgagatggacgagatcacccagggcctgatcagcgtgatgaagagagagctgcccagacacccccccaccttcgacaacctgtacgagtacttcatcagcagaagcagaaagaacctgcacgtggtgctgtgcttcagccccgtgggcgagaagttcagagccagaagcctgaagttccccggcctgatcagcggctgcaccatggactggttcagcagatggcccagagaggccctgatcgccgtggccagctacttcctgagcgactacaacatcgtgtgcagcagcgagatcaagagacaggtggtggagaccatgggcctgttccacgacatggtgagcgagagctgcgagagctacttccagagatacagaagaagagcccacgtgacccccaagagctacctgagcttcatcaacggctacaagaacatctacgccgagaaggtgaagttcatcaacgagcaggccgagagaatgaacatcggcctggacaagctgatggaggccagcgagagcgtggccaagctgagccaggacctggccgtgaaggagaaggagctggccgtggccagcatcaaggccgacgaggtgctggccgaggtgaccgtgagcgcccaggccagcgccaagatcaagaacgaggtgcaggaggtgaaggacaaggcccagaagatcgtggacgagatcgacagcgagaaggtgaaggccgagagcaagctggaggccgccaagcccgccctggaggaggccgaggccgccctgaacaccatcaagcccaacgacatcgccaccgtgagaaagctggccaagcccccccacctgatcatgagaatcatggactgcgtgctgctgctgttccagaagaagatcgaccccgtgaccatggaccccgagaagagctgctgcaagcccagctggggcgagagcctgaagctgatgagcgccaccggcttcctgtggagcctgcagcagttccccaaggacaccatcaacgaggagaccgtggagctgctgcagccctacttcaacatggacgactacaccttcgagagcgccaagaaggtgtgcggcaacgtggccggcctgctgagctggaccctggccatggccatcttctacggcatcaacagagaggtgctgcccctgaaggccaacctggccaagcaggagggcagactggccgtggccaacgccgagctgggcaaggcccaggccctgctggacgagaagcaggccgagctggacaaggtgcaggccaagttcgacgccgccatgaacgagaagatggacctgctgaacgacgccgacacctgcagaaagaagatgcaggccgccagcaccctgatcgacggcctgagcggcgagaagatcagatggacccagcagagcaaggagttcaaggcccagatcaacagactggtgggcgacatcctgctgtgcaccggcttcctgagctacctgggccccttcaaccagatcttcagaaactacctgctgaaggaccagtgggagatggagctgagagccagaaagatccccttcaccgagaacctgaacctgatcagcatgctggtggacccccccaccatcggcgagtggggcctgcagggcctgcccggcgacgacctgagcatccagaacggcatcatcgtgaccaaggccaccagataccccctgctgatcgacccccagacccagggcaagacctggatcaagagcaaggagaaggagaacgacctgcaggtgaccagcctgaaccacaagtacttcagaacccacctggaggacagcctgagcctgggcagacccctgctgatcgaggacatccacgaggagctggaccccgccctggacaacgtgctggagaagaacttcatcaagagcggcaccaccttcaaggtgaaggtgggcgacaaggagtgcgacatcatggacaccttcaagctgtacatcaccaccaagctgcccaaccccgccttcacccccgagatcaacgccaagaccagcgtgatcgacttcaccgtgaccatgaagggcctggagaaccagctgctgagaagagtgatcctgaccgagaagcaggagctggaggccgagagagtgaagctgctggaggacgtgaccttcaacaagagaaagatgaaggagctggaggacaacctgctgtacaagctgagcgccaccaagggcagcctggtggacgacgagagcctgatcggcgtgctgagaaccaccaagcagaccgccgccgaggtgagcgagaagctgcacgtggccgccgagaccgagatcaagatcaacgccgcccaggaggagttcagacccgccgccaccagaggcagcatcctgtacttcctgatcaccgagatgagcatggtgaacatcatgtaccagaccagcctggcccagttcctgaagctgttcgaccagagcatggccagaagcgagaagagccccctgccccagaagagaatcaccaacatcatcgagtacctgacctacgaggtgttcacctacagcgtgagaggcctgtacgagaaccacaagttcctgttcgtgctgctgatgaccctgaagatcgacctgcagagaggcaccgtgaagcacagagagttccaggccctgatcaagggcggcgccgccctggacctgaaggcctgcccccccaagccctacagatggatcctggacatgacctggctgaacctggtggagctgagcaagctgccccagttcgccgagatcatgaaccagatcagcagaaacgagaagggctggaagagctggttcgacaaggacgcccccgaggaggagatcatccccgacggctacaacgacagcctggacacctgccacaagctgctgctgatcagaagctggtgccccgacagaaccgtgttccaggccagaaagtacatcgccgacagcctggaggagaagtacaccgagcccgtgatcctgaacctggagaagacctgggaggagagcgacaccagaacccccctgatctgcttcctgagcatgggcagcgaccccaccaaccagatcgacgccctggccaagaagctgaagctggagtgcagaaccatcagcatgggccagggccaggaggtgcacgccagaaagctgatccagatgagcatgcagcagggcggctgggtgctgctgcagaactgccacctgggcctggagttcatggaggagctgctggagaccctgatcaccaccgaggccagcgacgacagcttcagagtgtggatcaccaccgagccccacgacagattccccatcaccctgctgcagaccagcctgaagttcaccaacgagcccccccagggcgtgagagccggcctgaagagaaccttcgccggcatcaaccaggacctgctggacatcagcaacctgcccatgtggaagcccatgctgtacaccgtggccttcctgcacagcaccgtgcaggagagaagaaagttcggccccctgggctggaacatcccctacgagttcaacagcgccgacttcagcgccagcgtgcagttcatccagaaccacctggacgagtgcgacatcaagaagggcgtgagctggaacaccgtgagatacatgatcggcgaggtgcagtacggcggcagagtgaccgacgacttcgacaagagactgctgaactgcttcgccagagtgtggttcagcgagaagatgttcgagcccagcttctgcttctacaccggctacaagatccccctgtgcaagaccctggaccagtacttcgagtacatccagagcctgcccagcctggacaaccccgaggtgttcggcctgcaccccaacgccgacatcacctaccagagcaacaccgccagcgccgtgctggagaccatcaccaacatccagcccaaggagagcggcggcggcgtgggcgagaccagagaggccatcgtgtacagactgagcgaggacatgctgagcaagctgccccccgactacatcccccacgaggtgaagagcagactgatcaagatgggccacctgaacagcatgaacatcttcctgagacaggagatcgacagaatgcagagagtgatcagcatcctgagaagcagcctgagcgacctgaagctggccatcgagggcaccatcatcatgagcgagaacctgagagacgccctggacaacatgtacgacgccagaatcccccagctgtggaagagagtgagctgggacagcagcaccctgggcttctggttcaccgagctgctggagagaaacgcccagttcagcacctggatcttcgagggcagacccaacgtgttctggatgaccggcttcttcaacccccagggcttcctgaccgccatgagacaggaggtgaccagagcccacaagggctgggccctggacaccgtgaccatccacaacgaggtgctgagacagaccaaggaggagatcaccagcccccccggcgagggcgtgtacatctacggcctgtacatggacggcgccgcctgggacagaagaaacggcaagctgatggagagcacccccaaggtgctgttcacccagctgcccgtgctgcacatcttcgccatcaacagcaccgcccccaaggaccccaagctgtacgtgtgccccatctacaagaagcccagaagaaccgacctgaccttcatcaccgtggtgtacctgagaaccgtgctgagccccgaccactggatcctgagaggcgtggccctgctgtgcgacatcaagtag

SEQ ID NO: 303592 - DNA, 13365 bp, Artificial Sequence
  derived and/or modified sequence
atgatgaaattgtatatagacaatgcagccccggataaactaaaaggactgtgcatattttttgttcgttgccgtaatgatgttgctataaatgttaaaactattcaagaggaagcgctctttactgttctggatgcgtcgaaaggactcttaaatggaattagggatatgttggcaaatatatttctaccagctgttcttgcaacaaacaactggggtgctttaaaccagtccaagcagggagaatctgaaaaacatattttcactgaaaccatcaacagatatctttcatttttagatggtgctagaataagtattgagggaacagtgaagttaaagacaatagacaatgttaatttttccaaactgcacacctttgaagaagtaactgctgcagccagcaactcagaaactgttcatcagctggaggaagtgctgatggtatggtacaaacagatcgaacaggtacttattgagagtgagcagatgagaaaagaagctggtgattcaggtccactcactgaattggaacactggaaacgcatgtcagccaagttcaactatatcattgagcagattaaagggccaagttgtaaggctgtcataaatgtgctaaatgttgcacactccaaactgctaaagaattggcgtgatttggatgcaagaatcactgatacagcaaatgaatccaaagataatgtcagatatttgtatactttggaaaaagtgtgtcaacctctctataaccatgacctagtttccatggcacatggaatacaaaatttgattaatgccatcagaatgattcacggtgtgtcaaggtattataatacctcagagagaatgacctcattgtttatcaaggtaacaaatcaaatggtaacagcatgtaaagcatatattactgatggaggattaaaccatgtatgggatcaggaaacgccagttgtactaaagaaaattcaggactgcatttttctattcaaggaatatcaggcatcttttcataaaacaaggaaactgatttcagaatcctcaggggaaaaatcttttgaggtttcagaaatgtatatatttggaaaatttgaagctttttgcaaaagactggagaagattacagaaatgataactgttgtgcaaacatattcaaccttgagtaattctaccatagaaggaatagatattatggcaataaaattcagaaatatataccaaggggttaagaaaaagcaatatgacattctggatccaagaaggacagaatttgacacagatttcttagatttcatgacaaaaatcaatggtttagaggtacaaatacaggcatttatgaacagtagttttgggaaaatcttatcttctcagcaggctcttcagctacttcaaaggtttcagaagctgaacattccctgtctgggattagaaataaaccacacaatagagcgtattcttcagtactatgtggctgaacttgatgctactaagaagctttatcattctcagaaagatgacccccctcttgctcgcaacatgccccctatagcaggaaaaatactctgggtgaggcagctctatcgccggataagtgagcccatcaattatttctttaaaaactcagacattttatcaagtccggacggtaaagctgtcatccgtcagtataacaagatctcctatgtgctggtggaattcgaggtggtctatcacacagcctggatcagagagatttcacagttgcattacgctttacaagccacgctttttgtgcgacatccagaaacagggaagttgctggttaatttcgatcccaaaattttggaagttgttcgggaaactaagtgtatgataaaaatgaagttggatgtaccagaacaggcaaagagattgctaaaattggaaagtaaattgaaagcagacaaactgtatttgcagggtcttctgcaatattatgatgagttatgtcaggaagtgccttctgtgtttgtcaatctgatgaccccaaaaatgaaaaaggtggaatctgtgttgaggcaaggactcacagtgttaacatggtcgtctttaacactggaaagcttctttcaagaagtcgaattagttttggatatgttcaatcaacttttaaagaagatcagtgacttgtgtgaaatgcatattgatacagttctgaaggagatagccaaaactgtgttgatttctctgcctgaaagtggtgctaccaaagtagaagatatgttgaccctcaatgagacatacacaaaagaatgggctgacattctaaaccacaaaagtaagcatgtggaagaagctgtcagagaacttatatcaatatttgagcagatttatgaagtgaaatacactgggaaagtaggaaaacagtcagaacagcggaaacacgttgtttttggaagtgaaacaggagagggtgaaaacaatgactatgaagctaatattgtgaatgagtttgatactcatgataaagaagatgaatttaaaaaggagtgtaaagaggtctttgcttttttctctcatcaattactagacagtcttcaaaaagctacacggttatctctggacacaatgaaaagaagaatatttgttgcaagcctttatgggcgaaagcagtcagaagatattatttcctttataaaaagtgaagtacatcttgcaattcctaatgtggtgatgattcctagtttggatgacattcaacaagccattaaccgtatgatccagttaaccctggaggtcagcagaggagtggctcactgggggcaacagcaaatccgtcccatcaagtctgtcattcccagccccaccactactgacgtgacccatcaaaacacaggaaaactgctgaagaaggaagaaagatcttttgaagaagctattcctgcgaggaagctgaagaatttttacccgggggtagcggagcacaaggatatttctaagttggtcctgctcctttcttcctctgtaaattccctaagaaaggcagctcatgaggccctgcaggactttcagaagtacaagactctctggacagaggaccgcgatgtgaaagtgaaggaatttttggctaacaacccctctctgactgaaatcagatcagaaattctacactatgctacttttgaacaggagattgatgagttgaagcctattattgttgtaggagcacttgaattacatacagagccgatgaaattggccttatccatcgaggccaaggcatggaagatgttactctgtcgatatctgaatgaagaatacaaaaagaaaatgtcatacatgatagcatttattaatgaatacttgaaaaagttatctagacctattcgtgatttagatgatgtcagatttgcaatggaagccttgtcttgcatacgtgataatgaaattcaaatggacatgactttgggaccaattgaagaagcctatgctattttaaacagatttgaagttgaagtaaccaaagaagaatcagaagcagttgataccttaagatattctttcaacaaattgcagagcaaagctgtttcagtacaagaggacctagttcaagtgcagccaaagtttaaaagcaatctacttgagtctgtggaagtttttcgtgaggacgtgataaactttgcagaagcatatgaattggaaggacctatggttccaaatataccaccccaagaagctagcaacaggctacagatatttcaggccagtttcgatgatctgtggaggaaatttgttacgtattcatctggtgaacaactttttggattgcctgtgactgattatgaggttttacacaaaaccagaaaagaactcaacttgctgcagaagctgtatggattgtatgacaccgtaatgagcagtattagtggttattatgaaatactttggggagatgtagatattgaaaaaattaatgcagaactgctggaatttcaaaacagatgtcgtaaacttccaaaaggacttaaagattggcaagcttttttggatctcaaaaagagaattgatgatttcagtgagtcatgtcctctactggaaatgatgaccaataaggccatgaaacagagacactgggatagaatctccgagttaactggaaccccatttgatgtggaatctgattctttttgccttagaaatatcatggaagcaccactccttaaacataaggatgatattgaggatatttgcatatctgccattaaggagaaggatatcgaagccaagctgactcaggtgattgagaattggaccaaccaaaatctgagttttgcagcatttaagggaaaaggagagctcctgctcaaaggaaccgaatcgggagaaattatcactttgatggaggatagtttaatggtcttagggtctttactcagcaacagatacaatgctccatttaaaaaaaatatccagaattgggtgtataaattgtccacttcctcagatataattgaagagtggctcgtagtacagaacctttgggtttatcttgaagccgtctttgtaggtggagatattgccaaacagctgcctcaggaagcaaaacgttttcagaatattgacaagtcttggataaaaataatgcagcgagctcatgagaatcccaatgtgattaattgctgtgttggagatgaaaccatgggacaacttttacctcatttacatgagcagttggaagtatgtcagaagtcactcacagggtatttggagaagaaacgattactgtttccaagattcttctttgtatctgatccagttctcctggaaattcttggacaagccagtgattcccacaccatacagccgcatctccctgcagtatctgacaacatcaatgaggtgacatttcatgcaaaagactatgatcgcatcatggccgtcatatcaagagaaggagaaaaaattgttttggataattctgttatggccaaaggtcctgtggagatttggctactggatttgttaaaaatgcagatgtcatcattacataatataattagatccgctttctatcaaatcagtgattcaggatttcaactcttaccattcctcagccactttccagcacaggttggacttctgggaattcagatgttgtggacacacgattcagaagaggctttacgtaatgcaaaagatgacaggaaaatcatgcaagtgaccaatcagaaatttttggatattctaaatactctcattagtcagacaacacatgatctaagcaagtttgatagagtgaagttcgagactctaattaccatccatgtgcatcagagagatatttttgatgacttggtaaaaatgcatatcaaatcacctactgactttgaatggctaaaacagagtagattttattttaaggaagatttggatcaaactgtggtgtctattacagatgttgattttatttaccaaaatgaatttctgggatgtactgatcgtcttgttatcactccattaacagatagatgctatatcacgttagctcaggccttgggcatgaacatgggaggtgctcccgcaggacctgctggcactggcaaaacagaaaccacaaaagacatgggaaggtgtttgggaaaatatgtggtcgtgttcaattgctcagatcaaatggatttcagaggcctaggaaggattttcaaaggtcttgcacagtcgggttcctggggctgttttgatgagtttaacagaattgaattgcctgtattatcagtggcagcacaacaaatttatattgttttgacagcaagaaaagaaagaaagaaacagttcattttttctgatggtgattgtgttgatttaaatccagaatttggaatcttcttaacgatgaaccctggatatgctgggcgccaggaactaccagaaaacctaaaaatccagtttagaactgttgctatgatggttcctgatagacaggttcattatgactttggattgagaaatattctgtctgtattgaggactcttggatctcaaaaaagagccagaccagaagatagtgaattaagcattgtcatgagaggactaagagatatgaacctttccaaactggttgatgaagatgaacccctgttcctcagcttaatcaatgacctgttcccaggactgcaactggatagtaatacttatgcagaactgcaaaacgcagtagcccatcaggttcagatagagggtttgattaaccatccaccctggaacctgaaactcgtgcagttatatgagacgtctttggtacggcatggcttgatgactcttgggcccagtggttctggaaagacaaccgttatcacgattctaatgaaggcgcaaacagaatgcggaaggcctcatagagaaatgcgaatgaatccaaaagccattactgcacctcagatgtttggcagactggacactgctaccaatgactggacagatgggattttttctactctgtggagaaaaacattaaaagctaaaaaaggtgaaaacattttcctcattttagatggtcctgtggatgccatctggattgagaacttaaattccgttttggatgacaataaaactctgacgttagctaatggagatcgcattcccatggcccctagttgtaagcttctgtttgaagtccacaatatcgagaacgcctctcctgccacggtttctaggatgggcatggtctatatcagcagctctgctctcagctggaggccaatcttacaggcatggttgaagaaacgcactgcacaggaagctgctgtattcctgacactgtatgagaaagtctttgaagatacatacacatatatgaagctaaatctcaatcccaaaatgcagctcttggagtgcaactatattgtgcaatctctcaatcttctggaagggttaattccctccaaagaagaaggcggtgtttcctgtgtcgaacatcttcataaattatttgtgtttggcctaatgtggagtttaggagcccttctggaattagaaagcagagaaaagcttgaagccttcttacggcagcatgaaagcaagttggacttaccagaaatacctaaaggctcaaatcaaaccatgtatgagttttatgttactgattatggtgattgggagcactggaataagaaacttcagccttattattatccaactgacagtattccggaatattcatcaattttggttccaaatgttgacaatattagaacaaattttttgatagacaccattgcaaaacaacataaagctgttttgctcacaggagagcagggaactgcaaaaactgtcatggttaaggcctatttgaaaaaatatgatcctgaagtacagctatccaaaagtctaaacttttcatctgccacagaaccaatgatgtttcagagaacaattgaaagctacgtggataagcgaattggaagcacatatgggccaccaggagggagaaaaatgactgtatttattgatgatattaatatgcctgtgattaatgagtggggagatcagataactaatgagattgtgcgacagatgatggaaatggaaggaatgtacagcttggacaagcctggagacttcactactattgttgatgtgcagctcatagcagcaatgatccaccctggaggtggtcgaaatgatattccacaacgtttaaaaagacaatttactgtgtttaattgtacattgccttcaaatgcttcaatagacaaaatttttggaattattggatgtggatactttgatccttgtagaagtttcaagcctcaaatatgtgagatgattgtgaatttagtctcagtgggtagagtgctgtggcaatggactaaggtgaagatgctgccaactccttctaaatttcattacatcttcaatcttcgagatctttccagaatttggcaaggaatgttgaccataaaagctgaggagtgcgcttcaatccctactctcctgtcccttttcaaacacgagtgcagcagagtaattgcagacagatttataactcctgaagatgagcagtggtttaatgcacatcttactcgtgcagttgaagaaaatattggctctgatgcagcgtcgtgtattcttcctgaaccatactttgtggattttcttcgtgagatgccagaaccaactggtgatgaacctgaagactctgtgtttgaagtacccaaaatatatgaattgatgccatcctttgactttctggctgaaaaactccagttttaccagagacagttcaatgaaatcattagaggaacatctcttgatctggtgttttttaaagatgcaatgactcatcttattaagatttcacgaataattcgaacgtcgtgtggaaatgcattgctggtgggtgttggtggttccggaaaacaaagtctttcaagattggcctcttttattgctggctatcaaatattccagataacattaaccaggtcttacaatgtgactaatctaacagatgatttaaaagctttgtacaaagttgctggtgctgatggaaaaggcatcactttcatctttactgacagtgaaataaaagatgaggcatttctagaataccttaacaacttgctatcttcaggggagatctccaacttgtttgcacgagatgagatggatgaaatcacccaaggtctgatttcagtgatgaagagggagctacctcgccatcctcctacctttgataatttgtatgaatacttcatttcaagatcaaggaagaacttacatgttgttctctgcttttctccagttggtgagaagttccgtgcccgttctttgaaatttcctggcttgatatcaggttgcactatggactggttcagccgctggccaagggaggctctgattgctgtggcctcctacttcctttcagactataatattgtctgctctagtgaaattaaaagacaagttgtagaaacaatgggcctgtttcatgacatggtttcagagagctgtgaaagttatttccaaagataccgccgaagagcacatgtgactcccaaatcttacctctcatttataaatggttataaaaacatttatgctgaaaaggtgaagttcattaatgaacaggctgaacgtatgaatattggtcttgataaactaatggaggcaagtgaatctgttgctaaactctctcaggatcttgcagtcaaggagaaggagttggcagtggcttccataaaagcagacgaagtattagcagaagtcacagtaagcgctcaggcttcagccaaaattaaaaatgaagtacaggaggtaaaggacaaagcccaaaaaattgtggatgaaattgatagtgaaaaagtgaaagctgaaagcaagcttgaggcagctaaacctgcactggaagaagcagaagcagccctgaatactatcaagccaaatgatattgccacagtcaggaaacttgcaaaaccaccacatcttattatgagaatcatggactgtgttctgttactatttcaaaagaaaattgaccctgttactatggatccagaaaaatcttgctgtaagccatcatggggagagtcattaaagttgatgagtgcaacaggattcctgtggagccttcagcagttccctaaggacactataaatgaagagactgttgagttactacagccatattttaatatggatgattatacttttgaaagtgccaaaaaagtctgtgggaatgtggctggtctcctgtcttggacacttgctatggcaatattttatggcatcaatagagaagtgttgcctctgaaggccaacctggccaagcaggaaggccggttagcagttgctaatgctgagttagggaaggcacaagccctgctggatgagaagcaagctgagctggataaagtacaggcaaaatttgatgcagcaatgaatgagaaaatggatttgcttaatgacgctgatacgtgccggaaaaagatgcaggccgcctccactctcatcgatgggctgagtggagaaaaaatccggtggacccagcaaagtaaagaattcaaagctcagattaatagacttgtaggtgatattctgctgtgcacgggattcctttcctaccttggtcctttcaatcagatatttaggaactatttgcttaaagatcaatgggaaatggagttgagagcacggaaaattcctttcacagaaaacctgaatcttatttcaatgttggtggatcctccaactattggtgagtgggggctacagggattaccaggagatgatctctcaattcagaatggcattattgtgacaaaggccaccagatacccactcctcatagacccacaaactcaaggcaaaacttggattaaatcaaaggaaaaagaaaatgatttacaggtgacatctctgaaccataaatattttcgcacacacttggaggacagcctttccttgggccgaccccttctcattgaggacattcatgaagagctggatccagccttggataatgtattagaaaagaattttattaaatctggcaccactttcaaggtgaaagtcggtgataaggaatgtgatatcatggatacatttaaactttacattactacgaagttaccaaatcctgcctttaccccagagattaatgctaaaacgtcagtcattgatttcactgttacaatgaaaggacttgagaatcagttactaaggagagtcattctaacagagaaacaggagttagaggctgagagggttaaacttttggaggatgttacttttaataagcggaagatgaaagaacttgaagataacctcctctataaattaagtgctacaaaaggctcattggtagatgacgaatctctcattggtgtacttcgaactaccaagcagacagcagctgaggtaagtgaaaagttgcatgtggctgcagaaactgagatcaagatcaacgcggctcaggaggagttccggcccgcagccacccgcggaagcatcctctacttcctcatcacagagatgagcatggtcaacatcatgtatcagacgtcattggcccagttcttgaagttatttgaccagtccatggccagatctgaaaagtcaccactacctcaaaagagaattacaaatattatcgagtacctgacatatgaagtttttacatactctgtcagaggcctatacgaaaaccacaaattcctgtttgtactcctcatgaccttaaagattgaccttcagagagggacagttaagcacagagagtttcaagctctcattaaagggggagcagctctggacctgaaagcctgtcctcccaaaccctatcgctggatccttgacatgacttggctgaatcttgtggagctgagtaaacttccacaatttgcagaaattatgaaccagatatctcgtaatgagaaggggtggaaaagctggtttgataaagatgctccagaggaggaaattatccctgatggatataatgattcactagatacctgccataaacttttacttatcaggtcttggtgcccagaccgtactgtttttcaagcaagaaagtatattgcagattctttggaggagaagtacacagaaccagttatcttaaatctggagaaaacttgggaagaaagtgatacccggacacctctgatatgcttcctgtccatgggatctgaccccaccaatcaaattgatgcattggccaagaaactgaaactggaatgtagaactatctcaatggggcaaggacaagaagtacatgctcgaaagctgattcagatgtcaatgcagcagggtggttgggtattactacaaaattgccaccttggcctggaattcatggaagaattactagagacgctaattaccactgaagccagtgatgattctttccgagtatggataactacggagccccatgatcgatttccaattacattgcttcagacctctctcaaattcactaatgagccaccccaaggtgtacgcgcaggtttgaaaagaacatttgctggaattaatcaagaccttctggacatcagtaatttacccatgtggaagccgatgctttacacagtagcatttttacactccactgtgcaggagcgacgaaaatttggccccttaggatggaatattccctacgaattcaattctgctgacttttcagccagtgttcagtttattcagaatcaccttgatgaatgcgatattaagaaaggtgtatcatggaatacggttcggtacatgatcggagaagtacaatatggaggcagagtgacagatgactttgacaaacgtctacttaattgctttgccagagtctggttcagtgagaagatgtttgaaccgtcattctgcttttatactggatataaaatccccttatgcaaaaccttagaccagtattttgaatacatccagtcactgccatccctagataaccctgaagtctttgggcttcaccctaatgctgatatcacgtatcagagtaacactgcttctgctgttcttgaaacaattaccaacattcaacccaaagagagtggaggtggtgtgggagagacccgggaggctattgtttatagattatctgaagatatgctgagtaaactccctcctgattacattcctcatgaggtgaaatctcgtttgataaagatgggccatcttaattcaatgaacatatttcttagacaagaaattgacagaatgcaaagagtcatttcaatactccgcagtagcctgagtgatctaaaattggccattgaaggaacaatcattatgagtgagaatctgagagatgctctggacaacatgtatgatgctcgtatacctcagctctggaaaagagtgtcttgggattcgtccacactgggcttctggttcactgaacttttggaaagaaatgctcagttttctacgtggatatttgaagggaggcctaatgtgttttggatgactggtttctttaatccccaaggcttcctcacagcaatgaggcaagaagtgacccgtgcccacaaaggctgggcactggacactgtgaccatccacaatgaagttctgagacagaccaaggaggagatcacgtcaccccctggggaaggtgtgtatatttatgggctctacatggatggagcagcctgggacagacggaatgggaagctcatggaatccacccccaaggtactcttcacgcagttacccgtgctccacatctttgccattaactccacggcacccaaggaccccaagctgtatgtgtgtcctatttacaagaaacccaggcgaactgatttgaccttcatcactgtggtatatttacgaacagtgttgtccccggatcactggatcctgagaggagtggcccttttgtgtgacatcaagtaa

SEQ ID NO: 303593 - protein, 128 aa, Artificial Sequence
  derived and/or modified sequence
MDKRALLASGGGGGPPAKRRLELGESGHQYLSDGLKTPKGKGRAALRSPDSPKKKTRYDTSLGLLTKKFIQLLSQSPDGVLDLNKAAEVLKVQKRRIYDITNVLEGISDLFDAYDLEKLPLVEDFMCS

SEQ ID NO: 303594 - DNA, 387 bp, Artificial Sequence
  derived and/or modified sequence
atggataagcgggccctgctagccagcggcggcggggggggcccccctgctaaaaggcggctggaacttggtgagagcggacatcagtatctaagtgacggacttaagaccccgaaaggaaagggccgggcagctcttcgatcccccgactcccccaaaaagaaaactcggtatgacacttccttgggcctgctgaccaagaagttcattcagctgctgtcgcagtctcccgacggggtccttgatctgaataaggctgccgaggtgttgaaagtgcagaaaaggaggatttatgatattacaaacgtcctggagggtattagtgacttattcgatgcctacgaccttgaaaaactgcctctggtggaagatttcatgtgctcctag

SEQ ID NO: 303595 - DNA, 387 bp, Artificial Sequence
  derived and/or modified sequence
atggacaagagggccctgctggccagcggcggcggcggcggccccccagccaagaggcggctggagctgggggagagcggccaccagtacctgagtgatggcctgaagacccccaagggcaagggccgggccgccctgcggagcccagacagccccaagaagaagaccaggtatgacaccagcctgggcctgctgaccaagaagttcatccagctgctgagccagagcccagatggagtgctggacctgaacaaggctgctgaggtgctgaaggtgcagaagaggcgcatctatgacatcaccaacgtgctggagggcatcagtgacctgtttgatgcctatgacctggagaagctgcccctggtggaggacttcatgtgcagctag

SEQ ID NO: 303596 - DNA, 387 bp, Artificial Sequence
  derived and/or modified sequence
atggacaagcgggccctgctggccagcggcggcggcggcggccccccggcaaagcgacgtcttgaacttggagaatccgggcatcagtatctttccgatgggctgaagaccccaaaggggaaagggcgtgcagctctccggagccccgattcccctaaaaagaagacacgctacgacacatctctggggttactcacaaaaaaattcattcagttgctaagccagtcccctgacggtgtgctagaccttaataaagcagccgaggtgctcaaggtgcagaagagaagaatctatgatattactaacgtgctcgaagggatttccgatctgttcgatgcctacgatctggagaaactgcccttggtcgaggactttatgtgttcatag

SEQ ID NO: 303597 - DNA, 387 bp, Artificial Sequence
  derived and/or modified sequence
atggacaagcgggctctcctcgcaagtggagggggtggaggtccgcctgcaaagcgcagactggagcttggagagtccggccatcagtacctgagtgacggcctgaaaaccccgaaggggaagggcagggctgccctccgctcacccgattcccctaagaagaagacccgatatgacacatcgctcggtcttcttacaaaaaaatttatccagttgctgagtcagtctccggatggggtcctggacttaaacaaagcggcagaagtgctgaaggtacagaagcggcgaatctatgacatcaccaatgtgctcgaagggatcagtgacctgttcgatgcatacgatctggagaagcttccactggttgaggactttatgtgttcatag

SEQ ID NO: 303598 - DNA, 387 bp, Artificial Sequence
  derived and/or modified sequence
atggacaagagagccctgctggccagcggcggcggcggcggcccccccgccaagagaagactggagctgggcgagagcggccaccagtacctgagcgacggcctgaagacccccaagggcaagggcagagccgccctgagaagccccgacagccccaagaagaagaccagatacgacaccagcctgggcctgctgaccaagaagttcatccagctgctgagccagagccccgacggcgtgctggacctgaacaaggccgccgaggtgctgaaggtgcagaagagaagaatctacgacatcaccaacgtgctggagggcatcagcgacctgttcgacgcctacgacctggagaagctgcccctggtggaggacttcatgtgcagctag

SEQ ID NO: 303599 - DNA, 4094 bp, Artificial Sequence
  derived and/or modified sequence
gccatttttcagctgccggccgcagcacccgggctgccgccgccgcctcgcaatccgttgcatcggccgcccccgacgcctccatccccgcttggggcccgatatccgtgcggccgggaccctcctctctccagagccccgattatttttggcccccggggcctgtgcggtgcggaaaaataaaaagaaaagagagagagggggctcggaagcgccgggcggggaggagagaaggaggagagacttggaaactccgactgcaaataataaagaaattgaaaacaatacattaatataccataacactaaaaagagcaggagcgagagatgagaaagggaatccagcccgctctggagcagtacctggtgaccgccgggggtggggagggggcggctgtcgtcgccgccgccgctgcagcctccatggacaaaagggcactgctagccagcggcggcggcggcggccctccggcaaagcgaaggctggagctaggagaaagcggtcatcagtacctctcagatggtttaaaaacccccaagggcaaaggaagagctgcactacgaagtccagatagtccaaaaaaaaaaacgcggtatgatacgtctcttggtctgctcaccaagaagttcattcagctcctgagccagtcacccgatggggtattggatttgaacaaggcagcagaagtgctaaaagtgcaaaagagaaggatttatgatatcaccaacgttctggaaggcatcagcgatctcttcgatgcttacgatttggaaaagctcccactggtggaagacttcatgtgtagttgattatgcttcgtgtgaactctccttaaaaaccgatatttttttatcatggaaccagaacatctgtcatgcagtgttgtcccttcctaccttcttcctccaagagagtatcatgaagtaaactacaaacttcagaagaaagctgacattttaatgaattttttaaaaaattaataaacaaattgtctaaacgcacagttgcaggctcccttgggaaagccctgctttgctccaggctccaagatctcctggctaagtcagcaagtgagaaaatgtgcaatcaggtgtctctcaccccgaattgtccttcctccttcctccccggattggcttgctgtgcctgacggatgggctgtagaatggggtctggccacctggcctgctgggaaacagcaatcttccttaatagcatttcaagccgtgccttctccgcagaatgcatgtctttgaggtctgctaatatggaatggaactgcagcaaatgcaaacttgaagtcatgcaaaagtatgaaatggatttcttcagctcttcttaggaatatttaaattactgtcataattcagtttaagctatgaactgtgtgtcccagtaggaggtcaagaaaacctccacagccttctggatgaagaacctgttttcaaatatacttgttgcagatacagaagactagtagagttctgccactctaagctgttgtggattttcctgtctccatgaaccactcccattcccccgtccccaatgtgtttgtgagtttccagttgatttgtagcaaatgcctacttagttctttgtggattgttctagacttttaatttttttagctgccatttaagcattcctgtggcacccatcaccatttcaatttaattgtttactttgaagcggtttttgcaaattcatattacttaagcagagggagagaacctctactgatcagagcatctaaacctgtgtgatctaaggtttatcagcctctgcaaggagctttgtcccatcgtgcttccattcccaggagggggagcttggagcgagtcagtcctggggcttgctgacatgggtggcccattggaaaggagaaccaggtcagatgatgtaacagccccaaggagcagcaggcatgggtccctccatccttgggcttcccgggcccctgtgacaggggaaagggctctcttacaccgcactcagggagaccacttctcaggatggggtcagatggagagacctctagggagaaagacatccccattgtgtgagtggcatttccttaagctggcaggaacagggagcagccctgtgtcgggggctggaatagttctggccagaccccgttccccttcctctatgaaggaataagttggaccaagggaagtcggggacgtaaaaaatgaagcaaaacaatgccagggtgtctcccgctttactcttcaggaatggtgtcccaagttggaggctttgtgtcagctgcaaatcctaccagttatgtccaagaatggctttccctcgggcaggtggcagcggccatctcccactgggaatatggcgtagtatctccggtccattccttggatgctaaggactgcgggaatgagggagtcagataaagaacaaacctcgaaacgaacagttaaattgaaatgctatgtgcctgacccaatggtaggcacatagtaggcactcaactcatatgtttaattgaattgaaaatatcccttaggaaaaaaaaaaaacacacaaaaaaccacaagagccccagccagtttactccaggtagatttccacaatatgcaaagtggtggtggggtcaagacagatgacaccagcactttaaactctttgtgtgggtatgcgtgggtgtatgtttgggaagaaaaacaaaggtgcagactatcttcctttttttcttcttcagcctccatccctggcctcctcccctcacacacactggacttggtacaaaatgtcggtgtggtcctagatgaagcattggggtgggggagggagagggagctttgtgttaagtgcctactggaaatgcactgtggggttttttcctgtatgggaaaccatttatgccaagcttttccccatttcccatatttatctcatctggttagctgcctctgcttccagctttgtgtaattctctttgccagctgcacaaagctgattttttccaaagtctaaagactgagctcacctggctagattgttgtgtgttttgttgaattttttcataatgtaatgccgtatttattgtttttaaaatgaaaggaatactaataagtcttaaaagttccttcatgcataagatttttttccagttactgggtttaactggtgtacattaattagatgtccatactgtattttgtttgcattaagtaattttctttttgacttagtatccggcacacaaagtgggttagtactacagtatttgcgttactttaagtactaagtatgcaggtttcctggtaccattgagttgctgctattaaagctcacacacgaaatggctaaaagttacaagtgtgcaaattatgactgcgtgagccttagaaaataaaatgtataaagggcaacacatgagctgtcaaacagtgttaggagtgtgtttatatgtacagagttgtgcatagcaatcgttttatttaagttgatatgtagtctactcacattttcattatttagcaattttgtacaaaaatagcaattaatttgtaaacactgccagaatactttctagctgctttgtaattttttaagagtgttattttgtttttgtttttctgttctttgttgtggctcttgttttcatttttgttgtacgtgtagatctgtaaataaaattgcagtatttaaagcttaagctttcaggaaaaagaaaataagaattcagtgtgtgcatgacaactcgtgtgtatgagaaggagggatatgaaggaagatggcttgcagagtaagtcgggtggcaattgtcagggtgtgggaatttcttttcctacggggtacgtgattttgtaaaaaggaagtatttctcccaaaattgggagtaggcaaactactaatcagtttagctttgtgttgtatgctagtttaaaaaagaaaatatgtaatataatgtaaaaaaaaacaaaaaaaagcttttatgatggattttgtaaatagatttgttacagggtgacctgttctctagctgtgatcttaccacttcaaatgggtgtaatttgaataaattttgtatggtaaaggatcaataaaatgattttttttaagagtt

SEQ ID NO: 303600 - DNA, 687 bp, Artificial Sequence
  derived and/or modified sequence
atggtggacaacatgaccaagctggtgctggtgaacgccatctacttcaagggcaactggaaggacaagttcatgaaggaggccaccaccaacgcccccttcagactgaacaagaaggacagaaagaccgtgaagatgatgtaccagaagaagaagttcgcctacggctacatcgaggacctgaagtgcagagtgctggagctgccctaccagggcgaggagctgagcatggtgatcctgctgcccgacgacatcgaggacgagagcaccggcctgaagaagatcgaggagcagctgaccctggagaagctgcacgagtggaccaagcccgagaacctggacttcatcgaggtgaacgtgagcctgcccagattcaagctggaggagagctacaccctgaacagcgacctggccagactgggcgtgcaggacctgttcaacagcagcaaggccgacctgagcggcatgagcggcgccagagacatcttcatcagcaagatcgtgcacaagagcttcgtggaggtgaacgaggagggcaccgaggccgccgccgccaccgccggcatcgccaccttctgcatgctgatgcccgaggagaacttcaccgccgaccaccccttcctgttcttcatcagacacaacagcagcggcagcatcctgttcctgggcagattcagcagcccctag

SEQ ID NO: 303601 - DNA, 687 bp, Artificial Sequence
  derived and/or modified sequence
atggtggataacatgacgaaactcgtgcttgtgaatgctatttatttcaagggaaattggaaggacaagttcatgaaagaggcaaccacaaacgccccgtttcgcctcaacaagaaggacagaaaaacggtgaagatgatgtaccagaaaaagaagttcgcctatggctatatagaggacctcaagtgtagggtgctggagctgccctatcagggagaagaactgagtatggtcatcctgctcccagatgacatcgaagacgaatccaccggcctgaagaaaattgaggagcaattgaccttggaaaaactgcatgaatggaccaaacccgagaatcttgacttcattgaggtcaacgtcagcctcccaagattcaagctagaagagagctacacactcaatagcgacctagccaggttaggagtacaggaccttttcaactccagtaaggctgacctgagcggcatgagcggggctagagacatctttatcagtaaaattgtgcacaaaagtttcgtggaagttaacgaagagggaaccgaggccgcagcggcaaccgcaggtattgctacattctgtatgttgatgcccgaggagaactttaccgcggaccacccgttcctgttcttcataaggcacaatagtagtggctccattttgtttctgggtcggttttccagcccatag

SEQ ID NO: 303602 - DNA, 687 bp, Artificial Sequence
  derived and/or modified sequence
atggtggacaacatgaccaagctggtgctggtgaatgccatctacttcaagggcaactggaaggacaagttcatgaaggaggccaccaccaatgcccccttccggctgaacaagaaggacaggaagacagtgaagatgatgtaccagaagaagaagtttgcctacggctacatcgaggacctgaagtgccgggtgctggagctgccctaccagggcgaggagctgtccatggtgatcctgctgcctgatgacattgaagatgagagcacaggcctgaagaagattgaggagcagctgaccctggagaagctgcacgagtggaccaagccagagaacctggacttcatcgaggtgaatgtgtccctgccccgcttcaagctggaggagagctacaccctgaacagcgacctggcccggctgggcgtgcaggacctcttcaacagcagcaaggctgacctgagcggcatgtctggggcccgggacatcttcatcagcaagatcgtgcacaagagctttgtggaggtgaatgaggagggcacagaggccgccgccgccacagctggcatcgccaccttctgcatgctgatgcctgaggagaacttcaccgctgaccaccccttcctgttcttcatccgccacaacagcagcggcagcatcctcttcctgggccgcttcagcagcccctag

SEQ ID NO: 303603 - DNA, 687 bp, Artificial Sequence
  derived and/or modified sequence
atggtggacaacatgaccaagctggtgctggtgaacgccatctacttcaaaggcaactggaaggacaaattcatgaaagaggccaccaccaatgctccctttcggttgaataaaaaggatagaaagacggtgaaaatgatgtaccagaagaagaagtttgcctacggctacatcgaggatctcaaatgtagggtcctcgaactgccttatcagggcgaggagctctcaatggttatcctgttgccagatgatatagaagacgagtccaccggactgaaaaagattgaagaacagctgaccctcgaaaagctgcacgaatggactaagcccgaaaacctggatttcattgaagtgaacgtgtcgctgccaaggtttaaactggaagagagctacaccctgaattcagacctggcgcggctgggagtgcaggacttgtttaactcaagcaaggcagatctatccggcatgagcggcgccagggacatcttcatttcgaaaattgttcataagagttttgtggaagttaacgaggaagggacagaggccgccgctgccactgccggcatcgctactttttgcatgctaatgcctgaagagaactttacggcagaccacccgtttctattttttatccggcacaattccagtggatcgatcctctttcttggccgcttctcaagcccatag

SEQ ID NO: 303604 - DNA, 687 bp, Artificial Sequence
  derived and/or modified sequence
atggtcgacaacatgacaaaacttgtgctcgttaacgcgatttacttcaaggggaactggaaggataaatttatgaaggaggcgacgacgaacgctccttttcggctcaacaaaaaggatagaaagacagtcaaaatgatgtaccaaaaaaaaaagttcgcctacggttatatcgaagaccttaaatgtagagtgctagagctgccgtatcagggagaggagctttctatggtcatcctgctgcctgacgacatcgaagatgaatcaactggcctcaagaaaatagaggagcagctgaccctggagaagctgcacgagtggaccaagcccgaaaacctggacttcatcgaagtgaacgtgagcctgcccaggtttaagctggaggagtcctatacactcaattccgacctcgccaggctgggagtgcaggatttgtttaattccagcaaggctgacttaagtgggatgtcaggggcacgcgacatttttatctccaaaattgtgcataagtccttcgtcgaagtaaatgaggagggaaccgaagcagctgcggctacggcaggaattgctacattctgtatgctcatgcccgaggaaaactttactgctgaccatccttttctgttcttcattcgccacaactcatctggaagcatactgtttctcggcaggttctcaagcccgtag

SEQ ID NO: 303605 - DNA, 687 bp, Artificial Sequence
  derived and/or modified sequence
atggtggacaatatgaccaaacttgtgttggtcaacgccatttatttcaaaggcaactggaaggataagttcatgaaagaggctacaacaaatgcaccttttaggctgaacaaaaaagaccgcaagactgtcaagatgatgtatcaaaagaaaaaatttgcctacggttacattgaagacttgaaatgccgcgtcctagaactgccctaccaaggcgaggagttgagtatggtgattctcctgccagatgatattgaagatgagagtactggtctcaagaagatagaggagcaactcacccttgagaagctgcacgaatggaccaaacccgaaaaccttgattttattgaggtgaacgtttcactcccccggtttaagctagaggagtcctacacactgaactctgacctggcaagattgggcgttcaagatctgtttaatagcagtaaagccgatttaagtggcatgtctggagctagggacatttttatcagcaagatcgtgcataaaagctttgtggaagtgaacgaggaaggcaccgaggctgcagccgccactgccggaatcgcaacattctgtatgctcatgcccgaagagaatttcactgcagaccatccattcctgttcttcataagacacaactcaagcggtagtattctcttcctggggcgattttcttctccgtag

SEQ ID NO: 303606 - DNA, 687 bp, Artificial Sequence
  derived and/or modified sequence
atggttgacaatatgacgaagctcgtccttgtgaacgcgatttactttaagggaaattggaaggacaagttcatgaaggaagctactactaatgccccctttcgcctgaacaaaaaagatcggaaaactgtgaaaatgatgtatcagaagaagaaattcgcctacggttatattgaagacctcaaatgtcgcgtgctggagctcccatatcaaggtgaggaactttcaatggtcatactgcttcccgatgatatagaagacgaatccactggacttaagaagatagaggaacaactgactctcgaaaaactgcacgaatggactaagcccgaaaatctggactttatagaagtcaatgtttcactcccacgcttcaagcttgaggagtcatacaccctgaatagtgacctggcaagactgggggtccaggatctgttcaattcaagcaaggccgacctgtccgggatgtctggagcaagagatatttttatcagtaaaattgtgcacaagtcatttgttgaggtaaacgaagagggaacggaggcagctgccgcaacagccggaattgccaccttctgtatgctgatgccagaagagaatttcaccgctgaccacccattcctcttctttattcgccacaactcctctggaagcattctgttcctaggccgtttctcatcaccgtag

SEQ ID NO: 303607 - protein, 501 aa, Artificial Sequence
  derived and/or modified sequence
MQDTVTTSALLDPSHSSVSTQDNSSTGGHTSSTSPQLSKPSITPVPAKSRNPHPRANIRRMRRIIAEDPEWSLAIVPLLTELCIQHIIRNFQKNPILKQMLPEHQQKVLNHLSPDLPLAVTANLIDSENYWLRCCMHRWPVCHVAHHGGSWKRMFFERHLENLLKHFIPGTTDPAVILDLLPLCRNYVRRVHVDQFLPPVQLPAQLRPGDQSDSGSEGEMEEPTVDHYQLGDLVAGLSHLEELDLVYDVKDCGMNFEWNLFLFTYRDCLSLAAAIKACHTLKIFKLTRSKVDDDKARIIIRSLLDHPVLEELDLSQNLIGDRGARGAAKLLSHSRLRVLNLANNQVRAPGAQSLAHALAHNTNLISLNLRLNCIEDEGGQALAHALQTNKCLTTLHLGGNELSEPTATLLSQVLAINTTLTSINLSCNHIGLDGGKQLLEGMSDNKTLLEFDLRLSDVAQESEYLIGQALYANREAARQRALNPSHFMSTITANGPENSVG

SEQ ID NO: 303608 - DNA, 1506 bp, Artificial Sequence
  derived and/or modified sequence
atgcaggacaccgtgaccaccagcgccctgctggaccccagccacagcagcgtgagcacccaggacaacagcagcaccggcggccacaccagcagcaccagcccccagctgagcaagcccagcatcacccccgtgcccgccaagagcagaaacccccaccccagagccaacatcagaagaatgagaagaatcatcgccgaggaccccgagtggagcctggccatcgtgcccctgctgaccgagctgtgcatccagcacatcatcagaaacttccagaagaaccccatcctgaagcagatgctgcccgagcaccagcagaaggtgctgaaccacctgagccccgacctgcccctggccgtgaccgccaacctgatcgacagcgagaactactggctgagatgctgcatgcacagatggcccgtgtgccacgtggcccaccacggcggcagctggaagagaatgttcttcgagagacacctggagaacctgctgaagcacttcatccccggcaccaccgaccccgccgtgatcctggacctgctgcccctgtgcagaaactacgtgagaagagtgcacgtggaccagttcctgccccccgtgcagctgcccgcccagctgagacccggcgaccagagcgacagcggcagcgagggcgagatggaggagcccaccgtggaccactaccagctgggcgacctggtggccggcctgagccacctggaggagctggacctggtgtacgacgtgaaggactgcggcatgaacttcgagtggaacctgttcctgttcacctacagagactgcctgagcctggccgccgccatcaaggcctgccacaccctgaagatcttcaagctgaccagaagcaaggtggacgacgacaaggccagaatcatcatcagaagcctgctggaccaccccgtgctggaggagctggacctgagccagaacctgatcggcgacagaggcgccagaggcgccgccaagctgctgagccacagcagactgagagtgctgaacctggccaacaaccaggtgagagcccccggcgcccagagcctggcccacgccctggcccacaacaccaacctgatcagcctgaacctgagactgaactgcatcgaggacgagggcggccaggccctggcccacgccctgcagaccaacaagtgcctgaccaccctgcacctgggcggcaacgagctgagcgagcccaccgccaccctgctgagccaggtgctggccatcaacaccaccctgaccagcatcaacctgagctgcaaccacatcggcctggacggcggcaagcagctgctggagggcatgagcgacaacaagaccctgctggagttcgacctgagactgagcgacgtggcccaggagagcgagtacctgatcggccaggccctgtacgccaacagagaggccgccagacagagagccctgaaccccagccacttcatgagcaccatcaccgccaacggccccgagaacagcgtgggctag

SEQ ID NO: 303609 - DNA, 1506 bp, Artificial Sequence
  derived and/or modified sequence
atgcaggacaccgttactacctctgcgctgctggatcccagccatagcagtgtgtctacacaggataattcctctacaggcggccacacttcgagtactagcccacagctctccaagcctagcattacacctgtgcctgccaaatctagaaatcctcaccctagggctaacatccgacgaatgcgtcgcatcatagccgaggatcctgaatggtctcttgcgattgttccgctgttgaccgagctttgcattcaacatattattcggaactttcagaagaacccgatcctgaaacagatgctgcccgaacaccagcagaaagtgctcaaccacctgagcccagatttgcctcttgctgttaccgccaacctaattgacagcgagaactattggctgcgctgctgcatgcacagatggcctgtgtgtcacgtggcacaccacgggggttcgtggaagagaatgttctttgaaagacacctggagaaccttctgaagcactttatccctgggacaacagaccctgctgtaattttggatctactccccctgtgtcggaattacgtgcgacgcgtacatgtagaccaatttttgccgcctgtgcaattaccagcccagctgcgccccggtgaccagtccgattcaggatccgagggcgagatggaggaacccactgtggaccactaccagctgggtgatcttgtagcaggcttgtcgcacctggaagagcttgacctggtgtatgatgtcaaggattgtggtatgaactttgagtggaacctgtttctgttcacctacagagattgcctctcgctcgcagccgcaatcaaagcatgccacacgctcaagatattcaagttgactagatccaaggtcgacgatgacaaggccaggatcattatcaggagcttactggaccacccggtgcttgaggagctcgatttgtcccaaaatcttattggggatcgaggcgccagaggggctgccaagctcctatcacatagtcgtctccgcgtactgaacttagcaaacaaccaagtgagagccccgggggctcaatctcttgcacacgctctcgcccacaatactaaccttattagcttgaacttgcgactaaattgtatcgaagatgagggaggacaggcactggcacatgccctgcagacaaataagtgcctgacaacgctgcatctgggggggaatgagctctctgagccaacagccaccttactctcacaggtcctggctattaacacaacactcactagcatcaacttgagttgcaaccacatcggcctggatggcggcaaacagctcctggaaggaatgtctgataataagaccttgctggaattcgatcttcgactctcagatgttgctcaggagagtgaatacctgattgggcaggccctctatgccaaccgggaggccgcccgccagcgggctctgaacccttcacactttatgtccacaattacggctaatggaccagagaattcagtcgggtag

SEQ ID NO: 303610 - DNA, 1506 bp, Artificial Sequence
  derived and/or modified sequence
atgcaggacacagtgaccaccagcgccctgctggaccccagccacagctctgtgtccacccaggacaacagcagcactggaggccacaccagcagcaccagcccccagctgagcaagcccagcatcacccctgtgcctgccaagagcaggaacccccacccccgggccaacatccggaggatgaggcgcatcatcgcagaagatcctgagtggagcctggccatcgtgcccctgctgacagagctgtgcatccagcacatcatccggaacttccagaagaaccccatcctgaagcagatgctgcctgagcaccagcagaaggtgctgaaccacctgagcccagacctgcccctggccgtgacagccaacctgattgattctgagaactactggctgcgctgctgcatgcaccgctggcctgtgtgccacgtggcccaccacggcggctcctggaagaggatgttctttgagcggcacctggagaacctgctgaagcacttcatccctggcaccacagatcctgctgtgatcctggacctgctgcccctgtgcagaaattatgtgagaagagtgcacgtggaccagttcctgccccctgtgcagctgcctgcccagctgcggcctggggaccagagcgacagcggcagcgagggggagatggaggagcccaccgtggaccactaccagctgggggacctggtggccggcctgagccacctggaggagctggacctggtgtatgatgtgaaggactgtggcatgaactttgagtggaacctcttcctgttcacctacagagactgcctgagcctggccgccgccatcaaggcctgccacaccctgaagatcttcaagctgaccaggagcaaggtggatgatgacaaggcccgcatcatcatccgcagcctgctggaccaccctgtgctggaggagctggacctgagccagaacctgattggagacagaggagcccggggagctgccaagctgctgagccacagccggctgcgggtgctgaacctggccaacaaccaggtgcgggcccctggggcccagagcctggcccacgccctggcccacaacaccaacctgatcagcctgaacctgcggctgaactgcattgaagatgagggcggccaggccctggcccacgccctgcagaccaacaagtgcctgaccaccctgcacctgggcggcaatgagctgtctgagcccacagccaccctgctgagccaggtgctggccatcaacaccaccctgaccagcatcaacctgagctgcaaccacatcggcctggatggcggcaagcagctgctggagggcatgtctgacaacaagaccctgctggagtttgacctgcggctgagtgatgtggcccaggagagcgagtacctgattggccaggccctgtatgccaaccgggaggccgcccggcagagggccctgaaccccagccacttcatgagcaccatcacagccaacggcccagaaaattctgtgggctag

SEQ ID NO: 303611 - DNA, 1506 bp, Artificial Sequence
  derived and/or modified sequence
atgcaggacaccgtgaccaccagcgccctgctggaccccagccactcaagcgtgagtacacaggacaatagctcgacaggggggcacacctcctcgacaagcccccagctaagcaagccgtcaattaccccagtgcctgctaaaagcaggaacccacaccctagggctaatatcaggaggatgaggcgtattatagccgaggacccagagtggtcgttagccattgtacccctgctgacagagctgtgcatacagcacatcatcaggaacttccagaaaaacccaatccttaaacagatgctgccagaacaccagcagaaggtccttaaccacctgagcccagatctgccccttgctgtcaccgcaaacctcattgactccgaaaattactggcttagatgttgcatgcacagatggcctgtgtgccacgttgcacaccatggcggatcgtggaagaggatgttcttcgagagacatcttgaaaatctgctcaaacactttatccccgggaccaccgaccctgctgtcattctggatctgctccccctgtgcaggaactacgttcgccgcgttcatgttgatcaattcctgccaccagtgcagctcccagcccagctgcggcccggcgatcaatctgacagtggatcagagggcgaaatggaagaacccaccgttgaccactatcagctgggcgatttggtggctggcctctcacacctggaggagctggatttagtctacgatgtgaaagactgtggtatgaattttgaatggaacctctttctgttcacataccgcgactgtttatccctggctgccgctattaaagcttgccataccttgaagattttcaagctaacacgaagcaaagtggatgacgacaaagccaggattattattagatctcttcttgatcaccccgtgctggaagagctggatctgtcccagaatctgattggggataggggcgcgaggggagctgcaaagcttctgagccattcccggctccgcgtgctcaatctcgccaacaaccaggttcgggcccctggcgcacagtctctagctcatgccctcgcacataacactaaccttatctcattaaacctcagacttaactgtatcgaggacgaagggggtcaggccctagctcacgctttacaaacaaataaatgtctgaccactttgcatttaggcgggaatgagctctccgaacctacggcgactctgctgtcccaggtcctcgcaatcaacacaactcttaccagtataaatcttagctgcaaccacatcgggctggacggcggaaagcagctcctggaaggcatgtctgataacaaaaccctgctcgaattcgatttacgcctgagcgatgtcgctcaagagtccgaatacttaatcgggcaggccttgtacgccaacagggaggctgcacggcagcgcgccttaaacccttcccattttatgtcaaccatcacagcgaatggtccggagaattccgtgggttag

SEQ ID NO: 303612 - DNA, 1506 bp, Artificial Sequence
  derived and/or modified sequence
atgcaggacactgtgacgaccagcgccttgctcgacccttcacactcgagtgtgagcacccaggataactcctccaccggaggacacacttctagcacatctccacaactgagtaagccctcaatcacccccgtacctgcaaagtcacgtaaccctcaccctagggcgaacattcggcgtatgcggagaatcattgcagaagatcctgagtggtccctggctattgtaccgctgctcacagagctgtgcatccagcatataattcggaacttccaaaaaaaccccatactcaagcagatgctaccagaacatcaacagaaggtactaaatcacctgtcacctgatctgcccctggcggtcacagcgaacttaattgattccgaaaactattggctccgttgttgcatgcaccgctggcccgtgtgtcacgtagcccaccacgggggtagctggaagcgtatgttctttgaacgccatctcgaaaacctcctcaagcattttatcccagggactacggaccctgcggtgatcctggacttactcccgctctgtcggaactatgtgagaagggtgcacgtcgatcagttcttaccccctgtgcagttgccagcccaacttcggcctggcgaccagagcgattctggtagtgagggagagatggaggaacctacggtggaccactaccagctcggcgacctggttgcaggcctcagtcacctggaagagctggacctggtgtatgatgttaaagactgcgggatgaactttgaatggaatctgtttctgtttacttatcgggattgtctttcccttgcggcagcaatcaaagcttgtcacactcttaagatatttaaattgacccgctcaaaggtggatgatgacaaagcgaggatcatcattcgttcactgcttgatcaccctgtcctagaggaactggatctgagccagaacctgataggcgaccgaggggctaggggggctgccaagctcctgagtcactcccgactgagagtgctgaatctggccaataatcaagtcagggccccaggggcacagtctctggcccacgccttagcccacaatactaacttgataagtctgaacctcagattgaattgtatcgaggatgagggcggacaagcgctggcacacgcgttacaaaccaacaagtgtctgacaaccttacacttggggggtaatgagctgtctgaaccaaccgcaaccctcttgagccaggtgttggccataaacacaacattgacaagcattaaccttagttgcaatcacattggtcttgatggaggtaagcagcttctggagggcatgtctgataataagactctcctggagttcgacctgagactttccgacgttgcccaggagtccgagtacttaattgggcaggccctttatgcgaatagggaagcagctcgccaacgggctctgaatcctagccattttatgagcaccatcaccgcaaatggtcctgagaacagcgtggggtag

SEQ ID NO: 303613 - DNA, 3067 bp, Artificial Sequence
  derived and/or modified sequence
gtgaggcgagcgccggggctcccggagcggatccctacctgtttcaaggacctgccagtctgagaagcttcttgtcataaggccatccaggggccacgcacccctaccttgccagcctccagcatgcaggataccgtaacgacatcagcattgttggaccccagccactcctcagtctccacccaggacaattcctccactggaggacacacttcaagcacaagcccacagctctcaaagccttcaatcacaccagtccctgcaaagtccaggaacccacatcccagggccaatatccgtcggatgcgccggatcattgctgaggatcctgagtggtcactggccatcgtgcccctcctcacagagctctgcattcagcacattatcaggaacttccagaaaaaccctatcctgaagcagatgctcccggaacaccagcagaaggtcctgaaccacctgtcccctgacctaccactggctgtgaccgccaacctgatagacagtgagaactactggctccgctgctgcatgcatcgctggcccgtgtgccacgtggcccaccatggcggcagctggaaacgcatgttcttcgagcggcacctggagaacctgctaaagcactttatcccaggcaccacagaccctgcggtgatcctcgacctgctgccgctctgccggaattacgtgcgcagggtccacgtcgatcagttccttccgccggtgcagctcccggcccagctccggccgggcgaccagtccgactcaggcagcgagggagagatggaggagcccaccgttgaccactaccaactgggcgatctggtagctggcctgagccacctggaggagctggacctggtgtacgatgtcaaggactgcggcatgaatttcgagtggaatctcttcctcttcacctaccgtgactgcctctccttggcagccgccatcaaggcatgccacaccctcaagatcttcaagctgacccgaagcaaggtggatgatgacaaggcacgcatcataattcgaagccttctggaccacccagtcctcgaggagctggacttgtcacaaaacctcattggagaccgtggtgcacgaggtgctgccaagctgctgagccacagccgcctgcgtgtgctcaacctggctaacaaccaggtgcgtgcacccggtgcccagtccctggctcacgctctggcacacaacaccaacctcatttccctcaacctacgtctcaactgcatcgaggatgagggtggccaggctcttgcccatgccttgcagaccaacaagtgcctcaccacgctgcacctcggtggcaatgagctgtctgagcccaccgccacactcctgtcacaggtgctcgccatcaacaccacactcaccagcatcaacctgtcctgcaaccacatcgggctggacggtgggaagcagctcctggaaggcatgtcagacaacaagaccctcctggaatttgacttgcgcctgtcagatgtggcccaggaaagcgagtacctcattggccaggccctctacgcaaaccgagaagcagcccgccagcgggccctgaatcccagccacttcatgtcaaccataactgccaatggccctgagaactctgtgggataaaatgacctgacttggatcatggccccagccccatccctcatttcatacccctgccatgcctgctgcagagtatcacactggttcagagggagcggggagggggactgtgaataaccttggagtgatcaagggttgtatggatggagacatgaggcagggaagggagcctggcatgggggaagaaagggtatgcagtagggacccagcctttgtgcccagggaaaggatattactggacacccacaaatgaccaacttctttcaggaacagggaagtcagagaggtgtctgagggactgtgcctgccagattctcccgttggggctgcctgcctccctgactccccaccattttcttctctaccaaacagatccttgatcttcaaacacacacacacacacacacacacacacacacacacacacacacacaccctctggctacagcagggctatgcctggctctctctgccaccctcatccctgtagatgcatttccctgttgcttgactctgctttaagtgatccagttctacaggccacgccatcccctagttccccaactcccaacctgggaaggggacaatgagctgacaccaggggctcagacccagtggactcctctggggaggcaactgtagatgacaacttccagggaaggatgacacaatccctgccacccaccccagagagcttccctgggagggagggaaagaagtgccacactgggacaggaagtcagtgagtcatccacgactttattatccaccagtttgatttgtacaatctttgcgcttaaatccacgacaaaaaggccacagtgtgatgcacccaattgacagagacctgtcttctccccagccaggcccagcccaccccacaagcccttgtccccaggacacatggagccttccaggtgccctacatgagtcccccatcactctgtagctgtccaccctggggccacacctacaggaatcacatcagcccccagggccacaagagacctagctgactgattcaggctgagcgccattgcccatcctccttgggctgattcattggcccagagcctccagaactgtgtccccaaagggcaggtcatgggctacaaccccagtccaggagtgcctgctctccagggactccttccgctaagcaggcgctgagcagagcaccaaagggggcttgggagtgactgcatgtgtgtgcctgtctaggcaacctagagtctgtctgtgcctgacaccctctgacagttccggagtgcaaacgtgtaggtgtgagggtgtgtgtgtgtgtgtgtgtgtgtatagccacagctgctagcagaagttctaattagagaaacaagaacattcagtgtaaagtttaattttagagattaattaattttctggttttcattttccctggcaatcagtaaagctaccaagaaaa

SEQ ID NO: 303614 - protein, 198 aa, Artificial Sequence
  derived and/or modified sequence
MFFERHLENLLKHFIPGTTDPAVILDLLPLCRNYVRRVHVDQFLPPVQLPAQLRPGDQSDSGSEGEMEEPTVDHYQLGDLVAGLSHLEELDLVYDVKDCGMNFEWNLFLFTYRDCLSLAAAIKACHTLKDGGKQLLEGMSDNKTLLEFDLRLSDVAQESEYLIGQALYANREAARQRALNPSHFMSTITANGPENSVG

SEQ ID NO: 303615 - DNA, 597 bp, Artificial Sequence
  derived and/or modified sequence
atgttcttcgagagacacctggagaacctgctgaagcacttcatccccggcaccaccgaccccgccgtgatcctggacctgctgcccctgtgcagaaactacgtgagaagagtgcacgtggaccagttcctgccccccgtgcagctgcccgcccagctgagacccggcgaccagagcgacagcggcagcgagggcgagatggaggagcccaccgtggaccactaccagctgggcgacctggtggccggcctgagccacctggaggagctggacctggtgtacgacgtgaaggactgcggcatgaacttcgagtggaacctgttcctgttcacctacagagactgcctgagcctggccgccgccatcaaggcctgccacaccctgaaggacggcggcaagcagctgctggagggcatgagcgacaacaagaccctgctggagttcgacctgagactgagcgacgtggcccaggagagcgagtacctgatcggccaggccctgtacgccaacagagaggccgccagacagagagccctgaaccccagccacttcatgagcaccatcaccgccaacggccccgagaacagcgtgggctag

SEQ ID NO: 303616 - DNA, 597 bp, Artificial Sequence
  derived and/or modified sequence
atgttttttgaacgccatctcgagaatctgctcaaacatttcatccctggaaccacagaccccgccgtcattctggatttgctgcctctgtgccggaactacgtgcggagagtgcatgttgaccagttcctaccccccgtccagctgccggctcaattacggcctggagaccagtcagacagtggcagcgagggggagatggaggagccaactgtggatcactaccaactcggcgacctggtggctgggcttagtcacttagaggagttagatttggtttatgacgtgaaggattgcggaatgaacttcgagtggaatttgttcctcttcacgtaccgggattgtctcagtcttgccgccgctatcaaagcgtgtcatacgctgaaagacggagggaaacagctgctcgagggcatgtcagataataagaccctgcttgagtttgatctgagactcagtgatgtggctcaggagtcagaatacttgatcgggcaggctctgtacgcaaatcgtgaggccgctcggcagcgcgccctgaacccctctcacttcatgtccaccatcactgctaatggcccggaaaactcagtcgggtag

SEQ ID NO: 303617 - DNA, 597 bp, Artificial Sequence
  derived and/or modified sequence
atgttcttcgagcggcatcttgaaaacttgctgaagcacttcatccctggaaccactgaccctgccgttatcttggacttattacccctgtgccgcaattacgtcaggcgcgttcacgtcgatcaattcctcccgccagtccagctccccgcgcagctgagaccgggcgatcagtcagacagcggttcagagggcgagatggaggaaccaaccgtggaccactatcagttaggcgacctggtggcaggcctatctcatttagaagaacttgacctcgtttatgatgtgaaagactgcggcatgaattttgaatggaacctattcctgtttacttatcgagattgcctgtcactggctgccgcaataaaggcttgccatactctgaaagatggaggcaaacagttgctcgaaggaatgagtgataacaaaacacttcttgaattcgatctcaggctgtcggatgtagctcaggaatctgagtacttgatcggccaagctctctatgccaatagggaagctgctcgccagagggctcttaaccccagtcacttcatgtcaaccatcactgcaaacggccctgaaaatagcgtgggctag

SEQ ID NO: 303618 - DNA, 597 bp, Artificial Sequence
  derived and/or modified sequence
atgttctttgagcggcacctggagaacctgctgaagcacttcatccctggcaccacagatcctgctgtgatcctggacctgctgcccctgtgcaggaactacgtgcggcgggtgcacgtggaccagttcctgccccctgtgcagctgcctgcccagctgcggcctggggaccagagcgacagcggcagcgagggggagatggaggagcccaccgtggaccactaccagctgggggacctggtggccggcctgagccacctggaggagctggacctggtgtatgatgtgaaggactgtggcatgaactttgagtggaacctcttcctgttcacctacagagactgcctgagcctggccgccgccatcaaggcctgccacaccctgaaggatggcggcaagcagctgctggagggcatgtctgacaacaagaccctgctggagtttgacctgcggctgagtgatgtggcccaggagagcgagtacctgattggccaggccctgtatgccaaccgggaggccgcccggcagagggccctgaaccccagccacttcatgagcaccatcacagccaatggacctgagaacagcgtgggctag

SEQ ID NO: 303619 - DNA, 597 bp, Artificial Sequence
  derived and/or modified sequence
atgttcttcgagcggcacctggagaacctgctgaagcacttcatccctggaacgaccgatccagcggtcatcctggacctattgccgctgtgtcgcaactatgtgagacgggttcacgttgaccagtttttaccacccgtgcagctacccgctcagttgcgacccggcgaccagtccgacagcgggagcgagggcgagatggaagaaccgacggtagatcattaccaactgggtgaccttgtggccggcttaagccacctggaagaattggaccttgtgtatgatgttaaggattgtggaatgaatttcgaatggaatttattcctgtttacctaccgggactgtttgagcctggccgcagcaataaaggcttgccacaccctcaaggacggggggaagcagctactggagggaatgtcagacaacaagaccctactggaattcgatctgcgtctttcggatgtggcacaagagtctgagtacctaattgggcaagcactgtacgccaatagggaggccgcccgccaaagggctctgaatcctagccactttatgtctacaattaccgcaaatggccccgagaactctgtggggtag

SEQ ID NO: 303620 - DNA, 597 bp, Artificial Sequence
  derived and/or modified sequence
atgttcttcgagcggcacctggagaacctgctgaagcacttcatccctggtacaactgatcccgccgtgattctggatcttctcccactatgtcgcaactacgtgaggcgtgtgcacgtggaccagttcctgcccccagtgcaactgccagcacagctgagacctggagatcaatctgactctggcagcgagggggagatggaagaaccaacggtggatcactaccagttaggggacttagtggcggggttgtcacacctggaagaactggacctagtatatgatgtcaaggactgcgggatgaacttcgagtggaacctgtttttgtttacttacagagattgcctgtcactggccgcagccatcaaggcatgccacaccctgaaggatggtggcaagcagctcctggagggaatgtccgacaacaagacattgctcgaatttgatctgaggctcagcgatgtggcccaggagtctgagtaccttatcggacaagcactgtatgctaatagagaggcagcccgacagcgggcactcaacccgagtcacttcatgagtacgattacggccaacggacccgaaaactcagtaggttag

SEQ ID NO: 303621 - DNA, 597 bp, Artificial Sequence
  derived and/or modified sequence
atgttcttcgagaggcatctcgaaaacctgctaaagcactttattcccggaaccaccgatccagctgtcatcctggacctgctgcccctatgccgcaactacgttcgcagagtgcatgtggatcagtttctcccccctgttcagctgcctgcccagctgcggcctggcgatcagtccgacagcggtagcgagggcgagatggaggaacccaccgtcgatcactaccagctgggcgaccttgtcgcaggccttagccatctcgaggagctggacctcgtgtatgacgtgaaggactgcggaatgaatttcgagtggaaccttttcctgttcacatatcgggactgtctatctctggccgctgccatcaaggcatgccacaccttgaaagacgggggtaagcagctgttggagggcatgtcagataataagactctgcttgaatttgacctgcggctctcggacgtggcccaagagtctgagtacctcattggtcaggctctgtatgcaaatagagaggctgctaggcagcgagcactcaatccgagtcattttatgtccacaatcacagcaaacggaccagaaaacagcgtcggttag

SEQ ID NO: 303622 - DNA, 597 bp, Artificial Sequence
  derived and/or modified sequence
atgtttttcgaaagacatcttgagaatttgctgaagcatttcatcccgggtactaccgatccggcagtcattctagaccttcttccgctgtgtcggaattacgtccggcgagtgcacgtggaccagtttttgcctccagtgcagctgcctgcacagctgagacctggagatcaatctgatagcggtagcgagggggaaatggaagagccaaccgtggaccattatcagttaggagacctggtggcgggactttcacacctggaagagctggatctggtctacgatgtgaaagactgcggaatgaacttcgagtggaacctgtttctgttcacttaccgcgactgtttatctctcgccgcagccatcaaagcatgccacacattgaaggacgggggaaagcagctcctggaaggcatgtcggataacaagaccctcctcgaattcgatctgcggctctccgacgtcgcacaggaatctgagtacctgatcggtcaagcactctacgctaacagagaagccgctagacagagagcacttaatccatcccacttcatgagtactattaccgccaatggccctgaaaactcagtcggctag

SEQ ID NO: 303623 - DNA, 1233 bp, Artificial Sequence
  derived and/or modified sequence
gacaaagacctgcgccggcgcgcgggactctgcgtgaggcgagcgccggggctcccggagcggatccctacctgtttcaaggacctgccagtctgagaagcttcttgtcataaggccatccaggggccacgcacccctaccttgccagcctccagcatgcaggataccgtaacgacatcagcattgttggaccccagccactcctcagtctccacccaggacaattcctccactggaggacacacttcaagcacaagcccacagctctcaaagccttcaatcacaccagtccctgcaaagtccaggaacccacatcccagggccaatatccgtcggatgcgccggatcattgctgaggatcctgagtggtcactggccatcgtgcccctcctcacagagctctgcattcagcacattatcaggaacttccagaaaaaccctatcctgaagcagatgctcccggaacaccagcagaaggtcctgaaccacctgtcccctgacctaccactggctgtgaccgccaacctgatagacagtgagaactactggctccgctgctgcatgcatcgctggcccgtgtgccacgtggcccaccatggcggcagctggaaacgcatgttcttcgagcggcacctggagaacctgctaaagcactttatcccaggcaccacagaccctgcggtgatcctcgacctgctgccgctctgccggaattacgtgcgcagggtccacgtcgatcagttccttccgccggtgcagctcccggcccagctccggccgggcgaccagtccgactcaggcagcgagggagagatggaggagcccaccgttgaccactaccaactgggcgatctggtagctggcctgagccacctggaggagctggacctggtgtacgatgtcaaggactgcggcatgaatttcgagtggaatctcttcctcttcacctaccgtgactgcctctccttggcagccgccatcaaggcatgccacaccctcaaggacggtgggaagcagctcctggaaggcatgtcagacaacaagaccctcctggaatttgacttgcgcctgtcagatgtggcccaggaaagcgagtacctcattggccaggccctctacgcaaaccgagaagcagcccgccagcgggccctgaatcccagccacttcatgtcaaccataactgccaatggccctgagaactctgtgggataaaatgacctgacttggatcatg

SEQ ID NO: 303624 - DNA, 616 bp, Artificial Sequence
  derived and/or modified sequence
cgcatgttcttcgagcggcacctggagaacctgctaaagcactttatcccaggcaccacagaccctgcggtgatcctcgacctgctgccgctctgccggaattacgtgcgcagggtccacgtcgatcagttccttccgccggtgcagctcccggcccagctccggccgggcgaccagtccgactcaggcagcgagggagagatggaggagcccaccgttgaccactaccaactgggcgatctggtagctggcctgagccacctggaggagctggacctggtgtacgatgtcaaggactgcggcatgaatttcgagtggaatctcttcctcttcacctaccgtgactgcctctccttggcagccgccatcaaggcatgccacaccctcaaggacggtgggaagcagctcctggaaggcatgtcagacaacaagaccctcctggaatttgacttgcgcctgtcagatgtggcccaggaaagcgagtacctcattggccaggccctctacgcaaaccgagaagcagcccgccagcgggccctgaatcccagccacttcatgtcaaccataactgccaatggccctgagaactctgtgggataaaatgacctgacttgga

SEQ ID NO: 303625 - protein, 13 aa, Artificial Sequence
  derived and/or modified sequence
MYVAVWTPYGVLR

SEQ ID NO: 303626 - DNA, 3999 bp, Artificial Sequence
  derived and/or modified sequence
aagggcgcacctgccgggataacaggccagatgaagtaaatagaaaatcctctgagctcccctactggctccagctgtggagaagggggaggagaaaaccctgtgggacaggggaggagggtgagggctcctcttaggaagttatttaagagccaactgtcttgtctttcccgagtccgtttgaggaagtccccgaggcgcacagagcaagcccacgcgagggcacctctggaggggagcgcctgcaggaccttgtaaagtcaaaaatgtcagaaacttccaggaccgcctttggaggcagaagagcagttccacccaataactctaatgcagcggaagatgacctgcccacagtggagcttcagggcgtggtgccccggggcgtcaacctgcaagagtttcttaatgtcacgagcgttcacctgttcaaggagagatgggacactaacaaggtggaccaccacactgacaagtatgaaaacaacaagctgattgtccgcagagggcagtctttctatgtgcagattgacttcagtcgtccatatgaccccagaagggatctcttcagggtggaatacgtcattggtcgctacccacaggagaacaagggaacctacatcccagtgcctatagtctcagagttacaaagtggaaagtggggggccaagattgtcatgagagaggacaggtctgtgcggctgtccatccagtcttcccccaaatgtattgtggggaaattccgcatgtatgttgctgtctggactccctatggcgtacttcgaaccagtcgaaacccagaaacagacacgtacattctcttcaatccttggtgtgaagatgatgctgtgtatctggacaatgagaaagaaagagaagagtatgtcctgaatgacatcggggtaattttttatggagaggtcaatgacatcaagaccagaagctggagctatggtcagtttgaagatggcatcctggacacttgcctgtatgtgatggacagagcacaaatggacctctctggaagagggaatcccatcaaagtcagccgtgtggggtctgcaatggtgaatgccaaagatgacgaaggtgtcctcgttggatcctgggacaatatctatgcctatggcgtccccccatcggcctggactggaagcgttgacattctattggaataccggagctctgagaatccagtccggtatggccaatgctgggtttttgctggtgtctttaacacatttttacgatgccttggaataccagcaagaattgttaccaattatttctctgcccatgataatgatgccaatttgcaaatggacatcttcctggaagaagatgggaacgtgaattccaaactcaccaaggattcagtgtggaactaccactgctggaatgaagcatggatgacaaggcctgaccttcctgttggatttggaggctggcaagctgtggacagcaccccccaggaaaatagcgatggcatgtatcggtgtggccccgcctcggttcaagccatcaagcacggccatgtctgcttccaatttgatgcaccttttgtttttgcagaggtcaacagcgacctcatttacattacagctaagaaagatggcactcatgtggtggaaaatgtggatgccacccacattgggaaattaattgtgaccaaacaaattggaggagatggcatgatggatattactgatacttacaaattccaagaaggtcaagaagaagagagattggccctagaaactgccctgatgtacggagctaaaaagcccctcaacacagaaggtgtcatgaaatcaaggtccaacgttgacatggactttgaagtggaaaatgctgtgctgggaaaagacttcaagctctccatcaccttccggaacaacagccacaaccgttacaccatcacagcttatctctcagccaacatcaccttctacaccggggtcccgaaggcagaattcaagaaggagacgttcgacgtgacgctggagcccttgtccttcaagaaagaggcggtgctgatccaagccggcgagtacatgggtcagctgctggaacaagcgtccctgcacttctttgtcacagctcgcatcaatgagaccagggatgttctggccaagcaaaagtccaccgtgctaaccatccctgagatcatcatcaaggtccgtggcactcaggtagttggttctgacatgactgtgacagttgagtttaccaatcctttaaaagaaaccctgcgaaatgtctgggtacacctggatggtcctggagtaacaagaccaatgaagaagatgttccgtgaaatccggcccaactccaccgtgcagtgggaagaagtgtgccggccctgggtctctgggcatcggaagctgatagccagcatgagcagtgactccctgagacatgtgtatggcgagctggacgtgcagattcaaagacgaccttccatgtgaatgcacaggaagctgagatgaaccctggcatttggcctcttgtagtcttggctaaggaaattctaacgcaaaaatagctcttgctttgacttaggtgtgaagacccagacaggactgcagagggctccagagtggagatcccacatatttcaaaaacatgcttttccaaacccaggctattcggcaaggaagttagtttttaatctctccaccttccaaagagtgctaagcattagctttaattaagctctcatagctcataagagtaacagtcatcatttatcatcacaaatggctacatctccaaatatcagtgggctctcttaccagggagatttgctcaatacctggcctcatttaaaacaagacttcagattccccactcagccttttgggaataatagcacatgatttgggctctagaattccagtcccctttctcggggtcaggttctaccctccatgtgagaatatttttcccaggactagagcacaacataatttttatttttggcaaagccagaaaaagatctttcattttgcacctgcagccaagcaaatgcctgccaaattttagatttaccttgttagaagaggtggccccatattaacaaattgcatttgtgggaaacttaaccacctacaaggagataagaaagcaggtgcaacactcaagtctattgaataatgtagttttgtgatgcattttatagaatgtgtcacactgtggcctgatcagcaggagccaatatcccttactttaaccctttctgggatgcaatactaggaagtaaagtgaagaatttatctctttagttagtgattatatttcacccatctctcaggaatcatctcctttgcagaatgatgcaggttcaggtcccctttcagagatataataagcccaacaagttgaagaagctggcggatctagtgaccagatatatagaaggactgcagccactgattctctcttgtccttcacatcacccatgttgagacctcagcttggcactcaggtgctgaagggtaatatggactcagccttgcaaatagccagtgctagttctgacccaaccacagaggatgctgacatcatttgtattatgttccaaggctactacagagaaggctgcctgctatgtatttgcaaggctgatttatggtcagaatttccctctgatatgtctagggtgtgatttaggtcagtagactgtgattcttagcaaaaaatgaacagtgataagtatactgggggcaaaatcagaatggaatgctctggtctatataaccacatttctaagcctttgagactgttcctgagccttcagcactaacctatgagggtgagctggtcccctctatatatacatcatacttaactttactaagtaatctcacagcatttgccaagtctcccaatatccaattttaaaatgaaatgcattttgctagacagttaaactggcttaacttagtatattattattaattacaatgtaatagaagcttaaaataaagttaaactgattat

SEQ ID NO: 303627 - DNA, 582 bp, Artificial Sequence
  derived and/or modified sequence
aaaggaaaccctcccagaccctctgaccaaaggggacgggtggggacttcctggcactgcagggccccttgcctgtccgtttgaggaagtccccgaggcgcacagagcaagcccacgcgagggcacctctggaggggagcgcctgcaggaccttgtaaagtcaaaaatgtcagaaacttccaggaccgcctttggaggcagaagagcagttccacccaataactctaatgcagcggaagatgacctgcccacagtggagcttcagggcgtggtgccccggggcgtcaacctgcaagagtttcttaatgtcacgagcgttcacctgttcaaggagagatgggacactaacaaggtggaccaccacactgacaagtatgaaaacaacaagctgattgtccgcagagggcagtctttctatgtgcagattgacttcagtcgtccatatgaccccagaagggatctcttcagggtggaatacgtcattggtcgctacccacaggagaacaagggaacctacatcccagtgcctatagtctcagagttacaaagtggaaagtggggggccaagattgtcatgagaga

SEQ ID NO: 303628 - DNA, 2313 bp, Artificial Sequence
  derived and/or modified sequence
atggtggaccccctggaggccaccgtgagctgcagcggcagccaccacatcaagtgctgcatcgaggaggacggcgactacaaggtgaccttccacaccggcagcagcagcctgcccgccgccaaggaggtgaacaagaagcaggtgtgctacaagcacaacttcaacgccagcagcgtgagctggtgcagcaagaccgtggacgtgtgctgccacttcaccaacgccgccaacaacagcgtgtggagccccagcatgaagctgaacctggtgcccggcgagaacatcacctgccaggaccccgtgatcggcgtgggcgagcccggcaaggtgatccagaagctgtgcagattcagcaacgtgcccagcagccccgagagccccatcggcggcaccatcacctacaagtgcgtgggcagccagtgggaggagaagagaaacgactgcatcagcgcccccatcaacagcctgctgcagatggccaaggccctgatcaagagccccagccaggacgagatgctgcccacctacctgaaggacctgagcatcagcatcgacaaggccgagcacgagatcagcagcagccccggcagcctgggcgccatcatcaacatcctggacctgctgagcaccgtgcccacccaggtgaacagcgagatgatgacccacgtgctgagcaccgtgaacgtgatcctgggcaagcccgtgctgaacacctggaaggtgctgcagcagcagtggaccaaccagagcagccagctgctgcacagcgtggagagattcagccaggccctgcagagcggcgacagcccccccctgagcttcagccagaccaacgtgcagatgagcagcatggtgatcaagagcagccaccccgagacctaccagcagagattcgtgttcccctacttcgacctgtggggcaacgtggtgatcgacaagagctacctggagaacctgcagagcgacagcagcatcgtgaccatggccttccccaccctgcaggccatcctggcccaggacatccaggagaacaacttcgccgagagcctggtgatgaccaccaccgtgagccacaacaccaccatgcccttcagaatcagcatgaccttcaagaacaacagccccagcggcggcgagaccaagtgcgtgttctggaacttcagactggccaacaacaccggcggctgggacagcagcggctgctacgtggaggagggcgacggcgacaacgtgacctgcatctgcgaccacctgaccagcttcagcatcctgatgagccccgacagccccgaccccagcagcctgctgggcatcctgctggacatcatcagctacgtgggcgtgggcttcagcatcctgagcctggccgcctgcctggtggtggaggccgtggtgtggaagagcgtgaccaagaacagaaccagctacatgagacacacctgcatcgtgaacatcgccgccagcctgctggtggccaacacctggttcatcgtggtggccgccatccaggacaacagatacatcctgtgcaagaccgcctgcgtggccgccaccttcttcatccacttcttctacctgagcgtgttcttctggatgctgaccctgggcctgatgctgttctacagactggtgttcatcctgcacgagaccagcagaagcacccagaaggccatcgccttctgcctgggctacggctgccccctggccatcagcgtgatcaccctgggcgccacccagcccagagaggtgtacaccagaaagaacgtgtgctggctgaactgggaggacaccaaggccctgctggccttcgccatccccgccctgatcatcgtggtggtgaacatcaccatcaccatcgtggtgatcaccaagatcctgagacccagcatcggcgacaagccctgcaagcaggagaagagcagcctgttccagatcagcaagagcatcggcgtgctgacccccctgctgggcctgacctggggcttcggcctgaccaccgtgttccccggcaccaacctggtgttccacatcatcttcgccatcctgaacgtgttccagggcctgttcatcctgctgttcggctgcctgtgggacctgaaggtgcaggaggccctgctgaacaagttcagcctgagcagatggagcagccagcacagcaagagcaccagcctgggcagcagcacccccgtgttcagcatgagcagccccatcagcagaagattcaacaacctgttcggcaagaccgccgcccccaagatcccccccggccacgacggcaacctggtgagcggcggcagcagcgccatctag

SEQ ID NO: 303629 - DNA, 2978 bp, Artificial Sequence
  derived and/or modified sequence
aaaagtgacattcatctctgtggccaatctaacaataaccccggacccaatttctgtttctgagggacaaaacttttctataaaatgcatcagtgatgtgagtaactatgatgaggtttattggaacacttctgctggaattaaaatataccaaagattttataccacgaggaggtatcttgatggagcagaatcagtactgacagtcaagacctcgaccagggagtggaatggaacctatcactgcatatttagatataagaattcatacagtattgcaaccaaagacgtcattgttcacccgctgcctctaaagctgaacatcatggttgatcctttggaagctactgtttcatgcagtggttcccatcacatcaagtgctgcatagaggaggatggagactacaaagttactttccatacgggttcctcatcccttcctgctgcaaaagaagttaacaaaaaacaagtgtgctacaaacacaatttcaatgcaagctcagtttcctggtgttcaaaaactgttgatgtgtgttgtcactttaccaatgctgctaataattcagtctggagcccatctatgaagctgaatctggttcctggggaaaacatcacatgccaggatcccgtaataggtgtcggagagccggggaaagtcatccagaagctatgccggttctcaaacgttcccagcagccctgagagtcccattggcgggaccatcacttacaaatgtgtaggctcccagtgggaggagaagagaaatgactgcatctctgccccaataaacagtctgctccagatggctaaggctttgatcaagagcccctctcaggatgagatgctccctacatacctgaaggatctttctattagcatagacaaagcggaacatgaaatcagctcttctcctgggagtctgggagccattattaacatccttgatctgctctcaacagttccaacccaagtaaattcagaaatgatgacgcacgtgctctctacggttaatgtcatccttggcaagcccgtcttgaacacctggaaggttttacaacagcaatggaccaatcagagttcacagctactacattcagtggaaagattttcccaagcattacagtcgggagatagccctcctttgtccttctcccaaactaatgtgcagatgagcagcatggtaatcaagtccagccacccagaaacctatcaacagaggtttgttttcccatactttgacctctggggcaatgtggtcattgacaagagctatctagaaaacttgcagtcggattcgtctattgtcaccatggctttcccaactctccaagccatccttgcccaggatatccaggaaaataactttgcagagagcttagtgatgacaaccactgtcagccacaatacaactatgccattcaggatttcaatgacttttaagaacaatagcccttcaggcggcgaaacgaagtgtgtcttctggaacttcaggcttgccaacaacacaggggggtgggacagcagtgggtgctatgtagaagaaggtgatggggacaatgtcacctgtatctgtgaccacctaacatcattctccatcctcatgtcccctgactccccagatcctagttctctcctgggaatactcctggatattatttcttatgttggggtgggcttttccatcttgagcttggcagcctgtctagttgtggaagctgtggtgtggaaatcggtgaccaagaaccggacttcttatatgcgccacacctgcatagtgaatatcgctgcctcccttctggtcgccaacacctggttcattgtggtcgctgccatccaggacaatcgctacatactctgcaagacagcctgtgtggctgccaccttcttcatccacttcttctacctcagcgtcttcttctggatgctgacactgggcctcatgctgttctatcgcctggttttcattctgcatgaaacaagcaggtccactcagaaagccattgccttctgtcttggctatggctgcccacttgccatctcggtcatcacgctgggagccacccagccccgggaagtctatacgaggaagaatgtctgttggctcaactgggaggacaccaaggccctgctggctttcgccatcccagcactgatcattgtggtggtgaacataaccatcactattgtggtcatcaccaagatcctgaggccttccattggagacaagccatgcaagcaggagaagagcagcctgtttcagatcagcaagagcattggggtcctcacaccactcttgggcctcacttggggttttggtctcaccactgtgttcccagggaccaaccttgtgttccatatcatatttgccatcctcaatgtcttccagggattattcattttactctttggatgcctctgggatctgaaggtacaggaagctttgctgaataagttttcattgtcgagatggtcttcacagcactcaaagtcaacatccctgggttcatccacacctgtgttttctatgagttctccaatatcaaggagatttaacaatttgtttggtaaaacagcagcccctaagatccccccaggccatgacggaaaccttgttagcggtggcagttcagcaatctgatggaacgtataatgtttccaccccagaagcaaccagctcatccctggaaaactcatccagtgcttcttcgttgctcaactaagaacaggataatccaacctacgtgacctcccggggacagtggctgtgcttttaaaaagagatgcttgcaaagcaatggggaacgtgttctcggggcaggtttccgggagcagatgccaaaaagactttttcatagagaagaggctttcttttgtaaagacagaataaaaataattgttatgtttctgtttgttccctccccctcccccttgtgtgataccacatgtgtatagtatttaagtgaaactcaagccctcaa

SEQ ID NO: 303630 - DNA, 2313 bp, Artificial Sequence
  derived and/or modified sequence
atggtcgatcctctcgaggccacagtctcatgctctggatcccatcatatcaagtgttgcattgaagaggatggtgattacaaggttacttttcacaccgggtctagctcactgcccgcggccaaagaagttaataagaagcaggtgtgctacaagcataactttaacgcctcctctgtctcctggtgctccaagaccgttgacgtctgctgccactttaccaatgccgccaataacagtgtttggagcccgagcatgaaactgaatctggtacccggcgagaatatcacatgccaggatccagttattggcgttggcgagcccggaaaggtgatacaaaagctctgcagattttccaacgtcccgtcttctcccgagagtcccatcgggggaacaattacctataagtgtgttggatctcagtgggaggaaaagagaaatgattgcatcagcgcccctattaacagcctgctgcagatggcaaaggcgttgataaaatccccctcacaggacgagatgctgcctacttaccttaaggacttgtccatctctatagacaaggcagagcacgaaattagcagttctccagggtctctgggtgccatcatcaacatcctggatctgttaagcaccgtgccaacccaggtgaatagcgaaatgatgacccacgtcctgtcaactgtgaatgtgatcctaggcaaacctgtcttgaatacttggaaagttctccaacagcagtggacgaaccaatcctcacagctcctccacagcgtagagcgtttttctcaagccctccagagtggagattccccaccactgtctttctctcaaactaatgtgcagatgagttcaatggtgatcaaatctagccatccggagacttatcagcagcgctttgtattcccgtacttcgacctttggggaaacgtggttatcgacaaaagttatttggagaacctccagtcggacagctccattgtgacgatggcttttcctactttacaggccatattggcccaggatatccaggagaacaactttgcagaatcactggttatgacaaccacggtttcccacaataccacaatgccttttaggataagtatgacattcaaaaacaattcgccctctggaggcgagaccaaatgtgtcttctggaactttagactggcgaacaacacaggagggtgggactcaagtggatgttatgtggaagaaggggacggcgacaatgttacgtgcatctgcgaccatctcacctccttttccattctgatgagccccgacagtcctgatccctcttccctgctcgggatcctgctcgacatcatttcttatgttggcgtggggttctctatcctttcactggctgcgtgtctggttgtcgaggcagtcgtatggaagtccgtgactaaaaacaggacctcctacatgaggcatacttgtatcgttaacatcgccgccagtcttttggtcgcaaatacatggtttattgtcgtggccgctatacaggataaccgctatatcctgtgcaaaaccgcttgcgtggctgctactttctttatacacttcttttatttgtccgtctttttctggatgctgacactgggattaatgctcttttaccggctggttttcatcctgcacgaaacctcacggtctacccagaaggcaatcgctttttgccttggctacggctgtcccttggccatctccgtgatcactctgggggccacccaacccagagaggtgtacaccagaaaaaacgtgtgttggctgaattgggaggatacgaaggccctgctagccttcgccatcccagccctcattatcgtagttgtcaacatcaccataaccattgttgtgattaccaagatcctgagaccttccataggggacaaaccatgcaaacaggaaaagtcctctctgttccaaatctccaagtccatcggggttctgacaccgctgctggggctaacatggggctttggactaacaacggtgtttcccggaacaaatttggtgtttcacatcatattcgccatcttgaatgtgtttcagggactttttatcttgctcttcgggtgcctgtgggatttaaaggtgcaagaggctctgttgaataagttttcattgagtcgttggtcttctcagcacagcaaatccacctcgctgggttcttccactccagttttcagcatgtcctcaccaataagtcgaagatttaacaaccttttcggcaagaccgccgctcctaaaatcccaccaggccacgacggaaacctggtgtccggagggagctcagctatctag

SEQ ID NO: 303631 - DNA, 2313 bp, Artificial Sequence
  derived and/or modified sequence
atggtggaccccctggaggccaccgtgtcctgcagcggcagccaccacatcaagtgctgcattgaagaagatggagactacaaggtgaccttccacacaggcagcagcagcctgcctgctgccaaggaggtgaacaagaagcaggtgtgctacaagcacaacttcaatgccagctctgtgtcctggtgcagcaagacagtggatgtgtgctgccacttcaccaatgctgccaacaacagcgtgtggagccccagcatgaagctgaacctggtgcctggagagaacatcacctgccaggaccctgtgattggagtgggggagcccgggaaggtgatccagaagctgtgccgcttcagcaatgtgcccagcagccctgagagccccatcggcggcaccatcacctacaagtgtgtgggcagccagtgggaggagaagagaaatgactgcatcagcgcccccatcaacagcctgctgcagatggccaaggccctgatcaagagccccagccaggatgagatgctgcccacctacctgaaggacctgagcatcagcattgacaaggccgagcacgagatcagcagcagccctggcagcctgggcgccatcatcaacatcctggacctgctgagcacagtgcccacccaggtgaacagcgagatgatgacccacgtgctgagcacagtgaatgtcatcctgggcaagcctgtgctgaacacctggaaggtgctgcagcagcagtggaccaaccagagcagccagctgctgcacagcgtggagcgcttcagccaggccctgcagagcggggacagcccccccctgtccttcagccagaccaacgtgcagatgagctccatggtgatcaagagcagccaccctgagacctaccagcagagatttgtgttcccctactttgacctgtggggcaatgtggtgattgacaagagctacctggagaacctgcagagcgacagcagcatcgtgaccatggccttccccaccctgcaggccatcctggcccaggacatccaggagaacaactttgctgagagcctggtgatgaccaccaccgtgagccacaacaccaccatgcccttccgcatctccatgaccttcaagaacaacagccccagcggcggggagaccaagtgtgtgttctggaacttccggctggccaacaacacaggaggctgggacagcagcggctgctacgtggaggagggagatggagacaacgtgacctgcatctgtgaccacctgaccagcttcagcatcctgatgagcccagacagcccagaccccagcagcctgctgggcatcctgctggacatcatctcctatgtgggcgtgggcttcagcatcctgagcctggccgcctgcctggtggtggaggccgtggtgtggaagtctgtgaccaagaacagaaccagctacatgaggcacacctgcatcgtgaacattgctgccagcctgctggtggccaacacctggttcatcgtggtggccgccatccaggacaaccgctacatcctgtgcaagacagcctgtgtggccgccaccttcttcatccacttcttctacctgagcgtcttcttctggatgctgaccctgggcctgatgctgttctaccgcctggtgttcatcctgcacgagaccagccgcagcacccagaaggccatcgccttctgcctgggctacggctgccccctggccatcagcgtcatcaccctgggcgccacccagccccgggaggtgtacaccaggaagaatgtgtgctggctgaactgggaggacaccaaggccctgctggcctttgccatcccagccctgatcatcgtggtggtgaacatcaccatcaccatcgtggtgatcaccaagatcctgcggcccagcattggagacaagccctgcaagcaggagaagagcagcctcttccagatcagcaagagcattggagtgctgacccccctgctgggcctgacctggggcttcggcctgaccaccgtcttccctggcaccaacctggtgttccacatcatctttgccatcctgaatgtgttccagggcctcttcatcctgctgtttggctgcctgtgggacctgaaggtgcaggaggccctgctgaacaagttcagcctgagccgctggagcagccagcacagcaagagcaccagcctgggcagcagcacccctgtgttctccatgagcagccccatcagccgccgcttcaacaacctgtttgggaagacagctgcccccaagatccccccaggccatgatggcaacctggtgtctgggggcagcagcgccatctag

SEQ ID NO: 303632 - DNA, 2313 bp, Artificial Sequence
  derived and/or modified sequence
atggtggaccccctggaggccaccgtgagctgcagcggcagccaccacattaagtgttgtatcgaagaagatggcgattacaaggtcacattccacacaggcagctctagccttccagctgccaaggaggtgaacaagaagcaggtctgctataaacataattttaacgcatcatccgtatcctggtgttccaaaactgttgatgtgtgctgccattttactaatgctgctaacaactctgtgtggagcccgagcatgaaactcaacctggttcctggtgagaatataacctgtcaagatccagttattggcgtaggagagccggggaaagtcatccagaagctgtgccgtttcagcaacgtcccaagtagccccgaaagccctattggcgggaccataacatacaagtgcgtggggtcacagtgggaagagaaacggaatgactgcatatccgctccaatcaattccctgctgcaaatggctaaggccctgataaagagtccaagccaggatgagatgcttcctacctacctcaaggacttgagcatctctattgacaaggctgagcacgaaatcagcagctcccctggaagtctgggagccataataaacattttagatctgctgagcactgtaccaacacaggtgaacagcgaaatgatgacacatgtcctcagtacagtgaatgtgatcctcggcaagccagtgttaaatacctggaaggtgctgcaacaacagtggaccaaccagtcgagccagctactgcattccgtggaacgattcagtcaggcattgcagagcggggactccccccccctttcctttagccagaccaacgttcagatgtcctccatggtgatcaaatctagccaccccgaaacgtatcagcagcggttcgtcttcccttacttcgacctttggggcaacgtggtgattgacaagagctatttggagaatctacagagcgactcatccatagtgactatggcttttccgaccctgcaggcaatcctggcccaagacatccaggagaataactttgcagagtccttggtgatgacaaccactgtgagtcacaatacaactatgccattcaggatttccatgacatttaaaaacaactcaccctctggcggcgagacgaagtgtgtcttttggaacttcaggctggctaataacacaggcgggtgggattcttctggctgttatgtcgaagaaggggatggagacaatgtcacatgcatctgtgaccacttaacctctttctcaatcctgatgtctccggacagccctgatccaagctcactgctgggaatattgctcgatattatctcgtatgtcggggtgggattctctatactgagtctcgcagcatgcctcgttgtggaagcggttgtgtggaagtctgtcaccaaaaaccggacgtcttatatgaggcacacatgcattgtcaacatagctgcaagcctgctggtagccaacacctggttcatcgtggtggccgccatacaggataatagatatatcctatgtaagactgcttgcgtagctgctaccttttttattcattttttctatctgtccgtgtttttctggatgctgaccctgggcctgatgttattctaccgcctagtttttattcttcacgaaacatcacggagcacccagaaggccatcgctttttgcctgggctatggctgcccactggctattagcgtgattaccctcggcgctactcagccacgcgaggtgtacacccgtaagaatgtgtgctggttaaactgggaagacacaaaggccctgctggcgtttgctatccctgctttaatcattgtcgtggtcaacatcacaattactatcgtggtcataactaagattctgcgccctagtatcggggacaaaccttgcaaacaggagaagagcagtcttttccaaatttctaaaagcataggcgtgttaacacccttacttggccttacttgggggtttggcttaacaaccgtgtttcctggcaccaatctcgtgtttcatattatttttgccattttgaatgtgttccagggactttttattttgttgttcgggtgtttgtgggatttgaaagttcaggaggccctgctcaacaagttcagcctttcaagatggagttcccagcattcaaagtctacttcgcttggtagcagcacacctgtcttctccatgtccagccccattagcaggcgcttcaacaacttgttcggaaaaactgccgcgccaaagataccccccgggcacgacgggaatcttgtgtcaggagggagttcagccatatag

SEQ ID NO: 303633 - DNA, 2313 bp, Artificial Sequence
  derived and/or modified sequence
atggtggatcctctggaagccacagtgtcttgttctggttcacatcacattaaatgttgcatcgaggaagatggcgactacaaggtgaccttccatacgggtagttcaagccttcctgctgcaaaggaagtgaataaaaagcaggtttgctataagcacaactttaatgcttcttcagtgtcatggtgttccaagaccgtcgacgtttgctgccatttcacaaacgccgctaacaacagcgtatggagccctagtatgaagctgaacctggttccaggagaaaacatcacctgccaggatccagtaattggagtcggcgagccaggtaaagtcatccaaaaactctgtaggttctccaacgtcccctcttctccggagagccccattggcggaaccattacttacaagtgtgtggggtcccagtgggaagaaaaaaggaacgactgcatatctgctcccatcaatagccttctccagatggccaaggccctgatcaagtctccatcccaggatgagatgctgccaacatatctcaaggatctgagtattagtattgacaaagcagaacacgaaattagtagcagccccggtagcctaggcgctataatcaacatcctggacctgctatctacggtccccacacaggtcaattcggagatgatgacgcatgttctttctaccgttaatgtaatcctcggaaaacccgttcttaatacctggaaggtcttgcaacagcagtggaccaatcagtcgagccagttactccactccgtcgaaagattcagtcaggctcttcagtctggcgattctccccctctgtccttcagtcagacgaatgtgcagatgtctagcatggtaatcaagtcctctcatcccgagacctaccagcagagatttgtgtttccgtatttcgatctgtggggaaacgtggtcatagataagagttatctggagaaccttcagagcgattcaagcatcgtgacgatggccttccccacgcttcaggcaatcctggcccaggacattcaggagaataattttgcggagagcttggtgatgaccacgactgttagtcacaacacaactatgccattcagaatatctatgaccttcaaaaacaacagtcccagtggcggtgaaaccaagtgcgtgttctggaattttagactcgcaaataataccggagggtgggattccagcggatgttatgtggaagaaggggatggagataatgtgacatgcatttgcgaccaccttacaagtttcagcatcctgatgagtcccgattccccagatccatctagcctgctcggaatcctgctcgatataatcagctatgtaggcgttggtttcagtatcctctccctggcagcgtgcctagttgtcgaagcagtggtgtggaaatcggttactaagaacaggacgagctatatgagacatacgtgtattgtgaacattgccgctagcttactcgtcgctaatacgtggttcatcgtggttgcagctatccaggacaaccgctacatactgtgcaaaaccgcgtgcgtcgccgctacgtttttcattcatttcttttatctcagcgtgttcttttggatgctcactctgggtctgatgctgttttaccggctggtgttcattcttcacgaaacttcccgatctacccaaaaagcaatcgcattctgcctgggttacgggtgccctttggcaatctccgtgattaccctaggtgccacgcagcccagggaggtctatacacgtaagaacgtctgctggttaaattgggaggacactaaggccctgctggcgtttgcaattccagctctgatcatcgttgtagtaaacatcaccatcaccatcgtggtgatcaccaaaatcctgcggcctagtatcggggacaagccttgcaagcaggaaaaatccagcctctttcagatcagtaaatccataggggtgctcactcctctgcttgggctgacatggggcttcggacttacaacggtgtttcccggaactaacttggtattccacattatctttgccatcctgaacgtattccaggggctattcatactgctgttcgggtgcttgtgggacctgaaggtccaagaagccctgcttaataagttttctctttctcggtggtcctcacagcatagcaaatccaccagtttagggtcatccacacctgtgttctcaatgagctcacctataagccggagattcaacaatctgtttgggaagacggccgctcctaagatccctcccggtcacgatggtaatctggttagtggtgggtcgtcagccatttag

SEQ ID NO: 303634 - protein, 717 aa, Artificial Sequence
  derived and/or modified sequence
DYRSQVHVESREGLWKIKGKIKKLGSSEKVTESKGENITCQDPVIGVGEPGKVIQKLCRFSNVPSSPESPIGGTITYKCVGSQWEEKRNDCISAPINSLLQMAKALIKSPSQDEMLPTYLKDLSISIDKAEHEISSSPGSLGAIINILDLLSTVPTQVNSEMMTHVLSTVNVILGKPVLNTWKVLQQQWTNQSSQLLHSVERFSQALQSGDSPPLSFSQTNVQMSSMVIKSSHPETYQQRFVFPYFDLWGNVVIDKSYLENLQSDSSIVTMAFPTLQAILAQDIQENNFAESLVMTTTVSHNTTMPFRISMTFKNNSPSGGETKCVFWNFRLANNTGGWDSSGCYVEEGDGDNVTCICDHLTSFSILMSPDSPDPSSLLGILLDIISYVGVGFSILSLAACLVVEAVVWKSVTKNRTSYMRHTCIVNIAASLLVANTWFIVVAAIQDNRYILCKTACVAATFFIHFFYLSVFFWMLTLGLMLFYRLVFILHETSRSTQKAIAFCLGYGCPLAISVITLGATQPREVYTRKNVCWLNWEDTKALLAFAIPALIIVVVNITITIVVITKILRPSIGDKPCKQEKSSLFQISKSIGVLTPLLGLTWGFGLTTVFPGTNLVFHIIFAILNVFQGLFILLFGCLWDLKVQEALLNKFSLSRWSSQHSKSTSLGSSTPVFSMSSPISRRFNNLFGKTGTYNVSTPEATSSSLENSSSASSLLN

SEQ ID NO: 303635 - protein, 176 aa, Artificial Sequence
  derived and/or modified sequence
MLVKRDYRYDRVLFWGRILGLVADYYIAQGLSEDQLAPRKTLYSLNCTEWSLLPPATEEMVAQSSVVKGRFMGDPSYEYEHTELQKVNEGEKVFEEEIVVQIKEETRLVSVIDQIDKAVAIIPRGALFKTPFGPTHVNRTFEGYYNWYKTPAPHPTCDGNQGVRARGRSPSLGRFL

SEQ ID NO: 303636 - protein, 133 aa, Artificial Sequence
  derived and/or modified sequence
  misc_feature (1)..(1): Xaa can be any naturally occurring amino acid
XLNCTEWSLLPPATEEMVAQSSVVKGRFMGDPSYEYEHTELQKVNEGEKVFEEEIVVQIKEETRLVSVIDQIDKAVAIIPRGALFKTPFGPTHVNRTFEGYYNWYKTPAPHPTCDGNQGVRARGRSPSLGRFL

SEQ ID NO: 303637 - DNA, 531 bp, Artificial Sequence
  derived and/or modified sequence
atgctggtaaagagggactatagatacgatagagtgctgttttggggaaggatattaggcctagtcgctgattactacatcgctcaagggctgtcggaagaccagttagcacctcgcaagacactctactccttgaactgcactgaatggagcctgctccctccagcaaccgaagagatggtcgcacagtcctctgtggtgaaagggcgattcatgggagatccaagctacgaatatgagcacactgagctacaaaaggtcaatgaaggcgagaaagtgttcgaggaggaaatcgtggtccaaataaaagaagagacacgactcgtgtctgtcattgaccagatcgataaggccgtggccattatccctcggggtgccctgttcaagacacccttcggccctacacacgtgaaccggacttttgaaggatactataactggtataaaacgcccgctcctcacccaacgtgcgacggcaaccagggtgttcgcgctcgtggtagaagcccctcactggggaggtttctctag

SEQ ID NO: 303638 - DNA, 402 bp, Artificial Sequence
  derived and/or modified sequence
tgattgaattgtactgaatggtccttgctccctccagcaacggaagagatggtggcgcaaagctccgtggtaaaaggcagatttatgggtgatcctagttacgaatacgagcacacagagctccaaaaggttaatgaaggcgaaaaagttttcgaagaggagatagtggtgcagatcaaagaagagacacgactcgtgagcgttatagatcaaatagacaaagccgtcgctattatcccaaggggggctctgttcaaaacccccttcggtccaacccacgtaaaccggacttttgagggctactacaactggtacaaaacacccgccccccacccaacatgtgatggaaaccagggggtgagggcaagggggaggtctccctctctggggagatttctgtag

SEQ ID NO: 303639 - DNA, 531 bp, Artificial Sequence
  derived and/or modified sequence
atgctggtgaagagggactaccgctatgacagagtgctcttctggggccgcatcctgggcctggtggccgactactacatcgcccagggcctgtctgaggaccagctggcccccaggaagaccctgtacagcctgaactgcacagagtggagcctgctgcccccagccacagaggagatggtggcccagagctctgtggtgaagggccgcttcatgggagaccccagctatgaatatgagcacacagagctgcagaaggtgaatgaaggagagaaggtgtttgaggaggagatcgtggtgcagatcaaggaggagacccggctggtgtctgtcatcgaccagattgacaaggctgtggccatcatccccaggggggccctcttcaagacccccttcggccccacccacgtgaacagaacatttgagggctactacaactggtacaagaccccagccccccaccccacctgtgatggcaaccagggcgtgcgggcccggggccgcagccccagcctgggccgcttcctgtag

SEQ ID NO: 303640 - DNA, 402 bp, Artificial Sequence
  derived and/or modified sequence
tgactgaactgcacagagtggagcctgctgcccccagccacagaggagatggtggcccagagctctgtggtgaagggccgcttcatgggagaccccagctatgaatatgagcacacagagctgcagaaggtgaatgaaggagagaaggtgtttgaggaggagatcgtggtgcagatcaaggaggagacccggctggtgtctgtgattgaccagattgacaaggctgtggccatcatccccaggggggccctcttcaagaccccatttggccccacccacgtgaacagaacatttgagggctactacaactggtacaagaccccagccccccaccccacctgtgatggcaaccagggcgtgcgggcccggggccgcagccccagcctgggccgcttcctgtag

SEQ ID NO: 303641 - DNA, 531 bp, Artificial Sequence
  derived and/or modified sequence
atgctggtgaagcgggactaccggtacgaccgggtgctgttctgggggcgtatcctcgggttagtggccgattactatatagcacaaggactgtctgaggaccagttggcacctagaaaaacattatactctttgaattgcacagagtggtccctacttcctcctgccacagaagagatggtcgcacagagctccgtcgttaagggcagatttatgggtgatccaagctacgagtatgaacacactgagctgcagaaggtgaatgagggcgagaaagtgtttgaagaagagatcgttgttcagattaaggaggagacaaggctagtatccgttatcgaccaaattgataaggctgtcgcgatcatccctagaggagctctgtttaaaactccttttggtcctacgcatgtcaaccggacattcgagggctactataactggtacaaaacccccgctccacacccgacctgtgatgggaatcaaggggtccgggctcggggaagaagcccatccctcggcagattcctatag

SEQ ID NO: 303642 - DNA, 402 bp, Artificial Sequence
  derived and/or modified sequence
tgactgaactgcaccgagtggagcctgctgccccccgccaccgaggagatggtagcccagtccagcgtggttaagggacgcttcatgggggacccctcctatgaatacgagcatacggaactccagaaagttaatgagggagaaaaggtgttcgaagaggagatagtagtccagatcaaagaggaaacccggttggtgagcgtgattgaccagattgataaagctgtggctatcatcccccggggtgccctctttaaaacaccatttggtcccacgcatgtcaacaggaccttcgaaggatattacaattggtacaagacacctgcccctcacccaacttgcgacgggaaccagggggtaagagcacgcggcaggtccccttcattggggcggttcctatag

SEQ ID NO: 303643 - DNA, 531 bp, Artificial Sequence
  derived and/or modified sequence
atgttagtgaaacgggactaccggtatgaccgggtgctgttttggggaaggatcctgggactggtagcagactattacattgcacaggggctgtcagaagaccagctcgctccccgtaagacactctatagcctgaattgcaccgagtggagtctgctcccgccagctaccgaggaaatggtagcacagagcagcgtggtgaaggggaggttcatgggtgacccttcatacgagtatgagcatactgagctacagaaggtgaacgagggggagaaggtgttcgaagaggaaatcgtcgtccagatcaaggaagagacacgcttggtgagcgtaatagaccagattgacaaagcggtggctattatcccacgcggagcattgtttaagactccttttgggccaactcacgtaaataggacattcgaggggtattacaattggtacaagacccccgcacctcatcccacatgcgatggcaaccaaggagttagggcccgtggccgaagtcctagcttgggaaggttcctgtag

SEQ ID NO: 303644 - DNA, 402 bp, Artificial Sequence
  derived and/or modified sequence
taattgaactgtacagaatggtccttgctgccccctgccaccgaagagatggttgctcaatcatccgtcgtgaaagggcgtttcatgggcgatcccagctacgagtatgagcacactgagctccaaaaggtcaacgagggggaaaaagtgttcgaggaagaaattgtagtgcaaataaaagaagaaacacggctagttagtgtcattgaccagatcgacaaggcagtggctataattcctaggggcgcactctttaaaacaccttttggaccgacgcacgtcaatcgcaccttcgaaggatattacaattggtataagacacctgcaccccatcctacttgtgacggaaaccagggcgttagggcccgaggtagatcacccagccttgggaggtttttatag

SEQ ID NO: 303645 - DNA, 669 bp, Artificial Sequence
  derived and/or modified sequence
ctcctagcaactcgacgggcgttgagcggagccgctgacctgatggacgccgacagcctcctgctgtctctggagctggcgtccggcagtgggcagggcctcagcccggaccgtcgggcctcgctgctcacgtctcttatgctggttaagcgcgactaccgctatgatcgggttctcttctggggccgcatccttggcctcgtcgccgattactacatcgcgcagggcctgagtgaggaccagctcgcaccgcgcaagacgctctatagcctgaactgcacagagtggagcctcttgccccctgccacagaggagatggtggcgcagtcgtctgtggtgaagggccgcttcatgggggacccatcatacgaatatgaacacactgagctgcagaaggtgaatgaaggtgaaaaagtctttgaagaagaaatagtggtccagatcaaggaagagacccgcttggtgtctgtcattgaccagattgacaaggctgtggccatcatcccccgaggcgccctcttcaagaccccttttggacccacccatgtcaatcggacctttgaagggtactataactggtataagacccctgcccctcacccaacctgtgatgggaatcaaggggtaagggcccgtgggcgcagccctagcctaggaaggttcctgtaa

SEQ ID NO: 303646 - DNA, 550 bp, Artificial Sequence
  derived and/or modified sequence
cctgaactgcacagagtggagcctcttgccccctgccacagaggagatggtggcgcagtcgtctgtggtgaagggccgcttcatgggggacccatcatacgaatatgaacacactgagctgcagaaggtgaatgaaggtgaaaaagtctttgaagaagaaatagtggtccagatcaaggaagagacccgcttggtgtctgtcattgaccagattgacaaggctgtggccatcatcccccgaggcgccctcttcaagaccccttttggacccacccatgtcaatcggacctttgaagggtactataactggtataagacccctgcccctcacccaacctgtgatgggaatcaaggggtaagggcccgtgggcgcagccctagcctaggaaggttcctgtaaataggaggggggtggggaaagatggctgccgcccatggacctttggcctcctttggggatggccagggccctgatagttcccagaaaagtggctcatgccggctaggattgggttttactctgtccagaataaaacttggatcctgtcca

SEQ ID NO: 303647 - DNA, 531 bp, Artificial Sequence
  derived and/or modified sequence
atgctggtgaagagagactacagatacgacagagtgctgttctggggcagaatcctgggcctggtggccgactactacatcgcccagggcctgagcgaggaccagctggcccccagaaagaccctgtacagcctgaactgcaccgagtggagcctgctgccccccgccaccgaggagatggtggcccagagcagcgtggtgaagggcagattcatgggcgaccccagctacgagtacgagcacaccgagctgcagaaggtgaacgagggcgagaaggtgttcgaggaggagatcgtggtgcagatcaaggaggagaccagactggtgagcgtgatcgaccagatcgacaaggccgtggccatcatccccagaggcgccctgttcaagacccccttcggccccacccacgtgaacagaaccttcgagggctactacaactggtacaagacccccgccccccaccccacctgcgacggcaaccagggcgtgagagccagaggcagaagccccagcctgggcagattcctgtag

SEQ ID NO: 303648 - DNA, 402 bp, Artificial Sequence
  derived and/or modified sequence
tgactgaactgcaccgagtggagcctgctgccccccgccaccgaggagatggtggcccagagcagcgtggtgaagggcagattcatgggcgaccccagctacgagtacgagcacaccgagctgcagaaggtgaacgagggcgagaaggtgttcgaggaggagatcgtggtgcagatcaaggaggagaccagactggtgagcgtgatcgaccagatcgacaaggccgtggccatcatccccagaggcgccctgttcaagacccccttcggccccacccacgtgaacagaaccttcgagggctactacaactggtacaagacccccgccccccaccccacctgcgacggcaaccagggcgtgagagccagaggcagaagccccagcctgggcagattcctgtag

SEQ ID NO: 303649 - protein, 171 aa, Artificial Sequence
  derived and/or modified sequence
MREEMSLGCQEAFEIFKRDHADSVTIDDNKQILKQRFSEAKALGESINEARSKIGHLKEEITQRHIQQVALGISENMAVPLMPDQQEEKLRSQLEEEKRRYKTMFTRLKALKVEIEHLQLLMDKAKVKLQKEFEVWWAEEATNLQVNSPAVNSLDHTKSKIKALADSMSGL

SEQ ID NO: 303650 - protein, 797 aa, Artificial Sequence
  derived and/or modified sequence
MVKQTIQIFARVKPPVRKHQQGIYSIDEDEKLIPSLEIILPRDLADGFVNNKRESYKFKFQRIFDQDANQETVFENIAKPVAGSVLAGYNGTIFAYGQTGSGKTFTITGGAERYSDRGIIPRTLSYIFEQLQKDSSKIYTTHISYLEIYNECGYDLLDPRHEASSLEDLPKVTILEDPDQNIHLKNLTLHQATTEEEALNLLFLGDTNRMIAETPMNQASTRSHCIFTIHLSSKEPGSATVRHAKLHLVDLAGSERVAKTGVGGHLLTEAKYINLSLHYLEQVIIALSEKHRSHIPYRNSMMTSVLRDSLGGNCMTTMIATLSLEKRNLDESISTCRFAQRVALIKNEAVLNEEINPRLVIKRLQKEIQELKDELAMVTGEQRTEALTEAELLQLEKLITSFLEDQDSDSRLEVGADMRKVHHCFHHLKKLLNDKKILENNTVSSESKDQDCQEPLKEEEYRKLRDILKQRDNEINILVNMLKKEKKKAQEALHLAGMDRREFRQSQSPPFRLGNPEEGQRMRLSSAPSQAQDFSILGKRSSLLHKKIGMREEMSLGCQEAFEIFKRDHADSVTIDDNKQILKQRFSEAKALGESINEARSKIGHLKEEITQRHIQQVALGISENMAVPLMPDQQEEKLRSQLEEEKRRYKTMFTRLKALKVEIEHLQLLMDKAKVKLQKEFEVWWAEEATNLQVNSPAVNSLDHTKPFLQTSDSQHEWSQLLSNKSDVNARKILPSPCPSPHSQKQSSTSTPLEDSIPKRPVSSIPLTGDSQTDSDIIAFIKARQSILQKQCLGSN

SEQ ID NO: 303651 - protein, 248 aa, Artificial Sequence
  derived and/or modified sequence
MREEMSLGCQEAFEIFKRDHADSVTIDDNKQILKQRFSEAKALGESINEARSKIGHLKEEITQRHIQQVALGISENMAVPLMPDQQEEKLRSQLEEEKRRYKTMFTRLKALKVEIEHLQLLMDKAKVKLQKEFEVWWAEEATNLQVNSPAVNSLDHTKPFLQTSDSQHEWSQLLSNKSDVNARKILPSPCPSPHSQKQSSTSTPLEDSIPKRPVSSIPLTGDSQTDSDIIAFIKARQSILQKQCLGSN

SEQ ID NO: 303652 - protein, 689 aa, Artificial Sequence
  derived and/or modified sequence
  misc_feature (1)..(1): Xaa can be any naturally occurring amino acid
XGAERYSDRGIIPRTLSYIFEQLQKDSSKIYTTHISYLEIYNECGYDLLDPRHEASSLEDLPKVTILEDPDQNIHLKNLTLHQATTEEEALNLLFLGDTNRMIAETPMNQASTRSHCIFTIHLSSKEPGSATVRHAKLHLVDLAGSERVAKTGVGGHLLTEAKYINLSLHYLEQVIIALSEKHRSHIPYRNSMMTSVLRDSLGGNCMTTMIATLSLEKRNLDESISTCRFAQRVALIKNEAVLNEEINPRLVIKRLQKEIQELKDELAMVTGEQRTEALTEAELLQLEKLITSFLEDQDSDSRLEVGADMRKVHHCFHHLKKLLNDKKILENNTVSSESKDQDCQEPLKEEEYRKLRDILKQRDNEINILVNMLKKEKKKAQEALHLAGMDRREFRQSQSPPFRLGNPEEGQRMRLSSAPSQAQDFSILGKRSSLLHKKIGMREEMSLGCQEAFEIFKRDHADSVTIDDNKQILKQRFSEAKALGESINEARSKIGHLKEEITQRHIQQVALGISENMAVPLMPDQQEEKLRSQLEEEKRRYKTMFTRLKALKVEIEHLQLLMDKAKVKLQKEFEVWWAEEATNLQVNSPAVNSLDHTKPFLQTSDSQHEWSQLLSNKSDVNARKILPSPCPSPHSQKQSSTSTPLEDSIPKRPVSSIPLTGDSQTDSDIIAFIKARQSILQKQCLGSN

SEQ ID NO: 303653 - DNA, 2394 bp, Artificial Sequence
  derived and/or modified sequence
atggttaaacagaccatccaaatctttgcacgggtgaagccccccgtgcggaagcatcagcagggcatatactcgatcgatgaggatgaaaagctgattccgtcactagaaattatacttccccgagatcttgcagatgggtttgtgaacaataagagagagagctacaagttcaagttccaaagaatatttgatcaggacgcaaaccaggagactgtcttcgagaatatagcaaaaccagtggcagggagcgtccttgccggttataatggtacaatctttgcatacgggcagaccggttcgggcaagacatttaccattacagggggcgctgaacgatatagcgatcgcgggattattccacggaccctctcttatatctttgaacaactccaaaaagactcatctaagatttacacaacacatatctcctatctagagatatacaatgagtgcggctacgaccttcttgatccccggcacgaggccagttctttggaagacctgcctaaagtaactatcttggaggatccagaccaaaacattcatttaaagaacctgacccttcatcaggccacaacggaggaggaagcactgaacctccttttcctgggcgacacgaaccgtatgatcgctgaaactccaatgaaccaagcctctacccggtcacattgtattttcactattcaccttagctctaaggaacccgggtccgccaccgtgaggcacgccaaattacatcttgtggacttggccggcagcgaaagggtcgcgaagacaggagtcggtggacatctcctaactgaggccaagtatatcaacctcagcctgcactacctagagcaggtcataatagccctgtctgaaaaacacaggagtcacataccatatcgcaattcaatgatgacttccgtgctgagagacagcctcggcggcaattgcatgaccactatgatcgcgacgctaagcctggaaaaaaggaatcttgacgaaagcattagcacctgccgcttcgcccagcgagtggcacttatcaaaaacgaggctgtgctcaacgaggaaatcaatcctagattggtgatcaagcgccttcagaaagaaatacaggagttgaaggacgaactagctatggtcacaggagagcagcggaccgaggcattgacagaggccgaacttttgcaactggagaagctaatcacctcgtttctggaagatcaggatagtgattcccgattggaagtaggcgcggatatgaggaaagtccaccattgctttcaccatctcaagaaactcttgaatgacaagaaaattctggagaacaatacagtaagttcagagtcgaaagaccaagactgtcaggaacctctgaaagaggaagagtatagaaagctacgcgatatcttgaaacaacgggacaacgaaattaacattctggtgaatatgctcaagaaagagaaaaaaaaagcacaggaggccctgcacttggcgggcatggaccgcagggaatttagacaaagccagagcccacccttccgccttggaaatccagaagaaggccagcgcatgcggctctcctccgctccaagccaagcgcaagattttagcatactgggcaagcgcagtagtcttctacacaagaaaatcggaatgcgggaagaaatgtcccttgggtgtcaagaagccttcgagattttcaagcgggaccacgctgattccgttacaattgacgataacaagcagatattgaaacagaggttctctgaggcaaaggctctcggagaaagcataaatgaggcaaggtcaaaaatcggtcatctcaaagaggagattacacaacgccatatccaacaggtggcccttgggataagcgagaacatggctgtaccgcttatgcctgaccagcaggaggagaaactgagaagccagttggaagaagagaagcgcaggtacaaaaccatgttcacgaggctgaaagcacttaaagtggaaatcgaacacttgcagctgctgatggacaaagccaaagtaaagctgcagaaggaatttgaggtatggtgggccgaagaggccactaacctgcaagtgaactctccggccgttaatagtctcgaccatactaaaccgttcctgcaaacgtccgatagtcagcacgaatggtcccaactgttgtctaataagtcggacgtgaacgctcgcaaaatactcccctctccctgccctagcccacactctcaaaagcaaagctcaaccagtaccccgctggaggactccatacctaagagaccagtctcgtctatccctctcacgggtgacagccaaacagattcagacatcattgccttcattaaggcaaggcagtccatcttacagaagcagtgccttggaagcaattag

SEQ ID NO: 303654 - DNA, 2070 bp, Artificial Sequence
  derived and/or modified sequence
tgaggagcagaaaggtattccgatcgcggtattataccccgcactctcagttacatctttgaacaattacaaaaagactcctctaaaatttacaccactcacatttcttacctggaaatctataatgagtgtgggtatgatcttttagatcccaggcatgaagcatccagcctggaggacttgcctaaggtgacaatccttgaagacccagatcagaacatccacctgaagaacctcaccctgcaccaggctactacagaagaagaagcactgaaccttcttttcttgggggataccaataggatgattgctgagacccccatgaaccaggcgagcacacgctctcattgtatattcactatccacctaagctcaaaggagcccggcagtgctaccgtgcggcatgccaaactccatttggtggatctggccggctcagagcgggtggccaaaactggggtgggggggcaccttctcaccgaggccaaatacattaacctcagccttcattatctcgagcaggtgataatcgctctatctgagaaacacaggagccacatcccttacaggaatagtatgatgaccagtgtgctgcgggactccctcggtggcaactgtatgaccacaatgattgcaaccctgtctttagaaaaacgaaatctcgacgagtccatctccacttgcagatttgcccaacgagtagccctcatcaagaatgaagccgtgcttaatgaagagatcaacccgagattagttattaagcgactgcagaaagagatccaggaattaaaggatgagctggctatggtgactggcgaacagcgaaccgaggccctcactgaagcagagctcctgcagctggagaaactgattacgtcttttctcgaggatcaggactctgacagccggcttgaggtgggcgcagacatgcgaaaggtgcaccattgctttcaccaccttaaaaagctgctgaacgacaagaagatcttggaaaacaacactgtgtcctccgagagtaaggaccaggactgccaggagccgctcaaagaggaggagtacagaaaacttcgggatattttgaaacagagagataacgagatcaacatcctcgtgaatatgctgaagaaagagaaaaagaaggctcaggaggcgttgcatctggctgggatggataggagagagtttagacagagtcaatcccctccgtttcggttgggtaaccctgaagagggacagcgcatgcgactttcctcagcaccttcccaggcccaagacttcagcatcctgggtaagagaagtagcctgctacacaagaagataggtatgagggaggagatgagcttaggatgtcaggaggccttcgagattttcaaacgcgaccatgcagattcagtcaccattgacgacaataagcaaatactcaagcaaagattttcagaggcgaaggccctgggtgagagcatcaacgaagctcggagtaaaattggtcatctgaaggaagaaatcacccagcgtcatatccagcaggtagctcttggcatctctgagaacatggcggtgcctctgatgccagatcaacaggaggagaagctcaggagccagctcgaagaagaaaaaagacggtacaaaactatgtttacccggttaaaggccctaaaagtcgagatagagcacctccaactcctgatggacaaggcaaaggtgaaactgcagaaagagttcgaagtctggtgggcagaagaggcaacaaatttgcaggtcaactctcccgcagtgaatagtctggatcatacaaagcccttcttgcagacttctgactcccaacacgaatggagccagttgctgtctaacaagtcagacgttaacgctaggaaaattttgccttctccctgcccgtctccccattcacagaaacaatccagtacctctactccattggaggattctatccccaagcgacccgtcagctccatccccctcaccggtgactcacaaacagatagtgatatcattgcttttatcaaagcacgccagtccattctgcagaaacagtgcttggggtcgaattag

SEQ ID NO: 303655 - DNA, 3921 bp, Artificial Sequence
  derived and/or modified sequence
gttgctaagactgtgggtcgccggaggtggtgggagttagttttggcagcccgggcctgagagaggtcaagggtcattgcagagccagggaggagatggtgaagcagactatccagatattcgcgagggtgaagccccctgtccggaagcaccaacaagggatttattccatagatgaagatgaaaaattaatacctagcttggaaatcatcttaccacgtgatttggcagatgggtttgtgaataataagcgagaaagctacaaatttaaatttcaaagaatttttgatcaggatgcaaaccaagagaccgtttttgaaaacattgccaaaccagttgctgggagtgtcctggcaggttacaatggtaccatctttgcatatgggcaaacaggcagcgggaagacattcactatcacagggggtgcagagcgttacagtgacagaggcattatcccaaggacactgtcatacatttttgaacagttacaaaaggacagcagcaaaatatatacaacacacatttcctatttggaaatctacaatgaatgtggttatgatcttttggatccaagacatgaagcctccagtttggaagatttgccgaaagtgacaatactggaggatcctgatcagaacattcacctgaaaaacttgactctccatcaggcaaccacagaggaagaagctctgaatttgctttttttaggagacaccaaccgaatgattgcagagactcctatgaaccaagcttcaacccgttcccactgcattttcaccattcatttgtcaagcaaggaaccaggatctgcaactgtacgacatgccaaactccatctggttgacctggctggttcagagcgagttgcaaagactggagtagggggccatcttctaacagaggccaagtatatcaacttgtcactacattacttagaacaggttatcattgccctttcagaaaagcaccgttcgcacattccttatagaaactccatgatgaccagtgtcctaagagacagtttgggagggaactgcatgacaactatgattgcaacactctccttggagaaaaggaatcttgatgagtctatatcaacctgcagatttgcacagcgagtggcactcataaagaatgaagctgttcttaatgaagaaattaaccccagattagtgattaaacgcctacaaaaggaaatccaggaactgaaggatgaactggccatggtcactggggagcagaggacagaggcactcacagaagcagagctccttcagctggaaaaactaataacatcctttttggaagaccaggattcagacagtagattagaggttggcgcggatatgcgtaaagttcatcactgttttcatcatttaaagaaactattgaatgacaagaagatccttgaaaacaatacagtctcctctgaaagcaaagaccaagattgtcaagaaccattaaaagaagaagaatatagaaagctacgagatattctgaaacagagagataacgaaatcaatatcctggtcaacatgttaaaaaaagaaaagaagaaagctcaggaggctctccacttggctggcatggatagacgtgaattcagacagtcccagagcccacccttccgcctaggaaacccagaagaaggtcaaagaatgcgactatcctcagctccctcacaggcccaggacttcagcattttggggaaaagatccagtttgctccacaagaaaataggaatgagagaggaaatgtcattaggatgccaggaggcttttgaaatcttcaagagggaccacgctgacagcgttaccatcgatgacaacaaacagattctgaaacagagattttctgaagccaaggccctgggagaaagtataaatgaagcaagaagtaaaattggtcacctgaaggaagaaatcacccagcggcatatacagcaagtagccctaggaatctcggaaaacatggccgtgcctctgatgccagaccagcaggaggagaagctgcgatcacaactggaggaagaaaagagaaggtataaaacaatgttcactcgcctgaaagccctgaaggtggagatcgagcacttgcagctgctcatggacaaagccaaggtgaagctacagaaagagtttgaagtctggtgggcagaggaggccaccaacctgcaggtaaattctccagcagtgaattcactcgatcacacgaagccatttctccagacatctgactcccagcatgaatggtcccaactcctctctaacaaaagtgatgtgaatgccaggaaaatcctgccctcgccttgccccagtccacacagccagaaacagagcagcaccagcaccccactggaagacagcatccccaagaggccagtgtcgtccatccctctcaccggagacagccagacggactcggacatcatcgccttcatcaaggccagacagagcattctgcagaagcaatgtttgggaagcaattgaatttccaggaaatatccatccatgaattatgccagcaagaatgaagcacagatgaaggcagcgcccctcacttgctctggcttcagaagtgaactatgggctgctgggagcaactagtgactttgattcccatggaggggactgtgtttctttaaggatgctgacctggaggccaccgagaggctggggctggggctgaccacaacatccttcctgtggttgctggagctgctggcagggccaggcaaggccagagtgctaggggcagggtgaaggcttcagctcactgttgtagtgacgttttgtgtagatctttataagcttttgagaatgtgaaatagcaccatcaaaatataatgtcagaggatgctcacaccagtggaatgtggggggaatatttttatttttaacgatttgccagctctctcccttggcccgtgctctggtttggaagcccagaaatggccatgacaggtccaggcaggatgtcccagccacaggcaaggcagtggaatgcagggcatcctgaaggccaatcctgatctcccagaccacatctttcaccatcagcctcttggccaggatgacctggaggcagtgcctgaacagctgtgtctccagggagccatctgccctgcagggtctaaggacatcatagcacccagagaacagtgggcagctcccaggggctctgctgagagcttgagagagggcagtgtgggtaccttgggcctcacaaccttcacccagccacttgggaggatttgggctgacactccccacttccacagggaaaaacatagctgcctgggggtcttgtctccatgggccctctccatgacagatccaagggaaggtgggcagccctcaaggaggttcttgaagaactgccccctgggccagggggttccaacccagctgcagccagggaggggcagcggagggtgagcaggagtggcacctggaaatgaagctaactggataaaagtgctggtccactgctcctggtgtctctgtcctataaatacaggacctgatgaccctggaggggagcagagtggtaatatagtataattggcttgattttctttttcgttttttaggactgggtaacaggatcatgcaggagaagattaaaccattacatttctaagctaggcaggcccatcgagctcctctaatccacacccctattttatataattagaaggccagagtgaaggggagattcagcttgctgttctatgccactgacaaatgtcccctcttcagggggcttcccctgaccactccatctcgagtcaccccctagttatcccctatcccattaccattttttctgcatcactatctgacatgttatccttccgaacttgcctatttttgaaatacctgcaaccccccataatactaagagctccaatgcaacagg

SEQ ID NO: 303656 - DNA, 8611 bp, Artificial Sequence
  derived and/or modified sequence
ggggtgcagagcgttacagtgacagaggcattatcccaaggacactgtcatacatttttgaacagttacaaaaggacagcagcaaaatatatacaacacacatttcctatttggaaatctacaatgaatgtggttatgatcttttggatccaagacatgaagcctccagtttggaagatttgccgaaagtgacaatactggaggatcctgatcagaacattcacctgaaaaacttgactctccatcaggcaaccacagaggaagaagctctgaatttgctttttttaggagacaccaaccgaatgattgcagagactcctatgaaccaagcttcaacccgttcccactgcattttcaccattcatttgtcaagcaaggaaccaggatctgcaactgtacgacatgccaaactccatctggttgacctggctggttcagagcgagttgcaaagactggagtagggggccatcttctaacagaggccaagtatatcaacttgtcactacattacttagaacaggttatcattgccctttcagaaaagcaccgttcgcacattccttatagaaactccatgatgaccagtgtcctaagagacagtttgggagggaactgcatgacaactatgattgcaacactctccttggagaaaaggaatcttgatgagtctatatcaacctgcagatttgcacagcgagtggcactcataaagaatgaagctgttcttaatgaagaaattaaccccagattagtgattaaacgcctacaaaaggaaatccaggaactgaaggatgaactggccatggtcactggggagcagaggacagaggcactcacagaagcagagctccttcagctggaaaaactaataacatcctttttggaagaccaggattcagacagtagattagaggttggcgcggatatgcgtaaagttcatcactgttttcatcatttaaagaaactattgaatgacaagaagatccttgaaaacaatacagtctcctctgaaagcaaagaccaagattgtcaagaaccattaaaagaagaagaatatagaaagctacgagatattctgaaacagagagataacgaaatcaatatcctggtcaacatgttaaaaaaagaaaagaagaaagctcaggaggctctccacttggctggcatggatagacgtgaattcagacagtcccagagcccacccttccgcctaggaaacccagaagaaggtcaaagaatgcgactatcctcagctccctcacaggcccaggacttcagcattttggggaaaagatccagtttgctccacaagaaaataggaatgagagaggaaatgtcattaggatgccaggaggcttttgaaatcttcaagagggaccacgctgacagcgttaccatcgatgacaacaaacagattctgaaacagagattttctgaagccaaggccctgggagaaagtataaatgaagcaagaagtaaaattggtcacctgaaggaagaaatcacccagcggcatatacagcaagtagccctaggaatctcggaaaacatggccgtgcctctgatgccagaccagcaggaggagaagctgcgatcacaactggaggaagaaaagagaaggtataaaacaatgttcactcgcctgaaagccctgaaggtggagatcgagcacttgcagctgctcatggacaaagccaaggtgaagctacagaaagagtttgaagtctggtgggcagaggaggccaccaacctgcaggtaaattctccagcagtgaattcactcgatcacacgaagccatttctccagacatctgactcccagcatgaatggtcccaactcctctctaacaaaagtgatgtgaatgccaggaaaatcctgccctcgccttgccccagtccacacagccagaaacagagcagcaccagcaccccactggaagacagcatccccaagaggccagtgtcgtccatccctctcaccggagacagccagacggactcggacatcatcgccttcatcaaggccagacagagcattctgcagaagcaatgtttgggaagcaattgaatttccaggaaatatccatccatgaattatgccagcaagaatgaagcacagatgaaggcagcgcccctcacttgctctggcttcagaagtgaactatgggctgctgggagcaactagtgactttgattcccatggaggggactgtgtttctttaaggatgctgacctggaggccaccgagaggctggggctggggctgaccacaacatccttcctgtggttgctggagctgctggcagggccaggcaaggccagagtgctaggggcagggtgaaggcttcagctcactgttgtagtgacgttttgtgtagatctttataagcttttgagaatgtgaaatagcaccatcaaaatataatgtcagaggatgctcacaccagtggaatgtggggggaatatttttatttttaacgatttgccagctctctcccttggcccgtgctctggtttggaagcccagaaatggccatgacaggtccaggcaggatgtcccagccacaggcaaggcagtggaatgcagggcatcctgaaggccaatcctgatctcccagaccacatctttcaccatcagcctcttggccaggatgacctggaggcagtgcctgaacagctgtgtctccagggagccatctgccctgcagggtctaaggacatcatagcacccagagaacagtgggcagctcccaggggctctgctgagagcttgagagagggcagtgtgggtaccttgggcctcacaaccttcacccagccacttgggaggatttgggctgacactccccacttccacagggaaaaacatagctgcctgggggtcttgtctccatgggccctctccatgacagatccaagggaaggtgggcagccctcaaggaggttcttgaagaactgccccctgggccagggggttccaacccagctgcagccagggaggggcagcggagggtgagcaggagtggcacctggaaatgaagctaactggataaaagtgctggtccactgctcctggtgtctctgtcctataaatacaggacctgatgaccctggaggggagcagagtggtaatatagtataattggcttgattttctttttcgttttttaggactgggtaacaggatcatgcaggagaagattaaaccattacatttctaagctaggcaggcccatcgagctcctctaatccacacccctattttatataattagaaggccagagtgaaggggagattcagcttgctgttctatgccactgacaaatgtcccctcttcagggggcttcccctgaccactccatctcgagtcaccccctagttatcccctatcccattaccattttttctgcatcactatctgacatgttatccttccgaacttgcctatttttgaaatacctgcaaccccccataatactaagagctccaatgcaacagggacctgtttgtcttgctcattgctgtgtcccaagcacagagtcgctgttcagtaaacggtccttcagttcatgagtagacgagccagaacccagatgtgtttctcaggctggtgtcactctgacttcccccaggctctgactgaatcccatcgggacaggggccagcatctctggtccactcctggccctcacagttcaatggaacatagtaagccctctgtaaagtctgtagaaccagaggaagaccaaattctgattctagaagcctccccaagagtccatggaacacacatgtaactgcacacacacacacacatacacacacacactctcaagagccctgaagatggcatggcatttgccccagtcccctatgtagcagcagcagtattcttggcatgccttagtgccctcagccctctagagctgggtagagtctactaacttttattttcttttatttttactttcttttatttattttttgagatggggggggtctctgtcagccaggctggggtgcagtggtgcgaccatacctcactagtcagcctccaactcctgggctcaagccatactcagcctccaactcctgggctcaagcgatcctctcacctcagcctccaaagtagctggaactacaggcatgcaccaccacacctagctcgttttaaattttttgtagagacagggtctcactgtgtggctcaggatggtctcaaattcctggccttaagcgatgctcccgccttggcctcccaaagtgctgggattgcaggcatgagccacataccctgccagagtctttcaacattagatctcccactgagacatcatctcctggatccaaaggccttactgacagagatgtgtggcatggccccatgcggggtgtgaaccagcctcctggggcaatcactaagacaggaaaggaaatgaagacagaaaaacacacaacatgggatctggggccactggtgtccagagcatatgcaaagtgtgtgcagcaactggccaaggggccttttgctccgaacatcccctaatggaagcccagcctttgatatggacacatgcttgacagcagtgcaccttcccagagttcactggcctctgcaaatgggagaaattgatgcaatgttttgaaaagactttccagcaatccacctgggatcagtggagccacggatgacaagaagtatctgagttcactctaggccaaaatgtgggattttcaaaaacattttctggaaagcagcctagccagtgactccagcccagtccctgctagaattcaactggctctaccaatcccttgacaagaagtagggtggacggaggttggaggagggaagttaaaatgtagcttgcccagatcttgctaaaaaggagttttagaaagcagatagagaaattgtggtatactgaatacatcattttaattcttcaccaccagtatagaattacacatccaaagctttgtcatggcccactttgactaatgtggtgttggcaaacctgatccaggcagaggcttgaattgtgctctcatggttgagcttgcctcttgctccagtgatctctcttgggatgaacatgccatgggtagctgctgccccttcagcctggaacatccagagagcagacctgagcccagtctacagcctggagcagagcctcccaggcaagcccagcccagatcagctgaactatggctcacccaaagacctattggcatgagaatatatgctgcttgtcataaaccactgaggtttagagtggtttgttatatagcattaattgtagcaatagcagactggcacagaaattggaacccagagacagtatatgactggatctaggatttctcagtgcagagttcattgtctctccatgcagcctgtggaaaggcactgagagcatcctgtatatggaaaagcaggaccaccacctacagccatgatgaagcaacaaggacctgatttaccctcctgctttaaatgactaaaaatgagacaaaatcctctatacaaaccaatggttttcagccattggataacaagcaatatagggtatgattgatccgcaagagaagggaaacaagtgaggggagccctatgattgctccaacttactgcctgcagtgagttttcaggctgcagcccaggaagggggaaccaggtagagcccagtggtttccctgagttgaggaaatggagctgggaatccagggaggacaaagtggcttaaatttgcaaggcagagtcccagggatgagagagagagaaggagagagagaggagaaaaaagagagagaaagagagagagcatgctctggagatcttcagagggttacccttgagtcttcagctaactaccgatcaacatctgcatgtgaagaaattacccaaggcaggggaaagaaccaccaggaggaagcaggtggaataatttcctgagataacactgtgttgggaagagttcatgtttccaacagccagagtggagaaacctcccaaaacagtcattgtatagagacacataaggtactgcctcagaagtggggccaaattagtcctagatgatagattgctctggtcccacctaacaaagcttaaaaagccagccccaaaggagtcaaattgtttccagtaagtttccaagtaacttcaatgagtcccaaaacaaagcttcaaaatatctaaaggaatatgaaaaacaaaccaaaaagaaaccagcatccaacaatatagaatccacaatgtctggtgtccattaaaaaataatcaggcatgcaaagaagcaggaaaatatgggccatgagaggagaaaaaaccatcaatagaaatagaggccgggtgtggtggctcactcctataatcccagcactttgggaggccgaggcaggaggatcacctgaggtcaggagttcaagaacagcctgttcaacatggggaaaccccgtctctactaaaaatacaaaaaatagccgggcatggtgttgcgtacctgtaatcccagctactcagaggctgaggcaggagaattgcttgagcccaggaggcagaggttacagtgagccgaaattgtgccattgcactccagcttgggcaacaagagtgaaactctgtctcaaaaaaaaaaaaaagaaaaaacaaatagaaacagccccaggcatggcacagttgatagagtaaatagacagaaacattttttaaaatgcaatgggtgtgtgtttcaaatctaggcagaaaaaatgctccttgtaattccttaaacataagcatgtctcattcatctggtcattgttttgacaaggatgtgccatccattgtgctaagttctgaggagtcagaggtgacagagacagagaaagtgccagcattcttggaaccttctaacgaaggagagggacaagccaggcatggtggctcacgcctgtaatcccaacactttgggagactgaggctggcggatcacgaggtcaggagtttgagaccaacctggccaacatggcgaaaccccatcgctactaaaaatacaaaaattagctgggtgtggtggtgcgcacctgtaatcccagctactctggaggctgaggcaggacaatcacttgaaccctggaggcagagtttgcagtgagctgagatcgtgccactgcactccaacctgggcaacaagagcgagactccttctctgaaaaaaaaaaaaagagagggacaataaacaagtaagcaagacaatctgattaagaaggagttggggttagctgggcatggtagcaagcgcctgtagtctcagctactcgggaggctgaggtgggaggatccttgaacccaggaggttaaggctgcagtgagctgtgatcacaccactgcactccagcctggatgacagagcaagaccctgtctcagaaaaagaagaaggagttgggggtggggtaggatgggcttggactcactatcaaggtgggtgggagtgtgagaacccggcaaggtgcaaagagagaagcagggaagggaagcttaggacaatgatggcaggttgggtattgggtgatgggaagaggcaaaggacgtggagcttggcaaaaaggggacttgtggggatttgggccatgtgagcatgtgggggagacagtgttccttccataacacgtgtccagggactgccagggctccgaggcagagcaggtgtagagaggttggctgtgaatgttggatgttgaaaacatatgtgtcaaatgtgggaggaaaaagcagtgtttccttgaatacaagctcctcctcaccttgcgaaaagtggcctctgagtgtagccctgaatgcatctcccaaggaataggaggaagcagcaaccttttcagagttaactgctttatttgggttttccatggcctcgtgccagccagcagggctgagccagtttcacccacactgagagggaactcagcaaagagcaagcagcatgccagctggtactcttccctctccattcactcagctcctgatctcaggagggcagcccctccccaggccagcacccctccccttctggccccaggtgtgggatgttgttgttttcttttctccgaaacatctcctgggtttgtcttttccatcactgtctttagactgaggcaagcagtccccatgccttcagccccatgttttgggggtaacctgtgctttgacatgctttgctaaaaactttctaagtctccctctggtgctgggaccagccatgaccaacaacgtcatccatgcaggccacccctaacatagtccaggcctcatgtgggtctcagttcccttttcttctttcaggaagttctccagtgcatgcatagggttgaccagatgtcccaaggtgctctaggacttatgcctatgaagctgttttagggcttcctagtcagtccctggttccaggaaagcagcctgatgaggagatcattcccgctggctggtgtggcatttcttttatggcactacctgggattgggccaccagacctgcgctaacatgctgatttgatggactcttaacatcataggacaaagaatcgtcatgtgaaccaattagacaataaacaaatgcctaagtgcc

SEQ ID NO: 303657 - DNA, 2258 bp, Artificial Sequence
  derived and/or modified sequence
gttgctaagactgtgggtcgccggaggtggtgggagttagttttggcagcccgggcctgagagaggtcaagggtcattgcagagccagggaggagatggtgaagcagactatccagatattcgcgagggtgaagccccctgtccggaagcaccaacaagggatttattccatagatgaagatgaaaaattaatacctagcttggaaatcatcttaccacgtgatttggcagatgggtttgtgaataataagcgagaaagctacaaatttaaatttcaaagaatttttgatcaggatgcaaaccaagagaccgtttttgaaaacattgccaaaccagttgctgggagtgtcctggcaggttacaatggtaccatctttgcatatgggcaaacaggcagcgggaagacattcactatcacagggggtgcagagcgttacagtgacagaggcattatcccaaggacactgtcatacatttttgaacagttacaaaaggacagcagcaaaatatatacaacacacatttcctatttggaaatctacaatgaatgtggttatgatcttttggatccaagacatgaagcctccagtttggaagatttgccgaaagtgacaatactggaggatcctgatcagaacattcacctgaaaaacttgactctccatcaggcaaccacagaggaagaagctctgaatttgctttttttaggagacaccaaccgaatgattgcagagactcctatgaaccaagcttcaacccgttcccactgcattttcaccattcatttgtcaagcaaggaaccaggatctgcaactgtacgacatgccaaactccatctggttgacctggctggttcagagcgagttgcaaagactggagtagggggccatcttctaacagaggccaagtatatcaacttgtcactacattacttagaacaggttatcattgccctttcagaaaagcaccgttcgcacattccttatagaaactccatgatgaccagtgtcctaagagacagtttgggagggaactgcatgacaactatgattgcaacactctccttggagaaaaggaatcttgatgagtctatatcaacctgcagatttgcacagcgagtggcactcataaagaatgaagctgttcttaatgaagaaattaaccccagattagtgattaaacgcctacaaaaggaaatccaggaactgaaggatgaactggccatggtcactggggagcagaggacagaggcactcacagaagcagagctccttcagctggaaaaactaataacatcctttttggaagaccaggattcagacagtagattagaggttggcgcggatatgcgtaaagttcatcactgttttcatcatttaaagaaactattgaatgacaagaagatccttgaaaacaatacagtctcctctgaaagcaaagaccaagattgtcaagaaccattaaaagaagaagaatatagaaagctacgagatattctgaaacagagagataacgaaatcaatatcctggtcaacatgttaaaaaaagaaaagaagaaagctcaggaggctctccacttggctggcatggatagacgtgaattcagacagtcccagagcccacccttccgcctaggaaacccagaagaaggtcaaagaatgcgactatcctcagctccctcacaggcccaggacttcagcattttggggaaaagatccagtttgctccacaagaaaataggaatgagagaggaaatgtcattaggatgccaggaggcttttgaaatcttcaagagggaccacgctgacagcgttaccatcgatgacaacaaacagattctgaaacagagattttctgaagccaaggccctgggagaaagtataaatgaagcaagaagtaaaattggtcacctgaaggaagaaatcacccagcggcatatacagcaagtagccctaggaatctcggaaaacatggccgtgcctctgatgccagaccagcaggaggagaagctgcgatcacaactggaggaagaaaagagaaggtataaaacaatgttcactcgcctgaaagccctgaaggtggagatcgagcacttgcagctgctcatggacaaagccaaggtgaagctacagaaagagtttgaagtctggtgggcagaggaggccaccaacctgcaggtaaattctccagcagtgaattcactcgatcacacgaagtccaagatcaaggcactggcagattcgatgtctggactctaa

SEQ ID NO: 303658 - DNA, 2394 bp, Artificial Sequence
  derived and/or modified sequence
atggtgaagcagaccatccagatctttgcccgggtgaagccccctgtgaggaagcaccagcagggcatctacagcattgatgaagatgagaagctgatccccagcctggagatcatcctgccccgggacctggctgatggctttgtgaacaacaagcgggagagctacaagttcaagttccagaggatctttgaccaggatgccaaccaggagaccgtgtttgaaaatattgccaagcctgtggccggctctgtgctggccggctacaacggcaccatctttgcctacggccagacaggcagcggcaagaccttcaccatcaccggcggcgctgagcgctacagcgaccggggcatcatccccaggaccctgagctacatctttgagcagctgcagaaggacagcagcaagatctacaccacccacatctcctacctggagatctacaatgaatgtggctatgacctgctggaccccaggcatgaggccagcagcctggaggacctgcccaaggtgaccatcctggaggaccctgaccagaacatccacctgaagaacctgaccctgcaccaggccaccacagaggaggaggccctgaacctgctcttcctgggggacaccaacaggatgattgctgagacccccatgaaccaggccagcaccaggagccactgcatcttcaccatccacctgagcagcaaggagcccggcagcgccaccgtgagacatgccaagctgcacctggtggacctggccggcagcgagcgggtggccaagacaggagtgggcggccacctgctgacagaggccaagtacatcaacctgagcctgcactacctggagcaggtgatcatcgccctgtctgagaagcacaggagccacatcccctacagaaacagcatgatgacctctgtgctgcgggacagcctgggcggcaactgcatgaccaccatgattgccaccctgagcctggagaagaggaacctggatgagagcatcagcacctgccgctttgcccagagggtggccctgatcaagaatgaagctgtgctgaatgaggagatcaacccccggctggtgatcaagaggctgcagaaggagatccaggagctgaaggatgagctggccatggtgactggagagcagaggacagaggccctgacagaggccgagctgctgcagctggagaagctgatcaccagcttcctggaggaccaggacagcgacagccggctggaggtgggcgctgacatgaggaaggtgcaccactgcttccaccacctgaagaagctgctgaatgacaagaagatcctggagaacaacacagtgtcctctgagagcaaggaccaggactgccaggagcccctgaaggaggaggagtacaggaagctgcgggacatcctgaagcagagggacaatgagatcaacatcctggtgaacatgctgaagaaggagaagaagaaggcccaggaggccctgcacctggccggcatggaccggcgggagttccggcagagccagagcccccccttccggctgggcaaccctgaggagggccagaggatgaggctgagcagcgcccccagccaggcccaggacttcagcatcctgggcaagaggagcagcctgctgcacaagaagattggcatgagggaggagatgagcctgggctgccaggaggcctttgagatcttcaagagggaccacgccgacagcgtgaccattgatgacaacaagcagatcctgaagcagcgcttcagcgaggccaaggccctgggggagagcatcaatgaggcccggagcaagattggccacctgaaggaggagatcacccagaggcacatccagcaggtggccctgggcatcagcgagaacatggctgtgcccctgatgccagaccagcaggaggagaagctgcggagccagctggaggaggagaagaggcgctacaagaccatgttcacccggctgaaggccctgaaggtggagattgagcacctgcagctgctgatggacaaggccaaggtgaagctgcagaaggagtttgaggtgtggtgggccgaggaggccaccaacctgcaggtgaacagccctgctgtgaacagcctggaccacaccaagcccttcctgcagaccagtgacagccagcacgagtggagccagctgctgagcaacaagagtgatgtgaatgccaggaagatcctgcccagcccctgccccagcccccacagccagaagcagagcagcaccagcacccccctggaggacagcatccccaagaggcctgtgagcagcatccccctgactggagacagccagacagacagcgacatcatcgccttcatcaaggcccggcagagcatcctgcagaagcagtgcctgggcagcaactag

SEQ ID NO: 303659 - DNA, 2070 bp, Artificial Sequence
  derived and/or modified sequence
tgaggagctgagcgctacagcgaccggggcatcatccccaggaccctgagctacatctttgagcagctgcagaaggacagcagcaagatctacaccacccacatctcctacctggagatctacaatgaatgtggctatgacctgctggaccccaggcatgaggccagcagcctggaggacctgcccaaggtgaccatcctggaggaccctgaccagaacatccacctgaagaacctgaccctgcaccaggccaccacagaggaggaggccctgaacctgctcttcctgggggacaccaacaggatgattgctgagacccccatgaaccaggccagcaccaggagccactgcatcttcaccatccacctgagcagcaaggagcccggcagcgccaccgtgagacatgccaagctgcacctggtggacctggccggcagcgagcgggtggccaagacaggagtgggcggccacctgctgacagaggccaagtacatcaacctgagcctgcactacctggagcaggtgatcatcgccctgtctgagaagcacaggagccacatcccctacagaaacagcatgatgacctctgtgctgcgggacagcctgggcggcaactgcatgaccaccatgattgccaccctgagcctggagaagaggaacctggatgagagcatcagcacctgccgctttgcccagagggtggccctgatcaagaatgaagctgtgctgaatgaggagatcaacccccggctggtgatcaagaggctgcagaaggagatccaggagctgaaggatgagctggccatggtgactggagagcagaggacagaggccctgacagaggccgagctgctgcagctggagaagctgatcaccagcttcctggaggaccaggacagcgacagccggctggaggtgggcgctgacatgaggaaggtgcaccactgcttccaccacctgaagaagctgctgaatgacaagaagatcctggagaacaacacagtgtcctctgagagcaaggaccaggactgccaggagcccctgaaggaggaggagtacaggaagctgcgggacatcctgaagcagagggacaatgagatcaacatcctggtgaacatgctgaagaaggagaagaagaaggcccaggaggccctgcacctggccggcatggaccggcgggagttccggcagagccagagcccccccttccggctgggcaaccctgaggagggccagaggatgaggctgagcagcgcccccagccaggcccaggacttcagcatcctgggcaagaggagcagcctgctgcacaagaagattggcatgagggaggagatgagcctgggctgccaggaggcctttgagatcttcaagagggaccacgccgacagcgtgaccattgatgacaacaagcagatcctgaagcagcgcttcagcgaggccaaggccctgggggagagcatcaatgaggcccggagcaagattggccacctgaaggaggagatcacccagaggcacatccagcaggtggccctgggcatcagcgagaacatggctgtgcccctgatgccagaccagcaggaggagaagctgcggagccagctggaggaggagaagaggcgctacaagaccatgttcacccggctgaaggccctgaaggtggagattgagcacctgcagctgctgatggacaaggccaaggtgaagctgcagaaggagtttgaggtgtggtgggccgaggaggccaccaacctgcaggtgaacagccctgctgtgaacagcctggaccacaccaagcccttcctgcagaccagtgacagccagcacgagtggagccagctgctgagcaacaagagtgatgtgaatgccaggaagatcctgcccagcccctgccccagcccccacagccagaagcagagcagcaccagcacccccctggaggacagcatccccaagaggcctgtgagcagcatccccctgactggagacagccagacagacagcgacatcatcgccttcatcaaggcccggcagagcatcctgcagaagcagtgcctgggcagcaactag

SEQ ID NO: 303660 - DNA, 2394 bp, Artificial Sequence
  derived and/or modified sequence
atggtgaagcagaccatccagatcttcgcccgggtgaagccccccgtaaggaaacatcaacagggcatttactccatagacgaggatgagaaactgatcccttcactcgaaatcatcttgccacgggatctggctgatggctttgttaataacaaaagggaatcctataagttcaaattccagcggatctttgatcaggacgctaatcaagaaaccgtattcgagaacatcgctaaacccgtcgctgggagcgtgctggctgggtataatggtacaatttttgcatatggacaaactggatcaggtaaaacttttaccatcactggtggtgcagagagatactcagatcgtggcatcatcccacgaaccctgtcctacatttttgagcagctccaaaaggattcatctaaaatctacacaacgcacataagctatctggaaatctataatgaatgcggctacgatcttctcgaccctcgccatgaagcctcctctttggaggacctgccaaaagtgactatcctggaggacccagaccagaacattcatctgaagaatctaacactacaccaagccacgacagaagaagaggcactcaatctgctattcctgggcgacactaacaggatgatcgcagaaacacctatgaaccaagcctcgactagatcacattgcatctttaccatccacctctcatcaaaagaaccagggtccgcaaccgtgaggcatgcaaagcttcacctggtcgacctggccggatcagaacgtgtcgcgaaaacaggagtgggcggtcatttgttaaccgaagctaagtacatcaacttaagcctccattatttagagcaggtcatcattgcccttagcgaaaagcaccggtcccacattccatatcggaacagtatgatgacatctgtactccgagacagtctcggtggcaactgcatgacaacaatgattgcaacgctttcattggaaaagcggaacttggatgagtctatctctacatgtcggtttgctcagcgggttgccctaatcaagaatgaggctgtgcttaatgaagaaatcaacccacgattagtcattaaaaggctgcagaaagaaatccaggaactgaaagacgagctcgcgatggtgacaggtgagcaacggaccgaggcgctcacagaggccgagttactccagctggagaaactgattacaagtttcctggaggaccaggactccgattctcgcctcgaagtgggcgcggacatgcgcaaagttcaccattgctttcaccatctgaaaaagctactgaacgataagaagatactcgagaataacactgtgagtagcgaaagcaaagatcaggactgccaggagccacttaaggaagaggagtataggaagctgagagatatccttaagcaacgcgataacgaaattaacatcctggtgaatatgttgaaaaaagagaagaaaaaggcccaggaggccctgcacctggccgggatggataggcgcgagttccggcagagtcaaagtccaccatttcgcttaggaaatcccgaggaaggccaaaggatgaggctgtcctccgccccatcccaggcacaggatttttccatactcggcaaaagaagctccctgctgcacaaaaagatcggaatgcgagaagagatgtccctcggttgtcaggaggcgttcgaaatctttaaaagagaccacgctgacagcgtgacaatagacgataacaaacagattctgaagcagcggttttccgaagcaaaggccctaggagagtccattaatgaggcccgctcaaaaattgggcatctgaaggaagagataacccagcgacacatacaacaggtggccctgggtataagtgagaacatggcggttcccctgatgccagatcagcaagaggagaagctgcgcagccagctggaggaggaaaaaagacgctataagaccatgtttactcgcctcaaggcccttaaggtggagattgagcaccttcagttactaatggacaaggctaaggtcaagctccagaaagaatttgaagtgtggtgggccgaggaggccactaaccttcaggttaattcacccgcagttaacagcctggaccacaccaaacccttcctgcaaacttccgactcccaacacgagtggtcccagctgctgtcaaataaatccgacgtgaatgctcgaaaaatcctgccaagcccctgtccttcaccacactcacaaaagcaatcatctacatctaccccacttgaggatagcatcccgaaaaggcccgtgagctcaatcccgttgacaggggacagtcagaccgatagcgacataatcgcattcataaaggctaggcagtctatactacagaagcagtgcctaggcagcaactag

SEQ ID NO: 303661 - DNA, 2070 bp, Artificial Sequence
  derived and/or modified sequence
tgaggcgccgagcggtacagcgaccggggcatcatcccccggaccttaagttacatctttgaacagcttcagaaagactcctcaaagatttacaccacacatatctcctatctcgaaatatataacgaatgcggatatgatctgctggatcctcgccacgaggcttcttcgctggaggacctacccaaagtgactattctcgaggaccctgatcagaatatacatctaaaaaatttgacgctgcaccaagcaacaaccgaggaggaagcccttaacctgttgttcctgggcgacactaacagaatgatagctgagactcccatgaaccaggcctcaacaagatcacattgtatcttcaccattcatctgagcagtaaagaaccagggtcagctacagtccgacatgctaaattgcacctggtggacctagcaggctctgaacgggtagctaaaactggagtgggcggacatctgctcaccgaagcaaagtatattaacctgtcgctgcactacttggaacaagtgataatcgccttatcagaaaagcatcgcagccacataccctatcggaactctatgatgacctctgtcttacgagattcccttggggggaactgtatgacaactatgatcgctaccctctcactggaaaagagaaatctggacgaaagcatctccacttgtcggtttgcccagcgtgttgctctgatcaaaaacgaagctgttctcaatgaagagatcaatccacgactcgtgataaagcgcctgcagaaagagattcaagaactgaaggatgagttggccatggtcacgggcgagcagcgtactgaagcgttgacagaggctgaactgctccaattagagaagcttatcacgagtttccttgaggaccaggacagtgattcccgcctggaggtgggggccgacatgagaaaggtccaccactgctttcaccatttaaagaaactacttaacgataaaaagattctggagaataacaccgtcagctccgagagtaaggaccaggactgccaggaacccctgaaggaggaagagtacagaaagctccgggatattttaaagcagcgcgacaacgaaatcaatatactggtgaatatgctcaagaaggagaaaaagaaggcacaggaagcactgcatcttgccggtatggacaggcgcgagtttaggcagagtcagagtccaccgttccggctgggcaatccagaagaggggcagcggatgaggctcagtagcgccccaagccaggcccaggacttcagcattctgggcaaaagaagttctctacttcataagaagataggtatgagagaagagatgtcactcggctgccaagaagctttcgagatctttaagagagaccatgccgatagcgtgacaatcgatgataataagcagattctgaaacaaaggtttagcgaggccaaagccctgggggagagcattaatgaagcacgcagcaagattggacacctgaaggaagagatcacccagcgccatattcaacaggtggcactcgggatctccgaaaacatggccgtgcccctgatgccagaccagcaagaagaaaaactgcgatcgcagctggaagaagaaaagagaaggtacaaaaccatgttcacacgccttaaggcacttaaggtagagattgaacatttgcaattgctcatggataaagctaaagtaaaattgcagaaggaattcgaggtctggtgggctgaggaagctactaatctgcaggtgaatagtcctgccgtgaattccttggatcacaccaaaccatttttgcaaacatccgacagtcagcacgaatggtcgcagttactgtctaacaagtccgatgtcaatgcaagaaagattctgccgagtccatgcccaagcccccactcgcagaaacagtcaagcacatcaacacccctggaggattccatacctaaacgtcctgtgagttcaatccccctcacaggggattcccaaaccgacagcgacatcatagcctttattaaggcccgccagtccatcctccaaaagcagtgtctggggtcaaattag

SEQ ID NO: 303662 - DNA, 2394 bp, Artificial Sequence
  derived and/or modified sequence
atggttaagcaaaccattcagatctttgcgagggttaagcctcccgtccgaaaacaccagcaggggatttactctatagatgaggatgaaaagttgatcccttccctcgagatcattctccctagggatctggccgacggcttcgtcaataacaagagggaatcctacaaatttaagtttcaacgtatattcgatcaagatgctaatcaggagaccgttttcgaaaatatagcaaaacccgtggctggatccgtgctagccggttataacggcaccattttcgcctatggccagactgggagcggcaaaacctttacaatcaccggaggtgcggagcggtactcagatcggggtattattccacgcaccttgtcttatatcttcgagcagctgcagaaggactccagcaaaatatacaccactcacatttcttatcttgagatctataatgaatgtggctacgatctactggatccgaggcacgaggcttcttccttagaagatcttcccaaagtcaccatcctggaggaccccgatcaaaacatccacctgaagaacctgacgctgcatcaggccaccactgaagaagaagctttaaacctgctgtttctcggtgatacgaaccggatgattgctgaaacccctatgaaccaggcatccacaaggtctcactgcattttcactatacacctgagtagcaaggagcccggttccgctacggtcaggcacgctaaactacatcttgtcgatctggctgggagtgaaagggtggccaagacaggcgtaggaggccaccttctgacggaagctaaatacataaatctgagtctccactatctggaacaggttattattgccctgtccgagaaacaccggagtcacatcccgtaccgcaactcgatgatgaccagtgtgctgagagacagtcttggcggaaattgtatgaccacaatgatcgcaaccttatcgcttgagaagcgcaacttagacgaatcaatcagtacctgccgattcgcccagcgggtggccctcattaaaaacgaagctgtgcttaacgaggagatcaaccctcgcttagtgattaagaggctgcagaaagagatccaggagctcaaggacgagctggccatggtgactggggagcaaagaacagaggctcttacagaggccgaactgctgcagctggaaaaactgattacttcttttctcgaggatcaggacagcgactcccggctggaagtcggggcagatatgcgcaaagtccaccattgctttcaccacttaaagaagctcctgaacgataagaagatattggagaacaacaccgtgtcttccgaatccaaagaccaggactgtcaggagcctttgaaggaagaagagtacaggaagcttagagacatccttaagcagagggataacgaaatcaacattctagtgaatatgctgaaaaaagagaaaaaaaaagctcaggaggccctccacttggccggaatggaccgtcgggagttcagacaatctcagtctccccctttccgcctgggaaacccagaagaaggccaacgcatgcgtttgagcagcgcgccaagccaggcacaggacttttctattttaggcaaacggtctagcctgttgcacaagaagatcggtatgcgagaagagatgtcactcggctgccaggaggcctttgaaatctttaagcgtgatcatgctgactcggtgacgatagacgacaataaacagattctgaaacagcgcttttctgaggccaaggcactgggagaaagcataaatgaggcccgaagcaagatcggacacctgaaggaggagattactcaacggcatatccaacaggtcgcgcttgggatatctgagaacatggcagtgccgctgatgcccgaccagcaggaggagaagctgcggtcacagctcgaagaggagaagaggcggtacaagaccatgttcacgcgtcttaaagccctcaaggtagagatcgaacacctccagctgctgatggacaaagccaaggtaaaactgcagaaggagttcgaggtatggtgggccgaggaggccaccaatttgcaggttaacagccccgctgtcaactcccttgatcatacaaaacctttcttgcagacgtcagactcccagcacgagtggagccaattgctcagtaacaagagcgatgtgaatgccaggaaaattctgccgagcccgtgccccagcccacactcgcaaaagcagtctagcacgtctaccccgttagaggatagtatacctaaaagacctgtctcctccattccactgactggtgatagccagactgacagtgacattatcgcatttatcaaagcgaggcaatcgattttacagaagcaatgtctcgggtctaattag

SEQ ID NO: 303663 - DNA, 2070 bp, Artificial Sequence
  derived and/or modified sequence
tgaggagcagaacgctactccgatagaggaatcatccctcggaccttgtcctatatctttgagcagctccagaaggatagttccaagatctataccactcacatatcctatctcgaaatttacaacgagtgtggttatgatttactggacccccgacacgaggcgtcctcactggaagaccttccaaaagtgacaatcctcgaagaccccgatcagaatatccatttaaagaaccttacccttcaccaagcaacaacggaagaggaggcactcaatctgctttttctgggagatactaataggatgatcgccgaaacccccatgaatcaggcctcaaccaggagccactgtatctttaccattcacttgagttcaaaggagcccggtagcgcaactgtgcggcacgccaaactgcatctagttgacttggcaggttctgagcgtgtcgcgaaaaccggtgtgggcggacacctcttgacagaggcaaagtacatcaatctgtcactccactacctggagcaggtgattatcgccctttcagagaagcaccgaagccatattccctaccgcaattccatgatgacatccgtgcttcgagacagtctcggcggaaattgcatgaccacaatgatcgctacactgagcctcgaaaagagaaacctcgatgaatccatatccacttgtagatttgcccagcgggtggctctgatcaagaacgaggccgtgctcaatgaggaaattaatccacgtctcgttatcaaaaggctgcagaaagagatccaggagctcaaggatgagttggccatggtgacgggtgagcagcgtacagaggctcttacagaggccgagctcttgcagctggaaaagctgatcacttctttccttgaagaccaggacagtgacagccgccttgaggtgggagccgatatgcggaaagtccatcattgtttccatcacctgaagaagcttctgaatgacaagaaaattttggagaataacacggtgtcttccgagtctaaagaccaggattgtcaagaaccactcaaggaggaggagtacaggaaactgcgagacatcctgaaacagagagataatgaaattaacattctcgtgaacatgctgaaaaaagaaaaaaaaaaggctcaggaagcactacacctggctggtatggaccgacgcgagttcagacaatcccagtctcccccattccgactgggcaatccggaggaggggcaacggatgcgattaagcagcgcccctagtcaggcccaggacttttctatcttgggaaagagatcttcattactgcacaagaaaatcgggatgcgggaggagatgtcgctggggtgtcaggaggcctttgaaatcttcaagagggaccatgctgactctgtgacaatcgacgataataagcagattctgaaacagcgtttctccgaggcgaaggctctcggggagagtatcaacgaggccaggagtaagatcgggcatctgaaagaggagattacccagcgtcatattcagcaagtggctttaggcataagcgaaaacatggctgtgcccctaatgccagaccagcaggaggagaaactccggtcacagctggaggaagagaaacgcagatacaagaccatgttcacgaggctgaaagccttgaaagtggagatcgaacaccttcagctgttgatggacaaggctaaggtcaaattgcagaaagagtttgaagtgtggtgggccgaagaggccactaatctgcaggtcaacagtcctgcggtgaattctctcgatcacaccaagccattcctccagacctccgattcacagcatgagtggtcccagctcctctcgaataaatcggacgttaatgcacgaaagatccttccatcgccatgcccttcgccccattcacagaagcagtcctctaccagtactcccctggaagactcaatcccaaaacggccagtttcatccatccctctgacgggcgattcacaaaccgattcagatatcatcgcgttcatcaaagcgaggcagagcatcttgcagaaacagtgtctcggcagcaattag

SEQ ID NO: 303664 - DNA, 2394 bp, Artificial Sequence
  derived and/or modified sequence
atggtgaagcagaccatccagatcttcgccagagtgaagccccccgtgagaaagcaccagcagggcatctacagcatcgacgaggacgagaagctgatccccagcctggagatcatcctgcccagagacctggccgacggcttcgtgaacaacaagagagagagctacaagttcaagttccagagaatcttcgaccaggacgccaaccaggagaccgtgttcgagaacatcgccaagcccgtggccggcagcgtgctggccggctacaacggcaccatcttcgcctacggccagaccggcagcggcaagaccttcaccatcaccggcggcgccgagagatacagcgacagaggcatcatccccagaaccctgagctacatcttcgagcagctgcagaaggacagcagcaagatctacaccacccacatcagctacctggagatctacaacgagtgcggctacgacctgctggaccccagacacgaggccagcagcctggaggacctgcccaaggtgaccatcctggaggaccccgaccagaacatccacctgaagaacctgaccctgcaccaggccaccaccgaggaggaggccctgaacctgctgttcctgggcgacaccaacagaatgatcgccgagacccccatgaaccaggccagcaccagaagccactgcatcttcaccatccacctgagcagcaaggagcccggcagcgccaccgtgagacacgccaagctgcacctggtggacctggccggcagcgagagagtggccaagaccggcgtgggcggccacctgctgaccgaggccaagtacatcaacctgagcctgcactacctggagcaggtgatcatcgccctgagcgagaagcacagaagccacatcccctacagaaacagcatgatgaccagcgtgctgagagacagcctgggcggcaactgcatgaccaccatgatcgccaccctgagcctggagaagagaaacctggacgagagcatcagcacctgcagattcgcccagagagtggccctgatcaagaacgaggccgtgctgaacgaggagatcaaccccagactggtgatcaagagactgcagaaggagatccaggagctgaaggacgagctggccatggtgaccggcgagcagagaaccgaggccctgaccgaggccgagctgctgcagctggagaagctgatcaccagcttcctggaggaccaggacagcgacagcagactggaggtgggcgccgacatgagaaaggtgcaccactgcttccaccacctgaagaagctgctgaacgacaagaagatcctggagaacaacaccgtgagcagcgagagcaaggaccaggactgccaggagcccctgaaggaggaggagtacagaaagctgagagacatcctgaagcagagagacaacgagatcaacatcctggtgaacatgctgaagaaggagaagaagaaggcccaggaggccctgcacctggccggcatggacagaagagagttcagacagagccagagcccccccttcagactgggcaaccccgaggagggccagagaatgagactgagcagcgcccccagccaggcccaggacttcagcatcctgggcaagagaagcagcctgctgcacaagaagatcggcatgagagaggagatgagcctgggctgccaggaggccttcgagatcttcaagagagaccacgccgacagcgtgaccatcgacgacaacaagcagatcctgaagcagagattcagcgaggccaaggccctgggcgagagcatcaacgaggccagaagcaagatcggccacctgaaggaggagatcacccagagacacatccagcaggtggccctgggcatcagcgagaacatggccgtgcccctgatgcccgaccagcaggaggagaagctgagaagccagctggaggaggagaagagaagatacaagaccatgttcaccagactgaaggccctgaaggtggagatcgagcacctgcagctgctgatggacaaggccaaggtgaagctgcagaaggagttcgaggtgtggtgggccgaggaggccaccaacctgcaggtgaacagccccgccgtgaacagcctggaccacaccaagcccttcctgcagaccagcgacagccagcacgagtggagccagctgctgagcaacaagagcgacgtgaacgccagaaagatcctgcccagcccctgccccagcccccacagccagaagcagagcagcaccagcacccccctggaggacagcatccccaagagacccgtgagcagcatccccctgaccggcgacagccagaccgacagcgacatcatcgccttcatcaaggccagacagagcatcctgcagaagcagtgcctgggcagcaactag

SEQ ID NO: 303665 - DNA, 2070 bp, Artificial Sequence
  derived and/or modified sequence
tgaggcgccgagagatacagcgacagaggcatcatccccagaaccctgagctacatcttcgagcagctgcagaaggacagcagcaagatctacaccacccacatcagctacctggagatctacaacgagtgcggctacgacctgctggaccccagacacgaggccagcagcctggaggacctgcccaaggtgaccatcctggaggaccccgaccagaacatccacctgaagaacctgaccctgcaccaggccaccaccgaggaggaggccctgaacctgctgttcctgggcgacaccaacagaatgatcgccgagacccccatgaaccaggccagcaccagaagccactgcatcttcaccatccacctgagcagcaaggagcccggcagcgccaccgtgagacacgccaagctgcacctggtggacctggccggcagcgagagagtggccaagaccggcgtgggcggccacctgctgaccgaggccaagtacatcaacctgagcctgcactacctggagcaggtgatcatcgccctgagcgagaagcacagaagccacatcccctacagaaacagcatgatgaccagcgtgctgagagacagcctgggcggcaactgcatgaccaccatgatcgccaccctgagcctggagaagagaaacctggacgagagcatcagcacctgcagattcgcccagagagtggccctgatcaagaacgaggccgtgctgaacgaggagatcaaccccagactggtgatcaagagactgcagaaggagatccaggagctgaaggacgagctggccatggtgaccggcgagcagagaaccgaggccctgaccgaggccgagctgctgcagctggagaagctgatcaccagcttcctggaggaccaggacagcgacagcagactggaggtgggcgccgacatgagaaaggtgcaccactgcttccaccacctgaagaagctgctgaacgacaagaagatcctggagaacaacaccgtgagcagcgagagcaaggaccaggactgccaggagcccctgaaggaggaggagtacagaaagctgagagacatcctgaagcagagagacaacgagatcaacatcctggtgaacatgctgaagaaggagaagaagaaggcccaggaggccctgcacctggccggcatggacagaagagagttcagacagagccagagcccccccttcagactgggcaaccccgaggagggccagagaatgagactgagcagcgcccccagccaggcccaggacttcagcatcctgggcaagagaagcagcctgctgcacaagaagatcggcatgagagaggagatgagcctgggctgccaggaggccttcgagatcttcaagagagaccacgccgacagcgtgaccatcgacgacaacaagcagatcctgaagcagagattcagcgaggccaaggccctgggcgagagcatcaacgaggccagaagcaagatcggccacctgaaggaggagatcacccagagacacatccagcaggtggccctgggcatcagcgagaacatggccgtgcccctgatgcccgaccagcaggaggagaagctgagaagccagctggaggaggagaagagaagatacaagaccatgttcaccagactgaaggccctgaaggtggagatcgagcacctgcagctgctgatggacaaggccaaggtgaagctgcagaaggagttcgaggtgtggtgggccgaggaggccaccaacctgcaggtgaacagccccgccgtgaacagcctggaccacaccaagcccttcctgcagaccagcgacagccagcacgagtggagccagctgctgagcaacaagagcgacgtgaacgccagaaagatcctgcccagcccctgccccagcccccacagccagaagcagagcagcaccagcacccccctggaggacagcatccccaagagacccgtgagcagcatccccctgaccggcgacagccagaccgacagcgacatcatcgccttcatcaaggccagacagagcatcctgcagaagcagtgcctgggcagcaactag

SEQ ID NO: 303666 - protein, 165 aa, Artificial Sequence
  derived and/or modified sequence
MIAETPMNQASTRSHCIFTIHLSSKEPGSATVRHAKLHLVDLAGSERVAKTGVGGHLLTEAKYINLSLHYLEQVIIALSEKHRSHIPYRNSMMTSVLRDSLGGNCMTTMIATLSLEKRNLDESISTCRFAQRVALIKNEAVLNEEINPRLKAPSSSDGVLFCRNQ

SEQ ID NO: 303667 - protein, 161 aa, Artificial Sequence
  derived and/or modified sequence
TPMNQASTRSHCIFTIHLSSKEPGSATVRHAKLHLVDLAGSERVAKTGVGGHLLTEAKYINLSLHYLEQVIIALSEKHRSHIPYRNSMMTSVLRDSLGGNCMTTMIATLSLEKRNLDESISTCRFAQRVALIKNEAVLNEEINPRLKAPSSSDGVLFCRNQ

SEQ ID NO: 303668 - protein, 293 aa, Artificial Sequence
  derived and/or modified sequence
MREEMSLGCQEAFEIFKRDHADSVTIDDNKQILKQRFSEAKALGESINEARSKIGHLKEEITQRHIQQVALGISENMAVPLMPDQQEEKLRSQLEEEKRRYKTMFTRLKALKVEIEHLQLLMDKAKVKLQKEFEVWWAEEATNLQVNSPAVNSLDHTKPFLQTSDSQHEWSQLLSNKSSGGWEVQDQGTGRFDVCDVNARKILPSPCPSPHSQKQSSTSTPLEDSIPKRPVSSIPLTGDSQTDSDIIAFIKARQSILQKQYLQLLCSLFPKSAVSSAQASTNRKGLSDVLVTR

SEQ ID NO: 303669 - DNA, 882 bp, Artificial Sequence
  derived and/or modified sequence
atgcgggaagagatgagcctggggtgtcaggaggcattcgaaatcttcaaaagggatcatgctgattcagttacgattgatgataacaaacagatactgaagcaaaggttttcagaagccaaagctcttggcgagtccatcaacgaagcccggagcaagataggtcatctcaaagaggagatcactcagcggcacattcaacaggtggccctgggcatctcagaaaacatggctgttccattaatgccagaccaacaggaagagaagctccggagtcagctggaagaagaaaaaaggaggtacaaaacaatgtttacaagactaaaggctctcaaggttgagatagagcacctgcaactattaatggacaaagctaaagtgaagctgcagaaagaatttgaggtgtggtgggccgaggaagccacaaacctgcaggtaaacagcccggccgtcaacagtctggaccacaccaagcctttccttcagacttcagactcccaacacgaatggagccagctgctgagtaacaagtcttcgggcggttgggaggtacaagaccaggggacaggcagatttgacgtgtgcgacgtgaacgctcggaagatccttccgtctccctgcccgagtccccacagtcagaagcagagttccacgtctactcccttggaagactctattccaaagcgtccggtgagttctattcctctcaccggggacagtcagacagattcagacatcatcgcctttattaaggcacgacaatccatcctccaaaaacagtatctgcagctcctctgcagcctttttcccaaatctgcagtgtcctctgctcaggcctccacaaaccggaaaggcctttctgacgtgctcgtcacacggtag

SEQ ID NO: 303670 - DNA, 1755 bp, Artificial Sequence
  derived and/or modified sequence
ctcagcaggttgtcagccagctggaagagcctggggccacctgtctggtcagagtctctctgctgtgggcctcttggagccagggctggttttgtggtctgactgaagtgacaatgaaattaataggatcctgatgctgtgactgaggccatttccctgtgtctccaaacaggaatgagagaggaaatgtcattaggatgccaggaggcttttgaaatcttcaagagggaccacgctgacagcgttaccatcgatgacaacaaacagattctgaaacagagattttctgaagccaaggccctgggagaaagtataaatgaagcaagaagtaaaattggtcacctgaaggaagaaatcacccagcggcatatacagcaagtagccctaggaatctcggaaaacatggccgtgcctctgatgccagaccagcaggaggagaagctgcgatcacaactggaggaagaaaagagaaggtataaaacaatgttcactcgcctgaaagccctgaaggtggagatcgagcacttgcagctgctcatggacaaagccaaggtgaagctacagaaagagtttgaagtctggtgggcagaggaggccaccaacctgcaggtaaattctccagcagtgaattcactcgatcacacgaagccatttctccagacatctgactcccagcatgaatggtcccaactcctctctaacaaaagttctggaggctgggaagtccaagatcaaggcactggcagattcgatgtctgtgatgtgaatgccaggaaaatcctgccctcgccttgccccagtccacacagccagaaacagagcagcaccagcaccccactggaagacagcatccccaagaggccagtgtcgtccatccctctcaccggagacagccagacggactcggacatcatcgccttcatcaaggccagacagagcattctgcagaagcaatatcttcagctcctttgttctctgttcccaaagtcagctgtctcctctgctcaggcttctacaaacaggaaggggctgagtgatgttttggtaactcgttgaacccctggcttaaagtctcactcccctatcagagtgtggttcttgccaaagagctgtgagtgtaaacactgcttgaaggcccaggcccgaggacaccataacaatcacagaggaagtaagagtggcgtgtcagacaacaggaagagaagaaggctcttcttggtctgcatcactgccccctccacccccagccccgtcctcttggcagctgcccatctcccatctgctgtggctgggccttttctctttctgccttccatccccaacacacccacagggcaagccccagggccccttaccccaggcctgcattttgtcttagcctcctccccataacccaaaggctactaggcaggcttaacattgccttcacattgccagaaaggcgcccccaccgtgatggtatgggctggcagattcgatgtataatgactgatgcctgccctgtggcgcctgcactcagcttctccaccagccgtgtgcagtttgggcaggaagaggtttgtgcatggatggagcgccgcaactgagagccggccttggtcctgtactcgccttgcttggccgccagcctgcttatttactatcctctcttcaccaccaggaccagcagcctcagcaacactgtcaggtcctttcttaagcctgagacagccccacctctgctgtgatcttgtctcattctcagtttccttgtct

SEQ ID NO: 303671 - DNA, 882 bp, Artificial Sequence
  derived and/or modified sequence
atgagggaggagatgagcctgggctgccaggaggcctttgagatcttcaagagggaccatgctgacagcgtgaccattgatgacaacaagcagatcctgaagcagcgcttcagcgaggccaaggccctgggggagagcatcaatgaggcccggagcaagattggccacctgaaggaggagatcacccagaggcacatccagcaggtggccctgggcatcagcgagaacatggctgtgcccctgatgccagaccagcaggaggagaagctgcggagccagctggaggaggagaagaggcgctacaagaccatgttcacccggctgaaggccctgaaggtggagattgagcacctgcagctgctgatggacaaggccaaggtgaagctgcagaaggagtttgaggtgtggtgggccgaggaggccaccaacctgcaggtgaacagccctgctgtgaacagcctggaccacaccaagcccttcctgcagaccagtgacagccagcacgagtggagccagctgctgagcaacaagagcagcggcggctgggaggtgcaggaccagggcaccggccgctttgatgtgtgtgatgtgaatgccaggaagatcctgcccagcccctgccccagcccccacagccagaagcagagcagcaccagcacccccctggaggacagcatccccaagaggcctgtgagcagcatccccctgactggagacagccagacagacagcgacatcatcgccttcatcaaggcccggcagagcatcctgcagaagcagtacctgcagctgctgtgcagcctcttccccaagtctgctgtgagcagcgcccaggccagcaccaacaggaagggcctgagtgatgtgctggtgaccaggtag

SEQ ID NO: 303672 - DNA, 882 bp, Artificial Sequence
  derived and/or modified sequence
atgcgggaggagatgagcctgggctgccaggaggccttcgagatctttaagagggaccatgctgacagcgttaccatagatgataataagcagatcctcaaacaaagattctcagaggccaaggccctcggggaaagcatcaatgaagcacgcagcaagatcggccacctcaaggaagaaataacacagagacacattcagcaggtggccttgggcatctctgaaaatatggccgtccctctgatgcccgaccagcaagaagagaagctgcgctctcagctggaggaagaaaagcgtaggtataaaaccatgttcactaggttgaaagctcttaaagtggaaatcgagcaccttcagctgctgatggacaaggctaaggttaagctgcaaaaagagtttgaagtctggtgggcagaagaggctacaaacttacaagtgaactctccagcagttaactccttagaccacacaaaacccttcctccagacttcagatagccagcacgagtggtcgcagcttctgagtaataagtcaagtggaggctgggaggtgcaggatcagggtacgggtaggttcgacgtttgcgacgtgaatgcaaggaagatcttaccaagcccttgccctagccctcattcccagaagcagagttcaacgagcaccccgctggaagactcaatcccaaaaaggccggttagttctatccccctcactggggattctcaaaccgatagtgacattatcgcatttatcaaggccagacagtctatcttgcagaagcaatacctccagctcctttgctctttatttccgaagagcgctgtatcatcagcccaggcgtccactaacagaaagggcttatcggacgtactcgtgacacggtag

SEQ ID NO: 303673 - DNA, 882 bp, Artificial Sequence
  derived and/or modified sequence
atgcgagaggaaatgagcttgggctgccaagaagcctttgagatattcaagagggatcacgcagattctgtgaccatcgacgataacaagcaaatcctaaagcagcgttttagcgaggcaaaagcactgggggaatctataaatgaagcaaggtccaaaatcggtcatctgaaggaagagattacacaacggcatattcagcaggttgcactgggcatatccgaaaatatggcggtgcccttgatgcccgatcagcaggaggagaagcttaggagtcagttagaggaggagaaacggcgttacaaaaccatgttcactcggctcaaagctctcaaggtggagatcgaacaccttcagctgctcatggacaaggccaaagtgaagctgcagaaggagttcgaagtatggtgggcagaggaggctacaaatctccaagtcaattctcccgcagtgaatagcctggaccacaccaagccattcctgcagacttccgatagccagcacgaatggtcccagctgctaagtaataaatccagtggcggatgggaagtacaggatcaggggacggggcgtttcgatgtatgtgacgttaatgccaggaagatccttccaagcccttgtccatctccacatagtcagaaacagtcctccacctctacccctttagaggattcgatccctaaaaggcctgtatcctctatcccacttaccggggattcccagactgactcggacatcatcgcattcattaaagccaggcaatcaatcctccagaaacagtacttgcaacttttatgcagtctgttcccaaagtccgcggtgtccagcgcacaggcctcaaccaatagaaagggcttgtcagacgtattagtgacacgttag

SEQ ID NO: 303674 - DNA, 882 bp, Artificial Sequence
  derived and/or modified sequence
atgagagaggagatgagcctgggctgccaggaggccttcgagatcttcaagagagaccacgccgacagcgtgaccatcgacgacaacaagcagatcctgaagcagagattcagcgaggccaaggccctgggcgagagcatcaacgaggccagaagcaagatcggccacctgaaggaggagatcacccagagacacatccagcaggtggccctgggcatcagcgagaacatggccgtgcccctgatgcccgaccagcaggaggagaagctgagaagccagctggaggaggagaagagaagatacaagaccatgttcaccagactgaaggccctgaaggtggagatcgagcacctgcagctgctgatggacaaggccaaggtgaagctgcagaaggagttcgaggtgtggtgggccgaggaggccaccaacctgcaggtgaacagccccgccgtgaacagcctggaccacaccaagcccttcctgcagaccagcgacagccagcacgagtggagccagctgctgagcaacaagagcagcggcggctgggaggtgcaggaccagggcaccggcagattcgacgtgtgcgacgtgaacgccagaaagatcctgcccagcccctgccccagcccccacagccagaagcagagcagcaccagcacccccctggaggacagcatccccaagagacccgtgagcagcatccccctgaccggcgacagccagaccgacagcgacatcatcgccttcatcaaggccagacagagcatcctgcagaagcagtacctgcagctgctgtgcagcctgttccccaagagcgccgtgagcagcgcccaggccagcaccaacagaaagggcctgagcgacgtgctggtgaccagatag

SEQ ID NO: 303675 - DNA, 498 bp, Artificial Sequence
  derived and/or modified sequence
atgatcgcagaaactcccatgaatcaggcaagcacgcgctcgcactgtatttttactatccatctctctagtaaggagccggggtccgcaacagtaagacacgcaaaactccacctggtcgatctggccggttctgaaagagtcgccaagaccggagtcggcgggcacttactgacggaagccaagtacataaacctcagcctgcactacctggagcaggttattatcgctctttccgaaaagcatcgtagtcacattccatacaggaattccatgatgaccagtgtgctaagagattccttgggagggaactgcatgaccacaatgatcgcaaccctgtcattggagaaacggaacctagacgaaagtattagtacatgtcggtttgcacagcgggtagcgctgatcaagaatgaagcggtgttaaacgaagagatcaacccacgcctgaaagctccatcgagctctgatggcgtgttgttttgccggaaccagtag

SEQ ID NO: 303676 - DNA, 486 bp, Artificial Sequence
  derived and/or modified sequence
acaccaatgaatcaagcttcaactcggtcgcattgcattttcaccattcaccttagtagtaaagaacccggctcagctacagtgagacatgctaagctgcatttagttgatttggccggtagcgaacgggttgcgaagactggcgtgggaggacacctcctcacggaggctaagtacataaatctcagtcttcattatctcgagcaggtgattatcgccctgtctgagaaacatcggtcccatatcccatacaggaacagcatgatgacatcagtcctgcgagacagtctgggcggcaactgtatgaccaccatgatcgctactctcagtctcgagaaacggaatctggatgagagtatttcaacctgtcggtttgcccagcgcgtcgcgctcatcaaaaatgaagcagtgctaaatgaagagatcaacccccggctgaaagcaccttcctcctctgacggcgtgcttttctgcagaaatcagtag

SEQ ID NO: 303677 - DNA, 1220 bp, Artificial Sequence
  derived and/or modified sequence
gttgctaagactgtgggtcgccggaggtggtgggagttagttttggcagcccgggcctgagagaggtcaagggtcattgcagagccagggaggagatggtgaagcagactatccagatattcgcgagggtgaagccccctgtccggaagcaccaacaagggatttattccatagatgaagatgaaaaattaatacctagcttggaaatcatcttaccacgtgatttggcagatgggtttgtgaataataagcgagaaagctacaaatttaaatttcaaagaatttttgatcaggatgcaaaccaagagaccgtttttgaaaacattgccaaaccagttgctgggagtgtcctggcaggttacaatggtaccatctttgcatatgggcaaacaggcagcgggaagacattcactatcacagggggtgcagagcgttacagtgacagaggcattatcccaaggacactgtcatacatttttgaacagttacaaaaggacagcagcaaaatatatacaacacacatttcctatttggaaatctacaatgaatgtggttatgatcttttggatccaagacatgaagcctccagtttggaagatttgccgaaagtgacaatactggaggatcctgatcagaacattcacctgaaaaacttgactctccatcaggcaaccacagaggaagaagctctgaatttgctttttttaggagacaccaaccgaatgattgcagagactcctatgaaccaagcttcaacccgttcccactgcattttcaccattcatttgtcaagcaaggaaccaggatctgcaactgtacgacatgccaaactccatctggttgacctggctggttcagagcgagttgcaaagactggagtagggggccatcttctaacagaggccaagtatatcaacttgtcactacattacttagaacaggttatcattgccctttcagaaaagcaccgttcgcacattccttatagaaactccatgatgaccagtgtcctaagagacagtttgggagggaactgcatgacaactatgattgcaacactctccttggagaaaaggaatcttgatgagtctatatcaacctgcagatttgcacagcgagtggcactcataaagaatgaagctgttcttaatgaagaaattaaccccagattaaaagcaccaagctcctctgatggagttctcttctgcagaaaccaatga

SEQ ID NO: 303678 - DNA, 743 bp, Artificial Sequence
  derived and/or modified sequence
actcctatgaaccaagcttcaacccgttcccactgcattttcaccattcatttgtcaagcaaggaaccaggatctgcaactgtacgacatgccaaactccatctggttgacctggctggttcagagcgagttgcaaagactggagtagggggccatcttctaacagaggccaagtatatcaacttgtcactacattacttagaacaggttatcattgccctttcagaaaagcaccgttcgcacattccttatagaaactccatgatgaccagtgtcctaagagacagtttgggagggaactgcatgacaactatgattgcaacactctccttggagaaaaggaatcttgatgagtctatatcaacctgcagatttgcacagcgagtggcactcataaagaatgaagctgttcttaatgaagaaattaaccccagattaaaagcaccaagctcctctgatggagttctcttctgcagaaaccaatgagtgaggcaggatctgtttcagcaaaggccctggtcaggtatcagcatcacacagtgttcctgctggagagaggagacagcatgcaaagtcaagattcaggtggaactgaactgctagggtggattttgttgctgtccctacccttccagaagccctatagcattacagtgctgaatgagaaagagagttaacaaagttattagccccaagacaaaaactagttcagaatttaaggaaaataaacatattagacattg

SEQ ID NO: 303679 - DNA, 498 bp, Artificial Sequence
  derived and/or modified sequence
atgattgctgagacccccatgaaccaggccagcaccaggagccactgcatcttcaccatccacctgagcagcaaggagcccggcagcgccaccgtgagacatgccaagctgcacctggtggacctggccggcagcgagcgggtggccaagacaggagtgggcggccacctgctgacagaggccaagtacatcaacctgagcctgcactacctggagcaggtgatcatcgccctgtctgagaagcacaggagccacatcccctacagaaattccatgatgacctctgtgctgcgggacagcctgggcggcaactgcatgaccaccatgattgccaccctgagcctggagaagaggaacctggatgagagcatcagcacctgccgctttgcccagagggtggccctgatcaagaatgaggccgtgctgaatgaggagatcaacccccggctgaaggcccccagcagcagtgatggagtgctcttctgcaggaaccagtag

SEQ ID NO: 303680 - DNA, 486 bp, Artificial Sequence
  derived and/or modified sequence
acccccatgaaccaggccagcaccaggagccactgcatcttcaccatccacctgagcagcaaggagcccggcagcgccaccgtgagacatgccaagctgcacctggtggacctggccggcagcgagcgggtggccaagacaggagtgggcggccacctgctgacagaggccaagtacatcaacctgagcctgcactacctggagcaggtgatcatcgccctgtctgagaagcacaggagccacatcccctacagaaattccatgatgacctctgtgctgcgggacagcctgggcggcaactgcatgaccaccatgattgccaccctgagcctggagaagaggaacctggatgagagcatcagcacctgccgctttgcccagagggtggccctgatcaagaatgaggccgtgctgaatgaggagatcaacccccggctgaaggcccccagcagcagtgatggagtgctcttctgcaggaaccagtag

SEQ ID NO: 303681 - DNA, 498 bp, Artificial Sequence
  derived and/or modified sequence
atgatcgccgagacccccatgaaccaggccagcacccggagccactgtattttcaccattcatttaagctcaaaggaaccaggaagtgcaaccgtaaggcacgccaagttacacctagtggatctagccggctcagaaagagttgccaaaaccggagtgggagggcatctgctgaccgaagcaaagtatatcaacctgtccttacattacctcgagcaggtcattattgcactgtctgagaagcaccgttcacacatcccttaccgtaatagtatgatgacatccgttcttcgtgattccctcggcggtaactgtatgactactatgattgctacattatccctggagaagcggaatctggacgagtccatctccacctgcagattcgcacagagggtcgctctgattaagaacgaggcagtactcaacgaggaaataaacccgcgactgaaggccccctcctcttccgatggtgtacttttttgtcggaaccaatag

SEQ ID NO: 303682 - DNA, 486 bp, Artificial Sequence
  derived and/or modified sequence
acccccatgaaccaggccagcacccggagccactgcatcttcaccatccatttatctagcaaggagcccggcagcgccacggtccgacacgccaagctgcaccttgttgatctagcgggctccgagagagtcgccaaaacgggggtgggaggacatctgcttaccgaggccaaatatataaatctcagtctccactacttagaacaggtgattatagccctgagcgaaaagcatcgaagccacattccgtacaggaatagcatgatgacctctgttctccgcgatagtctgggtggaaattgcatgaccaccatgattgcgacactttcactggagaagcggaatttagatgagtctatctcaacctgcagatttgcccagcgcgtggcactgatcaagaacgaagcagtcctaaacgaagaaattaacccacgcttaaaggcccccagctcctcagacggcgtcctgttttgccgaaatcaatag

SEQ ID NO: 303683 - DNA, 498 bp, Artificial Sequence
  derived and/or modified sequence
atgattgcagaaacccccatgaaccaggcaagcacgcggtcccactgcatattcacaattcatctatcctccaaggagcccggatcagcaaccgtgcgccacgctaagttgcatctagttgatctcgccggatccgagagagtagccaaaaccggagtgggcggacaccttctcaccgaagcaaaatacatcaacctgtcactacactatctggagcaagtgatcatcgcgctgagcgaaaaacaccggagtcacattccatacagaaacagcatgatgaccagcgtcctgagggacagcctgggagggaattgcatgactaccatgattgccaccctgagcctcgagaagaggaacctggacgagtcaatctctacatgtcggttcgcccagagggttgctttgataaaaaacgaagccgtattgaacgaggaaatcaatccacgccttaaagctccgagtagttctgatggtgtactcttttgtcggaaccagtag

SEQ ID NO: 303684 - DNA, 486 bp, Artificial Sequence
  derived and/or modified sequence
acccctatgaaccaggcctccacccgcagccactgtatattcactatacacttgtcatcaaaggagcctggctccgcaaccgtgcgacatgcgaagctacatctggtcgacctagcgggaagcgagcgagttgctaaaaccggcgtgggcggtcacctcctgaccgaagcgaagtacatcaatctctccttacactatctagagcaggtgatcatcgccctctccgagaagcacagatcccatataccttatcgcaacagcatgatgacgtccgtgcttagggatagtcttgggggaaattgtatgacgaccatgattgcgactcttagcctggagaagaggaatctggacgaaagcatcagcacttgtaggttcgcacagcgcgtcgccctcatcaagaacgaggcagttctcaacgaggagatcaatccccgactcaaagccccttcttcttctgacggggtgttgttttgccgcaatcagtag

SEQ ID NO: 303685 - DNA, 498 bp, Artificial Sequence
  derived and/or modified sequence
atgatcgccgagacccccatgaaccaggccagcaccagaagccactgcatcttcaccatccacctgagcagcaaggagcccggcagcgccaccgtgagacacgccaagctgcacctggtggacctggccggcagcgagagagtggccaagaccggcgtgggcggccacctgctgaccgaggccaagtacatcaacctgagcctgcactacctggagcaggtgatcatcgccctgagcgagaagcacagaagccacatcccctacagaaacagcatgatgaccagcgtgctgagagacagcctgggcggcaactgcatgaccaccatgatcgccaccctgagcctggagaagagaaacctggacgagagcatcagcacctgcagattcgcccagagagtggccctgatcaagaacgaggccgtgctgaacgaggagatcaaccccagactgaaggcccccagcagcagcgacggcgtgctgttctgcagaaaccagtag

SEQ ID NO: 303686 - DNA, 486 bp, Artificial Sequence
  derived and/or modified sequence
acccccatgaaccaggccagcaccagaagccactgcatcttcaccatccacctgagcagcaaggagcccggcagcgccaccgtgagacacgccaagctgcacctggtggacctggccggcagcgagagagtggccaagaccggcgtgggcggccacctgctgaccgaggccaagtacatcaacctgagcctgcactacctggagcaggtgatcatcgccctgagcgagaagcacagaagccacatcccctacagaaacagcatgatgaccagcgtgctgagagacagcctgggcggcaactgcatgaccaccatgatcgccaccctgagcctggagaagagaaacctggacgagagcatcagcacctgcagattcgcccagagagtggccctgatcaagaacgaggccgtgctgaacgaggagatcaaccccagactgaaggcccccagcagcagcgacggcgtgctgttctgcagaaaccagtag

SEQ ID NO: 303687 - DNA, 90 bp, Artificial Sequence
  derived and/or modified sequence
aacatacacaaatcaataaacgtaatccagcttataaacagaaccaaagacaaaaaccacatgattatctcaatagatgcggaaaaggcc

SEQ ID NO: 303688 - DNA, 852 bp, Artificial Sequence
  derived and/or modified sequence
atgaaagtaagagagctcatggatgcggagttcccacatagcttcttggtgtccggcaaacagcgaactcttgagctgcaagctcggtcccaggaggaaatgataagttggatgcaggctttccaagcggccatcgatcagatcgaaaagcggaatgagacgttcaaagcagccgcccaaggcccggaaggagatatacaagagcaggagttacagagcgaggaactagggttacgcgccccccagtgggttcgggacaaaatggtgactatgtgcatgcggtgtcaggagccattcaatgcccttactcggagacgccatcactgtagggcgtgcggttacgttgtgtgcgcccggtgttcggattaccgcgcagagctgaagtatgacgacaatcgacccaacagagtgtgcttacactgttatgctttcttaaccggcaatgtgctccctgaggcaaaggaggacaagcgccgcggtatccttgagaagggctcgtccgcaacacctgaccagagccttatgtgttctttcctccaattgatcggtgacaaatggggtaaatctgggccacgcggctggtgcgtgattccccgagatgatccactggtgttatatgtgtatgcggctccccaggatatgcgagcccatacatccatcccccttttggggtatcaggtaactgtgggcccgcagggagacccccgtgtctttcagctacagcagagtggccagctatatacatttaaagcagagacagaggaactcaaggggcggtgggtcaaggccatggagcgtgccgcctcaggttggtcgccttcctggccaaacgatggagaccttagcgattag

SEQ ID NO: 303689 - DNA, 852 bp, Artificial Sequence
  derived and/or modified sequence
atgaaggtgcgggagctgatggatgctgagttcccccacagcttcctggtgtctgggaagcagaggaccctggagctgcaggcccggagccaggaggagatgatctcctggatgcaggccttccaggccgccatcgaccagatcgagaagagaaatgagaccttcaaggccgccgcccagggccctgagggggacatccaggagcaggagctgcagagcgaggagctgggcctgcgggccccccagtgggtgcgggacaagatggtgaccatgtgcatgcgctgccaggagcccttcaatgccctgaccaggagaagacaccactgccgggcctgtggctacgtggtgtgtgcccgctgcagcgactacagagctgagctgaagtatgatgacaaccggcccaacagagtgtgcctgcactgctacgccttcctgactggaaatgtgctgcctgaggccaaggaggacaagaggcggggcatcctggagaagggcagcagcgccaccccagaccagagcctgatgtgcagcttcctgcagctgattggagacaagtggggcaagagcggcccccggggctggtgtgtgatccccagagatgaccccctggtgctgtatgtgtatgctgccccccaggacatgagggcccacaccagcatccccctgctgggctaccaggtgacagtgggcccccagggcgaccccagggtcttccagctgcagcagagcggccagctgtacaccttcaaggccgagacagaggagctgaagggccgctgggtgaaggccatggagagagctgccagcggctggagccccagctggcccaatgatggagacctgagtgactag

SEQ ID NO: 303690 - DNA, 852 bp, Artificial Sequence
  derived and/or modified sequence
atgaaggtgcgggagctgatggacgccgagttcccccacagcttcttggtatcgggtaaacagcgcaccctggagttgcaggctcgctctcaagaagaaatgatttcttggatgcaggcctttcaagcggccatagaccagattgagaaacgcaacgagaccttcaaagcagcagcccaagggcccgaaggagacatacaggagcaggagctgcagtccgaagaactgggccttcgagcaccccagtgggtaagggataaaatggtcaccatgtgcatgagatgtcaagagcccttcaacgctcttacgagacggcgccaccactgcagagcttgtggctacgtcgtgtgtgcacgctgttcggactatcgggccgaattgaagtacgatgataatcggcccaatcgtgtgtgcttacattgctatgccttcctcactggcaacgtgctgcccgaggctaaggaggacaaaaggcgcggcattctggagaaggggagctccgccacccctgaccagtctctgatgtgctccttcttacagctgataggagataagtggggtaagtcaggcccacgtggatggtgtgtgattccaagggatgatcccctagtgctgtatgtgtacgccgctccccaggacatgcgagctcatacctcaatccccctcctgggatatcaggttacagtcggccctcagggcgacccacgcgtcttccagctgcagcagtccggacagctgtacacttttaaagccgaaacagaagaactgaagggcaggtgggtaaaagccatggagagggccgctagtggatggtccccgtcctggccaaacgatggagacctgtccgactag

SEQ ID NO: 303691 - DNA, 852 bp, Artificial Sequence
  derived and/or modified sequence
atgaaagtccgagaactcatggatgctgaatttccccatagttttcttgtgagcgggaaacagaggactttagaattacaggcaaggagtcaggaggaaatgataagctggatgcaagccttccaagcagcaattgaccaaattgagaagcggaatgaaactttcaaagctgccgctcagggtcccgaaggggatatccaggagcaggaactccagtctgaggagcttggtttgcgcgcacctcaatgggtccgggataaaatggttactatgtgtatgcgctgccaggaaccctttaacgcgctgacaagacgtagacatcactgtagagcgtgtgggtacgtggtgtgcgcgcgttgttcggattaccgcgcagagctcaagtatgacgataatcggcctaaccgggtttgtctgcattgttatgccttcctcaccgggaacgtgctccctgaggcaaaagaagataaacggaggggaatcctggagaagggctctagtgccacccccgatcagagtttgatgtgcagcttcctgcagttaatcggcgataaatgggggaagagcggcccacgtggatggtgcgtcatacctagagacgaccccctggtgctctacgtgtatgccgcaccacaggacatgcgggctcacacttcaatccccttgttaggataccaggtgacagttggccctcaaggcgacccgagagtctttcagcttcaacagagtggccagctgtacacgttcaaagctgagacggaggagctgaaaggcaggtgggtaaaagccatggagcgcgctgcctctgggtggagtccatcatggccaaacgatggagatctttcagattag

SEQ ID NO: 303692 - DNA, 852 bp, Artificial Sequence
  derived and/or modified sequence
atgaaggtgagagagctgatggacgccgagttcccccacagcttcctggtgagcggcaagcagagaaccctggagctgcaggccagaagccaggaggagatgatcagctggatgcaggccttccaggccgccatcgaccagatcgagaagagaaacgagaccttcaaggccgccgcccagggccccgagggcgacatccaggagcaggagctgcagagcgaggagctgggcctgagagccccccagtgggtgagagacaagatggtgaccatgtgcatgagatgccaggagcccttcaacgccctgaccagaagaagacaccactgcagagcctgcggctacgtggtgtgcgccagatgcagcgactacagagccgagctgaagtacgacgacaacagacccaacagagtgtgcctgcactgctacgccttcctgaccggcaacgtgctgcccgaggccaaggaggacaagagaagaggcatcctggagaagggcagcagcgccacccccgaccagagcctgatgtgcagcttcctgcagctgatcggcgacaagtggggcaagagcggccccagaggctggtgcgtgatccccagagacgaccccctggtgctgtacgtgtacgccgccccccaggacatgagagcccacaccagcatccccctgctgggctaccaggtgaccgtgggcccccagggcgaccccagagtgttccagctgcagcagagcggccagctgtacaccttcaaggccgagaccgaggagctgaagggcagatgggtgaaggccatggagagagccgccagcggctggagccccagctggcccaacgacggcgacctgagcgactag

SEQ ID NO: 303693 - protein, 459 aa, Artificial Sequence
  derived and/or modified sequence
MASGVEVLRFQLPGHEAATLRNMNQLRAEERFCDVTIVADSLKFRGHKVILAACSPFLRDQFLLNPSSELQVSLMHSARIVADLLLSCYTGALEFAVRDIVNYLTAASYLQMEHVVEKCRNALSQFIEPKIGLKEDGVSEASLVSSISATKSLLPPARTPKPAPKPPPPPPLPPPLLRPVKLEFPLDEDLELKAEEEDEDEDEDVSDICIVKVESALEVAHRLKPPGGLGGGLGIGGSVGGHLGELAQSSVPPSTVAPPQGVVKACYSLSEDAEGEGLLLIPGGRASVGATSGLVEAAAVAMAARGAGGSLGAGGSRGPLPGGFSGGNPLKNIKCTKCPEVFQGVEKLVFHMRAQHFIFMCPRCGKQFNHSSNLNRHMNVHRGVKSHSCGICGKCFTQKSTLHDHLNLHSGARPYRCSYCDVRFAHKPAIRRHLKEQHGKTTAENVLEASVAEINVLIR

SEQ ID NO: 303694 - DNA, 1877 bp, Artificial Sequence
  derived and/or modified sequence
cgcccacgcggagccggccccgcgcgcgcgcgcgtgtcccgtgcatccccgcgcctgcgcgctgcccaggccctgcccgtgtgtgggggtcgctgccggccccgggggggggtggggaaaataagggattaaaaaaacagcgcgcggaaccgggccagggttgcccacccccgccacaatggcctctggggtggaagtcctgcgcttccagctgcccggccacgaggccgcaacgctacggaacatgaaccagctccgggcagaggagcggttctgcgacgtgaccattgtggccgacagcctcaagtttcgaggccacaaggtcatcttggccgcctgctcacccttcctgcgggaccagttcctgctgaaccccagctcggagctgcaggtctccctgatgcacagtgcacgcatcgtggccgacttgctcctctcctgctacacgggcgccttggaattcgctgttagggacatcgtcaactaccttacagccgcctcctacctgcagatggagcacgtggtggagaaatgccggaatgccctcagccagttcattgagcccaaaataggcctcaaagaggatggggtcagtgaggctagccttgtgagcagcatcagcgccaccaagtccctcctccctccagccaggaccccaaagccagccccgaagcccccacccccacctcctctaccccctccactcctgcggccagtgaagctggagttcccactggatgaagacttggagctgaaagccgaggaagaggatgaggatgaggatgaggacgtgtctgacatctgcatcgtcaaggtggagtcggccctggaggtggcacaccggctcaaaccccctggaggcctgggagggggtctgggcattggaggctccgtgggtggccaccttggggagctggcccagagcagcgttccccccagcactgtagccccaccgcagggtgtggtgaaggcctgctatagcctgtcggaagatgcagaaggggagggcctgctgttgattcccggaggccgggccagcgtgggggccacctcgggcctggtggaagcagcagcggtggccatggctgcccggggggcggggggcagcctgggggcggggggcagccggggacccctgcctgggggcttctcaggtggaaaccccttaaagaacatcaagtgcacgaagtgcccggaagtgttccagggcgtggagaagctggtcttccacatgcgggcgcagcacttcatcttcatgtgccctcgctgtggcaagcagttcaaccacagcagcaacctcaaccgccacatgaacgtgcatcgtggtgtcaagtcacactcgtgcggcatctgcggcaagtgcttcacacagaagtccacccttcacgaccacctcaacctgcactcgggagcgcggccctaccgctgctcctactgcgacgtgcgcttcgcccacaagcctgccattaggcggcacctcaaggagcaacacggcaagaccacggccgagaacgtgctggaggccagtgtggccgagattaacgtcctcatccgctagccgcgcaggcgtggaggccaggaggctggggcccctgggctgcgtggaaaaagggctctttggcccaggagaattggggggtggggggtctggggcagaaaggtaagagtgggaggctgagcagatgcacacatcctgagagagggaagatgattccttggagagacttgctcttgagagtgcaagaatctggagctgggaaaagggttcttggaggccaggggaatacggggtcccagagaaagatttccttctcttagaagtgcatgtatatgtggagggagggaaaagggtcctatagaatgagggaagacaaaaa

SEQ ID NO: 303695 - DNA, 1875 bp, Artificial Sequence
  derived and/or modified sequence
cgcccacgcggagccggccccgcgcgcgcgcgcgtcccgtgcatccccgcgcctgcgcgctgcccaggccctgcccgtgtgtgggggtcgctgccggccccgggggggggtggggaaaataagggattaaaaaaacagcgcgcggaaccgggccagggttgcccacccccgccacaatggcctctggggtggaagtcctgcgcttccagctgcccggccacgaggccgcaacgctacggaacatgaaccagctccgggcagaggagcggttctgcgacgtgaccattgtggccgacagcctcaagtttcgaggccacaaggtcatcttggccgcctgctcacccttcctgcgggaccagttcctgctgaaccccagctcggagctgcaggtctccctgatgcacagtgcacgcatcgtggccgacttgctcctctcctgctacacgggcgccttggaattcgctgttagggacatcgtcaactaccttacagccgcctcctacctgcagatggagcacgtggtggagaaatgccggaatgccctcagccagttcattgagcccaaaataggcctcaaagaggatggggtcagtgaggctagccttgtgagcagcatcagcgccaccaagtccctcctccctccagccaggaccccaaagccagccccgaagcccccacccccacctcctctaccccctccactcctgcggccagtgaagctggagttcccactggatgaagacttggagctgaaagccgaggaagaggatgaggatgaggatgaggacgtgtctgacatctgcatcgtcaaggtggagtcggccctggaggtggcacaccggctcaaaccccctggaggcctgggagggggtctgggcattggaggctccgtgggtggccaccttggggagctggcccagagcagcgttccccccagcactgtagccccaccgcagggtgtggtgaaggcctgctatagcctgtcggaagatgcagaaggggagggcctgctgttgattcccggaggccgggccagcgtgggggccacctcgggcctggtggaagcagcagcggtggccatggctgcccggggggcggggggcagcctgggggcggggggcagccggggacccctgcctgggggcttctcaggtggaaaccccttaaagaacatcaagtgcaccaagtgcccggaagtgttccagggcgtggagaagctggtcttccacatgcgggcgcagcacttcatcttcatgtgccctcgctgtggcaagcagttcaaccacagcagcaacctcaaccgccacatgaacgtgcatcgtggtgtcaagtcacactcgtgcggcatctgcggcaagtgcttcacacagaagtccacccttcacgaccacctcaacctgcactcgggagcgcggccctaccgctgctcctactgcgacgtgcgcttcgcccacaagcctgccattaggcggcacctcaaggagcaacacggcaagaccacggccgagaacgtgctggaggccagtgtggccgagattaacgtcctcatccgctagccgcgcaggcgtggaggccaggaggctggggcccctgggctgcgtggaaaaagggctctttggcccaggagaattggggggtggggggtctggggcagaaaggtaagagtgggaggctgagcagatgcacacatcctgagagagggaagatgattccttggagagacttgctcttgagagtgcaagaatctggagctgggaaaagggttcttggaggccaggggaatacggggtcccagagaaagatttccttctcttagaagtgcatgtatatgtggagggagggaaaagggtcctatagaatgagggaagacaaaaa

SEQ ID NO: 303696 - DNA, 1875 bp, Artificial Sequence
  derived and/or modified sequence
cgcccacgcggagccggccccgcgcgcgcgcgcgtcccgtgcatccccgcgcctgcgcgctgcccaggccctgcccgtgtgtgggggtcgctgccgaccccgggggggggtggggaaaataagggattaaaaaaacagcgcgcggaaccgggccagggttgcccacccccgccacaatggcctctggggtggaagtcctgcgcttccagctgcccggccacgaggccgcaacgctacggaacatgaaccagctccgggcagaggagcggttctgcgacgtgaccattgtggccgacagcctcaagtttcgaggccacaaggtcatcttggccgcctgctcacccttcctgcgggaccagttcctgctgaaccccagctcggagctgcaggtctccctgatgcacagtgcacgcatcgtggccgacttgctcctctcctgctacacgggcgccttggaattcgctgttagggacatcgtcaactaccttacagccgcctcctacctgcagatggagcacgtggtggagaaatgccggaatgccctcagccagttcattgagcccaaaataggcctcaaagaggatggggtcagtgaggctagccttgtgagcagcatcagcgccaccaagtccctcctccctccagccaggaccccaaagccagccccgaagcccccacccccacctcctctaccccctccactcctgcggccagtgaagctggagttcccactggatgaagacttggagctgaaagccgaggaagaggatgaggatgaggatgaggacgtgtctgacatctgcatcgtcaaggtggagtcggccctggaggtggcacaccggctcaaaccccctggaggcctgggagggggtctgggcattggaggctccgtgggtggccaccttggggagctggcccagagcagcgttccccccagcactgtagccccaccgcagggtgtggtgaaggcctgctatagcctgtcggaagatgcagaaggggagggcctgctgttgattcccggaggccgggccagcgtgggggccacctcgggcctggtggaagcagcagcggtggccatggctgcccggggggcggggggcagcctgggggcggggggcagccggggacccctgcctgggggcttctcaggtggaaaccccttaaagaacatcaagtgcaccaagtgcccggaagtgttccagggcgtggagaagctggtcttccacatgcgggcgcagcacttcatcttcatgtgccctcgctgtggcaagcagttcaaccacagcagcaacctcaaccgccacatgaacgtgcatcgtggtgtcaagtcacactcgtgcggcatctgcggcaagtgcttcacacagaagtccacccttcacgaccacctcaacctgcactcgggagcgcggccctaccgctgctcctactgcgacgtgcgcttcgcccacaagcctgccattaggcggcacctcaaggagcaacacggcaagaccacggccgagaacgtgctggaggccagtgtggccgagattaacgtcctcatccgctagccgcgcaggcgtggaggccaggaggctggggcccctgggctgcgtggaaaaagggctctttggcccaggagaattggggggtggggggtctggggcagaaaggtaagagtgggaggctgagcagatgcacacatcctgagagagggaagatgattccttggagagacttgctcttgagagtgcaagaatctggagctgggaaaagggttcttggaggccaggggaatacggggtcccagagaaagatttccttctcttagaagtgcatgtatatgtggagggagggaaaagggtcctatagaatgagggaagacaaaaa

SEQ ID NO: 303697 - protein, 199 aa, Artificial Sequence
  derived and/or modified sequence
MRQSREELIKRGVLKEIYDKDGELSISNEEDSLENGQSLSSSQLSLPALSEMEPVPMPRDPCSYEVLQPSDIMDGPVSEESPSASESGVLLSQDPSAKPVLLLPPKKPAAFPGDHEETPVKQLPLLKQPPALPPKPTTRIANHLTDWHQAHQVGQRHPLPPWQWAFSSPGSSKRIQSRPGAVAYACNPSTLGGRGRWIT

SEQ ID NO: 303698 - protein, 169 aa, Artificial Sequence
  derived and/or modified sequence
MDYPKMDYFLDVESAHRLLDVESAQRFFYSQGAQARRATLLLPPTLMAASSEDDIDRRPIRRVRSKSDTPYLAEARISFNLGAGVSLFGDMDEARMGPAVPTLGRPLGLELCSLENHGLLKTAPTYTTSAHICSGPSTGGQFSTQGMSPVQGAKRRRVVWLPLEGEEFG

SEQ ID NO: 303699 - protein, 265 aa, Artificial Sequence
  derived and/or modified sequence
  misc_feature (1)..(1): Xaa can be any naturally occurring amino acid
XSPFTPFSPLLSFFLSPFFFLFPSLSHSLPTPSLPLPSPFPSPSPVREPLPLPSSPFRLSPSPSVSFSLSARRATLLLPPTLMAASSEDDIDRRPIRRVRSKSDTPYLAEARISFNLGAAEEVERLAAMRSDSLVPGTHTPPIRRRSKFANLGRIFKPWKWRKKKSEKFKHTSAALERKISMRQSREELIKRGVLKEIYDKDGELSISNEEDSLENGQSLSSSQLSLPALSEMEPVPMPRDPCSYEVLQPSDIMDGPVSEESPSA

SEQ ID NO: 303700 - protein, 547 aa, Artificial Sequence
  derived and/or modified sequence
MDYPKMDYFLDVESAHRLLDVESAQRFFYSQGAQARRATLLLPPTLMAASSEDDIDRRPIRRVRSKSDTPYLAEARISFNLGAAEEVERLAAMRSDSLVPGTHTPPIRRRSKFANLGRIFKPWKWRKKKSEKFKHTSAALERKISMRQSREELIKRGVLKEIYDKDGELSISNEEDSLENGQSLSSSQLSLPALSEMEPVPMPRDPCSYEVLQPSDIMDGPVSEESPSASESGVLLSQDPSAKPVLLLPPKKPAAFPGDHEETPVKQLPLLKQPPALPPKPTTRIANHLTDPGAPVKLPCLPVKLSPPLPPKKVMICMPVGGPDLSLVSYTAQKSGQQGVAQHHHTVLPSQIQHQLQYGSHGQHLPSTTGSLPMHPSGCRMIDELNKTLAMTMQRLESSEQRVPCSTSYHSSGLHSGDGVTKAGPMGLPEIRQVPTVVIECDDNKENVPHESDYEDSSCLYTREEEEEEEDEDDDSSLYTSSLAMKVCRKDSLAIKLSNRPSKRELEEKNILPRQTDEERLELRQQIGTKLTRNKFRRDFGRQLEGK

SEQ ID NO: 303701 - protein, 230 aa, Artificial Sequence
  derived and/or modified sequence
NLGRIFKPWKWRKKKSEKFKHTSAALERKISMRQSREELIKRGVLKEIYDKDGELSISNEEDSLENGQSLSSSQLSLPALSEMEPVPMPRDPCSYEVLQPSDIMDGPVSEESPSASESGVLLSQDPSAKPVLLLPPKKPAAFPGDHEETPVKQLPLLKQPPALPPKPTTRIANHLTDWHQAHQVGQRHPLPPWQWAFSSPGSSKRIQSRPGAVAYACNPSTLGGRGRWIT

SEQ ID NO: 303702 - DNA, 798 bp, Artificial Sequence
  derived and/or modified sequence
tgaagccccttcacccccttcagccccctgctgagcttcttcctgagccccttcttcttcctgttccccagcctgagccacagcctgcccacccccagcctgcccctgcccagccccttccccagccccagccccgtgagagagcccctgcccctgcccagcagccccttcagactgagccccagccccagcgtgagcttcagcctgagcgccagaagagccaccctgctgctgccccccaccctgatggccgccagcagcgaggacgacatcgacagaagacccatcagaagagtgagaagcaagagcgacaccccctacctggccgaggccagaatcagcttcaacctgggcgccgccgaggaggtggagagactggccgccatgagaagcgacagcctggtgcccggcacccacaccccccccatcagaagaagaagcaagttcgccaacctgggcagaatcttcaagccctggaagtggagaaagaagaagagcgagaagttcaagcacaccagcgccgccctggagagaaagatcagcatgagacagagcagagaggagctgatcaagagaggcgtgctgaaggagatctacgacaaggacggcgagctgagcatcagcaacgaggaggacagcctggagaacggccagagcctgagcagcagccagctgagcctgcccgccctgagcgagatggagcccgtgcccatgcccagagacccctgcagctacgaggtgctgcagcccagcgacatcatggacggccccgtgagcgaggagagccccagcgcctag

SEQ ID NO: 303703 - DNA, 1644 bp, Artificial Sequence
  derived and/or modified sequence
atggactaccccaagatggactacttcctggacgtggagagcgcccacagactgctggacgtggagagcgcccagagattcttctacagccagggcgcccaggccagaagagccaccctgctgctgccccccaccctgatggccgccagcagcgaggacgacatcgacagaagacccatcagaagagtgagaagcaagagcgacaccccctacctggccgaggccagaatcagcttcaacctgggcgccgccgaggaggtggagagactggccgccatgagaagcgacagcctggtgcccggcacccacaccccccccatcagaagaagaagcaagttcgccaacctgggcagaatcttcaagccctggaagtggagaaagaagaagagcgagaagttcaagcacaccagcgccgccctggagagaaagatcagcatgagacagagcagagaggagctgatcaagagaggcgtgctgaaggagatctacgacaaggacggcgagctgagcatcagcaacgaggaggacagcctggagaacggccagagcctgagcagcagccagctgagcctgcccgccctgagcgagatggagcccgtgcccatgcccagagacccctgcagctacgaggtgctgcagcccagcgacatcatggacggccccgtgagcgaggagagccccagcgccagcgagagcggcgtgctgctgagccaggaccccagcgccaagcccgtgctgctgctgccccccaagaagcccgccgccttccccggcgaccacgaggagacccccgtgaagcagctgcccctgctgaagcagccccccgccctgccccccaagcccaccaccagaatcgccaaccacctgaccgaccccggcgcccccgtgaagctgccctgcctgcccgtgaagctgagcccccccctgccccccaagaaggtgatgatctgcatgcccgtgggcggccccgacctgagcctggtgagctacaccgcccagaagagcggccagcagggcgtggcccagcaccaccacaccgtgctgcccagccagatccagcaccagctgcagtacggcagccacggccagcacctgcccagcaccaccggcagcctgcccatgcaccccagcggctgcagaatgatcgacgagctgaacaagaccctggccatgaccatgcagagactggagagcagcgagcagagagtgccctgcagcaccagctaccacagcagcggcctgcacagcggcgacggcgtgaccaaggccggccccatgggcctgcccgagatcagacaggtgcccaccgtggtgatcgagtgcgacgacaacaaggagaacgtgccccacgagagcgactacgaggacagcagctgcctgtacaccagagaggaggaggaggaggaggaggacgaggacgacgacagcagcctgtacaccagcagcctggccatgaaggtgtgcagaaaggacagcctggccatcaagctgagcaacagacccagcaagagagagctggaggagaagaacatcctgcccagacagaccgacgaggagagactggagctgagacagcagatcggcaccaagctgaccagaaacaagttcagaagagacttcggcagacagctggagggcaagtag

SEQ ID NO: 303704 - DNA, 798 bp, Artificial Sequence
  derived and/or modified sequence
tgatcccctttcactcctttctcccctctcctgagtttcttcttgtccccgtttttctttctgtttcccagcttgagccactccctgcctacaccctctctccctctgcctagccccttccccagcccctccccagtgcgggaaccgttgcctctgccttccagccctttccgtttgtctcccagcccttctgtgagcttcagcctgagcgcccgacgagctactctgttgctcccgcctaccctgatggccgctagttctgaagacgatattgacagaaggcccatccgcagggtccgctctaagagcgacactccataccttgccgaagccagaatctctttcaaccttggggccgccgaagaagtggaacgcttggccgcaatgcggtctgatagtctggtacccggtacccatacgcccccgatcagaaggcggagcaagtttgcaaacctaggaaggatttttaaaccttggaagtggcggaagaagaagtccgaaaagttcaagcacacaagtgcagctttggagcgaaaaatttccatgcgccagtcacgggaggagctcattaaacgcggagtgctcaaggagatctatgacaaggatggcgagctgtccatctccaacgaggaggattcgctggaaaacggccaaagcctgtctagctcacagctaagtctacctgccctctctgaaatggagcccgtgcccatgcctagagacccttgttcatatgaagtacttcagccttccgacattatggacgggcccgtatccgaagaatccccctccgcttag

SEQ ID NO: 303705 - DNA, 1644 bp, Artificial Sequence
  derived and/or modified sequence
atggactacccaaaaatggactactttcttgacgtcgaatccgcccacagactgcttgacgtggagagtgcacagcggttcttctactcccagggtgctcaggctagacgagcaaccctgctattacctcctactctcatggctgcatccagcgaagacgacatagatcgacggcccatcaggcgcgtccgcagcaagagtgataccccgtatctagccgaagcccggatttcattcaacctcggggccgctgaggaagtggaacgcctcgcagccatgcggtcagattctctggtacccggaacccataccccacccatacgaaggagaagcaagtttgctaacctcgggcgcatcttcaagccctggaaatggcgtaagaaaaaatccgagaaattcaagcacacgtccgcggccctggaacgaaaaattagcatgcggcagtcccgtgaggagctgattaaacgcggagtgctgaaagaaatatacgacaaagacggcgagctgtctatctctaacgaggaggatagcctcgaaaacggccaaagtctttctagtagtcagctctcactccctgccctgagcgaaatggagccagtacccatgcctagggatccttgctcctacgaggtactgcagccgtcagacatcatggacgggcctgtgagcgaagaatctccaagtgcatcagagtctggagttctactgagtcaggaccctagtgctaagccggtgttgcttctgcctccaaagaaacctgctgcattcccaggagatcacgaggagacccctgtgaagcaactacccctgctgaagcagccgcccgccctgccacctaagcccacaacccggattgccaatcacctgaccgatcccggtgcgcctgtgaagctcccctgtctacctgtaaagctgtcgcctccacttccccctaaaaaagtgatgatatgtatgccggttggcgggcccgacctcagtttggtgtcatacacagcccagaagagcggacaacaaggcgtggctcaacaccatcacacagtgcttccaagccagatccaacatcagctgcagtacggcagccacggccagcaccttcccagcaccaccggatctcttcctatgcacccctcaggttgcagaatgatcgatgagctcaataaaacgctggctatgacaatgcaacgccttgaaagttccgaacaaagggttccttgcagcacctcttaccacagcagcggccttcatagcggcgatggtgtgacaaaggcaggccctatgggtctgcctgagatccggcaggtgcctactgtggttattgaatgtgatgataacaaagaaaatgtcccgcacgaaagcgactacgaagacagctcctgcctgtataccagggaagaagaggaggaagaggaggacgaagacgatgactcctctctatataccagctccctggcaatgaaggtctgtcgaaaggacagtcttgcaattaaactgtcaaatagaccctctaaaagggagctggaggaaaagaacatcctgccgcggcagaccgacgaggagaggctagagcttcgccagcagataggcactaagttaaccaggaacaaattccggagggacttcggacgccaactggagggaaagtag

SEQ ID NO: 303706 - DNA, 798 bp, Artificial Sequence
  derived and/or modified sequence
tgaagccccttcacccccttcagccccctgctgtccttcttcctgagccccttcttcttcctgttccccagcctgagccacagcctgcccacccccagcctgcccctgcccagccccttccccagccccagccctgtgcgggagcccctgcccctgcccagcagccccttccggctgagccccagccccagcgtgtccttcagcctgagcgcccggcgggccaccctgctgctgccccccaccctgatggccgccagcagtgaagatgacatcgacagaagacccatcagaagagtgcgcagcaagagtgacaccccctacctggccgaggcccgcatctccttcaacctgggcgctgctgaggaggtggagcggctggccgccatgagaagtgacagcctggtgcccggcacccacaccccacccatcagaagaagaagcaagtttgccaacctgggccgcatcttcaagccctggaagtggaggaagaagaagtctgagaagttcaagcacaccagcgctgccctggagaggaagatctccatgaggcagagccgggaggagctgatcaagaggggcgtgctgaaggagatctatgacaaggatggagagctgagcatcagcaatgaggaggacagcctggagaatggccagagcctgagcagcagccagctgagcctgcctgccctgtctgagatggagcctgtgcccatgccccgggacccctgcagctatgaggtgctgcagcccagcgacatcatggatggccctgtgtctgaggagagccccagcgcctag

SEQ ID NO: 303707 - DNA, 1644 bp, Artificial Sequence
  derived and/or modified sequence
atggactaccccaagatggactacttcctggatgtggagagcgcccaccggctgctggatgtggagagcgcccagcgcttcttctacagccagggcgcccaggcccggcgggccaccctgctgctgccccccaccctgatggccgccagcagtgaagatgacatcgacagaagacccatcagaagagtgcgcagcaagagtgacaccccctacctggccgaggcccgcatctccttcaacctgggcgctgctgaggaggtggagcggctggccgccatgagaagtgacagcctggtgcccggcacccacaccccacccatcagaagaagaagcaagtttgccaacctgggccgcatcttcaagccctggaagtggaggaagaagaagtctgagaagttcaagcacaccagcgctgccctggagaggaagatctccatgaggcagagccgggaggagctgatcaagaggggcgtgctgaaggagatctatgacaaggatggagagctgagcatcagcaatgaggaggacagcctggagaatggccagagcctgagcagcagccagctgagcctgcctgccctgtctgagatggagcctgtgcccatgccccgggacccctgcagctatgaggtgctgcagcccagcgacatcatggatggccctgtgtctgaggagagccccagcgccagcgagagcggcgtgctgctgagccaggaccccagcgccaagcctgtgctgctgctgccccccaagaagccagctgccttccctggggaccacgaggagacccctgtgaagcagctgcccctgctgaagcagcccccagccctgccccccaagcccaccaccagaattgccaaccacctgacagaccccggggcccctgtgaagctgccctgcctgcctgtgaagctgagcccccccctgccccccaagaaggtgatgatctgcatgcctgtgggcggccctgacctgagcctggtgtcctacacagcccagaagagcggccagcagggcgtggcccagcaccaccacacagtgctgcccagccagatccagcaccagctgcagtatggcagccacggccagcacctgcccagcaccaccggcagcctgcccatgcaccccagcggctgcaggatgattgatgagctgaacaagaccctggccatgaccatgcagaggctggagagcagcgagcagagggtgccctgcagcaccagctaccacagcagcggcctgcacagcggagatggagtgaccaaggccggccccatgggcctgcctgagatccggcaggtgcccaccgtggtgattgaatgtgatgacaacaaggaaaatgtgccccatgaaagtgactatgaggacagcagctgcctgtacacccgggaggaggaggaggaggaggaggatgaagatgatgacagcagcctgtacaccagcagcctggccatgaaggtgtgcaggaaggacagcctggccatcaagctgagcaaccggcccagcaagcgggagctggaggagaagaacatcctgccccggcagacagatgaggagcggctggagctgcggcagcagatcggcaccaagctgaccaggaacaagttcagaagagactttggccggcagctggagggcaagtag

SEQ ID NO: 303708 - DNA, 798 bp, Artificial Sequence
  derived and/or modified sequence
tgaagccccttcacccccttcagccccctgctgagcttcttcctgagtcccttctttttcctgttcccctctctgtcccacagtttacccacacctagcctgcctcttccctcaccgttcccaagtccttctcccgtacgcgagcccttgccgctaccctcctcccccttccgtttgtctcccagcccttctgtgtctttcagcctgtcagccaggcgcgcaaccctcctgttgcctcccacgctgatggccgcaagctcagaagacgacattgaccggcggcctattaggagggtaagatctaagtccgacactccctacctagcagaggccaggataagcttcaatctgggagctgccgaagaggtggaaaggctggccgctatgaggtccgattccttagtacccgggactcacactcctcccattcgccgaagatctaagtttgccaatctgggccggatttttaaaccatggaagtggcggaaaaagaaatcagaaaaatttaagcacacctctgctgctctggaaaggaagattagcatgaggcaaagcagggaggagctgattaagagaggcgtattgaaggagatttacgataaagatggggagctgagcataagcaacgaggaggacagtctggagaacgggcagtcattgtctagtagtcagctctccctgccagctcttagtgagatggaaccagtgccaatgcctcgtgatccatgttcctatgaggtactgcagccttccgacatcatggatgggccagtttcagaagagagccctagcgcctag

SEQ ID NO: 303709 - DNA, 1644 bp, Artificial Sequence
  derived and/or modified sequence
atggactaccccaagatggactacttcctggacgtggagagcgcccatcgcctactggacgttgagtcagctcagcggttcttttacagccagggagcccaggctaggcgggccacgctcctactcccccccacacttatggccgcttccagtgaggatgatattgatagacggccaatcagacgcgtgcggtccaaatccgacaccccctatttagccgaggcacgaattagcttcaacctcggcgcagctgaggaggtggagagattagcagcaatgcgctccgatagcctagtgcccggcacccacacaccgcctatccgccggagatctaaattcgcaaatttagggcgtatcttcaagccttggaaatggagaaaaaagaaaagcgagaagttcaaacatacttccgcggctctggagcgtaagatatctatgcgtcagagcagagaggagttaattaaaagaggagtgctgaaagagatctatgataaggatggagaattgtccattagcaatgaggaggattccctggagaacggacaatcattaagctccagccagttatctcttcccgcactgtcagaaatggagccagttcctatgccccgggacccttgtagttacgaggtgctccagcccagtgatatcatggacggccctgtgtctgaggaatccccttcggccagtgagagcggcgtgctgcttagccaagatcctagcgcgaaacccgtgctgcttttacctcctaaaaaacccgcagcattcccaggggaccacgaagaaacccccgtaaagcagctgcccctgctgaaacaaccacccgccctccctccaaagcctactaccaggatcgcaaatcacctcaccgaccccggggctcccgttaagttgccctgcttgcctgtgaagctatctcccccactcccaccaaaaaaagtgatgatatgtatgcctgtgggtggaccggatctctcactggtcagttacaccgcacaaaaaagtggacaacaaggtgtggcccagcaccaccacactgttctgccctcccagatccagcaccagctgcaatatggttcgcacggtcagcacttacctagcactacgggctcgttgccaatgcatccatctgggtgcaggatgattgacgagctcaacaaaacgctcgcaatgaccatgcagaggctggagtccagcgaacagagagttccatgctccacgagctatcactctagcggcctgcacagcggagacggtgttaccaaagcaggccctatgggactcccagagatccggcaagtgccaacagtcgtgatagagtgcgacgacaataaggagaatgtgccccatgagtctgactacgaagattccagctgcctgtatactagggaggaggaagaagaggaagaggacgaagacgatgatagctctttatacaccagttcacttgcaatgaaagtctgcagaaaagactccctggccataaagttgtccaacaggcccagcaaaagagagctcgaggaaaagaacattctaccccgacagaccgatgaagaacggctcgaacttaggcagcagatcggaaccaagctgacgagaaacaagttccgtcgagatttcggcagacagttggaggggaaatag

SEQ ID NO: 303710 - DNA, 792 bp, Artificial Sequence
  derived and/or modified sequence
ctctcccttcacccctttctctcctttgctctctttctttctctctcccttttttttcctttttccctctctttcccactccctccccaccccttcccttcctctcccctcccccttcccctccccctcccccgtgcgcgagcctcttcctctcccctcctcccccttccgcctctctccctctccctccgtctccttctccctctcagctcgccgggcgaccctgctcctgcctcccacattaatggcggcatcctcggaggatgatatagaccggcggcccatccggagagtgcgctccaagagcgacacgccgtacctcgcagaggccaggatctcctttaacctgggggcagctgaggaagtggagaggctggcggcgatgcgttctgactccctcgtcccaggcacccacaccccacccatccgcaggagaagtaagtttgccaacctgggaaggattttcaagccttggaaatggaggaagaagaaaagcgaaaagttcaaacacacgtcagcagccctggaaaggaaaatatctatgaggcaaagcagagaagagctgataaagcgaggagtcctgaaggaaatctatgataaagatggggaactctctatatccaatgaagaggactccctagaaaatgggcagtccctgagctccagccagctgtctctgcctgccctgtccgaaatggagccagtcccaatgcccagggatccctgctcatatgaggtgctccaaccgtcagacatcatggatgggccagtgtctgaagagagtccctctgc

SEQ ID NO: 303711 - DNA, 1644 bp, Artificial Sequence
  derived and/or modified sequence
atggattatcccaaaatggattattttctggatgtagagtctgctcacagactcttggatgttgagtcagctcaaagattcttctacagtcaaggagctcaagctcgccgggcgaccctgctcctgcctcccacattaatggcggcatcctcggaggatgatatagaccggcggcccatccggagagtgcgctccaagagcgacacgccgtacctcgcagaggccaggatctcctttaacctgggggcagctgaggaagtggagaggctggcggcgatgcgttctgactccctcgtcccaggcacccacaccccacccatccgcaggagaagtaagtttgccaacctgggaaggattttcaagccttggaaatggaggaagaagaaaagcgaaaagttcaaacacacgtcagcagccctggaaaggaaaatatctatgaggcaaagcagagaagagctgataaagcgaggagtcctgaaggaaatctatgataaagatggggaactctctatatccaatgaagaggactccctagaaaatgggcagtccctgagctccagccagctgtctctgcctgccctgtccgaaatggagccagtcccaatgcccagggatccctgctcatatgaggtgctccaaccgtcagacatcatggatgggccagtgtctgaagagagtccctctgccagtgagtctggagtcctcctgtcccaagatccttcagccaaaccagtcctgctactgccccccaaaaaacctgctgctttccctggagaccatgaagagaccccagtgaagcagctgccccttctcaagcagcccccggccctgcctcccaaacccactaccaggattgccaaccacttaacagatcctggcgcccctgtgaaattgccttgtctgccagtgaaactgtcgcctccgctacctccaaagaaagtcatgatctgtatgcccgtgggggggccagacctctcactggtgtcctacacagcccagaagagtggccagcagggtgtggcccagcaccaccacactgtcctgccctcccagatccagcaccagctgcagtacggcagccacggccagcacctcccctccaccaccggctccctccccatgcacccctcgggctgcagaatgatagacgagctcaacaaaacgctggccatgaccatgcagaggctggaaagctctgagcagcgggtcccctgttccacttcttaccacagctctgggttgcactcgggtgatggggtcaccaaagcaggacctatgggccttccagaaataagacaagtgccaactgttgtgattgaatgtgatgacaataaagaaaatgtgcctcatgagtcagactacgaagactcttcttgcctgtatacaagagaagaggaggaagaggaggaggacgaagacgacgacagctcattatacaccagctccctggccatgaaggtctgcaggaaggactccttagccatcaaactcagcaacaggccctccaagcgagagctggaagaaaagaacatccttcccaggcagacggatgaggagcggctggagctgaggcaacagattggcaccaagctcaccagaaacaagttcagaagagactttgggagacagctggaaggaaaatag

SEQ ID NO: 303712 - DNA, 798 bp, Artificial Sequence
  derived and/or modified sequence
tgaagccccttcacaccattctcccctttgctgtccttctttttgtcccccttcttttttttgtttccctcactgtcgcattccctgcctactccgagcttgcccctaccaagtccttttccttcaccatctcctgtccgggagcctttaccgcttcccagctcgccattcagattatccccatctcccagtgtgtcattttccctgagcgcgaggagagccacactgcttttacctcccacccttatggccgcatcatcagaagatgacattgaccgcaggcccatccgccgtgtgcgctctaaaagtgacactccttacctggcggaggctcggattagtttcaatctgggcgctgcggaggaagtggagcggctcgccgctatgagatcagactccttggtgcctggtacgcacaccccacccatacgcagaaggtccaagttcgccaacctaggcagaatcttcaaaccttggaagtggagaaagaagaagtcagaaaagtttaagcatacatctgcggctctcgaacgcaagatcagtatgaggcagtctcgggaggagctgatcaaacgcggagtgctgaaagaaatctacgacaaggacggtgagctgagcatctcaaatgaagaggacagcctggaaaatgggcagagcctgtcgagcagccaactcagtctccccgctctgtcagaaatggagcctgttcctatgccaagagatccgtgctcttatgaggtactccaaccctccgatatcatggatggtcctgtgtctgaagagagccccagtgcctag

SEQ ID NO: 303713 - DNA, 1644 bp, Artificial Sequence
  derived and/or modified sequence
atggactaccccaagatggattacttcctggacgtggagagcgctcaccggctgctggacgtcgagtccgctcagcggtttttctattcccaaggcgctcaggcaaggcgagctaccctgcttttaccgccaactcttatggccgcttccagcgaagatgatattgacaggcgccctattagaagagtgcggtcgaagagcgatacgccgtatctcgccgaggctcggataagctttaacctgggtgcagccgaggaggtggagagattagccgctatgcggagcgattcgctcgtaccgggtactcacacgcccccaatcagacggagaagtaaatttgctaatctaggcaggatttttaagccctggaagtggcggaagaagaagtcagaaaaatttaagcacacaagcgcagccctcgaacgcaagatcagtatgcgacagtcgagagaagaattgattaagcggggagtgctgaaagaaatttacgacaaggatggcgagctttccatttctaatgaggaagattccctggaaaacggccagtccctgtcctcctcccagctgagtttgccagcactgagcgagatggagcccgtccctatgccaagggatccttgctcatacgaggtcttgcagcctagcgatatcatggatggccctgtgagcgaggagagccctagcgcatccgaaagtggcgtgctcttgagtcaggatccttctgcgaaacccgtcctcctcctgccgcctaaaaagccagccgcttttcctggtgaccacgaggaaactcccgtcaaacagctgcccctcctcaagcagcctccagctctgcctcctaagcctacaacccggattgcaaaccatctaacagatcctggagcccctgtaaagctgccatgcctgcctgtgaaactcagcccccctctaccccctaaaaaagttatgatctgtatgccagtgggaggtcctgacctcagtttggtttcttatacagctcagaagtcaggacagcagggtgttgcccaacatcaccacacggtgctgcccagccaaatccagcaccagctgcagtacggctcccatgggcagcacctcccatccacaaccggaagcctccctatgcatccgtccggttgccgtatgattgacgaactcaacaagacattagctatgaccatgcaacggctagagtccagcgaacaacgggtgccttgttcaacctcgtaccactcttccggcctccatagcggcgacggcgtcaccaaagcgggaccaatgggcctgccggagatcaggcaggtgccgaccgtggtaatcgagtgtgatgataacaaggagaatgtgcctcatgagtctgattatgaggactcttcctgtctttatacacgtgaagaggaggaggaagaagaagatgaagacgacgactccagcctgtacacatcaagtttggctatgaaggtgtgccggaaggatagcctggccatcaagctgagcaaccggccttccaagcgcgaacttgaagagaagaacatcctgccccgacagactgacgaggagcggttagagctgagacagcagatcggtaccaagcttacccggaataaattcagacgggacttcgggaggcagctggaaggcaaatag

SEQ ID NO: 303714 - protein, 140 aa, Artificial Sequence
  derived and/or modified sequence
MYLQGPRKLMTQGGYDMVQKLFLDFFRRRLSQRPTAEELEQRNILKPRNEQEEQEEKREIKRRLTRKLSQRPTVEELRERKILIRFSDYVEVADAQDYDRRADKPWTRLTAADKVSRGECWRVGGRTVCWVSLGSPLGSV

SEQ ID NO: 303715 - protein, 144 aa, Artificial Sequence
  derived and/or modified sequence
MYLQGPRKLMTQGGYDMVQKLFLDFFRRRLSQRPTAEELEQRNILKPRNEQEEQEEKREIKRRLTRKLSQRPTVEELRERKILIRFSDYVEVADAQDYDRRADKPWTRLTAADKAAIRKELNEFKSTEMEVHELSRHLTRFHRP

SEQ ID NO: 303716 - DNA, 841 bp, Artificial Sequence
  derived and/or modified sequence
acagacccagagaggcggatgcatgtgggagcaaagagctttgggcagcctttaagctgaggaagtggagaggctggcggcgatgcgttctgactccctcgtcccaggcacccacaccccacccatccgcaggagaagtaagtttgccaacctgggaaggattttcaagccttggaaatggaggaagaagaaaagcgaaaagttcaaacacacgtcagcagccctggaaaggaaaatatctatgaggcaaagcagagaagagctgataaagcgaggagtcctgaaggaaatctatgataaagatggggaactctctatatccaatgaagaggactccctagaaaatgggcagtccctgagctccagccagctgtctctgcctgccctgtccgaaatggagccagtcccaatgcccagggatccctgctcatatgaggtgctccaaccgtcagacatcatggatgggccagtgtctgaagagagtccctctgccagtgagtctggagtcctcctgtcccaagatccttcagccaaaccagtcctgctactgccccccaaaaaacctgctgctttccctggagaccatgaagagaccccagtgaagcagctgccccttctcaagcagcccccggccctgcctcccaaacccactaccaggattgccaaccacttaacagattggcaccaagctcaccaggtaggacagcggcaccctctgcctccctggcagtgggcctttagctctccaggttctagcaaaagaattcagtctcggccgggcgcagtagcttatgcctgtaatcccagcactttgggaggccgaggcaggtggatcacatga

SEQ ID NO: 303717 - DNA, 600 bp, Artificial Sequence
  derived and/or modified sequence
atgagacagagcagagaggagctgatcaagagaggcgtgctgaaggagatctacgacaaggacggcgagctgagcatcagcaacgaggaggacagcctggagaacggccagagcctgagcagcagccagctgagcctgcccgccctgagcgagatggagcccgtgcccatgcccagagacccctgcagctacgaggtgctgcagcccagcgacatcatggacggccccgtgagcgaggagagccccagcgccagcgagagcggcgtgctgctgagccaggaccccagcgccaagcccgtgctgctgctgccccccaagaagcccgccgccttccccggcgaccacgaggagacccccgtgaagcagctgcccctgctgaagcagccccccgccctgccccccaagcccaccaccagaatcgccaaccacctgaccgactggcaccaggcccaccaggtgggccagagacaccccctgcccccctggcagtgggccttcagcagccccggcagcagcaagagaatccagagcagacccggcgccgtggcctacgcctgcaaccccagcaccctgggcggcagaggcagatggatcacctag

SEQ ID NO: 303718 - DNA, 693 bp, Artificial Sequence
  derived and/or modified sequence
aacctgggcagaatcttcaagccctggaagtggagaaagaagaagagcgagaagttcaagcacaccagcgccgccctggagagaaagatcagcatgagacagagcagagaggagctgatcaagagaggcgtgctgaaggagatctacgacaaggacggcgagctgagcatcagcaacgaggaggacagcctggagaacggccagagcctgagcagcagccagctgagcctgcccgccctgagcgagatggagcccgtgcccatgcccagagacccctgcagctacgaggtgctgcagcccagcgacatcatggacggccccgtgagcgaggagagccccagcgccagcgagagcggcgtgctgctgagccaggaccccagcgccaagcccgtgctgctgctgccccccaagaagcccgccgccttccccggcgaccacgaggagacccccgtgaagcagctgcccctgctgaagcagccccccgccctgccccccaagcccaccaccagaatcgccaaccacctgaccgactggcaccaggcccaccaggtgggccagagacaccccctgcccccctggcagtgggccttcagcagccccggcagcagcaagagaatccagagcagacccggcgccgtggcctacgcctgcaaccccagcaccctgggcggcagaggcagatggatcacctag

SEQ ID NO: 303719 - DNA, 600 bp, Artificial Sequence
  derived and/or modified sequence
atgaggcagtcgagagaggagttgattaagaggggagtcctgaaggaaatttatgacaaagacggagaactgtccatctcgaacgaagaggactctctcgagaatggtcaatcgctttctagtagtcagctaagcctcccagcacttagcgagatggaaccagtgcctatgccacgagacccttgcagctacgaagtactccagccttccgatattatggatggtcctgtgagcgaggagtccccatccgccagcgagtcaggcgttctgctgtctcaggatccttccgcgaaaccggtattgctgctaccaccaaagaaaccagccgcattccccggggatcatgaggagaccccagtgaagcagctgccactgctgaagcaacctcccgccctcccaccgaagcccactactagaattgccaaccaccttaccgattggcatcaggctcaccaggttggtcagcgccaccccctaccgccctggcagtgggcctttagttctcctggatcaagcaaaagaatccagagcagaccaggagccgtggcttacgcatgcaacccttctacactgggaggacgtggacgctggattacctag

SEQ ID NO: 303720 - DNA, 693 bp, Artificial Sequence
  derived and/or modified sequence
aatctgggtagaatttttaagccctggaaatggagaaagaagaaatctgagaaattcaagcatacctccgctgcacttgaaaggaagatcagtatgaggcagtctagagaagaactgattaagcggggggtccttaaggaaatatatgataaggatggagaactcagtatttctaatgaagaggacagcctcgagaatggacaaagtctgtcaagcagccagctgagtttacccgctctgtcggaaatggaaccggtgccaatgcccagggacccgtgctcatatgaagtgttgcagcctagcgacatcatggatggtccggtatccgaagagtctcccagcgcttcagaatcgggcgtcctcctgtctcaggaccctagcgccaagccggtgttactcttgcccccaaaaaaacctgctgcattccctggagatcatgaggagactccagtgaagcagctcccattacttaagcagccccccgccctccctccaaagcccactactcgtattgccaatcacctcactgactggcaccaggcccaccaggtcggccaaagacatcccctgcccccatggcaatgggctttcagttctcccggctctagcaaacggatccaatctcgccctggcgccgttgcgtatgcttgcaaccccagcaccctggggggaagagggcgatggatcacttag

SEQ ID NO: 303721 - DNA, 600 bp, Artificial Sequence
  derived and/or modified sequence
atgaggcagagccgggaggagctgatcaagaggggcgtgctgaaggagatctatgacaaggatggagagctgagcatcagcaatgaggaggacagcctggagaatggccagagcctgagcagcagccagctgagcctgcctgccctgtctgagatggagcctgtgcccatgccccgggacccctgcagctatgaggtgctgcagcccagcgacatcatggatggccctgtgtctgaggagagccccagcgccagcgagagcggcgtgctgctgagccaggaccccagcgccaagcctgtgctgctgctgccccccaagaagccagctgccttccctggggaccacgaggagacccctgtgaagcagctgcccctgctgaagcagcccccagccctgccccccaagcccaccacccgcatcgccaaccacctgacagactggcaccaggcccaccaggtgggccagaggcaccccctgcccccctggcagtgggccttcagcagccctggcagcagcaagaggatccagagcaggcctggagctgtggcctatgcctgcaaccccagcaccctgggcggccggggccgctggatcacctag

SEQ ID NO: 303722 - DNA, 693 bp, Artificial Sequence
  derived and/or modified sequence
aacctgggccgcatcttcaagccctggaagtggaggaagaagaagtctgagaagttcaagcacaccagcgctgccctggagaggaagatctccatgaggcagagccgggaggagctgatcaagaggggcgtgctgaaggagatctatgacaaggatggagagctgagcatcagcaatgaggaggacagcctggagaatggccagagcctgagcagcagccagctgagcctgcctgccctgtctgagatggagcctgtgcccatgccccgggacccctgcagctatgaggtgctgcagcccagcgacatcatggatggccctgtgtctgaggagagccccagcgccagcgagagcggcgtgctgctgagccaggaccccagcgccaagcctgtgctgctgctgccccccaagaagccagctgccttccctggggaccacgaggagacccctgtgaagcagctgcccctgctgaagcagcccccagccctgccccccaagcccaccaccagaattgccaaccacctgacagactggcaccaggcccaccaggtgggccagaggcaccccctgcccccctggcagtgggccttcagcagccctggcagcagcaagaggatccagagcaggcctggagctgtggcctatgcctgcaaccccagcaccctgggcggccggggccgctggatcacctag

SEQ ID NO: 303723 - DNA, 600 bp, Artificial Sequence
  derived and/or modified sequence
atgcggcagagccgggaggagctgatcaagcggggcgtgctgaaggagatctacgacaaggacggagagcttagcatcagcaatgaagaggacagtctcgagaacgggcagagcctcagctcgtcccagttaagtcttccggctctcagtgaaatggaaccagtgcccatgccccgggacccatgctcttacgaggtgctccagccatccgacatcatggatgggcctgtaagtgaggagtctccatccgcatccgaatcaggggtgctgctgtctcaggacccatcagccaagcctgtactattgctgcctcctaagaaaccagccgcattcccaggcgatcacgaagaaacaccggttaaacagcttccactcctgaagcagcctcccgccctgcctcccaagccgacgactagaatcgcaaatcacttaacagactggcaccaggctcatcaggttggccagcgacacccgctgcctccctggcagtgggccttttctagccctggctcctcaaaacggattcaatctcggcccggggcagttgcctacgcctgtaatcccagtaccctcggaggcaggggccgctggataacgtag

SEQ ID NO: 303724 - DNA, 693 bp, Artificial Sequence
  derived and/or modified sequence
aacctgggccggatcttcaagccctggaagtggcggaagaagaagagcgagaaattcaaacatacaagtgccgcccttgagcggaagataagcatgagacagagccgcgaagagctgatcaagcgaggagtgctcaaggaaatctacgacaaagatggtgaattgagcatctccaatgaggaggacagcctggaaaacggccagagtttatcgtcctctcaattgtctctccccgcattgtccgaaatggaaccagttccaatgcccagagatccctgttcatatgaagtgctccagccaagcgatatcatggatggccccgttagcgaagaaagcccatcagcatctgaatctggcgtcctcttgtctcaggatccctccgcaaagccagtgctgttactgcctcccaagaaacctgcggcctttccaggcgaccatgaggaaacacccgtgaaacaactacccctgcttaaacagcctcccgctttgcccccaaagcccactacgaggatagcaaatcacctcacagactggcatcaggcccatcaggttgggcagcgtcatccactccctccttggcaatgggccttctcaagtcccgggtctagtaagagaatccaaagccggcctggagccgtcgcatatgcctgcaatccatccacactggggggtagaggtcggtggatcacttag

SEQ ID NO: 303725 - DNA, 760 bp, Artificial Sequence
  derived and/or modified sequence
aacctgggaaggattttcaagccttggaaatggaggaagaagaaaagcgaaaagttcaaacacacgtcagcagccctggaaaggaaaatatctatgaggcaaagcagagaagagctgataaagcgaggagtcctgaaggaaatctatgataaagatggggaactctctatatccaatgaagaggactccctagaaaatgggcagtccctgagctccagccagctgtctctgcctgccctgtccgaaatggagccagtcccaatgcccagggatccctgctcatatgaggtgctccaaccgtcagacatcatggatgggccagtgtctgaagagagtccctctgccagtgagtctggagtcctcctgtcccaagatccttcagccaaaccagtcctgctactgccccccaaaaaacctgctgctttccctggagaccatgaagagaccccagtgaagcagctgccccttctcaagcagcccccggccctgcctcccaaacccactaccaggattgccaaccacttaacagattggcaccaagctcaccaggtaggacagcggcaccctctgcctccctggcagtgggcctttagctctccaggttctagcaaaagaattcagtctcggccgggcgcagtagcttatgcctgtaatcccagcactttgggaggccgaggcaggtggatcacatgaggtcaggagttcaagaccagcctggccaacatggtgaaaccccatctctactaaaaatgcaaaaatt

SEQ ID NO: 303726 - DNA, 600 bp, Artificial Sequence
  derived and/or modified sequence
atgagacagtcccgagaggagttgattaagaggggagtgctcaaggagatctacgacaaggatggtgaactgtccatttctaatgaggaagacagtctcgagaatggccagagcttgagttcctcccagctgagtctccctgccctgtcagagatggaacccgtgcctatgccaagagacccttgttcttacgaggtcctacagccaagtgatatcatggacggccctgtgtcggaagaatcaccatcagcctcagagtccggtgtgctgttgtcgcaggatccatcagccaaacccgtgctcctccttccccctaagaaacccgctgcttttcccggtgaccacgaggaaaccccagtcaagcagctccccctgctgaaacagccgccagccctccctccaaaacccacaactcgaattgccaatcacctgacagactggcaccaggcccatcaggtgggtcagcgccacccactccccccatggcagtgggctttttcaagccctgggtcaagcaagcgaatccagagcagacctggcgctgtcgcctatgcttgcaaccccagtactctcgggggtcggggtaggtggatcacatag

SEQ ID NO: 303727 - DNA, 693 bp, Artificial Sequence
  derived and/or modified sequence
aatcttgggagaatctttaagccatggaaatggcggaaaaagaaatcggaaaagtttaagcataccagtgcggcactagaacgcaaaatcagcatgagacaatctcgcgaggaacttattaagagaggagtgttgaaggagatttacgacaaagacggagaactgtccatcagcaatgaggaggattccctggagaatggccagtctctcagcagctcccagctaagcctcccggctctgagcgagatggaacctgttccaatgccaagagatccttgctcttatgaggtcctgcaaccaagcgacatcatggacgggccagtgagtgaggagtctccctcagcttctgagtccggcgtactgctgagccaagacccgtcagccaagcccgttcttctcttgccaccaaagaaaccagctgccttccccggtgaccatgaggagacccccgtcaagcagttaccactactgaaacagccacccgctctgccccctaaaccgaccacacggatcgccaatcatttgaccgattggcatcaggcccaccaagttgggcaaagacatccacttccgccatggcagtgggcattcagttccccgggatcctccaaacggatacagagcaggccgggtgcagtcgcttacgcttgcaacccctcaaccctggggggtcggggtcggtggataacctag

SEQ ID NO: 303728 - protein, 170 aa, Artificial Sequence
  derived and/or modified sequence
MRLQGAIFVLLPHLGPILVWLFTRDHMSGWCEGPRMLSWCPFYKVLLLVQTAIYSVVGYASYLVWKDLGGGLGWPLALPLGLYAVQLTISWTVLVLFFTVHNPGLALLHLLLLYGLVVSTALIWHPINKLAALLLLPYLAWLTVTSALTYHLWRDSLCPVHQPQPTEKSD

SEQ ID NO: 303729 - DNA, 513 bp, Artificial Sequence
  derived and/or modified sequence
atgagactgcagggcgccatcttcgtgctgctgccccacctgggccccatcctggtgtggctgttcaccagagaccacatgagcggctggtgcgagggccccagaatgctgagctggtgccccttctacaaggtgctgctgctggtgcagaccgccatctacagcgtggtgggctacgccagctacctggtgtggaaggacctgggcggcggcctgggctggcccctggccctgcccctgggcctgtacgccgtgcagctgaccatcagctggaccgtgctggtgctgttcttcaccgtgcacaaccccggcctggccctgctgcacctgctgctgctgtacggcctggtggtgagcaccgccctgatctggcaccccatcaacaagctggccgccctgctgctgctgccctacctggcctggctgaccgtgaccagcgccctgacctaccacctgtggagagacagcctgtgccccgtgcaccagccccagcccaccgagaagagcgactag

SEQ ID NO: 303730 - DNA, 513 bp, Artificial Sequence
  derived and/or modified sequence
atgcgactacagggtgctatcttcgttctgttacctcacttgggccccatccttgtgtggttatttacaagggatcacatgtcaggctggtgcgaagggccgagaatgctttcctggtgcccattctacaaggtgctgttgctggtccaaactgcgatttacagtgtggtgggctatgcgtcctacctagtttggaaagatctgggggggggcttaggatggcccctcgctctgcctcttgggctctatgctgttcagctgaccatttcttggacagttcttgtgctgtttttcacagttcacaaccctggactggccctgttgcacctgcttttgctctacgggctcgtggtctctacagctttgatttggcacccaatcaacaaactggctgccctgctgctgctaccttatctggcgtggctgacagtgacctcagccctcacctaccacttgtggcgggacagtctttgccctgtgcatcaaccgcaacctacagagaaatccgattag

SEQ ID NO: 303731 - DNA, 513 bp, Artificial Sequence
  derived and/or modified sequence
atgcggctgcagggggctatatttgtactactgccgcacctcggaccaatccttgtgtggctgttcactagagatcatatgagcggatggtgtgaaggtcctcgaatgctgtcttggtgtccattctacaaagttttactcctggtgcagacggctatttacagcgtggtgggctacgccagctatctggtctggaaagatctgggagggggacttggctggcccttggcgctgcctcttgggctgtacgccgtccagttaacaatctcatggaccgtgctggtactgttctttactgttcacaaccccggtcttgccctgctgcaccttctgctcctctacggactggttgtgtccaccgccttgatatggcatccaataaataagttagccgcgttgttgctgcttccatacttggcctggctcaccgtgacctctgctctcacctaccatctgtggagagattctctctgcccggtccaccagcctcagcccactgagaagagcgactag

SEQ ID NO: 303732 - DNA, 513 bp, Artificial Sequence
  derived and/or modified sequence
atgaggctgcagggcgccatctttgtgctgctgccccacctgggccccatcctggtgtggctgttcacccgggaccacatgagcggctggtgtgagggccccaggatgctgtcctggtgccccttctacaaggtgctgctgctggtgcagacagccatctacagcgtggtgggctacgccagctacctggtgtggaaggacctgggcggcggcctgggctggcccctggccctgcccctgggcctgtatgctgtgcagctgaccatctcctggacagtgctggtgctcttcttcaccgtgcacaaccctggcctggccctgctgcacctgctgctgctgtatggcctggtggtgtccacagccctgatctggcaccccatcaacaagctggccgccctgctgctgctgccctacctggcctggctgactgtgaccagcgccctgacctaccacctgtggagggacagcctgtgccctgtgcaccagccccagcccacagagaagagtgactag

SEQ ID NO: 303733 - DNA, 513 bp, Artificial Sequence
  derived and/or modified sequence
atgcggctgcagggcgccatcttcgtgctgctgccccacctgggccccattctggtctggctgttcacaagggaccatatgagcggatggtgtgagggccctcgaatgctgtcatggtgcccgttctacaaggtgctgctgttggttcagaccgcaatttattcagtcgtcggctatgcctcctatctggtgtggaaggaccttggagggggcctgggctggccattggcgcttccacttggactatatgccgttcaactgaccatctcttggaccgttctggtcttattttttaccgtacataatcccggtctcgccttactgcacctattgctgctatatggcctggtcgtcagcaccgcgctgatctggcatccgataaacaagctggctgccttgcttttactcccctatctcgcctggctcacagtgacgtcggcgctaacctatcacctgtggagggacagcctatgcccagtccaccaacctcaaccgactgagaagtccgattag

SEQ ID NO: 303734 - DNA, 513 bp, Artificial Sequence
  derived and/or modified sequence
atgcggctgcagggcgccatcttcgtgctgctgccccacctgggcccaatcctagtgtggttgtttacccgggatcatatgtctggctggtgcgaaggccctcgcatgctcagctggtgccctttttacaaagttctcctgcttgtgcaaaccgcaatctactcagtcgtggggtacgcgtcctatctggtttggaaggatctgggcggggggttgggctggcccctcgcattacccctcggcctctacgccgtgcagctgacaatctcctggactgtgctggttttgtttttcaccgtgcataatcccggtcttgccttgcttcacctcctgctcttatatgggctggtagtgtcaacagctctaatttggcatccgatcaataaactcgccgcgcttcttttgctgccctacctggcttggttgacggttacatcagccctgacttatcacctctggagggatagcctgtgtcctgtccaccagccacagcccacagagaagagtgactag

SEQ ID NO: 303735 - DNA, 513 bp, Artificial Sequence
  derived and/or modified sequence
atgcgccttcagggcgcaatttttgttctcctgccgcacttgggcccaattctcgtctggctgttcactagagaccatatgtctggttggtgtgagggcccacgcatgctctcttggtgcccattttacaaagtactgctgctggtgcagaccgctatttatagcgtggtcggctacgcatcatacctggtatggaaagatctaggtggaggactcggatggccactggcattgcccctcgggttgtatgcagtgcagctcacaatatcctggacggttctggtgcttttttttaccgtgcacaatcctggccttgccctgctgcacctgttgctattgtatggccttgttgtgtcaactgctctcatttggcatcccatcaacaagctggcagccctcctgctcctaccctatctggcctggcttaccgtcacatctgcactgacctaccacctctggcgggatagcctgtgtccagtgcaccagccacagcctaccgagaagagcgactag

SEQ ID NO: 303736 - DNA, 513 bp, Artificial Sequence
  derived and/or modified sequence
atgaggctgcagggtgccattttcgtgctgttgccacacctgggcccaatacttgtgtggctgttcacacgcgatcatatgtcaggctggtgcgaaggtccccgaatgttgtcatggtgcccattttacaaagtgctcctgctggtccaaaccgcgatctactctgtcgtagggtacgcttcatatctggtgtggaaagatctgggcggagggctggggtggccacttgcactccccctcggcctttacgctgtccagctgactatcagttggacagtgctcgtactctttttcaccgtgcacaatcctgggctagcgttactgcatctcctgctgttgtacggtttagtggtgtcaacagccctgatttggcatccaattaataagctcgcagcactgttgctgcttccatacctggcttggctcaccgtgactagcgctctcacttaccacctttggcgtgactcactgtgtccagtgcaccagccgcagcccaccgagaagtctgactag

SEQ ID NO: 303737 - DNA, 958 bp, Artificial Sequence
  derived and/or modified sequence
atcagcttaggtagaacagttctcggtgagggccagctacatacctggctaagcgctgcccactgcagaaaagctcatcacccgggacctgatctccaggactcagaagcacttggaggaaggcctattcacttagaagcagttaccagtgctgggcagtgtcctccaagtgccagaggagtgctgtggagaaaagaagtccatggaagccaggagatgggcaagattttgcctcttcaaggtgaatgcggcttcaaggggctatctttgtgctcctgccccacctggggcccatcctggtctggctgttcactcgtgatcacatgtctggttggtgtgagggcccgaggatgctgtcctggtgcccattctacaaagtcttattgcttgtacagacagccatctactctgtcgtgggctatgcctcctacctggtgtggaaggacctgggagggggcttggggtggcccctggccctgcctcttggcctctatgctgttcagctcaccatcagctggactgtcctggttctctttttcacagtccacaaccctggtctggccctgctgcacctgctgctgctgtatgggctggtggtgagcacagcactgatctggcatcccatcaacaaactggctgccctgttactgctgccctacctagcctggctcaccgtgacttcagccctcacctaccacctgtggagggacagcctttgtccagtgcaccagcctcagcccacggagaagagtgactgaggccctagggcatgggagaggagggacgcccagggtggggaggaagagtctgcaagcagggctgtggagttagggttcaccccaatgggaccaccctcctgggtcccctggtgccgtttttccttagaaatcagagaaatgggaaagggggggaaactgattttacacttaaataataaaatcctattagtaactctgaa

SEQ ID NO: 303738 - DNA, 699 bp, Artificial Sequence
  derived and/or modified sequence
tccaagtgccagaggagtgctgtggagaaaagaagtccatggaagccaggagatgggcaaggtgtggcctggggttggagagagctcagagattttgcctcttcaaggtgaatgcggcttcaaggggctatctttgtgctcctgccccacctggggcccatcctggtctggctgttcactcgtgatcacatgtctggttggtgtgagggcccgaggatgctgtcctggtgcccattctacaaagtcttattgcttgtacagacagccatctactctgtcgtgggctatgcctcctacctggtgtggaaggacctgggagggggcttggggtggcccctggccctgcctcttggcctctatgctgttcagctcaccatcagctggactgtcctggttctctttttcacagtccacaaccctggtctggccctgctgcacctgctgctgctgtatgggctggtggtgagcacagcactgatctggcatcccatcaacaaactggctgccctgttactgctgccctacctagcctggctcaccgtgacttcagccctcacctaccacctgtggagggacagcctttgtccagtgcaccagcctcagcccacggagaagagtgactgaggccctagggcatgggagaggagggacgcccagggtggggaggaagagtctgcaagcagggctgtggagttaggg

SEQ ID NO: 303739 - protein, 134 aa, Artificial Sequence
  derived and/or modified sequence
MKKKHDGIVYETKEVLNPSPKVTHCCKSLWLKYSFQKAYMTQLVSSQPVPAMSRNPDHNLLSQPKEHSIVQKHHQEEIIHKLAMQLRHIGDNIDHRMVREDLQQDGRDALDHFVFFFFRRVQVLLHFFWNNHLL

SEQ ID NO: 303740 - protein, 58 aa, Artificial Sequence
  derived and/or modified sequence
  misc_feature (1)..(1): Xaa can be any naturally occurring amino acid
XIIHKLAMQLRHIGDNIDHRMVREDLQQDGRDALDHFVFFFFRRVQVLLHFFWNNHLL

SEQ ID NO: 303741 - protein, 51 aa, Artificial Sequence
  derived and/or modified sequence
MQLRHIGDNIDHRMVREDLQQDGRDALDHFVFFFFRRVQVLLHFFWNNHLL

SEQ ID NO: 303742 - DNA, 2108 bp, Artificial Sequence
  derived and/or modified sequence
ggggccgcaccgtaaatgggtgtcgcctttcctccagtccactctgcacccaacctcagcgggcgcacttttctgagttgcgcataccctctcaattattaaaggttgcagacggaaaagttagtagttttcggaattgtagaatacgctcgtgcagcgccaggacggctaatgcttacccgaaaatgtggaaccctgatctccccatgcgtggagcgaggttggaggtagcgtagtaagaatactggagttgcttaaacgcatttgctcgaaagtcactaccctggatatacattctggccaaaagaaagggggaaaaactccacatttttctcaaatactgagtttcatgaagagaacctccaacaaatggtatataaaggaaaacaaagcaaacaaaagagggaaactttgcaatttattaactcaagcatgaaaatacagaaaataaagagggctcaacatacttggaaaaggaaaaaacatgaagaaaaaacatgatggcattgtttatgaaactaaagaagttctcaatccatctcccaaagtaacacattgttgcaaatcactgtggttaaaatacagttttcagaaggcatacatgacccaacttgtcagctcccagccagttccagccatgtcaaggaacccagatcataatctactttctcagcccaaggagcatagcattgttcagaagcatcaccaggaggaaataattcacaagttggccatgcagctgagacacattggggacaacattgatcataggatggttcgagaggatcttcaacaggatggcagagatgcactagatcattttgtcttctttttctttagaagagttcaggtgttgctgcattttttctggaacaaccatttgctgtaaaaggaaagtaaaggtcaagtggtcaagttctgttttctttttaccctctgagaaacatgaatcccactgggacagatgggaagaacacccttctccgtctccctctttttgtacccatcactgttggtctacacccagtttgttgaagaactgcgggttcacgagccatttgtctcttcggaggagctagctatgagatgtctgcgatcacatcacggtaaagcccaaggagtaattaggaccccaggaagccttgctgcccagaaaacaccagcgctgtggatggtcccagggctccttgtgaggaaaccttgaacatttccttccaggaatgaaagagaacctcgtcctcaaactaaaggccacagaaatgggcactacctcctggcccactccctgggcaccatgccctctggtgacctgttggctccactcttgtcactcatgtccagatctgcagtgccagcttctccttctcggtgacatgtcacctccctgccccaatcctggctccaaccctctctggaaaatcgaagtgaaacatttgtctctaatactcaaattcaacatatggctcatctcatctaccttcccatttccatgcctagaggccccactactaccactagcaccgttgggtgtttccttctcaggctctgattctacaacatttacgttcttttctcacctttgatcccctcactcctctgtgacccccttcaagtcttccttcaccactccagtgttttcccataccactcgaccctgctcgaaggtatctttccctgctctgtcatcctcttttaggcatgcctgcttaaaatcgggagtgcttagtccttggccaacagtcctgccttctagaagaatgtaagacctgaaagagttatgaatctatcactaggcaaaaacttctcttttcctattgctggatggttttgctattattggttggtgggccctttgcctgtggaatgtatttcactcattctctcctgcacgctgttaggcagttctttcacctgcatgcttcttcttttacctttttgtctacctcatagtccctctctcccctcctttaaaagaattataaatattaggaaagcttgttgttataaattaaaagtttacatatgtatcttgagttcttcataggggaagtgttattttaaaaaattctaaaaatgaaataaatattgttattttattgagcatgaaa

SEQ ID NO: 303743 - DNA, 405 bp, Artificial Sequence
  derived and/or modified sequence
atgaagaagaagcacgacggcatcgtgtacgagaccaaggaggtgctgaaccccagccccaaggtgacccactgctgcaagagcctgtggctgaagtacagcttccagaaggcctacatgacccagctggtgagcagccagcccgtgcccgccatgagcagaaaccccgaccacaacctgctgagccagcccaaggagcacagcatcgtgcagaagcaccaccaggaggagatcatccacaagctggccatgcagctgagacacatcggcgacaacatcgaccacagaatggtgagagaggacctgcagcaggacggcagagacgccctggaccacttcgtgttcttcttcttcagaagagtgcaggtgctgctgcacttcttctggaacaaccacctgctgtag

SEQ ID NO: 303744 - DNA, 177 bp, Artificial Sequence
  derived and/or modified sequence
tgaatcatccacaagctggccatgcagctgagacacatcggcgacaacatcgaccacagaatggtgagagaggacctgcagcaggacggcagagacgccctggaccacttcgtgttcttcttcttcagaagagtgcaggtgctgctgcacttcttctggaacaaccacctgctgtag

SEQ ID NO: 303745 - DNA, 156 bp, Artificial Sequence
  derived and/or modified sequence
atgcagctgagacacatcggcgacaacatcgaccacagaatggtgagagaggacctgcagcaggacggcagagacgccctggaccacttcgtgttcttcttcttcagaagagtgcaggtgctgctgcacttcttctggaacaaccacctgctgtag

SEQ ID NO: 303746 - DNA, 405 bp, Artificial Sequence
  derived and/or modified sequence
atgaaaaagaagcatgatggtattgtatacgagactaaggaggtattgaacccgagcccgaaagtgacacattgctgcaaaagtctctggctgaaatacagcttccaaaaggcctatatgacccagctcgtgtctagccaacccgtgcctgcaatgtcccgaaatcctgaccataacttactgagtcagcctaaggagcactcgatcgtgcagaaacatcatcaggaagagatcattcataaactggctatgcagctgaggcatatcggcgataatattgatcatcgtatggtccgtgaggatcttcaacaagacggtcgggatgcgctcgatcactttgtgttttttttctttcgcagagtgcaagttctcttgcacttcttttggaacaatcacctactctag

SEQ ID NO: 303747 - DNA, 177 bp, Artificial Sequence
  derived and/or modified sequence
tgaataatccacaaactggcaatgcagctgcgtcacataggggacaacattgaccacagaatggtgagagaagatcttcagcaggacggacgagacgccttggaccactttgtgttttttttcttcaggagggtccaggtcctgctccattttttctggaacaaccatcttctgtag

SEQ ID NO: 303748 - DNA, 156 bp, Artificial Sequence
  derived and/or modified sequence
atgcagctgcgccacattggggataacattgatcaccgaatggttagggaggatctgcagcaggatggccgggacgccctggatcactttgtgttttttttttttcgtcgggttcaagtactgctacattttttctggaacaaccaccttctgtag

SEQ ID NO: 303749 - DNA, 405 bp, Artificial Sequence
  derived and/or modified sequence
atgaagaagaagcatgatggcatcgtgtatgagaccaaggaggtgctgaaccccagccccaaggtgacccactgctgcaagagcctgtggctgaagtacagcttccagaaggcctacatgacccagctggtgagcagccagcctgtgcctgccatgagcaggaacccagaccacaacctgctgagccagcccaaggagcacagcatcgtgcagaagcaccaccaggaggagatcatccacaagctggccatgcagctgcggcacatcggggacaacatcgaccacaggatggtgcgggaggacctgcagcaggacggcagagatgccctggaccactttgtgttcttcttcttcagaagagtgcaggtgctgctgcacttcttctggaacaaccacctgctgtag

SEQ ID NO: 303750 - DNA, 177 bp, Artificial Sequence
  derived and/or modified sequence
tgaatcatccacaagctggccatgcagctgcggcacatcggggacaacatcgaccacaggatggtgcgggaggacctgcagcaggacggcagagatgccctggaccactttgtgttcttcttcttcagaagagtgcaggtgctgctgcacttcttctggaacaaccacctgctgtag

SEQ ID NO: 303751 - DNA, 156 bp, Artificial Sequence
  derived and/or modified sequence
atgcagctgcggcacatcggggacaacatcgaccacaggatggtgcgggaggacctgcagcaggacggcagagatgccctggaccactttgtgttcttcttcttccggcgggtgcaggtgctgctgcacttcttctggaacaaccacctgctgtag

SEQ ID NO: 303752 - DNA, 405 bp, Artificial Sequence
  derived and/or modified sequence
atgaagaagaagcacgacggcatcgtgtacgagaccaaggaggtgttgaacccctctcccaaggtgacgcactgctgcaagtccctgtggttaaaatattccttccagaaagcgtacatgactcaattggtcagtagccagcctgtgcccgctatgtctcggaatcctgatcataacctgttgagccagccgaaggaacatagcattgttcaaaaacatcaccaggaagagatcatccacaaattagctatgcagctgagacatataggcgacaatatcgatcaccgcatggtgcgggaagatctacagcaggacggcagggatgcactggaccattttgttttctttttcttcagacgtgtccaggtgttactgcacttcttttggaacaaccacttgctgtag

SEQ ID NO: 303753 - DNA, 177 bp, Artificial Sequence
  derived and/or modified sequence
tgaatcatccacaagctggccatgcagctgcggcacatcggcgacaatattgaccatcgaatggtaagggaagacctgcagcaggatggccgcgacgcactagatcacttcgtgttctttttcttcaggagagtgcaggtccttttgcattttttttggaacaaccatttattgtag

SEQ ID NO: 303754 - DNA, 156 bp, Artificial Sequence
  derived and/or modified sequence
atgcagctgcggcacatcggcgacaacatcgaccaccggatggtgcgggaagacctacagcaggacggcagagatgctctcgatcatttcgtcttctttttctttcggcgggtccaagtccttctccattttttctggaacaaccacctgttgtag

SEQ ID NO: 303755 - DNA, 405 bp, Artificial Sequence
  derived and/or modified sequence
atgaagaagaaacatgacgggatcgtttacgagacaaaggaggtccttaatccatcgccaaaagtgacccactgttgcaagagcctatggctgaagtacagcttccaaaaggcttacatgacccaactggtgagctctcaacccgtgccggctatgtcacggaaccccgaccataacttgttgagccagccaaaggaacacagcatcgtccagaagcaccaccaggaggagatcatccacaagctcgccatgcagcttcggcacattggcgataatatcgatcataggatggtgcgcgaagacctacaacaggacggcagggacgcgcttgatcattttgtcttttttttttttcgcagggtacaggttcttctacactttttctggaataatcacttactgtag

SEQ ID NO: 303756 - DNA, 177 bp, Artificial Sequence
  derived and/or modified sequence
tgaatcatccacaaactggctatgcaactccgccacataggtgataacatagatcatcgcatggtgcgggaagatttacaacaggacggtcgggacgctctcgatcattttgttttcttttttttccggagagtacaagtcctcctgcacttcttttggaacaatcacctgctgtag

SEQ ID NO: 303757 - DNA, 156 bp, Artificial Sequence
  derived and/or modified sequence
atgcagctccggcacattggagacaacatcgatcaccggatggtacgtgaggatctgcagcaggacggcagggatgcactcgatcacttcgtcttttttttctttcgtagggtccaggttttgttacacttcttctggaataatcatttactctag

SEQ ID NO: 303758 - DNA, 1070 bp, Artificial Sequence
  derived and/or modified sequence
aaataattcacaagttggccatgcagctgagacacattggggacaacattgatcataggatggttcgagaggatcttcaacaggatggcagagatgcactagatcattttgtcttctttttctttagaagagttcaggtgttgctgcattttttctggaacaaccatttgctgtaaaaggaaagtaaagagaacctcgtcctcaaactaaaggccacagaaatgggcactacctcctggcccactccctgggcaccatgccctctggtgacctgttggctccactcttgtcactcatgtccagatctgcagtgccagcttctccttctcggtgacatgtcacctccctgccccaatcctggctccaaccctctctggaaaatcgaagtgaaacatttgtctctaatactcaaattcaacatatggctcatctcatctaccttcccatttccatgcctagaggccccactactaccactagcaccgttgggtgtttccttctcaggctctgattctacaacatttacgttcttttctcacctttgatcccctcactcctctgtgacccccttcaagtcttccttcaccactccagtgttttcccataccactcgaccctgctcgaaggtatctttccctgctctgtcatcctcttttaggcatgcctgcttaaaatcgggagtgcttagtccttggccaacagtcctgccttctagaagaatgtaagacctgaaagagttatgaatctatcactaggcaaaaacttctcttttcctattgctggatggttttgctattattggttggtgggccctttgcctgtggaatgtatttcactcattctctcctgcacgctgttaggcagttctttcacctgcatgcttcttcttttacctttttgtctacctcatagtccctctctcccctcctttaaaagaattataaatattaggaaagcttgttgttataaattaaaagtttacatatgtatcttgagttcttcataggggaagtgttattttaaaaaattctaaaaatgaaataaatattgttattttattgagcatgaaa

SEQ ID NO: 303759 - DNA, 619 bp, Artificial Sequence
  derived and/or modified sequence
aaataattcacaagttggccatgcagctgagacacattggggacaacattgatcataggatggttcgagaggatcttcaacaggatggcagagatgcactagatcattttgtcttctttttctttagaagagttcaggtgttgctgcattttttctggaacaaccatttgctgtaaaaggaatgaaagagaacctcgtcctcaaactaaaggccacagaaatgggcactacctcctggcccactccctgggcaccatgccctctggtgacctgttggctccactcttgtcactcatgtccagatctgcagtgccagcttctccttctcggtgacatgtcacctccctgccccaatcctggctccaaccctctctggaaaatcgaagtgaaacatttgtctctaatactcaaattcaacatatggctcatctcatctaccttcccatttccatgcctagaggccccactactaccactagcaccgttgggtgtttccttctcaggctctgattctacaacatttacgttcttttctcacctttgatcccctcactcctctgtgacccccttcaagtcttccttcaccactccagtgttttcccataccactcgaccctgc

SEQ ID NO: 303760 - protein, 2407 aa, Artificial Sequence
  derived and/or modified sequence
MVGERHAGDLMVPLGPRLQAYPEELIRQRPGHDGHPEYLIRWSVLKCGEVGKVGVEEGKAEHILMWLSAPEVYANCPGLLGERALSKGLQHEPAGVSGSFPRDPGGLDEVAMGEMEADVQALVRRAARQLAESGTPSLTAAVLHTIHVLSAYASIGPLTGVFRETGALDLLMHMLCNPEPQIRRSAGKMLQALAAHDAGSRAHVLLSLSQQDGIEQHMDFDSRYTLLELFAETTSSEEHCMAFEGIHLPQIPGKLLFSLVKRYLCVTSLLDQLNSSPELGAGDQSSPCATREKSRGQRELEFSMAVGNLISELVRSMGWARNLSEQGMSPPRPTRSIFQPYISGPSLLLPTIVTTPRRQGWVFRQRSEFSSRSGYGEYVQQTLQPGMRVRMLDDYEEISAGDEGEFRQSNNGIPPVQTLGEKALGEISVSVEMAESLLQVLSSRFEGSTLNDLLNSQIYTKYGLLSNEPSSSSTSRNHSCTPDPEEESKSEASFSEEETESLKAKAEAPKTEAEPTKTRTETPMAQSDSQLFNQLLVTEGMTLPTEMKEAASEMARALRGPGPRSSLDQHVAAVVATVQISSLDTNLQLSGLSALSQAVEEVTERDHPLVRPDRSLREKLVKMLVELLTNQVGEKMVVVQALRLLYLLMTKHEWRPLFAREGGIYAVLVCMQEYKTSVLVQQAGLAALKMLAVASSSEIPTFVTGRDSIHSLFDAQMTREIFASIDSATRPGSESLLLTVPAAVILMLNTEGCSSAARNGLLLLNLLLCNHHTLGDQIITQELRDTLFRHSGIAPRTEPMPTTRTILMMLLNRYSEPPGSPERAALETPIIQGQDGSPELLIRSLVGGPSAELLLDLERVLCREGSPGGAVRPLLKRLQQETQPFLLLLRTLDAPGPNKTLLLSVLRVITRLLDFPEAMVLPWHEVLEPCLNCLSGPSSDSEIVQELTCFLHRLASMHKDYAVVLCCLGAKEILSKVLDKHSAQLLLGCELRDLVTECEKYAQLYSNLTSSILAGCIQMVLGQIEDHRRTHQPINIPFFDVFLRHLCQGSSVEVKEDKCWEKVEVSSNPHRASKLTDHNPKTYWESNGSTGSHYITLHMHRGVLVRQLTLLVASEDSSYMPARVVVFGGDSTSCIGTELNTVNVMPSASRVILLENLNRFWPIIQIRIKRCQQGGIDTRVRGVEVLGPKPTFWPLFREQLCRRTCLFYTIRAQAWSRDIAEDHRRLLQLCPRLNRVLRHEQNFADRFLPDDEAAQALGKTCWEALVSPLVQNITSPDAEGVSALGWLLDQYLEQRETSRNPLSRAASFASRVRRLCHLLVHVEPPPGPSPEPSTRPFSKNSKGRDRSPAPSPVLPSSSLRNITQCWLSVVQEQVSRFLAAAWRAPDFVPRYCKLYEHLQRAGSELFGPRAAFMLALRSGFSGALLQQSFLTAAHMSEQFARYIDQQIQGGLIGGAPGVEMLGQLQRHLEPIMVLSGLELATTFEHFYQHYMADRLLSFGSSWLEGAVLEQIGLCFPNRLPQLMLQSLSTSEELQRQFHLFQLQRLDKLFLEQEDEEEKRLEEEEEEEEEEEAEKELFIEDPSPAISILVLSPRCWPVSPLCYLYHPRKCLPTEFCDALDRFSSFYSQSQNHPVLDMGPHRRLQWTWLGRAELQFGKQILHVSTVQMWLLLKFNQTEEVSVETLLKDSDLSPELLLQALVPLTSGNGPLTLHEGQDFPHGGVLRLHEPGPQRSGEALWLIPPQAYLNVEKDEGRTLEQKRNLLSCLLVRILKAHGEKGLHIDQLVCLVLEAWQKGPNPPGTLGHTVAGGVACTSTDVLSCILHLLGQGYVKRRDDRPQILMYAAPEPMGPCRGQADVPFCGSQSETSKPSPEAVATLASLQLPAGRTMSPQEVEGLMKQTVRQVQETLNLEPDVAQHLLAHSHWGAEQLLQSYSEDPEPLLLAAGLCVHQAQAVPVRPDHCPVCVSPLGCDDDLPSLCCMHYCCKSCWNEYLTTRIEQNLVLNCTCPIADCPAQPTGAFIRAIVSSPEVISKYEKALLRGYVESCSNLTWCTNPQGCDRILCRQGLGCGTTCSKCGWASCFNCSFPEAHYPASCGHMSQWVDDGGYYDGMSVEAQSKHLAKLISKRCPSCQAPIEKNEGCLHMTCAKCNHGFCWRCLKSWKPNHKDYYNCSAMVSKAARQEKRFQDYNERCTFHHQAREFAVNLRNRVSAIHEVPPPRSFTFLNDACQGLEQARKVLAYACVYSFYSQDAEYMDVVEQQTENLELHTNALQILLEETLLRCRDLASSLRLLRADCLSTGMELLRRIQERLLAILQHSAQDFRVGLQSPSVEAWEAKGPNMPGSQPQASSGPEAEEEEEDDEDDVPEWQQDEFDEELDNDSFSYDESENLDQETFFFGDEEEDEDEAYD

SEQ ID NO: 303761 - DNA, 7224 bp, Artificial Sequence
  derived and/or modified sequence
atggtgggcgagagacacgccggcgacctgatggtgcccctgggccccagactgcaggcctaccccgaggagctgatcagacagagacccggccacgacggccaccccgagtacctgatcagatggagcgtgctgaagtgcggcgaggtgggcaaggtgggcgtggaggagggcaaggccgagcacatcctgatgtggctgagcgcccccgaggtgtacgccaactgccccggcctgctgggcgagagagccctgagcaagggcctgcagcacgagcccgccggcgtgagcggcagcttccccagagaccccggcggcctggacgaggtggccatgggcgagatggaggccgacgtgcaggccctggtgagaagagccgccagacagctggccgagagcggcacccccagcctgaccgccgccgtgctgcacaccatccacgtgctgagcgcctacgccagcatcggccccctgaccggcgtgttcagagagaccggcgccctggacctgctgatgcacatgctgtgcaaccccgagccccagatcagaagaagcgccggcaagatgctgcaggccctggccgcccacgacgccggcagcagagcccacgtgctgctgagcctgagccagcaggacggcatcgagcagcacatggacttcgacagcagatacaccctgctggagctgttcgccgagaccaccagcagcgaggagcactgcatggccttcgagggcatccacctgccccagatccccggcaagctgctgttcagcctggtgaagagatacctgtgcgtgaccagcctgctggaccagctgaacagcagccccgagctgggcgccggcgaccagagcagcccctgcgccaccagagagaagagcagaggccagagagagctggagttcagcatggccgtgggcaacctgatcagcgagctggtgagaagcatgggctgggccagaaacctgagcgagcagggcatgagcccccccagacccaccagaagcatcttccagccctacatcagcggccccagcctgctgctgcccaccatcgtgaccacccccagaagacagggctgggtgttcagacagagaagcgagttcagcagcagaagcggctacggcgagtacgtgcagcagaccctgcagcccggcatgagagtgagaatgctggacgactacgaggagatcagcgccggcgacgagggcgagttcagacagagcaacaacggcatcccccccgtgcagaccctgggcgagaaggccctgggcgagatcagcgtgagcgtggagatggccgagagcctgctgcaggtgctgagcagcagattcgagggcagcaccctgaacgacctgctgaacagccagatctacaccaagtacggcctgctgagcaacgagcccagcagcagcagcaccagcagaaaccacagctgcacccccgaccccgaggaggagagcaagagcgaggccagcttcagcgaggaggagaccgagagcctgaaggccaaggccgaggcccccaagaccgaggccgagcccaccaagaccagaaccgagacccccatggcccagagcgacagccagctgttcaaccagctgctggtgaccgagggcatgaccctgcccaccgagatgaaggaggccgccagcgagatggccagagccctgagaggccccggccccagaagcagcctggaccagcacgtggccgccgtggtggccaccgtgcagatcagcagcctggacaccaacctgcagctgagcggcctgagcgccctgagccaggccgtggaggaggtgaccgagagagaccaccccctggtgagacccgacagaagcctgagagagaagctggtgaagatgctggtggagctgctgaccaaccaggtgggcgagaagatggtggtggtgcaggccctgagactgctgtacctgctgatgaccaagcacgagtggagacccctgttcgccagagagggcggcatctacgccgtgctggtgtgcatgcaggagtacaagaccagcgtgctggtgcagcaggccggcctggccgccctgaagatgctggccgtggccagcagcagcgagatccccaccttcgtgaccggcagagacagcatccacagcctgttcgacgcccagatgaccagagagatcttcgccagcatcgacagcgccaccagacccggcagcgagagcctgctgctgaccgtgcccgccgccgtgatcctgatgctgaacaccgagggctgcagcagcgccgccagaaacggcctgctgctgctgaacctgctgctgtgcaaccaccacaccctgggcgaccagatcatcacccaggagctgagagacaccctgttcagacacagcggcatcgcccccagaaccgagcccatgcccaccaccagaaccatcctgatgatgctgctgaacagatacagcgagccccccggcagccccgagagagccgccctggagacccccatcatccagggccaggacggcagccccgagctgctgatcagaagcctggtgggcggccccagcgccgagctgctgctggacctggagagagtgctgtgcagagagggcagccccggcggcgccgtgagacccctgctgaagagactgcagcaggagacccagcccttcctgctgctgctgagaaccctggacgcccccggccccaacaagaccctgctgctgagcgtgctgagagtgatcaccagactgctggacttccccgaggccatggtgctgccctggcacgaggtgctggagccctgcctgaactgcctgagcggccccagcagcgacagcgagatcgtgcaggagctgacctgcttcctgcacagactggccagcatgcacaaggactacgccgtggtgctgtgctgcctgggcgccaaggagatcctgagcaaggtgctggacaagcacagcgcccagctgctgctgggctgcgagctgagagacctggtgaccgagtgcgagaagtacgcccagctgtacagcaacctgaccagcagcatcctggccggctgcatccagatggtgctgggccagatcgaggaccacagaagaacccaccagcccatcaacatccccttcttcgacgtgttcctgagacacctgtgccagggcagcagcgtggaggtgaaggaggacaagtgctgggagaaggtggaggtgagcagcaacccccacagagccagcaagctgaccgaccacaaccccaagacctactgggagagcaacggcagcaccggcagccactacatcaccctgcacatgcacagaggcgtgctggtgagacagctgaccctgctggtggccagcgaggacagcagctacatgcccgccagagtggtggtgttcggcggcgacagcaccagctgcatcggcaccgagctgaacaccgtgaacgtgatgcccagcgccagcagagtgatcctgctggagaacctgaacagattctggcccatcatccagatcagaatcaagagatgccagcagggcggcatcgacaccagagtgagaggcgtggaggtgctgggccccaagcccaccttctggcccctgttcagagagcagctgtgcagaagaacctgcctgttctacaccatcagagcccaggcctggagcagagacatcgccgaggaccacagaagactgctgcagctgtgccccagactgaacagagtgctgagacacgagcagaacttcgccgacagattcctgcccgacgacgaggccgcccaggccctgggcaagacctgctgggaggccctggtgagccccctggtgcagaacatcaccagccccgacgccgagggcgtgagcgccctgggctggctgctggaccagtacctggagcagagagagaccagcagaaaccccctgagcagagccgccagcttcgccagcagagtgagaagactgtgccacctgctggtgcacgtggagcccccccccggccccagccccgagcccagcaccagacccttcagcaagaacagcaagggcagagacagaagccccgcccccagccccgtgctgcccagcagcagcctgagaaacatcacccagtgctggctgagcgtggtgcaggagcaggtgagcagattcctggccgccgcctggagagcccccgacttcgtgcccagatactgcaagctgtacgagcacctgcagagagccggcagcgagctgttcggccccagagccgccttcatgctggccctgagaagcggcttcagcggcgccctgctgcagcagagcttcctgaccgccgcccacatgagcgagcagttcgccagatacatcgaccagcagatccagggcggcctgatcggcggcgcccccggcgtggagatgctgggccagctgcagagacacctggagcccatcatggtgctgagcggcctggagctggccaccaccttcgagcacttctaccagcactacatggccgacagactgctgagcttcggcagcagctggctggagggcgccgtgctggagcagatcggcctgtgcttccccaacagactgccccagctgatgctgcagagcctgagcaccagcgaggagctgcagagacagttccacctgttccagctgcagagactggacaagctgttcctggagcaggaggacgaggaggagaagagactggaggaggaggaggaggaggaggaggaggaggaggccgagaaggagctgttcatcgaggaccccagccccgccatcagcatcctggtgctgagccccagatgctggcccgtgagccccctgtgctacctgtaccaccccagaaagtgcctgcccaccgagttctgcgacgccctggacagattcagcagcttctacagccagagccagaaccaccccgtgctggacatgggcccccacagaagactgcagtggacctggctgggcagagccgagctgcagttcggcaagcagatcctgcacgtgagcaccgtgcagatgtggctgctgctgaagttcaaccagaccgaggaggtgagcgtggagaccctgctgaaggacagcgacctgagccccgagctgctgctgcaggccctggtgcccctgaccagcggcaacggccccctgaccctgcacgagggccaggacttcccccacggcggcgtgctgagactgcacgagcccggcccccagagaagcggcgaggccctgtggctgatccccccccaggcctacctgaacgtggagaaggacgagggcagaaccctggagcagaagagaaacctgctgagctgcctgctggtgagaatcctgaaggcccacggcgagaagggcctgcacatcgaccagctggtgtgcctggtgctggaggcctggcagaagggccccaacccccccggcaccctgggccacaccgtggccggcggcgtggcctgcaccagcaccgacgtgctgagctgcatcctgcacctgctgggccagggctacgtgaagagaagagacgacagaccccagatcctgatgtacgccgcccccgagcccatgggcccctgcagaggccaggccgacgtgcccttctgcggcagccagagcgagaccagcaagcccagccccgaggccgtggccaccctggccagcctgcagctgcccgccggcagaaccatgagcccccaggaggtggagggcctgatgaagcagaccgtgagacaggtgcaggagaccctgaacctggagcccgacgtggcccagcacctgctggcccacagccactggggcgccgagcagctgctgcagagctacagcgaggaccccgagcccctgctgctggccgccggcctgtgcgtgcaccaggcccaggccgtgcccgtgagacccgaccactgccccgtgtgcgtgagccccctgggctgcgacgacgacctgcccagcctgtgctgcatgcactactgctgcaagagctgctggaacgagtacctgaccaccagaatcgagcagaacctggtgctgaactgcacctgccccatcgccgactgccccgcccagcccaccggcgccttcatcagagccatcgtgagcagccccgaggtgatcagcaagtacgagaaggccctgctgagaggctacgtggagagctgcagcaacctgacctggtgcaccaacccccagggctgcgacagaatcctgtgcagacagggcctgggctgcggcaccacctgcagcaagtgcggctgggccagctgcttcaactgcagcttccccgaggcccactaccccgccagctgcggccacatgagccagtgggtggacgacggcggctactacgacggcatgagcgtggaggcccagagcaagcacctggccaagctgatcagcaagagatgccccagctgccaggcccccatcgagaagaacgagggctgcctgcacatgacctgcgccaagtgcaaccacggcttctgctggagatgcctgaagagctggaagcccaaccacaaggactactacaactgcagcgccatggtgagcaaggccgccagacaggagaagagattccaggactacaacgagagatgcaccttccaccaccaggccagagagttcgccgtgaacctgagaaacagagtgagcgccatccacgaggtgcccccccccagaagcttcaccttcctgaacgacgcctgccagggcctggagcaggccagaaaggtgctggcctacgcctgcgtgtacagcttctacagccaggacgccgagtacatggacgtggtggagcagcagaccgagaacctggagctgcacaccaacgccctgcagatcctgctggaggagaccctgctgagatgcagagacctggccagcagcctgagactgctgagagccgactgcctgagcaccggcatggagctgctgagaagaatccaggagagactgctggccatcctgcagcacagcgcccaggacttcagagtgggcctgcagagccccagcgtggaggcctgggaggccaagggccccaacatgcccggcagccagccccaggccagcagcggccccgaggccgaggaggaggaggaggacgacgaggacgacgtgcccgagtggcagcaggacgagttcgacgaggagctggacaacgacagcttcagctacgacgagagcgagaacctggaccaggagaccttcttcttcggcgacgaggaggaggacgaggacgaggcctacgactag

SEQ ID NO: 303762 - DNA, 7441 bp, Artificial Sequence
  derived and/or modified sequence
gaggcggggccaggacggcgggaccggccgctgggtcccagcgagggctgagccgggcggtgggaggaggtcaggatggtgggggaacggcatgctggggacctcatggtgcccttagggcctcggctgcaggcatatcctgaagaactcattcgacagaggcctgggcatgacgggcatcctgaatacctgatccgatggagtgtcctgaagtgtggggaagtgggcaaagtgggtgtggaagaaggcaaagcagagcacatcctcatgtggctgtcggctcctgaggtctacgccaactgccctgggctgttaggtgagcgggcactatctaagggacttcagcacgaaccagctggggtttcaggaagctttcctcgagatccaggaggcctggatgaagtggcaatgggagagatggaggctgatgttcaggcgctggtacgcagggcggccaggcagctggcagaaagtgggaccccaagcctcacggccgctgtgcttcacaccatccacgtgctcagtgcctacgccagcatcgggcccctcactggtgtcttcagggagacaggagccctggacctgctcatgcacatgttatgcaatcctgagcctcagatccgccggagtgcaggcaaaatgctgcaggctctggcagcccacgatgctgggagtcgggctcacgtccttctatcactgagccagcaagatggcatcgagcagcacatggattttgacagtcgctatacattgctggagctgtttgcagaaaccacatcctctgaagaacactgcatggcctttgagggcattcatctgcctcagatcccaggaaagctgcttttctccttggtgaagcgctacctttgtgtcacgtccctcctggatcagctgaatagcagtccagagctgggagctggagaccaaagctccccatgtgccacaagagagaaaagccggggacagcgggaactggagttcagcatggctgtgggcaacctcatctctgagcttgtgcggagcatgggctgggcccggaacctcagcgaacagggcatgtcacctccccggccaacccggtccatctttcagccctacatttcaggccccagccttttactccccaccattgtcaccacccccagaagacaagggtgggtcttccgccagcgctctgaattctccagccgtagtggctatggagaatatgtgcagcagacactccagccagggatgcgagtgcggatgctggatgattatgaggagatcagtgctggggacgagggcgagttccggcagagcaacaacggcattccccctgtgcagaccctgggtgaaaaggccctaggtgagatctctgtgtccgtggaaatggccgagagtctgctgcaggttctcagtagtcgatttgagggcagcactctcaatgacctgctcaactcccagatctacaccaagtatgggctgctgtctaatgaaccaagcagctcgtctacttcacgaaatcactcctgtaccccagatccagaagaggagtccaagtcggaggccagcttctcagaggaagagactgagtccctcaaagcaaaggccgaggcccctaagacagaggccgagcccaccaagacaaggaccgagacccccatggcacagagtgattctcagctgtttaaccagcttctggtgactgaggggatgaccctgcccactgagatgaaggaggcagccagtgaaatggccagagccttgcggggtcccggtcctcgcagctccctggatcagcatgtggcagcggtcgtggccactgtgcagatatccagcttggacacaaacctgcagctttcagggctctctgccctctctcaggctgtggaggaggtcactgagcgggaccaccctctggtccgtcctgacagatcgctgagagagaagctagtgaagatgctggtggagctgctgaccaaccaggtgggagagaagatggtggtcgtgcaggccctgcgcctcctttacctgctcatgaccaagcacgagtggcggccgctctttgccagggagggtggcatctatgctgtgctggtctgcatgcaagaatataagacttctgtcttggtgcagcaggctgggctggcggcactgaagatgctggccgtcgccagctcctcggagatccccacttttgttactggccgagattctatccactctttgtttgatgctcagatgaccagagagatcttcgccagcatcgactcagccacacgcccgggctctgagagcctgctcctcactgtccctgcagccgtgatcctgatgctgaatactgaggggtgctcttctgcagcgagaaatggcttactcctgctcaacctacttttgtgcaaccaccacactctgggagaccagattataacccaagagctgagagacacgttgtttaggcactcagggatagcaccaagaacagaacctatgcctaccacacgcaccatcctcatgatgcttctcaatcgctactcagagccgccgggcagccctgagcgtgcagcactagagacccccatcatccagggtcaggatgggtcccctgagctactgattcgatccctggttgggggcccatctgcagaactactcctggacttggagcgtgtgctgtgccgtgagggcagccccggaggtgccgtgaggcccctcctcaagcgcctccagcaggagacccagcctttcctcctgttgctgcggactctggatgctccggggcccaacaagactctgctgctgtctgtgctgagggtcataacccgactgctggatttccctgaggcaatggtcctcccctggcacgaggtcttggagccctgcctcaactgcctgagtggccctagcagtgactccgagattgttcaggagctgacctgcttcctacatcgcctggcctcgatgcataaggactatgctgtggtgctctgctgcctgggagcaaaagagatcctctccaaagtcctggacaagcactcagctcagctgctgctgggctgtgagcttcgggacctggtgacagagtgtgagaagtacgcacagctctatagcaacctcacctccagcatcctggccggctgcattcagatggtgctgggccagatcgaagaccacagacgaacccaccaacccatcaatatccccttctttgatgtgttcctcaggcatctctgccagggctccagtgtggaagtgaaggaggacaagtgctgggagaaggtggaggtgtcctccaacccgcaccgagccagcaagctgacggaccacaaccccaagacctactgggagtccaacggcagcaccggctcccactacatcaccctgcacatgcaccgtggtgttcttgttaggcagctcactttgctggtggccagtgaggactcaagctacatgccagccagggtggtggtgtttgggggtgacagcaccagctgcatcggcactgagctcaacacggtgaatgtgatgccctctgccagccgggtgatcctcttggagaacctgaaccgcttctggcccatcatccagatccgcataaagcgctgccagcagggcggcattgacacccgggttcggggtgtggaggtcctgggccctaagcccacattctggccactgttccgggagcagctgtgtcgccgaacatgtctcttctacacaattcgggcacaagcctggagccgggacatagcagaggaccaccggcgcctcctccagctctgtcccagactgaacagggttttgcgccacgagcagaattttgctgaccgcttcctccctgatgatgaggccgcccaggcactgggcaagacctgctgggaggccctggtcagccccctggtgcagaacatcacctctcccgatgcggaaggcgtgagtgccctgggatggctgctggatcagtacttagaacagagagagacctctcggaaccccttgagtcgagcagcgtcctttgcttctcgagttcgtcgcctttgccacttgctggtgcatgtggaacctcctcctgggccttctcctgagccatccactcggcccttcagcaagaacagcaagggtcgggaccggagcccggcgccttcgccagtgcttccaagcagcagcctgaggaacataacccagtgctggctgagcgtggtgcaggagcaggtcagcagattcctggctgcagcttggagggccccagactttgtgcctcgttactgtaaactctatgagcacttgcagagagcaggctccgagctgtttgggcctcgggcagccttcatgctggctctgcgcagtggcttctctggcgccttgctgcagcagtccttcctcactgctgctcacatgagtgagcagtttgccaggtacattgaccaacagatccagggtggcctgattggtggagcccctggagtggaaatgctggggcagcttcagcggcacctggaacccattatggtcctttctggtctggaactggccacaacttttgagcacttctatcagcattatatggcggaccgtctcctgagctttggttcgagctggctggagggggctgtgctagagcagattggcctctgttttcccaaccgcctcccacagctgatgctgcagagcctgagcacctctgaggagctgcagcgccagttccacctcttccagctccagcggctcgacaagttgttcttggagcaggaagatgaggaggaaaagagactagaggaagaggaggaggaagaggaggaagaggaagctgagaaagaattatttatcgaagatccaagtccagccatttctatactggtcctgtcaccacgctgctggcccgtctccccactctgctacctgtaccatcccagaaagtgccttcccacagaattctgtgatgcccttgaccgtttctccagtttctacagccagagtcagaaccatccagtcctggacatgggaccacatcggcgactgcagtggacgtggctgggccgggctgagctgcagtttgggaagcagatactgcatgtgtccaccgtgcagatgtggctgctgctgaaattcaatcagacagaggaggtgtcagtagagaccttgctgaaggattctgacctctccccagagctgctgctccaggcactcgtgcccctcacctcagggaatggccctttgaccctgcatgagggccaggactttccacacgggggtgtgctgcggcttcatgagcctgggccccagcgcagtggggaggccctgtggctgatacctccccaggcatacctgaacgtagagaaggatgaaggccgaaccctggaacagaagaggaatctcttgagctgtcttcttgttcgtattctcaaagcccatggggaaaagggcctccacattgatcagctggtttgtctggtgctggaggcctggcagaagggtccaaatcctcctggaaccctgggccacactgttgctgggggtgtggcctgtaccagtacagatgtcctctcttgcatcctgcacctcttaggccagggctacgtgaaacggcgtgatgaccggccccagatcctgatgtatgccgctccagagcccatggggccctgccggggtcaggcagatgtccctttctgtggcagccagagcgaaacctccaagcccagcccagaagctgtggctaccctggcatctctacagctgcctgcaggccgcaccatgagcccccaggaagtagaagggttgatgaagcagacggtgcgtcaggtgcaggagacgctgaacttagagccagatgtcgctcagcaccttttggctcattcccactggggcgctgaacagctgctgcagagctacagtgaggaccctgagccactgctgctggcagctgggctgtgcgtacaccaggctcaggctgtacccgtacggcctgaccactgccccgtctgtgtgagccccctggggtgtgacgacgacctgccctctctctgctgcatgcactattgctgtaagtcttgctggaatgagtacctgacaactcggatcgagcagaaccttgttttgaattgcacctgccccattgccgactgccccgcccagcccaccggagccttcattcgtgccatcgtctcctcgccagaggtcatctccaagtatgagaaggcgctcctgcgtggctatgtggagagctgctccaacctgacctggtgcaccaacccccagggctgcgaccgcatcctgtgccgccagggcctgggctgtgggaccacctgctccaagtgtggctgggcctcttgcttcaactgtagcttccctgaggcacactaccctgctagctgtggccatatgtctcagtgggtcgacgacggtggctactatgacggcatgagcgtggaggcgcagagcaagcacctggccaagctcatctccaagcgctgtcccagctgtcaggctcccatcgagaagaacgaggggtgcctgcacatgacctgtgccaaatgtaaccatggattctgctggcgctgcctcaagtcctggaagccaaatcacaaagactattacaactgctctgccatggtaagcaaggcagctcgccaggagaagcggtttcaggactataatgagaggtgcactttccatcaccaggcgcgggagtttgctgtgaacttgcggaaccgggtgtctgccatccatgaagtgcccccgcccagatccttcaccttcctcaatgatgcctgccagggactggagcaggctcggaaggtgctggcctacgcctgcgtgtacagcttctacagccaggacgcagagtacatggatgtggtggagcagcagacagagaacctggagctgcacaccaatgccctgcagatcctcctggaggaaaccctgctgcggtgcagagacctggcctcctccctgcgcctcctgcgggccgactgcctcagcacgggcatggagctgctccggcggatccaggagaggctgcttgccatcctgcagcattctgcccaggatttccgggttggtcttcagagtccatcagtagaggcctgggaggcaaaaggacccaacatgcctggcagtcagccccaggcctcctcagggccagaggcagaagaggaggaggaagacgatgaggatgatgtgcccgagtggcagcaggatgagtttgatgaggagctggacaatgacagcttctcctacgatgagtctgagaacctggaccaagagactttcttctttggtgatgaggaagaggatgaagatgaggcctatgactgagggggcagatgcaggaaacacctagagcagccccagagtcacggggctgagggggcgggagctgcccctgtcatagggagggggattcccagcgtctgtagtgcttcctgtttgctgaataaaggtctctttctcacacaca

SEQ ID NO: 303763 - DNA, 7224 bp, Artificial Sequence
  derived and/or modified sequence
atggtgggagaacgtcatgccggcgatctgatggtgccactcgggccacgtctgcaggcttacccggaggagctaattcgccagcggccaggccatgatggacatcctgagtacctgatcagatggagcgtgttgaagtgtggcgaggtcggaaaagtcggtgtcgaagagggcaaggccgaacacattctgatgtggctatcggcacctgaggtgtatgcgaactgcccgggtttgctgggggaaagggctctgtcaaaagggcttcaacacgagcctgctggggtgagtggttcctttccacgggatccaggcggacttgacgaggtcgccatgggtgagatggaggcggatgtgcaggcgcttgtgcgccgggccgcacggcagctcgccgagtcaggcactccttccctcacagctgctgtgctgcatactatccacgttcttagtgcgtacgcctccattggtccactgactggagtgtttagagaaacaggcgctctggatctgctaatgcacatgctgtgcaaccccgagccacaaattaggagatcagcgggaaagatgctccaggccctggctgctcatgatgcaggctctagggcacatgtgctgttgtcactgagccagcaagatggaattgagcagcatatggacttcgactctaggtacaccttgctcgaactatttgccgagaccacaagctcggaggagcactgcatggccttcgagggcatccatctcccccagattccagggaaactgctgttcagtttggtaaaaagatacctgtgcgttacgagcttgcttgatcagttgaactcgtcaccggagctgggagccggggaccagagctccccttgtgcaaccagggagaaaagccgagggcagcgggaactggaattctcaatggcagttggcaacttgatcagcgagttggtgaggagtatgggctgggcaagaaacctgtccgaacagggaatgagccccccgcgtcctactcgcagcatcttccagccttacatatcgggaccttctctgttactacccaccatcgtcactacacctcggaggcaaggatgggtgtttagacagcggtctgaatttagtagcagaagcggatacggtgagtacgttcagcagacacttcaacctggaatgagggtgcgcatgctggacgactacgaagagatctccgccggcgatgagggggaatttcggcagtctaacaacggaatacctcctgtgcagacattaggtgaaaaggcccttggagaaatatcggtctctgtggagatggccgaatccctgctgcaggttctgagctctcggtttgaaggcagtacactgaatgatctactcaactcccagatctatacaaagtacgggctactgtctaatgaacccagctcgtcaagcacctctcgcaatcactcttgtacccccgacccagaagaggagtccaagtcagaggccagttttagcgaggaggagactgagtctcttaaagctaaggccgaggctcctaagactgaggctgagcccacaaagacacggaccgaaactcctatggcccagagcgacagtcaactgttcaatcagcttcttgtcactgaaggaatgacattgccgactgagatgaaggaagctgcttccgagatggcacgagcacttcgcggcccaggaccgcgatcttctctggaccagcacgttgccgctgtggtggcaaccgtgcagatctcaagcttagatacaaacctgcaactctcaggcctgtcagctctcagccaagccgtagaggaggtgaccgagcgtgaccacccactcgtgagaccagataggtcactcagagagaaactcgtaaagatgttagtcgaactgctaactaatcaggtgggtgagaaaatggtggttgtccaagcactccgccttctatatctgcttatgacgaagcacgaatggcgtccactgtttgccagagagggcgggatatacgcagtgctggtgtgtatgcaggagtataaaacgagcgtcctggtccagcaagccggcctggctgccttaaaaatgcttgccgtggccagtagctcagagattcctacctttgttacaggcagagacagcatccacagtctctttgacgctcagatgacgcgcgaaatctttgcttctattgatagtgccactagacccgggtctgaaagcctgctcctcaccgtgccagccgcagttatactgatgctcaacaccgagggttgctcttccgccgcccggaacgggctgcttctgctcaatctattgctgtgtaaccaccatacacttggcgatcagattataactcaggagcttagggacactcttttccggcacagcggaatagcgcctcggacagagcctatgccaaccacaaggactattttgatgatgttgctgaaccggtactcagagccccccgggagccctgaaagagcagcattggaaacccctatcattcagggacaggatggcagtccagagctgctcatacgctctctggtgggcgggccttctgccgagctcctactcgatcttgagagggttctttgccgcgaggggtccccagggggcgccgtgagaccgctgctgaagcgtctgcagcaggagactcagcccttcttattgctcctgagaaccctggatgcgcccggacccaataagaccctcctgctcagcgtgcttcgcgtcatcacgcggttgctggattttcctgaagccatggtcctgccctggcatgaggtgctcgagccctgtctgaactgcctcagcggcccatccagcgactctgaaatcgtccaagagctgacgtgcttcctacaccgcctcgcttctatgcataaagactatgctgttgtgctctgttgcctgggggcaaaagagatcctcagcaaggtgctggacaagcacagtgcccagctgctgctgggatgcgagctgcgggacctggttactgagtgcgagaaatatgcccagctctactccaacctgaccagcagcattctggcaggatgtattcagatggtgctagggcagatcgaggatcaccggcgcacccaccagcctattaacattcccttctttgatgtgttcttaagacatctatgtcagggctcgtccgtggaggtgaaagaggacaagtgctgggagaaagtcgaagtcagcagcaatccacatcgagcgtcaaaattgaccgaccacaacccaaagacctattgggagagcaacggatcaaccggtagccactacatcaccctacacatgcatagaggtgttttggtgagacagctcaccttgttagtagcctccgaggattcatcctacatgccagcccgtgtggtggtttttgggggggattctacctcatgcattgggaccgagctgaacactgtgaacgttatgccatctgcttctcgtgtcatactgttagagaacctcaatcgcttttggcccatcattcaaatcaggataaagagatgtcagcaaggcggcattgatactcgagtgcgcggagtggaggtgctaggtccgaaacctacattctggcccctgtttcgagaacaattgtgccggcgcacatgtttgttctacactattcgggctcaggcttggtccagagacatagctgaggatcatcggcgccttctccagctatgtccacggctgaatcgagtgctgagacatgagcagaattttgctgatcgctttttaccagacgacgaagcagctcaggctcttgggaagacttgttgggaagcactggtatccccactggtacagaacataaccagccccgacgccgagggcgttagcgcattaggatggttattggatcagtatctcgaacaaagagagactagccgcaatccactttctcgagctgcatcctttgcctcccgcgtccgacgattatgtcacctcttggttcacgtggaacctcccccgggaccatctcctgagccaagcaccaggcccttctccaagaattccaagggccgggaccggagccccgcacccagccccgtactgccaagcagcagccttcgtaatatcactcagtgttggttgagtgtcgtccaagagcaggtgagcagattcttggcagccgcatggagggcccctgactttgtcccaaggtactgtaaactgtatgagcatctccagcgtgccgggtccgagcttttcggtcctcgggccgcgtttatgctcgcgctgcgatcaggcttcagtggtgctctgctccagcaatcgtttctgaccgcagcccatatgagcgaacaatttgctcgatatatcgaccagcaaattcaaggaggccttataggtggcgctcctggggttgaaatgctgggccagctgcagcgacacctggaaccaatcatggtgttaagtggcctggagctggctaccacattcgaacatttctaccagcattatatggcagacaggctgctgagcttcgggagctcatggctggagggagccgtgctagagcagatcggtctctgtttccctaacagactgcctcagttgatgctccaatccctttctacctctgaggaattgcagagacaatttcaccttttccagctgcagcgccttgataagctctttctggagcaggaggatgaagaggagaagaggttggaggaagaagaagaggaggaagaagaggaggaggctgagaaagagctgtttatcgaggatccaagtccggccataagtatactcgtcttgagcccgagatgctggcctgtttccccgctttgttacctgtaccatcctaggaaatgcctacctacggaattctgcgatgctctggataggtttagtagcttctactctcagtcccagaatcatcccgttttggacatggggccacatagacgattgcagtggacatggttggggagagccgaactgcaattcggcaaacaaatcctgcacgtgtcaaccgtacagatgtggctcctgctgaaattcaatcagactgaagaagtgagcgtagagacgctgctgaaggactccgatctcagtccagagctgttgctccaagctctggtaccacttacatcagggaatggtccgctgactctgcacgaaggacaggattttccccatggcggcgtgttgaggctacatgaacctgggcctcagcggagtggtgaggctctgtggcttatcccacctcaagcttatctcaacgttgaaaaagacgaaggaagaacactggagcagaaacggaatttgctgagctgcttgctggtccggattctgaaggcccatggggagaaaggcctccatattgaccaactagtctgtttggtcttggaggcttggcaaaaaggtcctaacccccccggaacactcgggcatactgtggcaggaggagtcgcctgcacaagcactgacgtccttagttgcatcctgcacctgttgggccagggatacgttaagcggcgggatgatcgcccacagatcctcatgtacgcggcacctgagccaatgggcccttgtaggggccaggcagacgtgccattctgtggatcacagagcgaaacttcgaagccctcccccgaggccgtcgccactttggctagcctgcagctccctgcaggccgtactatgagccctcaggaagtagaagggcttatgaagcagaccgttaggcaggtgcaggaaaccctgaacctcgaaccagatgttgcgcagcacctgctcgcacatagtcactggggcgcagaacagctgctccaatcttatagtgaagacccggagccactactgctagcagccgggctgtgcgtgcatcaggcccaggctgtacctgtgcgcccagaccactgccccgtgtgcgtgtcgccgctgggctgcgacgacgatctcccatcactttgttgcatgcactactgttgtaaatcatgctggaacgagtacttgactacccgcatagaacaaaacctggtgctcaactgcacatgtcctatagccgattgtccagcccagcccacaggcgcctttatcagggcaatcgtgtcatctccggaggtgatcagtaagtatgagaaagccctacttcgcggttatgttgaatcctgctctaatctgacttggtgtaccaatccccaggggtgcgatcgcatactgtgtaggcaggggctgggctgtggcacaacttgttccaagtgtggctgggcatcctgtttcaactgtagcttccccgaggctcactaccctgccagttgcgggcacatgagccagtgggttgatgacggaggctactacgatgggatgtcagtggaagctcagtctaaacacctagctaagcttatcagcaagcgatgtccttcctgccaggccccaattgaaaaaaatgaaggctgccttcatatgacctgcgctaagtgtaaccacggattctgctggaggtgccttaagagttggaaaccgaatcacaaagactattataattgttcagctatggtgtcaaaggccgcccgccaagagaagcggttccaagattacaatgaacgctgtacctttcaccatcaggctcgcgagttcgcggtgaatctgcggaacagagtgtcggccatccatgaggtcccacccccgagaagttttacttttctgaatgatgcatgccagggcctagaacaggcacggaaagtgctggcctacgcctgcgtgtattccttttacagccaggatgccgagtatatggatgtggtcgagcagcagacggaaaacctcgagctccacacgaacgcgctgcagattttgcttgaggaaaccctgcttcggtgtcgggatctcgcctcatctctacggctcctccgggccgactgtctgtctaccggtatggagctcctcaggagaattcaggaacgattattggccatcctccaacacagtgctcaagattttcgagtcggtcttcagtctccatccgtggaggcttgggaagctaaaggccccaacatgcctggaagtcagccgcaggcctcatcaggccccgaagcagaggaggaggaagaggacgacgaagacgacgtgcccgagtggcaacaagatgagttcgacgaggagctggataatgacagtttctcttatgacgagagcgagaatctcgatcaggagacttttttctttggggacgaagaggaggacgaggacgaggcttacgactag

SEQ ID NO: 303764 - DNA, 7224 bp, Artificial Sequence
  derived and/or modified sequence
atggtgggggagagacatgctggggacctgatggtgcccctgggcccccggctgcaggcctacccagaggagctgatccggcagaggcctggccatgatggccaccctgagtacctgatccgctggagcgtgctgaagtgtggggaggtgggcaaggtgggcgtggaggagggcaaggccgagcacatcctgatgtggctgagcgcccctgaggtgtatgccaactgccccggcctgctgggggagcgggccctgagcaagggcctgcagcacgagcctgctggggtgtctggcagcttcccccgggaccccggcggcctggatgaggtggccatgggagagatggaggctgatgtgcaggccctggtgcggcgggccgcccggcagctggccgagagcggcacccccagcctgacagctgctgtgctgcacaccatccacgtgctgagcgcctatgccagcatcggccccctgactggagtcttccgggagactggagccctggacctgctgatgcacatgctgtgcaaccctgagccccagatcagaagatctgctgggaagatgctgcaggccctggccgcccatgatgctggcagccgggcccacgtgctgctgagcctgagccagcaggacggcatcgagcagcacatggactttgacagccgctacaccctgctggagctgtttgctgagaccaccagcagcgaggagcactgcatggcctttgagggcatccacctgccccagatccctgggaagctgctcttcagcctggtgaagcgctacctgtgtgtgaccagcctgctggaccagctgaacagcagccctgagctgggcgctggggaccagagcagcccctgtgccacccgggagaagagccggggccagcgggagctggagttctccatggctgtgggcaacctgatcagcgagctggtgcgctccatgggctgggccaggaacctgtctgagcagggcatgagccccccccggcccaccaggagcatcttccagccctacatcagcggccccagcctgctgctgcccaccatcgtgaccaccccccggcggcagggctgggtgttccggcagaggtctgagttcagcagccgcagcggctatggagaatatgtgcagcagaccctgcagcccggcatgagggtgaggatgctggatgattatgaggagatctctgctggagatgaaggagagttccggcagagcaacaacggcatcccccctgtgcagaccctgggggagaaggccctgggggagatctctgtgtctgtggagatggccgagagcctgctgcaggtgctgagcagcagatttgagggcagcaccctgaatgacctgctgaacagccagatctacaccaagtatggcctgctgagcaatgagcccagcagcagcagcaccagcaggaaccacagctgcaccccagaccctgaggaggagagcaagtctgaggccagcttcagcgaggaggagacagagagcctgaaggccaaggccgaggcccccaagacagaagctgagcccaccaagaccaggacagagacccccatggcccagagcgacagccagctgttcaaccagctgctggtgacagagggcatgaccctgcccacagagatgaaggaggccgccagcgagatggcccgggccctgcggggccctggccccaggagcagcctggaccagcacgtggccgctgtggtggccaccgtgcagatcagcagcctggacaccaacctgcagctgagcggcctgagcgccctgagccaggccgtggaggaggtgacagagcgggaccaccccctggtgcggccagacaggagcctgcgggagaagctggtgaagatgctggtggagctgctgaccaaccaggtgggggagaagatggtggtggtgcaggccctgcggctgctgtacctgctgatgaccaagcatgagtggaggcccctgtttgcccgggagggcggcatctatgctgtgctggtgtgcatgcaggagtacaagacctctgtgctggtgcagcaggccggcctggccgccctgaagatgctggccgtggccagcagcagcgagatccccacctttgtgacaggccgggacagcatccacagcctgtttgatgcccagatgacccgggagatctttgccagcattgattctgccaccaggcctggcagcgagagcctgctgctgactgtgcctgctgctgtgatcctgatgctgaacacagagggctgcagcagcgctgccagaaatggcctgctgctgctgaacctgctgctgtgcaaccaccacaccctgggggaccagatcatcacccaggagctgcgggacaccctcttccgccacagcggcatcgcccccaggacagagcccatgcccaccaccaggaccatcctgatgatgctgctgaaccgctacagcgagcccccaggcagccctgagcgggccgccctggagacccccatcatccagggccaggacggcagccctgagctgctgatccgcagcctggtgggcggccccagcgctgagctgctgctggacctggagcgggtgctgtgccgggagggcagccctggaggagctgtgcggcccctgctgaagaggctgcagcaggagacccagcccttcctgctgctgctgcggaccctggatgcccctggccccaacaagaccctgctgctgtctgtgctgcgggtcatcacccggctgctggacttccctgaggccatggtgctgccctggcatgaggtgctggagccctgcctgaactgcctgagcggccccagcagtgacagcgagatcgtgcaggagctgacctgcttcctgcaccggctggcctccatgcacaaggactatgctgtggtgctgtgctgcctgggcgccaaggagatcctgagcaaggtgctggacaagcacagcgcccagctgctgctgggctgtgagctgcgggacctggtgacagaatgtgagaagtatgcccagctgtacagcaacctgaccagcagcatcctggccggctgcatccagatggtgctgggccagatcgaggaccacaggaggacccaccagcccatcaacatccccttctttgatgtgttcctgcggcacctgtgccagggcagctctgtggaggtgaaggaggacaagtgctgggagaaggtggaggtgagcagcaacccccaccgggccagcaagctgacagaccacaaccccaagacctactgggagagcaatggcagcacaggcagccactacatcaccctgcacatgcaccggggcgtgctggtgcggcagctgaccctgctggtggccagcgaggacagcagctacatgcctgcccgggtggtggtgtttggaggagacagcaccagctgcattggaacagagctgaacacagtgaatgtgatgcccagcgccagcagggtcatcctgctggagaacctgaaccgcttctggcccatcatccagatccgcatcaagcgctgccagcagggcggcatcgacaccagggtgcggggcgtggaggtgctgggccccaagcccaccttctggcccctcttccgggagcagctgtgcaggaggacctgcctcttctacaccatccgggcccaggcctggagccgggacattgctgaggaccaccggcggctgctgcagctgtgcccccggctgaacagagtgctgcggcatgagcagaactttgctgaccgcttcctgcctgatgatgaagctgcccaggccctgggcaagacctgctgggaggccctggtgagccccctggtgcagaacatcaccagcccagatgctgagggcgtgtctgccctgggctggctgctggaccagtacctggagcagcgggagaccagcaggaaccccctgagcagagctgccagctttgccagccgggtgcggcggctgtgccacctgctggtgcacgtggagcccccacctggccccagccctgagcccagcacccggcccttcagcaagaacagcaagggccgggacaggagccctgcccccagccctgtgctgcccagcagcagcctgaggaacatcacccagtgctggctgtctgtggtgcaggagcaggtgagccgcttcctggccgccgcctggagggccccagactttgtgccccgctactgcaagctgtatgagcacctgcagagagctggcagcgagctgtttggcccccgggccgccttcatgctggccctgcggagcggcttcagcggggccctgctgcagcagagcttcctgacagctgcccacatgtctgagcagtttgcccgctacatcgaccagcagatccagggcggcctcatcggcggggcccctggggtggagatgctgggccagctgcagaggcacctggagcccatcatggtgctgagcggcctggagctggccaccacctttgagcacttctaccagcactacatggctgaccggctgctgagctttggcagctcctggctggagggcgctgtgctggagcagatcggcctgtgcttccccaaccggctgccccagctgatgctgcagagcctgagcaccagcgaggagctgcagaggcagttccacctgttccagctgcagaggctggacaagctgttcctggagcaggaggatgaggaggagaagaggctggaggaggaggaggaggaggaggaggaggaggaggccgagaaggagctgttcatcgaggaccccagccctgccatcagcatcctggtgctgagcccccgctgctggcctgtgagccccctgtgctacctgtaccaccccaggaagtgcctgcccacagagttctgtgatgccctggaccgcttcagcagcttctacagccagagccagaaccaccctgtgctggacatgggcccccaccggcggctgcagtggacctggctgggccgggcagagctgcagtttgggaagcagatcctgcacgtgtccacagtgcagatgtggctgctgctgaagttcaaccagacagaggaggtgtctgtggagaccctgctgaaggacagcgacctgagccctgagctgctgctgcaggccctggtgcccctgaccagcggaaatggccccctgaccctgcacgagggccaggacttcccccacggcggcgtgctgcggctgcacgagcccggcccccagaggtctggagaggccctgtggctgatccccccccaggcctacctgaatgtggagaaggatgagggccgcaccctggagcagaagaggaacctgctgagctgcctgctggtgcgcatcctgaaggcccatggagagaagggcctgcacatcgaccagctggtgtgcctggtgctggaggcctggcagaagggccccaaccccccaggcaccctgggccacacagtggccggcggcgtggcctgcaccagcacagatgtgctgagctgcatcctgcacctgctgggccagggctacgtgaagagaagagatgaccggccccagatcctgatgtatgctgcccctgagcccatgggcccctgccggggccaggctgatgtgcccttctgtggcagccagagcgagaccagcaagcccagccctgaggccgtggccaccctggccagcctgcagctgcctgctggccgcaccatgagcccccaggaggtggagggcctgatgaagcagacagtgcggcaggtgcaggagaccctgaacctggagccagatgtggcccagcacctgctggcccacagccactggggcgctgagcagctgctgcagagctacagcgaggaccctgagcccctgctgctggccgccggcctgtgtgtgcaccaggcccaggccgtgcctgtgcggccagaccactgccctgtgtgtgtgagccccctgggctgtgatgatgacctgcccagcctgtgctgcatgcactactgctgcaagagctgctggaatgagtacctgaccaccagaattgagcagaacctggtgctgaactgcacctgccccatcgctgactgcccagcccagcccactggagccttcatccgggccatcgtgagcagccctgaggtgatcagcaaatatgagaaggccctgctgcggggctacgtggagagctgcagcaacctgacctggtgcaccaacccccagggctgtgaccgcatcctgtgccggcagggcctgggctgcggcaccacctgcagcaaatgtggctgggccagctgcttcaactgcagcttccctgaggcccactacccagccagctgtggccacatgagccagtgggtggatgatggcggctactatgatggcatgtctgtggaggcccagagcaagcacctggccaagctgatcagcaagcgctgccccagctgccaggcccccatcgagaagaatgaaggctgcctgcacatgacctgtgccaagtgcaaccacggcttctgctggcgctgcctgaagtcctggaagcccaaccacaaggactactacaactgcagcgccatggtgtccaaggccgcccggcaggagaagcgcttccaggactacaatgaacgctgcaccttccaccaccaggcccgggagtttgctgtgaacctgaggaacagagtgtctgccatccacgaggtgcccccacccaggagcttcaccttcctgaatgatgcctgccagggcctggagcaggccaggaaggtgctggcctatgcctgtgtgtacagcttctacagccaggatgctgagtacatggatgtggtggagcagcagacagagaacctggagctgcacaccaatgccctgcagatcctgctggaggagaccctgctgcgctgccgggacctggccagcagcctgcggctgctgcgggctgactgcctgagcacaggcatggagctgctgcggcgcatccaggagcggctgctggccatcctgcagcacagcgcccaggacttccgggtgggcctgcagagccccagcgtggaggcctgggaggccaagggccccaacatgcctggcagccagccccaggccagcagcggccctgaggccgaggaggaggaggaggatgatgaagatgatgtgcctgagtggcagcaggatgaatttgatgaggagctggacaatgacagcttctcctatgatgaaagtgagaacctggaccaggagaccttcttctttggagatgaggaggaggatgaagatgaggcctatgactag

SEQ ID NO: 303765 - DNA, 7224 bp, Artificial Sequence
  derived and/or modified sequence
atggtgggcgagcggcacgccggcgacctgatggtgcccctgggcccaagactccaggcctaccccgaggaactgatcaggcaaaggcccgggcacgatggtcaccccgagtacctgatcagatggtccgtcctcaaatgcggagaggttggcaaagtgggggtggaggagggaaaggccgagcacatacttatgtggctaagcgcaccagaggtttacgcaaactgccccgggctcttgggagaacgggccctgagcaaaggactgcagcacgagcccgcaggtgtgtctgggtcgtttccacgtgatccgggtggcctagatgaggtggcgatgggcgagatggaggcagatgtccaggctctcgttcggagagccgcgaggcagctggcagagagcggaaccccttcactcaccgcagcagtcctccacacaatacatgtcttatcagcatacgcgagcattgggccactgacaggggtgtttagagaaactggcgccctggatctgctaatgcacatgctttgtaaccctgaaccccagatccggaggtctgcagggaaaatgctgcaggcccttgcagctcatgacgctggctctagagctcatgtgcttctctctctcagtcaacaagacggcatcgagcagcatatggatttcgattcaagatacaccctcctggagctgtttgcggagacaacctcctccgaagaacactgtatggccttcgaggggatccatctgccccagattccaggtaagctccttttctcactggtgaagcgctacctctgtgtgacatccttgttggatcaattgaacagttctcctgaacttggagcaggcgaccagtcttccccatgtgccacccgcgagaagtctagagggcagcgcgaactcgagttttccatggccgttggtaacctgatcagcgaactggttcgcagcatgggctgggctcgaaatctgagtgagcagggaatgagtccgccgaggccaacacggtctatcttccagccatatatttctggtcccagcctgctgttgcccactatcgtaaccacgccaagacggcagggatgggtattcagacagcggagtgagttctcttcaagaagcgggtacggggagtatgtgcaacagacactgcagccagggatgcgggtgaggatgctggacgattatgaggaaattagtgccggggacgagggcgagttccggcagtctaataacgggatcccccctgtccagacattaggagaaaaagccctgggggagatctccgtgtcagtggagatggcagagtcactgctgcaggtgttaagctcccgcttcgaggggtcgaccctgaatgatttgctaaattcccagatctataccaagtacggactcctatcaaacgaaccttcttccagtagtacttcacgcaaccatagctgtacccccgatccagaggaggagtccaagtcggaggccagctttagcgaggaggagacagaaagtcttaaagccaaggccgaagcaccaaagaccgaggccgagcccaccaagactcgaaccgagacaccgatggcccagagcgatagccagctatttaaccaattgctcgtaactgagggaatgacattacccactgagatgaaagaagccgccagcgagatggcaagagccctccgaggccctggtccgagatcatctttggaccaacacgtggccgccgtggtagctacggttcagatcagttctctcgacacaaaccttcaactgtccggcctatccgctttaagtcaagccgtagaggaggttactgaacgggatcatcctctcgtgaggccagaccggtcactgcgcgagaagctcgtaaagatgctggtggaattactcactaatcaggtaggcgaaaagatggtggtggtgcaggcgctccgcctgttatacctcctgatgaccaaacatgagtggaggccgctgttcgcccgagaaggcggaatttatgccgtccttgtgtgcatgcaggagtacaaaacctccgtgctcgtgcagcaggccggacttgctgccctcaaaatgctcgccgtggcgagttccagcgagatcccgacctttgtgaccggccgagatagcatccactctctgttcgacgctcagatgactagggagatattcgcaagcattgactccgccactaggccaggctctgagtctctgttattgaccgtgcccgccgcggtgattctgatgctcaacaccgaaggctgcagctcagccgctcggaacggccttctgctcctgaatttgctgctgtgtaatcaccacacactgggcgaccagattatcactcaggagctcagggatactctgttcagacattcaggcattgctccccgtaccgaacctatgcctacaactagaacaatcctcatgatgctgcttaatcggtattccgagcctcctggtagtcccgagagagccgctcttgagactccaataattcaaggacaggacgggagcccagagctactgattcgctccctcgtgggcggacctagcgctgaactgcttctggaccttgagcgggttttgtgtcgggaggggtcacccggcggcgccgtacgacctctgctaaagcggctccagcaggaaacccaaccgttcctgctgctgctgagaacacttgacgccccaggccccaacaaaactctgctgctctctgtcttgcgggtgatcacccgtcttctcgattttcccgaagcaatggtacttccttggcacgaagtccttgagccctgcctgaattgtttgtctggcccaagttccgactcagaaattgtgcaagagctcacttgttttctgcaccgtctggcctctatgcacaaagattacgctgtagtgctgtgctgcctaggtgcaaaggaaatcctgtccaaagttcttgataagcacagcgcccaactgctgttggggtgtgaactgagggatttggtgaccgagtgtgaaaagtatgctcagttatactccaacctgacgagctctatcctggcagggtgcattcagatggtgctcggtcagatagaggaccatagacgaactcatcagccaataaatattccattcttcgatgtcttcctgcgccatttgtgtcagggaagcagcgtagaagtcaaagaagataaatgctgggagaaagtggaggtctcaagtaacccccaccgcgccagtaagcttaccgatcacaacccaaagacatattgggaaagcaatggttccacaggctcccactatatcacactgcacatgcacagaggggtgctggttaggcaattaaccctcctcgtggcatcagaagactctagctacatgcctgcaagggtggtggtcttcggaggagacagcactagttgcatcggaacggagcttaataccgtaaatgtgatgccatcagcctctcgggtaattctgttagagaacctgaaccgattctggcctattattcagattaggatcaagcggtgtcagcagggaggaattgataccagagttcgcggcgtggaggtactgggccctaaaccaaccttctggcccctcttccgggaacagttgtgcagacgcacctgtctcttttatacaattagggctcaggcctggtccagggatatagccgaggaccaccgtcgtttgttgcagttgtgccccagacttaacagggtactgcggcacgaacaaaatttcgccgaccggtttctgcccgatgatgaggccgcccaagccttgggaaagacctgttgggaggccctcgtcagccctttagtgcagaatataaccagccccgacgcggagggcgttagtgctctgggttggctgctggaccaatatcttgagcaaagggaaacaagtcgaaacccactgtcccgcgccgcctccttcgcttcacgagttcgccggctttgtcacctgctcgttcacgtggaaccgcctccaggacccagccctgaacccagtaccagacctttttcaaagaactccaagggtcgggacaggagccccgccccatcacctgtactgccatccagtagccttcggaacatcacacagtgctggctatccgtggttcaggagcaggtctcccgtttcctggccgctgcctggcgggcgcctgatttcgttccccgctactgtaagctatacgagcatctgcagagggcagggagcgagctctttgggccaagagctgcattcatgctggctcttcggagtgggtttagcggagcattgttacagcaatcctttctgactgccgcccacatgtcagaacagtttgcccgctacattgatcagcagattcaaggcggtcttatcggtggtgcaccaggggttgagatgcttggacagctgcagcggcatctggaacccatcatggtattaagcggtctggagttggccacaaccttcgaacatttctatcagcattatatggcggaccgactgttgagcttcggctcctcgtggcttgaaggtgccgtcttggaacagatcggcttgtgcttccccaatagactgccccagctgatgctccaatccctgtcaactagcgaagaattgcaaagacagtttcacctttttcagctgcagagattggataaactgttccttgagcaggaagacgaggaggagaagcgcctagaagaggaagaggaggaagaggaggaggaggaggcagaaaaggaactgtttattgaagaccctagccccgcaatctcgatcctggtcctctctccaagatgttggccagtctctcctctctgttacctgtaccatccccgtaaatgcttgccaaccgaattttgtgacgccttagaccggttctcatctttttactcccagtcccagaatcaccctgtgctggatatgggaccccatcgaaggctgcagtggacctggctggggagagccgaattgcagtttgggaaacagatcttgcacgtttccacagtccagatgtggctcctcctaaagtttaatcagaccgaagaagtgtccgtagaaacgctcctgaaggactccgacctctcccctgaattgcttctccaggcgttggtaccgttgactagtggcaacgggccactcaccctgcacgagggccaggatttccctcacgggggtgtactgaggttgcacgagcctgggccacagcgaagcggcgaggccctgtggttgatcccgccccaggcttacctgaacgtggaaaaggacgaaggaagaaccctggagcagaaaaggaatctgctctcttgcctcctcgtgcggatccttaaggctcacggggaaaaagggttgcacattgatcaactggtctgtctcgttttagaagcgtggcaaaaaggacctaaccctcctggaacactcggacatactgttgcaggcggtgtcgcctgtactagcactgatgttctttcctgtattctgcatcttctggggcagggatatgttaaacgcagggatgatcgacctcagatcctgatgtacgctgcaccggagcccatgggtccctgcaggggacaagccgacgtgcctttctgcggatctcaaagcgaaacatcaaagccttcaccagaagcggtggctaccctagctagcctgcagttgcccgctggcaggacaatgtcccctcaggaagttgagggccttatgaagcaaaccgtaagacaggtgcaggagactctcaacctggagcctgacgtagcccagcacctgctggctcacagtcattggggagccgaacaactgttgcaaagctatagcgaggaccccgaacctcttctgctcgctgcagggttatgcgtccaccaggctcaggcagttcctgttaggcctgatcattgccctgtatgcgtgtccccgctgggttgcgacgacgatctgccctctctatgctgcatgcattattgttgtaaaagttgctggaacgaatatctgactacccgcatcgagcagaatctggttctcaattgtacctgccccattgccgactgccctgcccagccaaccggagcctttatccgcgcaattgtatcctcacctgaagtcatcagcaaatatgaaaaagctctgctacgcggttacgtggagtcctgctccaacctcacctggtgcaccaatccccaggggtgcgataggatcctttgccgacaggggcttggatgtggcacaacctgtagcaaatgcggctgggctagctgcttcaattgctcattcccggaggctcactatccagcctcttgcggtcacatgtcacagtgggtcgacgacggtggctactatgacggtatgagcgttgaggcacagagtaagcatctcgccaagttgatctcaaagagatgtccctcgtgccaagcccccatcgagaaaaatgaaggctgcttgcacatgacctgtgccaagtgcaaccatggattctgttggagatgcctcaagagctggaaaccgaatcataaggactactataactgcagtgccatggtgtctaaggctgcaaggcaagaaaaaagatttcaagattataacgagcggtgtacattccaccaccaagcaagagagtttgccgtgaatctgcgcaaccgagtttccgcaatacatgaggtcccgcccccgcgttctttcacctttctcaatgacgcctgtcaggggctggaacaagcccgaaaagtactggcatacgcgtgtgtgtactccttttactctcaggacgcagagtatatggacgtggtagaacagcagacagaaaacctggaattacacacaaacgctctccagatcttgctggaggagaccctcctacgttgccgggatctcgcatcttctctgcgacttctcagagccgattgcctgagcaccggcatggaactcctgcggagaatccaggaaagactgttagctatcctgcagcactccgcacaggatttcagggtcggtttgcagtccccttctgtcgaagcctgggaagccaaaggccccaacatgcccggtagtcagcctcaggctagctcaggtccggaagccgaggaagaggaggaagacgacgaggatgacgtgccagagtggcagcaggacgaattcgacgaggaactagacaacgactctttttcctatgatgaaagcgaaaatttggatcaggaaaccttctttttcggggatgaagaagaagatgaagacgaagcctacgactag

SEQ ID NO: 303766 - DNA, 7223 bp, Artificial Sequence
  derived and/or modified sequence
atggtaggcgagcgtcatgccggagaccttatggtcccactgggccctcggcttcaggcgtaccccgaggaacttatcagacaaagaccaggccatgatggtcatccggaatatctgattcgatggagcgttctgaaatgtggagaagtggggaaggtgggcgtagaggaaggtaaggccgagcatatcctgatgtggctaagcgcgcctgaggtgtatgctaactgtcccggtctgcttggggaacgagccctgagcaaagggctgcaacacgagccggcaggcgtgtccgggtccttccccagggaccctggcggtctggatgaggtggccatgggggaaatggaagctgacgtccaggccttggtgcgccgtgccgctcgccagctagctgagagcgggacaccttctctcacagctgcggtcctgcataccatccacgtgctgtcagcgtacgcctccataggtcccctgaccggtgtgtttcgagagacgggggcactggatctattgatgcatatgctctgcaaccccgagcctcaaatccggagaagtgctggcaagatgctgcaggcactagccgctcacgacgccggtagtcgggctcatgtgcttctctcactttcccagcaggacgggatcgagcaacatatggacttcgattctagatacacactgctcgaactctttgccgaaaccacatccagcgaggaacactgcatggccttcgagggaattcatttgccccagataccgggaaagcttttgttctcactggtgaagaggtacctgtgcgtgaccagcttgttggatcagttgaatagttctcccgagctgggagcaggagatcaatctagcccttgcgccactcgcgaaaagagtcgtgggcaaagggagctggaattctctatggcggtcggaaatctcatctccgaactcgtcagatcaatgggatgggcccgtaacctaagcgagcagggcatgtccccacctagacccacaagatccatctttcagccatacatctccggaccatctttgctgctacctacaattgtgacaacccccagaagacaaggttgggttttcagacagcgatccgagttcagcagtagaagcggatacggcgagtatgtacagcagacactgcaacccggtatgagagtcagaatgctcgacgactacgaggagatttctgccggagacgaaggtgagttccgacaaagtaacaacggcattcctccagtccagaccctcggggagaaggcactcggagagatttctgtgagtgtggaaatggctgaaagccttctgcaggtgctgagcagtcgcttcgagggaagtacattgaacgaccttctaaattcccaaatttataccaagtatggcctgctgtctaatgagccctcaagctccagcacttcccgaaaccatagctgtactcccgacccagaggaagagtccaagtcagaggcatcctttagcgaagaagaaacagaatccctgaaagccaaggctgaagctccaaaaacagaagctgagcctaccaagacccggactgagactccaatggcgcagtctgatagtcagctattcaatcaattgctggtgaccgaagggatgactctgcccaccgaaatgaaggaagcagccagcgaaatggccagggccctccggggacctggcccacgcagctctctggatcagcacgtggcggctgttgtggctacagtgcaaatctccagcctcgacacaaatctccaactctctggactgtccgctctgtcacaggccgttgaggaagtgacagagcgcgatcaccctttagtgcgtcctgatagaagtcttcgtgagaaattggtgaaaatgctggttgagctgcttactaaccaggtcggagagaagatggttgtggttcaggctcttagactgttatacctgcttatgaccaaacacgagtggcggccactgttcgctagggaggggggtatctatgcagtccttgtctgcatgcaggaatacaaaacgtccgtcctcgtacagcaggccggtctcgctgctctgaagatgttagccgttgcctcttccagtgaaatccccacatttgtcacggggcgtgactccatccattcactgttcgatgctcaaatgacacgggaaatctttgctagtattgattctgcgacccgccctggctctgagtccctgctcctgacagtacccgcagcagttatactcatgttaaacacagagggatgttcctcagcagccaggaatggcctgttgttattaaaccttctgctgtgcaatcaccatacgctgggggatcagattatcacgcaggaattacgtgacacactgtttcggcatagcggaatagcccctcgtaccgagcctatgccaaccacgagaaccatattgatgatgcttctgaataggtattctgaaccaccgggaagtcctgagagggcagcactggaaacaccgataatccaggggcaagacggatctcccgaactgctgatcagaagtttagtggggggtccctccgctgagctcctgttggacctcgagagagttctgtgccgtgagggtagcccagggggtgctgtgcgtccccttctcaaaaggctacagcaggagacgcagcccttcctgctgttgctccggactctcgacgcccctggccctaataagacgctcttattgtctgtgctcagggtgatcacaagattattggatttccctgaggctatggttctaccctggcacgaggtgttggagccttgcctcaactgcctgagcggaccctccagcgatagcgaaatcgtgcaggaactgacgtgctttctgcatagactcgcgtccatgcataaagattacgcagtggtgctttgttgcctcggagccaaagaaatcctgtcaaaggtcttggataaacattcagcccagcttctgctggggtgtgagctgcgagaccttgtgactgagtgtgagaaatacgcccagctgtattccaacctcacatctagtatcttggcgggttgcattcagatggtgctcgggcagattgaagaccaccggagaactcaccagccaatcaatataccattcttcgacgttttcctccgacacttgtgccaggggtctagcgtagaggtgaaggaggacaaatgttgggaaaaggtggaggtcagctcaaatccccatcgcgcttccaaactcaccgaccacaatccgaagacttactgggagagcaatggatctaccggcagtcattacatcacactccatatgcaccgtggcgtgttggtgaggcaattaacactgcttgtggccagtgaagattcgtcttatatgcccgctcgggtcgtggttttcgggggtgacagcaccagctgtatcgggacagagctgaacactgttaatgtcatgccatctgctagcagggtgattctgctggaaaaccttaacaggttctggcctataatccagattaggatcaagcggtgccaacaggggggaatagacaccagggtccgcggagtggaggttctgggtccgaagcccacattttggcctctgttccgagaacagctatgccgccgtacctgcttgttctacaccattcgggctcaggcctggtcccgcgatatcgctgaagaccacagaaggttgctgcagctgtgcccaagactcaatagggtcttgcgtcatgaacaaaactttgccgacaggtttctgcccgacgacgaagctgcacaggccctcgggaaaacctgttgggaggcacttgttagcccactggtgcagaatatcacatccccagatgcggaaggcgtgtccgcactcggttggttgctcgaccagtatctggagcagagggagacctctcggaatccactctctcgagcagcaagcttcgcatcacgggtgagacgcctctgccacctattagttcatgttgagccacctcccggaccatctcccgagccgagcacgcgcccattctccaaaaattccaaaggacgggataggtcccccgcaccttccccagtcctcccctcctcgagcctgcgaaacataactcagtgctggctgtctgtagtccaggaacaggttagtcgatttctggctgccgcttggcgtgccccagatttcgtcccccgttactgtaagttgtacgaacatttacagcgggctggtagcgaactcttcggcccacgtgcagcatttatgctcgcgctcaggtcaggatttagcggtgccttgctgcagcagtctttcttgactgcagcccacatgtccgaacagtttgccagatacatcgaccaacagattcagggaggattaattggtggagcaccgggagtagagatgttagggcagctacagcgccatctggaaccgataatggttctctctggattagaattagccactacctttgaacacttttaccaacattacatggccgacaggctcctctcatttggcagctcgtggctggagggcgctgtgctcgaacagataggtctctgttttcctaacaggttgccccagcttatgctgcagtctctgagcacatctgaggaactgcagagacagttccacctgtttcagctccagcggctggacaagctttttctggagcaggaggatgaggaggaaaagaggcttgaagaggaggaggaggaggaggaggaggaggaggccgagaaagaactgtttattgaggacccaagcccggctatttcaatcctggttctgagccctcggtgttggccagtcagtccactctgctatctgtaccaccccaggaagtgcctgccaaccgagttttgtgacgctttggataggttctctagtttctatagccagagccaaaatcacccggtccttgatatgggcccacatcgccgactgcagtggacctggctggggagagccgagctccagttcggcaaacaaattttacatgtctccaccgtgcagatgtggctactgttgaagtttaatcagacggaagaagtcagcgtggaaacgcttttgaaagatagcgatctgtcgccagaactgctcctgcaggcattggtgcccctaacatctggcaacggccctctcacccttcatgaaggacaagatttccctcacggcggagtcctgcggctgcacgagcctggccctcagcggtcaggagaagcgctgtggttaatacccccacaagcatatttgaacgtggagaaagacgaggggaggactttagaacaaaagcgaaacttgctttcatgccttctggtgagaattctgaaggcacacggcgagaagggactgcatatagaccagctggtgtgtttggtgctcgaggcgtggcagaaagggccaaaccctcccggtaccctaggacataccgtcgctggcggagttgcatgtacctccactgatgtactgtcatgtattctgcacctgctcggtcaggggtatgttaagcggagagatgatcgtcctcagattctgatgtatgctgccccagagccaatgggcccttgtcgcggtcaggccgacgtccccttctgcgggagtcagagcgagactagcaagcctagcccggaggccgtcgccaccctggcatctcttcagttgccagctgggcgaacaatgtctccgcaggaagtggaaggcctgatgaagcagaccgtgagacaggtgcaggaaactcttaatctggagccggacgtagcccagcatctcttagcccactcacactggggagccgagcagttactccagtcttacagtgaggaccccgagccgctgcttcttgccgcagggctgtgcgtgcaccaagcgcaggccgttcccgtcaggcctgatcactgtcccgtgtgcgtttcccctcttggctgcgacgacgatttgccctccctgtgttgcatgcactactgttgtaaatcctgttggaacgaatacttgacaaccaggattgaacagaatctcgtgctaaactgtacatgcccaatcgctgattgccccgcacagccgaccggggcttttatacgggcaattgttagtagccctgaagtgatctcaaaatatgagaaggcattgctgcgtggttacgtagagtcgtgttccaacctgacctggtgcacgaacccacaaggctgtgaccgcattctgtgtcggcagggcctgggctgcggcaccacatgttccaaatgcggttgggcttcatgttttaactgttcctttccagaggcccactaccccgcttcttgtggacacatgagtcagtgggtggacgacggcggatattatgacgggatgagcgttgaggctcaatccaaacacttagccaaattaatcagtaagcggtgccccagctgccaggccccaattgagaaaaacgaaggctgtctgcatatgacctgcgctaagtgcaatcacggattttgctggcgctgtctgaagtcctggaagccgaaccataaggactactataattgttccgctatggtgagcaaggccgctcgccaggaaaagaggtttcaagactacaacgagcgatgcacatttcatcatcaggcacgtgagttcgccgtcaatctgcgcaaccgagtgtcagcgattcacgaggttcctcctcctcgttctttcacctttctcaatgatgcgtgtcagggtcttgagcaggcgagaaaggtactggcttacgcttgtgtctattcattttactcgcaggatgcggagtacatggacgttgtggagcaacagacagagaacttggagctccacaccaacgctctgcagatccttcttgaggaaaccctgctgcggtgtcgagatcttgcctctagcctgcggcttctcagggcggactgcttgtctactggcatggaactgttgcgtcgtattcaggaacgtcttctggcgatcctccagcactcagcccaggacttcagagtggggctgcagagcccttctgttgaagcctgggaggctaagggccctaatatgcccggatcccaaccacaggcctcttctggcccagaagctgaagaagaagaggaagatgatgaggacgacgtgcctgagtggcagcaagacgagtttgatgaagaactggataatgatagctttagttatgacgagtcagagaatctcgaccaggaaacattctttttcggcgacgaagaggaggacgaagatgaggcgtacgacta

SEQ ID NO: 303767 - DNA, 225 bp, Artificial Sequence
  derived and/or modified sequence
atgtttgtgatcatatctctccacaactgtgttgtgatcagctttgtgctgtttctgtttggtgggaataacttcatacaaaacttctatttgccacagaactatattgaccagtttttgctgactagcttccctacctttacaagcgtaggggtgctcattgttctggtgctctgcagcgcgtttctactcctttggcagggcgaaggagtgaacctcagatag

SEQ ID NO: 303768 - DNA, 3603 bp, Artificial Sequence
  derived and/or modified sequence
agggagggggtggtgtccccagccggtttggggggtgcgttgcccggagacggaaagtttgggagcccgagcaggctcggctgcagcctcggggagggggtccagcgggtggcggccctggggatggggaaggagcaggagctgctggaggcggcccgcaccgggcacctcccggcggtggagaagctgctgtccgggaagcggctctcctcaggctttgggggcggcggcggcggtggctctgggggcggcggcggcggcagcggcggcggcggcggcggcctcggctcttccagccaccccctctccagtctgctcagaaatcaagctccatgagggcagactttgtctttttccatctgcatctccagcccctagaaggcgcacttcacgtgtctgctgagtacatgccatgtggagagggccaaatgtgaactgtgttgacagcactggctacacacccctgcaccatgctgctttgaatggccataaggatgtggtcgaggttcttctgaggaacgatgcgctgaccaacgtggctgactcaaaaggctgctaccctctgcatttggcagcctggaaaggagatgcccagatagtgcggttgctcatccatcaagggccttcacacaccagagtcaatgaacagaacaatgacaacgagacagccctgcattgtgcagcgcagtatggccacacagaggtggtgaaggtgctcttagaggagctgacggaccccaccatgcgcaacaacaaattcgagacccctttggacctggcagcactgtacgggcgactggaggtggtgaaaatgctccttaatgcacaccccaacctcctgagctgcaacactaagaagcacacccctctgcacttggcagcaaggaatggccacaaagccgtggtccaggtcctcctcgatgctggcatggacagcaactaccagacggagatgggcagtgctttgcatgaggctgctttgtttggcaagaccgatgtggtgcaaatcctgctggctgcaggaactgacgtcaacataaaagataaccatggactgactgccctagacactgttcgggaactgccttctcaaaagagccagcaaatagcagcattaattgaagatcacatgactggaaaaagaagtacaaaagaagtagataaaacccccccaccccagccacctctcatctccagtatggactccatatcacagaagtctcagggtgacgtggagaaagcagtgactgaactgattatagattttgatgcaaatgctgaagaagagggtccctacgaagctctgtataatgccatctcctgccattcgttggacagcatggccagcgggcgatcatctgaccaagactccacgaacaaggaggctgaggcagcaggagtgaaacctgctggagtgaggcctagggaacgtccaccacctccagcaaagccaccgcccgatgaagaggaagaagaccacatagataagaagtattttcccttgacagcttctgaggttctgtccatgagacctaggattcatgggagtgcagcccgggaagaagacgaacacccttatgaactgttgttaacagcagagacaaagaaagtggtgttggtggatggaaaaacaaaaggctaagagaactgtcagaagcccatcagtctgggaagaaagggagcttcatgcctggcctccttgtggttaggaaggaaaatggcccacacacttaccaaattaaggggctactgccacgtgcgtccctgttgaagtgggacagcacagtgctctgcacagaagccattctcctgaaagagattgagaaaatcatgagttctattggagaagggattgacttttctcaggaacggcagaagatctcaggtttacggacgctggagcagagtgtcggggagtggctggagtcgattgggctgcagcagtatgagagcaagttgcttctgaatggctttgacgatgtccacttcctggggtctaatgtgatggaagagcaggacctgcgggacatcggcatcagcgacccacagcaccggcggaagctgctccaggcggcacgctccctacccaaggtgaaggctctgggttatgacgggaacagcccccctagcgtgccctcctggctggactccctggggctgcaggactacgtccattccttcttgtcaagtggttacagctccattgacaccgtgaagaacctctgggagctagagctcgtcaatgtcctgaaggtccagctgctcggccatcgcaagcgcatcatcgcctccctcgcagacagaccgtacgaggagccgccccagaagccccccagattctcccagctgaggtgccaagatttgctctcccagacgtcatccccactgagtcagaatgattcctgcactgggcggtcggcagatctgctgctgcctccaggggacacaggcaggaggcgccatgacagtctccatgaccctgcggcaccctcccgagcggagcgcttcaggatccaggaggagcaccgtgaggccaagctgaccctgcggcccccgagcctggcagccccctacgccccagtgcagagttggcaacaccagccagagaaactcatcttcgagtcctgtggttatgaagccaattatctgggctccatgctgatcaaagatctgcgagggacagaatccacgcaagacgcctgtgccaagatgcggaaatctacggagcacatgaagaagatccccaccatcatcctgtccatcacatacaaaggtgtcaagttcatcgatgcctccaacaagaacgtcattgcagagcacgagatccggaacatttcctgtgcggcccaggacccggaggacctctgtacctttgcctacatcaccaaggacctgcagaccagccaccactattgccatgtgttcagcaccgtggatgtgaacctgacctacgagatcatcctgacgctggggcaggccttcgaagtggcctatcagttggccctgcaggcccagaagtccagggcgacgggcgcctctgcagctgagatgattgaaacaaaatcttccaaaccggtgcctaagcctcgggtcggcgtgaggaaatccgcagtgccgctgccccccgatagtcgctgttgttactgtcacacctgcaccacccaccgtccttcctacctaccgctgccatctgttagtcctggagtcaagctggaaccacctgatatggaccaagatgcccaatcccatgccagtgtctcctgggttgtggaccccaaaccagactctaagcggagcctcagcaccaaccatactaggttggagctggtctgctgcagtcagcctgaaaatgagttggtctctacaatctcaggagacaagcccaaatccttcctagaacctctcttatttgtgatgccaacaacagcttacaaccacaactgcccagaatggagaagccagaaggatggaggctgctccacctctgaatgcccacatcacctctgcctggaaaaaccgggtgttctaagcttagagatgagggaaaggagacttactgggctagagaacaggaccagaataaacttgatacaagtgagtcac

SEQ ID NO: 303769 - DNA, 1025 bp, Artificial Sequence
  derived and/or modified sequence
attcgggggcgcgagctgccccagtaaatggaaatgttttctaacatataaaaacctacagaagaagaaaataattttctggatcaaattagaagtctgtattatattgatgtctccagattcaaatatattagaaagcagccgtggagacaaccatcttcattttgggagaaataactaaagcccgcctcaagcattagaactacagacaaaccctgatgcgacctctccagattgtcccaagtcgattgatttcccagctatattgtggcctgaagcctccagcgtccacacgaaaccagatttgcctgaaaatggctcggccaagttcaagacctggcgactcccctggcctttgcccacaacccgtcccgggtgtgggagttctaccactaccggcgggaggtcatggggagcaaggagcccaacgccgggcaccgcgccatagccgagtgtgagacccggctgggcaagcagggccggcgagtcgtggtcatcacccagaacatcgatgagctgcaccgcaaggctggcaccaagaaccttctggagatccatggtagcttatttaaaactcgatgtacctcttgtggagttgtggctgagaattacaagagtccaatttgtccagctttatcaggaaaaggtgctccagaacctggaactcaagatgccagcatcccagttgagaaacttccccggtgtgaagaggcaggctgcgggggcttgctgcgacctcacgtcgtgtggtttggagaaaacctggatcctgccattctggaggaggttgacagagagctcgcccactgtgatttatgtctagtggtgggcacttcctctgtggtgtacccagcagccatgtttgccccccaggtggctgccaggggcgtgccagtggctgaatttaacacggagaccaccccagctacgaacagattcaggtttcatttccagggaccctgtggaacgactcttcctgaagcccttgcctgtcatgaaaatgaaactgtttcttaagtgtcctg

SEQ ID NO: 303770 - protein, 186 aa, Artificial Sequence
  derived and/or modified sequence
AVCVPHVGPPPACHLNALHGPVCGTGGQVQLSCGATIPGSSAAMVPHFGVINGKLAHSPRLIMSGVLSSIGKIFKEEGLLGFFVGLIPHLLGDVVFLWGCNLLAHFINAYLVDDSFSQALAIRSYTKFVMGIAVSMLTYPFLLVGDLMAVNNCGLQAGLPPYSPVASSSEAPACFSAGCHQDHALP

SEQ ID NO: 303771 - DNA, 561 bp, Artificial Sequence
  derived and/or modified sequence
gccgtgtgcgtgccccacgtgggccccccccccgcctgccacctgaacgccctgcacggccccgtgtgcggcaccggcggccaggtgcagctgagctgcggcgccaccatccccggcagcagcgccgccatggtgccccacttcggcgtgatcaacggcaagctggcccacagccccagactgatcatgagcggcgtgctgagcagcatcggcaagatcttcaaggaggagggcctgctgggcttcttcgtgggcctgatcccccacctgctgggcgacgtggtgttcctgtggggctgcaacctgctggcccacttcatcaacgcctacctggtggacgacagcttcagccaggccctggccatcagaagctacaccaagttcgtgatgggcatcgccgtgagcatgctgacctaccccttcctgctggtgggcgacctgatggccgtgaacaactgcggcctgcaggccggcctgcccccctacagccccgtggccagcagcagcgaggcccccgcctgcttcagcgccggctgccaccaggaccacgccctgccctag

SEQ ID NO: 303772 - DNA, 765 bp, Artificial Sequence
  derived and/or modified sequence
atgagcaacgccctgagcaccgtgaccagaggcagcatgaagaaggtgttcccccccgacgagatcgagcaggtgagcaacaaggacgacatgaagaccagcctgaagaaggtggtgaaggagaccagctacgagatgatgatgcagtgcgtgagcagaatgctggcccaccccctgcacgtgatcagcatgagatgcatggtgcagttcgtgggcagagaggccaagtacagcggcgtgctgagcagcatcggcaagatcttcaaggaggagggcctgctgggcttcttcgtgggcctgatcccccacctgctgggcgacgtggtgttcctgtggggctgcaacctgctggcccacttcatcaacgcctacctggtggacgacagcttcagccaggccctggccatcagaagctacaccaagttcgtgatgggcatcgccgtgagcatgctgacctaccccttcctgctggtgggcgacctgatggccgtgaacaactgcggcctgcaggccggcctgcccccctacagccccgtgttcaagagctggatccactgctggaagtacctgagcgtgcaggtgagcaagcactggaccgccgaggccttccccgtgctgtgctacatcctgcagctgaagtggttctgcggctgcttcatcgcctgcaaggacaagtggttccacggcatccagtactgcgaggagatcctgggcatctacaaggccttcaagttcagcagctacatcatcagcgagagaatctag

SEQ ID NO: 303773 - DNA, 561 bp, Artificial Sequence
  derived and/or modified sequence
gcggtctgcgttccacatgtcggtcccccaccggcctgccatctgaacgctttacacggacccgtttgtggaacgggtggccaggtgcagttatcttgtggtgcgacaattccaggttcgtcagctgctatggtacctcatttcggagtcatcaatggcaaactcgcccatagtccccgtctgatcatgtccggagtgctgtcctccatcggaaaaatattcaaggaggagggactgctgggctttttcgtggggctcatcccgcacttactgggggacgtagtttttctgtggggatgcaacttgctcgcacatttcattaatgcttacctggtagacgattctttcagtcaggcattggccatccggtcatacaccaagttcgtcatgggtattgcagtgtctatgctcacttatcccttcctgctggttggagacctcatggctgtgaacaactgtggactgcaggccgggctcccaccttattccccagtcgccagctcttcagaagccccagcatgtttctcagccggctgtcatcaggatcacgcactgccctag

SEQ ID NO: 303774 - DNA, 765 bp, Artificial Sequence
  derived and/or modified sequence
atgtctaacgctctcagcacagtcacccgggggtctatgaaaaaggtgttcccacctgacgaaatcgagcaggtgtccaataaggacgacatgaagacaagtcttaaaaaagtcgtgaaggagacatcctacgaaatgatgatgcaatgcgtttccaggatgctcgctcaccctctacacgtgatcagcatgaggtgcatggtccagttcgttggaagggaagcgaagtatagtggagttctgtcgtccatcggaaagatcttcaaggaggaagggcttctcgggttctttgtggggttgatcccacatctcctcggcgatgtggtcttcctttggggctgcaacctgttggcccacttcatcaacgcatacctcgtggacgactctttttcacaggcgctggcaattcgctcttacacaaagttcgtcatgggcattgccgtgtcaatgttaacgtacccctttttgctggtgggggatctgatggcggtcaacaactgtggcctgcaggctgggttaccaccttactctccagtctttaagtcctggatccattgttggaagtacctttctgtgcaagtgagtaaacactggacagcagaagctttccccgtcctctgttatatattgcaactcaagtggttctgtgggtgctttatcgcgtgcaaggataaatggttccatggcatccaatactgtgaagagattctgggcatttataaggcatttaagtttagcagctacataatctccgagcgaatctag

SEQ ID NO: 303775 - DNA, 561 bp, Artificial Sequence
  derived and/or modified sequence
gctgtgtgtgtgccccacgtgggccccccaccagcctgccacctgaatgccctgcacggccctgtgtgtggcactggaggccaggtgcagctgagctgtggggccaccatccctggcagcagcgctgccatggtgccccactttggagtcatcaacgggaagctggcccacagccccaggctcatcatgtctggagtgctgagcagcatcggcaagatcttcaaggaggagggcctgctgggcttctttgtgggcctcatcccccacctgctgggagatgtggtgttcctgtggggctgcaacctgctggcccacttcatcaatgcctacctggtggatgacagcttcagccaggccctggccatccgcagctacaccaagtttgtgatgggcattgctgtgtccatgctgacctaccccttcctgctggtgggggacctgatggctgtgaacaactgtggcctgcaggccggcctgcccccctacagccctgtggccagcagcagcgaggccccagcctgcttctctgctggctgccaccaggaccacgccctgccctag

SEQ ID NO: 303776 - DNA, 765 bp, Artificial Sequence
  derived and/or modified sequence
atgagcaatgccctgagcacagtgacccggggctccatgaagaaggtgttccccccagatgaaattgagcaggtgagcaacaaggatgacatgaagaccagcctgaagaaggtggtgaaggagaccagctatgagatgatgatgcagtgtgtgtccaggatgctggcccaccccctgcacgtgatctccatgcgctgcatggtgcagtttgtgggccgggaggccaagtacagcggcgtgctgagcagcatcggcaagatcttcaaggaggagggcctgctgggcttctttgtgggcctcatcccccacctgctgggagatgtggtgttcctgtggggctgcaacctgctggcccacttcatcaatgcctacctggtggatgacagcttcagccaggccctggccatccgcagctacaccaagtttgtgatgggcattgctgtgtccatgctgacctaccccttcctgctggtgggggacctgatggctgtgaacaactgtggcctgcaggccggcctgcccccctacagccctgtgttcaagtcctggatccactgctggaagtacctgtctgtgcaggtgtccaagcactggacagctgaggccttccctgtgctgtgctacatcctgcagctgaagtggttctgtggctgcttcatcgcctgcaaggacaagtggttccacggcatccagtactgtgaggagatcctgggcatctacaaggccttcaagttcagcagctacatcatcagcgagcgcatctag

SEQ ID NO: 303777 - DNA, 561 bp, Artificial Sequence
  derived and/or modified sequence
gccgtgtgcgtgccccacgtgggccccccccccgcctgccacctgaacgccctgcatggtcccgtgtgtggcaccggcggccaggtacagctgtcctgcggggccacaatccccggcagctcagcagccatggtccctcatttcggcgtgatcaatggcaagctggcgcatagtccaagactgataatgagtggtgtgctgagcagtattggcaagatcttcaaggaagagggactgctgggtttcttcgttggcctgattccgcatttgttgggggacgtcgtgttcctgtggggctgcaacctgctcgcccattttattaatgcgtatttggtggatgactcgtttagccaggccttagcaatacggtcatacacaaagttcgtgatggggatcgccgtgagcatgttgacctacccttttcttttggttggggatctcatggccgtaaacaactgtggattgcaggccggtctccccccttactccccagtggctagttcatccgaagcgcccgcctgctttagcgctggctgccaccaggatcatgcgctaccatag

SEQ ID NO: 303778 - DNA, 765 bp, Artificial Sequence
  derived and/or modified sequence
atgagcaacgccctgagcaccgtgacccggggcagcatgaagaaggtgttccctcccgacgagatcgagcaggttagtaacaaggatgatatgaaaacttccttgaaaaaggtggttaaggagacaagttacgaaatgatgatgcagtgcgttagccggatgcttgctcaccccctgcacgtgataagcatgcgatgcatggtgcagtttgtgggaagagaagctaagtacagcggtgtccttagcagtattgggaaaatcttcaaggaggaaggcctcctggggttcttcgtaggccttatacctcacctacttggagatgtggtgttcttatggggatgcaatctgctcgctcatttcattaatgcatatttagtggacgactccttttctcaggcactcgccattcgctcttataccaaatttgtgatggggattgccgtcagcatgctgacatacccgtttttgcttgtgggggacctgatggctgtgaacaactgcggtctgcaggctggcttgcctccatatagcccagtgttcaagagctggattcattgctggaaatacctcagcgtgcaggtgtccaagcattggaccgccgaggcttttccagtgttgtgctatatcctccagctgaaatggttctgtggctgttttatcgcctgcaaggataaatggttccacggtattcagtactgcgaggagattctcggcatctacaaggccttcaaatttagtagttacatcatttctgagagaatctag

SEQ ID NO: 303779 - DNA, 561 bp, Artificial Sequence
  derived and/or modified sequence
gccgtgtgcgtgccacacgttggaccacctcctgcatgccacctgaatgcactccatgggcctgtgtgcggaacgggaggtcaggtgcagctgtcatgcggagccactattccaggcagttccgctgcaatggtgccccactttggcgtgataaacgggaagctcgcccactcaccgagactgattatgtcaggtgtgttgtctagcatcggcaagatcttcaaggaagagggcctgctcgggttttttgttggcttgataccacatcttctgggggatgtcgtattcctgtggggatgcaacttgctcgcccactttataaatgcgtatctggtggacgatagctttagccaagcattggctatcagaagttatactaagtttgtcatgggaatcgcagtctccatgctgacataccctttccttctggtgggcgatctgatggctgtgaacaactgcgggctacaagcaggcctgcccccatactctcccgtggcgtcatcttcggaggcaccagcatgcttttccgcaggttgccaccaggatcacgcactcccctag

SEQ ID NO: 303780 - DNA, 765 bp, Artificial Sequence
  derived and/or modified sequence
atgtccaacgctctatctactgtgactcgagggagcatgaagaaagtgtttcctccagacgagatcgaacaagtctctaataaggacgatatgaagacttccctgaaaaaggtcgtcaaggagaccagctacgagatgatgatgcagtgcgtgtcacgcatgctggctcatcccttgcacgtcataagcatgcgctgtatggtgcagttcgtgggaagagaggctaaatacagcggcgtattgtctagtattggaaagattttcaaggaggaaggactcctgggctttttcgtcggtcttatacctcacctgttaggcgatgtggtttttttatgggggtgtaacctgttggcccattttattaacgcttatctggtcgacgatagtttctctcaagcattagccatcagatcttataccaaattcgtcatgggcatcgccgtatcaatgctcacctacccctttctcctggtcggtgacctgatggcggtgaacaactgtggcctgcaagcgggactgccaccgtatagtcctgttttcaagtcttggatccactgctggaagtacttatccgttcaagtgtcaaagcactggaccgcagaagctttcccagtgctgtgctacatccttcaactgaagtggttttgcggttgctttatagcctgtaaagacaaatggtttcatggcattcagtactgcgaagagattcttggcatttataaggccttcaaattcagctcctatataatcagtgaacgcatctag

SEQ ID NO: 303781 - protein, 1117 aa, Artificial Sequence
  derived and/or modified sequence
MYRSSARSSVSSHRPKDDGGGGPRSGRSSGSSSGPARRSSPPPPPSGSSSRTPARRPRSPSGHRGRRASPSPPRGRRVSPSPPRARRGSPSPPRGRRLFPPGPAGFRGSSRGESRADYARDGRGDHPGDSGSRRRSPGLCSDSLEKSLRITVGNDHFCVSTPERRRLSDRLGSPVDNLEDMDRDDLTDDSVFTRSSQCSRGLERYISQEEGPLSPFLGQLDEDYRTKETFLHRSDYSPHISCHDELLRGTERNREKLKGYSIRSEERSREAKRPRYDDTVKINSMGGDHPSFTSGTRNYRQRRRSPSPRFLDPEFRELDLARRKREEEEERSRSLSQELVGVDGGGTGCSIPGLSGVLTASEPGYSLHRPEEVSVMPKKSILKKRIEVDIMEPSMQLESFSSSTSSSQDHPLYSGHPSLPLSGAIAAFASEIENKGTMVETALKEPQGNLYQWGPLPGIPKDNSPLREKFGSFLCHKDNLDLKAEGPERHTDFLLPHERASQDGSGFSRILSMLADSTSTQEKRRRSFPDIEDEEKFLYGDEEEDLKAESVPKPLGSSESEVMRQKASSLPSSAPAVKLESLEETNPEYAKIHDLLKTIGLDIGVAEISQLAARTQERLHGKKPSLRSSADRRSSVDRYFSADHCSSVDHRFSADRCSSVDHCFSADRRSSDPHRLESREAHHSNTHSPEVSHPHPPSPVDPYLLTKNSPPFLKSDHPVGHISGPEVVGSGFQSSVAVRCMLPSAPSAPIRLPHTAALSQFHMPRASQFAAARIPPNYQGPAIPPASFDAYRHYMAYAASRWPMYPTSQPSNHPVPEPHRIMPITKQATRSRPNLRVIPTVTPDKPKQKESLRGSIPAAQVPVQVSIPSLIRYNPEKISDEKNRASQKQKVIEEREKLKNDREARQKKMYYLRTELERLHKQQGEMLRKKRREKDGHKDPLLVEVSRLQDNIMKDIAELRQEAEEAEKKQSELDKVAQILGINIFDKSQKSLSDSREPTEKPGKAEKSKSPEKVSSFSNSSSNKESKVNNEKFRTKSPKPAESPQSATKQLDQPTAAYEYYDAGNHWCKDCNTICGTMFDFFTHMHNKKHTQGQFQKSSDFQKEGLQQTFLPPERQG

SEQ ID NO: 303782 - DNA, 3354 bp, Artificial Sequence
  derived and/or modified sequence
atgtatagatcttccgcccggtctagtgtgagtagtcatcgtcccaaagatgatggcggtggaggcccccgctcggggaggtccagcgggtctagtagcgggccggctcgacgcagctcgcccccaccacctccttctggctccagttcacgaacacccgccaggcggccacggagtcctagtggacatagggggcgacgtgccagccccagcccacctcgtggcaggagggtatccccctctccccccagagctagaaggggatcaccttccccaccacggggtagacgactttttccacccggtccagctggcttccgcggatcctctaggggggagtctcgcgcagactatgctcgagatggtaggggcgaccaccccggggacagcggcagccgcaggagatctcccgggctgtgtagtgattcactcgagaaatccctgcggatcacggtgggcaacgatcatttctgtgtgtctacccccgaacgtcgtcgactttctgaccggcttggctcaccggtggacaatcttgaggatatggacagagacgacttgacagatgacagtgtgttcacgcgaagcagccagtgttctcgcggactcgagcggtatatatcccaggaggagggtccactcagcccgtttctgggccagctggacgaggactatcgcacaaaagagacttttttacatcggagcgattattccccccatatttcttgtcatgacgagttgctcagggggactgagcggaaccgagaaaagctcaaaggctactcaatcaggtccgaggagaggagccgagaggccaaacggccccggtatgacgataccgtgaagattaattcaatgggtggagatcatccatcattcaccagtgggacaaggaactacagacaacggcgtcgcagcccatcaccacgattcttggacccagagtttagggaattagatctggccagaagaaagcgagaggaagaagaagaacgtagtaggtctctgagtcaggaactggtgggggttgatgggggcggcactggatgcagtatcccagggctgagcggagtcctaactgcttctgaaccaggatattcgttgcacaggccagaggaagtgagtgtcatgcctaaaaagagcatactgaaaaagaggatagaagttgacattatggagcccagtatgcaactcgagtctttttcaagttcaacttcaagcagccaagaccacccgctctattcaggccatccttctctgcctttgtctggagccattgctgctttcgcgagtgaaattgagaacaaaggcaccatggtcgagactgccctgaaggaaccccagggaaatctgtaccagtggggcccattgcccggaatccccaaggataattcgccccttagagagaaattcgggtcattcctgtgtcacaaggacaatttggacctaaaagcagagggaccggaacggcatactgactttttactgccccatgagagggcttctcaagacgggagtggattttccagaatcctgagcatgctcgccgactccaccagcacgcaagaaaagcgacgacgatcatttcctgatatcgaggatgaagagaagtttctgtacggagatgaggaagaggatcttaaagctgaaagcgtgcccaagcccttaggcagtagcgagagcgaagtcatgcggcagaaggctagctcgcttccgtcttctgccccagccgtgaagctggagtccctggaggagaccaacccggagtatgctaagatccacgatcttctgaagactatcgggctcgatattggcgttgctgaaattagccaactggccgcccgaacccaagaacgactccatggaaagaagccatcactgaggagctccgcagataggcgcagctccgtcgatcggtacttctccgcagaccattgcagcagcgtagatcaccgtttcagcgcagacaggtgctccagcgtggatcactgctttagcgctgaccggcggtcttccgaccctcacagactcgaaagccgggaggcccaccatagcaatacacattccccagaagtcagccatccccatccaccatctcccgtggacccatatttgctaacaaagaacagccctccatttctgaaaagcgatcatccagttggccacatcagcggaccagaggtggtcggatctggcttccaatcttcagttgccgtcaggtgcatgctgcccagcgcaccttcagctcctatccgtctcccccataccgctgccttatcccagttccacatgccgcgggccagtcaattcgccgccgcccggatacctccaaattatcaaggccctgccatcccacctgcctcttttgacgcttatcgtcactacatggcttatgccgccagcagatggccaatgtacccaacctcacaaccttccaaccacccagtgccggagcctcaccgtataatgccaattacgaagcaagccacaaggtcgcggccaaatctaagagtcatccctactgttaccccagataaacctaaacagaaagagtccctgagaggatccattccggccgcccaggtgcccgttcaggttagcatcccttctttaattcggtacaaccctgagaagatatccgacgaaaagaatagagcttctcagaagcagaaggtgatcgaggagagagagaaattgaagaatgacagggaagccagacagaaaaagatgtactatctccggactgaactggaacgcctgcacaaacagcagggagaaatgctccggaaaaagcgccgtgagaaggacggccacaaagacccccttctggtcgaggtctctagactgcaggataacatcatgaaagatatcgcagagctccggcaggaggctgaggaggccgagaagaagcagtccgagcttgataaagtggctcagatcctgggtatcaatatcttcgataagtctcagaaaagcctgagcgatagtcgtgaaccaactgaaaaaccaggtaaggccgaaaaatcaaaaagcccagaaaaagtgtcttcgttctcaaattcaagcagcaacaaggaatccaaggtgaacaacgaaaaatttagaaccaagtctccgaagccggcagagtctcctcagagtgctacaaagcagctcgaccagccgaccgcagcatatgaatattatgacgccggcaatcattggtgtaaggattgcaataccatctgtggaacaatgtttgacttcttcactcacatgcataataaaaagcacacgcaaggacaattccagaagagctccgattttcaaaaagagggacttcagcagacattcctcccaccggagaggcagggttag

SEQ ID NO: 303783 - DNA, 3354 bp, Artificial Sequence
  derived and/or modified sequence
atgtaccgcagcagcgcccggagctctgtgagcagccaccggcccaaggatgatggcggcggcggccccaggagcggccgcagcagcggcagcagcagcggccctgcccggcgcagcagccccccacctccacccagcggcagcagcagcaggaccccagcccggcggcccaggagccccagcggccaccggggccggcgggccagccccagccccccccggggccggcgggtgagccccagccccccccgggcccggcggggcagccccagccccccccggggccggcggctcttccccccaggccctgctggcttccggggcagcagcagaggagagagcagagctgactatgccagagatggccgcggggaccaccctggggacagcggcagcagaagaagaagccctggcctgtgcagcgacagcctggagaagagcctgcgcatcaccgtgggcaatgaccacttctgtgtgtccaccccagagcggcggcggctgagtgaccggctgggcagccctgtggacaacctggaggacatggacagagatgacctgacagatgacagcgtcttcaccaggagcagccagtgcagccggggcctggagcgctacatcagccaggaggagggccccctgagccccttcctgggccagctggatgaggactaccgcaccaaggagaccttcctgcacagaagtgactacagcccccacatcagctgccatgatgagctgctgcggggcacagagaggaaccgggagaagctgaagggctacagcatccgctctgaggagaggagccgggaggccaagaggcccaggtatgatgacacagtgaagatcaacagcatgggcggggaccaccccagcttcaccagcggcaccaggaactaccggcagaggagaagaagccccagcccccgcttcctggaccctgagttccgggagctggacctggcccggaggaagcgggaggaggaggaggagaggagccgcagcctgagccaggagctggtgggcgtggatggcggcggcaccggctgcagcatccctggcctgtctggagtgctgacagccagcgagcccggctacagcctgcacaggcctgaggaggtgtctgtgatgcccaagaagagcatcctgaagaagagaattgaggtggacatcatggagcccagcatgcagctggagagcttcagcagcagcaccagcagcagccaggaccaccccctgtacagcggccaccccagcctgcccctgagcggggccatcgccgcctttgccagcgagattgaaaataaaggcaccatggtggagacagccctgaaggagccccagggcaacctgtaccagtggggccccctgcccggcatccccaaggacaacagccccctgcgggagaagtttggcagcttcctgtgccacaaggacaacctggacctgaaggccgagggccctgagcggcacacagacttcctgctgccccatgagcgggccagccaggacggcagcggcttcagccgcatcctgtccatgctggccgacagcaccagcacccaggagaagagaagaagaagcttcccagacattgaagatgaggagaagttcctgtatggagatgaggaggaggacctgaaggccgagagcgtgcccaagcccctgggcagcagcgagagcgaggtgatgaggcagaaggccagcagcctgcccagcagcgccccagctgtgaagctggagagcctggaggagaccaacccagaatatgccaagatccatgacctgctgaagaccatcggcctggacattggagtggccgagatcagccagctggccgcccggacccaggagcggctgcacggcaagaagcccagcctgcggagcagcgctgaccggcgcagctctgtggaccgctacttctctgctgaccactgcagctctgtggaccaccgcttctctgctgaccgctgcagctctgtggaccactgcttctctgctgaccggcgcagcagtgacccccaccggctggagagccgggaggcccaccacagcaacacccacagccctgaggtgagccacccccacccccccagccctgtggacccctacctgctgaccaagaacagcccccccttcctgaagagtgaccaccctgtgggccacatcagcggccctgaggtggtgggcagcggcttccagagctctgtggccgtgcgctgcatgctgcccagcgcccccagcgcccccatccggctgccccacacagctgccctgagccagttccacatgccccgggccagccagtttgctgctgcccgcatcccccccaactaccagggccctgccatccccccagccagctttgatgcctaccgccactacatggcctatgctgccagccgctggcccatgtaccccaccagccagcccagcaaccaccctgtgcctgagccccaccgcatcatgcccatcaccaagcaggccaccaggagccggcccaacctgcgggtcatccccaccgtgaccccagacaagcccaagcagaaggagagcctgcggggcagcatcccagctgcccaggtgcctgtgcaggtgtccatccccagcctcatccgctacaaccctgagaagatcagtgatgagaagaacagagccagccagaagcagaaggtgattgaggagcgggagaagctgaagaatgaccgggaggcccggcagaagaagatgtactacctgaggacagagctggagcggctgcacaagcagcagggcgagatgctgaggaagaagagaagagagaaggatggccacaaggaccccctgctggtggaggtgtcccggctgcaggacaacatcatgaaggacattgctgagctgcggcaggaggccgaggaggccgagaagaagcagagcgagctggacaaggtggcccagatcctgggcatcaacatctttgacaagagccagaagagcctgagtgacagccgggagcccacagagaagccaggcaaggccgagaagagcaagagccctgagaaggtgagcagcttcagcaacagcagcagcaacaaggagagcaaggtgaacaatgagaagttccgcaccaagagccccaagccagctgagagcccccagagcgccaccaagcagctggaccagcccacagctgcctatgagtactatgatgctggcaaccactggtgcaaggactgcaacaccatctgtggcaccatgtttgacttcttcacccacatgcacaacaagaagcacacccagggccagttccagaagagcagtgacttccagaaggagggcctgcagcagaccttcctgcccccagagcggcagggctag

SEQ ID NO: 303784 - DNA, 3354 bp, Artificial Sequence
  derived and/or modified sequence
atgtaccggagcagcgcccggagcagcgtgagcagccaccggcccaaagatgacgggggtggaggaccgcgtagtggtcgttcctccggttcaagctccgggcccgcccgaagatccagtccccccccaccaccctcaggatcaagcagtcgtacacccgccaggcggcctcgatctccatctggacaccgcggccggagggcaagcccaagcccacctagaggccgaagagtgtctcctagcccgcctagggcccgtagaggcagcccttcccccccgcgaggtcggcgtttgttcccgcccggccctgcgggattccgaggcagctcacggggagagtctcgcgctgactacgctagggacggcagaggcgaccacccgggagactccggatctagaaggaggtctcctggcctctgtagcgacagccttgagaaatcgttaagaatcaccgttggaaacgatcacttctgtgtctcaacccccgaacgcagaaggctgagcgaccgacttggatctccagtggacaacttagaggacatggatcgcgacgacttgacagacgattccgtgtttacccgctcctcccaatgctcacggggcctggaaagatacatatcacaggaggagggcccattgtctccttttctcggccaactagacgaagactaccgcacgaaagagaccttcctgcatcgctccgattactcgccacacatctcctgccatgacgagcttctgagggggacggaaaggaaccgagaaaaactgaaaggatattcaatccgcagtgaggagcgctctcgtgaggctaaacgtcctagatacgacgatacagtgaagattaactccatgggaggggaccaccccagctttacatctggaacccggaattataggcagcggagacggagcccctccccccgtttcctggatcccgagttccgcgagctggaccttgctcgtcgcaagagagaggaggaggaggaaagatctagaagtttgagccaggagttagtgggcgttgacggtggcggcacagggtgctcaatccctggcttatctggagttctcactgcttccgagccaggctattccctgcacagacctgaggaagtcagcgtaatgccgaaaaagtcaatcctgaaaaagaggatcgaagtggacataatggagccaagcatgcagttagagagcttttctagctcaacatctagcagccaggaccacccactctatagcggccatcctagcctgcctctgagcggtgccatagccgccttcgctagcgagatcgagaacaaaggcaccatggtggagaccgcacttaaggagccacaggggaacctttaccagtgggggcccttacctggtattccgaaagataactcacctctcagggagaagttcggcagctttctctgccacaaggacaacctcgatctcaaggccgagggacctgagagacacactgactttctgctcccacatgagcgcgcttctcaggacgggtctggattctcgcggattttaagcatgcttgccgactctactagtactcaggagaaaagacggaggtccttccccgacattgaggacgaagagaaatttctgtacggggacgaggaggaagatctgaaggccgaaagtgtgccaaagcctttgggcagttctgaaagcgaggtcatgcgccaaaaggcaagtagcctccctagctctgccccagctgtgaagcttgagagcttggaggaaacgaatcccgaatacgctaaaatccatgacctccttaagactatcgggcttgacatcggggtggcagaaataagtcagctggccgctaggacccaagagaggttgcatggtaagaaacctagccttaggagttcggccgatcggcggagcagcgtcgaccgatatttctcagctgatcactgttcatccgtcgatcaccgattttcggcagaccgctgctccagtgtggaccactgcttcagtgctgatcgcagatcgagcgatcctcacagactcgagagtcgggaggcccaccactcaaatacgcactccccagaggtgtcccatccccatccaccaagcccagtcgacccttatctccttaccaaaaattccccgccatttttgaaatctgaccaccctgtgggacacattagcggtcccgaagtcgtgggaagtggatttcagtctagtgtggccgtgcgatgtatgcttccatcagcccccagcgctccaattcgactcccccataccgccgccttgagccagttccatatgccccgggcctcgcagtttgccgccgcaaggataccgcccaactaccaggggccagcaatcccaccggcctcattcgacgcttatagacactacatggcatatgccgcgtcacgatggcccatgtatcctacgagccagccttccaaccacccggtgcctgagccccacaggattatgcctatcaccaaacaggccacccgatcccggcccaacttaagggtgattcctacagtaaccccagataagcccaaacaaaaggagagcctgcgcggaagtataccagccgcgcaggttcccgtacaggtgtcaattcccagtctcattagatacaatcctgagaaaatttcagacgagaaaaacagagcgtctcaaaagcagaaagttattgaggaacgagaaaagctaaagaatgaccgagaggcacgccagaagaagatgtactatttaagaacagagctagaacgtttacataagcagcagggggagatgctgcgtaaaaagcggagggagaaggacggacataaggatccactgctggtcgaggtgtctcgcctccaggacaatatcatgaaagacatcgccgaactgaggcaagaggctgaggaagccgaaaagaaacagtcagaactggataaagttgctcaaatactgggtattaatatctttgacaaaagccaaaagtccttatccgacagtagggagcctaccgagaagcccggcaaagcagagaagtccaagagtcctgaaaaagtgtcctcgttcagtaactcctcatctaacaaagagagcaaggttaataatgagaagtttaggacgaaaagccctaaacccgcagagtcccctcagtctgctacaaaacagctggaccaacctacagccgcctacgaatactacgacgcagggaatcactggtgcaaagattgtaatactatctgtggcacgatgttcgacttcttcacccatatgcataacaagaaacatacgcaaggccaattccagaaatcgtccgattttcagaaagaagggttgcagcaaacatttttgccacccgaacggcagggatag

SEQ ID NO: 303785 - DNA, 3354 bp, Artificial Sequence
  derived and/or modified sequence
atgtatagaagctcagcacggagcagtgtcagttcgcatcgacccaaagacgacggaggcggaggacccagatcgggacgatcctcgggttcctcctcaggaccagccagacgcagtagcccgcctccccctcccagcgggtcctcctccaggactcccgcacgcagacccaggtcaccaagtggacatagaggacgacgcgcttctcccagccccccacgcggacgccgagtctccccttccccaccgagagccaggagagggtctccctcgcctcctcgtgggagaaggctcttcccccctgggcctgcaggtttccgagggagtagtagaggggaaagcagagccgattacgcccgagatggaagaggggaccatcccggagactccgggtcacgcaggcggagcccgggactgtgttctgatagcctggagaaatctctcaggataacagtgggtaatgatcacttttgcgtgagtactcctgagcggcgtcgactgtccgataggctgggaagtcctgtcgacaacttggaagatatggaccgtgacgacttaactgacgactccgtcttcacgcggtctagccagtgctccagggggctagaacggtacatttcacaggaagagggtccgctgtcgccgttcctgggccagcttgacgaggactaccgtaccaaagagacctttttgcatcgctccgattacagtccacatatctcatgccacgatgagttacttagaggcaccgagaggaacagagagaaactgaaaggatactctatcaggtccgaggagcggtcaagagaagcaaagcgcccaagatatgacgacaccgtcaaaattaattcaatggggggagatcaccctagttttactagtgggactagaaattaccgacagagacggagatctccttccccacgcttcctggacccggaatttagagagttggacttggctcgtaggaaacgagaggaggaggaagagcggtcacgctcattatcgcaggagctcgttggtgtagatggtgggggaacaggatgcagtattcctggtctatccggcgttctgactgcttcagaaccgggttattcgctacaccgccctgaggaagtttcagtgatgccaaagaagtcaatcctgaaaaagcggatcgaggttgacattatggagccatctatgcagctggaatccttttccagctccacaagttcctcacaagaccaccctctctatagcgggcacccatctctgccccttagcggggcaattgccgctttcgctagcgaaattgagaacaagggcaccatggttgaaaccgccttgaaggagcctcaggggaacctttaccagtggggacccttaccaggtattcccaaagataattccccactgagagagaagttcggctcatttctatgtcacaaggacaacctggacctaaaggcggaaggcccagaaaggcacacggactttctgcttccgcatgagagggcctcccaggacggctccggcttcagtagaattttaagcatgctcgcagactcaacctccactcaggaaaaacgtaggagatcctttcctgacattgaagatgaggaaaagtttctgtacggcgatgaggaagaggaccttaaagctgaaagcgtgccaaagcctctcggcagttccgagagcgaagtgatgaggcagaaagctagcagcctccccagctccgcccctgcggtcaagctagagtccctcgaggagacaaatcccgagtacgccaagatacatgacctactgaaaactattggtctggatatcggggtcgcagagatctctcaattagccgctaggactcaggaaagactgcatggtaaaaagccatcattacggagctctgcagacaggaggtccagtgttgatcgctatttctcagccgaccactgctcatcagtggaccacaggtttagcgctgataggtgctccagcgttgaccattgcttttcagccgacaggcggtcgtctgatccccaccgccttgaatctcgggaggcccaccatagtaatacacattcccctgaggtgtcacatcctcatccaccttctccggtcgatccttacctgttgaccaagaatagcccaccttttctgaagtcagatcacccagttggccatatttccgggccagaagtggttgggagcgggttccagtcatccgtcgccgtaaggtgcatgctgcctagtgccccaagtgctccgatacgactgcctcacaccgccgcactctcgcagttccatatgccacgtgcttctcagtttgccgctgctcgaatcccgccaaattaccaagggccagcgattccaccagccagtttcgacgcatataggcattacatggcatatgctgccagtcgctggcctatgtaccccacttcacagccaagcaatcacccggttcctgagccacatagaattatgcccatcacaaaacaggctactcgttcacgacctaacttgagagttatcccaacagttacccctgataagcctaagcagaaagaaagtcttcggggttccatccccgcagcccaggtgcccgtgcaggtgtctatcccatctctcatcagatacaacccagaaaaaatctctgacgagaagaaccgcgctagccagaaacagaaagtgatcgaggaaagagaaaaacttaagaacgaccgcgaagccaggcaaaaaaaaatgtactatctgcgaactgaactcgagcgcctgcacaagcagcaaggggaaatgctccggaaaaagcgcagggagaaggacggtcataaagacccacttttggttgaagtttcacgattgcaggacaacattatgaaggacatagccgaactgagacaggaagccgaagaggccgagaagaagcagtcagagctggataaagttgctcagattttgggcataaacatctttgacaagtctcagaaaagtttgtctgatagtcgcgaaccgacggagaaacctgggaaggcagagaaatctaaatcccccgaaaaagtaagctcattcagcaactcctccagcaataaggaatcaaaagtaaacaatgagaaattccggacaaaaagccctaagccagcagagtcaccacagagcgcaacaaagcagctcgatcagcctaccgccgcatatgagtactatgacgccggaaaccactggtgcaaggactgcaataccatctgcgggaccatgttcgacttcttcacgcacatgcacaataagaagcatacacagggccaattccagaaaagctccgacttccaaaaagagggcctccagcagacctttctcccgccagagcgacaggggtag

SEQ ID NO: 303786 - DNA, 3432 bp, Artificial Sequence
  derived and/or modified sequence
ctgcggcggcgcgctccgagcctgcgtctagggcgcccccgggtcagagctgtcgccgtggccgccgctgcaagaaccatgtaccgcagcagcgctcgctcctccgtctcttcccaccggcctaaagacgacggcgggggcggcccgcgcagcggccgcagctctggctcctcctcaggcccggctcgccgcagctcaccgccgcctccgccctccggctcctcgtcgcggaccccggctcgccgaccccgctcgccctcagggcaccgcggccgccgggcctcgccgtccccgccacggggtcgtcgcgtctccccgtccccgcctcgggcccgtcgcggctccccgtcgccaccgcggggccgacgactcttcccgccgggcccggccggcttcagaggcagcagccggggggagtcccgcgccgactatgcccgggacggccgcggagaccatccaggcgacagcggcagccggagacgctctcctggtctgtgttctgactctttggaaaagagcttaaggatcactgttggcaatgaccacttctgtgttagcacaccagaacggcgacggcttagtgatcggctggggtcaccagtggataatctggaagacatggacagggatgacctgactgatgattctgtcttcactcgaagctcccagtgctctcggggtcttgagcgatatatttcccaggaggaagggcctctcagtcccttcttgggacaacttgatgaggactaccgaacaaaagaaactttcctgcatcgatctgattatagtccccatatcagttgtcatgatgagctgttgcggggaacagaacggaatcgagaaaaactcaaaggctactccatacgatctgaagaaaggagccgggaggccaaaagaccccgttatgatgacacagtgaagataaacagcatgggaggggatcacccaagttttacatcaggaactcgcaactatcgacagcgtagaagaagcccaagtcctaggtttctcgaccctgagtttcgagaactggatcttgccagacgaaagcgagaggaagaggaggagcgaagtaggagcttgagtcaggagctggttggagttgatggtggtggtactggctgttccatccctggattgtcaggtgtcctaacagcatcggagccaggatattctttgcatcggcctgaggaagtatctgtgatgcccaagaaatccattttgaagaagcggattgaggtggacataatggagccctccatgcagcttgagagtttttccagcagtaccagctccagccaggatcaccctctctactctgggcacccatcccttccactaagtggtgctattgctgcttttgcctcagagattgaaaacaaggggactatggtagagactgccttgaaggaacctcagggcaacctctaccaatggggtccccttcctgggattcccaaagacaacagtcctctcagagaaaaatttggaagttttctatgccacaaggataatttggatttgaaggctgagggacctgagcgacacacagacttcctgctgccccatgagagagctagccaggatggcagtggtttttcccgcattctgagcatgttggctgattctaccagtacacaggaaaaaaggcgacgtagctttcccgacattgaagatgaggagaaatttctctatggggatgaagaagaggatttaaaggcagaatccgtaccaaagccccttgggagctctgagagtgaagttatgaggcagaaggcaagctccctgccgtcttcagctccagctgtaaagctagaatcactagaagagaccaatccagaatatgcgaagatccatgacttgctcaagacaatagggctggatattggagtagcagagattagtcaattggctgcacgcacccaggaacgacttcatggcaagaagccatcattacgctcctcagctgaccgccgttcctcagttgaccgatacttttcagctgaccactgttcctcagttgaccaccgcttctcagctgaccgctgttcctcagttgaccactgcttctcagctgatcgacgttcctcagatccccacagactagagagcagggaggcacatcatagcaatacccactctccagaggtgtcccatccacacccaccttctcctgtggatccttacctgctcacaaaaaacagccctccattcctaaagtctgaccatccagtgggtcatatttcaggaccagaggtggttggtagtgggtttcagtcatctgttgcagtcaggtgcatgttgccatcagccccatctgccccaattagacttccacacactgctgctttatctcagtttcacatgccaagggcctctcagtttgctgcagctcggatacctccgaactaccagggacctgccattccccctgcctcttttgatgcctataggcactacatggcatatgcagcctccagatggcccatgtatcccacctctcaaccgtcaaaccaccctgtacctgaaccacacaggataatgccaataaccaaacaagctactcgtagccgtcccaatcttcgtgtgatccccactgtgactcctgataagcctaagcagaaagagtctctgcgaggctcaattcctgcggcccaagtgcctgtccaggtgtccattccatcactcataagatataatccagagaagatctctgatgagaagaaccgtgcttcccagaagcaaaaggttattgaagagagggaaaaactaaagaatgaccgggaagcccgccagaagaagatgtactatcttaggaccgagttagagcggcttcataaacaacaaggagaaatgctgcgcaagaaacgaagggagaaggatggccacaaagatcctctcttggtggaggtgagtcggcttcaggataacattatgaaggacattgcagagctacggcaagaggcagaagaggcagaaaagaagcaatctgaactggacaaagtggctcagatcttgggaattaacatcttcgataaatcccagaagtctttaagtgacagtagagagcctacagagaagcctgggaaagcagaaaaatctaagagcccagaaaaagtgtcatcgttctcaaactcctcctccaacaaggaatcaaaagtaaacaatgagaagtttcgtactaagagccccaagcctgccgaaagcccccagtcagccactaagcagttggatcagcccactgctgcttatgagtattatgatgctggcaatcactggtgcaaagactgcaacaccatctgtgggaccatgtttgatttcttcactcatatgcacaataagaagcacacacaggggcaattccaaaagtcttcagatttccaaaaggaaggactgcagcagacatttctgcccccagaaaggcagggatag

SEQ ID NO: 303787 - DNA, 3354 bp, Artificial Sequence
  derived and/or modified sequence
atgtacagaagcagcgccagaagcagcgtgagcagccacagacccaaggacgacggcggcggcggccccagaagcggcagaagcagcggcagcagcagcggccccgccagaagaagcagccccccccccccccccagcggcagcagcagcagaacccccgccagaagacccagaagccccagcggccacagaggcagaagagccagccccagcccccccagaggcagaagagtgagccccagcccccccagagccagaagaggcagccccagcccccccagaggcagaagactgttcccccccggccccgccggcttcagaggcagcagcagaggcgagagcagagccgactacgccagagacggcagaggcgaccaccccggcgacagcggcagcagaagaagaagccccggcctgtgcagcgacagcctggagaagagcctgagaatcaccgtgggcaacgaccacttctgcgtgagcacccccgagagaagaagactgagcgacagactgggcagccccgtggacaacctggaggacatggacagagacgacctgaccgacgacagcgtgttcaccagaagcagccagtgcagcagaggcctggagagatacatcagccaggaggagggccccctgagccccttcctgggccagctggacgaggactacagaaccaaggagaccttcctgcacagaagcgactacagcccccacatcagctgccacgacgagctgctgagaggcaccgagagaaacagagagaagctgaagggctacagcatcagaagcgaggagagaagcagagaggccaagagacccagatacgacgacaccgtgaagatcaacagcatgggcggcgaccaccccagcttcaccagcggcaccagaaactacagacagagaagaagaagccccagccccagattcctggaccccgagttcagagagctggacctggccagaagaaagagagaggaggaggaggagagaagcagaagcctgagccaggagctggtgggcgtggacggcggcggcaccggctgcagcatccccggcctgagcggcgtgctgaccgccagcgagcccggctacagcctgcacagacccgaggaggtgagcgtgatgcccaagaagagcatcctgaagaagagaatcgaggtggacatcatggagcccagcatgcagctggagagcttcagcagcagcaccagcagcagccaggaccaccccctgtacagcggccaccccagcctgcccctgagcggcgccatcgccgccttcgccagcgagatcgagaacaagggcaccatggtggagaccgccctgaaggagccccagggcaacctgtaccagtggggccccctgcccggcatccccaaggacaacagccccctgagagagaagttcggcagcttcctgtgccacaaggacaacctggacctgaaggccgagggccccgagagacacaccgacttcctgctgccccacgagagagccagccaggacggcagcggcttcagcagaatcctgagcatgctggccgacagcaccagcacccaggagaagagaagaagaagcttccccgacatcgaggacgaggagaagttcctgtacggcgacgaggaggaggacctgaaggccgagagcgtgcccaagcccctgggcagcagcgagagcgaggtgatgagacagaaggccagcagcctgcccagcagcgcccccgccgtgaagctggagagcctggaggagaccaaccccgagtacgccaagatccacgacctgctgaagaccatcggcctggacatcggcgtggccgagatcagccagctggccgccagaacccaggagagactgcacggcaagaagcccagcctgagaagcagcgccgacagaagaagcagcgtggacagatacttcagcgccgaccactgcagcagcgtggaccacagattcagcgccgacagatgcagcagcgtggaccactgcttcagcgccgacagaagaagcagcgacccccacagactggagagcagagaggcccaccacagcaacacccacagccccgaggtgagccacccccacccccccagccccgtggacccctacctgctgaccaagaacagcccccccttcctgaagagcgaccaccccgtgggccacatcagcggccccgaggtggtgggcagcggcttccagagcagcgtggccgtgagatgcatgctgcccagcgcccccagcgcccccatcagactgccccacaccgccgccctgagccagttccacatgcccagagccagccagttcgccgccgccagaatcccccccaactaccagggccccgccatcccccccgccagcttcgacgcctacagacactacatggcctacgccgccagcagatggcccatgtaccccaccagccagcccagcaaccaccccgtgcccgagccccacagaatcatgcccatcaccaagcaggccaccagaagcagacccaacctgagagtgatccccaccgtgacccccgacaagcccaagcagaaggagagcctgagaggcagcatccccgccgcccaggtgcccgtgcaggtgagcatccccagcctgatcagatacaaccccgagaagatcagcgacgagaagaacagagccagccagaagcagaaggtgatcgaggagagagagaagctgaagaacgacagagaggccagacagaagaagatgtactacctgagaaccgagctggagagactgcacaagcagcagggcgagatgctgagaaagaagagaagagagaaggacggccacaaggaccccctgctggtggaggtgagcagactgcaggacaacatcatgaaggacatcgccgagctgagacaggaggccgaggaggccgagaagaagcagagcgagctggacaaggtggcccagatcctgggcatcaacatcttcgacaagagccagaagagcctgagcgacagcagagagcccaccgagaagcccggcaaggccgagaagagcaagagccccgagaaggtgagcagcttcagcaacagcagcagcaacaaggagagcaaggtgaacaacgagaagttcagaaccaagagccccaagcccgccgagagcccccagagcgccaccaagcagctggaccagcccaccgccgcctacgagtactacgacgccggcaaccactggtgcaaggactgcaacaccatctgcggcaccatgttcgacttcttcacccacatgcacaacaagaagcacacccagggccagttccagaagagcagcgacttccagaaggagggcctgcagcagaccttcctgccccccgagagacagggctag

SEQ ID NO: 303788 - DNA, 480 bp, Artificial Sequence
  derived and/or modified sequence
atgcaccagacccacgccatccagaggctggaggtgctgcccagcttcagcaatgaaagccccaccagccgggagaccagcgagagctggaccaaccaggatgacatcttctacgcctatgcctccatgagccctggagctgagcaccggggcaccacccagctgctgcgcttccagctggcccccatcaagaagctggagggcagcctgcagacccacttcctgctgagcagcctgcaccccaggatgaccttccctggccgggccggcggcggggaggccggcagccggcccccccggcggccctgggccggcatcctgatcctgcagctgcccagcacccggggcggccgccgcagcggccacggggctgtgcgctcctggggcccctggaaggtggtggccgagcagcctgtgggcggcacagaccccccagcccatggaggccggggccggcccagccccaatgaaaacacctag

SEQ ID NO: 303789 - DNA, 1737 bp, Artificial Sequence
  derived and/or modified sequence
atgctgctgctgctgctgctggcccccctgttcctgcggccccccggagccggcggggctcagacccctaatgccacgtccgaaggctgccagattattcaccccccatgggagggcggaattcgatatcggggattgacccgggaccaggtaaaagccattaattttttgccggttgattacgagattgagtatgtatgccggggagagagggaggtagtcggccctaaggtgcgcaaatgtctggcaaatgggtcatggacagacatggacaccccttcccggtgtgttaggatctgctccaaatcatacctgacgctggagaatggcaaagttttcttgacgggtggggacctccctgctcttgacggagccagggtggactttaggtgcgaccctgatttccacctggtcggctcctcacgatctatctgttctcaggggcagtggtctactcccaagccccactgtcaggtgaacaggactcctcatagcgaacgaagagcagtctacattggagctctgttccctatgtctgggggttggccgggtggccaggcctgccaacccgccgttgaaatggccctggaagacgtaaattctcgccgggacatccttcctgattacgagctgaaattgatccatcacgactctaaatgcgacccaggtcaggccactaaatacctctacgaacttttatacaacgaccccattaagatcatactaatgccagggtgttcatcagtgagtacccttgtggccgaggccgccagaatgtggaatttgattgtgctgtcctacggatcctcatcgcctgctctctccaatcgacagcggtttcctacattttttcgtactcatccttcggccacccttcacaacccaactcgggtcaagctgtttgagaagtggggatggaaaaagattgctactatacagcagacaaccgaagtatttacgtcaacgctggacgatctggaagaacgggtgaaggaggccggtatagaaatcacattcagacaaagcttcttctcagaccctgctgtgcctgtgaagaacttaaagaggcaggacgcccggataatcgtcggccttttttacgaaaccgaagccagaaaagttttttgtgaggtctataaggaacggctgttcggcaaaaagtacgtatggtttctgattggctggtatgccgacaattggtttaagatttacgatccgagcatcaactgtactgtggatgaaatgacagaggcagtggaaggccacattacaactgagattgtgatgttgaatccggcaaatacccggtccatatcaaatatgacctcccaggaattcgtggagaagctgaccaagagactcaagcgccatcctgaagagacaggcggctttcaggaggcacctctggcctacgatgcgatatgggccctggccctggcactcaataagacaagcggaggcggaggacgatcaggcgttagactggaagactttaactacaataatcaaacaatcactgaccagatctacagggccatgaacagtagttcattcgaaggagtgtccggccacgttgtcttcgatgcttccggaagccggatggcgtggacactgattgaacagcttcagggcgggtcatataagaagatcgggtattacgacagtacaaaggatgatctgtcctggagtaagaccgacaaatggatcgtcatatcccgaacccattctccgacttag

SEQ ID NO: 303790 - DNA, 1737 bp, Artificial Sequence
  derived and/or modified sequence
atgctgctgctgctgctgctggcccccctgttcctgcggccccccggggctggcggcgctcaaaccccgaacgccacctcagaaggctgtcagatcattcacccgccgtgggagggtggcatacgttaccgcgggctcacacgcgatcaggttaaggccataaacttcctgcccgtggactacgaaattgaatatgtttgcagaggcgagcgggaggtggtcggtcccaaggtgaggaaatgtctggccaacgggtcgtggaccgatatggacaccccgtcacggtgtgtgcggatctgctctaagtcttacctgacccttgagaacggaaaggtttttctgaccggaggcgatttacctgctctggacggagctcgcgttgacttccgttgtgatcccgattttcacttggtgggctctagtcgatctatttgttcccaggggcagtggagcacacccaagcctcattgtcaggttaaccgcactccccacagtgagagaagagccgtgtacatcggggcccttttccctatgagtgggggctggccaggagggcaggcctgccagcctgccgtggagatggctttggaagatgtgaatagccgccgcgatatcctgcccgactacgagctaaagctcatccaccacgatagtaagtgtgatccaggtcaggccaccaaatatctctacgaactcctgtataatgaccccataaagattattctaatgccaggctgttccagtgttagtacactggtcgccgaggccgccagaatgtggaacttgattgtgctgtcttatggctcgtcatcacctgccctaagcaataggcagcgcttcccaacctttttccgtacccatcccagtgccacactgcataacccaactcgagtgaaactctttgaaaaatggggttggaaaaaaatcgcgacaatccagcagactacggaagtcttcacctcgactcttgatgacctggaagagcgagtgaaggaagccggcatcgagatcactttccgacagagcttcttctcggatcctgctgtgcccgtgaagaatctcaaacggcaggacgctagaatcatcgttggcctgttttacgagacagaggcacgtaaggtcttttgtgaggtatacaaggagagactcttcggcaaaaaatacgtgtggtttcttattggctggtatgccgacaattggtttaaaatatatgacccaagtatcaattgtacagtggacgagatgacagaggctgtggaaggccacatcaccacggagatcgtcatgcttaatcctgcaaatacccgaagcatctcaaacatgacatcacaggagttcgttgaaaagctaacaaagcgtctcaaacggcatcccgaggaaactggcggcttccaagaggcccctcttgcctacgacgcaatctgggccctggcactcgcactcaacaagacttctggtggaggtgggcggtctggcgtgcgactggaagattttaattataacaaccagaccatcaccgatcagatttacagagcgatgaactcgtcttctttcgagggagtttctggccatgtggtgtttgacgcttccggctctagaatggcttggacgctgatcgagcagcttcaggggggctcctacaaaaaaatcggctattacgactccactaaagacgatctgtcatggtcaaaaacagacaagtggatcgtcatctcgaggacacacagccctacctag

SEQ ID NO: 303791 - DNA, 1737 bp, Artificial Sequence
  derived and/or modified sequence
atgctgctgctgctgctgctggcccccctgttcctgcggccccccggcgcaggtggggcacagacaccaaacgcaacgtccgaagggtgccagatcattcaccccccctgggagggcgggatacgctaccgaggacttactagagaccaagtcaaagccattaactttttgccagtggactatgaaatcgaatatgtttgcaggggagagcgggaggtcgtggggcctaaggtgaggaaatgcttggccaacggaagttggactgatatggacactcccagcaggtgcgtgcgaatctgttctaagagttatctgaccttggaaaacgggaaggtgttcctgaccggaggagatttgcccgctcttgatggagctagagtggactttaggtgtgaccccgatttccacttagtcggctcttctagatccatttgcagtcagggccagtggagtacacctaagccacactgtcaggtaaatcggactccccattctgagcggagagccgtctacataggcgctttgttccctatgtcaggaggatggcctggcggccaagcttgtcagccagctgtcgagatggctctggaggatgtgaactctcgccgagatattctgcctgattacgagcttaagcttatccaccacgattccaagtgtgaccccggccaggccacaaagtacctctacgaactcctgtataatgaccccatcaaaattatcctgatgcccggatgctcaagcgtatctactctcgtcgctgaggcagctcggatgtggaaccttatcgttctgagctatggttcctcatctcccgccctgagcaatagacaacggttcccgaccttctttaggacccatccttccgccacccttcacaatcctacccgggtcaagctgttcgagaagtggggatggaaaaaaatcgcgactattcagcaaaccactgaagtctttacttctaccctggatgacttagaggagcgcgtgaaagaggcaggaatcgaaataacgttcagacagagcttcttcagtgaccccgccgttcctgtgaaaaaccttaagcggcaggatgctaggataatcgtggggctcttttacgagacagaagctcgaaaggtgttctgcgaggtgtataaggagagactcttcggcaagaaatatgtgtggtttctaataggctggtacgcagacaactggttcaagatatacgacccttccataaactgcacagttgatgaaatgacagaagctgtggaggggcacattactactgaaattgtgatgctgaaccctgccaatactcgctccatctccaacatgacatctcaggaatttgttgagaagttaacaaagcgccttaagcgccatccagaggagacgggtggttttcaggaggccccgctagcctacgatgctatctgggccctggctttggctcttaataagacaagtgggggcggcgggcgctccggcgtgcgcttagaggattttaactacaataaccagaccattacagatcagatctacagagccatgaactctagctctttcgagggggtttctggccacgttgttttcgacgcctcaggttccagaatggcctggaccttgatagagcagctgcagggtggatcgtacaagaagatcggctactatgacagcacgaaagatgacctctcctggtcaaaaaccgacaaatggattgtaatttctagaacacactctccgacttag

SEQ ID NO: 303792 - DNA, 1737 bp, Artificial Sequence
  derived and/or modified sequence
atgctgctgctgctgctgctggcccccctgttcctgcggccccccggcgccgggggggctcaaaccccaaatgccacatcagagggctgccagataattcaccccccatgggaagggggcatacgatacagaggtctgactcgggatcaggttaaggcaataaattttctgccagtcgattacgaaatcgaatatgtttgtcgaggcgagcgagaagtggtgggacccaaggtgcggaaatgcctcgcaaatgggtcttggactgacatggatacacctagtagatgcgtacgcatctgctcaaagtcctatttaacccttgagaatggcaaggtttttttaactggtggggatctcccagccctcgacggcgcccgcgtcgattttagatgtgatcccgattttcatctggtcggcagctcgaggtccatctgttctcaaggtcagtggtctacccccaagcctcattgtcaggttaatagaaccccacactccgaacgtagagctgtttatataggggcccttttcccaatgagcggagggtggccgggggggcaggcttgtcagccagccgtggagatggccttagaagacgttaactcaagacgcgacattctgcccgattatgagcttaaactgatccatcatgacagcaaatgtgaccccggacaggcaactaagtatctctacgagctcctctataacgaccccattaaaatcatcctcatgccaggatgctcctccgtgagcacgttggtagccgaggccgccaggatgtggaatctaatcgtgctgtcatacggaagtagctccccagcactgagcaacaggcaaaggtttcctacattctttaggacccatccttccgctaccctgcacaatcctaccagagtgaagctcttcgaaaagtggggctggaagaagattgcaaccatccaacagacgaccgaggtgtttacatctaccctggatgacttagaagagagagtgaaagaggccggcattgagattaccttcagacagtctttctttagtgacccggcagttccagttaagaacctgaaaaggcaagatgccagaatcatcgtgggactattctatgagacagaggccagaaaagttttctgtgaagtctataaagaaagactgttcgggaagaagtatgtatggtttttgattggctggtacgctgacaactggttcaaaatttacgacccgtctattaactgcaccgtggatgagatgactgaagccgtggaggggcacattaccaccgagattgttatgttaaatcccgcaaatacaaggtccatctcaaacatgacgagccaggagtttgtcgagaaactgacaaagagactcaaacgtcaccccgaggagaccggcggatttcaggaggcccccttagcctatgacgccatctgggccctggccttggctctgaacaaaacgtccggagggggtggacgctctggcgtccgattagaagatttcaattataataatcaaactattacagaccaaatttatcgagcaatgaactcgagttcttttgagggagtaagcggccacgtggtgttcgatgcatcagggagccggatggcctggactttaatcgaacagctgcaaggtggcagctataaaaagatcggctattatgacagcacaaaggatgatctgtcgtggtccaaaactgacaagtggatagtgatttcgcgaacacacagtccaacatag

SEQ ID NO: 303793 - DNA, 1737 bp, Artificial Sequence
  derived and/or modified sequence
atgctgctgctgctgctgctggcccccctgttcctgcggccccccggagctggtggggctcagactcctaacgccactagtgaaggctgccaaatcatacatcctccttgggagggtggaatcaggtatagaggcttgacacgtgatcaggtgaaggctatcaactttctgcccgtggactacgagatcgagtacgtgtgccgcggcgaacgggaagtcgttggccccaaggttaggaaatgtctcgccaacgggagctggacggacatggatacgccatcccgctgcgttcggatctgttctaagtcctacctgactttggagaacggcaaggttttcctcacaggcggcgacctgcccgccctggacggagcacgcgtggatttccgttgcgaccctgattttcaccttgtggggtcttccaggtccatttgttcacagggccagtggagtaccccaaaacctcactgtcaggtgaaccgcacccctcactctgaaaggcgcgccgtgtatattggcgctttatttccaatgagcggagggtggcctggaggacaggcatgtcaacctgcagtcgaaatggcactggaagatgtgaacagcaggagggatatcttaccagactatgaactgaagctgatccatcacgactctaagtgcgacccgggccaggccactaagtatctgtacgaactcctgtacaacgatccaatcaagattattcttatgccagggtgctcctcagtcagtacattggtggcggaagcagccagaatgtggaacctgatagttctttcctacggcagttcctctcctgcattatccaaccgccagaggttccccactttctttcgcactcatcccagtgctacacttcacaaccctactagagtaaaactgttcgagaagtgggggtggaaaaagatcgcaacaatccagcagacaactgaagttttcacgtctactttggatgacttggaggagcgcgtaaaggaggccggcatcgagatcaccttccgacaatccttcttttcagaccccgcagtgcccgtcaaaaatctgaagcggcaggacgccagaatcatcgttggactgttctatgagaccgaggctaggaaggtgttctgcgaggtttacaaggaacgcctctttggtaagaaatacgtgtggtttctgatcggctggtacgctgacaattggttcaagatttacgacccttccatcaactgtactgtcgatgagatgaccgaggccgtggaggggcatatcactacagagatcgtgatgctaaaccccgccaatacgaggtcaattagcaacatgacttcccaggagttcgttgagaagctgacaaaaaggctcaagcgccacccggaggagaccggcggcttccaggaggctcccttagcatacgacgcaatatgggctctcgccctggcactgaataagacttcagggggaggcgggagaagcggcgttagactggaagatttcaattataacaaccaaacaatcactgaccagatttatagagcgatgaattcatccagtttcgagggcgtttctggacacgtcgtgttcgacgcttctggttcacgaatggcatggaccctgatcgagcaactgcaggggggtagttacaaaaagatcggctactatgacagtacaaaggatgacctctcttggagcaagacagacaagtggatcgtgatttccagaacccacagcccgacgtag

SEQ ID NO: 303794 - DNA, 1737 bp, Artificial Sequence
  derived and/or modified sequence
atgctgctgttactgctgctcgcacctctctttctgaggccaccaggcgctggcggtgcacagaccccaaacgcaacctccgaaggttgccagatcattcatcctccttgggagggcggaattagatatagagggttaactcgcgaccaggtgaaggcaatcaacttcctacctgttgactacgaaatcgaatacgtttgtcgaggcgaaagagaggttgtggggcctaaagtgcgcaaatgcctggctaacggttcatggaccgacatggacacaccatctcgttgcgtgcgcatctgttccaaaagctacctaacacttgagaacgggaaggtattcttgactgggggtgacttaccagccctcgatggcgctcgcgtggattttcggtgcgatcccgattttcatctcgtgggatcctcacgctcaatctgttcacagggccagtggagtacccccaagcctcactgccaggttaaccgaacccctcatagtgagcggcgagctgtgtatattggggctctttttcctatgtcgggaggctggccaggcggtcaggcgtgccagccagcggtcgagatggccctggaggatgtgaattctcggcgtgatatcctcccagactatgaactgaagctcatacatcatgactcgaaatgcgacccaggacaggccaccaagtacctctatgagttactctacaacgatccaataaagataatacttatgcctggttgttcttcggtgagtactcttgtggctgaggcagcgaggatgtggaaccttatcgtactcagttatggctctagctccccagccctatcgaaccgccaacgctttccgacattctttagaacacatccttccgctacattgcacaaccccacacgggttaaactcttcgaaaaatggggctggaagaaaatagccacaatccaacagactaccgaggtgtttacttcgacactggacgacctggaggaaagggtcaaggaagctggtattgagatcacattcagacagtcgtttttctccgacccagccgtgccagtcaagaaccttaagcggcaagatgccaggattatagtcggactgttctatgaaacagaagccagaaaggtattttgcgaggtttacaaggaaaggctgtttgggaagaagtacgtgtggtttctcatcggctggtatgctgataattggtttaagatatacgacccctcgattaactgtaccgtagacgagatgactgaggccgtcgagggacatattactacggagatcgtgatgttgaatcctgcaaacacacgctccattagtaatatgacttctcaggagttcgtggagaagctaacaaagaggctcaaacgacacccggaggagactggaggtttccaggaggctccgttagcatacgacgctatctgggcactggccctggccttgaacaaaacatcaggcggaggagggcgaagcggcgtaagattagaagactttaattataacaatcagaccatcaccgaccagatttatagagccatgaattccagtagcttcgagggggtgtctggccatgtcgtgtttgatgcttccggctccaggatggcttggaccctaattgagcagttgcaggggggttcatataagaaaatcggttattatgattccaccaaagatgacttatcttggtctaaaacagacaagtggatcgttattagcaggacacattctcccacatag

SEQ ID NO: 303795 - DNA, 471 bp, Artificial Sequence
  derived and/or modified sequence
atgctgcttttgctcttgctcgctcctttattcttacggccacctggcgctggaggagctcagacccctaatgcaacttcggaaggatgtcagatcatccaccctccttgggaaggcggaatacgctaccggggactcacaagggatcaggtgaaagccattaactttctgccagtagattatgaaatcgaatacgtgtgcaggggcgagagggaagttgtggggcctaaggttcggaagtgtctggccaacgggagttggaccgatatggacacgccgagccgatgcgtcaggatatgctccaagtcctatctgaccctggaaaatggtaaggtcttcttaacaggtggtgacctacccgctctggacggcgcaagagtcgattttcggtgtgacccagatttccacttggttggctcatcccgcagcatctgctcccaaggacagtggtcaacccctaaacctcactag

SEQ ID NO: 303796 - DNA, 1737 bp, Artificial Sequence
  derived and/or modified sequence
atgcttcttctgcttcttttagccccactctttttgagaccacccggagcgggaggcgcacagacgcctaacgctacttcagaaggatgccaaatcatacatcccccatgggaaggcggtatcaggtataggggtttgacaagggaccaggtgaaagccataaattttctcccagtcgactacgaaatcgaatacgtgtgtagaggggagcgcgaggttgttggccctaaagtcagaaagtgcctcgccaacggaagctggaccgacatggatactcctagccggtgcgtgaggatctgctccaaatcttacttaaccctggagaacgggaaagtctttctgaccggaggggatctgcctgcccttgatggggcacgggtggacttcagatgcgatccagacttccacctggtcggctcgtcccggtccatttgttctcaggggcagtggagcacccccaagccgcattgtcaggtgaatcgcacccctcactcagagaggagggccgtgtacatcggtgcgctcttcccaatgagtggcggttggccaggaggtcaggcctgccagccggctgtggagatggctttggaggacgtcaacagcagaagggacatcctccccgattatgaattgaagctgattcaccacgattccaaatgcgaccccggtcaggctaccaagtacctgtacgagctcctctacaacgatccaattaaaattatcttaatgccagggtgtagctctgtgagcactttggtggcagaggctgcacggatgtggaacctaatcgtgcttagttacggttccagctcaccagcgttgtctaacagacagagatttcctaccttcttccgcacacatccatctgcaacactgcataaccctacccgagtaaagttattcgagaaatggggatggaaaaaaatcgcgacaatacagcagacgaccgaggtatttactagtacactcgacgacctggaggagcgggtgaaggaggctggcattgagatcactttccggcagagttttttttcggacccagccgtacccgtgaaaaacctgaaacgccaggatgccagaatcattgtggggcttttttacgagactgaagcgaggaaggtattttgcgaagtgtacaaggagagattattcggcaagaagtacgtctggtttctgatcgggtggtacgcggacaactggtttaaaatctacgacccctcaatcaattgcactgtggacgagatgacagaggccgttgaggggcacatcactactgaaatcgtgatgctgaatcctgccaacacccgttccatttccaatatgacgtcccaggagttcgttgagaagctgaccaaaaggctgaagcgccacccggaggagactggaggctttcaagaggcgccactggcctacgacgccatttgggccctggcccttgcgctcaacaagacaagtggcggaggcggtcgaagcggtgtgcgtctggaagacttcaattacaataatcagacaatcaccgaccagatatacagggcaatgaactcctcatcttttgaaggcgtctctggacatgttgtgttcgatgcatcggggtctcgaatggcctggacactgatcgagcaactccaaggaggttcctacaaaaagatagggtactacgattcaactaaggacgacctcagttggagtaagaccgataagtggatcgtgatcagcaggacacattctcctacctag

SEQ ID NO: 303797 - DNA, 1737 bp, Artificial Sequence
  derived and/or modified sequence
atgttactccttctcctacttgcccctctcttccttcgacctccaggagctggtggcgctcaaaccccaaatgctactagcgaagggtgtcagatcatacatcctccttgggagggcggaattaggtatcggggtctgacccgtgaccaggtcaaggcgattaatttcctgccggtggactacgaaattgaatatgtttgtaggggggaacgcgaagtagtgggacctaaagtgcgtaaatgtctagcaaatggctcttggaccgatatggatacgccatctcgttgcgtgaggatttgcagtaagtcttacctcaccctggagaacggcaaggtcttccttaccggcggtgacctccctgcccttgacggggctagagttgattttaggtgcgaccctgatttccacctcgtaggcagcagtcgcagcatctgctctcagggccagtggtctacacccaaaccacactgtcaggtgaacagaaccccccatagcgaacgccgtgcagtttacatcggagcccttttcccgatgtcaggcggttggccgggaggacaggcctgtcagccagccgtggagatggccttagaagatgtaaattcccgacgagatatactgcctgattatgagctaaagctgatacaccatgattctaaatgcgaccctggacaggccaccaagtacctatatgagctcctctataatgacccgattaagatcatactaatgccaggatgttcaagtgtatccactcttgtagccgaagccgcacggatgtggaacctaatagtgttatcttatggctcttcctccccggctctaagcaacagacagagatttcctacgttctttagaacacacccatctgcaacacttcacaaccccactcgtgtgaaactgttcgagaagtggggttggaaaaaaatcgcaaccattcagcagacaacggaagtttttacgagcacacttgatgatctagaggagagagtgaaggaagcgggtatcgagatcacattccgtcagtcctttttctccgacccggcagtgccagttaaaaacctgaagcgccaggacgctagaattattgtgggactgttttacgaaacggaggctagaaaggtcttctgcgaagtttataaggagcggctcttcgggaagaagtacgtctggttccttatcggctggtatgctgataactggttcaagatctacgatcccagcataaactgtacggtggatgaaatgactgaagcagttgagggacacattactaccgagattgtgatgctgaatccagcgaacaccagaagcatcagcaatatgacatcccaggaattcgttgaaaagctgacaaagcgcttgaagcggcatcctgaagaaaccggcggatttcaggaagcccctcttgcctacgacgcaatctgggcgctcgcactcgccctgaataaaacttctggagggggaggaagaagtggggtcagactggaggacttcaactataacaaccaaacaatcaccgaccagatctatagggccatgaattcgtcctctttcgaaggagtgagcggccacgtcgtgttcgacgcatcaggctcccgcatggcctggaccctcatcgagcagttgcagggcggatcgtacaagaagataggttattacgattctaccaaagatgacttgtcctggagcaagaccgacaaatggatcgtcatttctcggactcacagccctacttag

SEQ ID NO: 303798 - DNA, 1737 bp, Artificial Sequence
  derived and/or modified sequence
atgttgctcctactgctccttgctccattgttccttcgccctccaggcgcaggcggagctcagacgcccaacgccacctcggagggatgccagattattcacccgccatgggagggaggcatccgctaccgcggtctgactagggatcaggtcaaagctatcaatttccttcctgtcgattatgaaatcgaatacgtgtgcaggggcgaacgtgaagtggtggggcctaaagtgcgaaaatgcttggcgaacgggtcatggaccgatatggacacacccagccggtgcgtgcgcatatgctctaaaagctatctgaccctcgagaatgggaaggtcttcttaactggcggtgatttgcctgctctggatggggcacgggttgattttcggtgtgatccagacttccatttggtcggctccagtcgtagcatctgttctcaggggcagtggtccactcccaagccccactgccaagtgaacagaactccgcacagtgaaagacgggcagtgtacatcggggctctgttcccaatgagcgggggatggcctggcggtcaggcatgccaaccggctgttgagatggcccttgaagacgtgaattctagaagggatatattgccagactatgagctgaaactgatccatcacgatagcaaatgtgaccccggacaagccactaaatacctgtacgagctgttgtacaatgaccccattaaaattattttgatgcccggttgttcttcggtttccaccctcgtggctgaggctgccagaatgtggaaccttatcgtgttgagctacggttcttccagccctgctttgtccaataggcagcgtttcccaactttctttcgcacacaccccagcgccaccctgcataacccgaccagagtcaaactttttgaaaaatggggctggaaaaaaatagctaccatccagcagaccaccgaggtgtttacttctaccctagacgatcttgaggaaagagtcaaggaagcaggaatcgagatcacattccggcagagcttcttttccgatcctgctgtgcccgtaaaaaacctcaagcgccaggacgccagaataatagttggcttgttttacgagacagaagcacgcaaggtgttttgtgaagtctacaaggagcggctgttcgggaagaagtatgtctggtttctcattgggtggtacgctgataactggtttaagatttatgacccatcaatcaactgtacagtggacgaaatgacagaggcagtggagggacacatcactaccgagattgtgatgctgaatcccgctaacactcgttctatctctaacatgacatcccaggaattcgtggagaagttgactaagcgactcaagcgccatcccgaagagacaggtgggttccaagaggccccactagcttatgatgcaatctgggctctcgcactggcgctgaataagacctccggcggaggcggacggagcggagtaaggttggaggacttcaactataacaaccagactattacggatcagatttatcgtgcaatgaacagtagcagttttgagggcgtgtccgggcatgtggtgtttgatgcgtcaggatctcgaatggcctggaccctgatcgagcaactccagggaggttcatataagaaaatcggatattatgatagcaccaaagatgatctgagctggtccaagacagacaagtggatcgtcatctctcgcacccacagcccaacatag

SEQ ID NO: 303799 - DNA, 1737 bp, Artificial Sequence
  derived and/or modified sequence
atgttactcctgctccttctagcaccacttttcctgaggccacccggtgctggcggtgctcaaacacccaatgccacctctgagggttgccagattatccacccgccttgggagggtggtatccgctaccgcggtctgaccagggaccaggtcaaggccatcaacttcctacctgtggactatgagatcgagtacgtttgccggggtgagcgcgaggtggtcggcccaaaagtgcgaaaatgtctcgctaacggatcatggacagacatggacacaccttcccgttgcgttaggatctgtagtaaaagttatctcactctcgaaaatggtaaagtgttcctcacgggtggagacctcccagctttggacggcgcacgggtggatttccggtgtgatccggatttccatctcgttggctctagtcgcagcatctgttcacagggccaatggtccacgcccaaaccgcactgccaggtgaataggacccctcattcagaaaggcgcgcagtatatatcggcgctctgtttcccatgtctggcggttggcccggagggcaggcctgccagcctgctgtggagatggcactagaagacgtgaacagcagacgcgacatactgccggattacgaactgaaactgatccaccacgactctaaatgcgaccctggccaggcaacaaaatatctctatgagctcctatacaatgacccaattaagatcatccttatgcctggttgctcgtcagtgtcaactttggtcgcggaagctgccaggatgtggaatttaattgtattatcttatgggagctctagcccagctctgtccaaccggcagaggttccccacctttttccgcactcaccctagcgccacccttcacaatcctacccgtgtcaaattgttcgagaaatggggatggaagaagatagccaccatccagcagacaaccgaggtctttacatcaacactggacgatcttgaggaacgcgtaaaagaggctggcattgagatcacatttaggcaaagttttttcagcgacccggctgtccctgtcaagaatcttaaaaggcaagacgcaaggatcatcgtcggcctcttctatgaaaccgaggcacggaaggtcttctgcgaagtatataaagagcgcctgtttggtaagaagtatgtgtggttcctgatcgggtggtacgcggataactggtttaagatctacgacccatcgatcaactgcaccgtggacgaaatgacggaggctgtggaaggacacattacaactgagatagtgatgttgaaccccgctaatactaggagcatcagtaacatgactagccaagagttcgttgagaagctgactaagcgcctcaagagacaccccgaggagaccggtggctttcaggaggcaccactggcttatgatgctatttgggccctggctctggctctgaacaagacatctggcggtggcggacggtccggagtgcgcctcgaggatttcaactataacaatcaaacaattactgaccagatttatcgagcgatgaactcatcttctttcgaaggggtcagcggccacgtcgtttttgacgccagcggaagcaggatggcatggaccctgattgagcagcttcaaggcggtagctacaagaagataggatattacgattcaactaaagacgacctctcctggagcaagacggacaagtggatcgtaatttcccgaacccacagtccaacatag

SEQ ID NO: 303800 - DNA, 1737 bp, Artificial Sequence
  derived and/or modified sequence
atgctgctcctcctccttctcgcccctctcttcttacgtccacctggagcaggcggtgctcagactccaaatgctacctcagagggctgccagattatacatccaccctgggaaggaggcatccgttatcgtggtctgaccagagatcaagtaaaggcaattaattttctgcccgtggactatgagattgaatacgtctgcagaggcgagagagaagtcgtggggccaaaggtgcggaagtgcttagctaacggatcctggaccgatatggacactccttcacggtgcgtgagaatttgttccaaatcttacctgaccctggaaaatggtaaggtgtttctcactggcggagatcttccagcccttgacggcgctcgggtggattttcggtgtgaccccgacttccacttagtgggctctagtcgatctatatgcagccaaggacaatggtccacacccaaaccacactgccaggtgaatcgaacaccgcattccgaacgaagggcagtctacatcggcgcactgtttcctatgtccgggggatggcctgggggtcaagcctgccagcctgcagtcgaaatggccctagaagatgtgaatagtagaagagacatcttaccagattacgagctgaagttgatccaccatgattctaagtgcgaccccggtcaggccacgaaatatctgtatgagctgctctacaacgaccctataaagatcattctgatgcccggatgctcgagcgtttcaaccctcgtcgcagaagccgctcgcatgtggaacctgatcgtgctgtcttacggtagtagttcacctgctctctccaacaggcaacgattccctaccttcttcagaacccacccctcagccactttgcataaccctacacgcgttaagttatttgagaagtggggctggaaaaagattgccacaattcagcagacgaccgaagtatttacatctactctcgacgatcttgaggaacgcgtcaaggaggccggtatcgaaatcacttttaggcagtctttcttttcagatcccgctgtgcccgtgaagaacctgaagagacaggacgcacggataattgtcggcctcttttacgagactgaagctcgcaaggtcttctgtgaagtgtataaggaaagactatttggcaagaaatatgtctggttcctaattgggtggtatgccgataactggttcaaaatctacgacccaagcatcaattgcaccgtggatgagatgactgaagctgtggagggtcacatcactacagagatagttatgcttaacccagccaatacacgcagtatctccaacatgacatctcaggaatttgtggagaaactgacgaagagacttaagaggcaccctgaagaaacggggggtttccaggaagcccctctcgcttacgacgccatttgggccctggctctcgcacttaacaagacgagcggcggaggagggaggagcggcgtcagactggaagactttaattataacaatcagacaattaccgatcagatttatcgcgcaatgaatagcagcagcttcgaaggcgtttcaggccacgtcgtgttcgacgctagcggctcacggatggcctggactctcattgaacagctccagggtggcagctacaagaaaatcgggtattacgacagtactaaagatgatctctcatggtcgaaaaccgataaatggattgtcatctcccgaacacacagccccacatag

SEQ ID NO: 303801 - DNA, 1737 bp, Artificial Sequence
  derived and/or modified sequence
atgttacttctcctcctgctggcccccctgttccttcgcccacccggcgccggcggggcacagacacccaacgccacgtctgaagggtgtcagatcatccaccctccatgggaaggtgggatccgatatcgcggccttacgagagaccaggtgaaagctatcaattttctccccgttgattacgaaattgagtatgtatgtagaggcgagagagaagttgtcggcccgaaggtgcgcaagtgcctagcaaatgggtcttggaccgacatggacacaccatctcgatgtgtgcgcatatgttccaagagttatcttactctggagaatggcaaagtgttcctaacaggcggagatctccccgctctcgatggagccagagtggactttagatgtgacccggactttcatctcgttggctcttccagatcaatctgctctcaagggcagtggtcgacgcccaagccccactgtcaggttaacaggacccctcacagtgagagacgggctgtgtatatcggcgccctgttcccgatgtccggcggctggccaggaggacaggcgtgtcagccagcggttgaaatggcactcgaagacgtaaatagccgccgcgacatcttacccgattacgaactgaaattgatccatcatgattccaaatgtgacccgggccaggctacaaagtacctgtacgaactcctctataacgatcccatcaagataatcctgatgccagggtgcagcagtgtatctactcttgtggcagaagccgcacggatgtggaaccttatcgtgctgtcgtatggctcttcctcccccgctctctctaacaggcagaggttcccaactttcttcaggactcacccatccgccaccctgcataatcccaccagagtgaaactatttgagaagtggggctggaaaaagatcgctaccatccaacagacgacagaggtattcacctcaacccttgacgacttagaagagcgggtgaaggaggctgggatagagattacattccggcagtccttttttagtgacccagccgtcccagtaaaaaatctgaagaggcaagatgctaggattatagtcgggttgttctacgagactgaagctagaaaagtattttgtgaagtctataaggagcgactgtttggtaagaaatatgtttggtttctgattggatggtacgctgataactggttcaaaatctacgacccaagcataaactgtaccgtcgatgaaatgacagaggccgtcgagggacatattactaccgaaattgtaatgctaaatccagcgaacacccgcagcatttccaacatgacgagccaagagtttgtagagaaactgactaagaggcttaaaaggcaccctgaggaaacgggcggcttccaggaagctccacttgcctacgacgctatttgggcgctcgccctggctctgaataaaacatccggagggggcggtagaagcggggtgaggctggaggattttaattacaacaaccagactatcacggaccaaatttaccgtgccatgaacagctcctcatttgagggcgtgagcggtcacgtggtttttgatgctagcggcagccgaatggcatggaccctcattgaacagttgcagggaggcagctataaaaaaatcggctactatgacagtacgaaagacgatctttcctggagtaaaacggacaaatggatagtgataagcagaacacattccccaacctag

SEQ ID NO: 303802 - DNA, 471 bp, Artificial Sequence
  derived and/or modified sequence
atgttattgttattacttctagcccctctgttcttacgccctcctggagctggcggagcccagaccccaaatgctacatctgaaggatgtcaaattatccatcctccttgggaaggtggtatccgctaccgggggctgactagggatcaagtcaaggccatcaacttccttccggtggactatgagattgaatacgtctgccggggcgagcgggaagtcgttggtcccaaggtacgtaaatgtcttgcaaatggttcttggacggacatggataccccatctagatgtgtgagaatctgctccaagtcctacctgacacttgaaaatggaaaagtattcttgactggaggcgatttacccgccctggatggagcccgagtggacttccgctgtgatcccgacttccatcttgttggctccagtcgctcgatttgcagccaaggccagtggtctactcccaaacctcattag

SEQ ID NO: 303803 - DNA, 1737 bp, Artificial Sequence
  derived and/or modified sequence
atgcttctgttgctactgttggcccccctctttcttcgcccacccggcgcagggggcgcgcagacccctaatgctacatccgaagggtgccaaattatccacccgccctgggaaggtgggatcagatacagaggcctaactcgcgatcaggttaaagccattaatttccttccagtagattatgagatcgagtacgtgtgtagaggcgagcgcgaagtcgttggtcctaaagtaaggaaatgtctcgcaaacggctcctggaccgatatggacactcctagtaggtgcgttagaatttgcagcaaatcttacctgacacttgagaatggcaaggtgtttctcaccggtggtgacctgcccgcattagacggcgctagggtggacttccggtgcgatccagattttcatttagttggaagcagtcggagcatttgctctcagggccagtggagcactcccaagccgcactgtcaagtgaatagaacccctcactctgaaaggcgggccgtctatattggcgccctcttccccatgtccgggggctggcccgggggtcaagcatgtcagccagccgtggagatggccctggaagatgttaacagccgccgcgatatcctgccagattacgaattaaagctgattcatcatgattctaagtgtgatcccggtcaagcgacaaaatacctctatgagttgctatataatgatccgattaagattatcctcatgcccggctgttcttcagtatcaacactggtggccgaggctgccagaatgtggaacctgatcgtcctttcctatggcagttcatcacctgctctcagtaatcgccaaaggttcccgacattcttccggacgcatccttctgctaccttgcacaaccctacacgagtgaaactgttcgaaaagtggggctggaaaaaaatcgcaacgatccaacagaccactgaagtctttacatccactcttgacgatttggaagaacgggtcaaagaggcgggcatagaaattacgtttcgacagtctttcttctctgatcctgcagttcccgtgaaaaacctcaaaagacaggatgctcgtattatcgttggacttttctatgaaaccgaagccagaaaagttttttgcgaagtgtacaaagagaggttgtttggtaaaaaatatgtctggtttctgatcggatggtacgccgacaactggtttaagatatacgacccaagtatcaattgtacagtggatgaaatgaccgaggccgttgaggggcacattaccacagagattgtcatgttaaaccctgctaacaccaggtccatctctaacatgacaagtcaggaattcgttgagaaactcacaaagcgtttgaagaggcaccctgaggagactggaggattccaggaggcacccctggcctacgacgcaatctgggctttggccctggcgctcaataagaccagcgggggcggtggccgatcaggcgtccgactagaggatttcaactataacaaccaaaccatcacagatcaaatatatcgcgccatgaactcctccagtttcgaaggcgtctcagggcacgtggttttcgatgcgtcaggctcaaggatggcctggaccctgattgaacagttgcagggtggttcttataagaaaattgggtactatgacagtacaaaggatgatctgagctggagcaagacggacaagtggatcgtgatcagtagaacccattcacctacttag

SEQ ID NO: 303804 - DNA, 1737 bp, Artificial Sequence
  derived and/or modified sequence
atgttgctgcttttattgttggcccccctctttctgagaccgcccggcgccggcggcgcccagacccccaatgccaccagcgagggatgtcaaattatccatccaccatgggaaggcggcattcggtaccggggcctgactcgggatcaggttaaagccataaacttcctgccagtcgattacgagatcgaatatgtctgtaggggagaacgtgaggtggtgggcccaaaagtgaggaagtgtctcgccaacgggtcctggacagacatggatacaccttctagatgcgtgcggatatgctccaaatcctacctcacattggagaatggaaaagtgtttctaacagggggggatctacccgctttggatggggcacgtgtcgacttccgctgtgatccagactttcacctcgttgggagcagtcgatctatatgcagtcagggtcaatggtccacccccaaaccccattgccaagtgaatcgcacaccccactccgaaagaagagccgtatacatcggtgctctgttccctatgagcggcgggtggccaggcggccaggcgtgccagccagctgttgagatggcccttgaggacgtcaactctcgccgtgacattctgccagactacgaattaaagcttatacaccacgatagcaaatgtgaccccggacaggccacaaaatacttatatgagttactatataatgaccctataaagattattctgatgccaggttgcagttctgttagcaccctggttgctgaggctgcacgtatgtggaacctgatcgtcctctcctatggcagcagcagccccgctttgtccaaccgccagcgctttccaacattttttaggactcatccttcagccactctacataacccaacgcgtgtcaaactcttcgaaaagtggggatggaagaagattgcaactattcagcaaaccaccgaggttttcacgtccacactggatgaccttgaagaaagggtgaaagaagcaggcattgagattacgttcagacagtccttcttcagcgatccagcagtgcccgtgaagaatctgaaaagacaggatgccaggattattgtagggctcttctatgaaactgaggctcgcaaggtgttctgcgaagtgtacaaggagcgcttgttcggaaagaagtatgtctggtttctgatcggttggtatgctgacaactggttcaagatctatgacccttccatcaactgcacggtagacgagatgacagaggcagttgagggacacattactaccgagattgtgatgctcaaccctgcaaacactagatccatttccaacatgacatcacaggagttcgtggaaaaactgactaagagattgaagcgtcatcccgaagaaaccggcggttttcaagaggcccccttggcctacgacgctatttgggccctcgccctggctctgaataagacctcaggaggtggagggagatctggagtgaggttagaagactttaactacaataaccaaaccatcacagatcagatctatcgcgcgatgaattcttcatcgtttgaaggagtcagcgggcacgtcgtgtttgacgccagcggatcccgcatggcttggaccttaatcgaacaattgcaggggggttcctacaagaaaataggatactacgacagcaccaaagacgatttgtcgtggtctaaaacagataagtggattgtcattagtagaacacattcccctacgtag

SEQ ID NO: 303805 - DNA, 1737 bp, Artificial Sequence
  derived and/or modified sequence
atgcttctgctactcctgcttgccccattgtttcttcgaccacctggcgccggtggggcccagacccctaatgcaactagtgaaggctgccaaattattcatcctccttgggagggcgggattcggtaccgagggctgactagagaccaggtgaaggcaattaatttcctaccagtggactacgagatcgaatacgtctgccggggtgaaagggaagttgtaggccctaaggtccgcaagtgtttagccaatggttcctggacggacatggacacacctagccggtgcgtgcgcatctgttccaagagctatttgaccttggagaacggcaaggtgtttctcacgggtggcgatcttccagcgttggatggcgcacgggttgacttcagatgtgaccctgatttccacctcgtcggcagttctagatccatctgcagtcagggtcagtggtcaacacctaaaccgcactgtcaggtaaaccgcacacctcattccgagagacgggctgtgtatattggagcgctgttccccatgagcggaggttggcctggcggccaggcttgccagcctgctgtggagatggccctggaggacgtgaattcccgtagagatatattgcctgattacgagctgaagctgattcatcacgattctaagtgcgatcccggtcaagcgaccaagtacctgtacgagctactatataatgacccaattaagatcattctgatgcccggctgctccagcgtgtcgacattagtagccgaagcagctcggatgtggaaccttattgtactctcctatggatcctcctcacccgctctgagtaatcgtcagcgattcccaaccttcttcagaacacatccctccgcgacactgcacaatcccactagggttaaattatttgaaaagtggggctggaagaaaatagctactattcaacaaaccacagaggtgttcaccagtactctggacgatttggaggagcgtgtaaaagaagctggcattgagatcaccttccgtcagtccttctttagcgaccccgctgtcccagtaaagaaccttaaacgacaagatgctaggattattgtgggattgttctacgagacagaggccaggaaggttttttgcgaagtctacaaagagcgactcttcggcaaaaagtacgtctggttcctcattggatggtatgccgacaattggttcaagatctatgacccttctattaattgtactgtggacgagatgaccgaagctgtcgaggggcatataacgacggagatagtaatgttgaacccagccaacacaagatcaatatctaatatgaccagtcaagagttcgtggagaagcttacaaagagactgaagcggcaccccgaggaaactggtggcttccaggaggcccctctggcgtatgacgccatttgggcactggctttagcactgaacaagacatccggagggggcggtcgctctggcgttcgcctggaggactttaattacaataaccagaccattaccgaccaaatatacagggctatgaacagtagctcgtttgaaggagtgtcaggccacgtagtgttcgatgcttccggcagcaggatggcttggactttgatcgagcagttacaaggagggagttacaagaagatcggctactatgattctactaaagacgacctgtcttggagcaaaacagacaagtggatcgtcatctcccggactcatagcccgacctag

SEQ ID NO: 303806 - DNA, 1737 bp, Artificial Sequence
  derived and/or modified sequence
atgctcctgctgctcctgctagcccctctcttcctccgaccacccggggccggtggagctcagacacccaacgcaacttccgagggctgccaaatcattcacccaccgtgggagggaggcatccgctatcgcggactcacacgcgaccaagtaaaagcaatcaactttttgcccgtcgattacgagattgagtacgtatgccgcggagaaagagaagtcgttggcccaaaggtgcgcaaatgtctcgccaacggctcgtggaccgacatggacactcccagccgatgcgttcggatatgttccaaatcctacctgactcttgagaatggtaaggtttttctgactggcggtgatctgcccgcccttgatggagctcgagtggacttccgttgtgatcctgattttcacctcgtggggtcaagtaggtctatatgcagtcagggacagtggagtaccccaaaacctcactgccaggtgaacaggactccccatagcgaacgtagagcagtgtacattggggctctattcccaatgagcgggggttggcccggcggacaggcatgtcagcccgctgtggaaatggcacttgaggatgtgaattcccgtcgagacatactgccggactacgaactgaagttgatacaccacgactcaaagtgcgatcccggccaagctacaaagtacctatacgagttgctgtataatgaccctatcaaaattattctgatgcccggatgcagtagtgtttccacgctggttgctgaggccgcgagaatgtggaatttaattgtgttgtcttatggctcctcttcaccagcactttcgaaccgtcaaagattccctacattcttccggacacacccttccgccacgctgcacaacccaacccgtgtgaagttatttgagaaatggggttggaaaaagatcgcaactattcaacagacgacggaggtgtttacaagcactctggacgatttagaagaacgggtgaaagaggccggaatcgagattacgttcagacagagcttcttcagcgacccggcagtccccgtgaagaatctgaagcggcaggatgctaggattatcgtcggactgttctatgagacagaggctcgtaaggtattttgcgaggtgtataaagaacgactgttcggaaaaaaatacgtctggttcctgattggctggtatgcagataactggttcaagatttacgaccctagcatcaattgtactgttgatgaaatgactgaggccgttgagggacatattaccaccgagatcgtgatgttaaatcccgctaatacaagaagtatcagtaacatgaccagccaagagttcgtggaaaagcttacaaagcgcttgaagcgtcacccagaagagaccggaggattccaggaagcaccactagcctacgatgcaatttgggcgttagccctcgcactaaataagaccagtggaggcggaggccggtcgggcgttaggctggaggatttcaactacaacaatcagacgatcacggatcagatctatcgggcgatgaactcatcctcctttgaaggagtgtctggacatgtcgtgttcgacgcaagcggctcgagaatggcttggactcttattgagcagctccaaggggggtcctataaaaagatcggatactacgattctacaaaggacgatctatcctggagtaaaacagataagtggattgtcattagtagaactcacagtcctacatag

SEQ ID NO: 303807 - DNA, 1737 bp, Artificial Sequence
  derived and/or modified sequence
atgctgttgctgttgctgcttgcgccactgttccttagaccacccggagctggtggtgctcagacgccaaatgccacttcagaggggtgtcaaattattcaccctccatgggagggcgggatcaggtacagaggtcttactcgggaccaggtgaaggcgatcaacttcttgccagtggactatgaaatcgaatatgtgtgccgcggagagcgtgaagtggtaggaccaaaagttagaaaatgcctcgccaacggaagttggaccgatatggataccccatctagatgtgtgcgcatctgttccaaaagctacttaacactcgagaatgggaaggtattcctgactggcggggacctgcccgccctcgacggcgctcgtgttgattttcgctgtgacccagactttcaccttgttggatcctctagaagcatttgcagtcagggccaatggagcacacctaagccgcattgtcaggttaaccgcacccctcatagcgaacggagggcagtgtatattggcgccctgttcccaatgagcggagggtggcctggcggccaggcctgtcagcccgctgtagagatggcgctggaagacgtgaatagtcggcgcgacattttgccggattacgaactaaagctgattcaccatgatagcaagtgtgaccctggccaggccactaaatacctctatgaactactgtataatgatcctataaaaattattctgatgcccggttgctcttctgtttctaccctagtagccgaggcggcaaggatgtggaatctgatcgtactctcttatggctcctcttccccagccctctcaaatcggcaacgcttccctactttctttcggactcatccctctgctacccttcataacccgacgcgcgtaaaacttttcgaaaagtggggctggaaaaagatcgcaaccatacagcaaactaccgaggtgtttacatctacactagacgatctcgaagaaagggtcaaggaggcggggattgaaattacttttcgccagagtttttttagcgaccccgccgtccctgtgaagaatctcaagagacaagacgctagaatcattgtgggattattttacgagaccgaggcgcggaaagtgttttgcgaggtttacaaagaacgtctgttcggaaaaaagtacgtctggttcctgatcggatggtacgccgataactggttcaagatatacgaccccagcattaattgtaccgtggacgagatgaccgaagctgttgaaggccacataaccaccgagatcgtcatgttgaaccccgctaacaccagatctatctcaaacatgacgtcccaggagttcgtggaaaagctgaccaaacgcttgaaacggcatccagaagagaccggcgggtttcaggaggcaccactcgcctacgacgcaatatgggctcttgcactcgccttgaataagacctccgggggcggaggccgatccggagtgagattggaggatttcaactacaataaccagaccatcactgaccagatctacagggccatgaactcatctagcttcgaaggggtgagtggccacgtggtatttgacgcaagcggctccagaatggcatggactctcatcgaacaactgcagggcggctcctacaaaaagattgggtattacgacagcacaaaggatgatctcagctggagtaagactgataagtggattgtaatctcacgtacccatagccctacttag

SEQ ID NO: 303808 - DNA, 1737 bp, Artificial Sequence
  derived and/or modified sequence
atgctcctgctgcttcttctcgctcccctattcctccgacctcccggcgccggcggtgcccagactcccaatgccacctctgaggggtgccaaatcattcaccctccctgggagggcggcattcgctatcgcggcttgacacgagaccaagtaaaggccattaatttcctacctgttgattatgaaattgaatacgtatgtcggggtgagagagaagtggttggtccaaaagtgcgaaagtgtctcgctaatgggtcctggacagacatggacactccatcacgttgcgtgcgtatatgtagcaagagttacttgaccctcgagaatggcaaagtgtttctgacaggtggcgacctgcccgctctcgacggagccagggtggattttcgctgtgaccccgacttccacttggtaggctcttcaaggagtatatgttctcagggccagtggagcacaccaaaaccccattgccaagtcaatcgtacaccacactccgaacgcagagccgtttacatcggagccctttttccaatgtccggggggtggccaggaggccaggcctgccagcccgccgtagagatggcgctcgaagatgttaattctagaagagacatcttgcccgactacgaactcaagctgatccaccatgatagcaaatgcgacccaggacaggctacgaagtatctttacgaactgctgtacaacgatccaataaagattatactcatgccagggtgttcaagtgtaagcactctcgtggctgaagcggcgcgtatgtggaacctaattgtcttaagctacggaagcagttcacccgccctctctaaccggcaaagattccctaccttttttcgcacccacccttcagccacactgcacaaccctacccgcgtaaaactgttcgagaaatggggctggaagaaaatcgccacaatccagcagacgacagaagtattcactagcacactcgacgatctagaggaacgcgtgaaggaggctggaatagaaatcacttttaggcaatcattcttcagtgatcctgcggtaccagtaaaaaacctgaagagacaagatgcaaggattatcgtcgggctgttctacgaaactgaggcacgtaaggtcttttgtgaggtgtacaaggagcggctttttgggaaaaagtatgtctggttcttgatagggtggtacgccgacaattggtttaagatatatgatccttctattaattgtaccgtggatgagatgactgaagccgtggagggccacatcacgacggagattgtaatgcttaacccagcaaatactagaagcatatctaatatgactagccaggagtttgtcgagaagttaactaagcgcttgaagcgccacccagaagaaacaggtggttttcaggaagctcccttggcttatgatgcaatttgggcattagccctggccctgaacaaaaccagtggtggtggaggcagatctggcgtgcgactcgaagactttaattataataaccagacaataacagaccaaatctatcgtgccatgaattcatcctcatttgagggggtttccgggcatgtcgtttttgacgcttcaggatcccggatggcctggactttaattgagcaattacaaggcggatcgtataaaaagatcggctactatgacagcaccaaagatgatctgagctggtccaaaactgataaatggatcgtaataagccgtactcactcacccacttag

SEQ ID NO: 303809 - DNA, 609 bp, Artificial Sequence
  derived and/or modified sequence
acacacacacccctccacttcaaggtatagccaagagcttctggagccgtcaaaaaggtctgtacctgctgtctttagagcttccagtttgcccttggtcaagaaatactgtttgctaggctctgctggagtacatcagatgttgctgctgctgctactggcgccactcttcctccgccccccgggcgcgggcggggcgcagacccccaacgccacctcagaaggttgccagatcatacacccgccctgggaagggggcatcaggtaccggggcctgactcgggaccaggtgaaggctatcaacttcctgccagtggactatgagattgagtatgtgtgccggggggagcgcgaggtggtggggcccaaggtccgcaagtgcctggccaacggctcctggacagatatggacacacccagccgctgtgtccgaatctgctccaagtcttatttgaccctggaaaatgggaaggttttcctgacgggtggggacctcccagctctggacggagcccgggtggatttccggtgtgaccccgacttccatctggtgggcagctcccggagcatctgtagtcagggccagtggagcacccccaagccccactg

SEQ ID NO: 303810 - DNA, 471 bp, Artificial Sequence
  derived and/or modified sequence
atgttactgctacttctcctggctcctctgtttttacgaccccctggcgccggtggagctcaaacccctaatgcaacctccgagggatgtcagatcattcatcccccttgggagggcggaattaggtatcgcggcttgacccgtgaccaggtgaaagccattaattttctgcctgtggattacgaaattgagtatgtttgccggggagagcgcgaagtcgtcgggcccaaggtaagaaagtgtctagccaatggatcctggactgatatggacactccttcaagatgtgtgaggatctgcagtaaatcctacttgactttagaaaacggcaaagtttttcttactggcggcgacctcccagcactagatggcgctcgggtagacttcagatgtgaccctgattttcatcttgtgggctcatccaggagcatatgttcccagggccagtggagcacgcccaaaccgcactag

SEQ ID NO: 303811 - DNA, 1737 bp, Artificial Sequence
  derived and/or modified sequence
atgctgttgcttttactgttagccccccttttcctcaggcctccaggcgctgggggagctcagactccaaatgcaacatccgaagggtgccagattatacacccgccatgggaaggcggaatcaggtacagaggactgacgagagaccaggtgaaagctataaattttctgcccgtggattacgagattgaatacgtgtgcagaggagaacgtgaagtggtgggccccaaagtgagaaagtgcctagcgaacggctcttggacagatatggataccccctcaaggtgcgtgcggatttgctctaaaagctacctaactctggagaacggcaaggtatttctgacgggcggggatcttccggcactcgatggtgctcgcgtggatttccgctgtgaccccgactttcatcttgtcggcagctctagaagcatttgctcccagggacaatggtccacccctaagccccactgccaggtcaataggactcctcattccgagcgtagagcagtttatattggcgccctttttccaatgagtggtggatggcccggcggccaggcttgtcagccagctgtagagatggccttagaggatgtgaattcgagaagagatatcctgccagactacgagttgaaattgatacatcatgattccaagtgcgacccaggacaggcaacgaagtatttgtatgagctgctgtacaatgatcctattaaaattattctcatgccaggatgttcatctgtgtccactttagttgctgaagcggcaagaatgtggaatctgatcgtattgtcctacggcagttctagccccgcccttagcaaccgccagcgttttccaactttctttcggactcacccaagcgcaacactacataatcccaccagagttaaactgtttgaaaaatggggttggaaaaagatcgctacaattcaacagacaactgaagtgttcactagcacactcgatgatctggaagagagagtaaaagaggctggtatcgaaatcaccttccgccagtccttcttctcggatcccgctgtccctgtgaagaatctgaaaaggcaggacgctcgcattatagtcggactgttctacgaaactgaagccagaaaagtgttctgcgaggtttacaaagaacgactgttcggtaagaaatacgtttggttcctgattggttggtacgccgacaactggttcaaaatatacgacccatcaatcaattgtaccgtggatgagatgaccgaggcagtcgaaggacacattacaactgaaatcgtcatgctgaaccctgcaaacacccgaagtatttcaaacatgactagtcaggagttcgttgagaagcttaccaagagactgaagagacacccagaagagactggcggtttccaggaagctcccctagcatatgacgcgatctgggcacttgctctggccctcaataagaccagcggaggcggtggaagaagtggcgttcggttggaggattttaattacaataatcaaactatcaccgaccaaatctatagagccatgaattcatcatctttcgagggcgtttctggccacgtggttttcgacgcatctggaagcaggatggcatggacattaattgaacaactccaggggggttcctacaagaaaattggttactacgattctacaaaagatgatctaagctggtctaaaaccgataagtggatagtcatttctcgcactcattccccaacgtag

SEQ ID NO: 303812 - DNA, 1737 bp, Artificial Sequence
  derived and/or modified sequence
atgttgctgctgctactactcgcccccctattcttacgtcctcccggagcaggcggcgcgcagactcctaacgcaacatccgagggctgtcagatcatacaccccccatgggaaggcggaatcagataccgcggcctgacaagagatcaggttaaggcgattaactttttgcccgtggactacgaaattgaatacgtctgccgaggcgaacgagaagtagtcggacccaaagtgcgtaagtgcctggcaaacggctcctggactgatatggacactccaagcaggtgcgtaagaatttgcagcaaaagttacttaactctcgaaaatggcaaagtgttcctgaccggaggggatctaccggcactcgacggggcacgcgtggattttcgatgcgatcccgactttcacctggttgggtcttctcgatccatttgctcacagggccagtggtctacgcctaaaccacactgtcaagttaatagaaccccccactcggaaagaagagctgtttacattggggcattattccctatgtcgggtggttggcctggcgggcaagcatgccagcctgcggtggagatggcactagaggacgtgaactctcgccgtgacattctgccagactacgaattaaagcttatacaccacgatagcaaatgtgaccccggacaggccacaaaatacttatatgagttactatataatgaccctataaagattattctgatgccaggttgcagttctgttagcaccctggttgctgaggctgcacgtatgtggaacctgatcgtcctctcctatggcagcagcagccccgctttgtccaaccgccagcgctttccaacattttttaggactcatccttcagccactctacataacccaacgcgtgtcaaactcttcgaaaaatggggatggaaaaagatcgctacaatccagcagaccactgaggtttttacctccacacttgatgatctggaagagcgcgtcaaagaggcgggcattgaaatcacatttaggcagtcgttttttagcgaccccgccgtcccggtcaaaaatttaaagagacaggacgcacgcataattgtaggattgttttacgagacagaagctcgcaaggtgttttgcgaagtttacaaggaacgcttgtttgggaagaagtatgtttggtttctcatcggatggtatgccgataattggttcaagatatacgaccctagtatcaactgtactgttgacgaaatgaccgaggcagtggagggccatattactacagagattgtaatgctcaatccagccaacacgagatccatcagtaacatgacttctcaggagttcgttgaaaagctgacaaaacggttgaagagacacccggaggaaactggtgggttccaagaagcccccctggcctacgacgccatttgggccctcgccctagctctaaacaaaactagcggaggaggtggtaggagcggagttcggctggaggactttaattataacaatcaaacaatcacggaccagatttatagagctatgaattcttcaagtttcgagggagtgagcggccatgttgttttcgacgcttctggttcccgaatggcctggacactgatcgaacagttgcagggaggctcatataagaaaattgggtattatgactccaccaaagacgatctctcttggtctaagacggataaatggattgtgatctctaggactcactctcccacatag

SEQ ID NO: 303813 - DNA, 1737 bp, Artificial Sequence
  derived and/or modified sequence
atgctcttgctcctgctgttagctcctttgttccttagacctcccggtgcaggtggggcccaaactcctaatgcgacgagcgaagggtgccagataatccacccaccatgggaaggcggcatcaggtaccgcgggctaacacgagatcaggtgaaggcaattaactttctgcctgtcgactatgaaattgaatatgtgtgtagaggagaaagagaggtggtgggcccaaaagttcggaaatgcttggcaaatgggtcctggacggatatggacaccccttctagatgcgtaagaatatgcagcaagagctacctaacgctcgagaatggaaaagttttcctcactggcggggatctcccagccttagacggagcaagagtagattttcgctgcgatcctgactttcacttagtgggctcctcacgctccatatgttcacagggacagtggtccactcccaaaccccactgccaggttaataggaccccacacagcgagcggcgtgcagtgtacatcggggcattgtttcccatgagcggcgggtggcctggcggccaagcttgccaacccgcagtcgaaatggcactggaggatgtaaattcccggagagatatcctgcccgactacgagctgaagctaattcatcacgactctaaatgcgatccaggccaagcgactaaatacttgtacgaactgctgtacaatgaccccatcaaaatcattctcatgccaggttgttcttcagtaagcactctggtcgccgaagcagctcggatgtggaacttgattgtactatcttacggttcttctagccccgccctgtctaatcgtcagagattccctacctttttccggacacatccaagcgcaacgcttcacaaccccacgcgtgtcaaactgttcgagaagtggggatggaagaaaatagcaacgattcagcaaactacagaggtgtttacctctaccctcgatgacctagaagagagagtaaaagaggccggcatcgaaataaccttcagacagagctttttctcagaccctgctgttcccgttaagaatctgaagcggcaagatgcccgtatcatcgtcggcctgttctacgagacagaggcaagaaaggtattttgtgaggtgtataaggagcgtctgttcggcaaaaaatacgtttggttcctgataggttggtacgcagacaattggtttaaaatttatgacccaagcatcaattgtactgtggacgaaatgaccgaggcagtggaggggcacatcaccacggagatcgtaatgctcaatccagccaacactagatccatctctaatatgacttctcaggagtttgtagagaagctcactaagcgcttaaaaaggcatccggaggaaacaggagggtttcaggaggcaccccttgcatacgacgcaatctgggcgctggctctcgctctcaacaagacatcaggtggcggtggaagaagcggcgtaaggttagaggactttaactacaataatcagaccatcacagatcaaatttacagagctatgaactcgtcttctttcgagggtgttagtgggcatgtggtgtttgacgcctctggcagcagaatggcctggacactgattgaacaattgcaaggtggatcatataagaagatagggtattatgatagcacgaaagatgacttatcctggtccaaaactgataaatggatagtgatcagtaggacacactcaccaacctag

SEQ ID NO: 303814 - DNA, 1737 bp, Artificial Sequence
  derived and/or modified sequence
atgctgctgttactgctccttgctcctctctttcttcgcccacctggcgcaggcggcgcacaaactcccaatgcgaccagcgagggatgccagatcatccaccccccctgggaaggaggaatcagataccgcggcttgactcgggaccaagtgaaggcgataaatttcttgcccgttgattacgaaattgaatacgtttgtaggggtgaaagggaagttgttggaccgaaggttagaaagtgcctggccaatgggtcatggacagacatggacacaccaagcagatgtgtgcgaatctgtagcaaaagctatcttacactcgaaaacggcaaagtcttcctgacaggcggggacctgccagctctagacggcgctagggtagatttccggtgcgacccagactttcatctcgttggctcaagccgctccatttgctctcaaggtcagtggtcaacccccaagcctcattgtcaggtcaaccgtacacctcactcagagagacgagccgtatacattggcgcgctgttccccatgagcgggggttggccaggtggccaggcatgtcaacctgccgtagaaatggccctagaagatgtgaattcccgcagagacatcttgccagactacgagttgaagctgattcaccacgatagcaaatgtgaccccggtcaggccactaaatacctttacgaactactttataacgatcctatcaagattatcctgatgcctgggtgctccagcgtatccacgcttgtggctgaagccgccaggatgtggaatcttattgttctatcgtacgggtccagttctccggccctctctaatcgacagcgttttcccaccttttttagaactcatccgtccgccaccctgcacaaccctacacgagtcaagctctttgagaagtggggatggaagaaaatagctaccattcagcaaactacggaggtatttacgtccactctagatgacttagaggaaagggtaaaggaggcaggaatcgagataacgtttcggcagtcattttttagcgatcccgcagttccagtcaaaaacctcaagagacaagacgctcgcatcattgtaggcctattttacgaaaccgaagctcggaaagtgttttgtgaagtttataaggaacgtctattcgggaagaagtacgtctggttccttatcggatggtatgcagacaactggtttaaaatctatgatccatccatcaactgcactgtcgatgaaatgacagaggccgtcgaagggcacatcacaactgagattgtaatgctgaatcctgccaacacccgatctatctccaacatgacgtctcaggaatttgtcgaaaagctcacaaagaggctgaagagacacccagaagagaccggcggctttcaagaggctccactggcatacgacgcaatatgggcactcgctctcgccctgaacaagacatcaggcggtggtggtcggagcggagttcgcctggaagacttcaactacaacaatcagacaattacagatcagatctatcgcgcaatgaactccagcagttttgagggtgtaagcgggcatgtcgtgttcgacgcctctggttccagaatggcctggaccttaattgaacaattacagggaggaagctacaaaaagattggctactatgactcgactaaagatgacctgtcatggtctaagaccgataaatggatcgtgatttctagaacccactccccgacctag

SEQ ID NO: 303815 - DNA, 1737 bp, Artificial Sequence
  derived and/or modified sequence
atgttactactcctgctcttggcccccctttttttaagaccccccggagcaggcggcgcacaaacccccaatgcgacctcagaaggatgtcaaattattcatccaccttgggagggtggcatcaggtaccggggactgacacgggatcaggtgaaggccatcaatttcctgccagttgattacgagatcgagtatgtttgccgcggcgagcgagaagtagtgggaccaaaagtgcgcaaatgcctcgccaacggatcatggacggatatggatactccatcgcgttgtgttcgcatatgtagcaagagttatctcacactagagaacggaaaggtctttttaaccggcggcgacctgccagctttagacggtgccagagtcgattttcgttgcgatccagacttccatctggtgggcagcagccgaagtatatgttcccaaggacaatggagcacccctaaaccccattgccaagtgaatcgaacaccccactccgagagacgggctgtgtacataggagctctcttccccatgtcgggcggttggcccggtggccaagcgtgccagccagccgtagagatggccctggaggatgtgaacagtcggcgcgacattttgccggattacgaactaaagctgattcaccatgatagcaagtgtgaccctggccaggccactaaatacctctatgaactactgtataatgatcctataaaaattattctgatgcccggttgctcttctgtttctaccctagtagccgaggcggcaaggatgtggaatctgatcgtactctcttatggctcctcttccccagccctctcaaatcggcaacgcttccctactttctttcggactcatccctctgctacccttcataacccgacgcgcgtaaaacttttcgaaaagtggggatggaagaaaatcgcaactatccagcagactacagaagtgtttaccagtacattagacgacctcgaagagagagttaaggaagccggcatcgaaattacttttcggcagtcatttttcagcgatccagccgtacccgtaaagaatctcaagcgccaggacgctcgaattattgttggcctcttttacgagactgaagcccgtaaagtgttttgtgaagtttataaagagcgactgtttggaaaaaaatacgtgtggttcctcatagggtggtacgcagataactggttcaagatctatgaccccagcattaattgcactgtggatgagatgaccgaagccgtggaaggacacattaccaccgaaatcgtgatgttgaaccccgccaacactagatccatcagcaacatgacatcccaagaattcgtcgagaaactgaccaagagactaaagagacatccagaagagacaggcgggtttcaggaggcaccacttgcctatgatgccatctgggctctagctttggcactgaacaagaccagtgggggcggcggaagatcgggggtgagactggaggactttaattataataatcagactatcaccgatcagatttatagagccatgaattcctcttcatttgaaggcgtttctggccacgtggtttttgatgcatccggctcgcgtatggcttggacactgatcgagcagcttcaagggggcagttacaaaaaaataggatactatgactctaccaaggacgacctgtcttggtctaaaacggataaatggattgtcatatcacgaacccactctcccacgtag

SEQ ID NO: 303816 - DNA, 4048 bp, Artificial Sequence
  derived and/or modified sequence
atgttgctgctgctgctactggcgccactcttcctccgccccccgggcgcgggcggggcgcagacccccaacgccacctcagaaggttgccagatcatacacccgccctgggaagggggcatcaggtaccggggcctgactcgggaccaggtgaaggctatcaacttcctgccagtggactatgagattgagtatgtgtgccggggggagcgcgaggtggtggggcccaaggtccgcaagtgcctggccaacggctcctggacagatatggacacacccagccgctgtgtccgaatctgctccaagtcttatttgaccctggaaaatgggaaggttttcctgacgggtggggacctcccagctctggacggagcccgggtggatttccggtgtgaccccgacttccatctggtgggcagctcccggagcatctgtagtcagggccagtggagcacccccaagccccactgccaggtgaatcgaacgccacactcagaacggcgcgcagtgtacatcggggcactgtttcccatgagcgggggctggccagggggccaggcctgccagcccgcggtggagatggcgctggaggacgtgaatagccgcagggacatcctgccggactatgagctcaagctcatccaccacgacagcaagtgtgatccaggccaagccaccaagtacctatatgagctgctctacaacgaccctatcaagatcatccttatgcctggctgcagctctgtctccacgctggtggctgaggctgctaggatgtggaacctcattgtgctttcctatggctccagctcaccagccctgtcaaaccggcagcgtttccccactttcttccgaacgcacccatcagccacactccacaaccctacccgcgtgaaactctttgaaaagtggggctggaagaagattgctaccatccagcagaccactgaggtcttcacttcgactctggacgacctggaggaacgagtgaaggaggctggaattgagattactttccgccagagtttcttctcagatccagctgtgcccgtcaaaaacctgaagcgccaggatgcccgaatcatcgtgggacttttctatgagactgaagcccggaaagttttttgtgaggtgtacaaggagcgtctctttgggaagaagtacgtctggttcctcattgggtggtatgctgacaattggttcaagatctacgacccttctatcaactgcacagtggatgagatgactgaggcggtggagggccacatcacaactgagattgtcatgctgaatcctgccaatacccgcagcatttccaacatgacatcccaggaatttgtggagaaactaaccaagcgactgaaaagacaccctgaggagacaggaggcttccaggaggcaccgctggcctatgatgccatctgggccttggcactggccctgaacaagacatctggaggaggcggccgttctggtgtgcgcctggaggacttcaactacaacaaccagaccattaccgaccaaatctaccgggcaatgaactcttcgtcctttgagggtgtctctggccatgtggtgtttgatgccagcggctctcggatggcatggacgcttatcgagcagcttcagggtggcagctacaagaagattggctactatgacagcaccaaggatgatctttcctggtccaaaacagataaatggattgttatatccagaactcacagcccaacctgaacaacctgactgctgtgggctgctcactggctttagctgctgtcttccccctggggctcgatggttaccacattgggaggaaccagttccctttcgtctgccaggcccgcctctggctcctgggcctgggctttagtctgggctacggttccatgttcaccaagatttggtgggtccacacggtcttcacaaagaaggaagaaaagaaggagtggaggaagactctggaaccctggaagctgtatgccacagtgggcctgctggtgggcatggatgtcctcactctcgccatctggcagatcgtggaccctctgcaccggaccattgagacatttgccaaggaggaacctaaggaagatattgacgtctctattctgccccagctggagcattgcagctccaggaagatgaatacatggcttggcattttctatggttacaaggggctgctgctgctgctgggaatcttccttgcttatgagaccaagagtgtgtccactgagaagatcaatgatcaccgggctgtgggcatggctatctacaatgtggcagtcctgtgcctcatcactgctcctgtcaccatgattctgtccagccagcaggatgcagcctttgcctttgcctctcttgccatagttttctcctcctatatcactcttgttgtgctctttgtgcccaagatgcgcaggctgatcacccgaggggaatggcagtcggaggcgcaggacaccatgaagacagggtcatcgaccaacaacaacgaggaggagaagtcccggctgttggagaaggagaaccgtgaactggaaaagatcattgctgagaaagaggagcgtgtctctgaactgcgccatcaactccagtctcggcagcagctccgctcccggcgccacccaccgacacccccagaaccctctgggggcctgcccaggggaccccctgagccccccgaccggcttagctgtgatgggagtcgagtgcatttgctttataagtgagggtagggtgagggaggacaggccagtagggggagggaaagggagaggggaagggcaggggactcaggaagcagggggtccccatccccagctgggaagaacatgctatccaatctcatctcttgtaaatacatgtccccctgtgagttctgggctgatttgggtctctcatacctctgggaaacagacctttttctctcttactgcttcatgtaattttgtatcacctcttcacaatttagttcgtacctggcttgaagctgctcactgctcacacgctgcctcctcagcagcctcactgcatctttctcttcccatgcaacaccctcttctagttaccacggcaacccctgcagctcctctgcctttgtgctctgttcctgtccagcaggggtctcccaacaagtgctctttccaccccaaaggggcctctccttttctccactgtcataatctctttccatcttacttgcccttccatactttctcacatgtggctccccctgaattttgcttcctttgggagctcattcttttcgccaaggctcacatgctccttgcctctgctctgtgcactcacgctcagcacacatgcatcctcccctctcctgcgtgtgcccactgaacatgctcatgtgtacacacgcttttcccgtatgctttcttcatgttcagtcacatgtgctctcgggtgccctgcattcacagctacgtgtgcccctctcatggtcatgggtctgcccttgagcgtgtttgggtaggcatgtgcaatttgtctagcatgctgagtcatgtctttcctatttgcacacgtccatgtttatccatgtactttccctgtgtaccctccatgtaccttgtgtactttcttcccttaaatcatggtattcttctgacagagccatatgtaccctaccctgcacattgttatgcacttttccccaattcatgtttggtggggccatccacaccctctccttgtcacagaatctccatttctgctcagattccccccatctccattgcattcatgtactaccctcagtctacactcacaatcatcttctcccaagactgctcccttttgttttgtgtttttttgaggggaattaaggaaaaataagtgggggcaggtttggagagctgcttccagtggatagttgatgagaatcctgaccaaaggaaggcacccttgactgttgggatagacagatggacctatggggtgggaggtggtgtccctttcacactgtggtgtctcttggggaaggatctccccgaatctcaataaaccagtgaacagtgtgactcgg

SEQ ID NO: 303817 - DNA, 4385 bp, Artificial Sequence
  derived and/or modified sequence
ccctctcttccccccgccctgccttcccttgcaccctccttcttccctccgcccgggagctctccctggtccccggcgccgcctccttccctcccggctccccgctccccgctcccgtggctgccgccgccccggggaagaagagacaggggtggggtttgggggaagcgagagaggaggggagagaccctggccaggctggagcctggattcgaggggaggagggacgggaggaggagaaaggtggaggagaagggaggggggagcggggaggagcggccgggcctggggccttgaggcccggggagagccggggagccgggcccgcgcgccgagatgttgctgctgctgctactggcgccactcttcctccgccccccgggcgcgggcggggcgcagacccccaacgccacctcagaaggttgccagatcatacacccgccctgggaagggggcatcaggtaccggggcctgactcgggaccaggtgaaggctatcaacttcctgccagtggactatgagattgagtatgtgtgccggggggagcgcgaggtggtggggcccaaggtccgcaagtgcctggccaacggctcctggacagatatggacacacccagccgctgtgtccgaatctgctccaagtcttatttgaccctggaaaatgggaaggttttcctgacgggtggggacctcccagctctggacggagcccgggtggatttccggtgtgaccccgacttccatctggtgggcagctcccggagcatctgtagtcagggccagtggagcacccccaagccccactgccaggtgaatcgaacgccacactcagaacggcgcgcagtgtacatcggggcactgtttcccatgagcgggggctggccagggggccaggcctgccagcccgcggtggagatggcgctggaggacgtgaatagccgcagggacatcctgccggactatgagctcaagctcatccaccacgacagcaagtgtgatccaggccaagccaccaagtacctatatgagctgctctacaacgaccctatcaagatcatccttatgcctggctgcagctctgtctccacgctggtggctgaggctgctaggatgtggaacctcattgtgctttcctatggctccagctcaccagccctgtcaaaccggcagcgtttccccactttcttccgaacgcacccatcagccacactccacaaccctacccgcgtgaaactctttgaaaagtggggctggaagaagattgctaccatccagcagaccactgaggtcttcacttcgactctggacgacctggaggaacgagtgaaggaggctggaattgagattactttccgccagagtttcttctcagatccagctgtgcccgtcaaaaacctgaagcgccaggatgcccgaatcatcgtgggacttttctatgagactgaagcccggaaagttttttgtgaggtgtacaaggagcgtctctttgggaagaagtacgtctggttcctcattgggtggtatgctgacaattggttcaagatctacgacccttctatcaactgcacagtggatgagatgactgaggcggtggagggccacatcacaactgagattgtcatgctgaatcctgccaatacccgcagcatttccaacatgacatcccaggaatttgtggagaaactaaccaagcgactgaaaagacaccctgaggagacaggaggcttccaggaggcaccgctggcctatgatgccatctgggccttggcactggccctgaacaagacatctggaggaggcggccgttctggtgtgcgcctggaggacttcaactacaacaaccagaccattaccgaccaaatctaccgggcaatgaactcttcgtcctttgagggtgtctctggccatgtggtgtttgatgccagcggctctcggatggcatggacgcttatcgagcagcttcagggtggcagctacaagaagattggctactatgacagcaccaaggatgatctttcctggtccaaaacagataaatggattgttatatccagaactcacagcccaacctgaacaacctgactgctgtgggctgctcactggctttagctgctgtcttccccctggggctcgatggttaccacattgggaggaaccagtttcctttcgtctgccaggcccgcctctggctcctgggcctgggctttagtctgggctacggttccatgttcaccaagatttggtgggtccacacggtcttcacaaagaaggaagaaaagaaggagtggaggaagactctggaaccctggaagctgtatgccacagtgggcctgctggtgggcatggatgtcctcactctcgccatctggcagatcgtggaccctctgcaccggaccattgagacatttgccaaggaggaacctaaggaagatattgacgtctctattctgccccagctggagcattgcagctccaggaagatgaatacatggcttggcattttctatggttacaaggggctgctgctgctgctgggaatcttccttgcttatgagaccaagagtgtgtccactgagaagatcaatgatcaccgggctgtgggcatggctatctacaatgtggcagtcctgtgcctcatcactgctcctgtcaccatgattctgtccagccagcaggatgcagcctttgcctttgcctctcttgccatagttttctcctcctatatcactcttgttgtgctctttgtgcccaagatgcgcaggctgatcacccgaggggaatggcagtcggaggcgcaggacaccatgaagacagggtcatcgaccaacaacaacgaggaggagaagtcccggctgttggagaaggagaaccgtgaactggaaaagatcattgctgagaaagaggagcgtgtctctgaactgcgccatcaactccagtctcggcagcagctccgctcccggcgccacccaccgacacccccagaaccctctgggggcctgcccaggggaccccctgagccccccgaccggcttagctgtgatgggagtcgagtgcatttgctttataagtgagggtagggtgagggaggacaggccagtagggggagggaaagggagaggggaagggcaggggactcaggaagcagggggtccccatccccagctgggaagaacatgctatccaatctcatctcttgtaaatacatgtccccctgtgagttctgggctgatttgggtctctcatacctctgggaaacagacctttttctctcttactgcttcatgtaattttgtatcacctcttcacaatttagttcgtacctggcttgaagctgctcactgctcacacactgcctcctcagcagcctcactgcatctttctcttcccatgcaacaccctcttctagttaccacggcaacccctgcagctcctctgcctttgtgctctgttcctgtccagcaggggtctcccaacaagtgctctttccaccccaaaggggcctctccttttctccactgtcataatctctttccatcttacttgcccttctatactttctcacatgtggctccccctgaattttgcttcctttgggagctcattcttttcgccaaggctcacatgctccttgcctctgctctgtgcactcacgctcagcacacatgcatcctcccctctcctgcgtgtgcccactgaacatgctcatgtgtacacacgcttttcccgtatgctttcttcatgttcagtcacatgtgctctcgggtgccctgcattcacagctacgtgtgcccctctcatggtcatgggtctgcccttgagcgtgtttgggtaggcatgtgcaatttgtctagcatgctgagtcatgtctttcctatttgcacacgtccatgtttatccatgtactttccctgtgtaccctccatgtaccttgtgtactttcttcccttaaatcatggtattcttctgacagagccatatgtaccctaccctgcacattgttatgcacttttccccaattcatgtttggtggggccatccacaccctctccttgtcacagaatctccatttctgctcagattccccccatctccattgcattcatgtactaccctcagtctacactcacaatcatcttctcccaagactgctcccttttgttttgtgtttttttgaggggaattaaggaaaaataagtgggggcaggtttggagagctgcttccagtggatagttgatgagaatcctgaccaaaggaaggcacccttgactgttgggatagacagatggacctatggggtgggaggtggtgtccctttcacactgtggtgtctcttggggaaggatctccccgaatctcaataaaccagtgaacagtgtgactcggc

SEQ ID NO: 303818 - DNA, 1737 bp, Artificial Sequence
  derived and/or modified sequence
atgctgctgctgctgctgctggcccccctgttcctgagaccccccggcgccggcggcgcccagacccccaacgccaccagcgagggctgccagatcatccaccccccctgggagggcggcatcagatacagaggcctgaccagagaccaggtgaaggccatcaacttcctgcccgtggactacgagatcgagtacgtgtgcagaggcgagagagaggtggtgggccccaaggtgagaaagtgcctggccaacggcagctggaccgacatggacacccccagcagatgcgtgagaatctgcagcaagagctacctgaccctggagaacggcaaggtgttcctgaccggcggcgacctgcccgccctggacggcgccagagtggacttcagatgcgaccccgacttccacctggtgggcagcagcagaagcatctgcagccagggccagtggagcacccccaagccccactgccaggtgaacagaaccccccacagcgagagaagagccgtgtacatcggcgccctgttccccatgagcggcggctggcccggcggccaggcctgccagcccgccgtggagatggccctggaggacgtgaacagcagaagagacatcctgcccgactacgagctgaagctgatccaccacgacagcaagtgcgaccccggccaggccaccaagtacctgtacgagctgctgtacaacgaccccatcaagatcatcctgatgcccggctgcagcagcgtgagcaccctggtggccgaggccgccagaatgtggaacctgatcgtgctgagctacggcagcagcagccccgccctgagcaacagacagagattccccaccttcttcagaacccaccccagcgccaccctgcacaaccccaccagagtgaagctgttcgagaagtggggctggaagaagatcgccaccatccagcagaccaccgaggtgttcaccagcaccctggacgacctggaggagagagtgaaggaggccggcatcgagatcaccttcagacagagcttcttcagcgaccccgccgtgcccgtgaagaacctgaagagacaggacgccagaatcatcgtgggcctgttctacgagaccgaggccagaaaggtgttctgcgaggtgtacaaggagagactgttcggcaagaagtacgtgtggttcctgatcggctggtacgccgacaactggttcaagatctacgaccccagcatcaactgcaccgtggacgagatgaccgaggccgtggagggccacatcaccaccgagatcgtgatgctgaaccccgccaacaccagaagcatcagcaacatgaccagccaggagttcgtggagaagctgaccaagagactgaagagacaccccgaggagaccggcggcttccaggaggcccccctggcctacgacgccatctgggccctggccctggccctgaacaagaccagcggcggcggcggcagaagcggcgtgagactggaggacttcaactacaacaaccagaccatcaccgaccagatctacagagccatgaacagcagcagcttcgagggcgtgagcggccacgtggtgttcgacgccagcggcagcagaatggcctggaccctgatcgagcagctgcagggcggcagctacaagaagatcggctactacgacagcaccaaggacgacctgagctggagcaagaccgacaagtggatcgtgatcagcagaacccacagccccacctag

SEQ ID NO: 303819 - DNA, 471 bp, Artificial Sequence
  derived and/or modified sequence
atgctgctgctgctgctgctggcccccctgttcctgagaccccccggcgccggcggcgcccagacccccaacgccaccagcgagggctgccagatcatccaccccccctgggagggcggcatcagatacagaggcctgaccagagaccaggtgaaggccatcaacttcctgcccgtggactacgagatcgagtacgtgtgcagaggcgagagagaggtggtgggccccaaggtgagaaagtgcctggccaacggcagctggaccgacatggacacccccagcagatgcgtgagaatctgcagcaagagctacctgaccctggagaacggcaaggtgttcctgaccggcggcgacctgcccgccctggacggcgccagagtggacttcagatgcgaccccgacttccacctggtgggcagcagcagaagcatctgcagccagggccagtggagcacccccaagccccactag

SEQ ID NO: 303820 - DNA, 1737 bp, Artificial Sequence
  derived and/or modified sequence
atgctgctgttgctcttgctcgcgcccctgttcctgagaccgccaggtgccggaggtgcccagactcctaatgccacaagcgagggttgccagataatccatcctccttgggaaggcgggatcagatatcgcggactgacgagggatcaagttaaagcaatcaattttcttccagtggattatgagatcgaatacgtctgcagaggagagagggaggtcgtggggccaaaggtgcggaagtgcctggcaaacgggtcttggaccgacatggatactccctcaagatgtgtgaggatttgctctaaatcctatctgactcttgagaatggtaaagtgtttctcaccggaggggatctccctgccctggacggggctagggtcgacttcaggtgtgaccctgacttccacctggtgggaagtagccgcagcatctgctcacagggacagtggagcactcctaagccccattgtcaggtgaacaggactcctcacagcgaaaggagggccgtctacattggagctctgtttcccatgtccggcggatggcctggaggccaggcgtgccaacctgccgttgaaatggctttggaagatgttaacagccgtcgcgacatcctgcctgactacgagttaaaattaatacaccacgacagcaaatgtgatcctggacaggctaccaaatacctctatgagttactgtacaatgatcctatcaagatcatcttgatgcctggatgctcaagcgtctcaaccctcgtagctgaagccgccaggatgtggaaccttatcgtgctgtcttacggtagttcttcacctgccctgtcaaacaggcaaaggtttcccacattcttcagaacacaccccagcgccacattacacaacccaacacgggtcaaattgttcgaaaagtgggggtggaagaagatcgctactatccagcaaacaactgaagtctttactagcaccttagacgacctggaggagagggtcaaggaagcaggaatcgagattacatttcgacagtcttttttttcagaccctgctgtgcctgtgaaaaacctgaaacgccaagatgcgcggatcattgttggtttgttttacgaaactgaagcacggaaagtcttctgcgaggtgtacaaagaacgcctcttcggaaagaagtacgtctggttcttgattggttggtatgccgataattggttcaaaatctatgatccttctattaactgcaccgtggacgaaatgactgaagcagtggagggccacatcactaccgagatcgtgatgctgaaccccgcaaatacacgcagtatcagtaacatgacatcacaggaatttgtagaaaagctcaccaagcgcctcaaacgacatcccgaagaaaccggtggattccaggaagcacccctcgcttacgatgccatctgggcacttgccttggccttaaacaagaccagcggtggcggtggtagatcaggcgtgcggctcgaggattttaactataataaccaaacaatcacagatcagatctatagagctatgaacagtagttctttcgagggtgtctccggacacgtcgtgtttgacgcctctggttccagaatggcctggacgcttatcgagcagctgcagggaggcagttacaaaaagatcggatactacgactcaacgaaagacgacctgagctggtcaaagacagataaatggatagtcatcagccgtacccacagcccaacctag

SEQ ID NO: 303821 - DNA, 471 bp, Artificial Sequence
  derived and/or modified sequence
atgctcttgctccttctcctggccccgttgtttctgagacccccgggggccggaggcgcacagacaccaaatgccacgtcagaggggtgccagatcattcatccaccttgggagggtggaatccggtacaggggattgacccgcgatcaggttaaggcgatcaacttcctccctgtggactacgagatcgaatatgtgtgtagaggtgagagggaagtggttggaccgaaggtgcgcaagtgtcttgccaatgggtcctggaccgatatggacacaccctcaaggtgcgtgaggatttgtagcaaatcatatctgaccctggaaaatggaaaagtttttcttacgggtggcgacttgccagctctagacggtgcacgagtggattttcgctgcgatcccgatttccaccttgtcggaagcagccgatctatctgttctcaggggcagtggtccacacctaaacctcattag

SEQ ID NO: 303822 - DNA, 1737 bp, Artificial Sequence
  derived and/or modified sequence
atgttgctgcttctcttactcgctccactctttctgcggcctcctggcgccgggggcgcccagacacctaatgccacctccgaaggctgtcagatcattcaccctccgtgggagggaggaattcgatacagagggctgacaagggaccaggtgaaggctataaacttcctgcccgtcgattatgagattgaatacgtgtgtaggggcgaaagggaggtcgttggtcctaaggtcaggaagtgtctggccaatggcagttggaccgatatggataccccgtctcgttgtgttaggatatgcagcaagtcatacctgacactcgagaacggcaaagtgttccttactggcggcgatcttcctgcactggacggagcgagggtcgactttcgctgcgacccagactttcacctggtgggcagcagtaggtctatatgctctcagggccagtggtcaacccctaaacctcactgccaggttaatagaacgccacacagcgagcgcagagctgtatacatcggtgctctgttccctatgtctggtggatggcctggagggcaggcatgccaaccagccgttgagatggcactcgaggacgttaactctcggcgagacatcttgccagactacgagttaaagttgatacaccacgactctaaatgtgaccccggacaggccacaaaatacctatacgaactcctgtataacgatccaataaagatcattctgatgcctgggtgcagttctgtcagtaccctcgtggccgaagcggccagaatgtggaacctgattgtattatcttatggttcttcgagtcccgctctgagtaatcgtcagcgattccctacattttttcgtactcacccctcggccacactgcacaacccgacacgagtgaagctgttcgagaagtggggttggaagaaaattgccacgatccagcagactaccgaggtgttcacctcaacgctggacgacttggaggagcgagttaaggaggcaggcatcgaaatcacattccggcagtcattcttttccgaccccgccgtgccagtgaagaacctgaagcgccaggatgcaagaattatcgttggcctattctacgagaccgaagctagaaaggtgttttgtgaggtctacaaagagagattatttggaaaaaagtatgtttggttcctgataggatggtacgccgataattggttcaagatctacgacccatctatcaattgcaccgtggacgagatgaccgaagccgtggagggtcacatcaccaccgagatcgtgatgcttaatccagcaaatactcggtcaataagcaacatgacttcacaggagtttgtggagaagctcactaaacgcctcaaaaggcaccctgaggagaccgggggttttcaggaggcacccctagcgtacgacgctatctgggcactggccctcgctctcaacaaaacatcagggggcgggggtagatccggcgtccggcttgaagattttaattacaacaatcagactattaccgaccaaatctacagggccatgaattccagttctttcgagggcgtgagcggtcacgttgtcttcgatgcatcaggtagccgtatggcctggaccctgatcgaacagctacagggggggtcgtacaaaaaaatcggctactacgattctacaaaagatgatttaagttggtctaaaaccgacaaatggattgtgatctcaaggacacattcccctacatag

SEQ ID NO: 303823 - DNA, 1737 bp, Artificial Sequence
  derived and/or modified sequence
atgttgctcctgttgctgctggccccgcttttcctgcgccctcctggagctggcggggctcagacaccaaatgccacaagcgaaggatgtcagatcattcacccaccctgggaagggggcattagatatcgggggctgaccagggaccaggttaaagccatcaacttcctgccggtagactacgaaatcgagtatgtctgtcgtggcgaacgggaggtcgtggggcctaaggtgcgtaagtgtctggcaaacgggtcatggaccgacatggataccccaagtagatgcgtccgcatctgctctaaatcctatctcaccctcgaaaatggcaaagtgttcttgacaggcggtgatttacccgcattggatggggccagggtggactttcggtgcgaccccgacttccacttagttgggtcatcccggagcatatgcagccagggccagtggtctacacctaagcctcactgtcaggtgaataggacacctcatagcgagaggcgcgcggtctatattggggccttattccccatgtccggggggtggccagggggccaggcatgtcagcccgctgtcgaaatggccctcgaagatgtgaattccagacgggatatccttccagattacgagctgaagttgatccatcatgactctaaatgtgatcctgggcaggccactaaatatctctacgagctgctttataacgaccctatcaagattatccttatgccgggttgcagcagtgtttctaccctcgtagcagaggctgcccgcatgtggaacctgattgtgctgtcctatggaagcagcagccctgcattgtcaaaccgccaacggtttcccacttttttcaggactcatccctctgccaccctgcacaacccgactagagttaagctgtttgaaaaatggggctggaagaaaatagccacaatccagcagactaccgaggttttcacatcaaccctggacgatctggaagagcgcgtgaaggaagccggcatcgagataacattcaggcagagctttttttctgaccctgccgtgccagtcaaaaacctaaagaggcaagacgcccgcattatagtgggcctgttctatgaaacggaagcccggaaggtattttgtgaagtttacaaggaaagactgttcggcaagaagtacgtgtggttcctgatcggttggtacgcagacaattggttcaagatttacgatccgagcatcaactgcacagtcgacgagatgacagaggccgtggaaggccatataaccacagagatcgtgatgttgaatcctgccaacacccggagcatctctaacatgacgtctcaggagttcgttgagaaattgactaagcggttgaagcggcaccctgaagaaactgggggcttccaggaagcccccctggcctatgacgccatatgggctttggccttagccctcaacaagacaagtgggggcggtgggcgctcaggtgtcagactcgaagatttcaattataataatcagaccattaccgatcagatctacagagccatgaatagctcctctttcgaaggggtgtccggccatgtggtatttgacgcgagtggtagtaggatggcttggacccttatcgagcagctccagggtgggagttataaaaaaattggatattatgatagtacaaaggatgatcttagctggtctaagaccgacaagtggattgtgatttccagaactcacagccctacgtag

SEQ ID NO: 303824 - DNA, 1737 bp, Artificial Sequence
  derived and/or modified sequence
atgctgctgctgctgcttctggcccccctgtttctgcggcctccaggagcaggaggcgctcagaccccgaacgcaaccagcgagggctgtcaaattatccatcctccttgggagggcgggatccgatatcgcggtcttactagagaccaggtgaaagcgattaattttctccccgtggactatgagattgaatacgtgtgcagaggcgagcgtgaagttgtgggccccaaggtgagaaaatgtctggccaatggttcctggactgacatggacacgccaagtagatgtgtgaggatatgctctaagagctaccttacactcgaaaatggcaaggttttcctgaccggcggggatctgccagcactagacggcgccagggtggatttccggtgcgatcccgatttccatttggtagggagcagtaggtccatctgctctcaaggccagtggtccactcccaagccacattgccaggtcaatcgcactccacatagcgaaagacgtgctgtttacattggcgccctcttccccatgtcaggcgggtggccaggaggccaggcctgtcagccggccgttgagatggcgctcgaggacgtcaactcaaggcgcgatatccttcccgactacgagttgaagctgatccatcacgatagtaagtgcgatccagggcaagcgaccaaatatctgtacgagctgctttataacgatccgataaaaattatcttaatgccaggctgttcgtctgtgtctacccttgtcgccgaagcagcccggatgtggaacctgatagtgctctcctatgggtcctctagcccagcactgtccaaccggcagagattccctacgtttttcagaacacatccctctgccactctccataatcctactcgggttaagctgtttgagaagtgggggtggaaaaaaatcgccactatccagcagacgaccgaagtgttcacttccaccttagacgacttggaagaacgcgtgaaggaagctggtatcgaaattacttttagacagagcttcttttccgaccctgccgtcccagtaaagaatttgaaaagacaagatgcccgcatcatcgtcggactgttttatgagactgaggcacgaaaagtgttttgtgaagtctacaaggagaggcttttcggaaagaaatatgtgtggtttctgattggatggtacgccgataactggtttaaaatctatgaccctagcatcaattgtactgtagacgaaatgacagaagcagttgagggccatatcaccacagagatcgtcatgttaaaccctgccaatacacgcagcattagcaatatgacaagccaagaattcgtggagaagttgacaaaacgtctcaaaagacatcccgaagagactggcggattccaggaggccccactggcctacgatgccatttgggcactcgccttagccttgaataaaacatccgggggcggcggacgctctggcgtccgcctcgaagactttaactacaacaaccaaactattaccgaccagatctaccgcgccatgaatagctccagctttgaaggggtcagtgggcatgttgtgttcgacgcctccggctcccgcatggcatggacccttatagaacagttgcagggagggtcttacaaaaaaattggttattacgactcgactaaggacgatctaagttggtctaaaacggacaagtggatcgtgatttcacgaacccactctcctacatag

SEQ ID NO: 303825 - DNA, 1737 bp, Artificial Sequence
  derived and/or modified sequence
atgctgctactactcctgctggctcctttgtttctgaggccaccaggagcagggggggcccaaacaccaaacgcgacttccgaggggtgtcagatcatccaccccccttgggaggggggtatccggtaccgcgggctcactagggatcaagtaaaggcaattaattttttgccggtcgattatgaaatagaatatgtctgccggggcgagcgcgaggtggtggggcccaaagtacggaagtgtctggccaacgggagttggacagatatggacacgccgtctaggtgtgtgcgcatctgttcaaagtcctacctgactctcgagaatggcaaagtgttcctgaccggaggggacctgccagcattggacggtgcacgcgtggacttccgatgtgacccagattttcatcttgttggctctagcagatctatttgtagccagggacagtggtccaccccaaagccacactgtcaggttaatcggacacctcacagcgagcgtagagccgtgtacatcggggccctttttccgatgagtggagggtggccgggaggacaagcctgtcagccggctgttgaaatggccctagaggatgtcaacagcagaagagacatactccccgactatgaactcaagctaatccaccatgattcaaaatgcgatcccggacaggctacaaaatacctatatgagctcttgtacaacgaccccattaagatcattctaatgccagggtgcagttctgtgtctacactggttgccgaggcggcacgtatgtggaatctgatcgtgctgagttatggttcttcctcacccgctctgtcgaacagacagagattcccgacttttttcaggacgcatccaagtgccaccttacacaatcccactcgagtgaagctctttgagaaatggggttggaagaagatcgccaccatccagcaaacgaccgaagtattcacgtccaccctggatgacctcgaggagcgcgtgaaagaggctggcatagagatcaccttcaggcagtcctttttcagtgatcctgctgtgcccgtgaaaaacctaaaaagacaggacgccagaattattgtgggactcttttatgagactgaagcaaggaaggtcttctgcgaggtgtacaaggaacgcctctttggaaaaaaatacgtctggttcctgatcgggtggtacgctgataactggtttaaaatttatgacccaagcattaattgcacagtcgatgagatgacagaggccgtcgaaggccatattactactgagatagtcatgctgaatcccgcaaatactaggtccatcagcaatatgaccagtcaggagttcgtggagaaactcaccaaaaggctcaaaagacaccccgaagagacgggcggattccaggaggctccccttgcatatgatgcaatatgggccctggccctggctttgaataaaacctcgggcggcggcggccgatccggggtaagattagaagacttcaattataacaaccagacaattaccgatcagatctatagggccatgaactcgagttctttcgagggggtttctggacacgtcgtgttcgacgctagcggctctaggatggcttggacgctgattgaacaactccaaggcgggtcctacaaaaaaatcggctattacgacagtactaaggatgacctctcatggtccaaaacggacaagtggatcgtgatatctcgaacccatagcccaacttag

SEQ ID NO: 303826 - DNA, 1737 bp, Artificial Sequence
  derived and/or modified sequence
atgctgctgctattgctccttgcccccttatttttacggccccctggggccgggggagcccaaacgcctaatgccacatctgaaggttgccaaatcatccatcccccctgggaggggggcatcagataccgcggcctgacgagagaccaggtgaaggccatcaactttctgccggtcgattatgagattgaatacgtgtgtaggggcgaacgcgaagtagtcgggcccaaggtccgtaagtgtttggctaacggatcctggaccgacatggatactcccagtagatgtgtaagaatttgctcaaagtcttaccttaccttggaaaacggcaaagtctttctgaccggcggtgacctgccagctctggatggcgcgagagtagacttccgctgcgaccctgatttccatctagtcggctcaagtaggagcatctgctcccagggacagtggagtacccccaaaccccattgccaggtgaaccggactccacactcagaacggcgcgcagtgtacattggtgcgctttttccaatgagtggcgggtggcctggagggcaggcctgtcaaccagccgtcgagatggcgctggaggacgtgaactctcggcgtgacatcctgcctgattacgagctgaaactgatacatcacgatagtaagtgtgatccaggacaggccactaagtacctctatgagctgctgtataacgatcctatcaagatcatcctaatgcctggatgttcaagcgtcagcaccctggtggcggaagccgccagaatgtggaatttaattgtcctgagctacggctcaagttcccctgctctcagtaaccggcagaggttccctacgtttttcagaacccacccctcagctaccctgcacaacccaactcgggtaaagctgtttgagaaatggggttggaagaaaatcgcaacaattcaacagacgacagaggttttcacctctacgctggacgacctggaagagcgtgttaaagaagcaggcattgaaatcacttttcggcagagcttcttcagtgatccagccgtaccagtgaaaaaccttaagagacaagatgctcgtatcatcgtgggtctattctacgaaacggaagctaggaaagtgttctgcgaggtttacaaggagcgacttttcggcaagaagtacgtctggttcctgattggatggtacgccgataactggtttaaaatttacgatccttccatcaattgtaccgtggacgaaatgactgaggccgtggaaggccacataaccacagaaattgtgatgcttaaccccgctaataccagaagcatatcaaatatgacctcccaggaatttgtggagaaattgacaaagaggctgaagcggcatcccgaagaaacaggtgggtttcaagaggctcccttggcctatgacgcgatctgggccctcgcattggcgcttaacaagacctcaggcggaggaggacgcagtggtgtaaggctcgaggatttcaactacaacaaccagacaattactgaccagatttatagggcaatgaactcatccagcttcgagggggtttccggccacgtggtgtttgatgcgagcggcagccgcatggcgtggacgctaatagaacagctacaaggcggaagttataagaagattggctactatgattccacaaaagatgacctttcatggagcaagacagataagtggattgtcatctcacgcacccattccccaacttag

SEQ ID NO: 303827 - DNA, 1737 bp, Artificial Sequence
  derived and/or modified sequence
atgctgctgctgctgctgctggcccccctcttcctgcggcccccaggagctggaggagcccagaccccaaatgccaccagcgagggctgccagatcatccaccccccctgggagggcggcatccgctaccggggcctgacccgggaccaggtgaaggccatcaacttcctgcctgtggactatgaaattgaatatgtgtgccgcggggagcgggaggtggtgggccccaaggtgaggaagtgcctggccaacggctcctggacagacatggacacccccagccgctgtgtgcgcatctgcagcaagagctacctgaccctggagaatggcaaggtgttcctgactggaggagacctgcctgccctggatggagcccgggtggacttccgctgtgaccctgacttccacctggtgggcagcagccgcagcatctgcagccagggccagtggagcacccccaagccccactgccaggtgaacagaacaccccacagcgagaggagagctgtgtacatcggggccctcttccccatgtctgggggctggccaggcggccaggcctgccagcctgctgtggagatggccctggaggatgtgaacagccggcgggacatcctgcctgactatgagctgaagctgatccaccacgacagcaaatgtgaccccggccaggccaccaagtacctgtatgagctgctgtacaatgaccccatcaagatcatcctgatgcctggctgcagctctgtgtccaccctggtggccgaggccgccaggatgtggaacctgattgtgctgtcctatggcagcagcagccctgccctgagcaaccggcagcgcttccccaccttcttccgcacccaccccagcgccaccctgcacaaccccaccagggtgaagctgtttgagaagtggggctggaagaagatcgccaccatccagcagaccacagaggtgttcaccagcaccctggatgacctggaggagcgggtgaaggaggccggcatcgagatcaccttccggcagagcttcttcagtgaccctgctgtgcctgtgaagaacctgaagaggcaggatgcccgcatcatcgtgggcctcttctatgaaacagaggccaggaaggtgttctgtgaggtgtacaaggagcggctgtttgggaagaagtatgtgtggttcctgattggctggtatgctgacaactggttcaagatctatgaccccagcatcaactgcaccgtggatgagatgacagaggccgtggagggccacatcaccacagaaattgtgatgctgaacccagccaacaccaggagcatcagcaacatgaccagccaggagtttgtggagaagctgaccaagaggctgaagaggcaccctgaggagactggaggcttccaggaggcccccctggcctatgatgccatctgggccctggccctggccctgaacaagaccagcggcggcggcggccgctctggagtgcggctggaggacttcaactacaacaaccagaccatcacagaccagatctaccgggccatgaacagcagcagctttgagggcgtgtctggccacgtggtgtttgatgccagcggcagcaggatggcctggaccctgattgagcagctgcagggcggcagctacaagaagattggctactatgacagcaccaaggatgacctgtcctggagcaagacagacaagtggatcgtcatcagcaggacccacagccccacctag

SEQ ID NO: 303828 - DNA, 471 bp, Artificial Sequence
  derived and/or modified sequence
atgctgctgctgctgctgctggcccccctcttcctgcggcccccaggagctggaggagcccagaccccaaatgccaccagcgagggctgccagatcatccaccccccctgggagggcggcatccgctaccggggcctgacccgggaccaggtgaaggccatcaacttcctgcctgtggactatgaaattgaatatgtgtgccgcggggagcgggaggtggtgggccccaaggtgaggaagtgcctggccaacggctcctggacagacatggacacccccagccgctgtgtgcgcatctgcagcaagagctacctgaccctggagaatggcaaggtgttcctgactggaggagacctgcctgccctggatggagcccgggtggacttccgctgtgaccctgacttccacctggtgggcagcagccgcagcatctgcagccagggccagtggagcacccccaagccccactag

SEQ ID NO: 303829 - DNA, 4385 bp, Artificial Sequence
  derived and/or modified sequence
ccctctcttccccccgccctgccttcccttgcaccctccttcttccctccgcccgggagctctccctggtccccggcgccgcctccttccctcccggctccccgctccccgctcccgtggctgccgccgccccggggaagaagagacaggggtggggtttgggggaagcgagagaggaggggagagaccctggccaggctggagcctggattcgaggggaggagggacgggaggaggagaaaggtggaggagaagggaggggggagcggggaggagcggccgggcctggggccttgaggcccggggagagccggggagccgggcccgcgcgccgagatgttgctgctgctgctactggcgccactcttcctccgccccccgggcgcgggcggggcgcagacccccaacgccacctcagaaggttgccagatcatacacccgccctgggaagggggcatcaggtaccggggcctgactcgggaccaggtgaaggctatcaacttcctgccagtggactatgagattgagtatgtgtgccggggggagcgcgaggtggtggggcccaaggtccgcaagtgcctggccaacggctcctggacagatatggacacacccagccgctgtgtccgaatctgctccaagtcttatttgaccctggaaaatgggaaggttttcctgacgggtggggacctcccagctctggacggagcccgggtggatttccggtgtgaccccgacttccatctggtgggcagctcccggagcatctgtagtcagggccagtggagcacccccaagccccactgccaggtgaatcgaacgccacactcagaacggcgcgcagtgtacatcggggcactgtttcccatgagcgggggctggccagggggccaggcctgccagcccgcggtggagatggcgctggaggacgtgaatagccgcagggacatcctgccggactatgagctcaagctcatccaccacgacagcaagtgtgatccaggccaagccaccaagtacctatatgagctgctctacaacgaccctatcaagatcatccttatgcctggctgcagctctgtctccacgctggtggctgaggctgctaggatgtggaacctcattgtgctttcctatggctccagctcaccagccctgtcaaaccggcagcgtttccccactttcttccgaacgcacccatcagccacactccacaaccctacccgcgtgaaactctttgaaaagtggggctggaagaagattgctaccatccagcagaccactgaggtcttcacttcgactctggacgacctggaggaacgagtgaaggaggctggaattgagattactttccgccagagtttcttctcagatccagctgtgcccgtcaaaaacctgaagcgccaggatgcccgaatcatcgtgggacttttctatgagactgaagcccggaaagttttttgtgaggtgtacaaggagcgtctctttgggaagaagtacgtctggttcctcattgggtggtatgctgacaattggttcaagatctacgacccttctatcaactgcacagtggatgagatgactgaggcggtggagggccacatcacaactgagattgtcatgctgaatcctgccaatacccgcagcatttccaacatgacatcccaggaatttgtggagaaactaaccaagcgactgaaaagacaccctgaggagacaggaggcttccaggaggcaccgctggcctatgatgccatctgggccttggcactggccctgaacaagacatctggaggaggcggccgttctggtgtgcgcctggaggacttcaactacaacaaccagaccattaccgaccaaatctaccgggcaatgaactcttcgtcctttgagggtgtctctggccatgtggtgtttgatgccagcggctctcggatggcatggacgcttatcgagcagcttcagggtggcagctacaagaagattggctactatgacagcaccaaggatgatctttcctggtccaaaacagataaatggattgttatatccagaactcacagcccaacctgaacaacctgactgctgtgggctgctcactggctttagctgctgtcttccccctggggctcgatggttaccacattgggaggaaccagtttcctttcgtctgccaggcccgcctctggctcctgggcctgggctttagtctgggctacggttccatgttcaccaagatttggtgggtccacacggtcttcacaaagaaggaagaaaagaaggagtggaggaagactctggaaccctggaagctgtatgccacagtgggcctgctggtgggcatggatgtcctcactctcgccatctggcagatcgtggaccctctgcaccggaccattgagacatttgccaaggaggaacctaaggaagatattgacgtctctattctgccccagctggagcattgcagctccaggaagatgaatacatggcttggcattttctatggttacaaggggctgctgctgctgctgggaatcttccttgcttatgagaccaagagtgtgtccactgagaagatcaatgatcaccgggctgtgggcatggctatctacaatgtggcagtcctgtgcctcatcactgctcctgtcaccatgattctgtccagccagcaggatgcagcctttgcctttgcctctcttgccatagttttctcctcctatatcactcttgttgtgctctttgtgcccaagatgcgcaggctgatcacccgaggggaatggcagtcggaggcgcaggacaccatgaagacagggtcatcgaccaacaacaacgaggaggagaagtcccggctgttggagaaggagaaccgtgaactggaaaagatcattgctgagaaagaggagcgtgtctctgaactgcgccatcaactccagtctcggcagcagctccgctcccggcgccacccaccgacacccccagaaccctctgggggcctgcccaggggaccccctgagccccccgaccggcttagctgtgatgggagtcgagtgcatttgctttataagtgagggtagggtgagggaggacaggccagtagggggagggaaagggagaggggaagggcaggggactcaggaagcagggggtccccatccccagctgggaagaacatgctatccaatctcatctcttgtaaatacatgtccccctgtgagttctgggctgatttgggtctctcatacctctgggaaacagacctttttctctcttactgcttcatgtaattttgtatcacctcttcacaatttagttcgtacctggcttgaagctgctcactgctcacacgctgcctcctcagcagcctcactgcatctttctcttcccatgcaacaccctcttctagttaccacggcaacccctgcagctcctctgcctttgtgctctgttcctgtccagcaggggtctcccaacaagtgctctttccaccccaaaggggcctctccttttctccactgtcataatctctttccatcttacttgcccttctatactttctcacatgtggctccccctgaattttgcttcctttgggagctcattcttttcgccaaggctcacatgctccttgcctctgctctgtgcactcacgctcagcacacatgcatcctcccctctcctgcgtgtgcccactgaacatgctcatgtgtacacacgcttttcccgtatgctttcttcatgttcagtcacatgtgctctcgggtgccctgcattcacagctacgtgtgcccctctcatggtcatgggtctgcccttgagcgtgtttgggtaggcatgtgcaatttgtctagcatgctgagtcatgtctttcctatttgcacacgtccatgtttatccatgtactttccctgtgtaccctccatgtaccttgtgtactttcttcccttaaatcatggtattcttctgacagagccatatgtaccctaccctgcacattgttatgcacttttccccaattcatgtttggtggggccatccacaccctctccttgtcacagaatctccatttctgctcagattccccccatctccattgcattcatgtactaccctcagtctacactcacaatcatcttctcccaagactgctcccttttgttttgtgtttttttgaggggaattaaggaaaaataagtgggggcaggtttggagagctgcttccagtggatagttgatgagaatcctgaccaaaggaaggcacccttgactgttgggatagacagatggacctatggggtgggaggtggtgtccctttcacactgtggtgtctcttggggaaggatctccccgaatctcaataaaccagtgaacagtgtgactcggc

SEQ ID NO: 303830 - DNA, 1737 bp, Artificial Sequence
  derived and/or modified sequence
atgctgctgctgctgctgctggcccccctgttcctgcggccccccggcgccggaggcgcccaaactcccaatgctacgtcggaaggatgccagatcattcaccctccctgggaaggaggtattcgctaccgggggctgacccgggaccaagttaaagcaattaatttcttaccggtggattatgagattgagtacgtgtgccggggagaaagagaagttgtgggccctaaggtccgaaaatgccttgccaacgggagctggaccgacatggacaccccttcccgttgcgtgcgcatttgtagcaaaagctacctgactctcgaaaacggcaaggtctttttgaccggaggagacctccctgccctcgacggcgctagggtggattttcgttgcgacccagactttcatttggtgggttcttcccgaagcatatgcagtcaagggcagtggagcacaccgaagccacactgccaggtcaatagaaccccccacagcgagagaagggcggtgtatattggtgccctctttccaatgtccggaggatggccaggggggcaggcctgtcagcctgccgtcgaaatggcgctggaggacgtcaattccaggcgggacattctgcctgattacgaactaaagctgatccatcacgactctaaatgcgatcctggacaggctactaaatatctgtacgaactgctctataatgaccccataaaaattatcctgatgcccgggtgctctagtgtttcaaccctggtggcagaagccgctagaatgtggaatttgattgttctgtcctatggcagtagctctcccgcactttctaatcgtcagagattcccgacctttttcagaacccatccatctgccactcttcataacccaacccgggtcaaactcttcgagaagtggggttggaagaaaatcgcgaccatccagcagactactgaggtgttcacatcgactctggacgacctcgaggagagagtaaaagaagccggaatagaaataactttccgtcagagctttttctctgatcctgcagtgcctgtcaagaatctgaagcgccaggatgcccgcatcattgtgggcctgttctacgagacagaagctcgtaaggtattttgtgaggtttataaagagcgactgtttggaaagaaatatgtttggttcttgatcgggtggtatgcagacaactggttcaagatctatgatcccagcattaactgtaccgtagacgaaatgactgaagctgtagagggtcatattacgacagagattgtgatgctgaatcccgcgaacaccagaagtattagcaacatgactagccaagaattcgtggaaaagctgacaaaacggttgaaaagacacccagaggaaaccggcggttttcaggaagctcctctggcctacgatgcaatttgggcccttgctctggcactgaacaagacatccggaggtggaggtcgcagtggcgtccgactcgaggatttcaattataacaatcagacgatcactgaccagatttatagggctatgaactctagtagtttcgaaggtgtctccggacatgtggttttcgatgcgtccgggtcacgcatggcctggaccctcatcgagcagcttcagggcggcagctataaaaagattggttactatgacagcactaaggatgacctgtcatggagtaagaccgacaagtggatcgtgattagcagaacacatagccccacttag

SEQ ID NO: 303831 - DNA, 471 bp, Artificial Sequence
  derived and/or modified sequence
atgctgctgctgctgctgctggcccccctgttcctgcggccccccggagctggaggcgcacagaccccaaatgcgacaagcgagggctgtcagattatccacccaccatgggagggcggcatcaggtatcgaggcttaaccagagaccaggtgaaggcaattaactttctgcccgtagattacgagattgaatacgtgtgccgaggggaaagggaagtagtggggcccaaggtgaggaaatgcctggccaatgggtcttggactgacatggacactccatctcgatgcgttaggatctgtagcaagagctatctgactctcgagaacggcaaagtgtttttaacaggtggtgatctgcctgctctcgatggagcgagagtcgactttcgatgcgaccctgattttcaccttgttggatctagcaggtccatctgtagccaggggcagtggagcactcctaaaccacattag

SEQ ID NO: 303832 - RNA, 1737 nt, Artificial Sequence
  derived and/or modified sequence
auguuacuucuccuccugcuggccccccuguuccuucgcccacccggcgccggcggggcacagacacccaacgccacgucugaagggugucagaucauccacccuccaugggaaggugggauccgauaucgcggccuuacgagagaccaggugaaagcuaucaauuuucuccccguugauuacgaaauugaguauguauguagaggcgagagagaaguugucggcccgaaggugcgcaagugccuagcaaaugggucuuggaccgacauggacacaccaucucgaugugugcgcauauguuccaagaguuaucuuacucuggagaauggcaaaguguuccuaacaggcggagaucuccccgcucucgauggagccagaguggacuuuagaugugacccggacuuucaucucguuggcucuuccagaucaaucugcucucaagggcaguggucgacgcccaagccccacugucagguuaacaggaccccucacagugagagacgggcuguguauaucggcgcccuguucccgauguccggcggcuggccaggaggacaggcgugucagccagcgguugaaauggcacucgaagacguaaauagccgccgcgacaucuuacccgauuacgaacugaaauugauccaucaugauuccaaaugugacccgggccaggcuacaaaguaccuguacgaacuccucuauaacgaucccaucaagauaauccugaugccagggugcagcaguguaucuacucuuguggcagaagccgcacggauguggaaccuuaucgugcugucguauggcucuuccucccccgcucucucuaacaggcagagguucccaacuuucuucaggacucacccauccgccacccugcauaaucccaccagagugaaacuauuugagaaguggggcuggaaaaagaucgcuaccauccaacagacgacagagguauucaccucaacccuugacgacuuagaagagcgggugaaggaggcugggauagagauuacauuccggcaguccuuuuuuagugacccagccgucccaguaaaaaaucugaagaggcaagaugcuaggauuauagucggguuguucuacgagacugaagcuagaaaaguauuuugugaagucuauaaggagcgacuguuugguaagaaauauguuugguuucugauuggaugguacgcugauaacugguucaaaaucuacgacccaagcauaaacuguaccgucgaugaaaugacagaggccgucgagggacauauuacuaccgaaauuguaaugcuaaauccagcgaacacccgcagcauuuccaacaugacgagccaagaguuuguagagaaacugacuaagaggcuuaaaaggcacccugaggaaacgggcggcuuccaggaagcuccacuugccuacgacgcuauuugggcgcucgcccuggcucugaauaaaacauccggagggggcgguagaagcggggugaggcuggaggauuuuaauuacaacaaccagacuaucacggaccaaauuuaccgugccaugaacagcuccucauuugagggcgugagcggucacgugguuuuugaugcuagcggcagccgaauggcauggacccucauugaacaguugcagggaggcagcuauaaaaaaaucggcuacuaugacaguacgaaagacgaucuuuccuggaguaaaacggacaaauggauagugauaagcagaacacauuccccaaccuag

SEQ ID NO: 303833 - RNA, 471 nt, Artificial Sequence
  derived and/or modified sequence
auguuauuguuauuacuucuagccccucuguucuuacgcccuccuggagcuggcggagcccagaccccaaaugcuacaucugaaggaugucaaauuauccauccuccuugggaaggugguauccgcuaccgggggcugacuagggaucaagucaaggccaucaacuuccuuccgguggacuaugagauugaauacgucugccggggcgagcgggaagucguuggucccaagguacguaaaugucuugcaaaugguucuuggacggacauggauaccccaucuagaugugugagaaucugcuccaaguccuaccugacacuugaaaauggaaaaguauucuugacuggaggcgauuuacccgcccuggauggagcccgaguggacuuccgcugugaucccgacuuccaucuuguuggcuccagucgcucgauuugcagccaaggccaguggucuacucccaaaccucauuag

SEQ ID NO: 303834 - RNA, 1737 nt, Artificial Sequence
  derived and/or modified sequence
augcuucuguugcuacuguuggccccccucuuucuucgcccacccggcgcagggggcgcgcagaccccuaaugcuacauccgaagggugccaaauuauccacccgcccugggaaggugggaucagauacagaggccuaacucgcgaucagguuaaagccauuaauuuccuuccaguagauuaugagaucgaguacguguguagaggcgagcgcgaagucguugguccuaaaguaaggaaaugucucgcaaacggcuccuggaccgauauggacacuccuaguaggugcguuagaauuugcagcaaaucuuaccugacacuugagaauggcaagguguuucucaccgguggugaccugcccgcauuagacggcgcuaggguggacuuccggugcgauccagauuuucauuuaguuggaagcagucggagcauuugcucucagggccaguggagcacucccaagccgcacugucaagugaauagaaccccucacucugaaaggcgggccgucuauauuggcgcccucuuccccauguccgggggcuggcccgggggucaagcaugucagccagccguggagauggcccuggaagauguuaacagccgccgcgauauccugccagauuacgaauuaaagcugauucaucaugauucuaagugugaucccggucaagcgacaaaauaccucuaugaguugcuauauaaugauccgauuaagauuauccucaugcccggcuguucuucaguaucaacacugguggccgaggcugccagaauguggaaccugaucguccuuuccuauggcaguucaucaccugcucucaguaaucgccaaagguucccgacauucuuccggacgcauccuucugcuaccuugcacaacccuacacgagugaaacuguucgaaaaguggggcuggaaaaaaaucgcaacgauccaacagaccacugaagucuuuacauccacucuugacgauuuggaagaacgggucaaagaggcgggcauagaaauuacguuucgacagucuuucuucucugauccugcaguucccgugaaaaaccucaaaagacaggaugcucguauuaucguuggacuuuucuaugaaaccgaagccagaaaaguuuuuugcgaaguguacaaagagagguuguuugguaaaaaauaugucugguuucugaucggaugguacgccgacaacugguuuaagauauacgacccaaguaucaauuguacaguggaugaaaugaccgaggccguugaggggcacauuaccacagagauugucauguuaaacccugcuaacaccagguccaucucuaacaugacaagucaggaauucguugagaaacucacaaagcguuugaagaggcacccugaggagacuggaggauuccaggaggcaccccuggccuacgacgcaaucugggcuuuggcccuggcgcucaauaagaccagcgggggcgguggccgaucaggcguccgacuagaggauuucaacuauaacaaccaaaccaucacagaucaaauauaucgcgccaugaacuccuccaguuucgaaggcgucucagggcacgugguuuucgaugcgucaggcucaaggauggccuggacccugauugaacaguugcagggugguucuuauaagaaaauuggguacuaugacaguacaaaggaugaucugagcuggagcaagacggacaaguggaucgugaucaguagaacccauucaccuacuuag

SEQ ID NO: 303835 - RNA, 1737 nt, Artificial Sequence
  derived and/or modified sequence
auguugcugcuuuuauuguuggccccccucuuucugagaccgcccggcgccggcggcgcccagacccccaaugccaccagcgagggaugucaaauuauccauccaccaugggaaggcggcauucgguaccggggccugacucgggaucagguuaaagccauaaacuuccugccagucgauuacgagaucgaauaugucuguaggggagaacgugagguggugggcccaaaagugaggaagugucucgccaacggguccuggacagacauggauacaccuucuagaugcgugcggauaugcuccaaauccuaccucacauuggagaauggaaaaguguuucuaacagggggggaucuacccgcuuuggauggggcacgugucgacuuccgcugugauccagacuuucaccucguugggagcagucgaucuauaugcagucagggucaaugguccacccccaaaccccauugccaagugaaucgcacaccccacuccgaaagaagagccguauacaucggugcucuguucccuaugagcggcggguggccaggcggccaggcgugccagccagcuguugagauggcccuugaggacgucaacucucgccgugacauucugccagacuacgaauuaaagcuuauacaccacgauagcaaaugugaccccggacaggccacaaaauacuuauaugaguuacuauauaaugacccuauaaagauuauucugaugccagguugcaguucuguuagcacccugguugcugaggcugcacguauguggaaccugaucguccucuccuauggcagcagcagccccgcuuuguccaaccgccagcgcuuuccaacauuuuuuaggacucauccuucagccacucuacauaacccaacgcgugucaaacucuucgaaaaguggggauggaagaagauugcaacuauucagcaaaccaccgagguuuucacguccacacuggaugaccuugaagaaagggugaaagaagcaggcauugagauuacguucagacaguccuucuucagcgauccagcagugcccgugaagaaucugaaaagacaggaugccaggauuauuguagggcucuucuaugaaacugaggcucgcaagguguucugcgaaguguacaaggagcgcuuguucggaaagaaguaugucugguuucugaucgguugguaugcugacaacugguucaagaucuaugacccuuccaucaacugcacgguagacgagaugacagaggcaguugagggacacauuacuaccgagauugugaugcucaacccugcaaacacuagauccauuuccaacaugacaucacaggaguucguggaaaaacugacuaagagauugaagcgucaucccgaagaaaccggcgguuuucaagaggcccccuuggccuacgacgcuauuugggcccucgcccuggcucugaauaagaccucaggagguggagggagaucuggagugagguuagaagacuuuaacuacaauaaccaaaccaucacagaucagaucuaucgcgcgaugaauucuucaucguuugaaggagucagcgggcacgucguguuugacgccagcggaucccgcauggcuuggaccuuaaucgaacaauugcagggggguuccuacaagaaaauaggauacuacgacagcaccaaagacgauuugucguggucuaaaacagauaaguggauugucauuaguagaacacauuccccuacguag

SEQ ID NO: 303836 - RNA, 1737 nt, Artificial Sequence
  derived and/or modified sequence
augcuucugcuacuccugcuugccccauuguuucuucgaccaccuggcgccgguggggcccagaccccuaaugcaacuagugaaggcugccaaauuauucauccuccuugggagggcgggauucgguaccgagggcugacuagagaccaggugaaggcaauuaauuuccuaccaguggacuacgagaucgaauacgucugccggggugaaagggaaguuguaggcccuaagguccgcaaguguuuagccaaugguuccuggacggacauggacacaccuagccggugcgugcgcaucuguuccaagagcuauuugaccuuggagaacggcaagguguuucucacggguggcgaucuuccagcguuggauggcgcacggguugacuucagaugugacccugauuuccaccucgucggcaguucuagauccaucugcagucagggucaguggucaacaccuaaaccgcacugucagguaaaccgcacaccucauuccgagagacgggcuguguauauuggagcgcuguuccccaugagcggagguuggccuggcggccaggcuugccagccugcuguggagauggcccuggaggacgugaauucccguagagauauauugccugauuacgagcugaagcugauucaucacgauucuaagugcgaucccggucaagcgaccaaguaccuguacgagcuacuauauaaugacccaauuaagaucauucugaugcccggcugcuccagcgugucgacauuaguagccgaagcagcucggauguggaaccuuauuguacucuccuauggauccuccucacccgcucugaguaaucgucagcgauucccaaccuucuucagaacacaucccuccgcgacacugcacaaucccacuaggguuaaauuauuugaaaaguggggcuggaagaaaauagcuacuauucaacaaaccacagagguguucaccaguacucuggacgauuuggaggagcguguaaaagaagcuggcauugagaucaccuuccgucaguccuucuuuagcgaccccgcugucccaguaaagaaccuuaaacgacaagaugcuaggauuauugugggauuguucuacgagacagaggccaggaagguuuuuugcgaagucuacaaagagcgacucuucggcaaaaaguacgucugguuccucauuggaugguaugccgacaauugguucaagaucuaugacccuucuauuaauuguacuguggacgagaugaccgaagcugucgaggggcauauaacgacggagauaguaauguugaacccagccaacacaagaucaauaucuaauaugaccagucaagaguucguggagaagcuuacaaagagacugaagcggcaccccgaggaaacugguggcuuccaggaggccccucuggcguaugacgccauuugggcacuggcuuuagcacugaacaagacauccggagggggcggucgcucuggcguucgccuggaggacuuuaauuacaauaaccagaccauuaccgaccaaauauacagggcuaugaacaguagcucguuugaaggagugucaggccacguaguguucgaugcuuccggcagcaggauggcuuggacuuugaucgagcaguuacaaggagggaguuacaagaagaucggcuacuaugauucuacuaaagacgaccugucuuggagcaaaacagacaaguggaucgucaucucccggacucauagcccgaccuag

SEQ ID NO: 303837 - RNA, 1737 nt, Artificial Sequence
  derived and/or modified sequence
augcuccugcugcuccugcuagccccucucuuccuccgaccacccggggccgguggagcucagacacccaacgcaacuuccgagggcugccaaaucauucacccaccgugggagggaggcauccgcuaucgcggacucacacgcgaccaaguaaaagcaaucaacuuuuugcccgucgauuacgagauugaguacguaugccgcggagaaagagaagucguuggcccaaaggugcgcaaaugucucgccaacggcucguggaccgacauggacacucccagccgaugcguucggauauguuccaaauccuaccugacucuugagaaugguaagguuuuucugacuggcggugaucugcccgcccuugauggagcucgaguggacuuccguugugauccugauuuucaccucguggggucaaguaggucuauaugcagucagggacaguggaguaccccaaaaccucacugccaggugaacaggacuccccauagcgaacguagagcaguguacauuggggcucuauucccaaugagcggggguuggcccggcggacaggcaugucagcccgcuguggaaauggcacuugaggaugugaauucccgucgagacauacugccggacuacgaacugaaguugauacaccacgacucaaagugcgaucccggccaagcuacaaaguaccuauacgaguugcuguauaaugacccuaucaaaauuauucugaugcccggaugcaguaguguuuccacgcugguugcugaggccgcgagaauguggaauuuaauuguguugucuuauggcuccucuucaccagcacuuucgaaccgucaaagauucccuacauucuuccggacacacccuuccgccacgcugcacaacccaacccgugugaaguuauuugagaaaugggguuggaaaaagaucgcaacuauucaacagacgacggagguguuuacaagcacucuggacgauuuagaagaacgggugaaagaggccggaaucgagauuacguucagacagagcuucuucagcgacccggcaguccccgugaagaaucugaagcggcaggaugcuaggauuaucgucggacuguucuaugagacagaggcucguaagguauuuugcgagguguauaaagaacgacuguucggaaaaaaauacgucugguuccugauuggcugguaugcagauaacugguucaagauuuacgacccuagcaucaauuguacuguugaugaaaugacugaggccguugagggacauauuaccaccgagaucgugauguuaaaucccgcuaauacaagaaguaucaguaacaugaccagccaagaguucguggaaaagcuuacaaagcgcuugaagcgucacccagaagagaccggaggauuccaggaagcaccacuagccuacgaugcaauuugggcguuagcccucgcacuaaauaagaccaguggaggcggaggccggucgggcguuaggcuggaggauuucaacuacaacaaucagacgaucacggaucagaucuaucgggcgaugaacucauccuccuuugaaggagugucuggacaugucguguucgacgcaagcggcucgagaauggcuuggacucuuauugagcagcuccaagggggguccuauaaaaagaucggauacuacgauucuacaaaggacgaucuauccuggaguaaaacagauaaguggauugucauuaguagaacucacaguccuacauag

SEQ ID NO: 303838 - RNA, 1737 nt, Artificial Sequence
  derived and/or modified sequence
augcuguugcuguugcugcuugcgccacuguuccuuagaccacccggagcugguggugcucagacgccaaaugccacuucagaggggugucaaauuauucacccuccaugggagggcgggaucagguacagaggucuuacucgggaccaggugaaggcgaucaacuucuugccaguggacuaugaaaucgaauaugugugccgcggagagcgugaagugguaggaccaaaaguuagaaaaugccucgccaacggaaguuggaccgauauggauaccccaucuagaugugugcgcaucuguuccaaaagcuacuuaacacucgagaaugggaagguauuccugacuggcggggaccugcccgcccucgacggcgcucguguugauuuucgcugugacccagacuuucaccuuguuggauccucuagaagcauuugcagucagggccaauggagcacaccuaagccgcauugucagguuaaccgcaccccucauagcgaacggagggcaguguauauuggcgcccuguucccaaugagcggaggguggccuggcggccaggccugucagcccgcuguagagauggcgcuggaagacgugaauagucggcgcgacauuuugccggauuacgaacuaaagcugauucaccaugauagcaagugugacccuggccaggccacuaaauaccucuaugaacuacuguauaaugauccuauaaaaauuauucugaugcccgguugcucuucuguuucuacccuaguagccgaggcggcaaggauguggaaucugaucguacucucuuauggcuccucuuccccagcccucucaaaucggcaacgcuucccuacuuucuuucggacucaucccucugcuacccuucauaacccgacgcgcguaaaacuuuucgaaaaguggggcuggaaaaagaucgcaaccauacagcaaacuaccgagguguuuacaucuacacuagacgaucucgaagaaagggucaaggaggcggggauugaaauuacuuuucgccagaguuuuuuuagcgaccccgccgucccugugaagaaucucaagagacaagacgcuagaaucauugugggauuauuuuacgagaccgaggcgcggaaaguguuuugcgagguuuacaaagaacgucuguucggaaaaaaguacgucugguuccugaucggaugguacgccgauaacugguucaagauauacgaccccagcauuaauuguaccguggacgagaugaccgaagcuguugaaggccacauaaccaccgagaucgucauguugaaccccgcuaacaccagaucuaucucaaacaugacgucccaggaguucguggaaaagcugaccaaacgcuugaaacggcauccagaagagaccggcggguuucaggaggcaccacucgccuacgacgcaauaugggcucuugcacucgccuugaauaagaccuccgggggcggaggccgauccggagugagauuggaggauuucaacuacaauaaccagaccaucacugaccagaucuacagggccaugaacucaucuagcuucgaaggggugaguggccacgugguauuugacgcaagcggcuccagaauggcauggacucucaucgaacaacugcagggcggcuccuacaaaaagauuggguauuacgacagcacaaaggaugaucucagcuggaguaagacugauaaguggauuguaaucucacguacccauagcccuacuuag

SEQ ID NO: 303839 - RNA, 1737 nt, Artificial Sequence
  derived and/or modified sequence
augcuccugcugcuucuucucgcuccccuauuccuccgaccucccggcgccggcggugcccagacucccaaugccaccucugaggggugccaaaucauucacccucccugggagggcggcauucgcuaucgcggcuugacacgagaccaaguaaaggccauuaauuuccuaccuguugauuaugaaauugaauacguaugucggggugagagagaagugguugguccaaaagugcgaaagugucucgcuaauggguccuggacagacauggacacuccaucacguugcgugcguauauguagcaagaguuacuugacccucgagaauggcaaaguguuucugacagguggcgaccugcccgcucucgacggagccaggguggauuuucgcugugaccccgacuuccacuugguaggcucuucaaggaguauauguucucagggccaguggagcacaccaaaaccccauugccaagucaaucguacaccacacuccgaacgcagagccguuuacaucggagcccuuuuuccaauguccgggggguggccaggaggccaggccugccagcccgccguagagauggcgcucgaagauguuaauucuagaagagacaucuugcccgacuacgaacucaagcugauccaccaugauagcaaaugcgacccaggacaggcuacgaaguaucuuuacgaacugcuguacaacgauccaauaaagauuauacucaugccaggguguucaaguguaagcacucucguggcugaagcggcgcguauguggaaccuaauugucuuaagcuacggaagcaguucacccgcccucucuaaccggcaaagauucccuaccuuuuuucgcacccacccuucagccacacugcacaacccuacccgcguaaaacuguucgagaaauggggcuggaagaaaaucgccacaauccagcagacgacagaaguauucacuagcacacucgacgaucuagaggaacgcgugaaggaggcuggaauagaaaucacuuuuaggcaaucauucuucagugauccugcgguaccaguaaaaaaccugaagagacaagaugcaaggauuaucgucgggcuguucuacgaaacugaggcacguaaggucuuuugugagguguacaaggagcggcuuuuugggaaaaaguaugucugguucuugauagggugguacgccgacaauugguuuaagauauaugauccuucuauuaauuguaccguggaugagaugacugaagccguggagggccacaucacgacggagauuguaaugcuuaacccagcaaauacuagaagcauaucuaauaugacuagccaggaguuugucgagaaguuaacuaagcgcuugaagcgccacccagaagaaacaggugguuuucaggaagcucccuuggcuuaugaugcaauuugggcauuagcccuggcccugaacaaaaccaguggugguggaggcagaucuggcgugcgacucgaagacuuuaauuauaauaaccagacaauaacagaccaaaucuaucgugccaugaauucauccucauuugaggggguuuccgggcaugucguuuuugacgcuucaggaucccggauggccuggacuuuaauugagcaauuacaaggcggaucguauaaaaagaucggcuacuaugacagcaccaaagaugaucugagcugguccaaaacugauaaauggaucguaauaagccguacucacucacccacuuag

SEQ ID NO: 303840 - RNA, 471 nt, Artificial Sequence
  derived and/or modified sequence
auguuacugcuacuucuccuggcuccucuguuuuuacgacccccuggcgccgguggagcucaaaccccuaaugcaaccuccgagggaugucagaucauucaucccccuugggagggcggaauuagguaucgcggcuugacccgugaccaggugaaagccauuaauuuucugccuguggauuacgaaauugaguauguuugccggggagagcgcgaagucgucgggcccaagguaagaaagugucuagccaauggauccuggacugauauggacacuccuucaagaugugugaggaucugcaguaaauccuacuugacuuuagaaaacggcaaaguuuuucuuacuggcggcgaccucccagcacuagauggcgcucggguagacuucagaugugacccugauuuucaucuugugggcucauccaggagcauauguucccagggccaguggagcacgcccaaaccgcacuag

SEQ ID NO: 303841 - RNA, 1737 nt, Artificial Sequence
  derived and/or modified sequence
augcuguugcuuuuacuguuagccccccuuuuccucaggccuccaggcgcugggggagcucagacuccaaaugcaacauccgaagggugccagauuauacacccgccaugggaaggcggaaucagguacagaggacugacgagagaccaggugaaagcuauaaauuuucugcccguggauuacgagauugaauacgugugcagaggagaacgugaaguggugggccccaaagugagaaagugccuagcgaacggcucuuggacagauauggauacccccucaaggugcgugcggauuugcucuaaaagcuaccuaacucuggagaacggcaagguauuucugacgggcggggaucuuccggcacucgauggugcucgcguggauuuccgcugugaccccgacuuucaucuugucggcagcucuagaagcauuugcucccagggacaaugguccaccccuaagccccacugccaggucaauaggacuccucauuccgagcguagagcaguuuauauuggcgcccuuuuuccaaugagugguggauggcccggcggccaggcuugucagccagcuguagagauggccuuagaggaugugaauucgagaagagauauccugccagacuacgaguugaaauugauacaucaugauuccaagugcgacccaggacaggcaacgaaguauuuguaugagcugcuguacaaugauccuauuaaaauuauucucaugccaggauguucaucuguguccacuuuaguugcugaagcggcaagaauguggaaucugaucguauuguccuacggcaguucuagccccgcccuuagcaaccgccagcguuuuccaacuuucuuucggacucacccaagcgcaacacuacauaaucccaccagaguuaaacuguuugaaaaaugggguuggaaaaagaucgcuacaauucaacagacaacugaaguguucacuagcacacucgaugaucuggaagagagaguaaaagaggcugguaucgaaaucaccuuccgccaguccuucuucucggaucccgcugucccugugaagaaucugaaaaggcaggacgcucgcauuauagucggacuguucuacgaaacugaagccagaaaaguguucugcgagguuuacaaagaacgacuguucgguaagaaauacguuugguuccugauugguugguacgccgacaacugguucaaaauauacgacccaucaaucaauuguaccguggaugagaugaccgaggcagucgaaggacacauuacaacugaaaucgucaugcugaacccugcaaacacccgaaguauuucaaacaugacuagucaggaguucguugagaagcuuaccaagagacugaagagacacccagaagagacuggcgguuuccaggaagcuccccuagcauaugacgcgaucugggcacuugcucuggcccucaauaagaccagcggaggcgguggaagaaguggcguucgguuggaggauuuuaauuacaauaaucaaacuaucaccgaccaaaucuauagagccaugaauucaucaucuuucgagggcguuucuggccacgugguuuucgacgcaucuggaagcaggauggcauggacauuaauugaacaacuccagggggguuccuacaagaaaauugguuacuacgauucuacaaaagaugaucuaagcuggucuaaaaccgauaaguggauagucauuucucgcacucauuccccaacguag

SEQ ID NO: 303842 - RNA, 1737 nt, Artificial Sequence
  derived and/or modified sequence
auguugcugcugcuacuacucgccccccuauucuuacguccucccggagcaggcggcgcgcagacuccuaacgcaacauccgagggcugucagaucauacaccccccaugggaaggcggaaucagauaccgcggccugacaagagaucagguuaaggcgauuaacuuuuugcccguggacuacgaaauugaauacgucugccgaggcgaacgagaaguagucggacccaaagugcguaagugccuggcaaacggcuccuggacugauauggacacuccaagcaggugcguaagaauuugcagcaaaaguuacuuaacucucgaaaauggcaaaguguuccugaccggaggggaucuaccggcacucgacggggcacgcguggauuuucgaugcgaucccgacuuucaccugguugggucuucucgauccauuugcucacagggccaguggucuacgccuaaaccacacugucaaguuaauagaaccccccacucggaaagaagagcuguuuacauuggggcauuauucccuaugucgggugguuggccuggcgggcaagcaugccagccugcgguggagauggcacuagaggacgugaacucucgccgugacauucugccagacuacgaauuaaagcuuauacaccacgauagcaaaugugaccccggacaggccacaaaauacuuauaugaguuacuauauaaugacccuauaaagauuauucugaugccagguugcaguucuguuagcacccugguugcugaggcugcacguauguggaaccugaucguccucuccuauggcagcagcagccccgcuuuguccaaccgccagcgcuuuccaacauuuuuuaggacucauccuucagccacucuacauaacccaacgcgugucaaacucuucgaaaaauggggauggaaaaagaucgcuacaauccagcagaccacugagguuuuuaccuccacacuugaugaucuggaagagcgcgucaaagaggcgggcauugaaaucacauuuaggcagucguuuuuuagcgaccccgccgucccggucaaaaauuuaaagagacaggacgcacgcauaauuguaggauuguuuuacgagacagaagcucgcaagguguuuugcgaaguuuacaaggaacgcuuguuugggaagaaguauguuugguuucucaucggaugguaugccgauaauugguucaagauauacgacccuaguaucaacuguacuguugacgaaaugaccgaggcaguggagggccauauuacuacagagauuguaaugcucaauccagccaacacgagauccaucaguaacaugacuucucaggaguucguugaaaagcugacaaaacgguugaagagacacccggaggaaacugguggguuccaagaagccccccuggccuacgacgccauuugggcccucgcccuagcucuaaacaaaacuagcggaggaggugguaggagcggaguucggcuggaggacuuuaauuauaacaaucaaacaaucacggaccagauuuauagagcuaugaauucuucaaguuucgagggagugagcggccauguuguuuucgacgcuucugguucccgaauggccuggacacugaucgaacaguugcagggaggcucauauaagaaaauuggguauuaugacuccaccaaagacgaucucucuuggucuaagacggauaaauggauugugaucucuaggacucacucucccacauag

SEQ ID NO: 303843 - RNA, 1737 nt, Artificial Sequence
  derived and/or modified sequence
augcucuugcuccugcuguuagcuccuuuguuccuuagaccucccggugcagguggggcccaaacuccuaaugcgacgagcgaagggugccagauaauccacccaccaugggaaggcggcaucagguaccgcgggcuaacacgagaucaggugaaggcaauuaacuuucugccugucgacuaugaaauugaauauguguguagaggagaaagagagguggugggcccaaaaguucggaaaugcuuggcaaauggguccuggacggauauggacaccccuucuagaugcguaagaauaugcagcaagagcuaccuaacgcucgagaauggaaaaguuuuccucacuggcggggaucucccagccuuagacggagcaagaguagauuuucgcugcgauccugacuuucacuuagugggcuccucacgcuccauauguucacagggacagugguccacucccaaaccccacugccagguuaauaggaccccacacagcgagcggcgugcaguguacaucggggcauuguuucccaugagcggcggguggccuggcggccaagcuugccaacccgcagucgaaauggcacuggaggauguaaauucccggagagauauccugcccgacuacgagcugaagcuaauucaucacgacucuaaaugcgauccaggccaagcgacuaaauacuuguacgaacugcuguacaaugaccccaucaaaaucauucucaugccagguuguucuucaguaagcacucuggucgccgaagcagcucggauguggaacuugauuguacuaucuuacgguucuucuagccccgcccugucuaaucgucagagauucccuaccuuuuuccggacacauccaagcgcaacgcuucacaaccccacgcgugucaaacuguucgagaaguggggauggaagaaaauagcaacgauucagcaaacuacagagguguuuaccucuacccucgaugaccuagaagagagaguaaaagaggccggcaucgaaauaaccuucagacagagcuuuuucucagacccugcuguucccguuaagaaucugaagcggcaagaugcccguaucaucgucggccuguucuacgagacagaggcaagaaagguauuuugugagguguauaaggagcgucuguucggcaaaaaauacguuugguuccugauagguugguacgcagacaauugguuuaaaauuuaugacccaagcaucaauuguacuguggacgaaaugaccgaggcaguggaggggcacaucaccacggagaucguaaugcucaauccagccaacacuagauccaucucuaauaugacuucucaggaguuuguagagaagcucacuaagcgcuuaaaaaggcauccggaggaaacaggaggguuucaggaggcaccccuugcauacgacgcaaucugggcgcuggcucucgcucucaacaagacaucagguggcgguggaagaagcggcguaagguuagaggacuuuaacuacaauaaucagaccaucacagaucaaauuuacagagcuaugaacucgucuucuuucgaggguguuagugggcaugugguguuugacgccucuggcagcagaauggccuggacacugauugaacaauugcaagguggaucauauaagaagauaggguauuaugauagcacgaaagaugacuuauccugguccaaaacugauaaauggauagugaucaguaggacacacucaccaaccuag

SEQ ID NO: 303844 - RNA, 1737 nt, Artificial Sequence
  derived and/or modified sequence
augcugcuguuacugcuccuugcuccucucuuucuucgcccaccuggcgcaggcggcgcacaaacucccaaugcgaccagcgagggaugccagaucauccacccccccugggaaggaggaaucagauaccgcggcuugacucgggaccaagugaaggcgauaaauuucuugcccguugauuacgaaauugaauacguuuguaggggugaaagggaaguuguuggaccgaagguuagaaagugccuggccaaugggucauggacagacauggacacaccaagcagaugugugcgaaucuguagcaaaagcuaucuuacacucgaaaacggcaaagucuuccugacaggcggggaccugccagcucuagacggcgcuaggguagauuuccggugcgacccagacuuucaucucguuggcucaagccgcuccauuugcucucaaggucaguggucaacccccaagccucauugucaggucaaccguacaccucacucagagagacgagccguauacauuggcgcgcuguuccccaugagcggggguuggccagguggccaggcaugucaaccugccguagaaauggcccuagaagaugugaauucccgcagagacaucuugccagacuacgaguugaagcugauucaccacgauagcaaaugugaccccggucaggccacuaaauaccuuuacgaacuacuuuauaacgauccuaucaagauuauccugaugccugggugcuccagcguauccacgcuuguggcugaagccgccaggauguggaaucuuauuguucuaucguacggguccaguucuccggcccucucuaaucgacagcguuuucccaccuuuuuuagaacucauccguccgccacccugcacaacccuacacgagucaagcucuuugagaaguggggauggaagaaaauagcuaccauucagcaaacuacggagguauuuacguccacucuagaugacuuagaggaaaggguaaaggaggcaggaaucgagauaacguuucggcagucauuuuuuagcgaucccgcaguuccagucaaaaaccucaagagacaagacgcucgcaucauuguaggccuauuuuacgaaaccgaagcucggaaaguguuuugugaaguuuauaaggaacgucuauucgggaagaaguacgucugguuccuuaucggaugguaugcagacaacugguuuaaaaucuaugauccauccaucaacugcacugucgaugaaaugacagaggccgucgaagggcacaucacaacugagauuguaaugcugaauccugccaacacccgaucuaucuccaacaugacgucucaggaauuugucgaaaagcucacaaagaggcugaagagacacccagaagagaccggcggcuuucaagaggcuccacuggcauacgacgcaauaugggcacucgcucucgcccugaacaagacaucaggcggugguggucggagcggaguucgccuggaagacuucaacuacaacaaucagacaauuacagaucagaucuaucgcgcaaugaacuccagcaguuuugaggguguaagcgggcaugucguguucgacgccucugguuccagaauggccuggaccuuaauugaacaauuacagggaggaagcuacaaaaagauuggcuacuaugacucgacuaaagaugaccugucauggucuaagaccgauaaauggaucgugauuucuagaacccacuccccgaccuag

SEQ ID NO: 303845 - RNA, 1737 nt, Artificial Sequence
  derived and/or modified sequence
auguuacuacuccugcucuuggccccccuuuuuuuaagaccccccggagcaggcggcgcacaaacccccaaugcgaccucagaaggaugucaaauuauucauccaccuugggaggguggcaucagguaccggggacugacacgggaucaggugaaggccaucaauuuccugccaguugauuacgagaucgaguauguuugccgcggcgagcgagaaguagugggaccaaaagugcgcaaaugccucgccaacggaucauggacggauauggauacuccaucgcguuguguucgcauauguagcaagaguuaucucacacuagagaacggaaaggucuuuuuaaccggcggcgaccugccagcuuuagacggugccagagucgauuuucguugcgauccagacuuccaucuggugggcagcagccgaaguauauguucccaaggacaauggagcaccccuaaaccccauugccaagugaaucgaacaccccacuccgagagacgggcuguguacauaggagcucucuuccccaugucgggcgguuggcccgguggccaagcgugccagccagccguagagauggcccuggaggaugugaacagucggcgcgacauuuugccggauuacgaacuaaagcugauucaccaugauagcaagugugacccuggccaggccacuaaauaccucuaugaacuacuguauaaugauccuauaaaaauuauucugaugcccgguugcucuucuguuucuacccuaguagccgaggcggcaaggauguggaaucugaucguacucucuuauggcuccucuuccccagcccucucaaaucggcaacgcuucccuacuuucuuucggacucaucccucugcuacccuucauaacccgacgcgcguaaaacuuuucgaaaaguggggauggaagaaaaucgcaacuauccagcagacuacagaaguguuuaccaguacauuagacgaccucgaagagagaguuaaggaagccggcaucgaaauuacuuuucggcagucauuuuucagcgauccagccguacccguaaagaaucucaagcgccaggacgcucgaauuauuguuggccucuuuuacgagacugaagcccguaaaguguuuugugaaguuuauaaagagcgacuguuuggaaaaaaauacgugugguuccucauagggugguacgcagauaacugguucaagaucuaugaccccagcauuaauugcacuguggaugagaugaccgaagccguggaaggacacauuaccaccgaaaucgugauguugaaccccgccaacacuagauccaucagcaacaugacaucccaagaauucgucgagaaacugaccaagagacuaaagagacauccagaagagacaggcggguuucaggaggcaccacuugccuaugaugccaucugggcucuagcuuuggcacugaacaagaccagugggggcggcggaagaucgggggugagacuggaggacuuuaauuauaauaaucagacuaucaccgaucagauuuauagagccaugaauuccucuucauuugaaggcguuucuggccacgugguuuuugaugcauccggcucgcguauggcuuggacacugaucgagcagcuucaagggggcaguuacaaaaaaauaggauacuaugacucuaccaaggacgaccugucuuggucuaaaacggauaaauggauugucauaucacgaacccacucucccacguag

SEQ ID NO: 303846 - protein, 255 aa, Artificial Sequence
  derived and/or modified sequence
NGKTVQVLPSALSTMFGIDSCPYYVLENHYITTPLSTEEAAFPLAYVMTISQDFDTFEWLFWAIYMPQNVYCIHVDKAATIDFKIAVSELLECFSNAFISSQSEYIIYGGKSRLQADLACMRDLIASTVQWRYVTNTGDHDFPLKTNREIVQYLKTMNWTNITPNLVSVLKSTERIKYTHREYRTRAHAFVLKKHKKKSPPPRQLKIHFGSSYVALTREFVHFALYNKIAIELLQRSQDTYSPDKHFWITLNNIP

SEQ ID NO: 303847 - protein, 391 aa, Artificial Sequence
  derived and/or modified sequence
MKVWSCYLCIITLQIIIIVTVLYNVHVSQPDSGQIDDVGGEYQALSRLHICDAALNGKTVQVLPSALSTMFGIDSCPYYVLENHYITTPLSTEEAAFPLAYVMTISQDFDTFEWLFWAIYMPQNVYCIHVDKAATIDFKIAVSELLECFSNAFISSQSEYIIYGGKSRLQADLACMRDLIASTVQWRYVTNTGDHDFPLKTNREIVQYLKTMNWTNITPNLVSVLKSTERIKYTHREYRTRAHAFVLKKHKKKSPPPRQLKIHFGSSYVALTREFVHFALYNKIAIELLQRSQDTYSPDKHFWITLNNIPVECTGPWILAVNSGSCQNRHICPRGLEFQQQYPVNSFGGNNCSIAAGTAAPREALGPFHLKAACSAHQNKWGFWNCYLHLK

SEQ ID NO: 303848 - DNA, 768 bp, Artificial Sequence
  derived and/or modified sequence
aacggcaagaccgtgcaggtgctgcccagcgccctgagcaccatgttcggcatcgacagctgcccctactacgtgctggagaaccactacatcaccacccccctgagcaccgaggaggccgccttccccctggcctacgtgatgaccatcagccaggacttcgacaccttcgagtggctgttctgggccatctacatgccccagaacgtgtactgcatccacgtggacaaggccgccaccatcgacttcaagatcgccgtgagcgagctgctggagtgcttcagcaacgccttcatcagcagccagagcgagtacatcatctacggcggcaagagcagactgcaggccgacctggcctgcatgagagacctgatcgccagcaccgtgcagtggagatacgtgaccaacaccggcgaccacgacttccccctgaagaccaacagagagatcgtgcagtacctgaagaccatgaactggaccaacatcacccccaacctggtgagcgtgctgaagagcaccgagagaatcaagtacacccacagagagtacagaaccagagcccacgccttcgtgctgaagaagcacaagaagaagagccccccccccagacagctgaagatccacttcggcagcagctacgtggccctgaccagagagttcgtgcacttcgccctgtacaacaagatcgccatcgagctgctgcagagaagccaggacacctacagccccgacaagcacttctggatcaccctgaacaacatcccctag

SEQ ID NO: 303849 - DNA, 768 bp, Artificial Sequence
  derived and/or modified sequence
aacggtaagactgtacaggttctcccgagcgctttgagcacgatgttcggcatagattcatgcccttactatgtccttgagaatcattatattaccacaccactcagtacggaagaggccgccttccctttggcgtacgtcatgacgatcagccaggatttcgacacctttgagtggctcttttgggccatctacatgcctcagaacgtgtactgtatccacgtggataaggcagccaccatcgatttcaaaatagccgtttctgagctgcttgaatgcttctcaaatgcctttatcagctcacagagcgaatacattatctacgggggaaaaagccgactgcaggcagacctggcttgtatgagagaccttattgcgtccacggttcagtggcgttacgtgaccaatacaggagatcacgattttccgctcaaaacaaaccgcgagattgtgcagtacctcaagaccatgaactggaccaatatcactccaaatctggtgagcgtgttgaaaagcacagaaagaattaaatacacacaccgcgaatacagaaccagggcacatgcctttgtgctgaagaagcacaagaaaaaaagccctccaccccggcagctgaaaatccattttggcagttcctatgtagcgctcactcgggagttcgtccatttcgccctgtataataaaatagctatcgagctgcttcaacggagtcaggatacctactcaccagacaagcacttttggatcaccctgaacaacatcccatag

SEQ ID NO: 303850 - DNA, 768 bp, Artificial Sequence
  derived and/or modified sequence
aatggcaagacagtgcaggtgctgcccagcgccctgagcaccatgtttggcatcgacagctgcccctactacgtgctggagaaccactacatcaccacccccctgagcacagaggaggccgccttccccctggcctacgtgatgaccatcagccaggactttgacacctttgagtggctgttctgggccatctacatgccccagaatgtgtactgcatccacgtggacaaggccgccaccatcgacttcaagattgctgtgtctgagctgctggagtgcttcagcaatgccttcatcagcagccagagcgagtacatcatctacggcggcaagagccggctgcaggccgacctggcctgcatgagggacctgattgccagcacagtgcagtggaggtatgtgaccaacacaggagaccatgacttccccctgaagaccaaccgggagatcgtgcagtacctgaagaccatgaactggaccaacatcacccccaacctggtgtctgtgctgaagagcacagagcgcatcaagtacacccaccgggagtaccgcacccgggcccacgcctttgtgctgaagaagcacaagaagaagagccccccaccccggcagctgaagatccacttcggcagcagctatgtggccctgacccgggagtttgtgcactttgccctgtacaacaagatcgccatcgagctgctgcagaggagccaggacacctacagcccagacaagcacttctggatcaccctgaacaacatcccctag

SEQ ID NO: 303851 - DNA, 765 bp, Artificial Sequence
  derived and/or modified sequence
aatgggaagacggtgcaagtattgccaagcgctttatccacaatgtttggaatagattcttgcccttactatgtgctagagaaccactatatcacaactcctttgtccacagaagaagctgcattccctttggcatatgtaatgaccatcagtcaagatttcgatacgtttgaatggcttttctgggctatttacatgcctcaaaatgtctactgtattcacgttgataaggcggccacgattgactttaaaattgctgtgagtgaattattggagtgcttctcaaatgcatttatatcctcacagtctgagtatattatttatggtggaaaatccaggctccaggcggacctggcctgcatgagagatcttatagcatcaactgttcagtggagatatgtcactaacactggtgatcacgatttccccctaaaaaccaacagggagatagttcagtatttgaaaacaatgaattggacaaacattacacctaatttagtgtctgttctgaaatctactgaaaggatcaaatatacccatagagagtacagaaccagagcacacgcttttgtcctaaagaagcataaaaagaagagcccacctccacgtcaactcaaaatccactttggctcaagttacgttgcccttacaagggaatttgtccattttgctctttataataaaatagccattgagttactccagcggtctcaagatacctacagtccagataaacatttctggattacactcaacaatattcca

SEQ ID NO: 303852 - DNA, 768 bp, Artificial Sequence
  derived and/or modified sequence
aacggcaagaccgtgcaggtgctgcccagcgccctgagcaccatgtttgggatcgattcatgcccctactacgtgctcgagaatcactatattacgaccccgcttagcaccgaagaagcagcgttcccactggcgtatgtcatgaccatcagtcaagacttcgacacatttgagtggttgttctgggccatttacatgccccagaatgtatactgcatacacgtggataaggccgccaccattgactttaagatcgccgtgtcagagctgctggaatgcttcagtaacgcctttatttcatcacaatccgaatacatcatatacggtggcaaaagtaggctccaggccgacctggcctgtatgagggacctgatagcttccactgtgcagtggcgatacgtcactaatacaggagatcacgacttcccactcaaaactaatagggaaattgttcaatatctcaagactatgaattggacaaacattacacccaaccttgtcagcgtgcttaaatctactgagaggatcaagtatacacacagggagtataggaccagagcacacgcgtttgttctgaaaaagcacaaaaagaaatcaccacccccaaggcagttaaagatacactttggttcgtcgtatgtggctttaactagagagttcgttcattttgctctgtataataagatagccatcgagctgctgcagcgctctcaagacacctacagccctgataaacacttctggattacgttaaacaacataccatag

SEQ ID NO: 303853 - DNA, 768 bp, Artificial Sequence
  derived and/or modified sequence
aatggcaagactgtgcaggtactgccttccgccctgtccacaatgtttggcatcgactcctgcccatattatgtgctggaaaatcactacattaccactcccctgagcactgaagaggccgctttccccttggcctacgtcatgacgattagccaagacttcgacacttttgaatggttattttgggctatatatatgccccaaaacgtgtattgcatccatgtggataaggccgctacgattgattttaaaattgcggtgagcgagctactggagtgtttctcgaacgccttcataagctctcagtcggagtatatcatttatgggggtaaatcaagactgcaggctgacttggcctgtatgagagatctcattgccagcaccgtgcaatggcgatatgttaccaataccggtgaccatgattttcctctgaaaacaaatagggagattgtgcagtacctgaaaacaatgaactggactaatatcacccccaatctcgtaagcgtcctgaagagcacagagagaatcaagtacacacaccgcgagtatagaaccagagcacatgcctttgttctcaaaaagcacaagaaaaaatcaccaccacccaggcagctcaagatacattttggaagtagctacgtggcactcaccagagagttcgtacactttgcactatataacaagatagccattgagcttttgcagcgcagccaggatacctactcccccgacaaacacttctggatcactctgaacaacattccttag

SEQ ID NO: 303854 - DNA, 1176 bp, Artificial Sequence
  derived and/or modified sequence
atgaaggtgtggagctgctacctgtgcatcatcaccctgcagatcatcatcatcgtgaccgtgctgtacaacgtgcacgtgagccagcccgacagcggccagatcgacgacgtgggcggcgagtaccaggccctgagcagactgcacatctgcgacgccgccctgaacggcaagaccgtgcaggtgctgcccagcgccctgagcaccatgttcggcatcgacagctgcccctactacgtgctggagaaccactacatcaccacccccctgagcaccgaggaggccgccttccccctggcctacgtgatgaccatcagccaggacttcgacaccttcgagtggctgttctgggccatctacatgccccagaacgtgtactgcatccacgtggacaaggccgccaccatcgacttcaagatcgccgtgagcgagctgctggagtgcttcagcaacgccttcatcagcagccagagcgagtacatcatctacggcggcaagagcagactgcaggccgacctggcctgcatgagagacctgatcgccagcaccgtgcagtggagatacgtgaccaacaccggcgaccacgacttccccctgaagaccaacagagagatcgtgcagtacctgaagaccatgaactggaccaacatcacccccaacctggtgagcgtgctgaagagcaccgagagaatcaagtacacccacagagagtacagaaccagagcccacgccttcgtgctgaagaagcacaagaagaagagccccccccccagacagctgaagatccacttcggcagcagctacgtggccctgaccagagagttcgtgcacttcgccctgtacaacaagatcgccatcgagctgctgcagagaagccaggacacctacagccccgacaagcacttctggatcaccctgaacaacatccccgtggagtgcaccggcccctggatcctggccgtgaacagcggcagctgccagaacagacacatctgccccagaggcctggagttccagcagcagtaccccgtgaacagcttcggcggcaacaactgcagcatcgccgccggcaccgccgcccccagagaggccctgggccccttccacctgaaggccgcctgcagcgcccaccagaacaagtggggcttctggaactgctacctgcacctgaagtag

SEQ ID NO: 303855 - DNA, 1176 bp, Artificial Sequence
  derived and/or modified sequence
atgaaggtgtggtcatgttacctctgtattatcacgctccagattattattatcgttaccgtcctttataacgtgcatgtttcccagcccgacagtggacagatcgacgacgttggcggagagtaccaggccctgagcaggctgcacatctgcgatgccgctctaaatggcaagacagttcaggtactaccgtctgctttgtcaaccatgtttgggattgattcttgcccctactatgtcctggaaaatcattacataactactcctttaagtacggaggaggctgcctttcctttagcttacgtgatgactatcagccaggactttgatacatttgaatggctcttctgggcgatatacatgccacagaatgtctattgtatccatgttgataaggccgcaacaatcgacttcaaaatcgctgtgagcgaactgctggaatgcttctctaacgctttcattagctctcagtctgagtacataatttatggcggcaaatccaggttacaggcagatctggcttgtatgagagatctcattgcgagcactgtgcagtggagatacgtgactaacactggggaccatgatttccctctcaaaaccaatagagagatcgtgcagtacctgaagaccatgaattggactaacatcacccctaacctggtttcggttttaaagagcactgagcggatcaagtacacccaccgcgagtatcgcacaagagcccacgcctttgttttgaaaaaacataagaaaaagagcccacctccacggcagctgaagattcacttcggctcttcctatgtcgccctgactagagaattcgtgcacttcgcattgtacaataagatcgccatcgagctgctccagcgcagtcaggacacttacagtccagataaacatttttggattacattgaacaatattcctgtcgagtgtacaggaccttggattctggctgtgaattctggtagctgccagaatcgccacatatgcccccggggcctggaatttcagcagcagtatcccgtcaatagctttggcggcaataactgttcaattgccgcaggcacagccgccccgcgcgaggccctcggaccattccatctcaaggccgcctgtagcgcccatcagaacaagtgggggttttggaattgctatttgcacctcaaatag

SEQ ID NO: 303856 - DNA, 1176 bp, Artificial Sequence
  derived and/or modified sequence
atgaaggtgtggagctgctacctgtgcatcatcaccctgcagatcatcatcatcgtgacagtgctgtacaacgtgcacgtgtcccagcctgacagcggccagattgatgatgtgggcggggagtaccaggccctgagccggctgcacatctgtgatgctgccctgaatggcaagacagtgcaggtgctgcccagcgccctgagcaccatgtttggaattgacagctgcccctactacgtgctggagaaccactacatcaccacccccctgagcacagaggaggccgccttccccctggcctacgtgatgaccatcagccaggactttgacacctttgagtggctgttctgggccatctacatgccccagaatgtgtactgcatccacgtggacaaggccgccaccatcgacttcaagattgctgtgtctgagctgctggagtgcttcagcaatgccttcatcagcagccagagcgagtacatcatctatggaggcaagagccggctgcaggccgacctggcctgcatgagggacctgattgccagcacagtgcagtggaggtatgtgaccaacacaggagaccatgacttccccctgaagaccaaccgggagatcgtgcagtacctgaagaccatgaactggaccaacatcacccccaacctggtgtctgtgctgaagagcacagagcgcatcaagtacacccaccgggagtaccgcacccgggcccacgcctttgtgctgaagaagcacaagaagaagagccccccaccccggcagctgaagatccacttcggcagcagctatgtggccctgacccgggagtttgtgcactttgccctgtacaacaagatcgccatcgagctgctgcagaggagccaggacacctacagcccagacaagcacttctggatcaccctgaacaacatccctgtggagtgcaccggcccctggatcctggccgtgaacagcggcagctgccagaacagacacatctgcccccggggcctggagttccagcagcagtaccctgtgaacagctttggaggcaacaactgcagcattgctgctggaacagctgccccccgggaggccctgggccccttccacctgaaggccgcctgcagcgcccaccagaacaagtggggcttctggaactgctacctgcacctgaagtag

SEQ ID NO: 303857 - DNA, 1176 bp, Artificial Sequence
  derived and/or modified sequence
atgaaggtttggagctgttatctttgtatcattactcttcaaattataatcatagtcacagtattatacaatgtgcatgtaagtcaaccagacagtggtcaaatagatgacgtaggtggtgaatatcaagccctttcccgactgcacatctgtgacgcagccctaaatgggaagacggtgcaagtattgccaagcgctttatccacaatgtttggaatagattcttgcccttactatgtgctagagaaccactatatcacaactcctttgtccacagaagaagctgcattccctttggcatatgtaatgaccatcagtcaagatttcgatacgtttgaatggcttttctgggctatttacatgcctcaaaatgtctactgtattcacgttgataaggcggccacgattgactttaaaattgctgtgagtgaattattggagtgcttctcaaatgcatttatatcctcacagtctgagtatattatttatggtggaaaatccaggctccaggcggacctggcctgcatgagagatcttatagcatcaactgttcagtggagatatgtcactaacactggtgatcacgatttccccctaaaaaccaacagggagatagttcagtatttgaaaacaatgaattggacaaacattacacctaatttagtgtctgttctgaaatctactgaaaggatcaaatatacccatagagagtacagaaccagagcacacgcttttgtcctaaagaagcataaaaagaagagcccacctccacgtcaactcaaaatccactttggctcaagttacgttgcccttacaagggaatttgtccattttgctctttataataaaatagccattgagttactccagcggtctcaagatacctacagtccagataaacatttctggattacactcaacaatattccagttgagtgtactgggccttggatattggcagtgaactctggctcctgccagaatagacacatctgtccacgtggccttgagtttcagcaacaatatccagttaacagctttggtggcaacaactgtagcatcgcagctggcactgcagcaccaagggaggccctggggcctttccacctgaaggcagcttgttctgctcatcagaacaagtggggattctggaactgctatttgcacctcaaatag

SEQ ID NO: 303858 - DNA, 1176 bp, Artificial Sequence
  derived and/or modified sequence
atgaaggtgtggagctgctacctgtgcatcatcaccctgcagatcattattatcgtgacggtactatacaatgtgcacgtgtcccaaccagattccggtcaaatagacgacgtggggggggaatatcaagctctgtctagacttcacatttgtgatgcagctttgaacggcaaaaccgtgcaggtgctgccctccgcgctctccaccatgtttggcatagactcctgtccctactatgtgctcgagaatcactatataactactccgctgtctaccgaggaagcagccttcccactcgcttacgtcatgaccatttctcaggatttcgacacctttgagtggttgttctgggcgatctatatgccccagaacgtgtactgcatccatgtcgataaagcggccacaatcgacttcaaaatcgcagtctcagagctgctagaatgcttcagtaatgccttcatctcttcccagtccgaatacattatatatggagggaaaagcagattgcaagctgaccttgcctgcatgcgggacctgattgcctctacggtgcagtggcgctacgtcacaaatacgggagaccatgactttcccctcaaaaccaacagagaaattgtgcagtacttgaaaaccatgaattggacgaatatcacccccaacctcgtatctgtcctgaaatccaccgaaagaattaaatacacacaccgggagtaccggactcgagctcatgcctttgtcttaaaaaagcataaaaaaaaatcaccacccccccgacaactcaagatccattttgggtcgtcatatgtggctctgactagagagttcgtgcattttgccctgtacaataagatcgctattgagctgctgcagcggtcacaggatacgtattctccagacaagcacttttggataaccctaaataacatcccagtggagtgtactggcccatggatactggcggtgaacagcgggtcctgtcagaaccgacacatctgccctaggggcctcgagtttcagcaacaatatccagtgaactccttcggtggcaacaattgctccattgctgctgggaccgccgcgccccgcgaagccttgggcccttttcatctgaaggccgcctgttcagcacaccagaacaagtgggggttctggaactgttatctgcatcttaaatag

SEQ ID NO: 303859 - DNA, 1176 bp, Artificial Sequence
  derived and/or modified sequence
atgaaggtgtggtcttgctatctatgcatcatcacactgcagataattataattgtcaccgtcctgtacaacgttcacgttagccagccggactcgggacagatcgatgacgtgggcggtgagtatcaagcactgtcccgactgcatatctgcgacgcggcactcaatggaaagacagtccaagtactgccttcagccctctctaccatgttcggaatagattcctgtccctactatgtcctggagaatcactatatcaccacgcccttaagcactgaggaagccgcttttcccctggcatatgttatgaccatttctcaggatttcgatacttttgagtggttgttctgggctatctacatgccacagaacgtatactgcattcatgtggataaggccgctacaatcgacttcaagatcgctgtgtccgagttactcgagtgtttcagtaatgcgttcatttccagtcagtcagaatacattatctacgggggtaagagcaggctgcaggctgatctggcatgcatgagagatctcatcgcgtcaacagtccagtggcggtacgtcactaatacaggcgaccacgactttccactgaaaacgaaccgagaaatagtccagtaccttaagaccatgaattggactaacataacccccaacctggtatctgtgctcaaaagcaccgagaggatcaagtatactcaccgtgagtaccgcacacgtgcccacgccttcgtgctcaaaaagcacaagaagaaatcacctccaccgagacaactgaagattcactttggtagcagctacgtggccctaacccgggaattcgttcacttcgctttgtataataaaatagcgatcgagctgctgcaaagaagccaagacacttatagcccagacaaacatttttggatcactctgaataatatcccggtagagtgcaccggcccttggatactcgctgtgaactccggcagttgccaaaacaggcacatttgcccaagaggtttggagttccagcagcagtatcctgtgaactcctttgggggaaacaactgctcaattgcagccggtaccgctgccccacgcgaggctctcggcccattccatctcaaggcagcatgctctgctcatcaaaataaatggggtttctggaactgctatcttcacctgaagtag

SEQ ID NO: 303860 - protein, 335 aa, Artificial Sequence
  derived and/or modified sequence
MWTGYKILIFSYLTTEIWMEKQYLSQREVDLEAYFTRNHTVLQGTRFKRAIFQGQYCRNFGCCEDRDDGCVTEFYAANALCYCDKFCDRENSDCCPDYKSFCREEKEWPPHTQPWYPEGRWTAQNYSQFWGMTLEDGFKFRLGTLPPSPMLLSMNEMTRLVSHACYPLFKDQNATNNGCAMASRSDGRGKRHATKPCPNNVEKSNRIYQCSPPYRVSSNETEIMKEIMQNGPVQAIMQVREDFFHYKTGIYRHVTSTNKESEKYRKLQTHAVKLTGWGTLRGAQGQKEKFWIAANSWGKSWGENGYFRILRGVNESDIEKLIIAAWGQLTSSDEP

SEQ ID NO: 303861 - protein, 155 aa, Artificial Sequence
  derived and/or modified sequence
MASRSDGRGKRHATKPCPNNVEKSNRIYQCSPPYRVSSNETEIMKEIMQNGPVQAIMQVREDFFHYKTGIYRHVTSTNKESEKYRKLQTHAVKLTGWGTLRGAQGQKEKFWIAANSWGKSWGENGYFRILRGVNESDIEKLIIAAWGQLTSSDEP

SEQ ID NO: 303862 - DNA, 1008 bp, Artificial Sequence
  derived and/or modified sequence
atgtggaccggctacaagatcctgatcttcagctacctgaccaccgagatctggatggagaagcagtacctgagccagagagaggtggacctggaggcctacttcaccagaaaccacaccgtgctgcagggcaccagattcaagagagccatcttccagggccagtactgcagaaacttcggctgctgcgaggacagagacgacggctgcgtgaccgagttctacgccgccaacgccctgtgctactgcgacaagttctgcgacagagagaacagcgactgctgccccgactacaagagcttctgcagagaggagaaggagtggcccccccacacccagccctggtaccccgagggcagatggaccgcccagaactacagccagttctggggcatgaccctggaggacggcttcaagttcagactgggcaccctgccccccagccccatgctgctgagcatgaacgagatgaccagactggtgagccacgcctgctaccccctgttcaaggaccagaacgccaccaacaacggctgcgccatggccagcagaagcgacggcagaggcaagagacacgccaccaagccctgccccaacaacgtggagaagagcaacagaatctaccagtgcagccccccctacagagtgagcagcaacgagaccgagatcatgaaggagatcatgcagaacggccccgtgcaggccatcatgcaggtgagagaggacttcttccactacaagaccggcatctacagacacgtgaccagcaccaacaaggagagcgagaagtacagaaagctgcagacccacgccgtgaagctgaccggctggggcaccctgagaggcgcccagggccagaaggagaagttctggatcgccgccaacagctggggcaagagctggggcgagaacggctacttcagaatcctgagaggcgtgaacgagagcgacatcgagaagctgatcatcgccgcctggggccagctgaccagcagcgacgagccctag

SEQ ID NO: 303863 - DNA, 468 bp, Artificial Sequence
  derived and/or modified sequence
atggccagcagaagcgacggcagaggcaagagacacgccaccaagccctgccccaacaacgtggagaagagcaacagaatctaccagtgcagccccccctacagagtgagcagcaacgagaccgagatcatgaaggagatcatgcagaacggccccgtgcaggccatcatgcaggtgagagaggacttcttccactacaagaccggcatctacagacacgtgaccagcaccaacaaggagagcgagaagtacagaaagctgcagacccacgccgtgaagctgaccggctggggcaccctgagaggcgcccagggccagaaggagaagttctggatcgccgccaacagctggggcaagagctggggcgagaacggctacttcagaatcctgagaggcgtgaacgagagcgacatcgagaagctgatcatcgccgcctggggccagctgaccagcagcgacgagccctag

SEQ ID NO: 303864 - DNA, 1008 bp, Artificial Sequence
  derived and/or modified sequence
atgtggacagggtacaagattttgatctttagttaccttacaactgaaatttggatggaaaagcagtacttaagtcagagggaggttgatctagaggcttattttacccgcaatcacacagtgctgcaaggaacacgatttaagagagctattttccaggggcagtactgtaggaacttcggttgttgcgaagatcgggatgacgggtgtgtgacggaattctacgccgccaatgcgctttgttattgcgataaattctgtgatagggaaaattccgactgttgtcctgactacaaaagcttctgccgtgaggaaaaggagtggccaccgcacacacagccatggtatcctgagggccgatggaccgcccagaactattcccagttctggggtatgactctcgaagacgggtttaaatttcggcttgggaccctgccacccagccctatgcttttgagtatgaacgagatgactcgcctggtgagtcacgcatgttatccactgtttaaagatcagaatgcaacaaataatggatgcgcaatggcctccagatccgatgggcggggaaaacgccacgccaccaagccttgcccgaataacgtggagaaatcaaatcggatctatcagtgtagtcctccctatcgcgtgtcaagcaatgaaacagagatcatgaaggagataatgcagaacgggcccgttcaagctatcatgcaggtccgggaggatttttttcactacaagactggcatctatcggcatgtcacttccaccaacaaggagagtgaaaagtataggaaacttcagactcacgctgtgaaactcactggttggggaaccttgcggggcgctcagggacagaaggaaaagttctggattgctgccaacagctggggaaagagttggggtgaaaatggctacttcaggatcctccgcggcgtaaatgaaagcgacattgagaagctaatcattgccgcttggggacaacttacctcatccgatgaaccttag

SEQ ID NO: 303865 - DNA, 468 bp, Artificial Sequence
  derived and/or modified sequence
atggcttctaggagtgacggacgtggaaagaggcatgcaactaaaccttgccctaacaatgtggaaaagtctaatcggatttatcagtgctcgccaccttaccgagtgtcctctaacgaaaccgagatcatgaaggagatcatgcaaaacggacccgtccaggccatcatgcaggttagagaggatttttttcactacaaaaccggaatttataggcacgttacatcaactaataaggaaagcgaaaagtatcggaaactgcagacccacgccgtgaagttaaccgggtggggcaccctcagaggggcacaggggcaaaaggaaaaattctggattgccgctaactcatgggggaagagctggggcgagaatggatatttccgtatcttgcggggggttaacgagtctgatatcgaaaaactgattattgctgcatggggccaactgacctccagtgacgaaccttag

SEQ ID NO: 303866 - DNA, 1008 bp, Artificial Sequence
  derived and/or modified sequence
atgtggacaggctacaagatcctgatcttctcctacctgaccacagagatctggatggagaagcagtacctgagccagcgggaggtggacctggaggcctacttcaccaggaaccacacagtgctgcagggcacccgcttcaagagggccatcttccagggccagtactgcaggaactttggctgctgtgaggacagagatgatggctgtgtgacagagttctacgccgccaatgccctgtgctactgtgacaagttctgtgaccgggagaacagcgactgctgcccagactacaagagcttctgccgggaggagaaggagtggccaccccacacccagccctggtacccagagggccgctggacagcccagaactacagccagttctggggcatgaccctggaggatggcttcaagttccggctgggcaccctgccccccagccccatgctgctgtccatgaatgagatgacccggctggtgtcccatgcctgctaccccctcttcaaggaccagaatgccaccaacaacggctgtgccatggccagcagaagtgatggccggggcaagagacatgccaccaagccctgccccaacaacgtggagaagagcaaccgcatctaccagtgcagccccccctacagagtgagcagcaatgaaacagagatcatgaaggagatcatgcagaatggacctgtgcaggccatcatgcaggtgcgggaggacttcttccactacaagacaggcatctacagacatgtgaccagcaccaacaaggagagcgagaagtacaggaagctgcagacccatgctgtgaagctgaccggctggggcaccctgcggggggcccagggccagaaggagaagttctggattgctgccaacagctggggcaagtcctggggagaaaatggctacttccgcatcctgcggggcgtgaatgaaagtgacatcgagaagctgatcatcgccgcctggggccagctgaccagcagtgatgagccctag

SEQ ID NO: 303867 - DNA, 468 bp, Artificial Sequence
  derived and/or modified sequence
atggccagcagaagtgatggccggggcaagagacatgccaccaagccctgccccaacaacgtggagaagagcaaccgcatctaccagtgcagccccccctacagagtgagcagcaatgaaacagagatcatgaaggagatcatgcagaatggacctgtgcaggccatcatgcaggtgcgggaggacttcttccactacaagacaggcatctacagacatgtgaccagcaccaacaaggagagcgagaagtacaggaagctgcagacccatgctgtgaagctgaccggctggggcaccctgcggggggcccagggccagaaggagaagttctggattgctgccaacagctggggcaagtcctggggagaaaatggctacttccgcatcctgcggggcgtgaatgaaagtgacatcgagaagctgatcatcgccgcctggggccagctgaccagcagtgatgagccctag

SEQ ID NO: 303868 - DNA, 1008 bp, Artificial Sequence
  derived and/or modified sequence
atgtggaccggctacaagatcctgatcttcagctacctgaccaccgaaatctggatggaaaagcaatatctgtcacagcgagaggtggatctagaggcctacttcaccagaaaccatactgtcctgcagggcacacgctttaagagagccatatttcaaggccagtactgccgaaacttcggatgctgcgaagatagggacgatggctgcgtaaccgagttctacgcggctaacgccttatgctactgtgacaaattctgcgacagagagaactccgactgctgtccggactacaaatctttctgtagggaggagaaagagtggcctccccacactcaaccatggtaccccgaagggcgttggaccgcccagaactactcgcagttctggggtatgactctcgaggacggattcaaatttcgcctgggcacactgcccccctcgcccatgctcctcagcatgaacgaaatgacgcggcttgtgagccacgcgtgctatcccctgttcaaagatcaaaacgccacaaacaacggttgcgcaatggcatccaggtccgatgggcggggcaaaagacacgcaacgaagccgtgccctaataacgtggagaaatcaaacaggatttatcagtgtagcccaccttatcgggtgtccagtaacgaaaccgagataatgaaagagatcatgcagaatgggcccgtccaagccattatgcaggtacgtgaggatttcttccattacaaaacaggaatctacaggcacgtcacatctacaaacaaagagtcagagaagtatcggaagttgcaaacccatgccgtcaaactgacaggctggggcacacttcgaggcgcacaaggccaaaaggagaaattctggatagccgccaacagctgggggaaatcctggggcgaaaatggctacttccggatcctacggggagttaatgaaagcgacatcgagaaattaataattgcggcttggggccagctgactagctccgacgagccctag

SEQ ID NO: 303869 - DNA, 468 bp, Artificial Sequence
  derived and/or modified sequence
atggccagccggagcgacggccggggcaagcggcacgccaccaagccttgtcccaataacgtggaaaagagcaatcggatctatcagtgcagccccccctaccgagtgagtagcaacgaaacggagatcatgaaggagatcatgcagaatggcccagtgcaagctatcatgcaggtgcgtgaagacttttttcactacaaaaccgggatctaccgccacgtcacctccaccaacaaagagagcgagaagtaccggaaactgcagacccatgcggtcaaactaaccggttggggaacactgcgtggcgcgcagggacagaaggaaaagttctggatcgccgctaattcttggggcaagtcttggggggagaacggctatttccgaatcttgagaggggttaatgagagcgacatcgagaagttgatcatcgccgcctggggccagctcactagcagcgacgagccctag

SEQ ID NO: 303870 - DNA, 1008 bp, Artificial Sequence
  derived and/or modified sequence
atgtggacaggatacaagatcctcatcttttcttatcttacgaccgaaatttggatggaaaagcagtatctctcccagcgagaagtcgacctcgaggcatacttcacccgcaaccacaccgtcctgcaaggaactagattcaagcgggctattttccagggccagtactgtcgaaacttcggatgttgcgaggatagagacgacggttgtgtgacggagttctatgccgcaaatgcactctgttattgcgacaagttctgtgacagagaaaattcagactgttgccccgactacaaaagcttttgccgagaggagaaggaatggcctccccatacccaaccatggtatcctgaaggccgttggacagcacagaattactcccaattttggggcatgaccctggaggacgggtttaagtttcgcctaggcaccctgccaccgagccccatgcttctgagtatgaatgaaatgacccggctggtctcacatgcttgctaccccctcttcaaggatcagaacgcgacgaacaatggctgtgccatggcgagtcggtctgacggcagaggtaagcggcatgctacaaagccatgtcctaacaatgtggagaaaagtaacaggatttaccagtgcagccctccttatagggtcagcagcaacgagacagaaatcatgaaagaaataatgcagaatgggccagtgcaggcgatcatgcaggttcgagaggattttttccactataaaaccggcatatatcggcatgtcacctccactaataaagagtccgagaagtaccgcaaattgcaaacccacgccgtgaaattgaccggctggggcaccctgaggggtgcccaaggccagaaggaaaaattttggattgccgctaactcatgggggaagtcatggggggagaacggatactttaggattttgcggggtgtgaacgagagcgatattgaaaagctgatcattgcagcttggggtcagctgacgtctagcgacgaaccatag

SEQ ID NO: 303871 - DNA, 468 bp, Artificial Sequence
  derived and/or modified sequence
atggccagcagatcagacggccgtggtaaacgacatgcgaccaagccatgccctaataacgtagaaaagagcaatcgcatctatcaatgcagccccccatacagagtaagcagtaatgagacggaaataatgaaagagatcatgcagaatggccctgtgcaagccattatgcaggtaagagaagatttctttcattacaaaactggaatctaccgccatgtaacatccaccaacaaagagagtgagaaataccgaaagcttcagacccacgctgttaagctgactggttggggcaccctgcgaggcgctcaggggcagaaggaaaagttttggatagcggcaaactcttgggggaaatcctggggagagaacgggtatttccgtatcctgcgaggagtgaacgaaagcgacatcgagaaacttatcatcgctgcatggggacaactgacttcatcagacgagccgtag

SEQ ID NO: 303872 - DNA, 1381 bp, Artificial Sequence
  derived and/or modified sequence
gaagtatactcattcaagtaaaggatcagtttcagggttcaggctgaagtgtcttaatgactagaattcaggttccaaggagaagcccacaaggctaagggtattggatataacggaaagtggaagctatacctgacttccagagaatgtggaccggatataagatcttaatcttctcttatcttactacagaaatctggatggagaagcagtatttatctcaaagagaagtggacctagaggcttatttcactaggaatcacaccgttttgcaaggtactcgattcaaaagagccattttccaagggcaatactgtagaaattttggctgttgtgaagacagagatgatggctgtgtcactgagttctatgcggcgaatgcgttgtgctactgtgataaattctgtgacagagaaaattctgattgctgtcctgactacaagtccttttgccgtgaagagaaagaatggcctcctcacacacagccttggtatccagaaggcagatggacagcacagaattacagccaattttggggaatgactttagaagatggttttaaatttcgccttggcactttgccacctagtcccatgctcctgagcatgaatgaaatgacaagactggtatcccacgcatgctacccacttttcaaagaccaaaatgctaccaacaatggatgtgccatggcaagcaggtctgatgggcgaggaaaacggcatgccacgaagccatgtcccaacaacgtagaaaaatctaacaggatctatcaatgttctcctccatacagagtctcttccaacgaaactgagataatgaaagaaatcatgcaaaatggaccagttcaagccataatgcaagtccgtgaagatttcttccattataagacagggatatacagacatgttaccagcacaaataaagaatcagaaaaatatcgaaagcttcagacacatgcagtcaaactcactggatggggcacactgagaggagcacaagggcagaaagaaaaattttggattgctgccaattcctggggaaagtcatggggagagaatggctatttcaggattcttcgaggagtaaatgagtccgacattgaaaagttgattatcgcagcttggggccaactgacgagttctgatgaaccataacatatcattaaatttccataaggtcatgcctttaagtaaccccctaaattgaagtttagcaatatgacattcttggtgacagtggaatctttgtctcttcaccgtgttaacataatctatctattttcttattttcccctctggtctatgcttctgcttccttcatattactgagcattaacaacaccaataaaggacagcagagtccctaaatgtctttaaagttc

SEQ ID NO: 303873 - DNA, 1045 bp, Artificial Sequence
  derived and/or modified sequence
atgtggaccggatataagatcttaatcttctcttatcttactacagaaatctggatggagaagcagtatttatctcaaagagaagtggacctagaggcttatttcactaggaatcacaccgttttgcaaggtactcgattcaaaagagccattttccaagggcaatactgtagaaattttggctgttgtgaagacagagatgatggctgtgtcactgagttctatgcggcgaatgcgttgtgctactgtgataaattctgtgacagagaaaattctgattgctgtcctgactacaagtccttttgccgtgaagagaaagaatggcctcctcacacacagccttggtatccagaagatggacagcacagaattacagccaattttggggaatgactttagaagatggttttaaatttcgccttggcactttgccacctagtcccatgctcctgagcatgaatgaaatgacaactggtatcccacgcatgctacccacttttcaaagaccaaaatgctaccaacaatggatgtgccatggcaagcaggtctgatgggcgaggaaaacggcatgccacgaagccatgtcccaacaacgtagaaaaatctaacaggatctatcaatgttctcctccatacagagtctcttccaacgaaactgagataatgaaagaaatcatgcaaaatggaccagttcaagccataatgcaagtccgtgaagatttcttccattataagacagggatatacagacatgttaccagcacaaataaagaatcagaaaaatatcgaaagcttcagacacatgcagtcaaactcactggatggggcacactgagaggagcacaagggcagaaagaaaaattttggattgctgccaattcctggggaaagtcatggggagagaatggctatttcaggattcttcgaggagtaaatgagtccgacattgaaaagttgattatcgcagcttggggccaactgacgagttctgatgaaccataacatatcattaaatttccataaggtcatgcctttaagtaacccc

SEQ ID NO: 303874 - DNA, 531 bp, Artificial Sequence
  derived and/or modified sequence
atgtcggcatttcgactgtggccaggacttcttattatgctgggctctctttgccatcgaggttctccttgtggattgtccacccacgtggaaatcggacaccgagccttagaatttctccagctgcacaatgggcgagtcaattaccgggagttactcctggaacatcaggacgcctaccaggctggaattgtgttcccggattgcttctatccatccatatgcaaaggggggaagtttcatgatgttagtgaatcaacacactggaccccattcctcaatgccagcgtgcattacataagagaaaattacccattgccgtgggagaaggacaccgagaaactggttgcatttcttttcggaatcacatcacacatggccgctgacgtaagctggcatagtctgggcctggaacaaggctttctgagaactatgggagctattgacttccacggatcatattctgaggcacatagcgccggcgatttcggaacagtatatcttcacctgcttaactttttggtggtgtag

SEQ ID NO: 303875 - DNA, 1090 bp, Artificial Sequence
  derived and/or modified sequence
agtgctgctgcagctctgagcattcccacgtcaccagagaagccggtgggcaatgagatcatgtctgctttcaggttgtggcctggcctgctgatcatgttgggttctctctgccatagaggttcaccgtgtggcctttcaacacacgtagaaataggacacagagctctggagtttcttcagcttcacaatgggcgtgttaactacagagagctgttactagaacaccaggatgcgtatcaggctggaatcgtgtttcctgattgtttttaccctagcatctgcaaaggaggaaaattccatgatgtgtctgagagcactcactggactccgtttcttaatgcaagcgttcattatatccgagagaactatccccttccctgggagaaggacacagagaaactggtagctttcttgtttggaattacttctcacatggcggcagatgtcagctggcatagtctgggccttgaacaaggattccttaggaccatgggagctattgattttcacggctcctattcagaggctcattcggctggtgattttggtactgtttatttacatttgctaaattttctcgtggtatagttcacttataatgacatcactactgtgctttaaatatgtgtgtctttaatattttgctggttgcatgtattttctatttaatgttgcagttcatttagagtagagatgtacctcatttaacatagagatgtatttctaaaaacttgtgtctatatgtatttttttgttaaaaaattctacactttgttgttgacatgtcataattttagaaaaactttacttatacattgggttaaaattcattagctagtgtctcctactttcctaatactttagctttaaactagtaaactccaccttttgcctgtagtagtaaattgcttttaaatatttaaactaggtggtgaatggtgtttattaaacccttatggtcgatatttccttaaagtaaaacaaaaaacacctttggttatatggccagttctttcttaatttatatgtttcactaactaagatttttaaaagataattttttcttaaaaaaaaaaaaaaaaaaaaa

SEQ ID NO: 303876 - DNA, 531 bp, Artificial Sequence
  derived and/or modified sequence
atgtctgccttccggctgtggccaggcctgctgatcatgctgggcagcctgtgccaccggggcagcccctgtggcctgagcacccacgtggagatcggccaccgggccctggagttcctgcagctgcacaacggccgggtgaactaccgggagctgctgctggagcaccaggatgcctaccaggccggcatcgtgtttcctgactgcttctaccccagcatctgcaagggcggcaagttccatgatgtgtctgagagcacccactggacccccttcctgaatgcctctgtgcactacatccgggagaactaccccctgccctgggagaaggacacagagaagctggtggccttcctgtttggcatcaccagccacatggccgcagatgtgtcctggcacagcctgggcctggagcagggcttcctgcggaccatgggcgccatcgacttccacggcagctacagcgaggcccacagcgctggggactttggaacagtgtacctgcacctgctgaacttcctggtggtgtag

SEQ ID NO: 303877 - DNA, 531 bp, Artificial Sequence
  derived and/or modified sequence
atgagcgccttccggctgtggcccggcctgctgatcatgctgggcagtctgtgccaccgaggctccccatgtggccttagcacacacgtggaaatagggcaccgcgctctggagtttctacagctgcataatgggagggtgaactatagagaactactccttgaacatcaggacgcttatcaggctggcatcgttttccccgactgcttctatccctctatatgtaagggagggaagtttcacgacgttagtgagtccacccattggacgcccttcctgaatgcctctgtgcattacatcagagaaaactatccgctgccttgggaaaaagacaccgagaaacttgttgcgttccttttcggaatcacctcacatatggcagcagatgtgtcatggcattcccttggcctcgagcaggggttcttgcggaccatgggcgctatcgatttccacggatcgtattcagaggctcactccgctggggacttcggaactgtttatctacatcttttaaacttcctggttgtttag

SEQ ID NO: 303878 - DNA, 531 bp, Artificial Sequence
  derived and/or modified sequence
atgtccgctttccggctgtggccaggcctactgatcatgctcgggtctctgtgccatcgcggaagcccatgcggcttgtccactcacgttgaaattggacatcgagcgcttgaatttttgcaactgcacaatggtagggtgaattatcgggaattgctgctggaacaccaggacgcctatcaggccggaatagtgtttccggactgcttctatccctccatctgcaagggcggaaaattccatgatgtttccgagagtacgcactggacaccttttcttaacgcgtctgtgcattacattcgggagaactatccgctgccatgggagaaagacaccgaaaagttagtggcattcctctttggcataacctctcatatggccgctgatgtttcctggcactctctcggattggaacagggattcctgaggactatgggcgctattgatttccacggttcatatagcgaggcccactccgctggtgactttgggacggtgtaccttcaccttctgaacttcctcgtcgtttag

SEQ ID NO: 303879 - DNA, 531 bp, Artificial Sequence
  derived and/or modified sequence
atgagcgccttcagactgtggcccggcctgctgatcatgctgggcagcctgtgccacagaggcagcccctgcggcctgagcacccacgtggagatcggccacagagccctggagttcctgcagctgcacaacggcagagtgaactacagagagctgctgctggagcaccaggacgcctaccaggccggcatcgtgttccccgactgcttctaccccagcatctgcaagggcggcaagttccacgacgtgagcgagagcacccactggacccccttcctgaacgccagcgtgcactacatcagagagaactaccccctgccctgggagaaggacaccgagaagctggtggccttcctgttcggcatcaccagccacatggccgccgacgtgagctggcacagcctgggcctggagcagggcttcctgagaaccatgggcgccatcgacttccacggcagctacagcgaggcccacagcgccggcgacttcggcaccgtgtacctgcacctgctgaacttcctggtggtgtag

SEQ ID NO: 303880 - protein, 222 aa, Artificial Sequence
  derived and/or modified sequence
MAEKPKLHYSNIRGRMESIRWLLAAAGVEFEEKFIKSAEDLDKLRNDGYLMFQQVPMVEIDGMKLVQTRAILNYIASKYNLYGKDIKEKALIDMYIEGIADLGEMILLLPFSQPEEQDAKLALIQEKTKNRYFPAFEKVLKSHGQDYLVGNKLSRADIHLVELLYYVEELDSSLISSFPLLKALKTRISNLPTVKKFLQPGSPRKPPMDEKSLEESRKIFRF

SEQ ID NO: 303881 - DNA, 669 bp, Artificial Sequence
  derived and/or modified sequence
atggccgagaaacctaagctgcattacagtaacatccgaggtagaatggaaagcatccgttggctccttgccgccgctggagttgagttcgaggaaaagtttataaaaagcgccgaagatctggataagctcaggaatgatggctatctaatgtttcaacaagtgcctatggttgaaatagacggcatgaagctggtacagactagagcgattctgaactacatcgctagcaagtataacctatacggaaaggatatcaaagagaaggccttaatcgatatgtatatcgagggaatcgccgacctgggagaaatgatcctgttgctccccttctcccaaccggaagaacaggatgcaaagctggccttgatccaggagaaaacaaaaaacagatacttcccagcctttgaaaaagtgctcaagtcacatggacaggattatttggtaggtaacaaattgtcccgtgcagatatccatcttgtcgagctattgtattacgtggaggagctggattcatctctcatatctagcttcccactcttgaaagcccttaaaaccagaataagtaaccttcccactgtgaaaaagtttctgcagcccggatccccacgcaagccgccaatggacgagaagtcactggaagagtcaagaaagatattcagattttag

SEQ ID NO: 303882 - DNA, 1303 bp, Artificial Sequence
  derived and/or modified sequence
gtggcttttccctaacttgacccttctttcagtgggagggaactattgagaggaacaaagagcttataaatacattaggacctggaattcggttgtccagccacaaaggtgacagcatttaacaaagcttagagaaacctccaggagactgctaccatggcagagaagcccaagctccactactccaatatacggggcagaatggagtccatccggtggctcctggctgcagctggagtagagtttgaagagaaatttataaaatctgcagaagatttggacaagttaagaaatgatggatatttgatgttccagcaagtgccaatggttgagattgatgggatgaagctggtgcagaccagagccattctcaactacattgccagcaaatacaacctctatgggaaagacataaaggagaaagccctgattgatatgtatatagaaggtatagcagatttgggtgaaatgatccttcttctgccctttagtcaacctgaggaacaagatgccaagcttgccttgatccaagagaaaacaaaaaatcgctacttccctgcctttgaaaaagtcttaaagagccacggacaagactaccttgttggcaacaagctgagccgggctgacattcacctggtggaacttctctactacgtggaagagcttgactctagccttatttccagcttccctctgctgaaggccctgaaaaccagaatcagtaacctgcccacagtgaagaagtttctacagcctggcagcccaaggaagcctcccatggatgagaaatctttagaagaatcaaggaagattttcaggttttaataaaccagccatagaggtcaagaacatgcaagaccagtattctaaagttttgcaacaattaagtgctttacctaagtgttgattgtgcctgttgtgaagctaatgaactctttcaaattatatgctaattaaataatacaactcctattcacccacttagttaaaattgatttcttctcattaggatctgatgtgaattcagttttccaatctcctcctagccaacaattttcttggaattacaaattcagtaaaaatggaaactataaattatgtggtttgtttgacttttccaagaattgccctgtaacatacaatttgtcatacaatctattaaaatgccaatgtaaaaatgcacctctgacattttcaggtatgcacaggagaagagttaccatcctggataatggcataaagacattttcttcttttcctgaacagtcattttatttctgataaaagcattctttctaatgca

SEQ ID NO: 303883 - DNA, 669 bp, Artificial Sequence
  derived and/or modified sequence
atggccgagaagcccaagctgcactacagcaacatccggggccgcatggagagcatccgctggctgctggccgccgccggcgtggagtttgaggagaagttcatcaagtctgctgaggacctggacaagctgagaaatgatggctacctgatgttccagcaggtgcccatggtggagattgatggcatgaagctggtgcagacccgggccatcctgaactacatcgccagcaagtacaacctgtatggcaaggacatcaaggagaaggccctgattgacatgtacatcgagggcattgctgacctgggggagatgatcctgctgctgcccttcagccagcctgaggagcaggatgccaagctggccctgatccaggagaagaccaagaaccgctacttccctgcctttgagaaggtgctgaagagccacggccaggactacctggtgggcaacaagctgagcagagctgacatccacctggtggagctgctgtactacgtggaggagctggacagcagcctcatcagcagcttccccctgctgaaggccctgaagacccgcatcagcaacctgcccaccgtgaagaagttcctgcagcccggcagccccaggaagccacccatggatgagaagagcctggaggagagcaggaagatcttccgcttctag

SEQ ID NO: 303884 - DNA, 669 bp, Artificial Sequence
  derived and/or modified sequence
atggccgagaagcccaagctgcactacagcaacatccggggccggatggaatctattcgatggctgctggcagctgctggtgtagagtttgaagagaagtttattaaatccgcggaggaccttgataagctgcgcaatgatggctacctgatgttccagcaggtgcccatggttgaaattgacgggatgaaactggtccagacacgtgcgatactgaattatatcgcctccaagtacaatctctacggaaaggacatcaaggaaaaagctctcattgatatgtatatcgaagggatcgccgaccttggcgagatgattctgcttctgcccttcagccagcctgaagagcaggacgccaaacttgccttaatccaggagaaaaccaagaaccgctactttccagccttcgagaaggtgctaaagagccatggccaagactacctcgttggaaacaagctgtccagagccgacatacaccttgtggaactactttactacgtggaggagttagatagctcgctgatttcctcttttccgcttctcaaggcgctcaaaacccgcatttccaacttaccaaccgtaaagaagtttttacagcctggttcccccaggaaaccccctatggatgagaagagcctcgaagagagcagaaagattttccgcttctag

SEQ ID NO: 303885 - DNA, 669 bp, Artificial Sequence
  derived and/or modified sequence
atggctgaaaagcccaaactgcactattctaacatccgtggcagaatggaatccattcggtggctcctggcggctgcgggtgttgaattcgaggagaaatttataaaatctgccgaggatctcgataaactgaggaacgatgggtaccttatgttccagcaggtcccaatggtggagattgacggcatgaaactggtgcaaacaagagccattttgaactacatagcgtcaaagtataacctgtacggcaaagatataaaggaaaaagcactgatagacatgtatatagaaggaatcgcagacctcggggagatgattttgctcctgccgttctcccagcctgaggagcaggacgccaaactggcacttatccaggaaaagaccaagaaccgatattttccggctttcgaaaaagtactcaagtcccacggccaggactacctggtcgggaataagttgagtcgggctgacatccatctcgtcgaactactctattacgtggaagagctggatagctcgttgatcagctcttttcctctcctgaaggccctgaagacccggatatcgaacctcccaaccgtgaagaaattcctgcagccaggtagtccaaggaagcccccaatggacgaaaaatcactcgaagaatctcgaaagattttccggttttag

SEQ ID NO: 303886 - DNA, 669 bp, Artificial Sequence
  derived and/or modified sequence
atggccgagaagcccaagctgcactacagcaacatcagaggcagaatggagagcatcagatggctgctggccgccgccggcgtggagttcgaggagaagttcatcaagagcgccgaggacctggacaagctgagaaacgacggctacctgatgttccagcaggtgcccatggtggagatcgacggcatgaagctggtgcagaccagagccatcctgaactacatcgccagcaagtacaacctgtacggcaaggacatcaaggagaaggccctgatcgacatgtacatcgagggcatcgccgacctgggcgagatgatcctgctgctgcccttcagccagcccgaggagcaggacgccaagctggccctgatccaggagaagaccaagaacagatacttccccgccttcgagaaggtgctgaagagccacggccaggactacctggtgggcaacaagctgagcagagccgacatccacctggtggagctgctgtactacgtggaggagctggacagcagcctgatcagcagcttccccctgctgaaggccctgaagaccagaatcagcaacctgcccaccgtgaagaagttcctgcagcccggcagccccagaaagccccccatggacgagaagagcctggaggagagcagaaagatcttcagattctag

SEQ ID NO: 303887 - DNA, 390 bp, Artificial Sequence
  derived and/or modified sequence
atgtatgtggaaggcaccctggacctgttggagctgctgatcatgcatccttttctcaaacccgatgaccaacagaaagaagttgtgaacatggcccaaaaagccattatccgatacttccctgtgttcgaaaagatacttagagggcacggccagagttttctcgtgggcaaccaattatccctggctgatgtgattctgctgcaaaccatcctggcattggaggaaaagattcccaatatcctgtctgcttttccattcctgcaggaatacacagtgaaactgagcaacatccccaccataaaaaggtttcttgagcctggatctaaaaagaagcctccacccgatgagatttacgtccgcacagtctacaacatttttagaccttag

SEQ ID NO: 303888 - DNA, 270 bp, Artificial Sequence
  derived and/or modified sequence
atgtatgtcgagggcacgctggatctcctcgagcttctaatcatgcacccctttctcaaacccgacgaccagcaaaaggaagtggtgaacatggcacagaaggccatcatcaggtacttcccggtgtttgagaaaattttacggggtcatggccagtcttttcttgtgggaaaccagctgtcgctcgctgatgtgatactgctgcagactatcctggctttggaagaaaaaattccgaacattctgagtgccttcccgttccttcagtag

SEQ ID NO: 303889 - DNA, 390 bp, Artificial Sequence
  derived and/or modified sequence
atgtacgtagaggggaccctggatttgttggagctgctgatcatgcatccctttcttaaacccgatgaccaacagaaggaggtggtcaacatggcacaaaaggctattatacgatatttccctgtcttcgaaaagattctgcgggggcacggccagtcatttttagtcggtaatcagttgagcttggccgatgttatcctgctgcagacaatcttggccttggaggaaaaaattcctaacattctgtccgcttttccgttcttgcaagaatacacagtgaagctgtctaacattcctaccatcaaacggttcttagaacctggcagtaaaaaaaagcctcccccagacgagatttatgttcgaaccgtatacaacattttcaggccctag

SEQ ID NO: 303890 - DNA, 859 bp, Artificial Sequence
  derived and/or modified sequence
agtgagggaaaatgcagcaacaaaaataaagaacagtttcccgtgccaaaatcctgaatattcatttcgcccctgagcactgggttgaagacgcgaaattgggactgttggtctgcgacgagctgctgcatttgtatttcagaaagcctgaaaagctatcatggcagcaaggcccaagctccactatcccaacggaagaggccggatggagtccgtgagatgggttttagctgccgccggagtcgaggattgacatgtacgtggaggggacactggatctgctggaactgcttatcatgcatcctttcttaaaaccagatgatcagcaaaaggaagtggttaacatggcccagaaggctataattagatactttcctgtgtttgaaaagattttaaggggtcacggacaaagctttcttgttggtaatcagctgagccttgcagatgtgattttactccaaaccattttagctctagaagagaaaattcctaatatcctgtctgcatttcctttcctccaggaatacacagtgaaactaagtaatatccctacaattaagagattccttgaacctggcagcaagaagaagcctccccctgatgaaatttatgtgagaaccgtctacaacatctttaggccataaaacaacacatccatgtgtgagtgacagtgtgttcctagagatggtattgtctacagtcatgtcttaatggatcccagctctgtcatggtgctatctatgtattaagttgggtcctaagttgggtcttttgtgtcaacgagatcatctcttctagaaatatcaaccttttttgtccagtaaataattgttaggggatctttattggaaaacttttt

SEQ ID NO: 303891 - DNA, 379 bp, Artificial Sequence
  derived and/or modified sequence
aaagcctgaaaagctatcatggcagcaaggcccaagctccactatcccaacggaagaggccggatggagtccgtgagatgggttttagctgccgccggagtcgaggattgacatgtacgtggaggggacactggatctgctggaactgcttatcatgcatcctttcttaaaaccagatgatcagcaaaaggaagtggttaacatggcccagaaggctataattagatactttcctgtgtttgaaaagattttaaggggtcacggacaaagctttcttgttggtaatcagctgagccttgcagatgtgattttactccaaaccattttagctctagaagagaaaattcctaatatcctgtctgcatttcctttcctccag

SEQ ID NO: 303892 - DNA, 1170 bp, Artificial Sequence
  derived and/or modified sequence
aattgggactgttggtctgcgacgagctgctgcatttgtatttcagaaagcctgaaaagctatcatggcagcaaggcccaagctccactatcccaacggaagaggccggatggagtccgtgagatgggttttagctgccgccggagtcgaggtaaccacctgctgttccaacaagtgcccatggttgaaattgacgggatgaagttggtacagacccgaagcattctccactacatagcagacaagcacaatctctttggattgacatgtacgtggaggggacactggatctgctggaactgcttatcatgcatcctttcttaaaaccagatgatcagcaaaaggaagtggttaacatggcccagaaggctataattagatactttcctgtgtttgaaaagattttaaggggtcacggacaaagctttcttgttggtaatcagctgagccttgcagatgtgattttactccaaaccattttagctctagaagagaaaattcctaatatcctgtctgcatttcctttcctccaggaatacacagtgaaactaagtaatatccctacaattaagagattccttgaacctggcagcaagaagaagcctccccctgatgaaatttatgtgagaaccgtctacaacatctttaggccataaaacaacacatccatgtgtgagtgacagtgtgttcctagagatggtattgtctacagtcatgtcttaatggatcccagctctgtcatggtgctatctatgtattaagttgggtcctaagttgggtcttttgtgtcaacgagatcatctcttctagaaatatcaaccttttttgtccagtaaataattgttaggggatctttattggaaaacttttttggagaggctggtatttaagttagatctgattgggctactcatgtcctgtagccagttcatcctcataataagaatgggcaggatctcttgttctctcctgagtgtctttctactctcctgagcgtctttctgctctccttatcctgttctcttatccttatcccctccagtctctgcctaatttttagtgtttaataacaaccgaatgtctagtaaatgactctcctctgagctgtaataaataaaatggtagtaatgaatgcaatcagtattagccaaaataaagaatttatgagtc

SEQ ID NO: 303893 - DNA, 390 bp, Artificial Sequence
  derived and/or modified sequence
atgtatgtggagggcaccctggacctgctggagctgctgatcatgcaccccttcctgaagccagatgaccagcagaaggaggtggtgaacatggcccagaaggccatcatccgctacttccctgtgtttgagaagatcctgcggggccacggccagagcttcctggtgggcaaccagctgagcctggctgatgtgatcctgctgcagaccatcctggccctggaggagaagatccccaacatcctgagcgccttccccttcctgcaggagtacacagtgaagctgagcaacatccccaccatcaagcgcttcctggagcccggcagcaagaagaagcccccaccagatgagatctacgtgaggacagtgtacaacatcttccggccctag

SEQ ID NO: 303894 - DNA, 270 bp, Artificial Sequence
  derived and/or modified sequence
atgtatgtggagggcaccctggacctgctggagctgctgatcatgcaccccttcctgaagccagatgaccagcagaaggaggtggtgaacatggcccagaaggccatcatccgctacttccctgtgtttgagaagatcctgcggggccacggccagagcttcctggtgggcaaccagctgagcctggctgatgtgatcctgctgcagaccatcctggccctggaggagaagatccccaacatcctgagcgccttccccttcctgcagtag

SEQ ID NO: 303895 - DNA, 390 bp, Artificial Sequence
  derived and/or modified sequence
atgtacgtggagggcaccctggacctgctggagctgctgatcatgcaccctttcctcaagcctgacgatcagcagaaggaggttgtgaacatggcacagaaagccattatacgttacttccctgtcttcgaaaagatcctccgcggacacggccagtccttccttgtgggaaatcagctgtccctggctgacgtgatactcttgcaaaccatcctggccctggaggagaaaatacctaatatcctttctgccttcccttttctgcaggagtatacagttaaactgtccaatatcccaaccattaagaggttcctggaacctgggagtaagaaaaagccaccgccggatgagatctacgtcagaaccgtgtataacatcttcaggccatag

SEQ ID NO: 303896 - DNA, 270 bp, Artificial Sequence
  derived and/or modified sequence
atgtacgtggagggcaccctggacctgctggagctgctgatcatgcaccctttcctgaagccagatgaccagcaaaaggaagttgtcaatatggcacagaaggctattatcagatattttccagtctttgaaaaaatactgcgcggacatgggcagagttttttagtgggaaatcagctcagtctggccgacgtgatactgcttcagacaattctcgccctggaggagaaaattccgaacatcctgagcgcattcccttttctacaatag

SEQ ID NO: 303897 - DNA, 390 bp, Artificial Sequence
  derived and/or modified sequence
atgtacgtggagggcaccctggacctgctggagctgctgatcatgcaccctttccttaaacccgacgaccaacaaaaagaagtggtgaatatggctcaaaaggccatcatccggtacttccccgtattcgagaagatactgcgcggacatggtcaatctttcctcgtggggaaccagctctcactggccgatgttatcttgctgcaaactattctggccctggaggagaaaatccccaacatcctgtctgccttccccttcttgcaagagtacactgtgaagctgtccaatattccgaccattaaacggtttctggagcccgggagtaagaagaagcctcctccggatgagatctacgtgaggaccgtatacaatatctttcgtccatag

SEQ ID NO: 303898 - DNA, 390 bp, Artificial Sequence
  derived and/or modified sequence
atgtacgttgaggggacacttgacttgcttgagctgcttatcatgcatccattcctcaaaccagacgaccagcagaaggaggtcgttaatatggcccagaaggctataatcagatattttcccgtattcgagaagatcctgcgcggacatggacagtcctttctggttgggaatcaactaagccttgccgacgtgattctcctgcagactatactggccttagaggagaagattccaaatatccttagtgcattccccttcctccaggaatatacagtgaaattgtccaatattcccacaatcaagcggttcctggaacccggatcaaaaaagaagcctcccccagacgaaatctacgtcaggacagtatacaacattttccggccatag

SEQ ID NO: 303899 - DNA, 270 bp, Artificial Sequence
  derived and/or modified sequence
atgtatgtggagggtaccctggacctgttggagttattgataatgcatccctttctgaagccagacgaccagcagaaggaggtggtgaatatggcacagaaggccatcatccgttacttccctgtatttgagaagatcctgaggggccacgggcagtcattccttgtgggtaatcaattgagcctggctgatgtcatcctacttcagaccatcttagcattggaggagaagattccaaatatcttatcagcattcccttttctgcaatag

SEQ ID NO: 303900 - DNA, 390 bp, Artificial Sequence
  derived and/or modified sequence
atgtacgttgaggggactctggacctgctggaactgttgatcatgcaccctttcctgaaaccagatgatcagcagaaggaagtcgtgaatatggcccaaaaggctattataaggtattttccagtgttcgaaaaaattctgcgcggacacggacagagtttcctagtgggcaatcagttgtccctggctgatgtgatcttacttcagaccatacttgctctggaggagaaaatcccaaatatcctgtctgcgttccctttcctccaagaatacaccgtaaaactcagcaatatcccgacaattaagaggttcctcgagcccggttctaagaaaaaaccacccccagacgaaatctacgttagaacagtatacaatatcttccgcccttag

SEQ ID NO: 303901 - DNA, 390 bp, Artificial Sequence
  derived and/or modified sequence
atgtacgtggagggcaccctggacctgctggagctgctgatcatgcaccccttcctgaagcccgacgaccagcagaaggaggtggtgaacatggcccagaaggccatcatcagatacttccccgtgttcgagaagatcctgagaggccacggccagagcttcctggtgggcaaccagctgagcctggccgacgtgatcctgctgcagaccatcctggccctggaggagaagatccccaacatcctgagcgccttccccttcctgcaggagtacaccgtgaagctgagcaacatccccaccatcaagagattcctggagcccggcagcaagaagaagcccccccccgacgagatctacgtgagaaccgtgtacaacatcttcagaccctag

SEQ ID NO: 303902 - DNA, 270 bp, Artificial Sequence
  derived and/or modified sequence
atgtacgtggagggcaccctggacctgctggagctgctgatcatgcaccccttcctgaagcccgacgaccagcagaaggaggtggtgaacatggcccagaaggccatcatcagatacttccccgtgttcgagaagatcctgagaggccacggccagagcttcctggtgggcaaccagctgagcctggccgacgtgatcctgctgcagaccatcctggccctggaggagaagatccccaacatcctgagcgccttccccttcctgcagtag

SEQ ID NO: 303903 - protein, 444 aa, Artificial Sequence
  derived and/or modified sequence
MSSSYDEASLAPEETTDSFWEVGNYKRTVKRIDDGHRLCNDLMNCVQERAKIEKAYGQQLTDWAKRWRQLIEKGPQYGSLERAWGAIMTEADKVSELHQEVKNNLLNEDLEKVKNWQKDAYHKQIMGGFKETKEAEDGFRKAQKPWAKKMKELEAAKKAYHLACKEEKLAMTREMNSKTEQSVTPEQQKKLQDKVDKCKQDVQKTQEKYEKVLEDVGKTTPQYMENMEQVFEQCQQFEEKRLVFLKEVLLDIKRHLNLAENSSYIHVYRELEQAIRGADAQEDLRWFRSTSGPGMPMNWPQFEEWNPDLPHTTTKKEKQPKKAEGVALTNATGAVESTSQAGDRGSVSSYDRGQPYATEWSDDESGNPFGGSETNGGANPFEDDSKGVRVRALYDYDGQEQDELSFKAGDELTKLGEEDEQGWCRGRLDSGQLGLYPANYVEAI

SEQ ID NO: 303904 - protein, 426 aa, Artificial Sequence
  derived and/or modified sequence
MSSSYDEASLAPEETTDSFWEVGNYKRTVKRIDDGHRLCNDLMNCVQERAKIEKAYGQQLTDWAKRWRQLIEKGPQYGSLERAWGAIMTEADKVSELHQEVKNNLLNEDLEKVKNWQKDAYHKQIMGGFKETKEAEDGFRKAQKPWAKKMKELEAAKKAYHLACKEEKLAMTREMNSKTEQSVTPEQQKKLQDKVDKCKQDVQKTQEKYEKVLEDVGKTTPQYMENMEQVFEQCQQFEEKRLVFLKEVLLDIKRHLNLAENSSYIHVYRELEQAIRGADAQEDLRWFRSTSGPGMPMNWPQFEEWNPDLPHTTTKKEKQPKKAEGVALTNATGAVESTSQAGDRGSVSSYDRGQPYATEWSDDESGNPFGGSETNGGANPFEDDSKGVRVRALYDYDGQEQDELSFKAGDELTKLGLYPANYVEAI

SEQ ID NO: 303905 - DNA, 1335 bp, Artificial Sequence
  derived and/or modified sequence
atgtcatcgagctacgacgaagcttctctggcgcccgaggagacaaccgattcattctgggaggtgggaaactataaacgaaccgtgaagcggattgatgacggccaccgactgtgtaacgatctgatgaactgcgtccaagaacgagctaagattgagaaagcctacggccagcagttaacggactgggccaagcgttggcggcagttgatcgaaaagggcccacagtatggtagcctggaacgagcctggggcgctattatgaccgaggccgataaggtgtccgagctgcaccaggaggttaagaacaacctcttaaacgaagacctcgagaaggtgaagaattggcagaaagatgcataccacaaacagatcatgggcggatttaaagaaacaaaagaggcggaggatggattcagaaaggcacaaaaaccttgggcaaagaagatgaaagagctggaagccgccaagaaggcatatcacctggcttgtaaggaggaaaagctggcaatgacccgcgagatgaattccaaaacagagcagagcgtcacccccgaacagcaaaagaagttgcaagacaaagtggataagtgtaaacaggatgtgcagaagacgcaggaaaagtacgaaaaagtcctggaggacgtaggcaaaactactccacagtatatggaaaatatggagcaggtctttgagcagtgtcagcaatttgaggaaaagcgtctggtattccttaaagaggttctgctggacatcaaaagacatctgaaccttgccgagaactctagctacatccacgtgtaccgcgaacttgaacaagcgattcggggtgctgacgctcaggaagatcttaggtggttccgttctacctccggcccgggcatgcctatgaactggccccaattcgaggagtggaatccagatttgcctcacacgaccaccaagaaggagaaacaaccaaaaaaggccgagggtgtggctctgaccaatgccacaggtgcagtggagagcacctctcaggctggcgataggggaagtgtttctagctacgatcgaggtcagccctatgcgacagagtggtcagatgacgagtcaggtaaccccttcgggggatccgaaacgaacgggggtgcaaatccattcgaagatgattccaagggtgttagggtccgcgcactctatgattacgatggccaggagcaggacgaactgagcttcaaagccggcgacgaacttactaagctcggcgaggaagatgaacaggggtggtgccgtggaaggctagactccggccagctgggtctctatccggcgaattacgttgaagccatatag

SEQ ID NO: 303906 - DNA, 1281 bp, Artificial Sequence
  derived and/or modified sequence
atgagcagtagttatgacgaggcctctcttgccccagaggagactacagactctttttgggaagtaggcaactataaacgcaccgtcaaaagaattgacgatggacaccgtctttgcaatgacttaatgaactgcgtccaagagcgtgcgaagatcgaaaaggcctacggccagcagctgaccgattgggcaaagcgatggcggcaactcattgagaaaggtccacagtacggatccctcgaaagagcctggggagctatcatgacagaggccgataaagtctccgaactacaccaggaagtgaaaaataacctgctcaatgaggatctcgaaaaggtgaagaactggcagaaggacgcttaccataagcagattatgggaggatttaaagagacaaaagaggccgaagacgggtttagaaaggctcaaaaaccttgggccaaaaaaatgaaggagttggaagctgccaagaaggcctaccacctcgcctgcaaagaggagaaactcgccatgactagagaaatgaactccaagactgaacaaagtgtgacaccagagcagcagaagaaattgcaggataaagtcgacaaatgtaaacaggacgttcagaagacccaggagaagtatgaaaaagttctggaagatgttggcaagactacgccacagtacatggagaacatggagcaggtcttcgaacaatgccaacagttcgaagagaagaggctcgttttcctaaaagaggtgctactggatattaagcggcacctgaatctggctgaaaactcttcatatatccacgtatacagggagctagaacaggccattagaggcgccgatgctcaggaagacctgagatggtttcgctctacctctggtccaggcatgcctatgaactggcctcaatttgaggagtggaacccagatcttccccataccacaactaagaaggaaaagcagcccaagaaagcagaaggtgtggccctcaccaacgccaccggggctgtcgagtccacttcccaagccggcgacaggggctccgtttcttcttacgacaggggccaaccttatgccactgagtggtccgatgatgagtcgggtaacccgtttggggggtctgagaccaacggcggggccaatccattcgaggacgactccaaaggcgtgcgagtgcgggctctgtacgattacgacggacaggagcaggacgaattaagtttcaaggctggcgatgaactgaccaagctgggcctgtaccctgctaattacgttgaagctatctag

SEQ ID NO: 303907 - DNA, 1335 bp, Artificial Sequence
  derived and/or modified sequence
atgtcatcatcctacgacgaagcctccctggccccagaagaaacaactgattctttttgggaggttgggaattacaagagaacagtcaaacggattgacgacgggcaccgcctatgcaacgaccttatgaactgtgtgcaggagcgcgccaaaatcgagaaagcctatggacagcagctcaccgactgggccaaaaggtggcgccaactcatcgaaaaggggccacagtacggttctctggagcgagcttggggggccatcatgaccgaagcagacaaagtgagcgaattacaccaggaagtgaagaataatttgctgaatgaagatttggagaaggttaagaactggcagaaggatgcctaccacaagcagattatgggcggtttcaaagagacgaaagaggctgaagacggttttagaaaagctcagaagccatgggccaaaaagatgaaggagctggaggctgctaagaaggcttaccacctggcctgtaaagaggaaaaactggcaatgacccgggagatgaactctaaaaccgagcagagcgtgactcccgagcagcaaaagaaactgcaagacaaagttgataagtgcaaacaggacgtgcaaaaaacccaggaaaaatacgagaaagtgctggaggatgtaggcaagaccacgccgcagtacatggaaaatatggaacaagtttttgaacagtgtcaacaatttgaggaaaagcgcctcgtgttcctcaaggaggtgctgctcgacataaagcggcaccttaacctcgccgagaactcctcttacatccacgtttacagggagctggaacaggctatccgcggcgccgacgctcaagaggatcttcgctggttccgctccaccagtggccccggaatgcccatgaactggcctcagtttgaagagtggaaccccgatctcccacatacaacgaccaaaaaagagaagcagcccaagaaggcggagggcgtggcgcttacaaacgccaccggggctgtggagagcacaagccaagctggcgaccgtgggagtgtgtcttcttacgatagaggacaaccatatgccactgagtggagcgacgatgaatccggaaatccatttggaggctccgaaacaaacggcggagcgaatccttttgaagatgactcgaaaggcgtccgggttagggccctgtacgactatgatggccaggagcaggatgagctcagctttaaggctggtgacgaattgaccaaactaggcgaagaggacgagcagggatggtgccgcggccgcctggactcgggccagcttggactctacccggctaactatgtggaagctatatag

SEQ ID NO: 303908 - DNA, 1335 bp, Artificial Sequence
  derived and/or modified sequence
atgagcagcagctatgatgaggccagcctggcccctgaggagaccacagacagcttctgggaggtgggcaactacaagaggacagtgaagagaattgatgatggccaccggctgtgcaatgacctgatgaactgtgtgcaggagcgggccaagattgagaaggcctacggccagcagctgacagactgggccaagcgctggaggcagctgattgagaagggcccccagtatggcagcctggagcgggcctggggcgccatcatgacagaagctgacaaggtgtctgagctgcaccaggaggtgaagaacaacctgctgaatgaagacctggagaaggtgaagaactggcagaaggatgcctaccacaagcagatcatgggcggcttcaaggagaccaaggaggccgaggatggcttcaggaaggcccagaagccctgggccaagaagatgaaggagctggaggccgccaagaaggcctaccacctggcctgcaaggaggagaagctggccatgacccgggagatgaacagcaagacagagcagagcgtgaccccagagcagcagaagaagctgcaggacaaggtggacaagtgcaagcaggatgtgcagaagacccaggagaagtatgagaaggtgctggaggatgtgggcaagaccaccccccagtacatggagaacatggagcaggtgtttgagcagtgccagcagtttgaggagaagaggctggtgttcctgaaggaggtgctgctggacatcaagaggcacctgaacctggccgagaacagcagctacatccacgtgtaccgggagctggagcaggccatcagaggagcagatgcccaggaggacctgcgctggttccgcagcaccagcggccctggcatgcccatgaactggccccagtttgaggagtggaacccagacctgccccacaccaccaccaagaaggagaagcagcccaagaaggccgagggcgtggccctgaccaatgccaccggggctgtggagagcaccagccaggccggggaccggggctctgtgtcctcctatgaccggggccagccctatgccacagagtggagcgatgatgaaagtggcaacccctttggaggcagcgagaccaatggaggagccaacccctttgaagatgacagcaagggcgtgcgggtgcgggccctgtatgactatgatggccaggagcaggatgagctgtccttcaaggctggagatgagctgaccaagctgggggaggaggatgagcagggctggtgccggggccgcctggacagcggccagctgggcctgtacccagccaactacgtggaggccatctag

SEQ ID NO: 303909 - DNA, 1281 bp, Artificial Sequence
  derived and/or modified sequence
atgagcagcagctatgatgaggccagcctggcccctgaggagaccacagacagcttctgggaggtgggcaactacaagaggacagtgaagagaattgatgatggccaccggctgtgcaatgacctgatgaactgtgtgcaggagcgggccaagattgagaaggcctacggccagcagctgacagactgggccaagcgctggaggcagctgattgagaagggcccccagtatggcagcctggagcgggcctggggcgccatcatgacagaagctgacaaggtgtctgagctgcaccaggaggtgaagaacaacctgctgaatgaagacctggagaaggtgaagaactggcagaaggatgcctaccacaagcagatcatgggcggcttcaaggagaccaaggaggccgaggatggcttcaggaaggcccagaagccctgggccaagaagatgaaggagctggaggccgccaagaaggcctaccacctggcctgcaaggaggagaagctggccatgacccgggagatgaacagcaagacagagcagagcgtgaccccagagcagcagaagaagctgcaggacaaggtggacaagtgcaagcaggatgtgcagaagacccaggagaagtatgagaaggtgctggaggatgtgggcaagaccaccccccagtacatggagaacatggagcaggtgtttgagcagtgccagcagtttgaggagaagaggctggtgttcctgaaggaggtgctgctggacatcaagaggcacctgaacctggccgagaacagcagctacatccacgtgtaccgggagctggagcaggccatcagaggagcagatgcccaggaggacctgcgctggttccgcagcaccagcggccctggcatgcccatgaactggccccagtttgaggagtggaacccagacctgccccacaccaccaccaagaaggagaagcagcccaagaaggccgagggcgtggccctgaccaatgccaccggggctgtggagagcaccagccaggccggggaccggggctctgtgtcctcctatgaccggggccagccctatgccacagagtggagcgatgatgaaagtggcaacccctttggaggcagcgagaccaatggaggagccaacccctttgaagatgacagcaagggcgtgcgggtgcgggccctgtatgactatgatggccaggagcaggatgagctgtccttcaaggctggagatgagctgaccaagctgggcctgtacccagccaactacgtggaggccatctag

SEQ ID NO: 303910 - DNA, 1335 bp, Artificial Sequence
  derived and/or modified sequence
atgagcagcagctacgacgaggccagcctggcccccgaggagaccaccgactctttctgggaagtcggtaactacaaaagaacggtgaaaaggatcgacgacggacataggttatgcaatgacctgatgaattgcgtgcaggaacgggcaaagatagaaaaggcgtacggacagcagctgactgattgggcgaagcggtggcgacagctcattgaaaagggtccacagtacggatcacttgagcgggcctggggggccattatgaccgaggccgataaagtgtccgagcttcaccaggaggtaaaaaataaccttctgaacgaggatctggaaaaggtcaaaaattggcaaaaggatgcatatcacaagcagattatgggtggttttaaagagacaaaggaggccgaggacggatttaggaaagcccagaagccttgggctaagaagatgaaggagctagaggccgccaaaaaggcttaccatttagcctgtaaagaagagaagctcgctatgaccagagaaatgaacagcaagacggagcagtccgtgacccccgagcagcagaagaaactgcaggacaaggtggacaagtgtaagcaagacgtgcagaaaacacaggaaaagtacgaaaaagtgcttgaggacgtcggtaaaaccactccgcagtacatggaaaacatggaacaggtgtttgaacagtgccagcagtttgaggagaagagattggtgtttttaaaggaggtgctgctggacattaaaagacatctgaacctcgccgaaaacagcagttatattcatgtttacagggagctcgagcaggcaattaggggggccgacgcccaagaagatctgcgctggttccggtctacatcaggccctgggatgccgatgaactggcctcagttcgaggaatggaaccccgatctaccacataccacgaccaaaaaggagaaacagccgaagaaggctgagggagtggctctcacaaacgcaactggggccgtggaaagcacatcacaagctggagaccgcgggagcgtttcaagctatgatcgcggtcagccttacgccacagagtggtctgatgacgagtccggcaacccatttggtgggtccgaaactaacggcggcgccaacccctttgaagatgactccaagggtgtgcgggttagagcactgtacgattacgacggccaagaacaggatgagctttcttttaaagcgggcgacgagttaaccaagctgggcgaagaagacgagcagggatggtgcagaggaagactggattctgggcagctggggctttatccagctaactatgtggaggcaatctag

SEQ ID NO: 303911 - DNA, 1281 bp, Artificial Sequence
  derived and/or modified sequence
atgagcagcagctacgacgaggccagcctggcccccgaggagaccacagactctttttgggaggtcgggaattacaagaggactgttaaacgcatagatgacggtcatcgtctttgcaatgacctgatgaactgcgtgcaggaacgggccaagatcgagaaagcttatgggcagcaactcactgactgggccaaacggtggcgacagctgatcgaaaaggggcctcagtatggatcactagagcgagcctggggggctattatgacagaggccgacaaggtcagtgagctccaccaagaagtcaaaaataatctcctcaacgaggatcttgaaaaagtcaagaattggcagaaggatgcatatcacaagcagattatgggtgggtttaaggagaccaaggaagcggaagatggcttcagaaaggcgcaaaagccatgggctaagaaaatgaaggaactggaggctgcgaagaaggcctaccaccttgcatgcaaggaggaaaaattagcaatgaccagagaaatgaactcaaagactgagcagtcggtgacccctgagcagcagaagaagctgcaagacaaagtcgataagtgtaaacaggatgtgcagaaaacccaagagaagtacgaaaaggtactggaggacgtggggaagacaacaccacagtatatggagaacatggagcaggtgtttgagcagtgccaacaatttgaggagaagcgccttgtttttctaaaagaggtgctgctggacattaaacgccaccttaacctcgcggagaatagttcatacattcatgtctacagggaactcgagcaggctatccgtggtgctgatgcacaagaggatctaagatggttcagatccacatctgggccggggatgcccatgaattggcctcagtttgaagaatggaatcctgacctgcctcacaccacgactaagaaggaaaagcagccaaagaaagccgagggcgtggccctgaccaatgccactggcgcagtcgaaagcacctcgcaggccggagatcgtggaagtgttagctcctatgaccgcggtcagccgtatgcaaccgagtggagcgatgatgaaagtggaaatccattcggcgggtcggaaacgaacggcggcgctaatccatttgaggacgattccaaaggcgtgcgcgtgcgcgcactctacgactacgatggacaggaacaggatgaactgtctttcaaggccggggatgaattgaccaagctgggtctctaccccgctaattacgtggaggcaatatag

SEQ ID NO: 303912 - DNA, 1335 bp, Artificial Sequence
  derived and/or modified sequence
atgagcagcagctacgacgaggccagcctggcccccgaggagaccacagactctttctgggaagttggcaattacaagcgaactgtaaagaggatcgatgacgggcaccgcctgtgcaacgacctgatgaactgtgtccaagagagggccaagatcgagaaggcctacggtcagcaactcacggactgggctaagagatggcggcagctgattgaaaagggaccacagtatgggtccctggaacgcgcttggggagcaatcatgaccgaagccgataaggttagtgagctgcatcaagaagtaaagaataatctgctcaatgaagacctggaaaaagtgaagaactggcaaaaggacgcataccacaaacagatcatgggcggatttaaagagactaaggaggcagaggatggttttcggaaggcgcagaagccgtgggccaaaaagatgaaggagttagaggccgccaaaaaagcgtatcatctggcctgtaaggaggaaaagctggctatgacgcgtgagatgaattcaaaaactgagcagtccgtgactcccgagcagcagaaaaagttgcaggataaggtggacaaatgtaagcaggatgttcagaagactcaagagaagtacgaaaaagtgttggaagatgtaggcaagaccactcctcagtatatggaaaatatggaacaggtatttgaacaatgtcaacaatttgaagagaaacggctagtgttccttaaggaggtcctattagatatcaagagacacctaaacctggccgagaatagctcatacattcatgtataccgggaactagagcaggcgatcagaggggcggatgcacaggaagatctgcgttggttccgaagcacaagtggcccaggtatgcctatgaattggccgcagtttgaggagtggaatccagacctacctcacacgacaactaaaaaagaaaagcagcccaagaaggccgagggcgtggcactgaccaacgcaaccggcgccgtggaatctactagtcaagcaggcgatagaggctctgtatccagttacgatagggggcagccatatgcaaccgaatggtcagatgatgaatctggaaaccctttcggcggtagtgagacaaacgggggcgctaacccctttgaagacgactcaaaaggcgtgcgcgtgcgagcattgtatgactacgatggccaggagcaggacgaacttagctttaaggctggcgatgaactaacaaaactgggtgaagaagacgaacaagggtggtgccgcggcagactggacagcggacaactgggcctgtatccagcaaattatgtggaagcaatatag

SEQ ID NO: 303913 - DNA, 1335 bp, Artificial Sequence
  derived and/or modified sequence
atgagcagcagctacgatgaggcctcgttagcgccagaagaaactaccgattcattttgggaagtaggtaattataagagaacagtaaaaagaatcgatgacggccatagactatgcaacgatcttatgaattgcgtgcaggaacgcgctaaaatcgagaaggcttatggccagcagctcacagattgggctaagcggtggaggcagcttatagaaaagggtccacagtacggaagcctggagagagcctggggggcaatcatgaccgaggctgataaggtgagtgaactccaccaggaggtgaagaacaatttattgaacgaggacctggagaaagtgaaaaattggcagaaggatgcctatcacaagcagatcatgggtgggttcaaggaaactaaagaagcagaggacgggtttcgtaaagcacaaaagccctgggccaagaaaatgaaagaactggaggccgctaagaaggcataccacctggcttgtaaagaggagaaactggctatgactcgggaaatgaattctaagacggaacaatctgttacccctgaacagcaaaagaaactgcaggataaagttgacaagtgtaaacaggacgtgcagaaaacccaggaaaagtacgaaaaggtgttagaggacgttgggaaaaccacacctcaatatatggaaaatatggagcaagtgttcgaacagtgtcagcagttcgaggaaaaacggctggtgttcttgaaggaagtcctcctggacattaaaagacacctgaacctcgctgaaaactcgagctacatccatgtgtatcgggaactagagcaggctattcggggagctgacgcacaggaggatctcaggtggtttcgatcaacctccggaccaggcatgcctatgaattggcctcaattcgaagagtggaaccctgatctaccgcatacgaccaccaaaaaggaaaaacaacctaagaaagccgaaggggtggctctcaccaacgctactggcgctgtcgaaagcacctctcaggctggtgaccggggatcagttagtagctatgatcggggtcagccttacgctaccgaatggagcgacgacgaatctggaaatccattcggagggtctgagaccaacggaggcgcaaacccgttcgaagatgattccaagggggtccgggttagggctctgtatgactacgatgggcaggaacaggatgagctgtctttcaaagcaggtgacgaattaacaaaacttggcgaggaagacgagcagggatggtgcagaggtagactggattctgggcagctggggctctaccctgctaactatgtcgaggctatttag

SEQ ID NO: 303914 - DNA, 1281 bp, Artificial Sequence
  derived and/or modified sequence
atgtcctcaagttacgacgaggcatcactagcgccagaggagacaacggactctttctgggaagtcggaaattacaagagaacagtgaagcgcatcgatgatggccaccgcctgtgtaacgacctcatgaactgtgtccaagaaagggcaaagatagagaaagcttacggacagcaactcacagattgggcgaagcggtggcgtcagttaattgagaaaggccctcaatatggctctctggagcgcgcttggggagctattatgacggaagctgataaggtgtcagagctgcaccaggaagtcaagaacaatctcctcaatgaggaccttgaaaaggtgaagaattggcagaaagatgcttaccataagcaaatcatgggtggttttaaggagacaaaggaggccgaggatggttttcgaaaggcccagaaaccatgggccaagaagatgaaagagttggaagctgcaaaaaaggcatatcacctggcctgcaaggaagagaagctcgcgatgaccagggaaatgaactctaagaccgagcaaagcgtgacacctgagcagcagaagaaacttcaggataaggtggataagtgcaaacaagatgttcagaagacacaggagaagtacgagaaggtgcttgaagatgtgggaaagacgacgcctcaatatatggaaaacatggagcaggtctttgagcagtgtcagcagtttgaggaaaagcgccttgtcttcctcaaagaggtgcttctggacatcaagagacacttgaatctcgctgagaatagctcttacatccatgtctacagagaattagagcaggcaattcgaggcgctgacgcacaggaggatctccggtggttccgctcaacgtctggtccaggcatgccgatgaattggccccagtttgaggagtggaatcctgacctcccccatacaacaaccaagaaggaaaaacagccaaaaaaggcagagggtgttgctctgacaaacgcgacaggagctgtggagtcaacaagtcaggctggcgataggggatcggtctccagttatgatcgcggacagccttacgccactgagtggtcagacgacgagtctgggaatccattcggaggttctgagaccaatggcggagcaaatccctttgaggacgattccaagggcgtccgcgttcgggctctgtacgactatgacggccaagagcaggacgagttgtccttcaaagccggagatgagctaaccaagcttggactgtaccctgccaactacgtagaggctatctag

SEQ ID NO: 303915 - DNA, 1335 bp, Artificial Sequence
  derived and/or modified sequence
atgagttcttcctatgatgaagcttcccttgctccagaggaaaccacagattccttttgggaagtgggtaattacaaacggacggtgaaaaggattgacgacggccatagactctgcaacgacttgatgaattgcgtgcaggaacgggcaaagattgagaaggcttacgggcagcagctcacggactgggccaagcgctggcgccagttgattgaaaagggccctcagtatgggtctctagaaagagcatggggcgcaattatgacggaggcggataaagtttccgaactccatcaggaggtaaaaaacaacctgcttaatgaagatcttgagaaagtgaagaactggcagaaggacgcgtatcataaacagataatgggaggttttaaagagactaaggaggctgaggacggatttaggaaggctcagaagccttgggccaagaaaatgaaggaactcgaggctgcaaagaaagcatatcacctagcatgcaaggaggagaagctggcgatgacacgagagatgaatagcaaaaccgagcagtcggtgacccctgaacaacagaagaagctgcaggataaggttgacaaatgcaagcaggacgtacagaagacacaggagaaatatgagaaagtgttagaggacgttggaaagaccacaccgcagtatatggagaatatggagcaggtgttcgagcaatgccagcagtttgaagaaaaacgtctggtcttccttaaggaggtgctgcttgatatcaaaaggcacctcaacttagcggagaattcctcatatattcatgtgtacagagagttagagcaggcaatccgaggagcggacgctcaagaggatctgcgatggtttaggtcaacgtccggaccagggatgccaatgaactggccccagtttgaagagtggaaccctgatctgcctcacactaccacgaagaaggaaaaacagcccaagaaggccgagggagtcgccctcaccaatgccacgggcgcagtggaatcaacctcccaggctggcgacagaggatctgtatctagctatgatcgaggtcagccctatgccaccgagtggtcagacgacgagtctggtaaccccttcggcggttccgagactaacggcggagcaaacccttttgaggacgacagtaaaggagtgagggtgcgcgctctgtatgattatgatggccaagaacaggacgaattatcgttcaaagcaggcgacgaattgacaaaacttggggaagaagatgaacagggatggtgccgcggacgattagattctggccaactgggcctgtatccagccaactacgtcgaggctatttag

SEQ ID NO: 303916 - DNA, 4229 bp, Artificial Sequence
  derived and/or modified sequence
agagcgacgcggtggcggcggcagcgccagccccctcctcccccgggaagtcggccgggcttgaggccgggccccagacgtcccgcttcgccccgagtcgccgccgatggtccccggagctcctgcccccagtgcatgagcagccgagcctgctaaccgcagctccgcacttgtccatccccctgcggctacaccatgtccagctcctacgatgaggcctcactggcgccagaggagaccaccgacagcttctgggaggtggggaactacaagcggaccgtgaagcgcatcgatgacggccaccgtctatgcaacgacctgatgaactgcgtgcaggagcgcgccaagatcgagaaggcgtacgggcagcagctcaccgactgggccaagcgttggcgccagctcatcgagaaaggcccacagtatggcagcctggagcgggcctggggtgccataatgacagaggcagacaaggtgagcgagctgcaccaggaggtgaagaacaatctgctgaatgaggacctggagaaggtgaagaactggcagaaggacgcctatcacaagcagatcatgggtggcttcaaggagacgaaggaggctgaagatggcttccgcaaggcccagaagccttgggccaagaagatgaaggagctggaggcagccaagaaggcctaccatttggcttgcaaagaggaaaagctggccatgacacgggagatgaacagcaagacggagcaatcggtcacacctgagcagcaaaagaagctgcaggacaaagtggacaagtgcaagcaggatgtgcagaagacacaggagaagtatgagaaagtgctggaagatgtgggcaagaccacaccccagtacatggagaacatggagcaggtgtttgagcaatgccagcaatttgaggaaaagcggctggtcttcctcaaggaggtgctgctggacatcaaacggcacctcaacctggctgagaacagcagctacatccatgtgtaccgtgagctggagcaggccatccggggggctgatgcccaggaagacctcagatggttccgcagcaccagtggccccggcatgcccatgaactggccccagtttgaggagtggaacccagaccttcctcacaccaccaccaagaaggagaaacagcctaagaaggcagagggagtggcgctgaccaatgccactggggcggtagagtccacatcccaggctggggaccgcggcagtgttagcagctacgacagaggccagccctacgccaccgagtggtcagacgacgagagtgggaacccctttgggggcagtgagaccaacgggggcgccaacccctttgaggacgactccaagggagtgcgcgtgcgggcactctacgactatgacggccaggagcaggacgagctcagctttaaggccggagacgaactcaccaagctgggcgaggaggatgagcagggctggtgccgtgggcggctggacagcgggcagctgggcctctaccctgccaactacgtggaggctatctagaggccccctccctccatactcccgtcactcctccccactgccgcccctcccctcccactctcgtctccttcccctcgccatagagttccagacatattttccgatcaagcttttatttttttaaaagtcaaaacagaacaaaacaaagtatgcagagacagagcatttgcagggccacctggaggctggggtgctggggcttggggtggccccagggtaggtaacagtcttaggacttagcccaacatcacaacatctgctcttcgggttccaccaaagagtctcctgagccctgagggatggatgtctcctgacccttccaccccgcctcactccctccgtcccactccactccaggctgccggcacctgccccattccctggcctggtttcctaacctcttcttcctcccctgccctgcttcccttcctccaccaccctgctctcaaaggcctcctctccagacccctggaagggaggcttccccatctttagttttccactctgccccggggagcacccttctactcctagccacgtcccttgggaccggtgggactggaggaggaacggtcaccctcctcccccatggaggtttccaggggtcccccagacatgaaagaggggtgagctggaggaagtcatggtgtcactggggtacaggagggtgaatgaagggcatgcaggccctcagcccgggctgtgccagccctcccagccccaggcccatctgagggaccaagacgctgttacgcaggcccttctttccagctatcagcactttcagcatcggctcttcagcagatccaaaccccctcagcaacttgcagaggacctgtcccctctcaaaagtcccctggcctagggtggggacccccaaacctacggcaaagccagcaacagtagcagcctgctcccatttgctggggaggagatcatcttgttcccctggccccccactctccctccatgtccatccaaaaaccataaaatcactgggttccacatcagcctccatgaggccaagccttgtacctgcaaggctcttggcctaaccattcctctgtcctcttctctggcctgcctggggagcccgtgaaggccgcacgggtgcctccagcctgagacatcaggggagagcctgcagctgagttcagcagaaaggaggaatcctggccctcaggaagaagatagtcacatgtttttcttccttgtccccacggcccccagaacaacattctccctgctggcagcccttccatgtctccaaacctgggtcagagtgaaaggacctttgggggtgggtgggagcaaagggcccacctgctggttggtgaaagcagtggtgccggagtgctaggtaccgcacgagagggtgcgggggcttgggaagcagaccagggttggacaaaaccccatgagggcggggagctggaagaaaagtctcttggggacctctggggcaaggagctgagaagtcctgcagcaccaggtgagacttgcttacagtggatgccacttctaggcctctggaccgcagatgccctcctccctcctgcacacctggcctcctgggcctccaggtaaagagagagagccagcccagccctgtttcccctcagtcctcctttgctcctgctgcttctcccaacagcccactgttaggaggtagtagaccccagcctcaaggctctgaccttcttcatgtgggcacagagggtcctgacactctggcagggcctgagctggggcaggcctccctcagggccaggggcgatggcaccccggggacaggcagacctccttcctgccgtcagcacccccttccttatcactgtctggtctccgagcttcggctgcagcctgaggtgtgtcctgggctcctcagagcctgaagcaagcttttggaagcctgcagtcctcccagctccagtgcagaagcctctctctccagcctttccccaggcaggagttggggttgggggcctctgtccctcatcgcttaccttggaaaggtgggaagctggcaatctgcaccttggggcctgggctccccctctctgtgccagcggcttcccagcacctgggaggggctgcagccccagctggactccagcctgtccctcttagcactctagctgcccactccagggcagggactcgaaaccccctccgtcctgagcagccacctccagggccctgtttgggaccactctctcagtccccaggtcctcagggccccagagcgggagggtctcctacctggaagtccccctgagctccagggcccagccctacctgccagtgctggtgtcagggcactcaacaccgagtgtgggggccacgccccttgccatgcccacggcctcctcctgtagctcctgcctgcacccacgatgctgcacgggcccgccctggtggggctcggcgagtaatgtgttttgtccccagttaaccaccattctgcggcctggttctgcaaggaaccagggctgccccaccgcccgccgtctgccgccctaggcttcctgactccattagttccgacacttgtgaaactccgagaagtgctgtggtctcagcaatgcacctgttttgtacatgattgtgtaatttaaaggtatataaatacaaatatatatatatatcagttgtgattgtatgactgtggataaaatccagaactgtgtcaacctggc

SEQ ID NO: 303917 - DNA, 1678 bp, Artificial Sequence
  derived and/or modified sequence
agttctggcgctgctgccttcctgagtgagcggtggagggaaccctagaggacagagcccccagcccggcagcaggccccctctccgcccgccaccacggaggagaaggaggacagccagcccctccagccctggcctggcccagcgggggcagtaagctcctacttgcccccagcttggtgcccacacgggcccagtgcatgagcagccgagcctgctaaccgcagctccgcacttgtccatccccctgcggctacaccatgtccagctcctacgatgaggcctcactggcgccagaggagaccaccgacagcttctgggaggtggggaactacaagcggaccgtgaagcgcatcgatgacggccaccgtctatgcaacgacctgatgaactgcgtgcaggagcgcgccaagatcgagaaggcgtacgggcagcagctcaccgactgggccaagcgttggcgccagctcatcgagaaaggcccacagtatggcagcctggagcgggcctggggtgccataatgacagaggcagacaaggtgagcgagctgcaccaggaggtgaagaacaatctgctgaatgaggacctggagaaggtgaagaactggcagaaggacgcctatcacaagcagatcatgggtggcttcaaggagacgaaggaggctgaagatggcttccgcaaggcccagaagccttgggccaagaagatgaaggagctggaggcagccaagaaggcctaccatttggcttgcaaagaggaaaagctggccatgacacgggagatgaacagcaagacggagcaatcggtcacacctgagcagcaaaagaagctgcaggacaaagtggacaagtgcaagcaggatgtgcagaagacacaggagaagtatgagaaagtgctggaagatgtgggcaagaccacaccccagtacatggagaacatggagcaggtgtttgagcaatgccagcaatttgaggaaaagcggctggtcttcctcaaggaggtgctgctggacatcaaacggcacctcaacctggctgagaacagcagctacatccatgtgtaccgtgagctggagcaggccatccggggggctgatgcccaggaagacctcagatggttccgcagcaccagtggccccggcatgcccatgaactggccccagtttgaggagtggaacccagaccttcctcacaccaccaccaagaaggagaaacagcctaagaaggcagagggagtggcgctgaccaatgccactggggcggtagagtccacatcccaggctggggaccgcggcagtgttagcagctacgacagaggccagccctacgccaccgagtggtcagacgacgagagtgggaacccctttgggggcagtgagaccaacgggggcgccaacccctttgaggacgactccaagggagtgcgcgtgcgggcactctacgactatgacggccaggagcaggacgagctcagctttaaggccggagacgaactcaccaagctgggcctctaccctgccaactacgtggaggctatctagaggccccctccctccatactcccgtcactcctccccactgccgcccctcccctcccactctcgtctccttcccctcgccattagttccgacacttgtgaaactccgagaagtgctgtggtctcagcaatgcacctgt

SEQ ID NO: 303918 - DNA, 4271 bp, Artificial Sequence
  derived and/or modified sequence
gccttcctgagtgagcggtggagggaaccctagaggacagagcccccagcccggcagcaggccccctctccgcccgccaccacggaggagaaggaggacagccagcccctccagccctggcctggcccagcgggggcagtaagctcctacttgcccccagcttggtgcccacacgggcccagtgcatgagcagccgagcctgctaaccgcagctccgcacttgtccatccccctgcggctacaccatgtccagctcctacgatgaggcctcactggcgccagaggagaccaccgacagcttctgggaggtggggaactacaagcggaccgtgaagcgcatcgatgacggccaccgtctatgcaacgacctgatgaactgcgtgcaggagcgcgccaagatcgagaaggcgtacgggcagcagctcaccgactgggccaagcgttggcgccagctcatcgagaaaggcccacagtatggcagcctggagcgggcctggggtgccataatgacagaggcagacaaggtgagcgagctgcaccaggaggtgaagaacaatctgctgaatgaggacctggagaaggtgaagaactggcagaaggacgcctatcacaagcagatcatgggtggcttcaaggagacgaaggaggctgaagatggcttccgcaaggcccagaagccttgggccaagaagatgaaggagctggaggcagccaagaaggcctaccatttggcttgcaaagaggaaaagctggccatgacacgggagatgaacagcaagacggagcaatcggtcacacctgagcagcaaaagaagctgcaggacaaagtggacaagtgcaagcaggatgtgcagaagacacaggagaagtatgagaaagtgctggaagatgtgggcaagaccacaccccagtacatggagaacatggagcaggtgtttgagcaatgccagcaatttgaggaaaagcggctggtcttcctcaaggaggtgctgctggacatcaaacggcacctcaacctggctgagaacagcagctacatccatgtgtaccgtgagctggagcaggccatccggggggctgatgcccaggaagacctcagatggttccgcagcaccagtggccccggcatgcccatgaactggccccagtttgaggagtggaacccagaccttcctcacaccaccaccaagaaggagaaacagcctaagaaggcagagggagtggcgctgaccaatgccactggggcggtagagtccacatcccaggctggggaccgcggcagtgttagcagctacgacagaggccagccctacgccaccgagtggtcagacgacgagagtgggaacccctttgggggcagtgagaccaacgggggcgccaacccctttgaggacgactccaagggagtgcgcgtgcgggcactctacgactatgacggccaggagcaggacgagctcagctttaaggccggagacgaactcaccaagctgggcgaggaggatgagcagggctggtgccgtgggcggctggacagcgggcagctgggcctctaccctgccaactacgtggaggctatctagaggccccctccctccatactcccgtcactcctccccactgccgcccctcccctcccactctcgtctccttcccctcgccatagagttccagacatattttccgatcaagcttttatttttttaaaagtcaaaacagaacaaaacaaagtatgcagagacagagcatttgcagggccacctggaggctggggtgctggggcttggggtggccccagggtaggtaacagtcttaggacttagcccaacatcacaacatctgctcttcgggttccaccaaagagtctcctgagccctgagggatggatgtctcctgacccttccaccccgcctcactccctccgtcccactccactccaggctgccggcacctgccccattccctggcctggtttcctaacctcttcttcctcccctgccctgcttcccttcctccaccaccctgctctcaaaggcctcctctccagacccctggaagggaggcttccccatctttagttttccactctgccccggggagcacccttctactcctagccacgtcccttgggaccggtgggactggaggaggaacggtcaccctcctcccccatggaggtttccaggggtcccccagacatgaaagaggggtgagctggaggaagtcatggtgtcactggggtacaggagggtgaatgaagggcatgcaggccctcagcccgggctgtgccagccctcccagccccaggcccatctgagggaccaagacgctgttacgcaggcccttctttccagctatcagcactttcagcatcggctcttcagcagatccaaaccccctcagcaacttgcagaggacctgtcccctctcaaaagtcccctggcctagggtggggacccccaaacctacggcaaagccagcaacagtagcagcctgctcccatttgctggggaggagatcatcttgttcccctggccccccactctccctccatgtccatccaaaaaccataaaatcactgggttccacatcagcctccatgaggccaagccttgtacctgcaaggctcttggcctaaccattcctctgtcctcttctctggcctgcctggggagcccgtgaaggccgcacgggtgcctccagcctgagacatcaggggagagcctgcagctgagttcagcagaaaggaggaatcctggccctcaggaagaagatagtcacatgtttttcttccttgtccccacggcccccagaacaacattctccctgctggcagcccttccatgtctccaaacctgggtcagagtgaaaggacctttgggggtgggtgggagcaaagggcccacctgctggttggtgaaagcagtggtgccggagtgctaggtaccgcacgagagggtgcgggggcttgggaagcagaccagggttggacaaaaccccatgagggcggggagctggaagaaaagtctcttggggacctctggggcaaggagctgagaagtcctgcagcaccaggtgagacttgcttacagtggatgccacttctaggcctctggaccgcagatgccctcctccctcctgcacacctggcctcctgggcctccaggtaaagagagagagccagcccagccctgtttcccctcagtcctcctttgctcctgctgcttctcccaacagcccactgttaggaggtagtagaccccagcctcaaggctctgaccttcttcatgtgggcacagagggtcctgacactctggcagggcctgagctggggcaggcctccctcagggccaggggcgatggcaccccggggacaggcagacctccttcctgccgtcagcacccccttccttatcactgtctggtctccgagcttcggctgcagcctgaggtgtgtcctgggctcctcagagcctgaagcaagcttttggaagcctgcagtcctcccagctccagtgcagaagcctctctctccagcctttccccaggcaggagttggggttgggggcctctgtccctcatcgcttaccttggaaaggtgggaagctggcaatctgcaccttggggcctgggctccccctctctgtgccagcggcttcccagcacctgggaggggctgcagccccagctggactccagcctgtccctcttagcactctagctgcccactccagggcagggactcgaaaccccctccgtcctgagcagccacctccagggccctgtttgggaccactctctcagtccccaggtcctcagggccccagagcgggagggtctcctacctggaagtccccctgagctccagggcccagccctacctgccagtgctggtgtcagggcactcaacaccgagtgtgggggccacgccccttgccatgcccacggcctcctcctgtagctcctgcctgcacccacgatgctgcacgggcccgccctggtggggctcggcgagtaatgtgttttgtccccagttaaccaccattctgcggcctggttctgcaaggaaccagggctgccccaccgcccgccgtctgccgccctaggcttcctgactccattagttccgacacttgtgaaactccgagaagtgctgtggtctcagcaatgcacctgttttgtacatgattgtgtaatttaaaggtatataaatacaaatatatatatatatcagttgtgattgtatgactgtggataaaatccagaactgtgtc

SEQ ID NO: 303919 - DNA, 1335 bp, Artificial Sequence
  derived and/or modified sequence
atgagcagcagctacgacgaggccagcctggcccccgaggagaccaccgacagcttctgggaggtgggcaactacaagagaaccgtgaagagaatcgacgacggccacagactgtgcaacgacctgatgaactgcgtgcaggagagagccaagatcgagaaggcctacggccagcagctgaccgactgggccaagagatggagacagctgatcgagaagggcccccagtacggcagcctggagagagcctggggcgccatcatgaccgaggccgacaaggtgagcgagctgcaccaggaggtgaagaacaacctgctgaacgaggacctggagaaggtgaagaactggcagaaggacgcctaccacaagcagatcatgggcggcttcaaggagaccaaggaggccgaggacggcttcagaaaggcccagaagccctgggccaagaagatgaaggagctggaggccgccaagaaggcctaccacctggcctgcaaggaggagaagctggccatgaccagagagatgaacagcaagaccgagcagagcgtgacccccgagcagcagaagaagctgcaggacaaggtggacaagtgcaagcaggacgtgcagaagacccaggagaagtacgagaaggtgctggaggacgtgggcaagaccaccccccagtacatggagaacatggagcaggtgttcgagcagtgccagcagttcgaggagaagagactggtgttcctgaaggaggtgctgctggacatcaagagacacctgaacctggccgagaacagcagctacatccacgtgtacagagagctggagcaggccatcagaggcgccgacgcccaggaggacctgagatggttcagaagcaccagcggccccggcatgcccatgaactggccccagttcgaggagtggaaccccgacctgccccacaccaccaccaagaaggagaagcagcccaagaaggccgagggcgtggccctgaccaacgccaccggcgccgtggagagcaccagccaggccggcgacagaggcagcgtgagcagctacgacagaggccagccctacgccaccgagtggagcgacgacgagagcggcaaccccttcggcggcagcgagaccaacggcggcgccaaccccttcgaggacgacagcaagggcgtgagagtgagagccctgtacgactacgacggccaggagcaggacgagctgagcttcaaggccggcgacgagctgaccaagctgggcgaggaggacgagcagggctggtgcagaggcagactggacagcggccagctgggcctgtaccccgccaactacgtggaggccatctag

SEQ ID NO: 303920 - DNA, 1281 bp, Artificial Sequence
  derived and/or modified sequence
atgagcagcagctacgacgaggccagcctggcccccgaggagaccaccgacagcttctgggaggtgggcaactacaagagaaccgtgaagagaatcgacgacggccacagactgtgcaacgacctgatgaactgcgtgcaggagagagccaagatcgagaaggcctacggccagcagctgaccgactgggccaagagatggagacagctgatcgagaagggcccccagtacggcagcctggagagagcctggggcgccatcatgaccgaggccgacaaggtgagcgagctgcaccaggaggtgaagaacaacctgctgaacgaggacctggagaaggtgaagaactggcagaaggacgcctaccacaagcagatcatgggcggcttcaaggagaccaaggaggccgaggacggcttcagaaaggcccagaagccctgggccaagaagatgaaggagctggaggccgccaagaaggcctaccacctggcctgcaaggaggagaagctggccatgaccagagagatgaacagcaagaccgagcagagcgtgacccccgagcagcagaagaagctgcaggacaaggtggacaagtgcaagcaggacgtgcagaagacccaggagaagtacgagaaggtgctggaggacgtgggcaagaccaccccccagtacatggagaacatggagcaggtgttcgagcagtgccagcagttcgaggagaagagactggtgttcctgaaggaggtgctgctggacatcaagagacacctgaacctggccgagaacagcagctacatccacgtgtacagagagctggagcaggccatcagaggcgccgacgcccaggaggacctgagatggttcagaagcaccagcggccccggcatgcccatgaactggccccagttcgaggagtggaaccccgacctgccccacaccaccaccaagaaggagaagcagcccaagaaggccgagggcgtggccctgaccaacgccaccggcgccgtggagagcaccagccaggccggcgacagaggcagcgtgagcagctacgacagaggccagccctacgccaccgagtggagcgacgacgagagcggcaaccccttcggcggcagcgagaccaacggcggcgccaaccccttcgaggacgacagcaagggcgtgagagtgagagccctgtacgactacgacggccaggagcaggacgagctgagcttcaaggccggcgacgagctgaccaagctgggcctgtaccccgccaactacgtggaggccatctag

SEQ ID NO: 303921 - protein, 345 aa, Artificial Sequence
  derived and/or modified sequence
MGPRARPALLLLMLLQTAVLQGRLLRSHSLHYLFMGASEQDLGLSLFEALGYVDDQLFVFYDHESRRVEPRTPWVSSRISSQMWLQLSQSLKGWDHMFTVDFWTIMENHNHSKESHTLQVILGCEMQEDNSTEGYWKYGYDGQDHLEFCPDTLDWRAAEPRAWPTKLEWERHKIRARQNRAYLERDCPAQLQQLLELGRGVLDQQEGSESSSLPGKVTTLRCRALNYYPQNITMKWLKDKQPMDAKEFEPKDVLPNGDGTYQGWITLAVPPGEEQRYTCQVEHPGLDQPLIVIWEPSPSGTLVIGVISGIAVFVVILFIGILFIILRKRQGSRGAMGHYVLAERE

SEQ ID NO: 303922 - DNA, 1038 bp, Artificial Sequence
  derived and/or modified sequence
atgggccccagagccagacccgccctgctgctgctgatgctgctgcagaccgccgtgctgcagggcagactgctgagaagccacagcctgcactacctgttcatgggcgccagcgagcaggacctgggcctgagcctgttcgaggccctgggctacgtggacgaccagctgttcgtgttctacgaccacgagagcagaagagtggagcccagaaccccctgggtgagcagcagaatcagcagccagatgtggctgcagctgagccagagcctgaagggctgggaccacatgttcaccgtggacttctggaccatcatggagaaccacaaccacagcaaggagagccacaccctgcaggtgatcctgggctgcgagatgcaggaggacaacagcaccgagggctactggaagtacggctacgacggccaggaccacctggagttctgccccgacaccctggactggagagccgccgagcccagagcctggcccaccaagctggagtgggagagacacaagatcagagccagacagaacagagcctacctggagagagactgccccgcccagctgcagcagctgctggagctgggcagaggcgtgctggaccagcaggagggcagcgagagcagcagcctgcccggcaaggtgaccaccctgagatgcagagccctgaactactacccccagaacatcaccatgaagtggctgaaggacaagcagcccatggacgccaaggagttcgagcccaaggacgtgctgcccaacggcgacggcacctaccagggctggatcaccctggccgtgccccccggcgaggagcagagatacacctgccaggtggagcaccccggcctggaccagcccctgatcgtgatctgggagcccagccccagcggcaccctggtgatcggcgtgatcagcggcatcgccgtgttcgtggtgatcctgttcatcggcatcctgttcatcatcctgagaaagagacagggcagcagaggcgccatgggccactacgtgctggccgagagagagtag

SEQ ID NO: 303923 - DNA, 1038 bp, Artificial Sequence
  derived and/or modified sequence
atgggccctagggcacgacccgctctcttgctgttgatgctgctgcagaccgccgttctgcagggccgcctcctccggtcgcatagtttgcactatctttttatgggggcctctgaacaggacctggggctgtcactgttcgaggcactcgggtatgtggacgatcagcttttcgtgttttatgaccacgagtcccgaagggtggagcctcgcacaccttgggtgtcctcgcggatctcctctcagatgtggctccagctgtcacagagcctgaagggctgggatcacatgttcactgtagatttttggacaattatggaaaaccataaccattcgaaggagagccatacattgcaggttatcctgggatgcgaaatgcaggaggacaactccacagaagggtattggaaatacggatacgacggacaggaccacctggagttttgcccagatacgctagattggcgcgctgccgagcctagagcatggccaacaaaactggaatgggaaaggcacaagattcgggcccgtcaaaatagagcttaccttgagcgcgactgtcccgcccagctccagcagctcctggagctgggccgtggtgtgttagatcaacaagaaggcagcgagtcttcctctctgcctggcaaggtgactactctccggtgcagggccctgaactactaccctcagaatataacaatgaaatggcttaaagacaaacagcctatggatgcaaaggaatttgaaccaaaggacgtactccccaatggtgacggcacctaccagggctggatcacacttgccgtcccacccggcgaagaacagagatacacttgccaggtcgagcatcccggtctggaccagccattgattgtgatttgggaaccctctcccagtggtacgttggtgattggtgtgatttcaggtatcgctgtttttgtagtcattttgttcatcggcattctcttcataatcctgcgcaagagacaggggagtcgcggagcaatgggccattatgtactggccgagcgcgaatag

SEQ ID NO: 303924 - DNA, 1038 bp, Artificial Sequence
  derived and/or modified sequence
atgggcccccgggcccggcctgccctgctgctgctgatgctgctgcagacagctgtgctgcagggccgcctgctgcggagccacagcctgcactacctgttcatgggcgccagcgagcaggacctgggcctgagcctgtttgaggccctgggctacgtggatgaccagctgtttgtgttctatgaccacgagagccggcgggtggagcccaggaccccctgggtgagcagccgcatcagcagccagatgtggctgcagctgagccagagcctgaagggctgggaccacatgttcaccgtggacttctggaccatcatggagaaccacaaccacagcaaggagagccacaccctgcaggtgatcctgggctgtgagatgcaggaggacaacagcacagagggctactggaagtatggctatgatggccaggaccacctggagttctgcccagacaccctggactggagggctgctgagccccgggcctggcccaccaagctggagtgggagcggcacaagatccgggcccggcagaacagagcctacctggagcgggactgcccagcccagctgcagcagctgctggagctgggccggggcgtgctggaccagcaggagggcagcgagagcagcagcctgcccgggaaggtgaccaccctgcgctgccgggccctgaactactacccccagaacatcaccatgaagtggctgaaggacaagcagcccatggatgccaaggagtttgagcccaaggatgtgctgcccaatggagatggcacctaccagggctggatcaccctggccgtgcccccaggagaggagcagcgctacacctgccaggtggagcaccctggcctggaccagcccctgattgtcatctgggagcccagccccagcggcaccctggtgattggagtcatcagcggcattgctgtgtttgtggtgatcctcttcatcggcatcctcttcatcatcctgaggaagaggcagggcagcagaggagccatgggccactacgtgctggccgagcgggagtag

SEQ ID NO: 303925 - DNA, 1038 bp, Artificial Sequence
  derived and/or modified sequence
atgggcccccgggcccggcccgccctgctgctgctgatgctgctgcagaccgcagtactgcaggggcgtctgttaagaagtcattccctccactacctcttcatgggggcatccgaacaggatctgggcttgtcccttttcgaagctctgggctacgtggacgatcaattatttgtcttttacgatcacgaatctaggagagtggagccgaggaccccatgggtttccagccgcattagctctcagatgtggctacaactgtcacaatcgttgaaggggtgggatcacatgttcaccgtggatttttggactattatggagaaccataaccattctaaggagagccataccctgcaggtgatcctgggctgtgagatgcaggaggacaatagtactgaaggctactggaagtatggctatgacggtcaggaccatcttgaattctgccctgacaccttagattggcgggctgcggagccgagagcctggcccacgaagctggagtgggagcgacataaaattagggcaaggcaaaatcgcgcttacttggaacgagattgtcctgctcagttgcagcagctgcttgaacttgggcggggagtccttgaccagcaagaaggaagcgagtccagtagtctgcctggcaaggtgacaaccctcagatgccgggccctgaactattacccccagaatatcacgatgaaatggctcaaggataagcagcctatggatgccaaagagtttgaaccaaaggacgtgctgccaaatggggatggcacgtatcaaggttggatcactctcgcagtgcctcctggggaagagcagcggtacacctgccaggtggagcacccaggtctcgaccagccactgatcgtcatttgggagcccagtcctagtggaacccttgtgattggggtgattagcggaattgctgtgttcgtagtgattctgttcattgggattttatttattattctgcgcaaaagacagggaagtcgaggagccatgggtcactacgtcctcgctgagcgggagtag

SEQ ID NO: 303926 - DNA, 1123 bp, Artificial Sequence
  derived and/or modified sequence
cccaaaagaagcggagatttaacggggacgtgcggccagagctggggaaatgggcccgcgagccaggccggcgcttctcctcctgatgcttttgcagaccgcggtcctgcaggggcgcttgctgcgttcacactctctgcactacctcttcatgggtgcctcagagcaggaccttggtctttccttgtttgaagctttgggctacgtggatgaccagctgttcgtgttctatgatcatgagagtcgccgtgtggagccccgaactccatgggtttccagtagaatttcaagccagatgtggctgcagctgagtcagagtctgaaagggtgggatcacatgttcactgttgacttctggactattatggaaaatcacaaccacagcaaggagtcccacaccctgcaggtcatcctgggctgtgaaatgcaagaagacaacagtaccgagggctactggaagtacgggtatgatgggcaggaccaccttgaattctgccctgacacactggattggagagcagcagaacccagggcctggcccaccaagctggagtgggaaaggcacaagattcgggccaggcagaacagggcctacctggagagggactgccctgcacagctgcagcagttgctggagctggggagaggtgttttggaccaacaagaaggaagtgaaagttccagtcttcctggcaaggtgaccactctacggtgtcgggccttgaactactacccccagaacatcaccatgaagtggctgaaggataagcagccaatggatgccaaggagttcgaacctaaagacgtattgcccaatggggatgggacctaccagggctggataaccttggctgtaccccctggggaagagcagagatatacgtgccaggtggagcacccaggcctggatcagcccctcattgtgatctgggagccctcaccgtctggcaccctagtcattggagtcatcagtggaattgctgtttttgtcgtcatcttgttcattggaattttgttcataatattaaggaagaggcagggttcaagaggagccatggggcactacgtcttagctgaacgtgagtgacacgcagcctgcagactcactgtgggaaggagacaa

SEQ ID NO: 303927 - DNA, 1038 bp, Artificial Sequence
  derived and/or modified sequence
atgggcccaagagctcggcctgcattgcttctgctaatgctgctgcagaccgctgtgctccagggcaggctcctgagaagtcactcccttcattatctgtttatgggagccagcgagcaggacctgggcttgagcctgttcgaagcactcggttatgtggacgaccagcttttcgtgttctatgaccacgaatctagacgcgtcgagcctcgcaccccgtgggtcagttccaggatctcatctcaaatgtggttacagctctctcagagccttaaggggtgggatcacatgttcacagttgacttctggactatcatggaaaatcacaaccacagtaaggagtcccataccctacaggtaattctcggttgtgagatgcaggaggataattctaccgagggatattggaagtacggctacgatggacaggaccatttggaattctgcccagacacgctggattggagggccgctgagccaagggcctggcctacgaaattagaatgggagagacataaaatcagggctcgacaaaatcgcgcttatctcgagcgtgattgtccggctcagctgcagcagttactggaattgggcaggggggtgttagatcagcaggagggatccgagtcttcaagcttgcctggcaaagtcacaacacttaggtgcagggccttaaactattacccccaaaatatcaccatgaaatggcttaaagacaaacaacctatggacgctaaagagtttgaacctaaggacgtcctgccgaacggggatggaacgtaccagggctggatcaccctggctgtgccacctggagaggagcagagatatacttgccaggtcgagcaccccggattggatcaaccactgattgtaatctgggaaccctcacccagcggcactcttgtgattggggtgatttccgggattgccgtgttcgttgtgattctcttcatcggtatattgtttattattctcaggaagcgacaggggagtaggggtgccatgggccactacgtgctcgcagaacgggagtag

SEQ ID NO: 303928 - protein, 2718 aa, Artificial Sequence
  derived and/or modified sequence
MPRTKQIHPRNLRDKIEEAQKELNGAEVSKKEILQAGVKGTSESLKGVKRKKIVAENHLKKIPKSPLRNPLQAKHKQNTEESSFAVLHSASESHKKQNYIPVKNGKQFTKQNGETPGIIAEASKSEESVSPKKPLFLQQPSELRRWRSEGADPAKFSDLDEQCDSSSLSSKTRTDNSECISSHCGTTSPSYTNTAFDVLLKAMEPELSTLSQKGSPCAIKTEKLRPNKTARSPPKLKNSSMDAPNQTSQELVAESQSSCTSYTVHMSAAQKNEQGAMQSASHLYHQHEHFVPKSNQHNQQLPGCSGFTGSLTNLQNQENAKLEQVYNIAVTSSVGLTSPSSRSQVTPQNQQMDSASPLSISPANSTQSPPMPIYNSTHVASVVNQSVEQMCNLLLKDQKPKKQGKYICEYCNRACAKPSVLLKHIRSHTGERPYPCVTCGFSFKTKSNLYKHKKSHAHTIKLGLVLQPDAGGLFLSHESPKALSIHSDVEDSGESEEEGATDERQHDLGAMELQPVHIIKRMSNAETLLKSSFTPSSPENVIGDFLLQDRSAESQAVTELPKVVVHHVTVSPLRTDSPKAMDPKPELSSAQKQKDLQVTNVQPLSANMSQGGVSRLETNENSHQKGDMNPLEGKQDSHVGTVHAQLQRQQATDYSQEQQGKLLSPRSLGSTDSGYFSRSESADQTVSPPTPFARRLPSTEQDSGRSNGPSAALVTTSTPSALPTGEKALLLPGQMRPPLATKTLEERISKLISDNEALVDDKQLDSVKPRRTSLSRRGSIDSPKSYIFKDSFQFDLKPVGRRTSSSSDIPKSPFTPTEKSKQVFLLSVPSLDCLPITRSNSMPTTGYSAVPANIIPPPHPLRGSQSFDDKIGTFYDDVFVSGPNAPVPQSGHPRTLVRQAAIEDSSANESHVLGTGQSLDESHQGCHAAGEAMSVRSKALAQGPHIEKKKSHQGRGTMFECETCRNRYRKLENFENHKKFYCSELHGPKTKVAMREPEHSPVPGGLQPQILHYRVAGSSGIWEQTPQIRKRRKMKSVGDDEELQQNESGTSPKSSEGLQFQNALGCNPSLPKHNVTIRSDQQHKNIQLQNSHIHLVARGPEQTMDPKLSTIMEQQISSAAQDKIELQRHGTGISVIQHTNSLSRPNSFDKPEPFERASPVSFQELNRTGKSGSLKVIGISQEESHPSRDGSHPHQLALSDALRGELQESSRKSPSERHVLGQPSRLVRQHNIQVPEILVTEEPDRDLEAQCHDQEKSEKFSWPQRSETLSKLPTEKLPPKKKRLRLAEIEHSSTESSFDSTLSRSLSRESSLSHTSSFSASLDIEDVSKTEASPKIDFLNKAEFLMIPAGLNTLNVPGCHREMRRTASEQINCTQTSMEVSDLRSKSFDCGSITPPQTTPLTELQPPSSPSRVGVTGHVPLLERRRGPLVRQISLNIAPDSHLSPVHPTSFQNTALPSVNAVPYQGPQLTSTSLAEFSANTLHSQTQVKDLQAETSNSSSTNVFPVQQLCDINLLNQIHAPPSHQSTQLSLQVSTQGSKPDKNSVLSGSSKSEDCFAPKYQLHCQVFTSGPSCSSNPVHSLPNQVISDPVGTDHCVTSATLPTKLIDSMSNSHPLLPPELRPLGSQVQKVPSSFMLPIRLQSSVPAYCFATLTSLPQILVTQDLPNQPICQTNHSVVPISEEQNSVPTLQKGHQNALPNPEKEFLCENVFSEMSQNSSLSESLPITQKISVGRLSPQQESSASSKRMLSPANSLDIAMEKHQKRAKDENGAVCATDVRPLEALSSRVNEASKQKKPILVRQVCTTEPLDGVMLEKDVFSQPEISNEAVNLTNVLPADNSSTGCSKFVVIEPISELQEFENIKSSTSLTLTVRSSPAPSENTHISPLKCTDNNQERKSPGVKNQGDKVNIQEQSQQPVTSLSLFNIKDTQQLAFPSLKTTTNFTWCYLLRQKSLHLPQKDQKTSAYTDWTVSASNPNPLGLPTKVALALLNSKQNTGKSLYCQAITTHSKSDLLVYSSKWKSSLSKRALGNQKSTVVEFSNKDASEINSEQDKENSLIKSEPRRIKIFDGGYKSNEEYVYVRGRGRGKYICEECGIRCKKPSMLKKHIRTHTDVRPYHCTYCNFSFKTKGNLTKHMKSKAHSKKCVDLGVSVGLIDEQDTEESDEKQRFSYERSGYDLEESDGPDEDDNENEDDDEDSQAESVLSATPSVTASPQHLPSRSSLQDPVSTDEDVRITDCFSGVHTDPMDVLPRALLTRMTVLSTAQSDYNRKTLSPGKARQRAARDENDTIPSVDTSRSPCHQMSVDYPESEEILRSSMAGKAVAITQSPSSVRLPPAAAEHSPQTAAGMPSVASPHPDPQEQKQQITLQPTPGLPSPHTHLFSHLPLHSQQQSRTPYNMVPVGGIHVVPAGLTYSTFVPLQAGPVQLTIPAVSVVHRTLGTHRNTVTEVSGTTNPAGVAELSSVVPCIPIGQIRVPGLQNLSTPGLQSLPSLSMETVNIVGLANTNMAPQVHPPGLALNAVGLQVLTANPSSQSSPAPQAHIPGLQILNIALPTLIPSVSQVAVDAQGAPEMPASQSKACETQPKQTSVASANQVSRTESPQGLPTVQRENAKKVLNPPAPAGDHARLDGLSKMDTEKAASANHVKPKPELTSIQGQPASTSQPLLKAHSEVFTKPSGQQTLSPDRQVPRPTALPRRQPTVHFSDVSSDDDEDRLVIAT

SEQ ID NO: 303929 - protein, 128 aa, Artificial Sequence
  derived and/or modified sequence
MPRTKQIHPRNLRDKIEEAQKELNGAEVSKKEILQAGVKGTSESLKGVKRKKIVAENHLKKIPKSPLRNPLQAKHKQNTEESSFAVLHSASESHKKQNYIPVKNGKQFTKQNGETPGIIAEASKSEES

SEQ ID NO: 303930 - protein, 142 aa, Artificial Sequence
  derived and/or modified sequence
MPRTKQIHPRNLRDKIEEAQKELNGAEVSKKEILQAGVKGTSESLKGVKRKKIVAENHLKKIPKSPLRNPLQAKHKQNTEESSFAVLHSASESHKKQNYIPVKNGKQFTKQNGETPGIIAEASKSEESVSPKKPLFLQQPSE

SEQ ID NO: 303931 - protein, 120 aa, Artificial Sequence
  derived and/or modified sequence
MPRTKQIHPRNLRDKIEEAQKELNGAEVSKKEILQAGVKGTSESLKGVKRKKIVAENHLKKIPKSPLRNPLQAKHKQNTEESSFAVLHSASESHKKQNYIPVKNGKQFTKQNGETPGIIA

SEQ ID NO: 303932 - DNA, 8891 bp, Artificial Sequence
  derived and/or modified sequence
gcggccgccgccatcagcagcgcagctccagggccggctgcagcggcagcggctccgccgggcgtcctggcagcagcacatggattaattgatgtatgttgagtttatggagctgccttttggtggcttgctttatctgcagtttttaagaagaaaaagaaggccctgagtcaaagaagatgcctcgaactaaacaaattcatcccagaaatctaagagacaaaattgaagaagcacaaaaagaacttaatggggcagaagtttcaaaaaaagaaatcttacaggctggtgttaaaggaacttcggaatcccttaaaggtgtgaaacgcaaaaagatcgtagctgagaatcacctgaaaaaaataccaaaatccccactgagaaatcctcttcaggcaaaacataaacaaaatacagaagagtcatctttcgccgttcttcatagtgcttcggagtctcacaagaaacagaattatattcctgtaaaaaatgggaagcagtttaccaaacaaaatggagaaacacctggaataattgctgaagcctcaaaatctgaagaatctgtctccccaaagaagcccttgtttctgcagcaaccatctgaactgcgtagatggagatccgaaggcgctgatcctgccaaattcagtgacctcgatgaacaatgtgactcaagttccttgtcaagtaaaaccaggactgacaatagcgaatgcatctcttctcattgtggcactacgtccccctcctatacaaacactgcattcgatgtcttactgaaagcaatggagccagaactgagcaccttgtcacaaaagggctcaccttgtgcaattaagacagaaaaactgaggccaaataaaactgcacgttcccctcccaaattaaaaaacagttcaatggatgccccaaatcagacttcacaggaattggttgctgaatcacagtcttcttgtacctcatacacagtccatatgtctgctgctcagaagaatgagcaaggggcaatgcagtcagcttctcatttgtatcatcaacatgaacactttgttcccaaatccaaccaacataatcaacagcttccggggtgttcaggtttcacaggatcactgacaaatctgcaaaatcaagagaatgccaaacttgaacaggtttataatatagcagtgacatcatctgtaggcctaacttcaccttccagtagatctcaggttactcctcaaaaccagcaaatggattctgcttcacctttgtcaataagtccggctaattctacacagtcgccccccatgccaatctataattcaactcatgttgcctctgttgttaatcaaagcgtagagcaaatgtgcaatcttcttctgaaagatcagaagccaaaaaaacaaggaaaatatatttgtgagtattgcaatagagcatgtgcaaagcctagtgtgcttttaaagcatatccgctcccacactggagagcgaccctatccctgtgtgacttgtggattttcatttaagactaaaagtaatctgtataagcacaagaaatcccacgcacatactatcaaactgggtcttgtcttgcaaccagatgctggtggcttgttcttgtcccacgagtcccccaaagcacttagtattcattcagacgtagaagacagtggggagagcgaggaggaaggcgccactgatgagagacagcatgacctgggcgccatggagctgcagcctgtgcacataataaagaggatgtcaaatgctgaaactttactaaaatcaagcttcactccaagcagtccagaaaatgtgataggtgactttttgctacaggacagatctgcagaatcacaagctgtgacagagttaccgaaagttgtggtccaccatgtcactgtgtcccccttaagaactgacagtccaaaggccatggatcccaagcctgaactttctagtgcacaaaagcagaaggaccttcaggtgacaaacgtacagccactttcagccaacatgtcccagggtggagtctccaggttggagactaatgagaattcccaccagaaaggcgacatgaatccactggaaggaaagcaagactctcacgtaggaacggtacacgcccagctacaaaggcagcaggctaccgattactcccaagagcagcaaggaaagctcctgagtcctcgaagtttaggaagtacggattctggttacttttcacgttctgaaagtgccgatcaaacagtgagtccaccaactccctttgccagaaggttacccagcacagaacaagactctggaaggagtaacggaccctctgcagctcttgtcaccacgtcaacaccctctgctttgcccacaggggaaaaggcattgcttttaccaggtcagatgcgcccacctttggccacaaaaacacttgaggagcggatatcgaagcttatctcagacaatgaagctttggtagatgacaagcaactggatagtgtgaagccgcggagaacctcactgtcaagacgaggaagcattgattcccccaaatcatacatatttaaagattctttccagtttgatttaaaaccagtgggacggagaacaagttcaagctctgatataccgaagtcacctttcacccctactgaaaaatcaaagcaagtgtttcttctgtctgtaccttcacttgactgtttacctatcacaagaagtaattccatgccgaccacaggttattcagcagtacctgcaaatataatacctcctcctcatccactaagaggaagtcagtcatttgatgacaaaattggcactttctatgatgatgtctttgtatcgggacctaacgctcctgtgccccagagtgggcatccccgtacacttgtgagacaagcagccatagaagactcttcagcaaatgaaagtcatgttcttggtactggacagtccctggatgagagccaccaaggatgccatgctgctggtgaagccatgtcagtgaggagcaaggcactggcacaaggcccacatatagaaaaaaagaagtctcatcaagggcgagggacaatgtttgagtgtgaaacttgtagaaacaggtataggaaactggaaaattttgaaaatcataagaaattttactgttctgagttacatggaccaaaaacaaaggtagccatgagagaacctgagcacagccctgtgcccggcggtctgcagcctcagattctacactacagagtcgctgggtcctccggcatctgggaacagacgccccagataagaaaaaggaggaaaatgaaaagtgttggggatgatgaagaacttcagcaaaatgaaagtggaacatctccaaaaagttctgaaggccttcagtttcagaatgctctgggctgtaatcccagtttgcctaaacataatgttaccataagaagtgaccagcagcataaaaatatacagttgcaaaactcccatattcaccttgttgccaggggccctgagcagaccatggatcccaagctgtcgaccatcatggaacaacagataagttcagcagcccaggacaagatagaactgcagagacacggaactggaatctctgtcatccagcacaccaactccctgagcaggcccaactcatttgacaagcctgagccttttgaaagagcctccccagtttctttccaggagctgaatagaacggggaagtccgggtctctaaaagtgataggaatctcccaagaggaaagtcacccttctcgggacgggtctcatcctcaccagcttgcactatcagacgctctcagaggagaacttcaggaaagctccagaaagagtccaagtgaacgacatgtgttaggacagccctcaagacttgtccggcagcacaacatccaagttccagagattttggtcacagaagaaccagatcgagacctggaagctcaatgccatgatcaagaaaagtcagagaagttcagttggccccagcgtagtgaaaccttgtcaaaattgccaacagagaaactgccacccaaaaagaaaaggctccgtctggctgagatagaacattcctcaacagaatcgagctttgattccactctctccaggagtctaagtagggagagcagtttatctcacacttcaagtttctcagcctctttagacatagaggacgtttctaaaacggaggcttcccccaaaatcgattttctaaataaagccgagtttcttatgattccagctggcttgaatactctgaatgttcctggatgtcaccgggaaatgaggcgtactgcatcagaacagattaattgcacgcaaacgtcaatggaggtctctgatctcagaagcaaatcattcgattgtggaagcatcaccccaccccagacaacaccacttactgaattgcagcctccatcttcaccttctcgagtgggagtgactgggcatgtgcctctcttagaaagaaggagaggcccactggtacggcaaatatctttaaacatagccccagatagtcatctgtctcctgtacacccaacatctttccaaaatactgctcttcccagtgtgaatgcagtgccatatcaggggcctcagctcactagtacatctttagctgagttttctgcaaatactttgcactctcagactcaggttaaggatctgcaggcagaaacatcaaactccagctctaccaacgtttttcctgttcaacagctctgtgatatcaatttgttaaatcaaatccatgcaccgcctagccaccagagcacacagctatctctgcaagtgtctacgcagggtagcaagccagataaaaattctgttttatctgggtcttctaaaagtgaggattgctttgctcccaaataccaattgcattgtcaggttttcacttcaggcccatcttgctcttctaatcctgtgcattctttgccaaatcaagttatttcagatccagttggaacagatcattgtgtgacatcagcaacattaccaaccaaattaattgacagcatgtctaattcgcatcctctgctaccaccagagctcaggccccttggaagtcaggtgcagaaggtgccatcatcattcatgctgcccatacgcctgcagagtagtgttcctgcttactgttttgctacactcacatccctgccacaaatactagtgacccaagatctgcccaatcagccaatttgccagactaatcatagtgtagtgccaatcagtgaagaacaaaattctgtgccaacattacaaaaaggtcatcagaatgctttgccaaacccagagaaggaatttctatgtgaaaatgttttttcagagatgagccaaaattcttctctatcagaatccttgcccataactcagaaaatatctgttggtcgactttcccctcaacaagaatcttcagcttcgagtaaaaggatgctttccccagcaaatagtttagacattgccatggaaaagcaccagaagcgggccaaagatgaaaatggagctgtttgtgcaacagacgtgagacctttagaggctttgagttcgagagttaatgaagctagtaaacagaagaagcctattttagtgagacaggtttgtactacagagcccctggacggtgtgatgttggaaaaggatgttttttctcaacctgaaattagtaatgaggctgttaatttgacaaatgttttaccagctgataattcatcaacaggatgctctaaatttgtcgttatagaacctataagtgaattgcaggaatttgaaaacatcaagtcatccacatcattaactcttacagttcgaagttcacctgctccttcagaaaatactcatatttctcctttgaaatgtacagacaataaccaagaaaggaagtctccaggggttaaaaatcaaggtgacaaagtgaacatccaagagcaaagtcaacagccagtcacttctctttcattgtttaacatcaaggacacccagcagctggctttccctagcctgaaaactacaaccaactttacatggtgttatctcttaaggcagaagtcgttgcatttgcctcagaaggaccagaaaacttcagcctatactgattggacagtaagcgccagtaatccaaatccactcggtttgcccacaaaagttgcacttgctctccttaattcaaaacagaacactggaaaatcactatactgtcaagcaataactacccattccaagtcagacttattggtctattcaagcaagtggaaaagcagcttaagcaagagagcattaggtaatcaaaagtccacagtagttgaattcagcaataaagatgcctctgaaattaacagtgagcaagataaagaaaattccttaatcaaaagtgaaccaagaagaattaaaatatttgatggaggatataagtcaaatgaagagtatgtatatgtccgaggcaggggaagaggaaaatacatttgtgaagaatgtggaatacgttgtaagaaacctagcatgttaaagaaacacatacgaacccatacagatgtccgcccctaccactgcacttactgtaacttctcctttaagactaaaggaaatctgacaaaacacatgaagtccaaggcacatagcaagaaatgtgtggatttaggcgtctcagtaggtttaatagatgaacaggatacagaagaatcagatgaaaaacagagattcagttatgagcgatctggatatgatcttgaagaatctgatggcccagatgaggatgacaatgaaaatgaagacgatgatgaggacagccaggctgaatcagtcctgtcagccacaccctcagtcacagctagcccgcagcaccttccatctagaagtagccttcaggaccctgtgagtactgacgaggatgtcaggatcaccgattgcttttctggggtacacacggacccaatggacgttctgcccagggcgctgctcaccagaatgactgtcctgagcacagcacagtctgactacaataggaagacactctctccggggaaggccaggcagcgtgctgcgagagatgaaaacgacacaattccgtctgtagacacttccaggtccccgtgtcatcagatgtctgtggactaccctgagtcagaagaaattctgagaagttctatggcaggaaaagctgttgctataacacagagcccatcatctgtaagacttcctcctgctgcagctgagcacagcccccagacagcagcggggatgccttctgtggcctcaccacatcctgaccctcaagaacagaagcagcaaataactctacagccgactccaggcttgccttctccccacactcatttgtttagccaccttcctttgcattcccagcagcaatcgaggacaccttataatatggttccagttggggggatccatgtggtacctgctggcctcacatactccacgtttgtgccccttcaggctggaccagtgcagctcacgatccctgctgtcagtgtcgttcacagaactttgggtactcataggaatacggtcacagaagtgtctggcactacaaaccctgctggagtggctgaattaagcagtgttgtgccatgtattcctatcggccaaatccgcgtgccaggccttcagaacctaagtaccccaggcttgcagtcactcccctcgttaagcatggaaaccgtcaatattgtaggcctagccaatacaaatatggccccacaagtccatccaccaggactggctctgaatgctgtcggactgcaggttctgactgcaaacccttcatcacaaagcagccccgcccctcaggcacacattccaggtctccagatcttgaacatagcattgcccaccttaatcccctcagtcagtcaagtagccgttgatgcacagggagctccagaaatgccagcttcccaaagcaaagcatgcgagacacaacccaagcagacttctgtagccagcgcaaaccaggtcagcaggaccgagtctcctcaggggttacctacagtccagcgggaaaatgcaaaaaaagttctgaatccacctgcccctgcaggtgaccatgcaaggcttgatggcctgagtaaaatggacacagagaaggctgcctcggcaaatcacgtgaagcccaagcctgaactcacttccatacagggccaaccagcgtccacgtcacaacctctgctgaaggcacattctgaagtttttacaaagccctcaggccagcagactctctctccagacagacaggttcccaggcccacagcactaccgcggaggcagcccactgtgcacttcagcgacgtgagcagcgatgatgacgaggacaggcttgtgatagcaacctgatggattttattttttatttgctttttttttatataacacttaaaggtttctttgaaaaccctcctttccttaaagcacatttttctgacataaactcatgactaatctttgtgcaatcatgaacttttgaccaataattgttgttttgtgtcagctccagccatttttgtacatgttgtatagacaattgtgccttttaggagctttatgtttagaaactgtacagattgttgaatatctatatacataaaaatatattatatatgtatatgaaaaccaggtagttatttgtgtttagtaaggaaaacctgtcaaataaatcaaatgattaaattatatgttccactgttgaatataaattttatggctatggggcagagtttctgtgtataaattagtatgtaaactccatatttattgtattcatattagtctttgaaaatgggtctgtcctccttgtgtaagacagtaactttacacttcagacagattttctgtgttatgaaatgtttcagtaaaatattgtttactgactttaaaaaaaaaaaaaaaaaa

SEQ ID NO: 303933 - DNA, 8157 bp, Artificial Sequence
  derived and/or modified sequence
atgccgagaactaagcagatacatccaaggaacctcagggacaagatcgaggaggcccagaaagagctcaacggagccgaggtgtctaagaaggagattctgcaggcaggagtgaaaggaacatctgaaagccttaaaggcgtaaaacggaaaaagatcgtcgctgaaaatcacttaaaaaagatcccaaaatcccccctgagaaatcccctgcaagccaaacacaagcaaaatacagaggagtcaagctttgcagttctgcattccgcctccgaaagccataaaaagcagaactatattcccgtaaagaacggaaaacagttcaccaaacaaaacggcgagacacctggcattattgccgaagcttctaagagcgaagaaagtgtgtccccaaaaaagcccctctttctgcagcagccatccgagcttcgccgatggcggagcgagggggccgaccccgctaagttctcagacctcgacgagcagtgtgattcttcatccctgagttcgaaaactcgtacagacaattccgaatgcatctctagccattgcgggactaccagtccctcctatactaatacagccttcgatgtgcttctcaaggcaatggagcccgagctgagcaccctgtctcagaaggggtctccatgcgccatcaagacagagaaactgagacccaacaagaccgctcgatccccccccaaacttaagaatagttcaatggacgcaccaaaccagacttcccaagaattagtggcagagtcacaaagcagctgtaccagctataccgtgcacatgagcgctgcacagaaaaatgagcagggcgctatgcagagcgcctctcatctttatcaccagcacgagcactttgttcctaagtccaaccagcacaatcaacaattgcctggctgctccggtttcacagggtcgctaaccaacctgcaaaatcaggaaaacgcgaaactggagcaggtctacaatatcgcagttaccagctctgtcggactcacatcgccctcctccagatcccaggtcactcctcaaaatcagcagatggatagcgcgtccccactgagcatttctccggccaattccacccagtcaccccccatgccaatctataactcaacccacgttgcatcagtagttaaccagagcgtcgaacagatgtgtaatctgctgttgaaggatcagaagcccaaaaagcagggtaaatacatttgtgagtattgcaatagagcatgcgctaagccctctgtattgttaaaacacattaggagtcacaccggagaaagaccctatccctgcgtcacttgtgggtttagctttaagacaaagtcaaacctgtacaaacataagaaatcacacgctcacacaattaaattggggctcgtactccagcccgatgctggcggtctttttctatctcatgagagcccgaaggccctgtccatacactcagatgtcgaagattcgggggaatccgaggaggagggagcaactgacgaaaggcagcatgatctgggggccatggaattacagccagtccatatcattaagcggatgagcaatgcagagacactgctgaagtcgtcctttacaccctcctctcctgaaaatgtgattggcgattttctgttgcaggatcggagcgctgaaagccaggcagttactgagctaccaaaggtggtggttcaccacgtgactgtttctccactgagaacagactcacccaaggccatggaccctaagccagaattaagcagcgcccagaagcagaaagacttgcaagttactaatgtccagcccctgtctgctaatatgagtcaggggggagtgtctaggctggaaactaatgagaactctcatcaaaaaggagatatgaatcctttggagggtaaacaagactcccatgtgggaactgtccatgcacagctgcaacgccaacaggctacagactattcccaggagcagcaagggaaactgttgtcgcctagatccctgggctcgactgatagtgggtacttctccagaagcgagtccgccgaccaaaccgtgtcgccgccgactccctttgccaggcgcctgccctcaacggagcaggattcaggccggagcaacggtcccagcgcagccctcgtgaccacttctactcccagtgccctgccaaccggggagaaagctctgctgctgccaggtcagatgcggcctcccctcgctacaaaaaccctagaggaaaggatttctaagctcatatccgacaatgaagccttggttgatgataagcaacttgattccgtgaagcctcgacgcacaagtctatcaagaaggggttccatagacagccccaaatcatacattttcaaggactcgtttcagtttgatctcaagccagtggggcgccgcacctcgagttcttccgacatacctaagtctccgttcacaccgacagaaaaaagtaagcaggtatttttgctttcggtgccttcactggattgcctgccaatcactagatctaactctatgccaactacgggatactccgccgtgccggcgaatataatccctcccccgcaccccctgcgaggatctcagagctttgatgacaaaataggcactttctacgacgatgtgttcgtatccggaccgaacgcccctgtgccgcagagtggccaccccagaactctggtgaggcaggcagctatagaggactcaagcgccaacgagtcccatgtgcttggcacaggtcagagtctggatgaaagtcatcaaggatgccacgcagctggagaagctatgtctgtgcgcagcaaggccctggcccaggggccacacatagaaaaaaagaagtctcaccagggtagggggacgatgttcgagtgtgagacttgcaggaaccgctaccggaagttagagaatttcgagaatcataagaagttctactgttccgagttgcatgggcccaaaacaaaggtggccatgcgggagcccgaacatagccctgtgcctggagggctacaaccacaaatcctgcactatcgcgtcgccggcagttcgggtatatgggagcagaccccccagatccgcaagaggaggaaaatgaaaagcgtaggcgacgacgaggaactgcagcaaaatgaatccggcaccagtcctaagagctctgaagggctccagttccagaacgctcttggatgtaacccaagcctccctaaacacaacgtcacaataagatctgaccagcaacataagaacatccagcttcaaaattctcatatacacctggtggcccgaggcccggaacagactatggatcccaagctctcaactattatggagcagcagattagctctgcagcacaggataagatcgaactccagcgccacggaaccgggatcagtgtgattcagcacactaactcactatcacggccaaatagtttcgataagcccgaaccttttgaacgggcatcacccgttagctttcaggagctaaacagaaccggaaaatccggttccttgaaggtgataggtatctctcaggaagaatcccatccatcgcgcgatggatcccatccccaccaactggcgctgtcggatgccctgagaggagaactgcaggaaagctcacgaaaatcgcccagcgagagacacgtattagggcaaccaagccggcttgttaggcagcataatattcaggtgcctgagatattagtaacagaagaacctgaccgcgatcttgaggcccaatgccatgaccaggagaaatctgaaaaattttcatggccacagcgttcagagactttatctaagcttccaaccgagaagctgcccccaaaaaagaagcgactgagattggccgagatcgaacactccagtacagagagttcctttgattccactctgtcccgcagccttagtagggagagcagtttgtcccatacgtcaagcttttctgccagcctagatatagaggatgtttccaagactgaagcatcccccaaaatagacttccttaataaggccgaattcctaatgatcccggccggactcaacactttaaacgttccagggtgccaccgagagatgcgacgaaccgcttccgagcagataaattgtacccagacaagtatggaggtcagtgatttacgctctaaaagcttcgactgcggatccatcactcctccccaaacaacacctctgaccgagctgcaacctccttctagtccttctagggttggagtgacaggccatgtcccactgttagaaaggaggcgtgggccgctggtgcgtcagataagtcttaacatagcgcctgactcacacctgtcgcctgtgcacccaacttcattccaaaacactgccctgccaagcgttaatgctgtgccatatcagggcccacagctcacctccacttcccttgcagaattttcggcgaacaccttgcattctcagacccaggtgaaagatctgcaggcagagacatcgaacagttccagcacgaatgtctttcccgtgcagcaactgtgcgacattaatttgctgaaccagatccacgcgcccccgtcacaccagtcaactcagctctcactgcaggtgtctacgcagggctcaaagcctgataagaatagcgtgctttcgggatcaagtaagagcgaagactgttttgcaccgaaataccagttgcattgtcaggtcttcacatcggggcccagctgcagtagtaatccagtgcactctttgccaaatcaggtaatctccgatccagttggaaccgatcactgtgtaaccagtgctacattgcccacaaagctcatcgacagtatgtcaaatagtcatccattactgccccctgaactgaggccccttggtagccaggtccaaaaggtgcctagctcttttatgttgcctatcagattacagagttcagtgcccgcctactgcttcgcaacgctgacttccctcccccagatccttgtgactcaggacctccctaaccagccaatctgtcagactaatcacagcgtcgtgccgattagtgaggaacaaaattcagtgccgacattgcagaagggccaccagaatgccctccctaatcctgaaaaggagttcttgtgtgagaacgtgttctcagagatgagtcagaactcctcactctctgagtcactgccaattactcagaaaatcagcgtgggccgcctgtctccacaacaggaatcatcagctagcagtaagcgaatgctgtctcccgccaattccctcgatatcgcaatggagaagcaccagaaaagagcgaaggacgaaaacggtgctgtctgcgccacggatgtgcgtccactggaggccctgagtagcagggttaatgaagcaagtaaacagaaaaaacctatacttgtcagacaggtgtgtaccaccgagcctctcgacggcgtcatgcttgagaaggatgtattctcgcagcccgaaatatccaatgaggcagtgaacctcacaaatgtcttaccagcggacaattcaagcacaggttgttctaaattcgtggtgatcgaacccatttcagagctgcaggaattcgaaaacatcaagagcagtaccagcctcacactcacagtcagaagctccccagctccaagtgagaacacgcacatcagccctcttaagtgtacagataataaccaggagcgcaagagccccggggtgaagaaccaaggtgataaagttaatattcaggagcagagtcaacaacccgttaccagcctcagcctgttcaacatcaaagacacacaacagctcgccttccccagcctgaaaactacaacaaacttcacatggtgctaccttttgcgccaaaaaagcctgcacctgcctcagaaagaccaaaaaacgagtgcctatactgactggaccgtgagcgcatccaaccctaatcccctgggcctacctacgaaggttgctctggcgctgctgaacagcaagcagaacactggaaaatcgctgtactgccaggcaataactacccactctaagtccgatctcctggtgtattctagcaagtggaagagttcattaagcaagcgtgcactgggtaaccagaaaagtacagttgtggagtttagcaataaggacgcctccgagatcaactccgagcaagataaagaaaatagcctgattaagtctgaaccacgccggatcaagattttcgacgggggttataagtccaatgaagagtatgtgtatgtccgcggtagggggcgagggaagtatatctgcgaggagtgcggtattcgatgtaagaaacctagcatgctcaaaaagcatatacggactcatactgatgtccgcccatatcactgtacatattgcaatttttctttcaagactaaggggaatctgaccaaacacatgaaaagtaaggctcactctaaaaagtgcgttgacctgggggtttctgtcggtctcatagatgagcaggataccgaggagtcggacgagaagcagcggttctcctacgagaggagtggctacgacctagaggagtccgacggaccagatgaggacgataacgagaacgaagacgacgacgaggatagtcaagctgagagcgtgctttctgctaccccctccgtgaccgccagtcctcaacatcttccatctagaagctccctgcaggaccccgtgtccaccgacgaggatgtccgcatcactgactgtttttctggcgttcatacagatcctatggatgtcctgccccgggctctgttgaccaggatgacagtgctttcaaccgcccagtctgactacaacagaaaaacactgagtcccggaaaggctagacaaagagcagcccgggatgagaatgacacgatccccagcgttgataccagcagatctccctgtcaccaaatgagtgttgactatccggaatctgaagagatcctaagaagttccatggctggcaaagccgttgccattacacagtcaccgtcgtcagtgcggctgccacccgcagccgctgagcatagccctcaaactgccgctggcatgcccagtgtcgcctcacctcacccagacccccaggaacagaagcagcagatcacgttacaaccaactccaggtctcccgagcccccacacgcatctgttttcacacctgccgctgcacagccaacaacagtcacgaacaccatacaatatggttcccgtcggcggtattcacgtggtgccagctggcctgacgtatagcacctttgtacctcttcaggctggacctgttcagttaacaatccccgccgtctccgtggtgcaccgtactctgggcacgcatcgcaacactgtgactgaagttagcggaacaacaaatcccgccggggtcgcggaactgagctcagtcgtaccctgcatccctatcgggcaaatcagagtgccagggctccagaacctctccacccccgggttacagtcactaccaagcttgtcaatggagaccgtgaatatcgttggactggccaacaccaacatggcgccgcaggttcacccacccggattggcactgaatgccgtcggactacaggtcctcacagccaacccgtcttcacagagttctcctgcccctcaagcacatataccgggtctccagattcttaacatcgccctcccaacattgatcccctccgtgtctcaggtggctgttgacgctcagggcgcccccgagatgcccgcaagtcagtctaaggcatgcgagacccagccgaaacagactagcgtggcttccgctaaccaggtgagtaggacggagagcccccagggcctccccaccgtgcagagggaaaatgccaagaaggtgctgaacccccctgcccctgcaggggatcacgcccgtctggacgggctgtccaaaatggatacagagaaggctgcgtcagcaaaccacgtcaagcctaaacccgagctgactagcatacagggacagcccgctagcacttcccaaccgttactgaaggcacacagtgaggtcttcacgaaacccagcggtcagcagacactaagcccagatcggcaggttccgcgccctaccgctctgcctcgtaggcagcctaccgtccacttttcagatgtatcctccgatgacgacgaggatcgtttagtaatcgcgacgtag

SEQ ID NO: 303934 - DNA, 387 bp, Artificial Sequence
  derived and/or modified sequence
atgccacgcaccaagcaaatccacccaaggaatctgagagacaaaattgaggaagcacagaaggagctgaatggtgccgaagtctccaagaaggaaatactgcaggcgggagttaaaggaacctcagaatccttgaagggggttaaacgcaagaaaatcgttgccgaaaatcatttgaaaaagattcccaagtcccctctccgcaatcctctgcaggcgaagcacaagcagaacacggaagaaagcagcttcgctgtcctccactccgcttccgagtcccataagaaacagaactacattcctgtgaaaaatggcaagcaattcacaaagcagaacggggagacccctgggatcattgccgaagctagcaaatctgaagagtcttag

SEQ ID NO: 303935 - DNA, 429 bp, Artificial Sequence
  derived and/or modified sequence
atgccccgcaccaagcaaattcacccacgcaacctgcgcgataagattgaagaggcccaaaaggaattgaacggcgccgaagtgtccaaaaaagaaatcctccaagccggggtgaaagggacgagcgagtcattaaagggggtcaaacgtaaaaaaattgtagccgaaaaccatctgaagaaaattcccaagagcccgcttcggaaccccctgcaagcaaaacataaacagaacaccgaggagagtagctttgccgtcctgcactcagcaagtgaaagccataagaagcagaactatatccccgttaagaacggcaagcagtttacaaagcagaacggcgagacacccggcattattgctgaggcttccaaatccgaggaaagtgtgagccccaagaagccactgtttttgcagcagccgtccgaatag

SEQ ID NO: 303936 - DNA, 363 bp, Artificial Sequence
  derived and/or modified sequence
atgcccaggaccaagcagattcatccccgcaacttgcgggataagatcgaggaggcacaaaaagaacttaatggcgccgaggtaagcaaaaaagagattctccaggcaggtgtgaagggcacaagtgagtctctcaaaggcgtcaaaagaaaaaagatagtggcagagaaccatctcaagaaaatacccaagtcccccctccgcaatcctcttcaggccaagcacaagcagaacactgaggagtcatcattcgccgtgttgcacagcgcaagcgaatcccacaaaaagcagaactacatccccgttaagaatggtaaacagtttaccaagcagaacggggaaacccccgggatcatcgcatag

SEQ ID NO: 303937 - DNA, 9027 bp, Artificial Sequence
  derived and/or modified sequence
gctgctgggcggcggcagggtggcggacggagcgggggaccggggagcggcggccgccggaggaggttatgtttgtgtttggggttgtcaagtgaaggagggatcccaggcgccgccgccgccgccgcgcgggggtcgcggagatcccgagccgcggccgccgccatcagcagcgcagctccagggccggctgcagcggcagcggctccgccgggcgtcctggcagcagcacatggattaattgatgtatgttgagtttatggagctgccttttggtggcttgctttatctgcagtttttaagaagaaaaagaaggccctgagtcaaagaagatgcctcgaactaaacaaattcatcccagaaatctaagagacaaaattgaagaagcacaaaaagaacttaatggggcagaagtttcaaaaaaagaaatcttacaggctggtgttaaaggaacttcggaatcccttaaaggtgtgaaacgcaaaaagatcgtagctgagaatcacctgaaaaaaataccaaaatccccactgagaaatcctcttcaggcaaaacataaacaaaatacagaagagtcatctttcgccgttcttcatagtgcttcggagtctcacaagaaacagaattatattcctgtaaaaaatgggaagcagtttaccaaacaaaatggagaaacacctggaataattgctgaagcctcaaaatctgaagaatctgtctccccaaagaagcccttgtttctgcagcaaccatctgaactgcgtagatggagatccgaaggcgctgatcctgccaaattcagtgacctcgatgaacaatgtgactcaagttccttgtcaagtaaaaccaggactgacaatagcgaatgcatctcttctcattgtggcactacgtccccctcctatacaaacactgcattcgatgtcttactgaaagcaatggagccagaactgagcaccttgtcacaaaagggctcaccttgtgcaattaagacagaaaaactgaggccaaataaaactgcacgttcccctcccaaattaaaaaacagttcaatggatgccccaaatcagacttcacaggaattggttgctgaatcacagtcttcttgtacctcatacacagtccatatgtctgctgctcagaagaatgagcaaggggcaatgcagtcagcttctcatttgtatcatcaacatgaacactttgttcccaaatccaaccaacataatcaacagcttccggggtgttcaggtttcacaggatcactgacaaatctgcaaaatcaagagaatgccaaacttgaacaggtttataatatagcagtgacatcatctgtaggcctaacttcaccttccagtagatctcaggttactcctcaaaaccagcaaatggattctgcttcacctttgtcaataagtccggctaattctacacagtcgccccccatgccaatctataattcaactcatgttgcctctgttgttaatcaaagcgtagagcaaatgtgcaatcttcttctgaaagatcagaagccaaaaaaacaaggaaaatatatttgtgagtattgcaatagagcatgtgcaaagcctagtgtgcttttaaagcatatccgctcccacactggagagcgaccctatccctgtgtgacttgtggattttcatttaagactaaaagtaatctgtataagcacaagaaatcccacgcacatactatcaaactgggtcttgtcttgcaaccagatgctggtggcttgttcttgtcccacgagtcccccaaagcacttagtattcattcagacgtagaagacagtggggagagcgaggaggaaggcgccactgatgagagacagcatgacctgggcgccatggagctgcagcctgtgcacataataaagaggatgtcaaatgctgaaactttactaaaatcaagcttcactccaagcagtccagaaaatgtgataggtgactttttgctacaggacagatctgcagaatcacaagctgtgacagagttaccgaaagttgtggtccaccatgtcactgtgtcccccttaagaactgacagtccaaaggccatggatcccaagcctgaactttctagtgcacaaaagcagaaggaccttcaggtgacaaacgtacagccactttcagccaacatgtcccagggtggagtctccaggttggagactaatgagaattcccaccagaaaggcgacatgaatccactggaaggaaagcaagactctcacgtaggaacggtacacgcccagctacaaaggcagcaggctaccgattactcccaagagcagcaaggaaagctcctgagtcctcgaagtttaggaagtacggattctggttacttttcacgttctgaaagtgccgatcaaacagtgagtccaccaactccctttgccagaaggttacccagcacagaacaagactctggaaggagtaacggaccctctgcagctcttgtcaccacgtcaacaccctctgctttgcccacaggggaaaaggcattgcttttaccaggtcagatgcgcccacctttggccacaaaaacacttgaggagcggatatcgaagcttatctcagacaatgaagctttggtagatgacaagcaactggatagtgtgaagccgcggagaacctcactgtcaagacgaggaagcattgattcccccaaatcatacatatttaaagattctttccagtttgatttaaaaccagtgggacggagaacaagttcaagctctgatataccgaagtcacctttcacccctactgaaaaatcaaagcaagtgtttcttctgtctgtaccttcacttgactgtttacctatcacaagaagtaattccatgccgaccacaggttattcagcagtacctgcaaatataatacctcctcctcatccactaagaggaagtcagtcatttgatgacaaaattggcactttctatgatgatgtctttgtatcgggacctaacgctcctgtgccccagagtgggcatccccgtacacttgtgagacaagcagccatagaagactcttcagcaaatgaaagtcatgttcttggtactggacagtccctggatgagagccaccaaggatgccatgctgctggtgaagccatgtcagtgaggagcaaggcactggcacaaggcccacatatagaaaaaaagaagtctcatcaagggcgagggacaatgtttgagtgtgaaacttgtagaaacaggtataggaaactggaaaattttgaaaatcataagaaattttactgttctgagttacatggaccaaaaacaaaggtagccatgagagaacctgagcacagccctgtgcccggcggtctgcagcctcagattctacactacagagtcgctgggtcctccggcatctgggaacagacgccccagataagaaaaaggaggaaaatgaaaagtgttggggatgatgaagaacttcagcaaaatgaaagtggaacatctccaaaaagttctgaaggccttcagtttcagaatgctctgggctgtaatcccagtttgcctaaacataatgttaccataagaagtgaccagcagcataaaaatatacagttgcaaaactcccatattcaccttgttgccaggggccctgagcagaccatggatcccaagctgtcgaccatcatggaacaacagataagttcagcagcccaggacaagatagaactgcagagacacggaactggaatctctgtcatccagcacaccaactccctgagcaggcccaactcatttgacaagcctgagccttttgaaagagcctccccagtttctttccaggagctgaatagaacggggaagtccgggtctctaaaagtgataggaatctcccaagaggaaagtcacccttctcgggacgggtctcatcctcaccagcttgcactatcagacgctctcagaggagaacttcaggaaagctccagaaagagtccaagtgaacgacatgtgttaggacagccctcaagacttgtccggcagcacaacatccaagttccagagattttggtcacagaagaaccagatcgagacctggaagctcaatgccatgatcaagaaaagtcagagaagttcagttggccccagcgtagtgaaaccttgtcaaaattgccaacagagaaactgccacccaaaaagaaaaggctccgtctggctgagatagaacattcctcaacagaatcgagctttgattccactctctccaggagtctaagtagggagagcagtttatctcacacttcaagtttctcagcctctttagacatagaggacgtttctaaaacggaggcttcccccaaaatcgattttctaaataaagccgagtttcttatgattccagctggcttgaatactctgaatgttcctggatgtcaccgggaaatgaggcgtactgcatcagaacagattaattgcacgcaaacgtcaatggaggtctctgatctcagaagcaaatcattcgattgtggaagcatcaccccaccccagacaacaccacttactgaattgcagcctccatcttcaccttctcgagtgggagtgactgggcatgtgcctctcttagaaagaaggagaggcccactggtacggcaaatatctttaaacatagccccagatagtcatctgtctcctgtacacccaacatctttccaaaatactgctcttcccagtgtgaatgcagtgccatatcaggggcctcagctcactagtacatctttagctgagttttctgcaaatactttgcactctcagactcaggttaaggatctgcaggcagaaacatcaaactccagctctaccaacgtttttcctgttcaacagctctgtgatatcaatttgttaaatcaaatccatgcaccgcctagccaccagagcacacagctatctctgcaagtgtctacgcagggtagcaagccagataaaaattctgttttatctgggtcttctaaaagtgaggattgctttgctcccaaataccaattgcattgtcaggttttcacttcaggcccatcttgctcttctaatcctgtgcattctttgccaaatcaagttatttcagatccagttggaacagatcattgtgtgacatcagcaacattaccaaccaaattaattgacagcatgtctaattcgcatcctctgctaccaccagagctcaggccccttggaagtcaggtgcagaaggtgccatcatcattcatgctgcccatacgcctgcagagtagtgttcctgcttactgttttgctacactcacatccctgccacaaatactagtgacccaagatctgcccaatcagccaatttgccagactaatcatagtgtagtgccaatcagtgaagaacaaaattctgtgccaacattacaaaaaggtcatcagaatgctttgccaaacccagagaaggaatttctatgtgaaaatgttttttcagagatgagccaaaattcttctctatcagaatccttgcccataactcagaaaatatctgttggtcgactttcccctcaacaagaatcttcagcttcgagtaaaaggatgctttccccagcaaatagtttagacattgccatggaaaagcaccagaagcgggccaaagatgaaaatggagctgtttgtgcaacagacgtgagacctttagaggctttgagttcgagagttaatgaagctagtaaacagaagaagcctattttagtgagacaggtttgtactacagagcccctggacggtgtgatgttggaaaaggatgttttttctcaacctgaaattagtaatgaggctgttaatttgacaaatgttttaccagctgataattcatcaacaggatgctctaaatttgtcgttatagaacctataagtgaattgcaggaatttgaaaacatcaagtcatccacatcattaactcttacagttcgaagttcacctgctccttcagaaaatactcatatttctcctttgaaatgtacagacaataaccaagaaaggaagtctccaggggttaaaaatcaaggtgacaaagtgaacatccaagagcaaagtcaacagccagtcacttctctttcattgtttaacatcaaggacacccagcagctggctttccctagcctgaaaactacaaccaactttacatggtgttatctcttaaggcagaagtcgttgcatttgcctcagaaggaccagaaaacttcagcctatactgattggacagtaagcgccagtaatccaaatccactcggtttgcccacaaaagttgcacttgctctccttaattcaaaacagaacactggaaaatcactatactgtcaagcaataactacccattccaagtcagacttattggtctattcaagcaagtggaaaagcagcttaagcaagagagcattaggtaatcaaaagtccacagtagttgaattcagcaataaagatgcctctgaaattaacagtgagcaagataaagaaaattccttaatcaaaagtgaaccaagaagaattaaaatatttgatggaggatataagtcaaatgaagagtatgtatatgtccgaggcaggggaagaggaaaatacatttgtgaagaatgtggaatacgttgtaagaaacctagcatgttaaagaaacacatacgaacccatacagatgtccgcccctaccactgcacttactgtaacttctcctttaagactaaaggaaatctgacaaaacacatgaagtccaaggcacatagcaagaaatgtgtggatttaggcgtctcagtaggtttaatagatgaacaggatacagaagaatcagatgaaaaacagagattcagttatgagcgatctggatatgatcttgaagaatctgatggcccagatgaggatgacaatgaaaatgaagacgatgatgaggacagccaggctgaatcagtcctgtcagccacaccctcagtcacagctagcccgcagcaccttccatctagaagtagccttcaggaccctgtgagtactgacgaggatgtcaggatcaccgattgcttttctggggtacacacggacccaatggacgttctgcccagggcgctgctcaccagaatgactgtcctgagcacagcacagtctgactacaataggaagacactctctccggggaaggccaggcagcgtgctgcgagagatgaaaacgacacaattccgtctgtagacacttccaggtccccgtgtcatcagatgtctgtggactaccctgagtcagaagaaattctgagaagttctatggcaggaaaagctgttgctataacacagagcccatcatctgtaagacttcctcctgctgcagctgagcacagcccccagacagcagcggggatgccttctgtggcctcaccacatcctgaccctcaagaacagaagcagcaaataactctacagccgactccaggcttgccttctccccacactcatttgtttagccaccttcctttgcattcccagcagcaatcgaggacaccttataatatggttccagttggggggatccatgtggtacctgctggcctcacatactccacgtttgtgccccttcaggctggaccagtgcagctcacgatccctgctgtcagtgtcgttcacagaactttgggtactcataggaatacggtcacagaagtgtctggcactacaaaccctgctggagtggctgaattaagcagtgttgtgccatgtattcctatcggccaaatccgcgtgccaggccttcagaacctaagtaccccaggcttgcagtcactcccctcgttaagcatggaaaccgtcaatattgtaggcctagccaatacaaatatggccccacaagtccatccaccaggactggctctgaatgctgtcggactgcaggttctgactgcaaacccttcatcacaaagcagccccgcccctcaggcacacattccaggtctccagatcttgaacatagcattgcccaccttaatcccctcagtcagtcaagtagccgttgatgcacagggagctccagaaatgccagcttcccaaagcaaagcatgcgagacacaacccaagcagacttctgtagccagcgcaaaccaggtcagcaggaccgagtctcctcaggggttacctacagtccagcgggaaaatgcaaaaaaagttctgaatccacctgcccctgcaggtgaccatgcaaggcttgatggcctgagtaaaatggacacagagaaggctgcctcggcaaatcacgtgaagcccaagcctgaactcacttccatacagggccaaccagcgtccacgtcacaacctctgctgaaggcacattctgaagtttttacaaagccctcaggccagcagactctctctccagacagacaggttcccaggcccacagcactaccgcggaggcagcccactgtgcacttcagcgacgtgagcagcgatgatgacgaggacaggcttgtgatagcaacctgatggattttattttttatttgctttttttttatataacacttaaaggtttctttgaaaaccctcctttccttaaagcacatttttctgacataaactcatgactaatctttgtgcaatcatgaacttttgaccaataattgttgttttgtgtcagctccagccatttttgtacatgttgtatagacaattgtgccttttaggagctttatgtttagaaactgtacagattgttgaatatctatatacataaaaatatattatatatgtatatgaaaaccaggtagttatttgtgtttagtaaggaaaacctgtcaaataaatcaaatgattaaattatatgttccactgttgaatataaattttatggctatggggcagagtttctgtgtataaattagtatgtaaactccatatttattgtattcatattagtctttgaaaatgggtctgtcctccttgtgtaagacagtaactttacacttcagacagattttctgtgttatgaaatgtttcagtaaaatattgtttactgacttta

SEQ ID NO: 303938 - DNA, 576 bp, Artificial Sequence
  derived and/or modified sequence
gtgcaaccgccgaccttgcagaggggatggctgcgtgcgggagacccttggcacttctgggcgccctcgccgcgcgcgagccgagcagcacatggattaattgatgtatgttgagtttatggagctgccttttggtggcttgctttatctgcagtttttaagaagaaaaagaaggccctgagtcaaagaagatgcctcgaactaaacaaattcatcccagaaatctaagagacaaaattgaagaagcacaaaaagaacttaatggggcagaagtttcaaaaaaagaaatcttacaggctggtgttaaaggaacttcggaatcccttaaaggtgtgaaacgcaaaaagatcgtagctgagaatcacctgaaaaaaataccaaaatccccactgagaaatcctcttcaggcaaaacataaacaaaatacagaagagtcatctttcgccgttcttcatagtgcttcggagtctcacaagaaacagaattatattcctgtaaaaaatgggaagcagtttaccaaacaaaatggagaaacacctggaataattgctgaagcctcaaaatctgaagaatctg

SEQ ID NO: 303939 - DNA, 585 bp, Artificial Sequence
  derived and/or modified sequence
tcctcccgccggccccaaagacgctaaacgtgccctactctgccccgggggagagcacatggattaattgatgtatgttgagtttatggagctgccttttggtggcttgctttatctgcagtttttaagaagaaaaagaaggccctgagtcaaagaagatgcctcgaactaaacaaattcatcccagaaatctaagagacaaaattgaagaagcacaaaaagaacttaatggggcagaagtttcaaaaaaagaaatcttacaggctggtgttaaaggaacttcggaatcccttaaaggtgtgaaacgcaaaaagatcgtagctgagaatcacctgaaaaaaataccaaaatccccactgagaaatcctcttcaggcaaaacataaacaaaatacagaagagtcatctttcgccgttcttcatagtgcttcggagtctcacaagaaacagaattatattcctgtaaaaaatgggaagcagtttaccaaacaaaatggagaaacacctggaataattgctgaagcctcaaaatctgaagaatctgtctccccaaagaagcccttgtttctgcagcaaccatctgaac

SEQ ID NO: 303940 - DNA, 579 bp, Artificial Sequence
  derived and/or modified sequence
tttcctctcacgcccacttccaacctaggaggcttttggtttctgcttttttgtttttaaaattaaaagttaaacccaggaagctttggatcagacttttgtgttgcagttcggcacatggattaattgatgtatgttgagtttatggagctgccttttggtggcttgctttatctgcagtttttaagaagaaaaagaaggccctgagtcaaagaagatgcctcgaactaaacaaattcatcccagaaatctaagagacaaaattgaagaagcacaaaaagaacttaatggggcagaagtttcaaaaaaagaaatcttacaggctggtgttaaaggaacttcggaatcccttaaaggtgtgaaacgcaaaaagatcgtagctgagaatcacctgaaaaaaataccaaaatccccactgagaaatcctcttcaggcaaaacataaacaaaatacagaagagtcatctttcgccgttcttcatagtgcttcggagtctcacaagaaacagaattatattcctgtaaaaaatgggaagcagtttaccaaacaaaatggagaaacacctggaataattgctga

SEQ ID NO: 303941 - DNA, 8157 bp, Artificial Sequence
  derived and/or modified sequence
atgcccaggaccaagcagatccaccccaggaacctgcgggacaagattgaggaggcccagaaggagctgaatggagctgaggtgtccaagaaggagatcctgcaggccggcgtgaagggcaccagcgagagcctgaagggcgtgaagaggaagaagatcgtggccgagaaccacctgaagaagatccccaagagccccctgaggaaccccctgcaggccaagcacaagcagaacacagaggagagcagctttgctgtgctgcacagcgccagcgagagccacaagaagcagaactacatccctgtgaagaatggcaagcagttcaccaagcagaatggagagaccccaggcatcatcgccgaggccagcaagtctgaggagagcgtgagccccaagaagcccctcttcctgcagcagcccagcgagctgcggcgctggaggtctgagggcgctgaccctgccaagttcagtgacctggatgagcagtgtgacagcagcagcctgagcagcaagaccaggacagacaacagcgagtgcatcagcagccactgcggcaccaccagccccagctacaccaacacagcctttgatgtgctgctgaaggccatggagcctgagctgagcaccctgagccagaagggcagcccctgtgccatcaagacagagaagctgcggcccaacaagacagcccggagcccccccaagctgaagaacagctccatggatgcccccaaccagaccagccaggagctggtggccgagagccagagcagctgcaccagctacacagtgcacatgtctgctgcccagaagaatgagcagggcgccatgcagagcgccagccacctgtaccaccagcacgagcactttgtgcccaagagcaaccagcacaaccagcagctgcccggctgcagcggcttcaccggcagcctgaccaacctgcagaaccaggagaatgccaagctggagcaggtgtacaacattgctgtgaccagctctgtgggcctgaccagccccagcagccgcagccaggtgaccccccagaaccagcagatggacagcgccagccccctgagcatcagccctgccaacagcacccagagcccccccatgcccatctacaacagcacccacgtggcctctgtggtgaaccagagcgtggagcagatgtgcaacctgctgctgaaggaccagaagcccaagaagcagggcaagtacatctgtgagtactgcaacagagcctgtgccaagcccagcgtgctgctgaagcacatccgcagccacactggagagcggccctacccctgtgtgacctgtggcttctccttcaagaccaagagcaacctgtacaagcacaagaagagccacgcccacaccatcaagctgggcctggtgctgcagccagatgctgggggcctcttcctgagccatgagagccccaaggccctgagcatccacagtgatgtggaggacagcggggagagcgaggaggagggcgccacagatgagcggcagcacgacctgggcgccatggagctgcagcctgtgcacatcatcaagaggatgagcaatgctgagaccctgctgaagagcagcttcacccccagcagcccagaaaatgtcatcggggacttcctgctgcaggacagatctgctgagagccaggccgtgacagagctgcccaaggtggtggtgcaccacgtgacagtgagccccctgaggacagacagccccaaggccatggaccccaagccagagctgagcagcgcccagaagcagaaggacctgcaggtgaccaacgtgcagcccctgagcgccaacatgagccagggcggcgtgtcccggctggagaccaatgaaaacagccaccagaagggggacatgaaccccctggagggcaagcaggacagccacgtgggcaccgtgcacgcccagctgcagaggcagcaggccacagactacagccaggagcagcagggcaagctgctgagccccaggagcctgggcagcacagattctggctacttcagccgctctgagagcgctgaccagacagtgagcccccccaccccatttgcccggcggctgcccagcacagagcaggacagcggccgcagcaatggccccagcgctgccctggtgaccaccagcacccccagcgccctgcccaccggggagaaggccctgctgctgcccggccagatgaggcctcccctggccaccaagaccctggaggagcgcatcagcaagctgatcagtgacaatgaggccctggtggatgacaagcagctggacagcgtgaagcccaggaggaccagcctgagccggcggggcagcattgacagccccaagagctacatcttcaaggacagcttccagtttgacctgaagcctgtgggccgccgcaccagcagcagcagtgacatccccaagagccccttcacccccacagagaagagcaagcaggtgttcctgctgtctgtgcccagcctggactgcctgcccatcaccaggagcaacagcatgcccaccaccggctacagcgctgtgcctgccaacatcatccccccaccccaccccctgcggggcagccagagctttgatgacaagattggcaccttctatgatgatgtgtttgtgtctggccccaatgcccctgtgccccagagcggccaccccaggaccctggtgcggcaggccgccatcgaggacagcagcgccaatgaaagccacgtgctgggcaccggccagagcctggatgagagccaccagggctgccacgccgccggggaggccatgtctgtgcgcagcaaggccctggcccagggcccccacatcgagaagaagaagagccaccagggccggggcaccatgtttgaatgtgagacctgcaggaaccgctacaggaagctggagaactttgagaaccacaagaagttctactgcagcgagctgcacggccccaagaccaaggtggccatgagggagcctgagcacagccctgtgcctgggggcctgcagccccagatcctgcactacagagtggccggcagcagcggcatctgggagcagaccccccagatcaggaagaggaggaagatgaagtctgtgggagatgatgaggagctgcagcagaatgaaagtggcaccagccccaagagcagcgagggcctgcagttccagaatgccctgggctgcaaccccagcctgcccaagcacaacgtgaccatccgcagtgaccagcagcacaagaacatccagctgcagaacagccacatccacctggtggcccggggccctgagcagaccatggaccccaagctgagcaccatcatggagcagcagatcagcagcgctgcccaggacaagattgagctgcagagacatggaacaggcatcagcgtcatccagcacaccaacagcctgagccggcccaacagctttgacaagccagagccctttgagcgggccagccctgtgtccttccaggagctgaacagaacaggcaagagcggcagcctgaaggtgattggcatcagccaggaggagagccaccccagcagagatggcagccacccccaccagctggccctgagtgatgccctgcggggggagctgcaggagagcagcaggaagagccccagcgagcggcacgtgctgggccagcccagccggctggtgcggcagcacaacatccaggtgcctgagatcctggtgacagaggagccagaccgggacctggaggcccagtgccacgaccaggagaagtctgagaagttctcctggccccagaggtctgagaccctgagcaagctgcccacagagaagctgccccccaagaagaagaggctgcggctggccgagattgagcacagcagcacagagagcagctttgacagcaccctgagccgcagcctgagccgggagagcagcctgagccacaccagcagcttcagcgccagcctggacattgaagatgtgtccaagacagaggccagccccaagattgacttcctgaacaaggccgagttcctgatgatcccagctggcctgaacaccctgaatgtgcccggctgccaccgggagatgagaagaacagccagcgagcagatcaactgcacccagacctccatggaggtgtctgacctgcggagcaagagctttgactgtggcagcatcaccccaccccagaccacccccctgacagagctgcagccccccagcagccccagccgggtgggcgtgacaggccacgtgcccctgctggagaggagaagaggccccctggtgcggcagatcagcctgaacatcgccccagacagccacctgagccctgtgcaccccaccagcttccagaacacagccctgcccagcgtgaatgctgtgccctaccagggcccccagctgaccagcaccagcctggccgagttcagcgccaacaccctgcacagccagacccaggtgaaggacctgcaggccgagaccagcaacagcagcagcaccaacgtgtttcctgtgcagcagctgtgtgacatcaacctgctgaaccagatccacgccccacccagccaccagagcacccagctgagcctgcaggtgtccacccagggcagcaagccagacaagaacagcgtgctgagcggcagcagcaagtctgaggactgctttgcccccaagtaccagctgcactgccaggtgttcaccagcggccccagctgcagcagcaaccctgtgcacagcctgcccaaccaggtgatcagtgaccctgtgggcacagaccactgtgtgaccagcgccaccctgcccaccaagctgattgacagcatgagcaacagccaccccctgctgcccccagagctgcggcccctgggcagccaggtgcagaaggtgcccagcagcttcatgctgcccatccggctgcagagctctgtgcctgcctactgctttgccaccctgaccagcctgccccagatcctggtgacccaggacctgcccaaccagcccatctgccagaccaaccacagcgtggtgcccatcagcgaggagcagaacagcgtgcccaccctgcagaagggccaccagaatgccctgcccaaccctgagaaggagttcctgtgtgaaaatgtgttttctgagatgagccagaacagcagcctgtctgagagcctgcccatcacccagaagatctctgtgggccgcctgagcccccagcaggagagcagcgccagcagcaagaggatgctgagccctgccaacagcctggacatcgccatggagaagcaccagaagagggccaaggatgaaaatggagctgtgtgtgccacagatgtgcggcccctggaggccctgagcagccgggtgaatgaggccagcaagcagaagaagcccatcctggtgcggcaggtgtgcaccacagagcccctggatggagtgatgctggagaaggatgtgttcagccagcctgagatcagcaatgaagctgtgaacctgaccaacgtgctgcctgctgacaacagcagcacaggctgcagcaagtttgtggtgattgagcccatcagcgagctgcaggagtttgagaacatcaagagcagcaccagcctgaccctgactgtgcgcagcagccctgcccccagcgagaacacccacatcagccccctgaagtgcacagacaacaaccaggagaggaagagccctggggtgaagaaccagggcgacaaggtgaacatccaggagcagagccagcagcctgtgaccagcctgagcctcttcaacatcaaggacacccagcagctggccttccccagcctgaagaccaccaccaacttcacctggtgctacctgctgcggcagaagagcctgcacctgccccagaaggaccagaagaccagcgcctacacagactggacagtgtctgccagcaaccccaaccccctgggcctgcccaccaaggtggccctggccctgctgaacagcaagcagaacacaggcaagagcctgtactgccaggccatcaccacccacagcaagagtgacctgctggtgtacagcagcaagtggaagagcagcctgagcaagagggccctgggcaaccagaagagcacagtggtggagttcagcaacaaggatgccagcgagatcaacagcgagcaggacaaggagaacagcctcatcaagtctgagccccggcgcatcaagatctttgatggcggctacaagagcaatgaggagtatgtgtatgtgcggggccggggccggggcaagtacatctgtgaggagtgtggcatccgctgcaagaagcccagcatgctgaagaagcacatccgcacccacacagatgtgcggccctaccactgcacctactgcaacttctccttcaagaccaagggcaacctgaccaagcacatgaagagcaaggcccacagcaagaagtgtgtggacctgggcgtgtctgtgggcctgattgatgagcaggacacagaggagagtgatgagaagcagcgcttctcctatgaaagaagtggctatgacctggaggagagtgatggcccagatgaagatgacaatgaaaatgaagatgatgatgaggacagccaggccgagagcgtgctgagcgccacccccagcgtgacagccagcccccagcacctgcccagccgcagcagcctgcaggaccctgtgtccacagatgaagatgtgcgcatcacagactgcttctctggagtgcacacagaccccatggatgtgctgccccgggccctgctgaccaggatgacagtgctgagcacagcccagagcgactacaacaggaagaccctgagccctgggaaggcccggcagagagctgccagagatgaaaatgacaccatccccagcgtggacaccagccgcagcccctgccaccagatgtctgtggactacccagagagcgaggagatcctgcggagctccatggccggcaaggctgtggccatcacccagagccccagctctgtgcggctgcccccagctgctgctgagcacagcccccagacagctgctggcatgcccagcgtggccagcccccacccagacccccaggagcagaagcagcagatcaccctgcagcccaccccaggcctgcccagcccccacacccacctgttcagccacctgcccctgcacagccagcagcagagcaggaccccctacaacatggtgcctgtgggcggcatccacgtggtgcctgctggcctgacctacagcacctttgtgcccctgcaggccggccctgtgcagctgaccatcccagctgtgtctgtggtgcacaggaccctgggcacccacaggaacacagtgacagaggtgtctggcaccaccaacccagctggggtggccgagctgagctctgtggtgccctgcatccccatcggccagatccgggtgcccggcctgcagaacctgagcaccccaggcctgcagagcctgcccagcctgtccatggagaccgtgaacatcgtgggcctggccaacaccaacatggccccccaggtgcaccccccaggcctggccctgaatgctgtgggcctgcaggtgctgacagccaaccccagcagccagagcagccctgccccccaggcccacatccctggcctgcagatcctgaacatcgccctgcccaccctcatccccagcgtgtcccaggtggccgtggatgcccagggcgcccctgagatgcctgccagccagagcaaggcctgtgagacccagcccaagcagacctctgtggccagcgccaaccaggtgtccaggacagagagcccccagggcctgcccaccgtgcagagagaaaatgccaagaaggtgctgaaccccccagccccagctggggaccacgcccggctggatggcctgagcaagatggacacagagaaggccgccagcgccaaccacgtgaagcccaagccagagctgaccagcatccagggccagcctgccagcaccagccagcccctgctgaaggcccacagcgaggtgttcaccaagcccagcggccagcagaccctgagcccagaccggcaggtgccccggcccacagccctgccccggcggcagcccaccgtgcacttcagtgatgtgtccagtgatgatgatgaagatcggctggtgattgccacctag

SEQ ID NO: 303942 - DNA, 387 bp, Artificial Sequence
  derived and/or modified sequence
atgcccaggaccaagcagatccaccccaggaacctgcgggacaagattgaggaggcccagaaggagctgaatggagctgaggtgtccaagaaggagatcctgcaggccggcgtgaagggcaccagcgagagcctgaagggcgtgaagaggaagaagatcgtggccgagaaccacctgaagaagatccccaagagccccctgaggaaccccctgcaggccaagcacaagcagaacacagaggagagcagctttgctgtgctgcacagcgccagcgagagccacaagaagcagaactacatccctgtgaagaatggcaagcagttcaccaagcagaatggagagaccccaggcatcatcgccgaggccagcaagtctgaggagagctag

SEQ ID NO: 303943 - DNA, 429 bp, Artificial Sequence
  derived and/or modified sequence
atgcccaggaccaagcagatccaccccaggaacctgcgggacaagattgaggaggcccagaaggagctgaatggagctgaggtgtccaagaaggagatcctgcaggccggcgtgaagggcaccagcgagagcctgaagggcgtgaagaggaagaagatcgtggccgagaaccacctgaagaagatccccaagagccccctgaggaaccccctgcaggccaagcacaagcagaacacagaggagagcagctttgctgtgctgcacagcgccagcgagagccacaagaagcagaactacatccctgtgaagaatggcaagcagttcaccaagcagaatggagagaccccaggcatcatcgccgaggccagcaagtctgaggagagcgtgagccccaagaagcccctcttcctgcagcagcccagcgagtag

SEQ ID NO: 303944 - DNA, 363 bp, Artificial Sequence
  derived and/or modified sequence
atgcccaggaccaagcagatccaccccaggaacctgcgggacaagattgaggaggcccagaaggagctgaatggagctgaggtgtccaagaaggagatcctgcaggccggcgtgaagggcaccagcgagagcctgaagggcgtgaagaggaagaagatcgtggccgagaaccacctgaagaagatccccaagagccccctgaggaaccccctgcaggccaagcacaagcagaacacagaggagagcagctttgctgtgctgcacagcgccagcgagagccacaagaagcagaactacatccctgtgaagaatggcaagcagttcaccaagcagaatggagagaccccaggcatcatcgcctag

SEQ ID NO: 303945 - DNA, 8157 bp, Artificial Sequence
  derived and/or modified sequence
atgccccggaccaagcagatccacccccggaacctgcgggacaagattgaagaggctcagaaggagcttaatggggcggaggttagcaaaaaggagattctgcaagctggcgtgaaagggacaagcgagagcctcaagggagtgaaaagaaaaaagatagtggccgagaaccatttgaaaaagatccccaaatctccactgcgaaacccgctgcaagccaaacacaagcagaacactgaggaatccagttttgccgtgctccactcagctagcgagtctcataaaaaacagaattacattcctgtcaaaaacggaaagcagtttacaaagcagaacggtgagacaccaggcattatcgctgaagccagcaaatctgaagaatcagtgagccctaaaaaaccactgttcttacagcagccatcggagctgaggaggtggagatctgagggagcagatccagccaagttctctgatctggatgaacaatgcgactcctcctccctcagctctaagaccagaactgataactcagagtgcataagctcccactgcgggaccaccagcccaagctatacaaacaccgcctttgatgtgctgctgaaggctatggaaccagaactgtcgacgttgagtcagaagggctccccatgtgctataaaaacagaaaaattgaggcccaataagacagcgaggagccccccgaagctgaaaaactcctctatggatgcccccaaccagaccagtcaggagctcgtggccgaaagccagtcaagttgtacgtcatacactgtacacatgtcggccgcacagaagaacgaacagggcgctatgcagtcagcctcccacctgtaccaccagcatgagcatttcgtccctaagagcaaccagcacaatcagcagctcccgggatgtagtggtttcacaggtagcctgaccaatctgcaaaatcaggaaaatgctaagcttgagcaagtatacaacatcgccgttacttccagtgtcgggctgaccagtccatcgtcccggtcccaggtaaccccacagaaccagcaaatggacagcgccagccccctgtccatttcacctgccaattctacacagtctccacccatgcctatatacaattcaacgcacgtcgcatcggtggtaaaccagagcgtggagcaaatgtgtaacctccttctgaaggatcagaagcctaagaagcaaggcaaatacatctgcgaatactgcaatcgcgcttgcgctaagccatccgtcctgctaaagcacatacgttcccacaccggtgagagaccctatccctgtgtaacttgtggattctctttcaaaaccaaaagcaacctgtataaacacaagaagtcgcacgctcacacaatcaagctggggttagtgttacaacccgacgcggggggcctttttctttctcacgagtcccccaaagccctttccatacacagcgacgtggaagactcaggggagagcgaggaggaaggtgccacggacgagcggcaacatgacctgggggcaatggaactgcaacctgttcacataatcaaacgcatgtccaatgcggagaccctattgaagtcttccttcacaccctcctcaccagaaaacgtgatcggcgacttcctgctgcaggacaggtcagcagagagccaagctgttacagagcttccaaaggtagtggtgcaccatgtgaccgtgtcccccctcaggactgacagccctaaggctatggatcccaaacctgaactctcaagtgcccagaagcaaaaggatctccaagtcactaacgtgcagcctcttagcgctaatatgagccagggaggcgtatcacggctcgagacgaatgaaaattctcatcagaaaggagatatgaatcccttagagggcaaacaggactcccatgtgggcacagtccacgctcagctgcagcgacagcaggctaccgattactctcaagagcaacagggcaaactgctgtctcctcgctcattgggcagcacagatagcggctatttctccagaagcgagtcagcagatcaaactgtttctccaccaaccccattcgccagacgccttccaagcaccgagcaggactccggcagatctaatgggccgtctgccgccctggtgaccactagcacgccatctgctttacccactggtgagaaagcccttcttttacccggccaaatgcgaccaccgctagcaacaaagactcttgaggagagaatctccaagctgatatctgacaacgaagccctcgtcgatgataaacagctggattctgtgaagccgcgacgcacatccctttctcgtagaggcagtatagacagcccgaagtcctacattttcaaagacagttttcagtttgacctcaagccagtcgggcgaagaaccagctcctctagcgatattcccaagagtccgtttactcctaccgaaaagtcgaagcaggtattcctgctctccgtaccatcattggactgtttacccattacccggtcaaatagcatgccaacaaccggatatagtgctgttcccgccaatatcatcccaccacctcatccgctgcgcggcagccagtccttcgacgataagatcgggactttttatgatgatgtctttgtttcagggccaaacgctccagttccccagtcaggccatccccgcactcttgtgcggcaggccgcaatcgaagactcctcagccaacgagtctcacgtgctaggtaccggccagtcgctcgacgagtcacatcaggggtgccacgccgcaggtgaggctatgtcagtgcgaagcaaggcactggctcaagggccacacattgagaaaaaaaagtcacaccagggtcgtggaaccatgttcgaatgcgagacctgtagaaatcgttacagaaagttagagaactttgagaaccacaaaaaattctactgttcagaactgcatggtcctaaaacgaaggtggccatgagagaacccgaacattctcctgtccctggcggactgcagccacagattctccactaccgcgtggccggatcgagcgggatatgggagcagacgccgcagatacgcaagcgccgaaaaatgaagagcgtaggggatgatgaggaattgcagcagaacgagtccggcaccagcccgaagtcttctgaagggctgcaattccagaatgccctgggatgcaatccctctcttccaaagcataacgtcaccattcgttccgatcagcagcataagaatatccagttacagaatagccatattcatctggtggcgcgcggcccggagcagacaatggaccccaagctgtcaaccataatggagcagcagatctctagtgccgctcaggacaagattgagctgcagcgacacggcacaggcattagcgtcattcagcacaccaatagcctttctaggcctaactccttcgataagcctgaaccattcgaacgagcatccccagtgtccttccaggagctcaatcgaacgggcaagtcaggttctctgaaggttatcggaatttcccaggaggaatcccaccccagccgggacggtagccacccccatcagctggcactgagcgacgccctgaggggcgagctgcaggaaagttctagaaaatcaccatcggaaagacatgttttggggcagccttctcggctcgtcaggcagcacaatatacaagtcccagagattctggtgacagaagaacctgaccgggatcttgaggcacagtgtcacgaccaggaaaaaagcgagaagtttagttggcctcagagatccgagactttgagtaagctcccaactgaaaagcttccaccgaagaaaaagcggctgaggctagccgagattgagcacagctcaaccgaatcatccttcgattcaacacttagccgatctctttctagagagtcctcactgagtcatacttccagcttttctgcctcactggacatagaggatgttagcaagactgaagcctcaccaaaaatagactttttgaacaaagccgagttcctcatgatcccggcaggcctcaatacccttaatgtccctggatgccaccgggagatgcggcggaccgcatcggagcagataaactgtacacaaacttctatggaagtctcagatctgaggtctaagtcctttgattgtgggtccattacccctccccagaccacccctcttacagagctgcagcccccttcgagtccttccagggtgggggttactggacatgtgccccttttggaacgacggcgcggccccctggtacgtcagatttcccttaacattgccccggattcacacctgagtcccgtccaccctactagctttcagaacacggccttgccatccgttaatgccgtcccatatcagggcccgcaactaacttctacctctctggctgagtttagtgctaacactttgcacagccagacccaggtgaaggacctgcaggctgagacctctaacagcagttccactaacgtctttcccgtacagcaactgtgtgatatcaacctactgaatcaaattcatgctccgccttctcaccagtctacccagctgagtctgcaggttagtacccaaggctccaaacctgataagaattcagtgctgtcgggatcatcaaagtcagaggactgttttgcgcctaaataccaactccactgtcaggtttttacatccggcccatcctgttcttccaaccctgttcattcacttcccaatcaagtcatcagcgacccagtcggaacagatcactgcgtcacatctgctaccctgcctaccaagctgatcgactccatgtctaatagccatcccctccttccacccgagctccggcccctgggatctcaggttcaaaaggtgccaagttcttttatgctgccaatcagacttcaatcaagcgtcccagcatactgctttgcgaccctgacctcattaccacagatccttgtcacccaggacctaccgaatcagcctatttgtcagaccaatcactccgtggtgcctatttccgaggagcagaacagcgtccctacattacagaagggccaccagaacgcactgcctaatcctgagaaagaattcctatgtgagaacgtattctctgaaatgagccagaattcttccctctctgagagcctccctataactcagaagatttccgtaggaaggctatcacctcagcaagagagcagtgcatcctcaaagcgaatgcttagtcctgccaactccttggacattgctatggagaagcatcagaagcgtgctaaggatgagaatggcgccgtgtgcgcaaccgacgtgagaccactcgaggcactctcctctagggtcaatgaagcctcaaagcagaaaaaacctatcctggtgcgccaggtgtgcactacggagcccttagatggcgttatgttagagaaggacgtctttagccagcccgaaattagcaacgaggccgtgaatcttactaacgtgctcccggccgataacagttctaccgggtgttctaaatttgtcgtgattgaacctatctctgaacttcaggaattcgagaatattaagtcaagcacctccttgactctgaccgtcagaagcagccccgctccttcggagaatacacatatctcacccctgaaatgcactgacaataaccaagagcggaaatctcccggggtgaaaaatcaaggagacaaagtcaacatacaggagcagtctcagcagcctgtaacatccttgtctctgtttaacattaaagacactcagcagctggcctttccctccctcaagactactactaattttacttggtgctacctgctgcggcagaaatcactgcaccttccccagaaggatcaaaaaacctccgcatatacagactggaccgtatctgcaagcaatccaaacccactaggcttgccgacgaaggttgctctggctcttctgaattcaaaacagaacaccgggaagagtttgtattgtcaggcaataacgactcattctaaatcggacctacttgtgtacagcagcaagtggaagagctctttgtcaaaacgggccctcggtaaccagaagtcaacagtggtggaattctcgaacaaggacgcatctgaaataaactcggagcaggataaagaaaattccctcattaaaagcgaaccacgacggattaaaattttcgatggcgggtataagagtaatgaagagtacgtgtatgtgcgcggcaggggacggggaaagtacatctgtgaagaatgtgggattcgatgcaaaaaaccatccatgctgaaaaagcatattcgcactcataccgatgtccggccctaccattgtacttattgcaatttcagttttaaaaccaagggtaacctgacgaaacacatgaagtctaaggcccacagcaaaaagtgcgtcgacctgggagtgtctgtgggtctgatagatgaacaggatacagaggaatcagatgagaaacaacggttctcgtatgaaaggagtgggtacgatctggaggagagtgacgggccagatgaagacgataatgagaacgaagacgacgacgaggattctcaggcggagtcagttctgtcagccactcccagtgtgaccgctagtccacaacacctgcctagccgtagctctctccaggacccagtgagcactgatgaagatgtcagaataaccgactgtttttccggcgtgcatactgatccaatggacgtgttgccccgggcgctgctgaccagaatgaccgttttgagcaccgctcaatccgactataacaggaaaaccctgtctccgggcaaggcaagacaaagggctgcaagagacgagaacgacacaattcccagtgtggatactagccgatctccttgccatcagatgtctgtggactacccagagtctgaagagatcctgcgctcctcaatggccgggaaggccgtcgcaattactcagagtccgagtagtgtgcgcctgcctcctgcggccgcagagcacagcccccagacagctgctggaatgccttctgtcgcgtccccacaccccgacccacaggaacagaagcagcaaatcacactacagcctactcccggtctgccctccccacacacccacctgttttcgcatctccccctgcattcccaacagcagtctagaactccctataacatggttccggtgggaggaatccacgtggttccagccgggctgacgtattctacattcgtccctttgcaggccgggcctgtccaattgactataccagctgtgagtgtagtgcatagaacccttggcacccaccgcaacacagttaccgaggttagtggaaccactaaccccgccggggtcgcagaattatcttcagtggttccgtgcatacccattggacagatacgtgttcccgggctgcagaatctgagcacgcccggattacaatccctgccttctctgtctatggaaacagtcaatattgttggtcttgctaacactaacatggctcctcaggtgcacccaccaggcctcgccctgaatgccgttggtctgcaagtcctgacagccaatcccagctctcaaagttcccccgcgcctcaggcccacatcccgggcctgcagattttgaatatcgctctcccaacactaattccctctgtgagtcaggtggcggtggacgcgcagggtgcccccgagatgcccgcatcacagagcaaggcatgtgaaacacaacccaaacagacctccgtggcttctgcaaaccaggtatccagaaccgaatcgccccagggcctcccgacggtacaaagagagaacgctaagaaagttctgaacccaccagcaccggctggagaccatgccagactggatggactctctaagatggatacggagaaggccgcttccgctaaccacgtgaagcccaagcctgagctgacctccatacagggacagcccgctagcactagccaaccactactgaaggcccacagcgaagtatttactaagccctcaggccagcagactctctctcctgaccggcaggtgcctcgaccaaccgctctgccccggagacaaccaacagtccatttctctgatgtctccagcgatgatgatgaggatcgtctggtgattgcaacttag

SEQ ID NO: 303946 - DNA, 387 bp, Artificial Sequence
  derived and/or modified sequence
atgccccggaccaagcagatccacccccggaacctgcgggacaagatcgaagaggctcagaaagagctaaacggtgcggaagttagtaagaaggaaatcttgcaggccggtgtgaagggcacaagcgagtctctgaagggggtaaaacgcaaaaagattgtggcagaaaaccatctcaaaaaaatcccaaaatctcctttgagaaatcctctgcaggccaaacacaaacaaaataccgaggagtcatccttcgctgtcctccactctgcctcagagagtcacaagaaacaaaattatatccctgtgaaaaatggcaaacaatttaccaagcagaacggagagaccccaggtataattgccgaggctagcaagtccgaggagtcgtag

SEQ ID NO: 303947 - DNA, 429 bp, Artificial Sequence
  derived and/or modified sequence
atgccccggaccaagcagatccacccccggaacctgcgggacaagatcgaggaggcccagaaagaactgaatggggcggaagtgtctaaaaaggaaattctgcaagcgggagtaaagggcacttccgaatcattaaagggtgtgaaaagaaagaaaattgtggccgaaaaccatctgaaaaagatccccaagagcccactcaggaatcctctacaggctaagcacaaacagaatacagaggaaagcagttttgctgtgcttcatagcgcatccgaaagtcacaagaaacagaactatattcccgttaaaaatggcaaacaattcacaaagcagaacggcgagacgcctggtatcatcgcagaggcatccaaatccgaagaaagtgtgtcccccaagaaaccgcttttcctgcagcagccatcagaatag

SEQ ID NO: 303948 - DNA, 363 bp, Artificial Sequence
  derived and/or modified sequence
atgccccggaccaagcagatccacccccggaacctgcgggacaagattgaggaggcccaaaaggagctaaatggagcagaggtttcaaagaaggagatactgcaagcgggggtcaaaggtacctctgaatcattgaagggcgtgaaaaggaaaaaaatcgtcgccgaaaaccaccttaagaagatcccgaagtctcccctgaggaatcccctccaggcgaagcacaagcagaacaccgaagaaagctccttcgcggtgctccacagcgcgtcagagtcccacaaaaagcagaactacatcccagtgaagaacgggaagcaatttacaaagcaaaacggcgagacacctggcattatcgcatag

SEQ ID NO: 303949 - DNA, 8156 bp, Artificial Sequence
  derived and/or modified sequence
atgcccaggacaaaacagatccacccacgcaatctccgcgataaaatcgaggaggctcagaaagagcttaacggtgcagaggtgtcgaaaaaagagatattgcaggctggggtgaaggggacttctgagtccctgaagggcgtgaaacgaaagaagatcgttgccgagaatcacctgaaaaagattcctaagagccctctgaggaatccattgcaggccaagcataagcagaacacagaagaatccagcttcgccgtgcttcacagtgcctctgaatcccataagaagcaaaattatatccccgtcaagaacggaaagcagtttactaagcagaatggcgagactccagggataatcgctgaggcctcgaaatctgaggagtctgtctcccccaagaaacccctgttcctacagcagccgtccgagctccgaaggtggagatccgagggggcagaccctgcgaagttcagtgatctggatgaacagtgtgatagctcatctctgtccagcaaaacccggaccgataacagtgaatgcatctcatctcactgtggcacaacaagtccaagttacactaacaccgcctttgacgtacttctgaaggccatggaacctgagctgagtacactgtctcagaagggcagcccttgtgctattaaaaccgagaaattaaggcctaacaaaaccgctagaagcccccctaaactgaagaactcaagtatggacgcccctaaccaaacgtctcaggagttggtagcagaaagccagtcatcttgcacaagctacaccgtgcacatgtccgctgcacagaaaaacgaacaaggggcaatgcagtccgcgtctcacctgtatcaccagcacgaacacttcgtgcccaagtcgaatcagcacaatcagcagctgcccggatgtagtggatttactgggtccctcaccaacctccagaatcaagagaatgcaaaactcgaacaggtatacaatatagctgtgactagctccgtcggactcacaagtcccagttcaaggtctcaagtgacaccccagaatcagcagatggacagtgccagccctctcagcatcagtcctgcaaacagcacccagtccccgccaatgccgatttacaactctacccacgttgccagcgtcgtcaatcagtccgtagagcagatgtgtaatctgcttttgaaagaccagaaacccaaaaaacaggggaagtacatttgcgagtattgtaatcgcgcttgtgccaagccgtcagtccttcttaagcacatccgctcccataccggtgagcggccatatccttgtgtgacatgcgggttctcattcaagacgaaaagtaatctttacaagcacaaaaaatcacatgcccacacaattaagctggggctggtgctgcagcctgatgctggcggactatttctgagtcatgaatctcccaaagctctgtccatccatagtgacgtggaggattcaggagaaagcgaagaggagggtgccaccgatgaacgacaacacgatcttggagctatggagctacagcccgtgcacattattaaacgcatgtcgaatgctgagaccttactgaagagttcttttacgccaagttcaccagagaacgtgatcggggatttcctgctgcaggaccgctcagccgaatcccaagctgttactgaactgccaaaggtggtcgtgcatcacgtgacggtctccccgctcagaactgattccccaaaggctatggatccaaagcctgagctctcttctgcccaaaagcagaaagatttgcaagtaaccaacgtgcaacctttgagtgctaatatgtcacagggtggcgtctcccgcctggagacaaacgaaaactcgcaccagaagggagatatgaaccctttagagggaaagcaggactctcatgtcgggacagtgcatgcacagctccagagacaacaggcgactgattactcgcaggagcagcagggcaagctattgagtcccagaagcttggggtccaccgattcagggtacttctcccggagcgagagcgctgaccagacagtgtctcccccaacaccttttgccagaagactgccttctaccgagcaggatagcggccgaagcaatggccctagcgcagcactcgtgacaacttccaccccatccgcgcttcccactggggagaaggccctgttattaccaggccagatgagaccaccattggccacaaaaaccctggaagaaaggatctctaagctgatctccgacaacgaggctctggtcgatgacaaacagctggatagcgtgaagccacggcgaacttccttatcaagacggggatccattgattcgccaaaatcatacattttcaaagatagttttcaattcgacctgaagccggtcggcagacgcacatcctcatcctccgacatccctaagagtccctttaccccaacagaaaagagcaaacaagttttcctgctgtctgtcccttctctggactgcctgcctataacccggagtaactccatgccaacgacagggtatagtgcagttccagccaacattatcccgccaccgcatcctctccgtgggagccagtcttttgacgacaagattgggacgttctatgatgacgtttttgtctccggtccgaacgcccctgttccacaaagcggacatcccagaaccttggtccgccaagccgctatcgaggattcctccgccaacgaatcccatgtgctggggaccgggcagtccctggacgaatcccaccagggctgtcacgctgcgggagaagccatgtctgttcgtagtaaagctctggcacagggccctcacattgagaaaaaaaagtcacaccaggggagggggaccatgttcgaatgcgagacctgtcggaatcggtatcgcaaactggaaaatttcgagaaccacaagaagttttactgctctgagctgcatgggcctaaaacaaaggtagctatgcgcgagcccgagcactcacccgttcctgggggactgcagccccagattttgcactaccgtgtagctgggtcaagcggcatttgggaacaaacaccacagattaggaagcgtcgcaagatgaaatccgttggcgatgatgaggagctccagcagaacgaatccggcaccagtccaaaatccagcgaaggtctgcagttccaaaacgctctgggatgtaacccgtcactgccaaagcacaacgtgaccattaggtctgatcagcagcataaaaacatacaattgcagaattctcatattcatctcgtggccagaggcccagagcagactatggatccaaagctcagcacaatcatggagcagcagatctcatctgccgctcaggacaaaattgaactgcagagacatggaaccggcattagtgtcatccaacacaccaatagcctgtcccgaccgaactcatttgataagccagagccctttgagcgggctagcccagtgtctttccaagagctgaatagaaccggcaagtctggtagtctgaaagtaattggcatatctcaggaggagagccatccctcaagagatggctcccaccctcaccagctggccttgagtgatgcattacgcggagagctgcaggaatcttcccgcaaaagcccatctgaacgtcacgtactgggtcagccctcgcgccttgtgcggcagcataatatccaggtgcccgagatccttgttactgaggagcccgacagagatttagaagctcagtgccatgatcaggagaaatccgagaaattctcctggccgcaacgcagcgaaaccttaagcaagttgcctaccgaaaagttaccccctaagaagaaacgactgcggcttgcagagatagagcactcaagcactgagagcagctttgacagcacactgtcccggtctctgtctcgcgagtcatctctaagccacacaagttccttcagtgcttcacttgatatagaagatgtatccaaaacagaggcgtccccgaaaattgacttcttaaacaaagccgaattcctgatgattcctgccggactgaataccctcaatgttcctggctgccaccgggagatgcggaggactgcatctgaacagataaactgtactcagaccagcatggaggtatcagatttgagatccaaatccttcgattgtggttcaataacccctcctcagaccacacctcttacagaattacagcctccttcctcgccgtccagagtcggcgtcaccggtcacgttcctctcctggagcggagacggggacccttggtgcgccagattagcctcaatattgcacccgattctcatctttctcccgtgcatccgacatcatttcagaatactgctctgcccagcgtcaacgccgtgccatatcagggcccacagctgacatccacatctcttgccgaattctccgccaacacccttcattctcagacgcaggtaaaggacttgcaagccgagaccagtaattcttcttccactaatgtgttccccgtacaacaactctgcgacatcaacctgctgaaccagatccacgctccaccttctcatcaatctacccagctgtctttgcaagtctcgacgcagggatctaagcctgataagaattcagtgctatccgggtcttctaagagcgaggattgctttgcccctaagtatcagctacattgccaagtctttacttcaggaccttcctgctcctctaatcccgtacacagcttgccaaaccaggtgatctctgaccctgtgggtaccgatcactgtgtgacttccgccaccctgcctacaaaactgatagactccatgtctaattcccatcctcttctgccacccgaacttcggccactcggttcacaggtgcagaaagtaccatctagctttatgctcccaattagactgcaatcttccgtgcccgcttactgttttgccacattaacgtcactgccccagatcttagtgacccaggatctgccaaatcagccaatctgtcaaacaaaccactccgtagttcctataagtgaagaacagaattcagtcccaacactccagaaaggccaccagaatgccttgcccaatcctgagaaggagtttttgtgcgaaaatgtcttctccgaaatgtcacaaaactccagtttgtctgaaagtttgcctattacccaaaaaatttccgtcggcaggctatcacctcaacaagagtcctccgcctctagtaagcggatgcttagccctgcaaactcactggatatagctatggagaagcaccaaaagagggcaaaagacgaaaacggcgctgtgtgtgctacagacgtgagacctcttgaggcactctcttcccgtgtgaacgaagcgtctaaacagaagaaaccgatcttggtacggcaggtgtgtaccacagagcctcttgatggcgtgatgctggagaaggatgttttttctcagccagagataagcaacgaagctgtgaatttgactaacgtgctccccgcagataatagtagcactggctgctccaagtttgtggtaatagagccaatttccgaattgcaggagttcgaaaacatcaagtcgtcaacctctctgactcttacagttaggagcagccctgccccatctgagaatacccatattagcccactgaagtgtacagacaacaaccaggagagaaaatcccccggtgtcaaaaaccagggcgacaaagtgaacatccaggagcagtcacagcagccagtcacctctctgtcactttttaacataaaggacacccagcagttagccttccccagcctcaaaaccacaacaaattttacttggtgctatctcctgagacagaaatccctccatctaccacaaaaagaccagaagacttcagcctacaccgattggacagtcagcgcgagcaatcctaatcctctgggacttccaaccaaagttgcattggcgttgctcaactctaagcagaacactgggaagtccctatattgtcaggcaatcactactcacagcaagtctgatctgctggtgtattcttcaaagtggaaaagctcattgagtaaacgcgctctgggaaatcaaaaatccacggtggtagaattcagcaacaaagatgcctctgaaataaacagtgagcaggacaaagagaattctttgatcaaaagtgaacctaggcggatcaagatcttcgatggcggatacaaatccaatgaggaatatgtgtacgtacgcggacggggtcgaggcaaatacatatgtgaagagtgcgggataagatgcaaaaaaccctccatgctcaaaaagcacatccgcactcatacagatgtgaggccttatcattgcacgtattgcaatttttcgtttaagactaagggaaatctgacgaaacatatgaaatctaaggctcattcaaagaagtgtgttgatcttggcgtgagtgtgggactgatagacgaacaggacactgaggagtccgacgaaaaacagcgcttcagctatgagcggtctggctatgacctcgaagagtctgatggccctgatgaagacgacaatgaaaacgaggacgacgatgaagattctcaggctgaatccgtcctatcagccactccttctgtcacagccagccctcagcacctgcccagcaggtcttcactgcaggatccagttagcaccgatgaggatgttagaatcacggattgtttctccggtgtccataccgaccctatggatgtgttgcctcgcgcattgctaacccggatgacagtgctgtccaccgcacagtcagactataaccgaaaaacactttctcctggcaaagctcggcagagggctgcgagagatgagaatgatacaataccaagcgtggacacatccaggtctccatgtcatcagatgtctgtggactaccccgagtcagaggagatcctgagaagctctatggccggtaaagccgttgctatcactcagtccccaagctcagttcgcctgccgcctgcggcagcggagcacagcccacagaccgcagccggaatgccctctgtcgcaagcccacacccggacccacaagagcagaagcagcagattactctccagccaacacccggactcccttccccacacacccatctgtttagccacctgcctctccatagccagcagcagtcccggactccttataatatggtgccagttggcggtatccacgttgtgcctgccggtctgacttactcgaccttcgttccactgcaagccggtcccgttcagcttacaatccccgcagtcagtgtggtgcatagaaccctggggacacatagaaatactgttactgaagtgagtggtacaaccaatcccgctggggttgcagagctgagctctgttgtcccttgtatcccaattggtcagatccgggtgcctggcttgcagaacctgtcaacgccaggccttcagtctttgccttcgctcagcatggagacagtcaatattgtgggtctggcaaacaccaatatggctcctcaagttcatccaccgggactggcgctgaatgccgtcggcctccaggtgttgacggccaatccctccagtcagagctccccagcaccccaggcccatattcccggactgcagattctcaatatcgctctgcctaccctgatccctagcgtgtctcaggttgctgttgatgcccagggcgctcccgaaatgccagcatcccagtctaaagcttgtgaaacacagccgaaacagacctccgtcgcctccgctaaccaggttagccgcaccgagagccctcaaggccttcccacggtgcagcgggagaacgccaagaaggtgttaaaccctcccgctcccgcaggtgaccatgcgcgacttgatgggctgtctaagatggatacagagaaagccgcttctgccaaccacgtcaaacccaagcctgagttaacctccatccagggccagcccgcttctacttctcaaccactgctaaaagctcattccgaggtattcaccaaacccagcggccagcagacactgtctcccgatagacaggtaccacggccaacggcactgcccagaaggcagccaaccgtgcatttcagtgatgtctcgagtgacgatgatgaggatcgtcttgttatcgccacata

SEQ ID NO: 303950 - DNA, 387 bp, Artificial Sequence
  derived and/or modified sequence
atgccacgtaccaagcagattcatcccaggaacctgagagataagatagaggaggctcagaaagaactgaacggagccgaagtctcaaagaaagagatcttgcaggcaggtgtcaaaggcacttctgagagcctaaaaggggtaaagagaaaaaaaatcgtggcagagaatcatctgaaaaagattcctaaatcccctctgcgaaaccctctgcaggccaagcataagcaaaacacagaggaatccagtttcgccgttttacactcggcaagcgagtctcacaagaaacagaattacatccctgtcaagaacgggaaacagttcactaagcaaaacggtgagacacctggcatcatcgcagaggctagtaagtcagaggagtcctag

SEQ ID NO: 303951 - DNA, 429 bp, Artificial Sequence
  derived and/or modified sequence
atgccacgaacaaagcagattcacccgcgaaatctaagagacaagatcgaggaggcacagaaggaactaaatggtgccgaggtgtccaagaaggaaatactccaggcaggtgtgaagggcacaagcgaaagcctgaagggcgtgaaacgaaagaagatagtggcagagaatcacctgaagaaaatccctaagtcgcctctacggaaccccctccaggcaaagcacaagcagaacaccgaggagagctccttcgccgtactccacagcgcgtctgagtcacacaaaaaacagaactatattcccgtaaaaaatggaaagcagtttacaaagcagaacggcgaaacgcccggaatcatcgcagaggcttcaaaatccgaggagagcgtctcacctaagaagcccctcttccttcagcagccctctgaatag

SEQ ID NO: 303952 - DNA, 363 bp, Artificial Sequence
  derived and/or modified sequence
atgccacgcaccaagcaaatccacccacgaaatctgagagacaagattgaagaagcccagaaggaactgaatggagccgaggtgtcaaagaaagagattttgcaagctggcgtgaaaggaacaagtgaaagtttgaaaggcgtgaagcggaagaagattgtcgccgagaaccacttgaagaagatcccaaagagcccgttgcggaatcctctgcaggcaaaacacaaacagaatactgaggaaagcagcttcgcagtgctgcatagcgctagcgagagtcacaagaagcaaaactacatccctgtgaaaaatgggaagcaatttacaaagcaaaacggggaaactcccggaattatcgcatag

SEQ ID NO: 303953 - DNA, 8157 bp, Artificial Sequence
  derived and/or modified sequence
atgcccagaaccaagcagatccaccccagaaacctgagagacaagatcgaggaggcccagaaggagctgaacggcgccgaggtgagcaagaaggagatcctgcaggccggcgtgaagggcaccagcgagagcctgaagggcgtgaagagaaagaagatcgtggccgagaaccacctgaagaagatccccaagagccccctgagaaaccccctgcaggccaagcacaagcagaacaccgaggagagcagcttcgccgtgctgcacagcgccagcgagagccacaagaagcagaactacatccccgtgaagaacggcaagcagttcaccaagcagaacggcgagacccccggcatcatcgccgaggccagcaagagcgaggagagcgtgagccccaagaagcccctgttcctgcagcagcccagcgagctgagaagatggagaagcgagggcgccgaccccgccaagttcagcgacctggacgagcagtgcgacagcagcagcctgagcagcaagaccagaaccgacaacagcgagtgcatcagcagccactgcggcaccaccagccccagctacaccaacaccgccttcgacgtgctgctgaaggccatggagcccgagctgagcaccctgagccagaagggcagcccctgcgccatcaagaccgagaagctgagacccaacaagaccgccagaagcccccccaagctgaagaacagcagcatggacgcccccaaccagaccagccaggagctggtggccgagagccagagcagctgcaccagctacaccgtgcacatgagcgccgcccagaagaacgagcagggcgccatgcagagcgccagccacctgtaccaccagcacgagcacttcgtgcccaagagcaaccagcacaaccagcagctgcccggctgcagcggcttcaccggcagcctgaccaacctgcagaaccaggagaacgccaagctggagcaggtgtacaacatcgccgtgaccagcagcgtgggcctgaccagccccagcagcagaagccaggtgaccccccagaaccagcagatggacagcgccagccccctgagcatcagccccgccaacagcacccagagcccccccatgcccatctacaacagcacccacgtggccagcgtggtgaaccagagcgtggagcagatgtgcaacctgctgctgaaggaccagaagcccaagaagcagggcaagtacatctgcgagtactgcaacagagcctgcgccaagcccagcgtgctgctgaagcacatcagaagccacaccggcgagagaccctacccctgcgtgacctgcggcttcagcttcaagaccaagagcaacctgtacaagcacaagaagagccacgcccacaccatcaagctgggcctggtgctgcagcccgacgccggcggcctgttcctgagccacgagagccccaaggccctgagcatccacagcgacgtggaggacagcggcgagagcgaggaggagggcgccaccgacgagagacagcacgacctgggcgccatggagctgcagcccgtgcacatcatcaagagaatgagcaacgccgagaccctgctgaagagcagcttcacccccagcagccccgagaacgtgatcggcgacttcctgctgcaggacagaagcgccgagagccaggccgtgaccgagctgcccaaggtggtggtgcaccacgtgaccgtgagccccctgagaaccgacagccccaaggccatggaccccaagcccgagctgagcagcgcccagaagcagaaggacctgcaggtgaccaacgtgcagcccctgagcgccaacatgagccagggcggcgtgagcagactggagaccaacgagaacagccaccagaagggcgacatgaaccccctggagggcaagcaggacagccacgtgggcaccgtgcacgcccagctgcagagacagcaggccaccgactacagccaggagcagcagggcaagctgctgagccccagaagcctgggcagcaccgacagcggctacttcagcagaagcgagagcgccgaccagaccgtgagcccccccacccccttcgccagaagactgcccagcaccgagcaggacagcggcagaagcaacggccccagcgccgccctggtgaccaccagcacccccagcgccctgcccaccggcgagaaggccctgctgctgcccggccagatgagaccccccctggccaccaagaccctggaggagagaatcagcaagctgatcagcgacaacgaggccctggtggacgacaagcagctggacagcgtgaagcccagaagaaccagcctgagcagaagaggcagcatcgacagccccaagagctacatcttcaaggacagcttccagttcgacctgaagcccgtgggcagaagaaccagcagcagcagcgacatccccaagagccccttcacccccaccgagaagagcaagcaggtgttcctgctgagcgtgcccagcctggactgcctgcccatcaccagaagcaacagcatgcccaccaccggctacagcgccgtgcccgccaacatcatcccccccccccaccccctgagaggcagccagagcttcgacgacaagatcggcaccttctacgacgacgtgttcgtgagcggccccaacgcccccgtgccccagagcggccaccccagaaccctggtgagacaggccgccatcgaggacagcagcgccaacgagagccacgtgctgggcaccggccagagcctggacgagagccaccagggctgccacgccgccggcgaggccatgagcgtgagaagcaaggccctggcccagggcccccacatcgagaagaagaagagccaccagggcagaggcaccatgttcgagtgcgagacctgcagaaacagatacagaaagctggagaacttcgagaaccacaagaagttctactgcagcgagctgcacggccccaagaccaaggtggccatgagagagcccgagcacagccccgtgcccggcggcctgcagccccagatcctgcactacagagtggccggcagcagcggcatctgggagcagaccccccagatcagaaagagaagaaagatgaagagcgtgggcgacgacgaggagctgcagcagaacgagagcggcaccagccccaagagcagcgagggcctgcagttccagaacgccctgggctgcaaccccagcctgcccaagcacaacgtgaccatcagaagcgaccagcagcacaagaacatccagctgcagaacagccacatccacctggtggccagaggccccgagcagaccatggaccccaagctgagcaccatcatggagcagcagatcagcagcgccgcccaggacaagatcgagctgcagagacacggcaccggcatcagcgtgatccagcacaccaacagcctgagcagacccaacagcttcgacaagcccgagcccttcgagagagccagccccgtgagcttccaggagctgaacagaaccggcaagagcggcagcctgaaggtgatcggcatcagccaggaggagagccaccccagcagagacggcagccacccccaccagctggccctgagcgacgccctgagaggcgagctgcaggagagcagcagaaagagccccagcgagagacacgtgctgggccagcccagcagactggtgagacagcacaacatccaggtgcccgagatcctggtgaccgaggagcccgacagagacctggaggcccagtgccacgaccaggagaagagcgagaagttcagctggccccagagaagcgagaccctgagcaagctgcccaccgagaagctgccccccaagaagaagagactgagactggccgagatcgagcacagcagcaccgagagcagcttcgacagcaccctgagcagaagcctgagcagagagagcagcctgagccacaccagcagcttcagcgccagcctggacatcgaggacgtgagcaagaccgaggccagccccaagatcgacttcctgaacaaggccgagttcctgatgatccccgccggcctgaacaccctgaacgtgcccggctgccacagagagatgagaagaaccgccagcgagcagatcaactgcacccagaccagcatggaggtgagcgacctgagaagcaagagcttcgactgcggcagcatcacccccccccagaccacccccctgaccgagctgcagccccccagcagccccagcagagtgggcgtgaccggccacgtgcccctgctggagagaagaagaggccccctggtgagacagatcagcctgaacatcgcccccgacagccacctgagccccgtgcaccccaccagcttccagaacaccgccctgcccagcgtgaacgccgtgccctaccagggcccccagctgaccagcaccagcctggccgagttcagcgccaacaccctgcacagccagacccaggtgaaggacctgcaggccgagaccagcaacagcagcagcaccaacgtgttccccgtgcagcagctgtgcgacatcaacctgctgaaccagatccacgccccccccagccaccagagcacccagctgagcctgcaggtgagcacccagggcagcaagcccgacaagaacagcgtgctgagcggcagcagcaagagcgaggactgcttcgcccccaagtaccagctgcactgccaggtgttcaccagcggccccagctgcagcagcaaccccgtgcacagcctgcccaaccaggtgatcagcgaccccgtgggcaccgaccactgcgtgaccagcgccaccctgcccaccaagctgatcgacagcatgagcaacagccaccccctgctgccccccgagctgagacccctgggcagccaggtgcagaaggtgcccagcagcttcatgctgcccatcagactgcagagcagcgtgcccgcctactgcttcgccaccctgaccagcctgccccagatcctggtgacccaggacctgcccaaccagcccatctgccagaccaaccacagcgtggtgcccatcagcgaggagcagaacagcgtgcccaccctgcagaagggccaccagaacgccctgcccaaccccgagaaggagttcctgtgcgagaacgtgttcagcgagatgagccagaacagcagcctgagcgagagcctgcccatcacccagaagatcagcgtgggcagactgagcccccagcaggagagcagcgccagcagcaagagaatgctgagccccgccaacagcctggacatcgccatggagaagcaccagaagagagccaaggacgagaacggcgccgtgtgcgccaccgacgtgagacccctggaggccctgagcagcagagtgaacgaggccagcaagcagaagaagcccatcctggtgagacaggtgtgcaccaccgagcccctggacggcgtgatgctggagaaggacgtgttcagccagcccgagatcagcaacgaggccgtgaacctgaccaacgtgctgcccgccgacaacagcagcaccggctgcagcaagttcgtggtgatcgagcccatcagcgagctgcaggagttcgagaacatcaagagcagcaccagcctgaccctgaccgtgagaagcagccccgcccccagcgagaacacccacatcagccccctgaagtgcaccgacaacaaccaggagagaaagagccccggcgtgaagaaccagggcgacaaggtgaacatccaggagcagagccagcagcccgtgaccagcctgagcctgttcaacatcaaggacacccagcagctggccttccccagcctgaagaccaccaccaacttcacctggtgctacctgctgagacagaagagcctgcacctgccccagaaggaccagaagaccagcgcctacaccgactggaccgtgagcgccagcaaccccaaccccctgggcctgcccaccaaggtggccctggccctgctgaacagcaagcagaacaccggcaagagcctgtactgccaggccatcaccacccacagcaagagcgacctgctggtgtacagcagcaagtggaagagcagcctgagcaagagagccctgggcaaccagaagagcaccgtggtggagttcagcaacaaggacgccagcgagatcaacagcgagcaggacaaggagaacagcctgatcaagagcgagcccagaagaatcaagatcttcgacggcggctacaagagcaacgaggagtacgtgtacgtgagaggcagaggcagaggcaagtacatctgcgaggagtgcggcatcagatgcaagaagcccagcatgctgaagaagcacatcagaacccacaccgacgtgagaccctaccactgcacctactgcaacttcagcttcaagaccaagggcaacctgaccaagcacatgaagagcaaggcccacagcaagaagtgcgtggacctgggcgtgagcgtgggcctgatcgacgagcaggacaccgaggagagcgacgagaagcagagattcagctacgagagaagcggctacgacctggaggagagcgacggccccgacgaggacgacaacgagaacgaggacgacgacgaggacagccaggccgagagcgtgctgagcgccacccccagcgtgaccgccagcccccagcacctgcccagcagaagcagcctgcaggaccccgtgagcaccgacgaggacgtgagaatcaccgactgcttcagcggcgtgcacaccgaccccatggacgtgctgcccagagccctgctgaccagaatgaccgtgctgagcaccgcccagagcgactacaacagaaagaccctgagccccggcaaggccagacagagagccgccagagacgagaacgacaccatccccagcgtggacaccagcagaagcccctgccaccagatgagcgtggactaccccgagagcgaggagatcctgagaagcagcatggccggcaaggccgtggccatcacccagagccccagcagcgtgagactgccccccgccgccgccgagcacagcccccagaccgccgccggcatgcccagcgtggccagcccccaccccgacccccaggagcagaagcagcagatcaccctgcagcccacccccggcctgcccagcccccacacccacctgttcagccacctgcccctgcacagccagcagcagagcagaaccccctacaacatggtgcccgtgggcggcatccacgtggtgcccgccggcctgacctacagcaccttcgtgcccctgcaggccggccccgtgcagctgaccatccccgccgtgagcgtggtgcacagaaccctgggcacccacagaaacaccgtgaccgaggtgagcggcaccaccaaccccgccggcgtggccgagctgagcagcgtggtgccctgcatccccatcggccagatcagagtgcccggcctgcagaacctgagcacccccggcctgcagagcctgcccagcctgagcatggagaccgtgaacatcgtgggcctggccaacaccaacatggccccccaggtgcacccccccggcctggccctgaacgccgtgggcctgcaggtgctgaccgccaaccccagcagccagagcagccccgccccccaggcccacatccccggcctgcagatcctgaacatcgccctgcccaccctgatccccagcgtgagccaggtggccgtggacgcccagggcgcccccgagatgcccgccagccagagcaaggcctgcgagacccagcccaagcagaccagcgtggccagcgccaaccaggtgagcagaaccgagagcccccagggcctgcccaccgtgcagagagagaacgccaagaaggtgctgaacccccccgcccccgccggcgaccacgccagactggacggcctgagcaagatggacaccgagaaggccgccagcgccaaccacgtgaagcccaagcccgagctgaccagcatccagggccagcccgccagcaccagccagcccctgctgaaggcccacagcgaggtgttcaccaagcccagcggccagcagaccctgagccccgacagacaggtgcccagacccaccgccctgcccagaagacagcccaccgtgcacttcagcgacgtgagcagcgacgacgacgaggacagactggtgatcgccacctag

SEQ ID NO: 303954 - DNA, 387 bp, Artificial Sequence
  derived and/or modified sequence
atgcccagaaccaagcagatccaccccagaaacctgagagacaagatcgaggaggcccagaaggagctgaacggcgccgaggtgagcaagaaggagatcctgcaggccggcgtgaagggcaccagcgagagcctgaagggcgtgaagagaaagaagatcgtggccgagaaccacctgaagaagatccccaagagccccctgagaaaccccctgcaggccaagcacaagcagaacaccgaggagagcagcttcgccgtgctgcacagcgccagcgagagccacaagaagcagaactacatccccgtgaagaacggcaagcagttcaccaagcagaacggcgagacccccggcatcatcgccgaggccagcaagagcgaggagagctag

SEQ ID NO: 303955 - DNA, 429 bp, Artificial Sequence
  derived and/or modified sequence
atgcccagaaccaagcagatccaccccagaaacctgagagacaagatcgaggaggcccagaaggagctgaacggcgccgaggtgagcaagaaggagatcctgcaggccggcgtgaagggcaccagcgagagcctgaagggcgtgaagagaaagaagatcgtggccgagaaccacctgaagaagatccccaagagccccctgagaaaccccctgcaggccaagcacaagcagaacaccgaggagagcagcttcgccgtgctgcacagcgccagcgagagccacaagaagcagaactacatccccgtgaagaacggcaagcagttcaccaagcagaacggcgagacccccggcatcatcgccgaggccagcaagagcgaggagagcgtgagccccaagaagcccctgttcctgcagcagcccagcgagtag

SEQ ID NO: 303956 - DNA, 363 bp, Artificial Sequence
  derived and/or modified sequence
atgcccagaaccaagcagatccaccccagaaacctgagagacaagatcgaggaggcccagaaggagctgaacggcgccgaggtgagcaagaaggagatcctgcaggccggcgtgaagggcaccagcgagagcctgaagggcgtgaagagaaagaagatcgtggccgagaaccacctgaagaagatccccaagagccccctgagaaaccccctgcaggccaagcacaagcagaacaccgaggagagcagcttcgccgtgctgcacagcgccagcgagagccacaagaagcagaactacatccccgtgaagaacggcaagcagttcaccaagcagaacggcgagacccccggcatcatcgcctag

SEQ ID NO: 303957 - protein, 700 aa, Artificial Sequence
  derived and/or modified sequence
GDKFSFQRALGNQKSTVVEFSNKDASEINSEQDKENSLIKSEPRRIKIFDGGYKSNEEYVYVRGRGRGKYICEECGIRCKKPSMLKKHIRTHTDVRPYHCTYCNFSFKTKGNLTKHMKSKAHSKKCVDLGVSVGLIDEQDTEESDEKQRFSYERSGYDLEESDGPDEDDNENEDDDEDSQAESVLSATPSVTASPQHLPSRSSLQDPVSTDEDVRITDCFSGVHTDPMDVLPRALLTRMTVLSTAQSDYNRKTLSPGKARQRAARDENDTIPSVDTSRSPCHQMSVDYPESEEILRSSMAGKAVAITQSPSSVRLPPAAAEHSPQTAAGMPSVASPHPDPQEQKQQITLQPTPGLPSPHTHLFSHLPLHSQQQSRTPYNMVPVGGIHVVPAGLTYSTFVPLQAGPVQLTIPAVSVVHRTLGTHRNTVTEVSGTTNPAGVAELSSVVPCIPIGQIRVPGLQNLSTPGLQSLPSLSMETVNIVGLANTNMAPQVHPPGLALNAVGLQVLTANPSSQSSPAPQAHIPGLQILNIALPTLIPSVSQVAVDAQGAPEMPASQSKACETQPKQTSVASANQVSRTESPQGLPTVQRENAKKVLNPPAPAGDHARLDGLSKMDTEKAASANHVKPKPELTSIQGQPASTSQPLLKAHSEVFTKPSGQQTLSPDRQVPRPTALPRRQPTVHFSDVSSDDDEDRLVIAT

SEQ ID NO: 303958 - DNA, 333 bp, Artificial Sequence
  derived and/or modified sequence
atgtcctgtcaacagtcacagcagcagtgtcagccgcctccaaagtgcacacccaaatgccctcccaaatgccctacgccaaagtgcccacccaagtgtccgccaaaatgccctcccgtctcatcctgctgcagcgtgagtagtggcggatgctgcggttcatcatctgggggagggtgctcaagcggcggtggcggatgctgtttgtctcaccatcggagacaccgctcgcaccgccaccgcctccaatctagcggatgttgctcccagccgtccggcggtagcagttgttgtggaggtgactccgggcagcacagcggtggctgttgttag

SEQ ID NO: 303959 - protein, 583 aa, Artificial Sequence
  derived and/or modified sequence
MLKKHIRTHTDVRPYHCTYCNFSFKTKDEKQRFSYERSGYDLEESDGPDEDDNENEDDDEDSQAESVLSATPSVTASPQHLPSRSSLQDPVSTDEDVRITDCFSGVHTDPMDVLPRALLTRMTVLSTAQSDYNRKTLSPGKARQRAARDENDTIPSVDTSRSPCHQMSVDYPESEEILRSSMAGKAVAITQSPSSVRLPPAAAEHSPQTAAGMPSVASPHPDPQEQKQQITLQPTPGLPSPHTHLFSHLPLHSQQQSRTPYNMVPVGGIHVVPAGLTYSTFVPLQAGPVQLTIPAVSVVHRTLGTHRNTVTEVSGTTNPAGVAELSSVVPCIPIGQIRVPGLQNLSTPGLQSLPSLSMETVNIVGLANTNMAPQVHPPGLALNAVGLQVLTANPSSQSSPAPQAHIPGLQILNIALPTLIPSVSQVAVDAQGAPEMPASQSKACETQPKQTSVASANQVSRTESPQGLPTVQRENAKKVLNPPAPAGDHARLDGLSKMDTEKAASANHVKPKPELTSIQGQPASTSQPLLKAHSEVFTKPSGQQTLSPDRQVPRPTALPRRQPTVHFSDVSSDDDEDRLVIAT

SEQ ID NO: 303960 - DNA, 1752 bp, Artificial Sequence
  derived and/or modified sequence
atgctgaaaaaacacattcgcacacacaccgacgtgcggccctaccactgcacttattgcaattttagcttcaagacgaaggatgagaaacagcgcttcagttacgaaaggtcggggtacgatctagaagagtccgacggccccgacgaggatgacaatgagaatgaggacgacgatgaggattctcaggctgagagtgtgcttagcgccaccccatccgtaacagcttctccccaacatctaccttcgaggtcctccctgcaggaccccgtttctacagatgaagacgtgagaataaccgactgcttttctggagtgcacactgacccgatggacgttttgcccagggcactcctcaccagaatgacggtgctgagcaccgctcagagtgactacaataggaagacactttcacctggcaaagcccgccagcgagctgctagggatgagaatgataccatcccgtcagtcgatacttcccgatctccctgccaccaaatgagcgttgattaccctgagagcgaagagatccttagatccagcatggctggcaaggctgtcgcaatcacacagtctccttcctctgtccgcctccctccagcagccgctgaacattccccgcagaccgcggctgggatgccttctgtggccagtccgcaccccgacccgcaggagcagaaacagcaaattacccttcaacctacaccaggcttgccttccccgcatacacacttgtttagccatttgccactgcactcccagcaacagtctcgtaccccatacaacatggtgcccgtcggggggatccacgtggtgcccgcagggttgacttactccactttcgtgcccttgcaggctggccctgtacagttgaccattccagctgtcagcgtggtgcaccgcacactcggcacacatcggaacaccgtgaccgaagtatcgggcaccacaaacccagcaggcgtagccgagctatcgtcggtggtgccttgtattccgattggccagataagagtccctggtctgcaaaacttatctacacctgggctccagagcctaccctccctgtccatggagaccgtgaacatagtcggactggctaacacaaacatggcaccacaggtgcacccacccgggctcgcgctcaatgcagtcggacttcaggtcttgacagccaatccctcttcccagtcatcgcctgccccgcaggcccacattccaggacttcaaatcttgaacatcgccctgcccaccctcatcccttccgtctctcaggtcgccgtagacgctcaaggggccccggagatgcccgccagccagtccaaggcgtgcgaaactcagcccaaacaaacttctgtggcctccgccaatcaagtcagccgcaccgaatcgccgcaggggctccctactgtgcagcgggaaaacgcaaagaaagtgctgaatccaccagctcctgccggagatcatgcacggctggacggcctctctaaaatggacacggagaaggctgcctccgcaaatcacgtgaagcctaagccagagctgacctcaatccaaggccagcctgcttctacaagccagcctctgctcaaggctcacagcgaggtgttcaccaaaccatctgggcaacagactttgtcacctgatagacaggtgccccggcccaccgctctgccgcggcgccaacccacagtccactttagcgatgtgagttctgacgacgatgaggatagactcgtaattgctacatag

SEQ ID NO: 303961 - DNA, 2103 bp, Artificial Sequence
  derived and/or modified sequence
ggtgacaaatttagcttccagagggccctcggaaaccaaaagagcaccgtggtggagttttcgaataaggacgcttctgagattaactctgaacaggataaagaaaactccttgatcaagagcgagccgcgcagaattaagatctttgatgggggatataaatcgaacgaagagtatgtgtatgtcagaggtagagggcgcggcaagtacatctgtgaagaatgcggaatccgctgcaaaaaaccttcaatgctcaaaaaacacatcaggacacacacagatgttaggccgtatcattgcacgtactgcaacttctctttcaagaccaaaggaaatctcactaaacatatgaaatccaaagcccactccaagaaatgcgtcgacttgggcgtatcggttggcctcattgacgagcaggacacggaggaatccgatgaaaaacaaaggttctcctacgaacgctctgggtatgatctggaggagagtgatggaccggatgaggacgacaatgaaaacgaggacgacgacgaggattctcaggcggagtcagtcctttcagcaaccccctccgtgacagcgtctcctcaacacctaccctctagaagtagcctgcaggatcccgtgtctactgatgaagacgtgcgtatcacggattgcttctcaggcgtccacactgatcctatggacgtcctccctcgagcgctcctcactagaatgaccgtcctgtccacagcccagtccgactacaataggaaaacattgtccccggggaaggcccgtcaaagggctgcgagagacgaaaatgacacgattcccagtgttgacacgtcccgtagcccatgccatcagatgagtgtcgactaccctgaaagcgaagagatcctaagatccagtatggccggcaaagccgtagccataacccagagcccctcaagcgtgcgtttgccacccgccgctgctgagcactcacctcaaactgcggctggcatgcccagcgtggcctcccctcacccggaccctcaggagcagaaacagcagataacacttcagccaacaccgggattaccctcaccacacactcacctgttcagccacctaccactgcacagtcaacaacagagccggaccccatacaatatggttcctgtgggtggcatacacgtcgttccagcagggctcacatatagcacgtttgtccctctccaagccgggcctgtacagctgacaatccccgccgtgagcgtcgtgcaccgaaccttaggcacccaccggaacacagtcacagaagtcagcgggaccactaacccggcaggtgtagccgagctgagcagtgttgttccctgcatccctatcggacagattcgggtaccagggctgcagaacctgtccaccccagggctgcagagtcttccctctctcagtatggagacggtcaacatcgtggggttggcaaacacgaatatggcccctcaggttcatccccctggtctggcgctgaatgcagtgggcttacaggtgttgacagcgaacccatcttcgcagagcagccccgccccacaggctcacattccggggctccaaatcctaaatattgcgcttccaacactgattcccagcgtaagtcaggtggccgtagatgctcagggcgctccggaaatgccggccagccagagtaaagcctgcgagacacagcccaaacaaactagtgtggcctctgccaaccaggtgtctaggaccgagtcaccccaagggctcccaacagttcaacgcgagaatgccaaaaaagtcctgaatcctcccgcacctgctggtgatcacgcccgcttagacggactgtccaaaatggataccgagaaagcggcctccgcgaaccacgtcaaaccaaaaccagaactgacctccattcagggccagcccgcttcaactagccagccattgctaaaggctcattccgaagtctttaccaaacctagcgggcagcagacgctgtcaccagaccgccaggtacctagacctactgctctaccccggcgccaacctacagtccacttcagcgatgtgagcagcgacgatgatgaggatcgattggtgatcgccacctag

SEQ ID NO: 303962 - DNA, 2085 bp, Artificial Sequence
  derived and/or modified sequence
ttgcacttgctctccttaattcaaaacagaacactggaaaatcactatactgtcaagcaataactacccattccaagtcagacttattggtctattcaagcaagtggaaaagcagcttaagcaagatataagtcaaatgaagagtatgtatatgtccgaggcaggggaagaggaaaatacatttgtgaagaatgtggaatacgttgtaagaaacctagcatgttaaagaaacacatacgaacccatacagatgtccgcccctaccactgcacttactgtaacttctcctttaagactaaagatgaaaaacagagattcagttatgagcgatctggatatgatcttgaagaatctgatggcccagatgaggatgacaatgaaaatgaagacgatgatgaggacagccaggctgaatcagtcctgtcagccacaccctcagtcacagctagcccgcagcaccttccatctagaagtagccttcaggaccctgtgagtactgacgaggatgtcaggatcaccgattgcttttctggggtacacacggacccaatggacgttctgcccagggcgctgctcaccagaatgactgtcctgagcacagcacagtctgactacaataggaagacactctctccggggaaggccaggcagcgtgctgcgagagatgaaaacgacacaattccgtctgtagacacttccaggtccccgtgtcatcagatgtctgtggactaccctgagtcagaagaaattctgagaagttctatggcaggaaaagctgttgctataacacagagcccatcatctgtaagacttcctcctgctgcagctgagcacagcccccagacagcagcggggatgccttctgtggcctcaccacatcctgaccctcaagaacagaagcagcaaataactctacagccgactccaggcttgccttctccccacactcatttgtttagccaccttcctttgcattcccagcagcaatcgaggacaccttataatatggttccagttggggggatccatgtggtacctgctggcctcacatactccacgtttgtgccccttcaggctggaccagtgcagctcacgatccctgctgtcagtgtcgttcacagaactttgggtactcataggaatacggtcacagaagtgtctggcactacaaaccctgctggagtggctgaattaagcagtgttgtgccatgtattcctatcggccaaatccgcgtgccaggccttcagaacctaagtaccccaggcttgcagtcactcccctcgttaagcatggaaaccgtcaatattgtaggcctagccaatacaaatatggccccacaagtccatccaccaggactggctctgaatgctgtcggactgcaggttctgactgcaaacccttcatcacaaagcagccccgcccctcaggcacacattccaggtctccagatcttgaacatagcattgcccaccttaatcccctcagtcagtcaagtagccgttgatgcacagggagctccagaaatgccagcttcccaaagcaaagcatgcgagacacaacccaagcagacttctgtagccagcgcaaaccaggtcagcaggaccgagtctcctcaggggttacctacagtccagcgggaaaatgcaaaaaaagttctgaatccacctgcccctgcaggtgaccatgcaaggcttgatggcctgagtaaaatggacacagagaaggctgcctcggcaaatcacgtgaagcccaagcctgaactcacttccatacagggccaaccagcgtccacgtcacaacctctgctgaaggcacattctgaagtttttacaaagccctcaggccagcagactctctctccagacagacaggttcccaggcccacagcactaccgcggaggcagcccactgtgcacttcagcgacgtgagcagcgatgatgacgaggacaggcttgtgatagcaacctgatggattttattttttatttgctttttttttatataacacttaaaggtttctttgaaaaccctcctttccttaaagcacatttttctgacataaactcatgactaatctttgtgc

SEQ ID NO: 303963 - DNA, 2640 bp, Artificial Sequence
  derived and/or modified sequence
ggagataaattttcctttcagagagcattaggtaatcaaaagtccacagtagttgaattcagcaataaagatgcctctgaaattaacagtgagcaagataaagaaaattccttaatcaaaagtgaaccaagaagaattaaaatatttgatggaggatataagtcaaatgaagagtatgtatatgtccgaggcaggggaagaggaaaatacatttgtgaagaatgtggaatacgttgtaagaaacctagcatgttaaagaaacacatacgaacccatacagatgtccgcccctaccactgcacttactgtaacttctcctttaagactaaaggaaatctgacaaaacacatgaagtccaaggcacatagcaagaaatgtgtggatttaggcgtctcagtaggtttaatagatgaacaggatacagaagaatcagatgaaaaacagagattcagttatgagcgatctggatatgatcttgaagaatctgatggcccagatgaggatgacaatgaaaatgaagacgatgatgaggacagccaggctgaatcagtcctgtcagccacaccctcagtcacagctagcccgcagcaccttccatctagaagtagccttcaggaccctgtgagtactgacgaggatgtcaggatcaccgattgcttttctggggtacacacggacccaatggacgttctgcccagggcgctgctcaccagaatgactgtcctgagcacagcacagtctgactacaataggaagacactctctccggggaaggccaggcagcgtgctgcgagagatgaaaacgacacaattccgtctgtagacacttccaggtccccgtgtcatcagatgtctgtggactaccctgagtcagaagaaattctgagaagttctatggcaggaaaagctgttgctataacacagagcccatcatctgtaagacttcctcctgctgcagctgagcacagcccccagacagcagcggggatgccttctgtggcctcaccacatcctgaccctcaagaacagaagcagcaaataactctacagccgactccaggcttgccttctccccacactcatttgtttagccaccttcctttgcattcccagcagcaatcgaggacaccttataatatggttccagttggggggatccatgtggtacctgctggcctcacatactccacgtttgtgccccttcaggctggaccagtgcagctcacgatccctgctgtcagtgtcgttcacagaactttgggtactcataggaatacggtcacagaagtgtctggcactacaaaccctgctggagtggctgaattaagcagtgttgtgccatgtattcctatcggccaaatccgcgtgccaggccttcagaacctaagtaccccaggcttgcagtcactcccctcgttaagcatggaaaccgtcaatattgtaggcctagccaatacaaatatggccccacaagtccatccaccaggactggctctgaatgctgtcggactgcaggttctgactgcaaacccttcatcacaaagcagccccgcccctcaggcacacattccaggtctccagatcttgaacatagcattgcccaccttaatcccctcagtcagtcaagtagccgttgatgcacagggagctccagaaatgccagcttcccaaagcaaagcatgcgagacacaacccaagcagacttctgtagccagcgcaaaccaggtcagcaggaccgagtctcctcaggggttacctacagtccagcgggaaaatgcaaaaaaagttctgaatccacctgcccctgcaggtgaccatgcaaggcttgatggcctgagtaaaatggacacagagaaggctgcctcggcaaatcacgtgaagcccaagcctgaactcacttccatacagggccaaccagcgtccacgtcacaacctctgctgaaggcacattctgaagtttttacaaagccctcaggccagcagactctctctccagacagacaggttcccaggcccacagcactaccgcggaggcagcccactgtgcacttcagcgacgtgagcagcgatgatgacgaggacaggcttgtgatagcaacctgatggattttattttttatttgctttttttttatataacacttaaaggtttctttgaaaaccctcctttccttaaagcacatttttctgacataaactcatgactaatctttgtgcaatcatgaacttttgaccaataattgttgttttgtgtcagctccagccatttttgtacatgttgtatagacaattgtgccttttaggagctttatgtttagaaactgtacagattgttgaatatctatatacataaaaatatattatatatgtatatgaaaaccaggtagttatttgtgtttagtaaggaaaacctgtcaaataaatcaaatgattaaattatatgttccactgttgaatataaattttatggctatggggcagagtttctgtgtataaattagtatgtaaactccatatttattgtattcatattagtctttgaaaatgggtctgtcctccttgtgtaagacagtaactttacacttcagacagattttctgtgttatgaaatgtttcagtaaaatattgtttactgacttt

SEQ ID NO: 303964 - DNA, 1752 bp, Artificial Sequence
  derived and/or modified sequence
atgctgaagaagcacatccgcacccacacagatgtgcggccctaccactgcacctactgcaacttctccttcaagaccaaggatgagaagcagcgcttctcctatgaaagaagtggctatgacctggaggagagtgatggcccagatgaagatgacaatgaaaatgaagatgatgatgaggacagccaggccgagagcgtgctgagcgccaccccatctgtgacagccagcccccagcacctgcccagccgcagcagcctgcaggaccctgtgtccacagatgaagatgtgcgcatcacagactgcttcagcggcgtgcacacagaccccatggatgtgctgccccgggccctgctgaccaggatgacagtgctgagcacagcccagagcgactacaacaggaagaccctgagccctgggaaggcccggcagagagctgccagagatgaaaatgacaccatccccagcgtggacaccagccgcagcccctgccaccagatgtctgtggactacccagagagcgaggagatcctgcggagctccatggccggcaaggctgtggccatcacccagagccccagctctgtgcggctgcccccagctgctgctgagcacagcccccagacagctgctggcatgcccagcgtggccagcccccacccagacccccaggagcagaagcagcagatcaccctgcagcccaccccaggcctgcccagcccccacacccacctgttcagccacctgcccctgcacagccagcagcagagcaggaccccctacaacatggtgcctgtgggcggcatccacgtggtgcctgctggcctgacctacagcacctttgtgcccctgcaggccggccctgtgcagctgaccatcccagctgtgtctgtggtgcacaggaccctgggcacccacaggaacacagtgacagaggtgtctggcaccaccaacccagctggggtggccgagctgagctctgtggtgccctgcatccccatcggccagatccgggtgcccggcctgcagaacctgagcaccccaggcctgcagagcctgcccagcctgtccatggagaccgtgaacatcgtgggcctggccaacaccaacatggccccccaggtgcaccccccaggcctggccctgaatgctgtgggcctgcaggtgctgacagccaaccccagcagccagagcagccctgccccccaggcccacatccctggcctgcagatcctgaacatcgccctgcccaccctcatccccagcgtgtcccaggtggccgtggatgcccagggcgcccctgagatgcctgccagccagagcaaggcctgtgagacccagcccaagcagacctctgtggccagcgccaaccaggtgtccaggacagagagcccccagggcctgcccaccgtgcagcgggagaatgccaagaaggtgctgaaccccccagccccagctggggaccacgcccggctggatggcctgagcaagatggacacagagaaggccgccagcgccaaccacgtgaagcccaagccagagctgaccagcatccagggccagcctgccagcaccagccagcccctgctgaaggcccacagcgaggtgttcaccaagcccagcggccagcagaccctgagcccagaccggcaggtgccccggcccacagccctgccccggcggcagcccaccgtgcacttcagtgatgtgtccagtgatgatgatgaggaccggctggtgattgccacctag

SEQ ID NO: 303965 - DNA, 2103 bp, Artificial Sequence
  derived and/or modified sequence
ggggacaagttctccttccagagggccctgggcaaccagaagagcacagtggtggagttcagcaacaaggatgccagcgagatcaacagcgagcaggacaaggagaacagcctcatcaagtctgagccccggcgcatcaagatctttgatggcggctacaagagcaatgaggagtatgtgtatgtgcggggccggggccggggcaagtacatctgtgaggagtgtggcatccgctgcaagaagcccagcatgctgaagaagcacatccgcacccacacagatgtgcggccctaccactgcacctactgcaacttctccttcaagaccaagggcaacctgaccaagcacatgaagagcaaggcccacagcaagaagtgtgtggacctgggcgtgtctgtgggcctgattgatgagcaggacacagaggagagtgatgagaagcagcgcttctcctatgaaagaagtggctatgacctggaggagagtgatggcccagatgaagatgacaatgaaaatgaagatgatgatgaggacagccaggccgagagcgtgctgagcgccacccccagcgtgacagccagcccccagcacctgcccagccgcagcagcctgcaggaccctgtgtccacagatgaagatgtgcgcatcacagactgcttctctggagtgcacacagaccccatggatgtgctgccccgggccctgctgaccaggatgacagtgctgagcacagcccagagcgactacaacaggaagaccctgagccctgggaaggcccggcagagagctgccagagatgaaaatgacaccatccccagcgtggacaccagccgcagcccctgccaccagatgtctgtggactacccagagagcgaggagatcctgcggagctccatggccggcaaggctgtggccatcacccagagccccagctctgtgcggctgcccccagctgctgctgagcacagcccccagacagctgctggcatgcccagcgtggccagcccccacccagacccccaggagcagaagcagcagatcaccctgcagcccaccccaggcctgcccagcccccacacccacctgttcagccacctgcccctgcacagccagcagcagagcaggaccccctacaacatggtgcctgtgggcggcatccacgtggtgcctgctggcctgacctacagcacctttgtgcccctgcaggccggccctgtgcagctgaccatcccagctgtgtctgtggtgcacaggaccctgggcacccacaggaacacagtgacagaggtgtctggcaccaccaacccagctggggtggccgagctgagctctgtggtgccctgcatccccatcggccagatccgggtgcccggcctgcagaacctgagcaccccaggcctgcagagcctgcccagcctgtccatggagaccgtgaacatcgtgggcctggccaacaccaacatggccccccaggtgcaccccccaggcctggccctgaatgctgtgggcctgcaggtgctgacagccaaccccagcagccagagcagccctgccccccaggcccacatccctggcctgcagatcctgaacatcgccctgcccaccctcatccccagcgtgtcccaggtggccgtggatgcccagggcgcccctgagatgcctgccagccagagcaaggcctgtgagacccagcccaagcagacctctgtggccagcgccaaccaggtgtccaggacagagagcccccagggcctgcccaccgtgcagagagaaaatgccaagaaggtgctgaaccccccagccccagctggggaccacgcccggctggatggcctgagcaagatggacacagagaaggccgccagcgccaaccacgtgaagcccaagccagagctgaccagcatccagggccagcctgccagcaccagccagcccctgctgaaggcccacagcgaggtgttcaccaagcccagcggccagcagaccctgagcccagaccggcaggtgccccggcccacagccctgccccggcggcagcccaccgtgcacttcagtgatgtgtccagtgatgatgatgaagatcggctggtgattgccacctag

SEQ ID NO: 303966 - DNA, 1752 bp, Artificial Sequence
  derived and/or modified sequence
atgctgaagaagcacatccggacccacaccgacgtgcggccctaccactgtacatactgcaatttttcttttaagaccaaggacgagaagcagaggttctcttacgagcgatccggctacgaccttgaagagtccgatggaccagacgaggacgacaacgaaaacgaagatgacgacgaggattcccaagctgagtccgtgctcagcgccactccatctgtgacagcctctcctcaacacctccccagccgcagctccctgcaagaccctgtgtctactgatgaggacgtaaggattaccgattgtttctctggggtgcacacagaccccatggatgtgcttccacgcgctttgttaaccaggatgactgtgctgtcaacggcgcagagcgattacaaccggaagactcttagtcccggaaaggcccgccagcgagccgctcgagatgaaaatgacaccatccctagtgtcgatacaagtcgctccccctgtcatcagatgtccgtcgattatccagagtctgaggaaatcctgcgttcttcaatggctgggaaagctgtcgcgataacgcagtccccctcttcagtccgcctgcccccagccgctgcggaacactctccccagactgccgctgggatgccgtcagtggctagccctcacccggatcctcaggaacaaaagcagcaaatcacccttcagcccacccctggcctgccctccccacatacccatctgttcagccatctgcccttgcatagtcagcagcaatctagaacgccctataacatggttcctgtcgggggaatccacgtcgtaccagcgggactgacgtactctactttcgtccccctgcaagctgggcccgtacaacttaccatccctgccgtgtccgtggttcatcgaacacttggcactcataggaatacagtcacagaagtgtctggtacaactaatcctgccggtgttgccgagttgtcttcagtggtcccatgcattcccatcggacaaatccgcgtacccggacttcagaatctttccacacccgggctgcagtcactgccgagcctttccatggagactgtcaacatcgtgggtttggccaacaccaacatggccccacaagtgcacccccccggcctggccctgaatgccgtagggttgcaagtcctgaccgctaatccttcgtctcaaagtagtcccgccccccaggcccacatacccggactgcagattctgaatattgcccttccaacgttgattcctagtgtatcacaggtggctgttgatgctcagggagcgcctgaaatgcctgcatctcagtcaaaggcttgtgagacccagccgaaacaaactagcgtcgcttcagccaaccaggtcagccggactgaatcaccccaaggcctgccaactgtgcaacgcgaaaacgccaaaaaggtcctgaaccccccagcgcctgctggggatcacgcccggttggacgggctctctaagatggacaccgaaaaagctgccagcgcaaaccatgtgaaacccaagcctgagctgacctccattcaaggccagcccgccagcacaagtcaacccttgcttaaagctcattcagaagtctttacaaaaccttccggccaacagaccctgtccccagacagacaggtgccaaggccgacggcactgcccagacgacaaccaactgtgcacttctccgacgtatcatcagacgatgacgaggatagactggtgatcgccacctag

SEQ ID NO: 303967 - DNA, 2103 bp, Artificial Sequence
  derived and/or modified sequence
ggcgacaagttcagcttccagcgggccctgggcaaccagaagagcacggtcgtggaattcagcaataaggacgctagtgaaattaactcagaacaagataaagagaattctttgattaaatcagaaccccggcggatcaaaatttttgatggcggatataagtccaacgaggagtacgtgtacgtgcggggccggggtagaggcaaatacatctgtgaggaatgtggaatacgatgcaaaaaaccctccatgttgaagaaacacatccgtactcataccgatgttcgcccataccactgtacctattgtaatttcagtttcaaaactaaaggtaatctcactaaacacatgaagtccaaggcccacagcaagaaatgcgtggacctgggtgtcagcgttgggctcattgacgaacaagataccgaggaaagcgacgagaaacagagattctcctacgagcgctctgggtatgatctggaggaatctgacggacctgacgaagatgataacgagaatgaggacgatgatgaggattctcaagccgaatctgtgctcagcgctaccccgtctgtcactgcctcccctcagcatctcccaagtcgcagctctctgcaagatcccgtgtctaccgatgaggatgtccggatcactgactgctttagtggagtccatacggaccctatggacgtattgcctcgggcgttactgactaggatgactgtcttgtctacagcgcagagcgactataatcgcaagactctgtcacccggcaaggctcggcaaagggccgccagagatgagaatgatacaatcccttccgtggacacatcccgaagcccatgccaccagatgtcggtggattaccccgagtcggaggaaatactgcgatcatctatggcgggcaaggcggtggcgatcactcagtctccctcctcagtccggttgccacctgccgcagcagagcacagcccacaaaccgccgctgggatgccttccgtggcttctccccatcccgatcctcaagagcagaaacaacagatcacactgcagccaactccgggactcccaagcccacatacacacctgtttagccatctccctctccactctcagcagcagtccagaacaccgtacaatatggtgcctgtcgggggcattcacgttgtgccagctggccttacctatagcacgttcgtgccacttcaggcgggaccagtacagctgacgattccagcagtcagtgtggtgcaccgcacgctgggcactcacagaaacacggtaaccgaggtttctggcaccactaaccccgccggagtcgcagaactctcaagcgtcgtgccttgtatcccaattggccagataagggtacctgggctccagaatttgtcgacacctggcctgcagagcctcccatccttgtctatggagacagtgaacatcgtcggcctcgccaacaccaatatggctcctcaggtgcatcctcccgggctggccctaaacgctgttgggctacaagtccttacggccaatccctctagtcagagctctcccgccccccaagcccacattcccggcttgcaaattcttaatatcgccctgccaactctgattccttctgtgagccaggtggctgtggacgcacagggtgctcctgagatgccagcatctcagagcaaggcttgtgagacccagcctaaacagacctccgttgcttcagccaaccaggtctcccgcacagagtctccacaaggcctgcctactgtgcagagggagaatgctaaaaaggtcctgaacccccctgctcccgctggtgaccatgcccggttggatgggctgagtaaaatggacacagagaaagccgcctctgccaaccacgttaagcctaaaccagaactaaccagtatccagggacagcccgcctctactagccagccgctactgaaagcccacagcgaggtgttcaccaagccgtccggccagcagacattgtctcccgataggcaagtgccaaggcctaccgctctgcccagacgacagcctacggttcatttctccgacgtgtccagtgacgatgatgaggatagattagttattgcaacctag

SEQ ID NO: 303968 - DNA, 1752 bp, Artificial Sequence
  derived and/or modified sequence
atgcttaagaaacacatacgtacccacaccgacgtcagaccatatcactgtacttactgtaacttctcattcaagacgaaagacgaaaagcagcgattcagctacgagcgttctggttatgaccttgaagagagcgatggaccggacgaggacgataacgaaaatgaggacgatgacgaagatagccaagcggagtctgttctgagtgccactccttccgtgactgcatcacctcagcacctgccgtctaggtcatcactccaagatcccgtaagtactgacgaggatgtcaggataacagattgcttctccggggtccacaccgacccaatggatgtcttgccgagggcgctactgaccagaatgaccgtgttgtccactgcccagagcgattacaatcgaaagaccctatctcctggcaaggcacgtcagcgagccgctcgggacgagaacgacacaataccttccgtggacacctcacgctccccgtgccatcagatgagcgttgactacccggaaagcgaagagatcctgagatctagcatggcaggcaaggcagtggccatcactcagtctcctagctccgtgaggctgccacccgctgccgcagagcactccccgcagacagcagctgggatgccgagcgtggcaagccctcaccccgatccccaggagcaaaagcagcagattactctccaacccacaccaggcctgccttctccgcacactcacctgttttctcacttacccctgcactctcaacagcagagcaggaccccctacaatatggtaccagtgggcggaatacacgtggtacccgctgggctaacatattctactttcgttccattgcaggccggtcccgtgcagctcaccattccagctgtcagtgtggtccaccgcacactcggaacgcatcgcaatactgtgaccgaggtgtccggaaccacaaaccccgcaggagtggccgagctatcctccgtggtaccttgcattcctatcgggcagattagagtacctggcctgcaaaacctgtccacccccggacttcagtcactgccatcactgagcatggagacggtcaacatagtcggcttggccaacacaaatatggctcctcaagtgcatccaccgggtcttgccctgaacgccgtgggcctgcaagtgctaaccgccaatccatcaagtcagtctagcccagctcctcaggcccacattcccggtctgcagattctgaacatcgcgctccctaccttgataccttccgtgtcacaggtggccgtagatgctcaaggcgcacctgaaatgcctgctagtcaatctaaggcttgtgagactcagcccaaacagacctctgtggcctccgccaaccaagtgtcaaggaccgaaagccctcagggcctgccgaccgttcaaagggagaacgcgaaaaaagtgctgaatccaccagctcccgcaggcgaccatgcgaggctggacggtctctcgaagatggatacggagaaggcggcttcagctaaccacgtgaaacccaaacccgagcttacttccattcaggggcagccagcctcaacgtctcagccactgctgaaggcccattccgaagtgtttacaaagccaagcggacagcagaccctgagtccagaccgccaagtgccaaggccgaccgccctgcctcgacggcaaccaacggtgcacttctccgacgtgagttctgacgatgacgaagaccgattggtaattgccacctag

SEQ ID NO: 303969 - DNA, 2103 bp, Artificial Sequence
  derived and/or modified sequence
ggggataagttctcattccaaagagccctggggaatcagaagagcactgtcgttgaattctccaataaggacgcctccgaaatcaattccgagcaggataaggaaaatagtctcattaaaagtgagcctcgcagaattaaaatcttcgatggtggttacaaatctaacgaagagtatgtttacgtgaggggaagaggccgaggaaagtatatctgcgaggaatgcggcataagatgtaaaaagccttcaatgctcaaaaaacacattcgaacacacaccgacgtgcgcccttaccactgcacgtattgcaacttctcttttaaaaccaagggtaacttgactaaacacatgaaatccaaagcgcacagcaagaagtgtgtcgatctgggagtctcagtcggacttattgatgagcaagataccgaggaatccgatgaaaaacagcgtttttcatatgagaggtcgggctatgacctcgaggaaagtgatggtcctgatgaggacgacaatgagaacgaagacgacgacgaagattctcaggctgagtccgtgctcagtgctaccccctccgtgacggcctcacctcagcacctccccagccggagttccctgcaggacccagtatctactgacgaagacgtgcggattacagattgtttctcaggcgtccatacggacccaatggacgtgctgccccgagctctactaactcgcatgacagtgttatccactgcacaaagtgactataaccggaaaactctctcgcctgggaaggctaggcagcgcgctgctcgtgatgaaaatgatactatcccatccgtggacacatccaggtcgccttgtcaccagatgagtgttgactacccagaaagtgaggagattttgcgcagcagtatggccggaaaagctgttgccatcacacaatcaccgtcatctgttcgccttcccccagccgctgctgagcactcccctcaaacagccgctgggatgccttcagtggcctccccacatccagatccgcaggagcagaaacaacaaatcactttacagcccactccaggtctacctagcccccacactcaccttttttcacaccttcctttgcatagccagcagcagtcacggacaccatacaatatggtgcccgtgggcggtattcacgtggtcccggcaggtctcacctattctacatttgtgcccttgcaggcaggccctgtacaactcacaataccggcagtctccgtggtgcaccgtaccctgggcactcatcgtaatacagtgacagaggtgtctgggaccactaaccccgcaggcgtagctgagctttcctcggtggtcccctgcatacccatcgggcagattcgtgtgcctggattacaaaacctgagtactcctgggctgcagtctttaccctccttgtctatggagacagttaatattgtaggcttggccaataccaacatggctcctcaggtccaccccccaggtctggctttaaatgccgtgggcttacaggtgctgaccgctaacccgtctagccagtcatctcctgcccctcaggctcacataccgggactgcagatccttaacatcgccctccccacactgattccttctgtgtctcaagtcgcagttgatgcccagggagctcccgaaatgccggcatcgcagtccaaagcctgtgagactcagccaaagcaaacatctgtcgcatctgccaatcaggtctcccgaactgagagcccacaaggcttgcccacggtgcagagagaaaatgccaagaaggtgctcaaccctccagcacccgctggcgaccatgccagactggacgggctttccaaaatggacactgagaaggccgctagcgccaatcacgttaaacctaagcctgagctgacgtctattcaaggacaacccgcatccacatcacagcctctcttaaaggcacactccgaagtcttcacaaaaccatcaggccaacaaacactgtccccagacaggcaggtgcctcgacctacggctctacctcgacgccagccgacagtgcacttttccgatgtgagttctgatgacgacgaggaccgtctggtgattgccacctag

SEQ ID NO: 303970 - DNA, 1752 bp, Artificial Sequence
  derived and/or modified sequence
atgctgaagaagcacatcagaacccacaccgacgtgagaccctaccactgcacctactgcaacttcagcttcaagaccaaggacgagaagcagagattcagctacgagagaagcggctacgacctggaggagagcgacggccccgacgaggacgacaacgagaacgaggacgacgacgaggacagccaggccgagagcgtgctgagcgccacccccagcgtgaccgccagcccccagcacctgcccagcagaagcagcctgcaggaccccgtgagcaccgacgaggacgtgagaatcaccgactgcttcagcggcgtgcacaccgaccccatggacgtgctgcccagagccctgctgaccagaatgaccgtgctgagcaccgcccagagcgactacaacagaaagaccctgagccccggcaaggccagacagagagccgccagagacgagaacgacaccatccccagcgtggacaccagcagaagcccctgccaccagatgagcgtggactaccccgagagcgaggagatcctgagaagcagcatggccggcaaggccgtggccatcacccagagccccagcagcgtgagactgccccccgccgccgccgagcacagcccccagaccgccgccggcatgcccagcgtggccagcccccaccccgacccccaggagcagaagcagcagatcaccctgcagcccacccccggcctgcccagcccccacacccacctgttcagccacctgcccctgcacagccagcagcagagcagaaccccctacaacatggtgcccgtgggcggcatccacgtggtgcccgccggcctgacctacagcaccttcgtgcccctgcaggccggccccgtgcagctgaccatccccgccgtgagcgtggtgcacagaaccctgggcacccacagaaacaccgtgaccgaggtgagcggcaccaccaaccccgccggcgtggccgagctgagcagcgtggtgccctgcatccccatcggccagatcagagtgcccggcctgcagaacctgagcacccccggcctgcagagcctgcccagcctgagcatggagaccgtgaacatcgtgggcctggccaacaccaacatggccccccaggtgcacccccccggcctggccctgaacgccgtgggcctgcaggtgctgaccgccaaccccagcagccagagcagccccgccccccaggcccacatccccggcctgcagatcctgaacatcgccctgcccaccctgatccccagcgtgagccaggtggccgtggacgcccagggcgcccccgagatgcccgccagccagagcaaggcctgcgagacccagcccaagcagaccagcgtggccagcgccaaccaggtgagcagaaccgagagcccccagggcctgcccaccgtgcagagagagaacgccaagaaggtgctgaacccccccgcccccgccggcgaccacgccagactggacggcctgagcaagatggacaccgagaaggccgccagcgccaaccacgtgaagcccaagcccgagctgaccagcatccagggccagcccgccagcaccagccagcccctgctgaaggcccacagcgaggtgttcaccaagcccagcggccagcagaccctgagccccgacagacaggtgcccagacccaccgccctgcccagaagacagcccaccgtgcacttcagcgacgtgagcagcgacgacgacgaggacagactggtgatcgccacctag

SEQ ID NO: 303971 - DNA, 2103 bp, Artificial Sequence
  derived and/or modified sequence
ggcgacaagttcagcttccagagagccctgggcaaccagaagagcaccgtggtggagttcagcaacaaggacgccagcgagatcaacagcgagcaggacaaggagaacagcctgatcaagagcgagcccagaagaatcaagatcttcgacggcggctacaagagcaacgaggagtacgtgtacgtgagaggcagaggcagaggcaagtacatctgcgaggagtgcggcatcagatgcaagaagcccagcatgctgaagaagcacatcagaacccacaccgacgtgagaccctaccactgcacctactgcaacttcagcttcaagaccaagggcaacctgaccaagcacatgaagagcaaggcccacagcaagaagtgcgtggacctgggcgtgagcgtgggcctgatcgacgagcaggacaccgaggagagcgacgagaagcagagattcagctacgagagaagcggctacgacctggaggagagcgacggccccgacgaggacgacaacgagaacgaggacgacgacgaggacagccaggccgagagcgtgctgagcgccacccccagcgtgaccgccagcccccagcacctgcccagcagaagcagcctgcaggaccccgtgagcaccgacgaggacgtgagaatcaccgactgcttcagcggcgtgcacaccgaccccatggacgtgctgcccagagccctgctgaccagaatgaccgtgctgagcaccgcccagagcgactacaacagaaagaccctgagccccggcaaggccagacagagagccgccagagacgagaacgacaccatccccagcgtggacaccagcagaagcccctgccaccagatgagcgtggactaccccgagagcgaggagatcctgagaagcagcatggccggcaaggccgtggccatcacccagagccccagcagcgtgagactgccccccgccgccgccgagcacagcccccagaccgccgccggcatgcccagcgtggccagcccccaccccgacccccaggagcagaagcagcagatcaccctgcagcccacccccggcctgcccagcccccacacccacctgttcagccacctgcccctgcacagccagcagcagagcagaaccccctacaacatggtgcccgtgggcggcatccacgtggtgcccgccggcctgacctacagcaccttcgtgcccctgcaggccggccccgtgcagctgaccatccccgccgtgagcgtggtgcacagaaccctgggcacccacagaaacaccgtgaccgaggtgagcggcaccaccaaccccgccggcgtggccgagctgagcagcgtggtgccctgcatccccatcggccagatcagagtgcccggcctgcagaacctgagcacccccggcctgcagagcctgcccagcctgagcatggagaccgtgaacatcgtgggcctggccaacaccaacatggccccccaggtgcacccccccggcctggccctgaacgccgtgggcctgcaggtgctgaccgccaaccccagcagccagagcagccccgccccccaggcccacatccccggcctgcagatcctgaacatcgccctgcccaccctgatccccagcgtgagccaggtggccgtggacgcccagggcgcccccgagatgcccgccagccagagcaaggcctgcgagacccagcccaagcagaccagcgtggccagcgccaaccaggtgagcagaaccgagagcccccagggcctgcccaccgtgcagagagagaacgccaagaaggtgctgaacccccccgcccccgccggcgaccacgccagactggacggcctgagcaagatggacaccgagaaggccgccagcgccaaccacgtgaagcccaagcccgagctgaccagcatccagggccagcccgccagcaccagccagcccctgctgaaggcccacagcgaggtgttcaccaagcccagcggccagcagaccctgagccccgacagacaggtgcccagacccaccgccctgcccagaagacagcccaccgtgcacttcagcgacgtgagcagcgacgacgacgaggacagactggtgatcgccacctag

SEQ ID NO: 303972 - protein, 246 aa, Artificial Sequence
  derived and/or modified sequence
MASAGRSEGTAGGGAGPEEPRREEGRAGLSPSSPPGSHSMRYFYTSVSRPGRGEPRFISVGYVDDTQFVRFDSDAASPREEPRAPWIEQEGPEYWDRNTQIYKAQAQTDRESLRNLRGYYNQSEAGSHTLQSMYGCDVGPDGRLLRGHDQYAYDGKDYIALNEDLRSWTAADTAAQITQRKWEAAREAEQRRAYLEGECVEWLRRYLENGKDKLERADPPKTHVTHHPISDHEATLRCWALGFYPA

SEQ ID NO: 303973 - protein, 202 aa, Artificial Sequence
  derived and/or modified sequence
MYGCDVGPDGRLLRGHDQYAYDGKDYIALNEDLRSWTAADTAAQITQRKWEAAREAEQRRAYLEGECVEWLRRYLENGKDKLERADPPKTHVTHHPISDHEATLRCWALGFYPAEITLTWQRDGEDQTQDTELVETRPAGDRTFQKWAAVVVPSGEEQRYTCHVQHEGLPKPLTLRWGGKGGSYSQAACSDSAQGSDVSLTA

SEQ ID NO: 303974 - DNA, 345 bp, Artificial Sequence
  derived and/or modified sequence
atgacccaccaccccatcagcgaccacgaggccaccctgagatgctgggccctgggcttctaccccgccgagatcaccctgacctggcagagagacggcgaggaccagacccaggacaccgagctggtggagaccagacccgccggcgacggcaccttccagaagtgggccgccgtggtggtgcccagcggcgaggagcagagatacacctgccacgtgcagcacgagggcctgcccaagcccctgaccctgagatgggacagaaagggcggcagctacacccaggccgccagcagcgacagcgcccagggcagcgacgtgagcctgaccgcctgcaaggtgtag

SEQ ID NO: 303975 - DNA, 678 bp, Artificial Sequence
  derived and/or modified sequence
tgaatgctggtgatggcccccagaaccgtgctgctgctgctgagcgccgccctggccctgaccgagacctgggccggcagccacagcatgagatacttctacaccagcgtgagcagacccggcagaggcgagcccagattcatcagcgtgggctacgtggacgacacccagttcgtgagattcgacagcgacgccgccagccccagagaggagcccagagccccctggatcgagcaggagggccccgagtactgggacagaaacacccagatctacaaggcccaggcccagaccgacagagagagcctgagaaacctgagaggctactacaaccagagcgaggccggcagccacaccctgcagagcatgtacggctgcgacgtgggccccgacggcagactgctgagaggccacgaccagtacgcctacgacggcaaggactacatcgccctgaacgaggacctgagaagctggaccgccgccgacaccgccgcccagatcacccagagaaagtgggaggccgccagagaggccgagcagagaagagcctacctggagggcgagtgcgtggagtggctgagaagatacctggagaacggcaaggacaagctggagagagccgaccaggagcagaagagcctgttccccgcccagagactggagctgagcaacgagtag

SEQ ID NO: 303976 - DNA, 741 bp, Artificial Sequence
  derived and/or modified sequence
atggccagcgccggcagaagcgagggcaccgccggcggcggcgccggccccgaggagcccagaagagaggagggcagagccggcctgagccccagcagcccccccggcagccacagcatgagatacttctacaccagcgtgagcagacccggcagaggcgagcccagattcatcagcgtgggctacgtggacgacacccagttcgtgagattcgacagcgacgccgccagccccagagaggagcccagagccccctggatcgagcaggagggccccgagtactgggacagaaacacccagatctacaaggcccaggcccagaccgacagagagagcctgagaaacctgagaggctactacaaccagagcgaggccggcagccacaccctgcagagcatgtacggctgcgacgtgggccccgacggcagactgctgagaggccacgaccagtacgcctacgacggcaaggactacatcgccctgaacgaggacctgagaagctggaccgccgccgacaccgccgcccagatcacccagagaaagtgggaggccgccagagaggccgagcagagaagagcctacctggagggcgagtgcgtggagtggctgagaagatacctggagaacggcaaggacaagctggagagagccgacccccccaagacccacgtgacccaccaccccatcagcgaccacgaggccaccctgagatgctgggccctgggcttctaccccgcctag

SEQ ID NO: 303977 - DNA, 609 bp, Artificial Sequence
  derived and/or modified sequence
atgtacggctgcgacgtgggccccgacggcagactgctgagaggccacgaccagtacgcctacgacggcaaggactacatcgccctgaacgaggacctgagaagctggaccgccgccgacaccgccgcccagatcacccagagaaagtgggaggccgccagagaggccgagcagagaagagcctacctggagggcgagtgcgtggagtggctgagaagatacctggagaacggcaaggacaagctggagagagccgacccccccaagacccacgtgacccaccaccccatcagcgaccacgaggccaccctgagatgctgggccctgggcttctaccccgccgagatcaccctgacctggcagagagacggcgaggaccagacccaggacaccgagctggtggagaccagacccgccggcgacagaaccttccagaagtgggccgccgtggtggtgcccagcggcgaggagcagagatacacctgccacgtgcagcacgagggcctgcccaagcccctgaccctgagatggggcggcaagggcggcagctacagccaggccgcctgcagcgacagcgcccagggcagcgacgtgagcctgaccgcctag

SEQ ID NO: 303978 - DNA, 345 bp, Artificial Sequence
  derived and/or modified sequence
atgacccaccatcctatttccgaccatgaagcgaccctccggtgctgggccctgggcttctatcccgctgagattacgttgacatggcagcgcgacggagaagatcagactcaggacactgaactagtggagacgcgcccagctggagatggcacattccagaagtgggcggccgttgttgtgccgagcggggaggagcaacggtacacttgtcatgtgcagcacgagggtctgcctaagccactgacactgagatgggatcgcaaggggggcagttacactcaggccgcaagctctgactctgctcagggttctgatgtcagcctgacagcctgtaaagtctag

SEQ ID NO: 303979 - DNA, 345 bp, Artificial Sequence
  derived and/or modified sequence
atgacccaccaccctatatcggaccacgaggcaactctcagatgttgggccctaggcttctatccagccgagatcaccttgacctggcagagggacggggaagatcagacacaggacaccgagctggtagagacaagacccgccggcgatggaacattccagaaatgggcagcagtcgtggtgccgtctggagaagagcagagatatacctgtcacgtccaacatgaaggtctgcccaagcccttaaccctccggtgggatcgaaaaggggggtcctacactcaggcagcgtcaagcgactcggctcagggatctgacgtgtctctgacagcttgcaaagtgtag

SEQ ID NO: 303980 - DNA, 345 bp, Artificial Sequence
  derived and/or modified sequence
atgactcaccaccctatctctgaccatgaggccaccctccggtgctgggccttaggcttttaccctgctgagatcactctcacatggcagagagacggggaagaccaaacccaagatactgaactcgtagaaactaggcccgccggtgacggcaccttccaaaaatgggccgccgtggtggttccgagcggcgaggaacagcgatatacatgtcatgtgcagcacgaggggttgcccaaacctcttaccttacgctgggaccgcaaaggcgggtcttacacccaggctgcttcaagtgacagcgctcaggggtccgatgtgtcccttactgcctgcaaagtgtag

SEQ ID NO: 303981 - DNA, 678 bp, Artificial Sequence
  derived and/or modified sequence
tgaatgctcgtaatggcacctcgtactgttctgctgcttttgtcagcggctctcgctcttaccgaaacatgggccgggagtcacagtatgaggtacttctataccagcgtgagtcgccccggaagaggggagcctcggtttatctcagtagggtatgttgatgacacccaattcgtgagattcgattccgacgctgcttctcctagggaggaacctcgcgcaccctggatagaacaggaaggccctgagtactgggatcggaatacacagatctacaaggctcaggcgcagaccgacagagaaagcctacgcaatctaagaggttattataatcaatcagaagccggcagccacaccctccaatctatgtatgggtgcgacgtgggacccgacggacggttactgagggggcacgatcagtatgcttacgacgggaaggactacatcgccctgaacgaagatctgcggtcttggaccgcggcggatactgcagcgcaaattacccagcgaaaatgggaggcagcacgggaggccgagcaaaggagagcctacctcgaaggggaatgtgtcgagtggctgaggcgatacctcgaaaatggcaaggacaagctcgagagggctgaccaggagcagaagtccctgttccctgcgcagcggctggaactgagcaatgagtag

SEQ ID NO: 303982 - DNA, 741 bp, Artificial Sequence
  derived and/or modified sequence
atggccagcgctggcaggtcggaagggactgctgggggcggggcaggtcctgaggagccgaggcgggaagaaggcagggccggcttatcccccagctcaccccctggaagccactcaatgagatacttttatacatcggtcagccgccctggccgcggggagcctcggttcatctccgttgggtacgtcgatgatactcagtttgtgcggtttgattcagacgccgccagccctcgggaggaacccagggccccctggatagagcaggagggccccgaatactgggaccgcaatacgcagatatacaaggctcaggcccaaacagacagggagagcctccggaacttaagaggctattacaaccagagcgaggctgggtctcataccctccagtcaatgtacggctgcgatgtcggcccggacggccggctgctgaggggacacgatcaatacgcgtatgatggcaaggattacatagccctgaatgaggaccttaggtcgtggaccgccgcagacactgccgcacagatcactcagaggaagtgggaagcagcgcgagaggctgaacagcgtagagcctacttggagggagagtgtgttgagtggctcaggcgctatctcgaaaacgggaaagataagctggagagggcggatcctccaaagacacatgtaacgcaccaccctattagcgaccacgaagccacattaagatgctgggccttaggattctaccccgcttag

SEQ ID NO: 303983 - DNA, 609 bp, Artificial Sequence
  derived and/or modified sequence
atgtacggatgtgatgtaggccccgatggacgcctccttcgtggtcacgaccaatacgcctatgacgggaaggactacattgcccttaacgaggacctgaggtcttggacggccgctgacacagccgcccaaatcactcaacgaaagtgggaagctgcccgggaagctgagcagcggcgcgcatatctcgagggtgagtgtgtcgaatggttaaggcgctatcttgagaatggcaaggacaaactggaacgagccgacccccccaagacccacgtcacccaccacccaatatctgaccacgaggccaccctgagatgctgggcactcggcttctaccccgccgagatcactctgacgtggcagagggacggggaggaccagactcaggacacagagctggtagagactcgtcctgccggcgataggactttccagaagtgggccgccgtggtagtgccttccggagaagagcagcgatacacgtgtcatgttcaacacgaaggactgcctaagcctctgacactgaggtgggggggcaagggcgggagctactcacaagccgcatgcagcgacagcgcacagggctctgacgtttcactgacagcttag

SEQ ID NO: 303984 - DNA, 863 bp, Artificial Sequence
  derived and/or modified sequence
cccggactcagagtctcctcagacgccgagatgctggtcatggcgccccgaaccgtcctcctgctgctctcggcggccctggccctgaccgagacctgggccggtgagtgcgggtcgggagggaaatggcctctgccgggaggagcgaggggaccgcaggcgggggcgcaggacctgaggagccgcgccgggaggagggtcgggcgggtctcagcccctcctcacccccaggctcccactccatgaggtatttctacacctccgtgtcccggcccggccgcggggagccccgcttcatctcagtgggctacgtggacgacacccagttcgtgaggttcgacagcgacgccgcgagtccgagagaggagccgcgggcgccgtggatagagcaggaggggccggagtattgggaccggaacacacagatctacaaggcccaggcacagactgaccgagagagcctgcggaacctgcgcggctactacaaccagagcgaggccgggtctcacaccctccagagcatgtacggctgcgacgtggggccggacgggcgcctcctccgcgggcatgaccagtacgcctacgacggcaaggattacatcgccctgaacgaggacctgcgctcctggaccgccgcggacacggcggctcagatcacccagcgcaagtgggaggcggcccgtgaggcggagcagcggagagcctacctggagggcgagtgcgtggagtggctccgcagatacctggagaacgggaaggacaagctggagcgcgctgaccccccaaagacacacgtgacccaccaccccatctctgaccatgaggccaccctgaggtgctgggccctgggtttctaccctgcg

SEQ ID NO: 303985 - DNA, 1312 bp, Artificial Sequence
  derived and/or modified sequence
agagtctcctcagacgccgagatgctggtcatggcgccccgaaccgtcctcctgctgctctcggcggccctggccctgaccgagacctgggccggctcccactccatgaggtatttctacacctccgtgtcccggcccggccgcggggagccccgcttcatctcagtgggctacgtggacgacacccagttcgtgaggttcgacagcgacgccgcgagtccgagagaggagccgcgggcgccgtggatagagcaggaggggccggagtattgggaccggaacacacagatctacaaggcccaggcacagactgaccgagagagcctgcggaacctgcgcggctactacaaccagagcgaggccgggtctcacaccctccagagcatgtacggctgcgacgtggggccggacgggcgcctcctccgcgggcatgaccagtacgcctacgacggcaaggattacatcgccctgaacgaggacctgcgctcctggaccgccgcggacacggcggctcagatcacccagcgcaagtgggaggcggcccgtgaggcggagcagcggagagcctacctggagggcgagtgcgtggagtggctccgcagatacctggagaacgggaaggacaagctggagcgcgctgaccccccaaagacacacgtgacccaccaccccatctctgaccatgaggccaccctgaggtgctgggccctgggtttctaccctgcggagatcacactgacctggcagcgggatggcgaggaccaaactcaggacactgagcttgtggagaccagaccagcaggagatagaaccttccagaagtgggcagctgtggtggtgccttctggagaagagcagagatacacatgccatgtacagcatgaggggctgccgaagcccctcaccctgagatggggtggaaaaggagggagctactctcaggctgcgtgcagcgacagtgcccagggctctgatgtgtctctcacagcttgaaaagcctgagacagctgtcttgtgagggactgagatgcaggatttcttcacgcctcccctttgtgacttcaagagcctctggcatctctttctgcaaaggcacctgaatgtgtctgcgtccctgttagcataatgtgaggaggtggagagacagcccacccttgtgtccactgtgacccctgttcccatgctgacctgtgtttcctccccagtcatctttcttgttccagagaggtggggctggatgtctccatctctgtctcaactttacgtgcactgagctgcaacttcttacttccctactgaaaataagaatctg

SEQ ID NO: 303986 - DNA, 345 bp, Artificial Sequence
  derived and/or modified sequence
atgacccaccaccccatcagtgaccacgaggccaccctgcgctgctgggccctgggcttctacccagctgagatcaccctgacctggcagagagatggagaggaccagacccaggacacagagctggtggagaccaggcctgctggagatggcaccttccagaagtgggccgctgtggtggtgcccagcggggaggagcagcgctacacctgccacgtgcagcacgagggcctgcccaagcccctgaccctgcgctgggacagaaaaggaggcagctacacccaggccgccagcagtgacagcgcccagggcagtgatgtgtccctgacagcctgcaaggtgtag

SEQ ID NO: 303987 - DNA, 678 bp, Artificial Sequence
  derived and/or modified sequence
tgaatgctggtgatggcccccaggacagtgctgctgctgctgtctgctgccctggccctgacagagacctgggccggcagccacagcatgagatacttctacacctctgtgtcccggcccggccgcggggagccccgcttcatctctgtgggctacgtggatgacacccagtttgtgcgctttgacagtgatgctgccagcccccgggaggagccccgggccccctggattgagcaggagggccctgagtactgggacaggaacacccagatctacaaggcccaggcccagacagaccgggagagcctgaggaacctgcggggctactacaaccagagcgaggccggcagccacaccctgcagagcatgtatggctgtgatgtgggcccagatggccgcctgctgcggggccatgaccagtatgcctatgatggcaaggactacatcgccctgaatgaagacctgcgctcctggacagctgctgacacagctgcccagatcacccagaggaagtgggaggccgcccgggaggccgagcagaggcgggcctacctggagggggagtgtgtggagtggctgcggcgctacctggagaatggcaaggacaagctggagagagctgaccaggagcagaagagcctcttccctgcccagaggctggagctgagcaatgaatag

SEQ ID NO: 303988 - DNA, 741 bp, Artificial Sequence
  derived and/or modified sequence
atggccagcgctggccgctctgagggcacagctgggggcggggccggccctgaggagccccggcgggaggagggccgggccggcctgagccccagcagccccccaggcagccacagcatgagatacttctacacctctgtgtcccggcccggccgcggggagccccgcttcatctctgtgggctacgtggatgacacccagtttgtgcgctttgacagtgatgctgccagcccccgggaggagccccgggccccctggattgagcaggagggccctgagtactgggacaggaacacccagatctacaaggcccaggcccagacagaccgggagagcctgaggaacctgcggggctactacaaccagagcgaggccggcagccacaccctgcagagcatgtatggctgtgatgtgggcccagatggccgcctgctgcggggccatgaccagtatgcctatgatggcaaggactacatcgccctgaatgaagacctgcgctcctggacagctgctgacacagctgcccagatcacccagaggaagtgggaggccgcccgggaggccgagcagaggcgggcctacctggagggggagtgtgtggagtggctgcggcgctacctggagaatggcaaggacaagctggagagagctgacccccccaagacccacgtgacccaccaccccatcagtgaccacgaggccaccctgcgctgctgggccctgggcttctacccagcctag

SEQ ID NO: 303989 - DNA, 609 bp, Artificial Sequence
  derived and/or modified sequence
atgtatggctgtgatgtgggcccagatggccgcctgctgcggggccatgaccagtatgcctatgatggcaaggactacatcgccctgaatgaagacctgcgctcctggacagctgctgacacagctgcccagatcacccagaggaagtgggaggccgcccgggaggccgagcagaggcgggcctacctggagggggagtgtgtggagtggctgcggcgctacctggagaatggcaaggacaagctggagagagctgacccccccaagacccacgtgacccaccaccccatcagtgaccacgaggccaccctgcgctgctgggccctgggcttctacccagctgagatcaccctgacctggcagagagatggagaggaccagacccaggacacagagctggtggagaccaggcctgctggggacaggaccttccagaagtgggccgctgtggtggtgcccagcggggaggagcagcgctacacctgccacgtgcagcacgagggcctgcccaagcccctgaccctgcgctggggcggcaagggcggcagctacagccaggccgcctgcagcgacagcgcccagggcagtgatgtgtccctgacagcctag

SEQ ID NO: 303990 - DNA, 345 bp, Artificial Sequence
  derived and/or modified sequence
atgacccaccaccccatcagcgaccacgaggccaccctgcggtgctgggcacttggattctacccagccgagattacccttacctggcagcgagatggggaggaccagactcaagacaccgagttggtggagacccgccctgccggagacggtacattccaaaagtgggccgcagtggtggtgcccagtggggaagagcagaggtacacctgccatgtgcagcacgaaggcctccctaagccactaacactacgatgggaccggaagggggggagctacacacaggcagcgagctctgacagcgcccagggctctgacgtatctctgacagcatgtaaggtgtag

SEQ ID NO: 303991 - DNA, 345 bp, Artificial Sequence
  derived and/or modified sequence
atgacccaccaccccatcagcgaccacgaggccaccctgcggtgctgggcattgggcttttatccagccgagattaccctgacatggcagcgcgacggagaggaccagacccaagataccgaactcgtggaaactagaccagctggggacgggacgtttcaaaagtgggccgccgtagtggtgccgtcgggagaggaacagcgctacacatgtcacgtacagcacgaagggctcccaaagccactgaccctgcggtgggacaggaaaggaggtagctatacacaggcagcctctagcgacagcgcccaaggctccgatgtgagcctcactgcttgtaaggtctag

SEQ ID NO: 303992 - DNA, 345 bp, Artificial Sequence
  derived and/or modified sequence
atgacccaccaccccatcagcgaccacgaggccaccctgcggtgctgggcactgggcttttatcctgccgagattacgctgacctggcagagagatggcgaagatcaaactcaggataccgaactggtcgagactaggcctgctggagacggtacctttcagaaatgggcggctgtcgtagtcccatcaggcgaggaacagcgatacacatgtcatgtccagcacgagggacttccaaagccactcaccctaagatgggacagaaagggcggttcttacacacaggctgccagttcagattcagcccagggaagtgatgtgtcgctgaccgcatgcaaggtctag

SEQ ID NO: 303993 - DNA, 678 bp, Artificial Sequence
  derived and/or modified sequence
tgaatgctggtgatggccccccggaccgtgctgctgctgctgagcgcggctttagccttgacagagacatgggctggaagccattccatgcgctacttctatacaagtgtatctagacctggccgcggggagccacggttcataagtgtgggctacgtggatgacacccagtttgtcagatttgactctgacgcagcgtcgcccagggaggagccgcgtgccccctggatcgaacaggagggaccggagtactgggaccgaaacactcagatttataaggcgcaagctcagacagaccgtgagtctctgcgcaatctgagaggctactacaaccaaagcgaggctggtagtcatacgctccagagcatgtatggttgcgatgtgggtcccgatggtagactacttagaggacatgaccaatatgcctatgacgggaaggattatattgcattaaacgaggacctaagatcatggacagcagcagacaccgctgctcagattacgcagcgcaagtgggaagctgcccgtgaagctgagcagcggagggcctatctcgagggcgagtgtgtggagtggctgcgcaggtatcttgagaacggcaaggataagctcgaacgagctgatcaagaacagaagtccttattccctgctcagagactcgagcttagtaacgaatag

SEQ ID NO: 303994 - DNA, 741 bp, Artificial Sequence
  derived and/or modified sequence
atggccagcgccggccggagcgagggcaccgccggcggcggcgccggccctgaagaaccaaggcgcgaagagggccgggctggcctctccccgtctagccctcccggaagccatagtatgcgttatttttacacatctgtttctaggccagggagaggcgagccaaggttcatcagtgtgggctacgttgacgacactcagttcgtgaggtttgacagcgatgctgcttccccccgggaagagcctagggctccttggattgagcaagaaggtcccgaatactgggaccggaacacccagatatataaagctcaggcccaaaccgaccgtgagtcccttcgcaacctgagggggtactataatcaatccgaagccggttctcacacgctgcaatcgatgtatggatgtgatgtcgggccagatggtagactgttacgtggccatgatcaatacgcttatgacgggaaagactatattgcactcaacgaagacctgaggagctggactgcagccgacaccgcagcccagattacacagcgaaaatgggaagcagcccgcgaagccgaacagcggcgtgcatatctggagggtgagtgcgtggagtggcttcgccgctatttagagaacgggaaggacaagttggagcgcgctgacccaccaaaaactcatgtgacacaccaccccatctctgaccatgaagctactctaagatgctgggctctgggcttctatcccgcctag

SEQ ID NO: 303995 - DNA, 609 bp, Artificial Sequence
  derived and/or modified sequence
atgtacggctgcgacgtgggccccgacggccggctgctgcggggccacgatcagtatgcctacgacgggaaggattacatagcattgaatgaggacctgcgatcctggacagctgctgatacagctgcccagatcacccagagaaaatgggaagcagccagagaggcagaacagcggcgagcctacctggaaggcgagtgcgttgaatggctcaggcgctatttagaaaacgggaaagataagctggagcgagcagacccacctaagactcacgttactcaccatccgatttcagatcacgaagcaacgctgcgatgctgggcgctcggattttaccccgcagagattactcttacatggcagagagacggggaggaccagacgcaagatactgagttagttgaaacccgccccgcaggcgatcggacctttcagaaatgggccgccgtcgttgtcccatcgggagaagaacagcggtatacttgccacgtgcagcacgagggtctgcctaaacccctgactctgagatggggcggcaagggcggcagctatagccaagcagcctgctcagatagtgcccaggggtccgatgtgtctctcactgcatag

SEQ ID NO: 303996 - DNA, 345 bp, Artificial Sequence
  derived and/or modified sequence
atgacccatcatccaattagcgatcacgaagctaccctccgttgctgggccctgggcttctatcccgctgaaattaccctgacctggcagcgtgatggagaagaccagacacaggatacagaactggttgagactcggcctgcaggagatgggacctttcagaagtgggctgctgtggtcgtgccaagcggcgaagaacagcgatatacatgccacgttcagcatgagggattgcccaaacctctgaccctgaggtgggaccgtaaagggggaagctacactcaggctgcttcaagtgatagcgcacaaggaagtgatgtgtccttgacagcctgtaaagtgtag

SEQ ID NO: 303997 - DNA, 345 bp, Artificial Sequence
  derived and/or modified sequence
atgacacaccaccctatctccgatcacgaggctactctgaggtgttgggcactcggtttttatccagcggaaattaccctgacatggcaaagagacggggaggaccaaacccaggacacagagctcgtggagactagacctgcgggagatggcacttttcagaaatgggcagcagtagtcgtgcctagtggggaagagcagcgctacacttgccacgtccagcacgaaggcctgcccaaacccttgacactcagatgggaccggaagggaggcagttacacccaagcggcaagctccgacagcgcccagggcagtgacgtgtctctaacagcatgtaaagtctag

SEQ ID NO: 303998 - DNA, 345 bp, Artificial Sequence
  derived and/or modified sequence
atgacgcaccatcctatttctgaccacgaggctacccttcgctgttgggctttaggcttctaccccgcagagatcaccctgacgtggcagcgagacggcgaggaccagacccaggacacagaactcgtggaaactaggcctgcaggagacgggacattccagaagtgggctgcagtggtggtcccatctggagaggaacagcgttacacctgtcacgtgcagcacgaaggcctcccgaagccgctgaccctaaggtgggatagaaagggaggctcctatacgcaagcagcaagcagcgattcagcccaagggtcagacgtcagcctcaccgcctgtaaagtgtag

SEQ ID NO: 303999 - DNA, 678 bp, Artificial Sequence
  derived and/or modified sequence
taaatgttggtgatggcccctcgcacggtgctacttcttctgtccgcggctttggcattgaccgagacgtgggccggatcacatagcatgcggtacttttacacttccgtttcccggccagggcgtggtgagccacgctttattagcgtgggctacgtggatgacactcagttcgtcagattcgattcagatgctgcttcccctcgggaggagcctagggccccttggattgagcaggagggacccgagtattgggatcggaatacccagatttacaaggctcaggcacagaccgacagggaatcccttaggaatctgaggggatactacaaccagtctgaggccggatcccacactctgcaatccatgtacggctgcgacgtgggacctgacggcaggctgctcaggggccacgatcagtacgcatatgatgggaaggactatattgcccttaacgaggatctgcgctcttggacggctgccgacacagctgctcaaattacacagaggaagtgggaagctgcaagggaggccgagcagcgccgtgcataccttgaaggagaatgtgtggagtggttacggagatatcttgaaaatggcaaagataagctggaacgggcagaccaggagcagaaatccctatttccagcacaacgtctggagctgagcaatgaatag

SEQ ID NO: 304000 - DNA, 741 bp, Artificial Sequence
  derived and/or modified sequence
atggcctcagcaggacgtagcgaggggacagctgggggtggagccggaccagaggagcccaggagggaagagggcagggccggtctatctccaagttccccgccagggtcccatagcatgcggtacttctacacaagcgtatctcgcccaggccgtggggagcctcggtttatttctgtggggtacgttgatgatacccaatttgtgcggttcgactctgatgcagcctcgccccgtgaggaaccacgggctccctggatagagcaggaaggacccgaatactgggaccgtaatactcagatttataaggctcaggctcagacagaccgtgagtcactaagaaatctgagaggctattataatcagtctgaggctggcagccacactctccagtccatgtacggatgcgatgtgggccctgatgggcgattactgaggggtcacgaccaatacgcttatgatggaaaggactatattgcactcaatgaggacttgcgctcttggacggctgcggacactgctgctcagatcacacagaggaagtgggaagccgctcgagaagcagagcagagacgggcttaccttgagggggagtgcgtggaatggctccggagatatttagaaaacggtaaagacaagttggagcgcgcagatccgccaaaaacacatgtgacgcaccatccaattagcgaccacgaagcaacccttcggtgctgggcccttgggttctaccccgcatag

SEQ ID NO: 304001 - DNA, 609 bp, Artificial Sequence
  derived and/or modified sequence
atgtatggttgcgacgtgggacctgatgggaggcttctcagaggccacgaccagtatgcgtacgatgggaaggattacattgcccttaatgaagacctgagatcctggaccgcagccgacaccgccgcacaaatcacgcagcgaaaatgggaggctgctagagaagcggagcaacgaagggcctatctggagggcgagtgcgtggagtggctgcgtcgttatcttgagaacggcaaggataagctggaaagggcagacccaccaaagacccatgtgacacatcatcctatcagcgatcacgaagcgaccctgcgatgctgggctcttggcttctaccctgctgaaatcactctgacctggcaaagggacggtgaggatcagacacaggacactgaactggtcgaaacaaggcctgcaggcgacagaacattccaaaagtgggcggcagtggtggtgcccagcggggaagagcagaggtatacgtgccacgtccagcatgagggccttcccaagccccttacccttcggtggggagggaagggcggaagttatagtcaggccgcatgttcagactccgcacagggctcagacgtgtccctcactgcgtag

SEQ ID NO: 304002 - DNA, 786 bp, Artificial Sequence
  derived and/or modified sequence
tgaagagtgatggcccccagaaccctgatcctgctgctgagcggcgccctggccctgaccgagacctgggccggcagccacagcatgagatacttctacaccgccgtgagcagacccggcagaggcgagccccacttcatcgccgtgggctacgtggacgacacccagttcgtgagattcgacagcgacgccgccagccccagaggcgagcccagagccccctgggtggagcaggagggccccgagtactgggacagagagacccagaagtacaagagacaggcccagaccgacagagtgagcctgagaaacctgagaggctactacaaccagagcgaggccggcagccacatcatccagagaatgtacggctgcgacgtgggccccgacggcagactgctgagaggctacgaccagtacgcctacgacggcaaggactacatcgccctgaacgaggacctgagaagctggaccgccgccgacaccgccgcccagatcacccagagaaagtgggaggccgccagagaggccgagcagctgagagcctacctggagggcctgtgcgtggagtggctgagaagatacctgaagaacggcaaggagaccctgcagagagccgagcaccccaagacccacgtgacccaccaccccgtgagcgaccacgaggccagcagaagatggaacctgcccgaggtgggcagctgcggcggcgccttctggagaagagccgagatccacgtgccctgcgccgccagaggcgccgccggcgccccccaccccgagtag

SEQ ID NO: 304003 - DNA, 786 bp, Artificial Sequence
  derived and/or modified sequence
tagcgcgtgatggcccctagaacgctgattctgcttctgtctggcgccctggcattaaccgaaacctgggcaggcagtcattcaatgcgatacttttacactgccgtctcaaggccgggccggggggagccccatttcattgcagttggatacgtagacgacacccagtttgtccgctttgatagtgatgctgccagcccgcgaggcgagcctcgcgcaccttgggtggagcaggagggccccgaatattgggaccgcgaaacccagaagtataagaggcaggcccagactgatcgggtgtccctgagaaatctgaggggatattataatcagagcgaagcaggttctcatattatccagcgaatgtatggatgcgatgtgggaccagatggtaggcttctgaggggctacgatcagtatgcctatgacgggaaggactatatagccctgaatgaggatctgcgcagctggaccgcagctgacacggcagctcagataacccaaaggaagtgggaggcagcgcgcgaagctgagcagctgagggcctatctcgagggcttgtgcgttgagtggttacgccgttacctcaagaacggcaaggaaactctgcaaagagccgagcaccctaagacccatgtgacacatcaccctgtgtctgaccacgaggcctctagaagatggaatctgcctgaggtgggatcatgcggtggtgctttttggcgcagagctgagatccatgttccgtgcgccgcgcgcggagcagcaggtgctcctcaccccgagtag

SEQ ID NO: 304004 - DNA, 786 bp, Artificial Sequence
  derived and/or modified sequence
tgaagagtgatggcccccaggaccctcatcctgctgctgagcggggccctggccctgacagagacctgggccggcagccacagcatgagatacttctacacagctgtgtccaggcctggccgcggggagccccacttcatcgctgtgggctacgtggatgacacccagtttgtgcgctttgacagtgatgctgccagccccagaggagagccccgggccccctgggtggagcaggagggccctgagtactgggaccgggagacccagaagtacaagaggcaggcccagacagacagagtgtccctgaggaacctgcggggctactacaaccagagcgaggccggcagccacatcatccagaggatgtatggctgtgatgtgggcccagatggccgcctgctgcggggctatgaccagtatgcctatgatggcaaggactacatcgccctgaatgaagacctgcgctcctggacagctgctgacacagctgcccagatcacccagaggaagtgggaggccgcccgggaggccgagcagctgcgggcctacctggagggcctgtgtgtggagtggctgcggcgctacctgaagaatggcaaggagaccctgcagagagctgagcaccccaagacccacgtgacccaccaccctgtgtctgaccacgaggccagccgccgctggaacctgcctgaggtgggcagctgtggcggggccttctggaggagagctgagatccacgtgccctgtgccgcccggggagctgctggggccccccaccctgagtag

SEQ ID NO: 304005 - DNA, 786 bp, Artificial Sequence
  derived and/or modified sequence
tgacgggtgatggccccccggaccctgatcctgctgctgagcggcgcattagctctcacggaaacatgggctggctctcatagtatgcgctacttttacaccgccgtcagcagacctgggcggggcgaaccgcatttcattgccgttggttacgttgacgacacccagtttgtgaggttcgattccgacgccgcctctccccgcggagagccacgagccccctgggtcgagcaggagggaccagagtattgggatcgtgagacccaaaaatacaagaggcaggcccaaacagaccgcgtgagcctgagaaatctgcgcggttactataatcagtctgaagcgggaagtcacattattcaaaggatgtatggctgtgatgtcgggccagatggacggctgttgagggggtatgatcagtacgcatacgatggtaaggactacatcgccctgaatgaggatctgcgtagctggacagctgctgataccgctgctcagatcacccaacggaagtgggaagccgcccgcgaagccgagcaacttcgggcctatctggaaggtctttgcgttgagtggcttcgcaggtatctaaaaaacggaaaggaaacactacagagggctgagcacccgaagacacatgtcacccaccatcctgtatccgaccatgaagccagccggagatggaacctgcctgaggtgggatcctgcggtggcgccttttggagacgagcagagattcacgtcccatgcgccgcccggggggccgccggggctccacacccagagtag

SEQ ID NO: 304006 - DNA, 786 bp, Artificial Sequence
  derived and/or modified sequence
taaagagttatggcgcctcgtactcttattcttctgctttcgggagcactggccctgaccgagacatgggccggatcgcacagcatgcgctacttttacacagcagtgtcccgtcccggacgaggtgaaccgcacttcatcgcagttggttacgttgacgacacacaatttgtccgatttgatagtgatgccgcttcacccaggggagaacctcgtgcaccctgggtggaacaagaaggccctgagtactgggaccgagaaacccagaaatacaaaagacaagctcaaactgatcgcgtgagcctcagaaatcttagaggatactataaccaaagtgaggcagggagccacatcattcagcgcatgtatggatgcgatgttggtcctgatggacgactgctgaggggttatgatcagtatgcctacgacggaaaagactatatcgccctaaacgaggacctgagatcctggactgctgctgacaccgcagcccagatcacacaacgcaaatgggaagccgctcgcgaggcagagcaactcagagcctacctcgaggggctttgtgtggaatggttgcggcgttaccttaagaacggtaaggaaaccttacagcgcgcagaacacccgaaaacccacgtgacccatcaccccgtgagcgaccacgaggcaagtagacgctggaacctgccagaggtgggcagttgtggaggtgccttttggcgccgtgctgaaatccacgtgccttgcgcagccaggggggcagcgggtgctccccatcccgagtag

SEQ ID NO: 304007 - DNA, 782 bp, Artificial Sequence
  derived and/or modified sequence
gcgggtcatggcgccccgaaccctcatcctgctgctctcgggagccctggccctgaccgagacctgggccggctcccactccatgaggtatttctacaccgctgtgtcccggcccggccgcggggagccccacttcatcgcagtgggctacgtggacgacacgcagttcgtgcggttcgacagcgacgccgcgagtccgagaggggagccgcgggcgccgtgggtggagcaggaggggccggagtattgggaccgggagacacagaagtacaagcgccaggcacagactgaccgagtgagcctgcggaacctgcgcggctactacaaccagagcgaggccgggtctcacatcatccagaggatgtatggctgcgacgtggggcccgacgggcgcctcctccgcgggtatgaccagtacgcctacgacggcaaggattacatcgccctgaacgaggatctgcgctcctggaccgccgcggacacggcggctcagatcacccagcgcaagtgggaggcggcccgtgaggcggagcagctgagagcctacctggagggcctgtgcgtggagtggctccgcagatacctgaagaatgggaaggagacgctgcagcgcgcggaacacccaaagacacacgtgacccaccatcccgtctctgaccatgaggccagcaggagatggaaccttccagaagtgggcagctgtggtggtgccttctggagaagagcagagatacacgtgccatgtgcagcacgaggggctgccggagcccctcaccctgaga

SEQ ID NO: 304008 - protein, 61 aa, Artificial Sequence
  derived and/or modified sequence
MALRAGLVLGFHTLMTLLSPQEAGATKADHMGSYGPPSTSLTAPRASSPMNLMRNSCSLWT

SEQ ID NO: 304009 - DNA, 261 bp, Artificial Sequence
  derived and/or modified sequence
atggccctgagagccggcctggtgctgggcttccacaccctgatgaccctgctgagcccccaggaggccggcgccaccaagggcagagccggcagacacagaagaaaccagagccccagcggccaccccggcggcgccctgcagccccagcagagccaccagagagccagcaccggcgacagagccccccaggtgagcggcggcgccggccccgcccagcacccccacctgcacagaggccagcacctgcccccctgctag

SEQ ID NO: 304010 - DNA, 261 bp, Artificial Sequence
  derived and/or modified sequence
atggccctgagagccggcctggtgctgggcttccacaccctgatgaccctgctgagcccccaggaggccggcgccaccaagggctgggccggcagacacagaagaaaccagagccccagcggccaccccggcggcgccctgcagccccagcagagccaccagagagccagcaccggcgacagagccccccaggtgagcggcggcgccggccccgcccagcacccccacctgcacagaggccagcacctgcccccctgctag

SEQ ID NO: 304011 - DNA, 186 bp, Artificial Sequence
  derived and/or modified sequence
atggccctgagagccggcctggtgctgggcttccacaccctgatgaccctgctgagcccccaggaggccggcgccaccaaggccgaccacatgggcagctacggcccccccagcaccagcctgaccgcccccagagccagcagccccatgaacctgatgagaaacagctgcagcctgtggacctag

SEQ ID NO: 304012 - DNA, 261 bp, Artificial Sequence
  derived and/or modified sequence
atggctttgagagctggactcgttttggggtttcataccctaatgacccttctttcccctcaagaagccggagccaccaaaggacgcgccggtcggcatagacgaaatcaatccccgtctggccatccgggaggagctctgcagcctcagcagtcccaccagcgcgcctccaccggagaccgggctccacaagtgagcggaggagcaggccccgcccagcacccgcatctccaccggggtcagcatttgcccccgtgttag

SEQ ID NO: 304013 - DNA, 261 bp, Artificial Sequence
  derived and/or modified sequence
atggcactacgggcaggcttagtgctgggattccacactctcatgaccctgctgtcgccccaggaggctggtgccactaaaggcagggccggacgccatagaaggaaccagagtccctctggacatcccggaggagctttgcagccacagcagagccaccagcgggcaagcaccggcgatagggcccctcaggtgtcagggggagcgggaccagctcagcatccacacctacatcgaggacaacacttgcccccctgttag

SEQ ID NO: 304014 - DNA, 261 bp, Artificial Sequence
  derived and/or modified sequence
atggctctacgtgctggcctcgtcctcggctttcacacgctgatgacgttgctttcacctcaagaagccggtgctaccaagggatgggctggacggcaccgacgcaaccagagcccctcaggccatcccggtggcgctctgcagccccagcagtctcatcagcgcgcgagtacaggagaccgcgctcctcaggtgagcgggggggcaggtcccgcccaacatcctcacctgcaccgtggacagcacctcccaccatgctag

SEQ ID NO: 304015 - DNA, 261 bp, Artificial Sequence
  derived and/or modified sequence
atggctcttagagcaggactcgtccttgggtttcacactctgatgaccctccttagtccccaggaggccggcgcaacgaagggtcgcgcaggccgccatagacgcaatcagagtccgtccggacacccagggggcgccctgcagccacagcagagtcaccagcgggcatctaccggtgaccgggcacctcaggttagtggcggcgcaggccccgcacaacatccccacctgcatcggggacagcatctgcctccatgttag

SEQ ID NO: 304016 - DNA, 186 bp, Artificial Sequence
  derived and/or modified sequence
atggcccttcgagcgggtctggtactcggattccatacccttatgactcttttgtctcctcaggaggccggagctaccaaggccgaccacatgggaagctacggcccaccgagtacctctctcactgcaccaagggcctcgtcccccatgaaccttatgagaaatagttgctctctctggacatag

SEQ ID NO: 304017 - DNA, 261 bp, Artificial Sequence
  derived and/or modified sequence
atggccctccgcgccgggcttgtgctgggcttccacacgttaatgactctgctcagcccccaggaggccggggcaacgaaaggccgcgcggggcgtcaccggagaaatcagtccccatccggtcaccccggaggagcgctgcagccccagcagagccaccaacgcgcctccaccggagatcgcgccccacaggtatcgggtggtgctggacctgcccagcatccacatctgcaccggggacagcaccttcccccctgctag

SEQ ID NO: 304018 - DNA, 261 bp, Artificial Sequence
  derived and/or modified sequence
atggctctcagggctggccttgtattaggatttcatacattgatgacgctactgagtccccaggaagcaggcgcaactaagggatgggccggaaggcatcggcggaaccaaagcccttcaggccatcccggcggggccttgcagccacagcagtcacatcagcgtgcatctaccggagatagagctcctcaagtttctggcggtgcaggccctgctcagcacccacacctccaccgggggcaacaccttcctccctgttag

SEQ ID NO: 304019 - DNA, 261 bp, Artificial Sequence
  derived and/or modified sequence
atggcccttcgcgccggactcgtcctgggctttcatactcttatgacgctgctatcgccacaggaggccggcgcaaccaagggacgcgcaggccgacaccggaggaatcaatccccaagtggtcacccaggaggagctttacaaccccagcagagtcaccaacgagcatcaacaggtgatagagcgccacaagtctcaggaggcgctggacctgcgcagcaccctcatctgcacagagggcagcacctccccccttgctag

SEQ ID NO: 304020 - DNA, 186 bp, Artificial Sequence
  derived and/or modified sequence
atggcactgagagctggactggtgctgggcttccatacactcatgacgttactgagtcctcaggaggccggggcaacgaaagcagatcacatggggagctacggccctccgtctacatctcttaccgctccaagagcatcttccccaatgaacttaatgcgcaattcatgtagcctctggacctag

SEQ ID NO: 304021 - DNA, 186 bp, Artificial Sequence
  derived and/or modified sequence
atggctctccgagcaggactggtgcttgggtttcacacccttatgactttgctatcaccacaggaagccggagccactaaggccgatcatatgggctcctacggccccccaagcacctcgctgacagcaccccgcgccagttccccgatgaacttaatgcgcaacagctgctccctctggacatag

SEQ ID NO: 304022 - DNA, 186 bp, Artificial Sequence
  derived and/or modified sequence
atggccctgcgggccggactcgtactcggcttccatactttgatgactctgctgtcaccacaagaagccggagctaccaaagctgatcacatggggtcgtatggcccaccctcaacaagcttgacagctcctcgggctagtagccctatgaacttgatgagaaatagctgtagcctttggacatag

SEQ ID NO: 304023 - DNA, 186 bp, Artificial Sequence
  derived and/or modified sequence
atggcgctcagagccggcctggtgctgggtttccatacgttgatgaccctcctgtcgccacaggaagccggcgcaacaaaagctgatcatatgggttcatacggtcctcctagcaccagtctgacagcgcccagagcaagctctcccatgaatcttatgcggaattcatgttctctctggacctag

SEQ ID NO: 304024 - DNA, 186 bp, Artificial Sequence
  derived and/or modified sequence
atggcactgcgagctggcttagtgttggggtttcatacactgatgactttgctctccccacaggaggctggtgccaccaaggcggatcatatgggttcctacgggccgccaagcacatctttgacagcccctcgggcttcatcgcccatgaaccttatgcgtaactcctgtagcctatggacttag

SEQ ID NO: 304025 - DNA, 186 bp, Artificial Sequence
  derived and/or modified sequence
atggccttgcgcgctggactagttctgggatttcacactctgatgaccctcctgtctcctcaagaagcaggggctaccaaagccgaccatatggggagctacggcccaccttcgacttcactgacagcgcctcgagccagcagtccgatgaacctcatgaggaatagctgttcactctggacctag

SEQ ID NO: 304026 - DNA, 261 bp, Artificial Sequence
  derived and/or modified sequence
atggccctgcgggccggcctggtgctgggcttccacaccctgatgaccctgctgagcccccaggaggccggggccaccaagggccgggccggccgccacagaagaaaccagagccccagcggccaccctggaggagccctgcagccccagcagagccaccagagggccagcactggagaccgggccccccaggtgtctgggggcgccggccctgcccagcacccccacctgcaccggggccagcacctgcccccctgctag

SEQ ID NO: 304027 - DNA, 261 bp, Artificial Sequence
  derived and/or modified sequence
atggccctgcgggccggcctggtgctgggcttccacaccctgatgaccctgctgagcccccaggaggccggggccaccaagggctgggccggccgccacagaagaaaccagagccccagcggccaccctggaggagccctgcagccccagcagagccaccagagggccagcactggagaccgggccccccaggtgtctgggggcgccggccctgcccagcacccccacctgcaccggggccagcacctgcccccctgctag

SEQ ID NO: 304028 - DNA, 186 bp, Artificial Sequence
  derived and/or modified sequence
atggccctgcgggccggcctggtgctgggcttccacaccctgatgaccctgctgagcccccaggaggccggggccaccaaggctgaccacatgggcagctatggcccccccagcaccagcctgacagccccccgggccagcagccccatgaacctgatgaggaacagctgcagcctgtggacctag

SEQ ID NO: 304029 - DNA, 261 bp, Artificial Sequence
  derived and/or modified sequence
atggccctgcgggccggcctggtgctgggcttccacaccctgatgacacttctctctccgcaggaggctggggctaccaaggggagggccggtcgacatcggaggaaccaatcaccctcaggccaccctgggggcgctttacagccacagcagtcccaccagagggcttcaacgggggaccgggccccccaggtgtctgggggtgccggacccgcccagcatccccatctacaccggggtcagcacctgcctccgtgctag

SEQ ID NO: 304030 - DNA, 261 bp, Artificial Sequence
  derived and/or modified sequence
atggccctgcgggccggcctggtgctgggcttccacaccctgatgacactcctgtctccacaggaggccggagccaccaaggggagagcggggcgtcacaggcgcaatcaaagcccatctggccaccccgggggggccctccagccccagcagtcccaccaaagggctagcactggcgaccgggccccccaagtgtccggtggcgcagggcccgcccagcacccccacctgcatcgggggcaacatctccctccctgttag

SEQ ID NO: 304031 - DNA, 261 bp, Artificial Sequence
  derived and/or modified sequence
atggccctgcgggccggcctggtgctgggcttccacaccctgatgacactgttaagtccacaggaggccggcgccacaaaaggctgggccggaagacaccgtaggaaccagtcacccagcggccatccagggggagccttgcagccgcagcagtcccatcagagagcatccactggcgatagggcccctcaggtgagtgggggtgctggccctgcccaacatccccatctgcatcggggccagcatctgcccccctgctag

SEQ ID NO: 304032 - DNA, 261 bp, Artificial Sequence
  derived and/or modified sequence
atggccctgcgggccggcctggtgctgggcttccacaccctgatgactttactcagccctcaggaggccggggccactaaaggcagagccggacggcatcgccgcaatcagtcacccagtgggcacccaggtggggcgctccagccccagcagtcacatcagcgcgcctcaactggggacagggccccgcaggtgagcgggggcgccggacctgctcagcacccacatctccataggggacagcatctgccaccttgctag

SEQ ID NO: 304033 - DNA, 186 bp, Artificial Sequence
  derived and/or modified sequence
atggccctgcgggccggcctggtgctgggcttccacaccctgatgacactactgagtccgcaggaagccggtgccacaaaagcagatcacatgggctcttacgggcctccctctacttccttgaccgccccaagagcttcaagccccatgaacttaatgagaaattcctgttctctatggacatag

SEQ ID NO: 304034 - DNA, 261 bp, Artificial Sequence
  derived and/or modified sequence
atggccctgcgggccggcctggtgctgggcttccacaccctgatgactctgctctcaccacaagaagccggcgccaccaagggacgggccggacgacacagacggaatcagtcccccagcgggcaccctgggggcgcactgcagccccagcagtcacatcaaagagctagcaccggggaccgagcaccacaggtttctggaggcgcagggcctgcccagcacccacatctccatagggggcagcacctgcccccctgctag

SEQ ID NO: 304035 - DNA, 261 bp, Artificial Sequence
  derived and/or modified sequence
atggccctgcgggccggcctggtgctgggcttccacaccctgatgacactactgagcccacaggaggccggtgccacaaagggctgggcagggcgtcatcgtcgtaaccagtctcccagcggtcatccaggtggcgccctacaacctcaacagtcacaccaacgggctagcacgggggaccgtgctccccaagtcagcggaggtgccggcccggcccagcacccacatctgcacagggggcagcacttgccgccatgctag

SEQ ID NO: 304036 - DNA, 261 bp, Artificial Sequence
  derived and/or modified sequence
atggccctgcgggccggcctggtgctgggcttccacaccctgatgaccttactgagtccgcaggaagccggtgctactaaaggccgggcagggaggcacaggaggaaccagagcccgagcggccaccccgggggcgccttgcaaccccagcagtcgcaccagcgtgcaagcacgggtgaccgggccccacaggtgagcggcggagccggtccagctcaacaccctcaccttcatcggggtcagcatctgccaccctgttag

SEQ ID NO: 304037 - DNA, 186 bp, Artificial Sequence
  derived and/or modified sequence
atggccctgcgggccggcctggtgctgggcttccacaccctgatgacactcctatcaccacaggaggccggggctaccaaagccgaccacatgggtagttatgggcctccgtcaacatccctgaccgccccaagagcaagtagcccaatgaatttgatgcgcaatagctgctccctgtggacatag

SEQ ID NO: 304038 - DNA, 186 bp, Artificial Sequence
  derived and/or modified sequence
atggccctgcgggccggcctggtgctgggcttccacaccctgatgacactgctctcaccacaggaggccggagcgaccaaagctgatcacatgggttcatatgggcccccctcaacatccctgacagccccccgtgccagctctccgatgaatctgatgcgcaactcttgctccctctggacctag

SEQ ID NO: 304039 - DNA, 186 bp, Artificial Sequence
  derived and/or modified sequence
atggccctgcgggccggcctggtgctgggcttccacaccctgatgacactgctgagtcctcaggaagcaggcgccacgaaagctgatcacatgggaagttatgggcccccttcaacctccctgactgctccgcgcgccagctcacctatgaatctcatgagaaatagctgctcattgtggacttag

SEQ ID NO: 304040 - DNA, 186 bp, Artificial Sequence
  derived and/or modified sequence
atggccctgcgggccggcctggtgctgggcttccacaccctgatgacgctgctgagcccccaggaggccggagctacaaaagctgatcacatgggctcatacggacctccctcgactagccttacggctccacgagccagctctcccatgaacttgatgcgtaacagctgttcactctggacttag

SEQ ID NO: 304041 - DNA, 186 bp, Artificial Sequence
  derived and/or modified sequence
atggccctgcgggccggcctggtgctgggcttccacaccctgatgaccctgctttcaccacaggaagccggggccacaaaggcagatcacatgggctcatatggacccccatcgacctcactgacagcacccagggcctctagtcccatgaacctcatgcggaattcttgctctctctggacctag

SEQ ID NO: 304042 - DNA, 186 bp, Artificial Sequence
  derived and/or modified sequence
atggccctgcgggccggcctggtgctgggcttccacaccctgatgacgctgttgtccccacaggaggctggcgcgacaaaagcagaccacatgggatcatatggcccccctagcacctcgctgacagcacccagagcctcctcccccatgaatctgatgcggaattcttgttcactgtggacctag

SEQ ID NO: 304043 - DNA, 261 bp, Artificial Sequence
  derived and/or modified sequence
atggccctccgggctgggctggtgttaggctttcatacccttatgactctgctgtcacctcaggaagcaggcgcaaccaagggacgcgctgggcgacataggagaaatcagagtccaagtgggcatcccggtggcgctttgcagccacagcagagccaccagagggcctctaccggtgacagagcacctcaagtgtccggaggcgctggtcccgctcagcatcctcatctgcacaggggccagcacctgccaccgtgttag

SEQ ID NO: 304044 - DNA, 261 bp, Artificial Sequence
  derived and/or modified sequence
atggccctcagggcaggactggtgttaggattccatactttgatgactctcttatcaccccaggaggccggagcaaccaaaggcagggcgggaagacatcggagaaaccagtcacccagtggccacccgggaggagccttacagccgcagcagtcacaccagagggccagcaccggagaccgggcacctcaagtgagcggaggagccggtcccgcacaacatccacatctacaccgcggacagcaccttccaccgtgctag

SEQ ID NO: 304045 - DNA, 261 bp, Artificial Sequence
  derived and/or modified sequence
atggcactgcgtgccggactggtgttgggcttccacacccttatgacactcttgagtccccaggaggcaggagcgaccaagggatgggccggacgtcacagaagaaatcagagtccttctgggcatccgggaggagccctgcagccacaacaaagtcaccagcgggcttctaccggtgacagagccccacaagtgtctggaggcgctggaccagctcaacatcctcacctccaccgtggtcagcatctgcctccttgctag

SEQ ID NO: 304046 - DNA, 261 bp, Artificial Sequence
  derived and/or modified sequence
atggccttacgcgcaggactggtcctcggctttcacacactcatgaccctactgagcccccaggaggccggtgcaacaaaggggagagccggtcgccataggcggaaccagtctccttccggacaccccggaggcgctttgcaaccccaacagagtcatcagagggcgtcaaccggcgacagagctccccaggttagcggcggagcagggccagcccagcacccccacttgcaccgcggtcagcaccttcccccttgctag

SEQ ID NO: 304047 - DNA, 186 bp, Artificial Sequence
  derived and/or modified sequence
atggctctaagggctgggttggtgctgggctttcacacattgatgacattactctctccccaggaagccggagccacaaaagctgaccacatggggtcttacgggccacctagtacgtctctgactgctcctagggcatcttctccgatgaacttgatgagaaactcctgtagtttatggacgtag

SEQ ID NO: 304048 - DNA, 261 bp, Artificial Sequence
  derived and/or modified sequence
atggccctcagagcgggactcgtgttaggcttccacactttgatgacgctgctgtcccctcaggaagccggagcgacaaaagggagggccggacgtcacagacgcaaccagtccccgagtggccatccaggcggagcccttcagccacaacagagtcatcagcgcgcatctactggggacagagcaccacaggtgtctggcggagcaggaccagcgcagcacccacaccttcaccggggacagcacctgcccccatgttag

SEQ ID NO: 304049 - DNA, 261 bp, Artificial Sequence
  derived and/or modified sequence
atggcgctgagagcaggcctggttctaggatttcacacacttatgactctactgtcacctcaggaggccggagctactaaaggctgggctggaaggcacaggcggaaccaatcaccgtccggccaccctggtggagccttgcagccacagcaatcccatcagagagcgagcaccggggatcgcgcacctcaggtgagtggcggagccggaccagcgcagcatccccatctccaccgaggccaacatctccccccatgctag

SEQ ID NO: 304050 - DNA, 261 bp, Artificial Sequence
  derived and/or modified sequence
atggcgctgagagccggactggtgctggggttccacacccttatgaccctcctgagccctcaagaggctggcgctacaaaggggagagccggacggcataggcggaatcagagcccgagcggacatccgggaggcgcactgcagccccagcaatcccaccagcgcgcatccactggcgacagagctcctcaggttagtgggggagcagggccagctcaacaccctcaccttcaccgcggacaacacctccctccatgctag

SEQ ID NO: 304051 - DNA, 186 bp, Artificial Sequence
  derived and/or modified sequence
atggctttaagggccggtctggttttgggattccatactctgatgaccctcctcagcccacaagaggcaggggctacaaaagcagaccatatgggcagctatggaccaccctccacttctcttactgccccacgggcatcttctccaatgaatctgatgcggaactcctgctccctgtggacttag

SEQ ID NO: 304052 - DNA, 186 bp, Artificial Sequence
  derived and/or modified sequence
atggcacttagagccggactggttttaggtttccatactctgatgaccctgctgtctccccaagaagcgggagccactaaggcagatcatatgggctcttacggaccaccttcaaccagcttaaccgcccctcgagcttccagccctatgaatctgatgagaaacagctgtagcctatggacctag

SEQ ID NO: 304053 - DNA, 186 bp, Artificial Sequence
  derived and/or modified sequence
atggccctgcgggcagggctggtgttgggcttccacacactgatgactttgcttagccctcaggaagccggagctacaaaggccgaccacatgggatcatacggaccgccaagcacttctttaactgctcctcgcgcatcctcacccatgaacctgatgcgaaattcatgctccctgtggacctag

SEQ ID NO: 304054 - DNA, 186 bp, Artificial Sequence
  derived and/or modified sequence
atggccctcagggcgggtctcgtgctggggttccataccctcatgaccctgctatccccccaagaggcaggtgccacgaaagccgatcacatgggctcttatgggccaccaagcacctcactcacagcaccacgcgcatcgagtcccatgaacttgatgcggaattcctgtagcctgtggacctag

SEQ ID NO: 304055 - DNA, 186 bp, Artificial Sequence
  derived and/or modified sequence
atggcattgcgtgccggactcgtcctagggtttcatactctgatgactcttctgtctccacaggaagcgggagcaaccaaagctgatcacatgggtagctacggaccaccttcgacgtctctgacagcgcctcgagcctcgtccccaatgaatctcatgcggaactcctgctccctttggacgtag

SEQ ID NO: 304056 - DNA, 186 bp, Artificial Sequence
  derived and/or modified sequence
atggcactgagagccggactcgtcctcggtttccacacactcatgacactgttaagcccacaggaggctggcgctactaaggctgaccacatgggaagctacggccctccttccacctctctgaccgcaccaagggcgtcatctcccatgaatctgatgagaaacagctgctccctctggacttag

SEQ ID NO: 304057 - protein, 23 aa, Artificial Sequence
  derived and/or modified sequence
MRPEDRMFHIRAVILRALSLAFL

SEQ ID NO: 304058 - DNA, 72 bp, Artificial Sequence
  derived and/or modified sequence
atgcggcccgaagatcgcatgtttcacatccgagcggtcatactcagggccctgtctctcgcatttctgtag

SEQ ID NO: 304059 - DNA, 630 bp, Artificial Sequence
  derived and/or modified sequence
atgagacctgaggatcgtatgttccacatcagagccgtcatccttcgggctctcagcctggcgtttcttctgagccttcgcggcgccggcgcaatcaaagcggatcatgtgtctacttatgcggcttttgtgcagacacaccgcccgacaggagaatttatgttcgagtttgatgaagacgagatgttctatgtggacctggacaaaaaggagacagtgtggcaccttgaggaatttggacaggcgttctcatttgaggctcaaggggggctcgccaacatcgccattcttaataacaatctaaacacgctgattcagcgttctaatcatacccaggctacaaatgatccccccgaagttaccgtgttccctaaagagcccgttgagttggggcagccgaatactctaatttgccatatcgacaaatttttcccacccgtgctcaatgtgacatggctgtgcaatggcgaactggtgactgagggagtggctgaatcactattcctgccccggacggattattccttccataaatttcactatttgacctttgtgccatctgctgaagatttttacgattgtcgcgtagagcactggggcctcgaccagcctctcctaaaacactggtag

SEQ ID NO: 304060 - DNA, 72 bp, Artificial Sequence
  derived and/or modified sequence
atgcggcccgaggacagaatgttccacatccgggctgtcattctgagggccctatccttagcctttctgtag

SEQ ID NO: 304061 - DNA, 72 bp, Artificial Sequence
  derived and/or modified sequence
atgagacccgaagaccgcatgttccatatccgagcagtgattctccgcgccttgtccctggcgtttttgtag

SEQ ID NO: 304062 - DNA, 630 bp, Artificial Sequence
  derived and/or modified sequence
atgcggccagaagacaggatgtttcacataagggctgttatccttcgcgccctttcattagcattcctgctgagtctccgcggtgccggtgcaattaaagctgaccacgtgtctacgtatgctgcttttgtccagacacataggcctactggtgagttcatgttcgagttcgatgaggatgaaatgttctacgtggatctcgataaaaaagagactgtgtggcacctggaggagtttggacaggccttttcctttgaagcacaaggcgggttggcaaacatcgctatacttaataacaatctgaatacgcttattcaacgcagcaaccacacccaggcaaccaacgatccacccgaagttactgtctttcccaaggagccggtggagctgggacagcctaacacgctcatatgccatattgacaagttcttccccccagttctcaatgtcacatggctgtgcaatggagagctcgttaccgagggggttgctgaatcactgtttctgccaagaactgattactcttttcacaaattccattacctcacgttcgtgccctctgccgaggacttttacgattgcagagtggaacactgggggcttgaccagccacttctgaaacattggtag

SEQ ID NO: 304063 - DNA, 72 bp, Artificial Sequence
  derived and/or modified sequence
atgagaccagaagacagaatgtttcatatccgcgcagtcatcttgcgggcgcttagtctggcatttctgtag

SEQ ID NO: 304064 - DNA, 72 bp, Artificial Sequence
  derived and/or modified sequence
atgcgtcccgaagaccgtatgttccacattcgggcagtcatcttgcgggccctgtctttggctttcctctag

SEQ ID NO: 304065 - DNA, 630 bp, Artificial Sequence
  derived and/or modified sequence
atgcgtcctgaagaccggatgttccatatcagggcagtaatccttcgggctcttagtctagcctttttactgtcattgaggggagcaggggccatcaaagccgaccatgtgagtacctatgcggcctttgtacagactcaccgccccactggagagttcatgttcgagtttgatgaggacgagatgttctacgtggatctggacaaaaaggagacagtctggcatctcgaagagtttggacaggcatttagcttcgaagcccagggggggttggcaaatattgctattctgaataacaatctgaacaccctcattcagcggtccaaccacactcaagccacgaacgaccctcctgaggttacggtgttcccaaaggagccagtcgaacttgggcagccgaatactctgatctgccatattgataagtttttccccccagttttgaatgtcacatggttatgtaatggcgaactagtgacggaaggggttgccgagtcgctgttcttacccaggacggattacagcttccataaattccattacctcacattcgtgcccagcgctgaggatttttacgattgccgtgtcgagcattggggccttgaccaaccactcttaaagcattggtag

SEQ ID NO: 304066 - DNA, 630 bp, Artificial Sequence
  derived and/or modified sequence
atgcggccagaagatcgaatgtttcacattcgggccgtgattctgagagccctatctctcgccttccttttaagtttgcgcggcgccggcgctataaaggcagatcacgtatcgacctatgccgcatttgtccagacacataggccaactggtgaattcatgttcgagttcgatgaagacgagatgttttatgtggatctggataagaaggaaacagtgtggcatctcgaggaatttggccaggccttctccttcgaagcccagggcggattggctaacattgcgattctgaataataacctgaacacgctcatccaaagaagtaaccatacacaggccacgaatgatcccccagaggtaaccgtatttcccaaggagcctgttgagctgggccaaccaaatactctaatatgccacatcgacaagttttttcctcccgtccttaacgtcacatggttgtgcaatggggagttggtgaccgagggtgtcgctgaatccttgtttctgccgagaaccgattactcgtttcacaaatttcactatctgactttcgtcccctcagccgaggacttctacgactgtcgagtggaacactggggactggatcagcctctgctgaagcattggtag

SEQ ID NO: 304067 - DNA, 72 bp, Artificial Sequence
  derived and/or modified sequence
atgagacccgaagacagaatgtttcacattcgtgcagttattcttagagccctaagccttgcttttttgtag

SEQ ID NO: 304068 - DNA, 630 bp, Artificial Sequence
  derived and/or modified sequence
atgcgaccagaagaccgtatgtttcacatcagggccgtaatattaagagcccttagtctcgccttcctgctctccctgagaggagccggggcaatcaaggcagaccacgtctccacttacgccgcctttgtccagacacaccgaccaactggcgagtttatgtttgagttcgatgaggatgagatgttctacgtggatctcgataagaaggagacggtgtggcacctggaggaatttggacaagcctttagtttcgaagctcaggggggactcgcaaacattgcaatccttaacaataacctcaatacattaatccagcgaagtaatcatacacaggctacgaacgaccctcccgaggtgaccgtcttcccaaaggagcccgtagagctaggacagcccaacacacttatttgccacatagataagttcttcccccccgtgctcaacgtcacctggttgtgtaatggagaactcgttaccgagggcgtcgccgagagcctgttcctgccccgtacagattactcgtttcacaaatttcactatctgactttcgttccaagtgctgaagacttctatgattgtcgggtggaacactggggccttgatcagcctctgctcaagcattggtag

SEQ ID NO: 304069 - DNA, 72 bp, Artificial Sequence
  derived and/or modified sequence
atgaggcccgaggataggatgtttcacatccgcgccgtgattctgcgcgctctatcccttgccttcctgtag

SEQ ID NO: 304070 - DNA, 72 bp, Artificial Sequence
  derived and/or modified sequence
atgcgaccagaggaccgtatgttccacatccgggccgtgatactaagggctctctccttggcattcctgtag

SEQ ID NO: 304071 - DNA, 630 bp, Artificial Sequence
  derived and/or modified sequence
atgcggcccgaggaccgaatgttccacatacgggccgtcatcctccgggccctctcattggcctttttgctcagtctccgcggcgcaggggccattaaggctgaccacgtatccacgtacgccgcgtttgtacagacccaccgacctaccggcgagttcatgtttgaattcgatgaggatgaaatgttctatgttgatctggataagaaggaaaccgtttggcatttggaggagtttggccaggctttttcttttgaagcacagggtggcctggccaacattgccattctgaacaacaatcttaacactcttatccagcgctcgaaccacacacaagcgaccaacgatcctcccgaagttaccgtttttccaaaggagccagtggagctgggccagcctaacactcttatatgtcatatcgataaattcttcccgcctgtgctgaacgttacctggctgtgtaatggcgagctcgtcacagagggagtggccgaaagcctgtttctgccccgcaccgactactccttccataaattccattacctcaccttcgtaccctcagcggaggacttttatgactgtcgagtagagcactggggactggaccagccacttcttaaacactggtag

SEQ ID NO: 304072 - DNA, 630 bp, Artificial Sequence
  derived and/or modified sequence
atgcggccagaagacagaatgttccatatccgcgctgtcatactgcgtgccttgtctctcgctttcttgcttagtttgcgcggtgccggcgcaattaaagcagaccatgtgagtacctatgccgctttcgtgcagactcaccggccaactggggagttcatgtttgagtttgatgaggatgagatgttctatgtcgacctcgataaaaaggaaaccgtctggcatttggaagaattcggacaagccttctcattcgaagctcagggtggtttggctaacattgccattttaaataacaacctcaacaccctcatccaaagaagtaaccacacccaggccactaatgatcctcctgaggtaaccgtgtttcctaaggagccagtggagctcggccagcctaatactttaatctgccatatagacaagttctttccgccggtcctgaatgtgacctggctctgcaatggcgagctcgtgaccgagggagtggccgagtccctgttcctacctaggaccgactatagctttcacaagtttcattacctcactttcgtgccatctgccgaagacttttacgactgccgagtggaacactgggggctcgaccaacctctgctcaagcactggtag

SEQ ID NO: 304073 - DNA, 630 bp, Artificial Sequence
  derived and/or modified sequence
atgcggccggaggatcggatgtttcacattagggccgtcatcttacgagcgctgtccctggcatttcttcttagtctcagaggtgccggagccatcaaggcggatcatgtttccacttacgctgcatttgtccagacacataggcctactggagagttcatgtttgaatttgatgaggatgagatgttctacgtcgatctggacaagaaggagacagtatggcacttggaagagtttggacaggccttctccttcgaagctcaggggggtctcgcaaatatcgcaatcttgaacaacaacctcaatacattgatccagagatctaaccatactcaggcaaccaacgacccccctgaggtgacagtctttcctaaagagcccgtggaacttggtcagcccaatactctaatatgtcacatcgataaatttttcccccccgtgttgaatgttacttggctctgcaatggggagctcgtgaccgagggcgttgccgagtcattattcttacctaggacagattattctttccacaaattccactacctaacctttgtgccctcggccgaagacttttatgattgccgtgtcgaacactggggcctggaccaaccgctgctcaagcactggtag

SEQ ID NO: 304074 - DNA, 72 bp, Artificial Sequence
  derived and/or modified sequence
atgaggcctgaggacaggatgttccacatccgggccgtcatcctgcgggccctgagcctggccttcctgtag

SEQ ID NO: 304075 - DNA, 630 bp, Artificial Sequence
  derived and/or modified sequence
atgaggcctgaggacaggatgttccacatccgggccgtcatcctgcgggccctgagcctggccttcctgctgagcctgcggggagctggggccatcaaggctgaccacgtgtccacctatgctgcctttgtgcagacccaccggcccaccggggagttcatgtttgaatttgatgaagatgagatgttctacgtggacctggacaagaaggagaccgtgtggcacctggaggagtttggccaggccttctcctttgaggcccagggcggcctggccaacatcgccatcctgaacaacaacctgaacaccctcatccagaggagcaaccacacccaggccaccaatgaccccccagaggtgacagtgttccccaaggagcctgtggagctgggccagcccaacaccctcatctgccacatcgacaagttcttcccccctgtgctgaatgtgacctggctgtgcaatggagagctggtgacagagggcgtggccgagagcctcttcctgcccaggacagactacagcttccacaagttccactacctgacctttgtgcccagcgctgaggacttctatgactgccgggtggagcactggggcctggaccagcccctgctgaagcactggtag

SEQ ID NO: 304076 - DNA, 918 bp, Artificial Sequence
  derived and/or modified sequence
gcacgaactcctcccggttgtagatgtatctctccaggaagcgctgtgtcccattaaacgcgtagcattcctgccgtccctggaaaagcaccttccagcgtcctctttacccagcaacagagaatgtcagctctatgatttctctgataggtgaatcccagccatgctgattcctctccacccatttccagtgctagaggcccacagtttcagtctcatctgcctccactcggcctcagttcctcatcactgttcctgtgctcacagtcatcaattatagaccccacaacatgcgccctgaagacagaatgttccatatcagagctgtgatcttgagagccctctccttggctttcctgctgagtctccgaggagctggggccatcaaggcggaccatgtgtcaacttatgccgcgtttgtacagacgcatagaccaacaggggagtttatgtttgaatttgatgaagatgagatgttctatgtggatctggacaagaaggagaccgtctggcatctggaggagtttggccaagccttttcctttgaggctcagggcgggctggctaacattgctatattgaacaacaacttgaataccttgatccagcgttccaaccacactcaggccaccaacgatccccctgaggtgaccgtgtttcccaaggagcctgtggagctgggccagcccaacaccctcatctgccacattgacaagttcttcccaccagtgctcaacgtcacgtggctgtgcaacggggagctggtcactgagggtgtcgctgagagcctcttcctgcccagaacagattacagcttccacaagttccattacctgacctttgtgccctcagcagaggacttctatgactgcagggtggagcactggggcttggaccagccgctcctcaagcactggg

SEQ ID NO: 304077 - DNA, 918 bp, Artificial Sequence
  derived and/or modified sequence
gcacgaactcctcccggttgtagatgtatctctccaggaagcgctgtgtcccattaaacgcgtagcattcctgccgtaactggtacaccaccttccagcgtcctctttacccagcaacagagaatgtcagctctatgatttctctgataggtgaatcccagccatgctgattcctctccacccatttccagtgctagaggcccacagtttcagtctcatctgcctccactcggcctcagttcctcatcactgttcctgtgctcacagtcatcaattatagaccccacaacatgcgccctgaagacagaatgttccatatcagagctgtgatcttgagagccctctccttggctttcctgctgagtctccgaggagctggggccatcaaggcggaccatgtgtcaacttatgccgcgtttgtacagacgcatagaccaacaggggagtttatgtttgaatttgatgaagatgagatgttctatgtggatctggacaagaaggagaccgtctggcatctggaggagtttggccaagccttttcctttgaggctcagggcgggctggctaacattgctatattgaacaacaacttgaataccttgatccagcgttccaaccacactcaggccaccaacgatccccctgaggtgaccgtgtttcccaaggagcctgtggagctgggccagcccaacaccctcatctgccacattgacaagttcttcccaccagtgctcaacgtcacgtggctgtgcaacggggagctggtcactgagggtgtcgctgagagcctcttcctgcccagaacagattacagcttccacaagttccattacctgacctttgtgccctcagcagaggacttctatgactgcagggtggagcactggggcttggaccagccgctcctcaagcactggg

SEQ ID NO: 304078 - DNA, 918 bp, Artificial Sequence
  derived and/or modified sequence
gcgcgaactcctcccggttgtagatgtatctctccaggaagcgctgtgtcccattaaacgcgtagcattcctgccgtccctggaaaagcaccttccagcgtcctctttacccagcaacagagaatgtcagctctatgatttctctgataggtgaatcccagccatgctgattcctctccacccatttccagtgctagaggcccacagtttcagtctcatctgcctccactcggcctcagttcctcatcactgttcctgtgctcacagtcatcaattatagaccccacaacatgcgccctgaagacagaatgttccatatcagagctgtgatcttgagagccctctccttggctttcctgctgagtctccgaggagctggggccatcaaggcggaccatgtgtcaacttatgccgcgtttgtacagacgcatagaccaacaggggagtttatgtttgaatttgatgaagatgagatgttctatgtggatctggacaagaaggagaccgtctggcatctggaggagtttggccaagccttttcctttgaggctcagggcgggctggctaacattgctatattgaacaacaacttgaataccttgatccagcgttccaaccacactcaggccaccaacgatccccctgaggtgaccgtgtttcccaaggagcctgtggagctgggccagcccaacaccctcatctgccacattgacaagttcttcccaccagtgctcaacgtcacgtggctgtgcaacggggagctggtcactgagggtgtcgctgagagcctcttcctgcccagaacagattacagcttccacaagttccattacctgacctttgtgccctcagcagaggacttctatgactgcagggtggagcactggggcttggaccagccgctcctcaagcactggg

SEQ ID NO: 304079 - DNA, 918 bp, Artificial Sequence
  derived and/or modified sequence
gcacgagctcctcccggttgtagatgtatctctccaggaagcgctgtgtcccattaaacgcgtagcattcctgccgtccctggaaaagcaccttccagcgtcctctttacccagcaacagagaatgtcagctctatgatttctctgataggtgaatcccagccatgctgattcctctccacccatttccagtgctagaggcccacagtttcagtctcatctgcctccactcggcctcagttcctcatcactgttcctgtgctcacagtcatcaattatagaccccacaacatgcgccctgaagacagaatgttccatatcagagctgtgatcttgagagccctctccttggctttcctgctgagtctccgaggagctggggccatcaaggcggaccatgtgtcaacttatgccgcgtttgtacagacgcatagaccaacaggggagtttatgtttgaatttgatgaagatgagatgttctatgtggatctggacaagaaggagaccgtctggcatctggaggagtttggccaagccttttcctttgaggctcagggcgggctggctaacattgctatattgaacaacaacttgaataccttgatccagcgttccaaccacactcaggccaccaacgatccccctgaggtgaccgtgtttcccaaggagcctgtggagctgggccagcccaacaccctcatctgccacattgacaagttcttcccaccagtgctcaacgtcacgtggctgtgcaacggggagctggtcactgagggtgtcgctgagagcctcttcctgcccagaacagattacagcttccacaagttccattacctgacctttgtgccctcagcagaggacttctatgactgcagggtggagcactggggcttggaccagccgctcctcaagcactggg

SEQ ID NO: 304080 - DNA, 72 bp, Artificial Sequence
  derived and/or modified sequence
atgcggcccgaggaccggatgttccacatccgggccgtgatcctgcgggccttaagccttgccttcctctag

SEQ ID NO: 304081 - DNA, 630 bp, Artificial Sequence
  derived and/or modified sequence
atgcggcccgaggaccggatgttccacatccgggccgtgatcctgagagcattatcgctggccttcctgttaagtctgaggggagctggagccatcaaggctgatcatgtttcgacatatgctgcttttgtgcagactcatcgacccaccggcgaatttatgttcgagttcgatgaggacgaaatgttctatgtggatctggataaaaaggaaacagtctggcatctggaagagtttgggcaagcattctcctttgaggcccagggcggcctcgccaacattgcaatcttgaataataatctcaacacactgatccagcgaagtaatcatacacaggctaccaatgatccaccggaggtgactgtgttccccaaggagcctgtggagcttggccagccaaatacccttatctgtcatatagacaaattctttcccccagtcctgaatgtcacctggttatgtaacggcgaactcgttaccgaaggtgtggcagagtctctctttttgcccaggacagactactctttccacaagttccattatcttacctttgtcccctccgccgaagacttttatgattgtcgcgtggagcattggggcctggaccagccacttctcaagcattggtag

SEQ ID NO: 304082 - DNA, 72 bp, Artificial Sequence
  derived and/or modified sequence
atgcggcccgaggaccggatgttccacatccgggccgtgatcctgagagcgctcagtctggcgtttctgtag

SEQ ID NO: 304083 - DNA, 72 bp, Artificial Sequence
  derived and/or modified sequence
atgcggcccgaggaccggatgttccacatccgggccgtgatcctgcgagctctttctttggctttcctctag

SEQ ID NO: 304084 - DNA, 630 bp, Artificial Sequence
  derived and/or modified sequence
atgcggcccgaggaccggatgttccacatccgggccgtgatcctgagggctcttagtctggcattcctgctcagcctgcgaggagcgggagccattaaggcggaccacgtgagcacatacgctgctttcgtgcagacccatagacccacaggggaattcatgtttgagtttgatgaagacgagatgttttatgtagatctggataagaaagaaaccgtctggcatctggaagaattcgggcaggctttcagtttcgaggcccaagggggcctggccaatattgcaattctcaacaataatctcaacaccttgatacagcggagtaatcacacgcaggcaaccaacgatccaccggaggtgacagtctttccaaaggaaccagttgagctggggcagcctaacaccctgatatgccacatcgataaattcttcccgccagtattgaatgttacgtggttgtgcaatggggaactcgttaccgaaggtgttgccgaatcccttttcttaccgaggacagactacagctttcataaattccactacctcacgttcgtcccttccgccgaggacttttatgactgccgtgtcgaacactggggtctggatcagcccttactcaaacactggtag

SEQ ID NO: 304085 - DNA, 72 bp, Artificial Sequence
  derived and/or modified sequence
atgcggcccgaggaccggatgttccacatccgggccgtgatcctgagagcactgtcactggccttcctgtag

SEQ ID NO: 304086 - DNA, 72 bp, Artificial Sequence
  derived and/or modified sequence
atgcggcccgaggaccggatgttccacatccgggccgtgatcctgcgagctctctccctcgcatttctgtag

SEQ ID NO: 304087 - DNA, 630 bp, Artificial Sequence
  derived and/or modified sequence
atgcggcccgaggaccggatgttccacatccgggccgtgatcctgcgggcgctgtctctggctttcctcctctctctgcggggcgcaggcgccatcaaagccgatcacgtgtccacctacgctgcttttgtgcagacgcacagacccacaggcgagttcatgttcgagttcgacgaggacgagatgttttacgtcgatctcgataaaaaagaaaccgtgtggcatttggaggagttcggccaagcattcagctttgaagctcaggggggtctcgcaaacatcgccattctgaataataaccttaacaccttgattcagcggtctaaccatacacaggccactaacgaccctcctgaggttaccgtctttcccaaggagcccgtggagctgggacagcctaacaccctgatatgccacattgataagttctttcctcccgtcctcaatgtgacctggctgtgtaacggggagcttgtgacggaaggggtggctgaatcactttttttgccaagaacagactatagtttccacaaatttcattacctcacttttgtgccctccgcggaggatttctatgactgcagagtggaacactggggacttgatcaacctctgctaaagcattggtag

SEQ ID NO: 304088 - DNA, 630 bp, Artificial Sequence
  derived and/or modified sequence
atgcggcccgaggaccggatgttccacatccgggccgtgatcctgagagctctcagcctggcctttttacttagcctacgaggagcaggagctatcaaagcagaccacgtgagcacctacgccgcattcgtccaaacccatcgcccaactggggagttcatgttcgagttcgatgaagacgaaatgttctacgtggatctggacaaaaaggaaacagtgtggcatctggaggaatttggccaggccttttccttcgaggcacaagggggcctcgctaatattgcaattctcaataataatctaaatacactgattcaacgcagtaaccatacccaggctactaatgaccctcctgaggtgactgtttttccgaaggagcctgtggaactcggccaacccaataccctgatttgtcacatagacaaattctttccacccgtgttaaatgtgacatggctctgtaatggcgagctcgtgactgagggggtagccgaaagcttgttcctgccgcggacagattattctttccacaagtttcactacctaacattcgttccaagcgcggaagacttttatgactgcagggttgaacactgggggctcgaccagccccttctaaagcactggtag

SEQ ID NO: 304089 - DNA, 72 bp, Artificial Sequence
  derived and/or modified sequence
atgcggcccgaggaccggatgttccacatccgggccgtgatcctgcgcgcactgtctctggctttcctctag

SEQ ID NO: 304090 - DNA, 630 bp, Artificial Sequence
  derived and/or modified sequence
atgcggcccgaggaccggatgttccacatccgggccgtgatcctgagagcactgagcctggcctttctactcagcctgcgaggcgctggtgcaataaaggcagatcacgtatcgacgtatgctgccttcgtccaaacacatcgcccaacgggggagttcatgtttgagttcgatgaagatgagatgttctatgtggacctcgataagaaggagaccgtgtggcacctggaggaattcggacaggctttctccttcgaggcccaaggcgggttggcaaacattgcaatactaaataacaacctgaacactcttatacagcggagcaatcatacgcaggccacaaacgatcctcctgaggtgactgtctttcccaaggagcctgtcgagctggggcaacctaacactcttatatgccatatcgacaagttctttccacccgtgctcaatgtaacctggttgtgtaatggggaactcgtgaccgaaggcgtggccgaatcccttttcttgcctagaaccgattattctttccacaaatttcactatctgacattcgtgccaagcgccgaggacttttacgactgcagagtcgaacattggggtctggatcagccactgcttaagcattggtag

SEQ ID NO: 304091 - DNA, 72 bp, Artificial Sequence
  derived and/or modified sequence
atgcggcccgaggaccggatgttccacatccgggccgtgatcctgagggccctgagccttgcgttcctgtag

SEQ ID NO: 304092 - DNA, 72 bp, Artificial Sequence
  derived and/or modified sequence
atgcggcccgaggaccggatgttccacatccgggccgtgatcctgcgggcccttagtctggccttcctgtag

SEQ ID NO: 304093 - DNA, 630 bp, Artificial Sequence
  derived and/or modified sequence
atgcggcccgaggaccggatgttccacatccgggccgtgatcctgcgtgcactcagcctggcatttctgctgtcactccgcggggctggggccatcaaagccgaccacgtctccacctacgctgccttcgtgcagactcatcggccaaccggtgaatttatgttcgaattcgatgaggacgagatgttctacgtggatttagataagaaagagaccgtttggcacctagaagagtttggccaggccttttctttcgaagcacagggcggactggcgaacatcgcgattctaaataataatttgaataccttgattcagcggtcaaaccatacacaggctactaacgacccacctgaggtgacggtgtttcccaaggagccagtggaattggggcagcccaacaccctgatttgtcacatcgacaagttttttccccccgtgttaaacgtcacctggctctgtaacggcgaattagtgaccgagggagtggcggagagcttgttcctgcctcgtaccgactattccttccataagtttcactacctaacatttgtacctagtgccgaggacttctacgattgcagagtggagcactgggggcttgatcaaccacttctgaaacactggtag

SEQ ID NO: 304094 - DNA, 630 bp, Artificial Sequence
  derived and/or modified sequence
atgcggcccgaggaccggatgttccacatccgggccgtgatcctgcgcgccctctctctggcttttctgctgtctctgcgtggcgccggtgccatcaaagccgatcacgtgtctacctatgctgcgtttgtgcagactcatagacccactggcgaattcatgttcgaatttgatgaagacgaaatgttttacgttgatctggacaaaaaggagacagtatggcacctcgaggagttcgggcaagccttctccttcgaggctcagggtggcctggccaatatagcaatcctgaacaacaacctcaacactttaatacaaaggtctaaccatacgcaagccaccaatgacccaccagaggttactgtgtttcccaaagaaccagtggagttagggcagccaaatactctaatttgccacattgataagttcttccctcccgtactgaatgtgacttggctctgcaatggggagctcgtaacagaaggcgtggccgagagtttatttctgccacggacagactacagttttcacaaatttcactatctgacttttgtgccttctgcagaggacttctacgactgccgggttgagcattggggactggatcagccactcctcaagcactggtag

SEQ ID NO: 304095 - DNA, 630 bp, Artificial Sequence
  derived and/or modified sequence
atgcggcccgaggaccggatgttccacatccgggccgtgatcctgcgtgccttgtcgctggcttttctcctgtcactgaggggggcgggagcgataaaggctgaccatgtatccacttacgccgcttttgtccagacccaccgacccacaggagagtttatgtttgagttcgacgaagatgaaatgttctatgtcgatctcgacaagaaagagaccgtatggcacctggaggagttcgggcaggccttttcatttgaagcccaaggggggctggctaatattgccatactgaacaacaacctgaacaccttaattcagcgttctaaccacactcaggctaccaatgacccacctgaggtaacagtgttccctaaagagcccgttgaattgggacagccaaacaccctgatctgtcacattgacaaattcttcccccctgtgctgaatgtaacatggctgtgcaacggggagctggttacagagggggttgccgagagcttgttcctgccacgcaccgattactcttttcacaagtttcattatttgacttttgtgccttccgcggaagatttttacgactgccgggtagagcactggggcctggatcagccgctccttaaacattggtag

SEQ ID NO: 304096 - DNA, 72 bp, Artificial Sequence
  derived and/or modified sequence
atgcgaccggaagacaggatgttccacatcagagctgtaatattacgggcattatcgctggctttcctgtag

SEQ ID NO: 304097 - DNA, 630 bp, Artificial Sequence
  derived and/or modified sequence
atgagaccagaggatcgaatgttccacatcagggcagtgatcctgagggctttatctctggccttccttctgtctttgaggggtgccggagccataaaggcagaccatgtgagcacctacgctgcatttgtgcagacccatcggcctactggagaattcatgtttgagtttgatgaggatgagatgttctatgttgatttagataaaaaggagaccgtttggcacttagaagaattcggacaggccttttcttttgaggcacaggggggattagccaacatcgccatcctcaacaataacctgaatacactcatacagagatccaaccatacccaggctaccaatgatccacccgaagtgacagtcttccctaaagaaccagtggagctgggacagcctaataccttgatctgccacatcgacaagttcttcccccctgttctcaacgtgacctggctgtgtaacggcgagttagtaactgaaggtgtggcagaaagcttgtttttgcccagaacagattacagcttccacaaattccattaccttacgtttgtcccctccgccgaggatttctacgattgtcgagtggagcactgggggcttgatcagccactgctcaaacactggtag

SEQ ID NO: 304098 - DNA, 72 bp, Artificial Sequence
  derived and/or modified sequence
atgcggccagaggatcgcatgtttcatatcagggcggtgatcctgcgcgctcttagcctggcttttctatag

SEQ ID NO: 304099 - DNA, 72 bp, Artificial Sequence
  derived and/or modified sequence
atgcgcccagaagatcgaatgttccatattagagccgttattctgagagccctttcactcgccttcttgtag

SEQ ID NO: 304100 - DNA, 630 bp, Artificial Sequence
  derived and/or modified sequence
atgcgcccagaagaccgaatgttccatattcgagccgttatcttaagagccctatcgctggctttcctactttccctgcggggtgcaggagctatcaaagcagaccacgtgtccacatatgcagctttcgtgcagacccataggccaaccggggaattcatgttcgaattcgatgaggacgagatgttctacgtcgacctggacaagaaggaaacagtgtggcacttagaggaatttggccaggccttctccttcgaagcgcagggaggattggcgaacatcgcaatacttaataacaatttaaatacgctcatccagcggagcaaccacacccaggcaactaatgatcctccagaggtcaccgtcttccccaaggagcccgtggagttgggccagcccaacacactcatctgccatatagacaagttctttccccctgtcctcaacgtgacgtggttatgtaatggcgaactcgtgacagagggcgtggccgagtctttgtttctgccaaggacagactatagttttcataagttccattaccttaccttcgtcccttctgcagaagatttctacgattgccgggtggagcattggggcctcgaccagccgttgctgaagcattggtag

SEQ ID NO: 304101 - DNA, 72 bp, Artificial Sequence
  derived and/or modified sequence
atgagacctgaagatagaatgttccatatcagagctgttatcctgcgggcactgtcattggccttcctatag

SEQ ID NO: 304102 - DNA, 72 bp, Artificial Sequence
  derived and/or modified sequence
atgcgccctgaggatagaatgtttcacattcgcgcagtcatcttgcgggctctatctctcgcctttttgtag

SEQ ID NO: 304103 - DNA, 630 bp, Artificial Sequence
  derived and/or modified sequence
atgcgccctgaagatcgcatgtttcatattcgcgctgtcattttgagagcccttagcctggctttcctacttagccttagaggcgctggagctatcaaggctgaccacgtgagtacatacgcagccttcgtccaaacccatagacccactggagagttcatgttcgagtttgacgaggatgaaatgttctatgtggatctggacaagaaagagacagtgtggcacctcgaagaattcggccaagccttctcttttgaggcgcaaggcggactggctaacattgcaatactcaacaataatctaaacacactcatccagagaagcaatcatacccaagctacaaacgaccccccagaggtgacagtttttcctaaagagcccgtagagctggggcagcctaacaccctcatatgtcatattgataagttcttcccacctgtcctgaacgtaacctggctttgcaatggagagcttgtgacagaaggggttgcggagtccctcttcctcccacggacagactattccttccacaagtttcattatctaacgtttgtcccatctgcagaagatttttatgactgcagggtggaacattggggcctggaccagccactcttgaaacactggtag

SEQ ID NO: 304104 - DNA, 630 bp, Artificial Sequence
  derived and/or modified sequence
atgagacctgaggatcgtatgtttcacatccgtgccgtgattctccgcgcattgtctttggcattcttgctcagcttgaggggagctggtgccataaaggcagaccacgtgtccacctacgctgcctttgtccagactcaccgccctactggggagtttatgtttgaattcgacgaggacgaaatgttttatgtcgatctggataagaaggagaccgtctggcacctggaggagtttgggcaggctttctctttcgaggctcagggcggattggctaatattgccatcctaaacaataacctgaatacactcatccaaagaagcaatcacacgcaagctacaaacgatcctcccgaggtgaccgtcttccccaaagaaccggtggagctgggccagcctaacacccttatttgccatattgacaagttctttccacctgtcttgaacgtaacatggttatgtaatggggaactcgttacagaaggagtggccgagagccttttcttgcctcggaccgattatagtttccacaagttccactacctgacctttgtccccagtgctgaagacttctacgattgccgcgtcgagcactgggggctggaccagccgctgcttaaacactggtag

SEQ ID NO: 304105 - DNA, 72 bp, Artificial Sequence
  derived and/or modified sequence
atgcgtcccgaagatagaatgttccacattcgagccgtgattctgcgggctctgagcctggcttttctgtag

SEQ ID NO: 304106 - DNA, 630 bp, Artificial Sequence
  derived and/or modified sequence
atgcgccctgaggacaggatgtttcatatcagagccgtaattctccgagctttgagcctagcctttcttctatcacttcggggagccggtgcaatcaaagccgaccatgtgagcacttatgccgctttcgtgcagactcataggccaacaggcgagtttatgttcgaatttgatgaggacgagatgttttatgtggacctcgacaagaaggaaacagtctggcatttggaggaattcgggcaggctttctcatttgaggcgcagggaggccttgccaacatcgccattctcaataacaacctgaacacacttatccagaggtccaaccatacgcaggccacaaacgacccacctgaagtaacggtctttccaaaggagcccgtagagctggggcagccaaataccctgatatgccacatagacaagttctttccccctgtattgaatgtgacatggttgtgcaacggagagttggtcactgaaggagtagcggagagcctgttcctgccgagaactgactactcttttcacaagttccactacctgacatttgttcctagcgccgaggatttctatgactgccgtgtcgaacattggggtttggatcagccgttgcttaaacactggtag

SEQ ID NO: 304107 - DNA, 72 bp, Artificial Sequence
  derived and/or modified sequence
atgcgaccagaagacaggatgttccacattagggccgtaatcctgcgggctctatctctggctttcttgtag

SEQ ID NO: 304108 - DNA, 72 bp, Artificial Sequence
  derived and/or modified sequence
atgaggcccgaagatcgcatgtttcatatccgagccgtgattctgcgcgctctttctctggccttcttatag

SEQ ID NO: 304109 - DNA, 630 bp, Artificial Sequence
  derived and/or modified sequence
atgcgcccagaagatcgtatgttccatattcgagctgttatcctgagggcactttctcttgctttcctcctgtcactgcgcggtgccggagccattaaagccgatcatgtttccacttacgccgctttcgttcagacccacagacctaccggggagtttatgttcgagtttgacgaggacgaaatgttctacgtcgacttggacaaaaaggaaacagtctggcatctcgaggagtttggccaggccttttcctttgaggctcagggcggactggccaacatcgcgattctgaacaacaacttgaatacacttattcagaggagcaaccacacccaggccaccaacgacccacctgaggttaccgtgttccccaaggaacctgtggaactggggcagccaaatacactaatttgtcacattgataaattcttcccaccagtgctgaacgtgacgtggctttgcaatggcgaactggtaacggagggggttgccgaaagcttattcctgcctcgtacggactacagcttccacaagttccactatctaaccttcgttccatctgccgaggatttttacgattgccgagtggaacactgggggttggaccaacccctgcttaagcattggtag

SEQ ID NO: 304110 - DNA, 630 bp, Artificial Sequence
  derived and/or modified sequence
atgcggccagaagatcggatgtttcacatcagggccgtaatcctccgggctctgagcctggcatttcttttatccctcagaggcgctggagcgatcaaggcggatcacgtgtctacatatgcggcttttgtccagactcataggcctactggggaattcatgtttgaattcgacgaagacgagatgttttatgtagacctcgataaaaaggaaaccgtctggcacctagaggaatttggccaggcgttctctttcgaagctcaaggtggactcgctaacatagccatcctgaacaacaatttgaacactctgattcagaggtccaaccatactcaggccaccaacgacccacccgaagtgaccgtctttcccaaagaaccagtagagctggggcagccaaacacactaatctgccacattgataagttctttcccccagtcctgaatgtgacatggctgtgcaatggcgaactggtcaccgaaggggttgctgaatccctgtttctgcccaggactgattactctttccacaaattccactacttaacattcgtgcccagtgccgaggatttctacgactgccgagtggagcactggggattggatcagccactactcaagcactggtag

SEQ ID NO: 304111 - DNA, 630 bp, Artificial Sequence
  derived and/or modified sequence
atgagaccagaagacaggatgttccacataagagccgtgattctgcgtgcattatctctcgcctttctgctgtccctccggggagctggcgctattaaagctgatcatgtcagtacctacgcagcctttgtgcaaacacatcggccaaccggcgaatttatgttcgaattcgacgaggatgagatgttctatgtagacctggataaaaaagagactgtctggcatctcgaagaattcggtcaggcgttctctttcgaggcccagggcggtcttgcaaacatcgccatcctgaataacaatctgaacacgctcatccaaagatctaatcacacccaggcaaccaatgatcccccagaggtgactgtgtttccaaaagagcccgtcgagttaggccagcctaacaccctcatctgtcacattgacaagttcttcccccctgttctcaacgtgacatggctgtgtaacggagaactggtcacagagggcgttgcagaatcactctttcttccccgtacggactactccttccataagttccactaccttacttttgtgccctctgccgaggacttctacgactgcagggtcgagcattggggcctcgatcaacctctgctgaagcattggtag

SEQ ID NO: 304112 - DNA, 72 bp, Artificial Sequence
  derived and/or modified sequence
atgagacccgaggacagaatgttccacatcagagccgtgatcctgagagccctgagcctggccttcctgtag

SEQ ID NO: 304113 - DNA, 630 bp, Artificial Sequence
  derived and/or modified sequence
atgagacccgaggacagaatgttccacatcagagccgtgatcctgagagccctgagcctggccttcctgctgagcctgagaggcgccggcgccatcaaggccgaccacgtgagcacctacgccgccttcgtgcagacccacagacccaccggcgagttcatgttcgagttcgacgaggacgagatgttctacgtggacctggacaagaaggagaccgtgtggcacctggaggagttcggccaggccttcagcttcgaggcccagggcggcctggccaacatcgccatcctgaacaacaacctgaacaccctgatccagagaagcaaccacacccaggccaccaacgacccccccgaggtgaccgtgttccccaaggagcccgtggagctgggccagcccaacaccctgatctgccacatcgacaagttcttcccccccgtgctgaacgtgacctggctgtgcaacggcgagctggtgaccgagggcgtggccgagagcctgttcctgcccagaaccgactacagcttccacaagttccactacctgaccttcgtgcccagcgccgaggacttctacgactgcagagtggagcactggggcctggaccagcccctgctgaagcactggtag

SEQ ID NO: 304114 - protein, 218 aa, Artificial Sequence
  derived and/or modified sequence
  misc_feature (1)..(1): Xaa can be any naturally occurring amino acid
XLQIPGGFWAAAVTVMLVMLSTPVAEARDFPKDFLVQFKGMCYFTNGTERVRGVARYIYNREEYGRFDSDVGEFQAVTELGRSIEDWNNYKDFLEQERAAVDKVCRHNYEAELRTTLQRQVEPTVTISPSRTEALNHHNLLVCSVTDFYPAQIKVRWFRNDQEETAGVVSTSLIRNGDWTFQILVMLEITPQRGDIYTCQVEHPSLQSPITVEWRLLH

SEQ ID NO: 304115 - DNA, 657 bp, Artificial Sequence
  derived and/or modified sequence
tgactgcagatccccggcggcttctgggccgccgccgtgaccgtgatgctggtgatgctgagcacccccgtggccgaggccagagacttccccaaggacttcctggtgcagttcaagggcatgtgctacttcaccaacggcaccgagagagtgagaggcgtggccagatacatctacaacagagaggagtacggcagattcgacagcgacgtgggcgagttccaggccgtgaccgagctgggcagaagcatcgaggactggaacaactacaaggacttcctggagcaggagagagccgccgtggacaaggtgtgcagacacaactacgaggccgagctgagaaccaccctgcagagacaggtggagcccaccgtgaccatcagccccagcagaaccgaggccctgaaccaccacaacctgctggtgtgcagcgtgaccgacttctaccccgcccagatcaaggtgagatggttcagaaacgaccaggaggagaccgccggcgtggtgagcaccagcctgatcagaaacggcgactggaccttccagatcctggtgatgctggagatcaccccccagagaggcgacatctacacctgccaggtggagcaccccagcctgcagagccccatcaccgtggagtggagactgctgcactag

SEQ ID NO: 304116 - DNA, 657 bp, Artificial Sequence
  derived and/or modified sequence
taattacaaattcctggcgggttctgggcagccgctgtgaccgtaatgttagttatgctgagtacccccgttgccgaggctcgcgactttccgaaggacttccttgttcaattcaaggggatgtgttactttacaaacgggacggagcgagttcggggtgtggcccgatacatctacaacagagaggaatacggccgcttcgactcggatgtgggggagtttcaggcggtgaccgagctgggacgttcgatcgaggattggaacaattacaaagatttcctggaacaggaaagagccgcagtggacaaagtgtgtcgtcataactatgaggctgaacttaggactacccttcagagacaggtggaacccactgtgacaatcagcccctcaagaaccgaggcacttaaccaccacaacctcctcgtttgtagtgtgaccgacttctaccccgctcagatcaaggtccgatggttccgtaacgaccaggaggagacagcgggggtggtgagcacctcactcataagaaatggggactggaccttccagatcctagtgatgctggagatcactcctcagaggggagacatctatacctgtcaggtggaacaccctagtttgcagtcgcccatcaccgttgaatggcggttgttacactag

SEQ ID NO: 304117 - DNA, 657 bp, Artificial Sequence
  derived and/or modified sequence
tgactacagatcccagggggcttttgggccgccgccgtcacagtcatgctggtgatgctctcaacccctgtggcagaagctcgcgatttccctaaagatttccttgtccagttcaaaggcatgtgctattttaccaatggtacagaacgggtgcgcggagtggccagatatatctacaacagggaagaatatggccgctttgacagcgacgtgggagagttccaggccgtaaccgaactaggaaggtcgattgaggactggaacaattacaaagatttcctggagcaggagagggctgctgtcgacaaagtctgcagacacaattatgaggcagaactgaggacgactctccagagacaagtggaacccaccgtcactatcagtccatcacggactgaagcgctgaatcaccacaaccttcttgtatgttctgtgaccgacttctatccggcacagattaaggtcaggtggttccggaacgaccaggaggagacagccggagtggtgagtacctcgctaatcaggaatggggactggaccttccaaattctggtgatgctcgagatcacaccgcagcggggtgacatctatacctgccaagtcgagcaccccagcctccaatccccaattacagttgaatggcgtcttctccactag

SEQ ID NO: 304118 - DNA, 657 bp, Artificial Sequence
  derived and/or modified sequence
taacttcagatccccggcgggttttgggccgccgccgtcactgtgatgttagtgatgctaagcacccctgtggcggaggctcgcgattttcctaaggactttttggtgcagttcaaaggcatgtgctacttcactaacggcacggagagagtcaggggggtggcaagatatatttataatcgggaagagtacggacggttcgacagtgatgtaggtgaattccaggcggtaactgaactgggaagatcgatcgaggattggaataattataaagacttcctggagcaagaacgtgcagcagtcgacaaggtatgcaggcacaactacgaggctgagcttcggaccaccctacagcgacaagttgagcccaccgtgactatcagtccatctcggacggaggcactcaaccatcataatttactggtgtgctccgtgactgatttctaccccgctcagatcaaggtgcgctggttcaggaatgatcaggaggagacagcaggcgtcgtctccacctcactcatccgaaacggggactggacatttcagatcctcgtgatgttagagattacccctcagagaggggacatttacacgtgtcaagttgagcacccatctttgcagagtcccatcactgtcgagtggcggctgctgcactag

SEQ ID NO: 304119 - DNA, 657 bp, Artificial Sequence
  derived and/or modified sequence
taactgcaaatcccgggcggattctgggccgcagcagtgaccgtcatgctggtgatgttaagtacccccgttgccgaggcccgggattttccgaaagactttctggtgcagttcaaaggcatgtgttactttacaaacgggaccgaacgggtccggggcgtggcaaggtacatatacaatcgcgaggagtatggccggttcgattccgacgtaggcgaatttcaggccgtaaccgaactgggccggtccatagaggactggaacaactataaggacttcttagaacaggagcgcgccgccgttgataaggtatgtagacataactatgaagctgagttgagaacgacactacaaaggcaagtggaacctaccgttactattagcccctccaggaccgaagctttgaaccaccataatctcttagtttgctccgtgactgatttttacccggctcagatcaaggtgcgatggttcagaaatgaccaggaggagacagctggagtggtgtccacctcactgatccgaaacggtgactggaccttccagattctcgtgatgctagaaataacccctcaacgtggggacatctatacctgtcaggttgagcatccgagcctgcagtcgcccataaccgtggagtggcgactattgcactag

SEQ ID NO: 304120 - DNA, 657 bp, Artificial Sequence
  derived and/or modified sequence
tgactgcagatccctgggggcttctgggccgctgctgtgacagtgatgctggtgatgctgagcacccctgtggccgaggcccgggacttccccaaggacttcctggtgcagttcaagggcatgtgctacttcaccaacggcacagagcgggtgcggggcgtggcccgctacatctacaaccgggaggagtatggccgctttgacagtgatgtgggggagttccaggccgtgacagagctgggccgcagcattgaggactggaacaactacaaggacttcctggagcaggagagagctgctgtggacaaggtgtgccgccacaactatgaagctgagctgcggaccaccctgcagaggcaggtggagcccaccgtgaccatcagccccagcaggacagaggccctgaaccaccacaacctgctggtgtgcagcgtgacagacttctacccagcccagatcaaggtgcgctggttcagaaatgaccaggaggagacagctggggtggtgtccaccagcctcatcagaaatggagactggaccttccagatcctggtgatgctggagatcaccccccagagaggagacatctacacctgccaggtggagcaccccagcctgcagagccccatcaccgtggagtggaggctgctgcactag

SEQ ID NO: 304121 - DNA, 721 bp, Artificial Sequence
  derived and/or modified sequence
ctctgcagatccctggaggcttttgggcagcagctgtgaccgtgatgctggtgatgctgagcaccccagtggctgaggccagagactttcccaaggatttcttggtccagtttaagggcatgtgctacttcaccaacgggacagagcgcgtgcgcggtgtggccagatacatctataaccgcgaggagtacgggcgcttcgacagcgacgttggggagttccaggcggtgaccgagctggggcggagcatcgaggactggaacaactataaggacttcttggagcaggagcgggccgcggtggacaaggtgtgcagacacaactacgaggcggagctgcgcacgaccttgcagcggcaagtggagcccacagtgaccatctccccatccaggacagaggccctcaaccaccacaacctgctggtctgctcagtgacagatttctatccagcccagatcaaagtccggtggtttcggaatgaccaggaggagacagccggtgttgtgtccacctccctcattaggaatggtgactggaccttccagattctggtgatgctggaaataactccccagcgtggagacatctacacctgccaagtggagcaccccagcctccagagccccatcaccgtggagtggcgactcctgcactgactcctgaggacttttgtctgggattggtcatcactcttctgtaatgcccacctgcccctgcccag

SEQ ID NO: 304122 - DNA, 721 bp, Artificial Sequence
  derived and/or modified sequence
ctctgcagatccctggaggcttttgggcagcagctgtgaccgtgatgctggtgatgctgagcaccccagtggctgaggccagagactttcccaaggatttcttggtccagtttaagggcatgtgctacttcaccaacgggacagagcgcgtgcgcggtgtggccagatacatctataaccgcgaggagtacgggcgcttcgacagcgacgttggggagttccaggcggtgaccgagctggggcggagcatcgaggactggaacaactataaggacttcttggagcaggagcgggccgcggtggacaaggtgtgcagacacaactacgaggcggagctgcgcacgaccttgcagcggcaagtggagcccacagtgaccatctccccatccaggacagaggccctcaaccaccacaacctgctggtctgctcggtgacagatttctatccagcccagatcaaagtccggtggtttcggaatgaccaggaggagacagccggtgttgtgtccacctccctcattaggaatggtgactggaccttccagattctggtgatgctggaaataactccccagcgtggagacatctacacctgccaagtggagcaccccagcctccagagccccatcaccgtggagtggcgactcctgcactgactcctgaggacttttgtctgggattggtcatcactcttctgtaatgcccacctgcccctgcccag

SEQ ID NO: 304123 - DNA, 657 bp, Artificial Sequence
  derived and/or modified sequence
tgactgcagatccccggcggcttctgggccgccgccgtgaccgtgatgcttgtaatgctgtccacgcctgtggctgaggccagggatttcccgaaggacttcttggtacagtttaaggggatgtgttacttcacaaacggtaccgagagagtgagaggggtggccaggtatatctataaccgcgaagaatacggtcgctttgattccgacgtgggcgaatttcaggcggttaccgaattgggcaggtccatcgaggactggaataactataaggactttttggagcaggagagggccgcagtcgataaggtgtgtagacataattatgaggctgagctgcgaaccaccttgcaacgccaagtagagccaacagtgacaatatcaccaagcagaacagaggccttgaaccaccacaacttgttggtgtgctctgtgacggacttctaccccgcacagatcaaggtgcggtggtttagaaatgaccaggaggaaactgcaggagtcgttagtacatctctcattcgaaacggcgactggaccttccagatcctggtgatgctggagatcactccacagcgcggagatatttatacttgccaggtggaacatcccagcttgcagtctcctatcacggtagagtggaggttgctacattag

SEQ ID NO: 304124 - DNA, 657 bp, Artificial Sequence
  derived and/or modified sequence
tgactgcagatccccggcggcttctgggccgccgccgtgaccgtgatgctggttatgctgagcaccccagtggccgaggcccgagactttccaaaggatttccttgtccagtttaagggtatgtgctacttcaccaatggcaccgagcgagtgcgaggcgtcgcccgatacatttataaccgggaggagtatggacgttttgatagcgacgtgggagaatttcaggccgttaccgaactagggaggagcattgaagactggaacaactacaaagacttcctagagcaggaacgggcagctgttgataaagtctgtcgtcacaattatgaggccgaactaagaacaactttgcagagacaggtggaacctacagtcaccatatctccttccaggaccgaagctctaaaccaccacaatctgcttgtctgctccgtgacggacttttacccagcccaaatcaaggtgcggtggttccgcaacgatcaagaggaaactgcaggagtggtgagcacgagtctcatccgaaacggggactggacgttccaaattcttgtaatgctggagattacaccacagaggggagatatctacacgtgccaggtggagcatcctagcctgcagtcccccataactgtggaatggcggcttttgcactag

SEQ ID NO: 304125 - DNA, 657 bp, Artificial Sequence
  derived and/or modified sequence
tgactgcagatccccggcggcttctgggccgccgccgtgaccgtgatgctcgtgatgctctcaacccccgttgccgaggccagagactttcccaaggattttctggtccagtttaaaggcatgtgttatttcaccaacggtaccgaacgcgtacgaggggttgctagatatatctataatcgagaagaatacgggcggttcgatagcgacgtaggggagtttcaggctgtcactgaactgggtagatcgatcgaagactggaacaattacaaggacttcctggaacaggagagggcagcagtggataaagtgtgcaggcacaattatgaagccgaacttaggacaactctgcagagacaagtggagccaactgtgactatcagcccgagccggactgaggccctgaaccaccacaatcttctggtctgtagcgtaactgatttctaccccgctcagatcaaggtgcgatggttccgaaacgatcaagaggaaacggccggcgtggtttccacctccctgatccgaaacggagactggacattccagatcttagtgatgctcgagatcacgccccagcggggtgacatatacacttgtcaggtggagcatcccagccttcagtcaccgatcacagtggagtggcggttgttgcactag

SEQ ID NO: 304126 - DNA, 657 bp, Artificial Sequence
  derived and/or modified sequence
tgactgcagatccccggcggcttctgggccgccgccgtgaccgtgatgctagtaatgctgtctaccccagtggccgaggcgagggacttcccaaaggacttcctggtgcaattcaaggggatgtgctatttcaccaacggcactgagcgcgtgcggggggtggcacgttacatctataatcgtgaggagtacgggaggttcgacagtgatgtgggcgagtttcaggcagtcacggaacttggaagatctatagaagattggaataactataaagattttctggagcaagagagagccgctgtggataaggtttgccgacataactacgaggcggagttgcggacaacccttcagagacaggtagagcctacagtcaccatttctccctcaagaaccgaggctttgaaccatcacaatctcttagtgtgttccgtgaccgacttttaccctgctcaaattaaggtgcggtggtttcgaaatgaccaggaggaaacagcaggtgtggtgtctacaagtttaatcagaaacggcgattggacatttcagatccttgtgatgttggagattaccccccagcgcggagatatctatacttgtcaggtggagcatcctagcttgcaaagtcctatcactgtagagtggagactactgcattag

SEQ ID NO: 304127 - DNA, 657 bp, Artificial Sequence
  derived and/or modified sequence
tagctgcaaatccccggtgggttctgggctgcagccgtcactgtcatgctggtgatgctttcgaccccggtcgccgaagcgagggattttcctaaggacttcctcgtgcagttcaagggaatgtgctacttcactaacgggacagagagggtgagaggtgtcgcgcgttacatctataaccgggaggagtacggtcggtttgattccgacgtgggcgaattccaggctgttaccgagttagggcgaagcatcgaggactggaataattataaagatttcctggagcaggagcgtgccgctgtggataaagtgtgccgtcataactacgaggctgaactccggaccaccctccagcgtcaggtcgagcccactgtaacaatctcaccatcgcgaacagaagctctgaatcaccataacttgttagtgtgctccgtaacggacttctaccctgcccagatcaaggtgaggtggtttcgtaatgatcaggaggaaaccgccggagtggttagtacatctctaatacggaacggcgactggacgttccaaattctggtgatgctcgaaatcactccccaaagaggcgacatctacacctgtcaggtcgaacaccccagtctgcagtctcctataactgtggaatggaggctgttacattag

SEQ ID NO: 304128 - DNA, 657 bp, Artificial Sequence
  derived and/or modified sequence
tgactccagattcccggaggattctgggctgccgcagtcaccgtaatgctggttatgctgagtaccccagtggcggaggcacgagacttccccaaagactttctcgtgcagtttaaaggcatgtgctatttcacaaatggcaccgaacgagtgcggggagtggcccgatatatttataacagggaggagtatggcagatttgactccgacgtgggggaattccaggccgttaccgagcttgggagatctatcgaggactggaataattataaagacttcctggagcaggaacgtgctgctgtggataaagtgtgcagacacaattacgaggctgagctgagaaccaccctgcagaggcaagtggaacccacagtaactatcagtccttctcggactgaggcactgaatcatcataatctgcttgtgtgcagcgtgacagacttctaccccgctcaaatcaaggtgagatggttcaggaacgaccaggaggaaaccgctggcgtggtgagtacctctctgatacgcaacggtgactggactttccagatcctcgttatgctggagattactccacagcgtggcgacatatatacgtgccaggttgagcacccgagcctgcagtcaccaattactgtagaatggcgcctcttgcattag

SEQ ID NO: 304129 - DNA, 657 bp, Artificial Sequence
  derived and/or modified sequence
tgactgcagatcccaggcggtttttgggccgcagccgttactgtgatgttggttatgctcagtaccccagtcgcagaggccagagacttccccaaggactttcttgtgcaattcaaagggatgtgttactttacgaacggaaccgaacgggtcaggggggtggcccgatacatttacaatcgcgaagagtatggtaggttcgacagcgacgttggagaatttcaggcggttactgagctgggacgatccattgaagactggaataactacaaggacttcctcgagcaggaaagagctgcagtggataaggtatgtcggcacaactacgaagcagagcttcgcactactcttcaaaggcaggtggagcccaccgtgaccatctctccatctcggaccgaagccttgaaccaccacaacctactggtctgctccgtgaccgacttctacccggctcagataaaggtgagatggtttaggaatgatcaggaagaaacagcaggcgtggtcagtaccagtctgattcgcaatggagattggacattccagatcctggtgatgctggaaatcacccctcagcggggtgatatatacacatgtcaagtggagcatcctagcctccagagccctataactgtggagtggcggctgctgcattag

SEQ ID NO: 304130 - DNA, 657 bp, Artificial Sequence
  derived and/or modified sequence
tgacttcagatccctggcggattttgggccgcagccgtgaccgtgatgctggtgatgctgtcaacaccagtggccgaggcccgtgattttccaaaggactttctagtgcagtttaagggcatgtgttacttcacaaatgggactgaaagggtgcggggagtggctcgatacatatacaatagagaggagtatggcaggttcgattctgacgtaggagagttccaggccgtcactgagctgggaagatccattgaggattggaacaactacaaagatttcctggagcaggaacgcgctgctgttgataaggtctgtcgtcacaactacgaggccgagctgagaactacactccaacgccaggtggagcccactgtgacaatctcacctagtcgcacagaggccctgaaccaccataacttgctcgtgtgctctgtgactgatttttatccggcacaaattaaagttcggtggttccgaaatgatcaggaagagacggcaggcgtggtgtccacctcgctgatcaggaacggcgattggaccttccaaatccttgtcatgctcgaaattacgccacagaggggggacatctatacatgccaggttgagcacccctccctgcagagccctattacggtggagtggcgcttgttgcactag

SEQ ID NO: 304131 - protein, 107 aa, Artificial Sequence
  derived and/or modified sequence
MSESSSKSSQPLASKQEKDGTEKRGRGRPRKQPPVSPGTALVGSQKEPSEVPTPKRPRGRPKGSKNKGAAKTRKTTTTPGRKPRGRPKKLEKEEEEGISQESSEEEQ

SEQ ID NO: 304132 - protein, 328 aa, Artificial Sequence
  derived and/or modified sequence
MSESSSKSSQPLASKQEKDGTEKRGRGRPRKQPPVSPGTALVGSQKEPSEVPTPKRPRGRPKGSKNKGEGGRGGHLAGVLGGGAVTHACRLLLTGGAASFWDWTALLRSHRPHPFPRPTITTASGRHPHLPPVPSPPHYTAHQPLQGSHGLSGEQFSPGLSSQLPPPTHAYTHALLDKANIPLSRTLHLLRPHSLGGGDIALWAFGLGAPSLLLHCSLWLPIVGPGRVPLALKGAQAPSHPGTPYSTALAAAGVANGGGCWPPGFPQPNCLCHHVGLTFHPSPTSLVPVLGWTAPFGYRKAGGVSPLLPLHCGHSPLALRLGSEYILW

SEQ ID NO: 304133 - DNA, 324 bp, Artificial Sequence
  derived and/or modified sequence
atgagtgaatcatcctcaaaatcgtcacagcccctagcttcgaagcaggagaaagacggtactgaaaagcgtggtcgtggacgtcctcgcaagcaaccacccgtgagtcccggaaccgcccttgtcggatctcaaaaagagccatctgaggtacccacgccgaagaggccacggggaaggccaaaagggagcaaaaacaaaggggcagcaaaaactagaaagacgaccacaacccccgggaggaagccgcgcggtcgccccaaaaaactggaaaaagaggaggaggagggtatctcacaagaatctagcgaggaggagcagtag

SEQ ID NO: 304134 - DNA, 324 bp, Artificial Sequence
  derived and/or modified sequence
atgtccgagagttcttccaagtcgagccaaccactagctagtaaacaagagaaggatggaacagaaaagcgcggtcggggccggccccgaaaacagcccccagtatcccccggcactgcccttgtgggttctcagaaggagccttcagaggtcccaaccccaaaacgccctagggggaggccaaaagggagcaagaataagggtgcggccaaaacgcggaagaccaccaccactcccggcagaaagcctagaggacggcccaagaaactggaaaaggaagaggaagagggaatcagccaggagtctagtgaagaagaacaatag

SEQ ID NO: 304135 - DNA, 987 bp, Artificial Sequence
  derived and/or modified sequence
atgagtgaatcctcctccaagtcctcgcagccactggcatctaagcaggaaaaagacggaactgaaaaaagaggccgggggagacccaggaagcagccaccagtctcacctgggacagcactcgtagggtcccagaaggagccttccgaagtgcctacaccgaagagacctcggggacgcccgaaaggaagtaaaaataaaggggagggtggtagggggggccatctggcgggagtccttggtggtggggcagttacgcacgcctgcaggctgttactgacgggcggtgcagcaagcttctgggactggaccgccctgttgagatcacatcggccgcaccccttccccagacccaccatcaccaccgcctcgggcagacacccacacctccctccagtacctagcccccctcactacactgctcatcagccactccaaggaagtcatggcctgtccggagaacagttctcccctggactgtctagtcaactgccgccccccactcacgcatacactcacgctctgctggataaagcgaacatcccactcagccgaacgctccacctcctacggcctcacagcctcggggggggcgatattgccttgtgggcgttcggccttggagcaccctccctccttcttcactgttccctgtggcttcccatcgtggggcctggtcgcgtaccactcgccctgaaaggagctcaggccccttcacatccgggtactccatatagcaccgcactggccgcagcgggtgtggccaacggcggcggttgttggcctcccggattcccacagcccaactgcctctgtcaccacgttggcctgaccttccatcccagtccaacctccctcgttcccgtgctcggttggaccgcgccctttggctaccgaaaggcgggtggagtcagtccgctgctcccactgcactgcgggcatagtccactggccctgcgcctcgggagcgaatacatactctggtag

SEQ ID NO: 304136 - DNA, 324 bp, Artificial Sequence
  derived and/or modified sequence
atgtcagagtcttcctccaagagctcccagcccctcgcgtccaagcaagaaaaagatggcacagaaaagcggggcaggggcagacctaggaaacaaccccccgtcagccccgggacagccttggtcggatcacagaaagaacccagcgaggtgcctacaccgaagcgcccacggggacggcccaaaggctctaagaacaagggggctgccaaaacacggaaaaccacaactactcccggacgcaagcccagaggtagaccaaagaaacttgaaaaagaggaggaggaggggattagccaggagagtagcgaggaagaacagtag

SEQ ID NO: 304137 - DNA, 1992 bp, Artificial Sequence
  derived and/or modified sequence
catttgcatggccccgccccctgagtgacacggctggcgcgggcgggcccgtcccccctgcccctgggtcgctctttttaagctcccctgagccggtgctgcgctcctctaattgggactccgagccggggctatttctggcgctggcgcggctccaagaaggcatccgcatttgctaccagcggcggccgcggcggagccaggccggtcctcagcgcccagcaccgccgctcccggcaacccggagcgcgcaccgcaggccggcggccgagctcgcgcatcccagccatcactcttccacctgctccttagagaagggaagatgagtgagtcgagctcgaagtccagccagcccttggcctccaagcaggaaaaggacggcactgagaagcggggccggggcaggccgcgcaagcagcctccggtgagtcccgggacagcgctggtagggagtcagaaggagcccagcgaagtgccaacacctaagagacctcggggccgaccaaagggaagcaaaaacaagggtgctgccaagacccggaaaaccaccacaactccaggaaggaaaccaaggggcagacccaaaaaactggagaaggaggaagaggagggcatctcgcaggagtcctcggaggaggagcagtgacccatgcgtgccgcctgctcctcactggaggagcagcttccttctgggactggacagctttgctccgctcccaccgcccccaccccttccccaggcccaccatcaccaccgcctctggccgccacccccatcttccacctgtgccctcaccaccacactacacagcacaccagccgctgcagggctcccatgggctgagtggggagcagttttcccctggcctcagttcccagctccccccgcccacccacgcatacacacatgccctcctggacaaggctaacatcccacttagccgcaccctgcacctgctgcgtccccactcccttggtggtggggacattgctctctgggcttttggtttgggggcgccctctctgctccttcactgttccctctggcttcccatagtggggcctgggagggttcccctggccttaaaaggggcccaagccccatctcatcctggcacgccctactccactgccctggcagcagcaggtgtggccaatggaggggggtgctggcccccaggattcccccagccaaactgtctttgtcaccacgtggggctcacttttcatccttccccaacttccctagtccccgtactaggttggacagcccccttcggttacaggaaggcaggaggggtgagtcccctactccctcttcactgtggccacagcccccttgccctccgcctgggatctgagtacatattgtggtgatggagatgcagtcacttattgtccaggtgaggcccaagagccctgtggccgccacctgaggtgggctggggctgctcccctaaccctactttgcttccgccactcagccatttccccctcctcagatggggcaccaataacaaggagctcaccctgcccgctcccaacccccctcctgctcctccctgccccccaaggttctggttccatttttcctctgttcacaaactacctctggacagttgtgttgttttttgttcaatgttccattcttcgacatccgtcattgctgctgctaccagcgccaaatgttcatcctcattgcctcctgttctgcccacgatcccctcccccaagatactctttgtggggaagaggggctggggcatggcaggctgggtgaccgactaccccagtcccagggaaggtggggccctgcccctaggatgctgcagcagagtgagcaagggggcccaaatcgaccataaagggtgtaggggccacctcctccccctgttctgttggggaggggtagccatgatttgtcccagcctggggctccctctctggtttcctatttgcagttacttgaataaaaaaaatatccttttctgg

SEQ ID NO: 304138 - DNA, 1981 bp, Artificial Sequence
  derived and/or modified sequence
ctttttaagctcccctgagccggtgctgcgctcctctaattgggactccgagccggggctatttctggcgctggcgcggctccaagaaggccgcgagttgtgcacccggcggagcccggaggagcccggcgcacctcgcgcggcggccgctcccgctggagccggagcccgagcccgagcccgggcccgggtgaggggcggggagagacacgggctgcggcgcggcaggagagtggggggtcgggcgccccccgcagctcagggaacatcccagccatcactcttccacctgctccttagagaagggaagatgagtgagtcgagctcgaagtccagccagcccttggcctccaagcaggaaaaggacggcactgagaagcggggccggggcaggccgcgcaagcagcctccggtgagtcccgggacagcgctggtagggagtcagaaggagcccagcgaagtgccaacacctaagagacctcggggccgaccaaagggaagcaaaaacaagggtgctgccaagacccggaaaaccaccacaactccaggaaggaaaccaaggggcagacccaaaaaactggagaaggaggaagaggagggcatctcgcaggagtcctcggaggaggagcagtgacccatgcgtgccgcctgctcctcactggaggagcagcttccttctgggactggacagctttgctccgctcccaccgcccccaccccttccccaggcccaccatcaccaccgcctctggccgccacccccatcttccacctgtgccctcaccaccacactacacagcacaccagccgctgcagggctcccatgggctgagtggggagcagttttcccctggcctcagttcccagctccccccgcccacccacgcatacacacatgccctcctggacaaggctaacatcccacttagccgcaccctgcacctgctgcgtccccactcccttggtggtggggacattgctctctgggcttttggtttgggggcgccctctctgctccttcactgttccctctggcttcccatagtggggcctgggagggttcccctggccttaaaaggggcccaagccccatctcatcctggcacgccctactccactgccctggcagcagcaggtgtggccaatggaggggggtgctggcccccaggattcccccagccaaactgtctttgtcaccacgtggggctcacttttcatccttccccaacttccctagtccccgtactaggttggacagcccccttcggttacaggaaggcaggaggggtgagtcccctactccctcttcactgtggccacagcccccttgccctccgcctgggatctgagtacatattgtggtgatggagatgcagtcacttattgtccaggtgaggcccaagagccctgtggccgccacctgaggtgggctggggctgctcccctaaccctactttgcttccgccactcagccatttccccctcctcagatggggcaccaataacaaggagctcaccctgcccgctcccaacccccctcctgctcctccctgccccccaaggttctggttccatttttcctctgttcacaaactacctctggacagttgtgttgttttttgttcaatgttccattcttcgacatccgtcattgctgctgctaccagcgccaaatgttcatcctcattgcctcctgttctgcccacgatcccctcccccaagatactctttgtggggaagaggggctggggcatggcaggctgggtgaccgactaccccagtcccagggaaggtggggccctgcccctaggatgctgcagcagagtgagcaagggggcccaaatcgaccataaagggtgtaggggccacctcctccccctgttctgttggggaggggtagccatgatttgtcccagcctggggctccctctctggtttcctatttgcagttacttgaataaaaaaaatatccttttctgga

SEQ ID NO: 304139 - DNA, 1726 bp, Artificial Sequence
  derived and/or modified sequence
aagctcccctgagccggtgctgcgctcctctaattgggactccgagccggggctatttctggcgctggcgcggctccaagaaggcatccgcatttgctaccagcggcggccgcggcggagccaggccggtcctcagcgcccagcaccgccgctcccggcaacccggagcgcgcaccgcaggccggcggccgagctcgcgcatcccagccatcactcttccacctgctccttagagaagggaagatgagtgagtcgagctcgaagtccagccagcccttggcctccaagcaggaaaaggacggcactgagaagcggggccggggcaggccgcgcaagcagcctccggtgagtcccgggacagcgctggtagggagtcagaaggagcccagcgaagtgccaacacctaagagacctcggggccgaccaaagggaagcaaaaacaagggagaaggaggaagaggagggcatctcgcaggagtcctcggaggaggagcagtgacccatgcgtgccgcctgctcctcactggaggagcagcttccttctgggactggacagctttgctccgctcccaccgcccccaccccttccccaggcccaccatcaccaccgcctctggccgccacccccatcttccacctgtgccctcaccaccacactacacagcacaccagccgctgcagggctcccatgggctgagtggggagcagttttcccctggcctcagttcccagctccccccgcccacccacgcatacacacatgccctcctggacaaggctaacatcccacttagccgcaccctgcacctgctgcgtccccactcccttggtggtggggacattgctctctgggcttttggtttgggggcgccctctctgctccttcactgttccctctggcttcccatagtggggcctgggagggttcccctggccttaaaaggggcccaagccccatctcatcctggcacgccctactccactgccctggcagcagcaggtgtggccaatggaggggggtgctggcccccaggattcccccagccaaactgtctttgtcaccacgtggggctcacttttcatccttccccaacttccctagtccccgtactaggttggacagcccccttcggttacaggaaggcaggaggggtgagtcccctactccctcttcactgtggccacagcccccttgccctccgcctgggatctgagtacatattgtggtgatggagatgcagtcacttattgtccaggtgaggcccaagagccctgtggccgccacctgaggtgggctggggctgctcccctaaccctactttgcttccgccactcagccatttccccctcctcagatggggcaccaataacaaggagctcaccctgcccgctcccaacccccctcctgctcctccctgccccccaaggttctggttccatttttcctctgttcacaaactacctctggacagttgtgttgttttttgttcaatgttccattcttcgacatccgtcattgctgctgctaccagcgccaaatgttcatcctcattgcctcctgttctgcccacgatcccctcccccaagatactctttgtggggaagaggggctggggcatggcaggctgggtgaccgactaccccagtcccagggaaggtggggccctgcccctaggatgctgcagcagagtgagcaagggggcccaaatcgaccataaagggtgta

SEQ ID NO: 304140 - DNA, 2159 bp, Artificial Sequence
  derived and/or modified sequence
ctttttaagctcccctgagccggtgctgcgctcctctaattgggactccgagccggggctatttctggcgctggcgcggctccaagaaggcgtgagttcgcggccgctccggtggcttcttttttttatatctataatttaattaaattatttatttattgaggccgcgcacgggccgtgcccagcttcctgcccctcgccatccttcgggggagggggaatatttttgtccccccgcctggctgtgacacataaataccccgcgggggcctgggcggcgagcacgcggcggcggcggtctctgagcgcctctgctctctcccggtttcagatccgcatttgctaccagcggcggccgcggcggagccaggccggtcctcagcgcccagcaccgccgctcccggcaacccggagcgcgcaccgcaggccggcggccgagctcgcgcatcccagccatcactcttccacctgctccttagagaagggaagatgagtgagtcgagctcgaagtccagccagcccttggcctccaagcaggaaaaggacggcactgagaagcggggccggggcaggccgcgcaagcagcctccggtgagtcccgggacagcgctggtagggagtcagaaggagcccagcgaagtgccaacacctaagagacctcggggccgaccaaagggaagcaaaaacaagggtgctgccaagacccggaaaaccaccacaactccaggaaggaaaccaaggggcagacccaaaaaactggagaaggaggaagaggagggcatctcgcaggagtcctcggaggaggagcagtgacccatgcgtgccgcctgctcctcactggaggagcagcttccttctgggactggacagctttgctccgctcccaccgcccccaccccttccccaggcccaccatcaccaccgcctctggccgccacccccatcttccacctgtgccctcaccaccacactacacagcacaccagccgctgcagggctcccatgggctgagtggggagcagttttcccctggcctcagttcccagctccccccgcccacccacgcatacacacatgccctcctggacaaggctaacatcccacttagccgcaccctgcacctgctgcgtccccactcccttggtggtggggacattgctctctgggcttttggtttgggggcgccctctctgctccttcactgttccctctggcttcccatagtggggcctgggagggttcccctggccttaaaaggggcccaagccccatctcatcctggcacgccctactccactgccctggcagcagcaggtgtggccaatggaggggggtgctggcccccaggattcccccagccaaactgtctttgtcaccacgtggggctcacttttcatccttccccaacttccctagtccccgtactaggttggacagcccccttcggttacaggaaggcaggaggggtgagtcccctactccctcttcactgtggccacagcccccttgccctccgcctgggatctgagtacatattgtggtgatggagatgcagtcacttattgtccaggtgaggcccaagagccctgtggccgccacctgaggtgggctggggctgctcccctaaccctactttgcttccgccactcagccatttccccctcctcagatggggcaccaataacaaggagctcaccctgcccgctcccaacccccctcctgctcctccctgccccccaaggttctggttccatttttcctctgttcacaaactacctctggacagttgtgttgttttttgttcaatgttccattcttcgacatccgtcattgctgctgctaccagcgccaaatgttcatcctcattgcctcctgttctgcccacgatcccctcccccaagatactctttgtggggaagaggggctggggcatggcaggctgggtgaccgactaccccagtcccagggaaggtggggccctgcccctaggatgctgcagcagagtgagcaagggggcccaaatcgaccataaagggtgtaggggccacctcctccccctgttctgttggggaggggtagccatgatttgtcccagcctggggctccctctctggtttcctatttgcagttacttgaataaaaaaaatatccttttctgg

SEQ ID NO: 304141 - DNA, 324 bp, Artificial Sequence
  derived and/or modified sequence
atgtctgagagcagcagcaagagcagccagcccctggccagcaagcaggagaaggatggaacagagaagaggggccggggccggcccaggaagcagccccctgtgtccccaggcacagccctggtgggcagccagaaggagcccagcgaggtgcccacccccaagaggccccggggccggcccaagggcagcaagaacaagggagctgccaagaccaggaagaccaccaccaccccaggcaggaagccccggggccggcccaagaagctggagaaggaggaggaggagggcatcagccaggagagcagcgaggaggagcagtag

SEQ ID NO: 304142 - DNA, 987 bp, Artificial Sequence
  derived and/or modified sequence
atgtctgagagcagcagcaagagcagccagcccctggccagcaagcaggagaaggatggaacagagaagaggggccggggccggcccaggaagcagccccctgtgtccccaggcacagccctggtgggcagccagaaggagcccagcgaggtgcccacccccaagaggccccggggccggcccaagggcagcaagaacaagggggagggcggccggggcggccacctggccggcgtgctgggcggcggcgctgtgacccacgcctgccgcctgctgctgaccggcggggccgccagcttctgggactggacagccctgctgcggagccaccggccccaccccttcccccggcccaccatcaccacagccagcggccgccacccccacctgccccctgtgcccagccccccccactacacagcccaccagcccctgcagggcagccacggcctgagcggggagcagttcagccctggcctgagcagccagctgcccccacccacccacgcctacacccacgccctgctggacaaggccaacatccccctgagcaggaccctgcacctgctgcggccccacagcctgggcggcggggacatcgccctgtgggccttcggcctgggcgcccccagcctgctgctgcactgcagcctgtggctgcccatcgtgggccctggccgggtgcccctggccctgaagggggcccaggcccccagccaccctggcaccccctacagcacagccctggccgccgccggcgtggccaacggcggcggctgctggcccccaggcttcccccagcccaactgcctgtgccaccacgtgggcctgaccttccaccccagccccaccagcctggtgcctgtgctgggctggacagcccccttcggctacaggaaggccggcggcgtgagccccctgctgcccctgcactgcggccacagccccctggccctgcggctgggcagcgagtacatcctgtggtag

SEQ ID NO: 304143 - DNA, 324 bp, Artificial Sequence
  derived and/or modified sequence
atgagcgagagcagcagcaagagcagccagcccctggccagcaagcaagagaaagacggtacagagaagcggggacgcggacgaccaagaaagcaaccccccgtgtctccaggcaccgcacttgttgggtctcaaaaagagccgtctgaagtgcctacccctaagagacccagaggcagaccaaaaggatccaagaacaagggggccgccaaaactcggaaaaccaccacgacacctggcaggaaacctcgaggaagacccaagaaactcgaaaaggaggaggaagaggggatatctcaggagtcttccgaagaagagcaatag

SEQ ID NO: 304144 - DNA, 324 bp, Artificial Sequence
  derived and/or modified sequence
atgagcgagagcagcagcaagagcagccagcccctggccagcaagcaggagaaggacgggaccgagaaaaggggcagggggcggccgcgtaaacaacccccagtttcgcccggaaccgcactggtggggtctcagaaagagccgtcagaggttcctacacccaaacgcccaaggggtcggcctaagggatctaaaaataagggtgctgcgaaaacaagaaaaaccactactaccccgggcagaaagccaaggggtaggcctaagaagttggagaaggaagaggaagagggtattagtcaggaaagttccgaggaggagcagtag

SEQ ID NO: 304145 - DNA, 987 bp, Artificial Sequence
  derived and/or modified sequence
atgagcgagagcagcagcaagagcagccagcccctggccagcaagcaggaaaaggatgggacagaaaagagaggccgtggccggccgagaaagcagccccctgtgtctccagggacagccttggtaggctcacagaaggaaccttccgaggtgccaaccccgaagcgcccccgcgggcggcccaaagggtccaaaaacaagggcgagggtggcagaggcgggcacttggccggagtcctcggaggcggcgctgtcacgcatgcctgtagattactcctcacaggcggggccgctagtttttgggattggaccgccttgctccgcagccaccggcctcacccttttccacgaccaaccataaccaccgcgagtggtaggcacccacacctcccccccgtgccatcgcccccccactatacagcccatcagcctctccagggatcacacggactctctggtgagcagttctccccagggttgagctcccagctacctcctcccacacacgcctacacacacgcactactggacaaggctaatatccccttgtcaaggactctccatcttctgaggcctcattctttaggaggaggcgacatcgctctttgggcttttggcctgggcgcccccagcttgttactgcattgtagcctgtggctgccgatcgtgggcccaggacgcgtcccattggctcttaagggcgctcaggcgccgagccaccctgggaccccctatagcacagccctcgccgcagcaggtgtggcgaatgggggtggatgctggcctcccggctttccccagcctaattgcctgtgccatcatgttggcctaacatttcatccttcacccacctctctggtacctgtcttaggatggacagcaccgttcggataccgaaaggccggaggggtttctccccttctgcctcttcactgtgggcacagtcccctggcacttcgtttggggagtgagtacattttatggtag

SEQ ID NO: 304146 - DNA, 324 bp, Artificial Sequence
  derived and/or modified sequence
atgagcgagagcagcagcaagagcagccagcccctggccagcaagcaggaaaaagacgggactgagaagcgaggacggggacggcccaggaaacagcctcccgtgtctccagggacagcgctcgtgggatcccagaaagagcctagcgaggtccccacacccaaacggccaagggggagaccgaaaggaagcaaaaacaagggcgcagcgaaaacgaggaaaaccaccactacgccaggacgaaaaccgcgtgggcgcccgaagaagttggaaaaagaagaggaagagggaattagtcaggaatcatcagaggaggagcaatag

SEQ ID NO: 304147 - DNA, 324 bp, Artificial Sequence
  derived and/or modified sequence
atgtccgaatctagtagtaaatcttcccagccccttgccagtaagcaggagaaagacggtaccgagaagcggggtcgcggtagacctagaaaacagcctccagtctcgccaggcacagctctggtgggctctcagaaagaaccttcagaagtgccaaccccaaagaggccacgtgggaggcccaaaggaagcaagaacaagggcgctgccaaaacaagaaaaaccacaacaaccccgggacgcaagcctcgaggccgtcccaagaagctggaaaaagaagaggaggaaggtattagccaggaaagcagcgaggaggaacagtag

SEQ ID NO: 304148 - DNA, 324 bp, Artificial Sequence
  derived and/or modified sequence
atgtcagaaagcagcagcaagtcttctcaaccactggcctcgaagcaagagaaagacggtacagagaagcgtggtcggggtaggcccagaaaacagccgccagtgagtcctggcaccgcattggtgggctcccagaaggaaccatccgaagtgcccacaccaaagcggccaaggggaaggcccaaaggcagtaaaaataaaggcgcagcaaaaacccgaaagacaaccacaacgcctgggaggaagccgagaggacggccaaaaaagttagagaaggaagaggaagaagggatttctcaagagtctagtgaggaagaacagtag

SEQ ID NO: 304149 - DNA, 987 bp, Artificial Sequence
  derived and/or modified sequence
atgtcggagagcagttcaaaaagttcccaacccctggcatcaaagcaagagaaagacggcactgaaaaacgcggtcgtggccgacccagaaagcagcccccagtgagcccgggaactgcgttagttggaagccagaaagagccctccgaagttcccacacctaaacgccctcgcggacgcccaaaggggagcaaaaacaaaggtgaaggaggtcgagggggtcatctagccggagtattaggaggtggagcggttacacacgcctgccgtctcctcttaacaggcggagccgctagcttctgggactggaccgctctgttgaggtctcaccgccctcatccctttccacggccaacgatcactaccgcctctggccgtcatccccatctaccacccgttccctcccctcctcactatacagcccaccagcctttgcagggtagccatgggttgtcaggcgagcagttttccccaggactgagctcccagcttccacccccaactcacgcttatacccatgcccttctagataaggctaacattcccctctcgagaacgctgcaccttcttcgcccacattccctcgggggaggagatatcgcattgtgggcatttgggttaggtgccccttcactcttgctgcattgcagcttgtggctgccaatcgttggcccaggcagagtgcccctggcccttaaaggtgctcaggccccttctcacccaggaactccctactcgactgcgctggccgctgccggagtggccaatggcggaggatgttggcctcctggcttcccacagcccaattgtctgtgtcaccacgtcggcttaacttttcatcccagcccgacctcccttgtgccagtgctcggctggacagccccttttggctatcgtaaagctggcggagtaagccccctgcttccattgcactgtgggcactccccgttggccctccggctaggctccgagtacattctgtggtag

SEQ ID NO: 304150 - DNA, 324 bp, Artificial Sequence
  derived and/or modified sequence
atgagtgagtcttcgtctaagagcagccagcctctggcttcaaaacaggagaaagacggcaccgagaagaggggacggggtaggcctcgcaaacagcctccagtgtctcccggtacggcactggtcgggtcccagaaggagccttccgaagtgccaacccccaagcgcccacggggacgacccaaaggatctaagaacaagggcgcagcaaagactcgtaaaacgaccaccacacctgggaggaagccccgaggaaggccgaaaaagctggaaaaggaggaggaagagggcatctcgcaggaatcgtcagaagaggaacagtag

SEQ ID NO: 304151 - DNA, 324 bp, Artificial Sequence
  derived and/or modified sequence
atgagcgagagcagcagcaagagcagccagcccctggccagcaagcaggagaaggacggcaccgagaagagaggcagaggcagacccagaaagcagccccccgtgagccccggcaccgccctggtgggcagccagaaggagcccagcgaggtgcccacccccaagagacccagaggcagacccaagggcagcaagaacaagggcgccgccaagaccagaaagaccaccaccacccccggcagaaagcccagaggcagacccaagaagctggagaaggaggaggaggagggcatcagccaggagagcagcgaggaggagcagtag

SEQ ID NO: 304152 - DNA, 987 bp, Artificial Sequence
  derived and/or modified sequence
atgagcgagagcagcagcaagagcagccagcccctggccagcaagcaggagaaggacggcaccgagaagagaggcagaggcagacccagaaagcagccccccgtgagccccggcaccgccctggtgggcagccagaaggagcccagcgaggtgcccacccccaagagacccagaggcagacccaagggcagcaagaacaagggcgagggcggcagaggcggccacctggccggcgtgctgggcggcggcgccgtgacccacgcctgcagactgctgctgaccggcggcgccgccagcttctgggactggaccgccctgctgagaagccacagaccccaccccttccccagacccaccatcaccaccgccagcggcagacacccccacctgccccccgtgcccagccccccccactacaccgcccaccagcccctgcagggcagccacggcctgagcggcgagcagttcagccccggcctgagcagccagctgcccccccccacccacgcctacacccacgccctgctggacaaggccaacatccccctgagcagaaccctgcacctgctgagaccccacagcctgggcggcggcgacatcgccctgtgggccttcggcctgggcgcccccagcctgctgctgcactgcagcctgtggctgcccatcgtgggccccggcagagtgcccctggccctgaagggcgcccaggcccccagccaccccggcaccccctacagcaccgccctggccgccgccggcgtggccaacggcggcggctgctggccccccggcttcccccagcccaactgcctgtgccaccacgtgggcctgaccttccaccccagccccaccagcctggtgcccgtgctgggctggaccgcccccttcggctacagaaaggccggcggcgtgagccccctgctgcccctgcactgcggccacagccccctggccctgagactgggcagcgagtacatcctgtggtag

SEQ ID NO: 304153 - protein, 358 aa, Artificial Sequence
  derived and/or modified sequence
MESLRGNTAQGPTNEEDYKNEGQLSRQTKCPAQKKSSFENTVVRKVSVTLKEIFTGEEGPESSEFSLSPNLDAQQKIPKGHGSPISRKNSKDNSDLIKHQRLFSQRKPCKCNECEKAFSYQSDLLVHSRIHGGEKPFECNKCGKSFSRSTHLIEHQRTHTGEKPYECNECGKAFSRSTHLSLHQRIHTGEKPYECSECGKAFSRSTNLSQHQRTHTQERPYKCNECGKAFGDRSTIIQHQRIHTGENPYECSKCGKAFSWISSLTEHQRTHTGENPYECSECGKVFSRSSSLTEHQRIHSGEKPHECRVCGKGFSRSSSLIIHQRTHTGEKPYKCNDCGKAFCQSSTLIRHQHLHTKE

SEQ ID NO: 304154 - protein, 133 aa, Artificial Sequence
  derived and/or modified sequence
MESLRGNTAQGPTNEEDYKNEGQLSRQTKCPAQKKSSFENTVVRKVSVTLKEIFTGEEGPESSEFSLSPNLDAQQKIPKGHGSPISRKNSKDNSDLIKHQRLFSQRKPCKCNECEKAFSYQSDLLVHSRIHGG

SEQ ID NO: 304155 - DNA, 1077 bp, Artificial Sequence
  derived and/or modified sequence
atggagagcctgagaggcaacaccgcccagggccccaccaacgaggaggactacaagaacgagggccagctgagcagacagaccaagtgccccgcccagaagaagagcagcttcgagaacaccgtggtgagaaaggtgagcgtgaccctgaaggagatcttcaccggcgaggagggccccgagagcagcgagttcagcctgagccccaacctggacgcccagcagaagatccccaagggccacggcagccccatcagcagaaagaacagcaaggacaacagcgacctgatcaagcaccagagactgttcagccagagaaagccctgcaagtgcaacgagtgcgagaaggccttcagctaccagagcgacctgctggtgcacagcagaatccacggcggcgagaagcccttcgagtgcaacaagtgcggcaagagcttcagcagaagcacccacctgatcgagcaccagagaacccacaccggcgagaagccctacgagtgcaacgagtgcggcaaggccttcagcagaagcacccacctgagcctgcaccagagaatccacaccggcgagaagccctacgagtgcagcgagtgcggcaaggccttcagcagaagcaccaacctgagccagcaccagagaacccacacccaggagagaccctacaagtgcaacgagtgcggcaaggccttcggcgacagaagcaccatcatccagcaccagagaatccacaccggcgagaacccctacgagtgcagcaagtgcggcaaggccttcagctggatcagcagcctgaccgagcaccagagaacccacaccggcgagaacccctacgagtgcagcgagtgcggcaaggtgttcagcagaagcagcagcctgaccgagcaccagagaatccacagcggcgagaagccccacgagtgcagagtgtgcggcaagggcttcagcagaagcagcagcctgatcatccaccagagaacccacaccggcgagaagccctacaagtgcaacgactgcggcaaggccttctgccagagcagcaccctgatcagacaccagcacctgcacaccaaggagtag

SEQ ID NO: 304156 - DNA, 402 bp, Artificial Sequence
  derived and/or modified sequence
atggagagcctgagaggcaacaccgcccagggccccaccaacgaggaggactacaagaacgagggccagctgagcagacagaccaagtgccccgcccagaagaagagcagcttcgagaacaccgtggtgagaaaggtgagcgtgaccctgaaggagatcttcaccggcgaggagggccccgagagcagcgagttcagcctgagccccaacctggacgcccagcagaagatccccaagggccacggcagccccatcagcagaaagaacagcaaggacaacagcgacctgatcaagcaccagagactgttcagccagagaaagccctgcaagtgcaacgagtgcgagaaggccttcagctaccagagcgacctgctggtgcacagcagaatccacggcggctag

SEQ ID NO: 304157 - DNA, 1077 bp, Artificial Sequence
  derived and/or modified sequence
atggagagcttaaggggaaacaccgctcaggggcccacgaacgaagaagattataaaaacgaagggcagctaagtcgtcagaccaaatgcccagcccagaaaaaatcctcatttgagaacactgtggttagaaaggtcagcgttacattgaaagaaatcttcaccggagaagaagggccagagtccagcgaattcagtctgtcaccgaacttggatgcacaacagaagattcccaagggccacggatctccaatttcaaggaagaatagtaaggacaacagcgacctgattaaacatcaacggcttttcagtcaaagaaagccctgtaagtgcaacgaatgcgagaaagccttctcgtaccagagtgatttgttagtccatagccgcatccatggcggcgagaagccctttgaatgtaacaagtgtggtaaaagtttttcccggagcacccacttaattgagcaccagcgtacacacaccggtgaaaagccatacgagtgcaatgagtgcggcaaggctttttccagatcaactcatctttcattgcaccaacggattcataccggcgagaagccctatgaatgctcagagtgtggcaaggctttctccagaagcactaatctctctcagcatcaacggacccacacacaggagcgcccatataagtgcaacgagtgtggcaaagcgttcggggataggagtacaattatccaacaccaacgaatacacaccggagagaatccatacgaatgcagcaaatgcggcaaggcgtttagctggatctcttccctcactgagcaccagagaactcacacaggggaaaatccctacgagtgtagcgagtgtggcaaagtgttctccagaagttcaagcctgaccgagcaccaaaggattcattccggtgagaagccacacgaatgccgagtctgcggcaaaggcttttctaggtcctcatctctgataatccaccaacgtactcacaccggggagaagccatataagtgtaatgactgcggaaaggctttctgtcagtcttccaccctgatcagacaccagcaccttcatacaaaggaatag

SEQ ID NO: 304158 - DNA, 402 bp, Artificial Sequence
  derived and/or modified sequence
atggagtccctaagaggcaatacagcccaggggccgacaaatgaagaagattacaagaatgagggccaactctcccgccagacaaaatgccccgcccaaaagaaatcctcttttgagaacacagtggtgcggaaggtgtccgtcaccctcaaggagatcttcactggcgaagagggccccgagagctctgaattctcgctgagtcccaatctggacgcccaacagaagatccccaagggccacggcagccccatctcgaggaagaactcaaaggataactcggacctgataaagcaccagcggctgtttagccagcggaaaccttgcaagtgcaatgagtgcgagaaggcattctcttatcagtctgatttactggtccacagcaggatacacgggggctag

SEQ ID NO: 304159 - DNA, 1077 bp, Artificial Sequence
  derived and/or modified sequence
atggagagcctgcggggcaacacagcccagggccccaccaatgaggaggactacaagaatgaaggccagctgagccggcagaccaagtgcccagcccagaagaagagcagctttgaaaatacagtggtgaggaaggtgtctgtgaccctgaaggagatcttcaccggggaggagggccctgagagcagcgagttcagcctgagccccaacctggatgcccagcagaagatccccaagggccacggcagccccatcagcaggaagaacagcaaggacaacagcgacctgatcaagcaccagaggctcttcagccagaggaagccctgcaagtgcaatgaatgtgagaaggccttctcctaccagagcgacctgctggtgcacagccgcatccatggaggagagaagccctttgagtgcaacaagtgtgggaagagcttcagccgcagcacccacctgattgagcaccagaggacccacactggagagaagccctatgagtgcaatgaatgtgggaaggccttcagccgcagcacccacctgagcctgcaccagaggatccacactggagagaagccctatgagtgcagtgaatgtgggaaggccttcagccgcagcaccaacctgagccagcaccagaggacccacacccaggagcggccctacaagtgcaatgaatgtgggaaggccttcggggacaggagcaccatcatccagcaccagaggatccacactggagagaacccctatgagtgcagcaaatgtgggaaggccttctcctggatcagcagcctgacagagcaccagaggacccacactggagagaacccctatgagtgcagtgaatgtgggaaggtgttcagccgcagcagcagcctgacagagcaccagaggatccacagcggggagaagccccatgagtgccgggtgtgtgggaagggcttcagccgcagcagcagcctcatcatccaccagaggacccacactggagagaagccctacaagtgcaatgactgtgggaaggccttctgccagagcagcaccctcatccgccaccagcacctgcacaccaaggagtag

SEQ ID NO: 304160 - DNA, 402 bp, Artificial Sequence
  derived and/or modified sequence
atggagagcctgcggggcaacacagcccagggccccaccaatgaggaggactacaagaatgaaggccagctgagccggcagaccaagtgcccagcccagaagaagagcagctttgaaaatacagtggtgaggaaggtgtctgtgaccctgaaggagatcttcaccggggaggagggccctgagagcagcgagttcagcctgagccccaacctggatgcccagcagaagatccccaagggccacggcagccccatcagcaggaagaacagcaaggacaacagcgacctgatcaagcaccagaggctcttcagccagaggaagccctgcaagtgcaatgaatgtgagaaggccttctcctaccagagcgacctgctggtgcacagccgcatccatggaggatag

SEQ ID NO: 304161 - DNA, 1077 bp, Artificial Sequence
  derived and/or modified sequence
atggagagcctgcggggcaacaccgcccagggccccaccaacgaggaagactataagaatgaaggccagctgtctaggcagacgaagtgccccgctcagaagaaaagttcattcgaaaacaccgttgtcagaaaagtgagcgtgactctgaaagaaattttcacaggggaggaaggccccgagagtagtgagttcagcctctctcccaatttggacgcccagcaaaagattcccaaggggcacgggagcccaatctcccgaaagaattcaaaggacaatagcgatctgatcaagcaccagcgtcttttctcacagagaaagccctgcaagtgcaacgagtgtgagaaggccttcagttaccagtccgacctgcttgtacacagtagaatccacggcggagagaagcccttcgagtgcaacaaatgtggaaagtccttcagtcggagtacccacctaatcgaacatcagaggacacacaccggagagaaaccttacgaatgtaacgagtgtgggaaggccttctcccgcagcacacacctgtctctgcaccagcggatccacactggagaaaaaccttatgagtgttctgagtgcgggaaggctttcagccgcagcaccaacctaagtcaacaccaaaggacacatacgcaagaaagaccatacaaatgcaatgagtgtgggaaagctttcggcgaccggagcacaattatacagcatcagcggatccatacaggcgagaatccttacgaatgttctaagtgtggcaaggcatttagttggattagtagcctgacagagcaccagagaacccatactggtgagaatccttacgaatgctccgagtgcggtaaggtcttttcccgctcctcctcattgactgaacaccagaggatacactcgggggagaaacctcatgaatgtcgggtctgcggcaagggctttagccggtccagttcccttatcattcaccaacggactcataccggagagaaaccttacaagtgcaacgattgcggcaaggctttctgccaaagttcgacgctgattcgccaccagcatctacataccaaagagtag

SEQ ID NO: 304162 - DNA, 402 bp, Artificial Sequence
  derived and/or modified sequence
atggagagcctgcggggcaacaccgcccagggccccaccaacgaggaggattataaaaacgaggggcaactaagccgtcagacaaagtgtcccgcccaaaagaagtcctctttcgaaaataccgtggtgcgcaaggtgtccgtgaccctgaaggagatattcaccggtgaagagggtcctgaatccagtgagttctctttgtcacccaatttagatgctcagcagaagattcctaaaggtcatggctcacctattagcagaaaaaacagcaaggataatagcgacctcattaagcaccagagactgttctctcagaggaagccctgtaagtgcaacgaatgtgagaaggctttttcatatcagtcagacttgctggtccatagcaggattcacggaggctag

SEQ ID NO: 304163 - DNA, 1077 bp, Artificial Sequence
  derived and/or modified sequence
atggagagtttaaggggaaacactgcccaaggacccacaaatgaggaggattataaaaatgaaggccagctgtcccgccagacgaagtgcccagctcagaagaagtcttcgtttgagaacaccgtggtgcgcaaagtttcagtaactttgaaagaaatcttcactggcgaggaggggccagaaagctccgaatttagtttgtcaccaaatctggacgcacaacagaaaattccaaaaggacacggctcgcccatcagccggaaaaatagcaaggacaattcggacctgattaagcatcagcgactattctcccaacgcaaaccatgcaaatgcaacgagtgtgagaaggctttcagctatcagtctgatctcctagtccattcccgcatccacggtggggagaaacctttcgaatgtaacaaatgtggcaaaagcttctcgagaagcacacatctcatcgagcaccagcggacccataccggtgagaaaccctacgaatgtaacgagtgcggaaaggctttcagccgaagtacccacctgtcactgcaccagcgcatacataccggagagaaaccttacgaatgctcagagtgtggcaaggctttttctaggagtacgaacctatcacagcatcagaggactcatactcaggaacgaccatataaatgtaacgagtgtggtaaggccttcggtgaccgttcaactattatccagcatcagcggattcacaccggagaaaatccctatgaatgttccaagtgcgggaaagcttttagttggatctcgagcctgacagagcatcagcggacacataccggggagaatccttacgaatgtagtgaatgcggcaaggtgttttcaagatcttctagcctgaccgagcatcagagaatccacagtggggagaagccccatgagtgtagggtatgcggaaaaggcttctctcgatcatccagtctgataatacatcaaagaacccacaccggtgaaaaaccatacaaatgcaatgattgcggtaaagccttttgccagagcagtacactgatacggcaccagcacctgcatacaaaggaatag

SEQ ID NO: 304164 - DNA, 402 bp, Artificial Sequence
  derived and/or modified sequence
atggaaagcctgagaggcaacaccgcacaaggacccactaacgaggaggattataagaatgagggccagctgtcccggcaaaccaagtgcccggctcagaagaaaagctctttcgaaaatacagtggtacgaaaagtttctgtcaccttaaaggagatctttacaggtgaagagggcccagaatcttctgagtttagcctgtcccccaacttagatgctcagcaaaaaataccaaagggccacggttcaccaatcagcaggaaaaacagcaaggacaacagcgacctgatcaagcaccagcgcctcttcagccagagaaagccttgtaaatgcaacgagtgtgaaaaagctttctcttatcagagcgacctgttggtccatagtcggatacacggtggttag

SEQ ID NO: 304165 - DNA, 4079 bp, Artificial Sequence
  derived and/or modified sequence
agcgcagagctgcgaccgctgctgatacgttgctcagtctcagtgtggtctctgttttgcaactggtcgtccgcgtcaggagacttaggtccaggcgactgcccagacaatgactggtcccgcataccgagcagagcatgatcagcagcagtctgagtggaagagtgcctgtgatcttagggaacctgatgggcgttggagcagcggttcgacgcatgggtttctctttaatccttccgacttccccaagcccagcgcactcaggttccgctccaagtgcgggacccgcccggggtgtgtcgggggtactcggccggaggcggccggtgagtgaggcttacagggccccgggaccaaggaaccccagcatgttaattgaacttgatcacccagttgaaggaagaataatagtagatgttggatcttcaggaagctgaagagggcagtgcccagaaatacctgtcttgatagggggatttgagctgaaccaaagcatcaacaccaatcagactgtttccgaagaactagagttttctgggtcagcaatggaaagcctcagagggaatactgctcagggtcctacaaatgaagaagactataaaaacgaaggccaattatcaaggcaaacaaaatgtcctgcacagaagaaatcctcttttgagaacacagtggtcagaaaagtgtcagtgacactcaaagaaattttcacaggggaggaaggccctgaatccagtgaatttagtctaagcccaaaccttgacgcacaacagaaaattccaaagggacatggatccccaatatctaggaaaaactccaaagataattcagacttaattaaacaccaaagacttttctcacaaagaaaaccttgtaaatgcaatgaatgtgaaaaagcctttagttaccaatcagaccttcttgtacacagtagaattcatggtggagaaaagccttttgaatgcaacaaatgtgggaaatctttcagccgaagtacacaccttattgaacatcaaagaactcacactggagagaaaccttatgaatgcaatgaatgtggaaaagcttttagccggagcacacatcttagtctacatcagagaatccatactggagaaaaaccatatgaatgtagtgaatgtggaaaagcctttagccgaagcactaaccttagtcagcatcagcgaactcatactcaagaaaggccttacaaatgtaatgaatgtgggaaagccttcggtgaccgttcaaccataattcagcatcaacgaatacacactggagagaatccctatgaatgcagtaaatgtggaaaagctttcagttggatctcatcgcttactgaacatcagagaacacacactggggagaacccctatgagtgcagtgaatgtgggaaagtgttcagtcgaagctcgtctcttacagaacatcagagaatccacagtggagaaaagcctcacgagtgtagagtgtgtggaaagggcttcagtcgaagctcatcccttattattcatcagagaactcataccggggagaagccgtacaaatgtaatgactgtggaaaagccttctgtcagagttcaactctgatcagacatcagcaccttcatactaaagagtaatatctgagcttttattaatgttagcataagaacacatatacctaacctcccaccactgaaatatatatatttcaagtatatatatacttgttctaattttcttttattagatacctatacccgttttaagctttcattcgttctttccatccatctatccttctttcgtctcccctcccttcttccctccttccctccttcctactttttctccctctccctgttctttctttctcttttctcaaataagttcacaataaaacaaagggatgactcaaaaaacataacatatgaaatctaatattctgaagggctccaactttagagtataaagctatctgacaccttgtagtttctctgctaatctattccttcaagcgtgggtccccgaaccaccaggttctcctctgttttctaaccacatcagcccctgcacatgaagagaaaatcctgtgtgtgtgtcttcatacttgctggctctagtaccagaagagagggatctggcttcagagcaggactgaaaacttctcaccagtctggggataatagtgttgaggcaaattcattctcttgacttgcaaaaacagatttttctcatcttcctccttctctcaccttttttgcagtagcatttttcctcaaagtacaactcatttttttactaacgcctaactaatcctagtgttattttatcatatttttaccaagaatgttctaaaaatcttggagacgttcctccatgatcttgggaaaaaaagttgccaaatgctgtgctgttttttttgtttgtttttaattttctttcatttacagatttcatgaaacttatattctgtggctttgaccctcaccaatcttggaagattgatctctcaaggacaaacccagtgcctatttctcagtcctttttctacttgacatttgcagaattggcactttttgccactgttatgccttaaatcttgagcttctttcaggatccatgattctgtgctgatctacacttttcctacctctcagcatttctttgattgtcaatgatcagctctgtgatttggggcaagggttaggccagaattatctcattttatcaagttataaaacttgaggtagtgcaactagattatacacttcttgaagacagaaatcttggtttgtttgttgttttatttttgagagaaggtcttgctgtgttgcccaggctggagtgcaatggcacaatcatagctcactgtagccttgaacttctgggctcctgccacagcctcctgagtagctagggctgcaagtgtgtaccaccacacccacaattttaaagtttttttgtggagacaggatctcactatattggcaaggctggcctccatctcctgaactcaaacaattctcccacctcggcttccgaaaacactgacattacaggtgtgagccaccacacctgccagaaatcttgtttttgattgatataaaacatcacaaagtactgagtagacactaaatgctctgtaattattgctcactgattcctctttatctgtaatcaatcaacttgactttatttgatatggattaataattgatttctttctctctttctactgctgcttccaagttcttggtaccttgtgcctagattactaaattgatcactgttgactcactaccattatctagctccttactaaactactactttgttaaaaaaaaatagtcgtttcccagtgacctctgccccaaatgtaaacttctttaacctaaaggtctttcatagtttgatctacttacttacttcctttctcttctcaaagataatacatgcgggcaggcctgttttgtccctactataccctcttctcacacttttcttcttttcaaactgttccttggcacttctacatgtcctactttcttcgttgtattccagaaaccctatccacccttttttaaaggccatgctcatatcctggctctgtgacactttcagtcccctgccttcttagaaatcctttgtagtgatggtttgcattattctcctgtattagacaccttctttactgttttctggttctttcacaagtacttttttacataagctgttttgaagttgtaaatcatcctaaatcttttataagcctcatataatacatagtacaatgccagcctggactctagttttaatctaaatacatagggtttaatttagcagcataatctttttagtcttttgaatgatgaggtaacctcataggtattttggcccattttgtttttccttgaattacatatataactgactatttagactgactcctttagatctcctgggatgctgacctcttggctttccaattcatgagactattgtaaagaataagtgagttcattcatgtaaagtagtaaaacagtgcctgacaaaagtaaatgctcaataaattctaattgttatgattctagtga

SEQ ID NO: 304166 - DNA, 749 bp, Artificial Sequence
  derived and/or modified sequence
aagtgcgggacccgcccggggtgtgtcgggggtactcggccggaggcggccggtgagtgaggcttacagggccccgggaccaaggttcataggtggaagaaattcatctccagatgagactttggacttggacttgggacttttgagttaatgccagaatgatgaaccccagcatgttaattgaacttgatcacccagttgaaggaagaataatagtagatgttggatcttcaggaagctgaagagggcagtgcccagaaatacctgtcttgatagggggatttgagctgaaccaaagcatcaacaccaatcagactgtttccgaagaactagagttttctgggtcagcaatggaaagcctcagagggaatactgctcagggtcctacaaatgaagaagactataaaaacgaaggccaattatcaaggcaaacaaaatgtcctgcacagaagaaatcctcttttgagaacacagtggtcagaaaagtgtcagtgacactcaaagaaattttcacaggggaggaaggccctgaatccagtgaatttagtctaagcccaaaccttgacgcacaacagaaaattccaaagggacatggatccccaatatctaggaaaaactccaaagataattcagacttaattaaacaccaaagacttttctcacaaagaaaaccttgtaaatgcaatgaatgtgaaaaagcctttagttaccaatcagaccttcttgtacacagtagaattcatggtgga

SEQ ID NO: 304167 - protein, 516 aa, Artificial Sequence
  derived and/or modified sequence
MFEQLKPIEPRDCWREARVKKKPVTFEDVAVNFTQEEWDCLDASQRVLYQDVMSETFKNLTSVARIFLHKPELITKLEQEEEQWREFVHLPNTEGLSEGKKKELREQHPSLRDEGTSDDKVFLACRGAGQCPLSAPAGTMDRTRVLQASQAGPPFFCYTCGKCFSRRSYLYSHQFVHNPKLTNSCSQCGKLFRSPKSLSYHRRMHLGERPFCCTLCDKTYCDASGLSRHRRVHLGYRPHSCSVCGKSFRDQSELKRHQKIHQNQEPVDGNQECTLRIPGTQAEFQTPIARSQRSIQGLLDVNHAPVARSQEPIFRTEGPMAQNQASVLKNQAPVTRTQAPITGTLCQDARSNSHPVKPSRLNVFCCPHCSLTFSKKSYLSRHQKAHLTEPPNYCFHCSKSFSSFSRLVRHQQTHWKQKSYLCPICDLSFGEKEGLMDHWRGYKGKDLCQSSHHKCRVILGQWLGFSHDVPTMAGEEWKHGGDQSPPRIHTPRRRGLREKACKGDKTKEAVSILKHK

SEQ ID NO: 304168 - protein, 211 aa, Artificial Sequence
  derived and/or modified sequence
  misc_feature (1)..(1): Xaa can be any naturally occurring amino acid
XARSQEPIFRTEGPMAQNQASVLKNQAPVTRTQAPITGTLCQDARSNSHPVKPSRLNVFCCPHCSLTFSKKSYLSRHQKAHLTEPPNYCFHCSKSFSSFSRLVRHQQTHWKQKSYLCPICDLSFGEKEGLMDHWRGYKGKDLCQSSHHKCRVILGQWLGFSHDVPTMAGEEWKHGGDQSPPRIHTPRRRGLREKACKGDKTKEAVSILKHK

SEQ ID NO: 304169 - protein, 536 aa, Artificial Sequence
  derived and/or modified sequence
MFEQLKPIEPVQKTLPWVGEVAATLQEAMKRDCWREARVKKKPVTFEDVAVNFTQEEWDCLDASQRVLYQDVMSETFKNLTSVARIFLHKPELITKLEQEEEQWREFVHLPNTEGLSEGKKKELREQHPSLRDEGTSDDKVFLACRGAGQCPLSAPAGTMDRTRVLQASQAGPPFFCYTCGKCFSRRSYLYSHQFVHNPKLTNSCSQCGKLFRSPKSLSYHRRMHLGERPFCCTLCDKTYCDASGLSRHRRVHLGYRPHSCSVCGKSFRDQSELKRHQKIHQNQEPVDGNQECTLRIPGTQAEFQTPIARSQRSIQGLLDVNHAPVARSQEPIFRTEGPMAQNQASVLKNQAPVTRTQAPITGTLCQDARSNSHPVKPSRLNVFCCPHCSLTFSKKSYLSRHQKAHLTEPPNYCFHCSKSFSSFSRLVRHQQTHWKQKSYLCPICDLSFGEKEGLMDHWRGYKGKDLCQSSHHKCRVILGQWLGFSHDVPTMAGEEWKHGGDQSPPRIHTPRRRGLREKACKGDKTKEAVSILKHK

SEQ ID NO: 304170 - protein, 451 aa, Artificial Sequence
  derived and/or modified sequence
AGGSPESLLFFQKPVTFEDVAVNFTQEEWDCLDASQRVLYQDVMSETFKNLTSVARIFLHKPELITKLEQEEEQWRETRVLQASQAGPPFFCYTCGKCFSRRSYLYSHQFVHNPKLTNSCSQCGKLFRSPKSLSYHRRMHLGERPFCCTLCDKTYCDASGLSRHRRVHLGYRPHSCSVCGKSFRDQSELKRHQKIHQNQEPVDGNQECTLRIPGTQAEFQTPIARSQRSIQGLLDVNHAPVARSQEPIFRTEGPMAQNQASVLKNQAPVTRTQAPITGTLCQDARSNSHPVKPSRLNVFCCPHCSLTFSKKSYLSRHQKAHLTEPPNYCFHCSKSFSSFSRLVRHQQTHWKQKSYLCPICDLSFGEKEGLMDHWRGYKGKDLCQSSHHKCRVILGQWLGFSHDVPTMAGEEWKHGGDQSPPRIHTPRRRGLREKACKGDKTKEAVSILKHK

SEQ ID NO: 304171 - DNA, 1551 bp, Artificial Sequence
  derived and/or modified sequence
atgttcgagcagctgaagcccatcgagcccagagactgctggagagaggccagagtgaagaagaagcccgtgaccttcgaggacgtggccgtgaacttcacccaggaggagtgggactgcctggacgccagccagagagtgctgtaccaggacgtgatgagcgagaccttcaagaacctgaccagcgtggccagaatcttcctgcacaagcccgagctgatcaccaagctggagcaggaggaggagcagtggagagagttcgtgcacctgcccaacaccgagggcctgagcgagggcaagaagaaggagctgagagagcagcaccccagcctgagagacgagggcaccagcgacgacaaggtgttcctggcctgcagaggcgccggccagtgccccctgagcgcccccgccggcaccatggacagaaccagagtgctgcaggccagccaggccggcccccccttcttctgctacacctgcggcaagtgcttcagcagaagaagctacctgtacagccaccagttcgtgcacaaccccaagctgaccaacagctgcagccagtgcggcaagctgttcagaagccccaagagcctgagctaccacagaagaatgcacctgggcgagagacccttctgctgcaccctgtgcgacaagacctactgcgacgccagcggcctgagcagacacagaagagtgcacctgggctacagaccccacagctgcagcgtgtgcggcaagagcttcagagaccagagcgagctgaagagacaccagaagatccaccagaaccaggagcccgtggacggcaaccaggagtgcaccctgagaatccccggcacccaggccgagttccagacccccatcgccagaagccagagaagcatccagggcctgctggacgtgaaccacgcccccgtggccagaagccaggagcccatcttcagaaccgagggccccatggcccagaaccaggccagcgtgctgaagaaccaggcccccgtgaccagaacccaggcccccatcaccggcaccctgtgccaggacgccagaagcaacagccaccccgtgaagcccagcagactgaacgtgttctgctgcccccactgcagcctgaccttcagcaagaagagctacctgagcagacaccagaaggcccacctgaccgagccccccaactactgcttccactgcagcaagagcttcagcagcttcagcagactggtgagacaccagcagacccactggaagcagaagagctacctgtgccccatctgcgacctgagcttcggcgagaaggagggcctgatggaccactggagaggctacaagggcaaggacctgtgccagagcagccaccacaagtgcagagtgatcctgggccagtggctgggcttcagccacgacgtgcccaccatggccggcgaggagtggaagcacggcggcgaccagagcccccccagaatccacacccccagaagaagaggcctgagagagaaggcctgcaagggcgacaagaccaaggaggccgtgagcatcctgaagcacaagtag

SEQ ID NO: 304172 - DNA, 1611 bp, Artificial Sequence
  derived and/or modified sequence
atgttcgagcagctgaagcccatcgagcccgtgcagaagaccctgccctgggtgggcgaggtggccgccaccctgcaggaggccatgaagagagactgctggagagaggccagagtgaagaagaagcccgtgaccttcgaggacgtggccgtgaacttcacccaggaggagtgggactgcctggacgccagccagagagtgctgtaccaggacgtgatgagcgagaccttcaagaacctgaccagcgtggccagaatcttcctgcacaagcccgagctgatcaccaagctggagcaggaggaggagcagtggagagagttcgtgcacctgcccaacaccgagggcctgagcgagggcaagaagaaggagctgagagagcagcaccccagcctgagagacgagggcaccagcgacgacaaggtgttcctggcctgcagaggcgccggccagtgccccctgagcgcccccgccggcaccatggacagaaccagagtgctgcaggccagccaggccggcccccccttcttctgctacacctgcggcaagtgcttcagcagaagaagctacctgtacagccaccagttcgtgcacaaccccaagctgaccaacagctgcagccagtgcggcaagctgttcagaagccccaagagcctgagctaccacagaagaatgcacctgggcgagagacccttctgctgcaccctgtgcgacaagacctactgcgacgccagcggcctgagcagacacagaagagtgcacctgggctacagaccccacagctgcagcgtgtgcggcaagagcttcagagaccagagcgagctgaagagacaccagaagatccaccagaaccaggagcccgtggacggcaaccaggagtgcaccctgagaatccccggcacccaggccgagttccagacccccatcgccagaagccagagaagcatccagggcctgctggacgtgaaccacgcccccgtggccagaagccaggagcccatcttcagaaccgagggccccatggcccagaaccaggccagcgtgctgaagaaccaggcccccgtgaccagaacccaggcccccatcaccggcaccctgtgccaggacgccagaagcaacagccaccccgtgaagcccagcagactgaacgtgttctgctgcccccactgcagcctgaccttcagcaagaagagctacctgagcagacaccagaaggcccacctgaccgagccccccaactactgcttccactgcagcaagagcttcagcagcttcagcagactggtgagacaccagcagacccactggaagcagaagagctacctgtgccccatctgcgacctgagcttcggcgagaaggagggcctgatggaccactggagaggctacaagggcaaggacctgtgccagagcagccaccacaagtgcagagtgatcctgggccagtggctgggcttcagccacgacgtgcccaccatggccggcgaggagtggaagcacggcggcgaccagagcccccccagaatccacacccccagaagaagaggcctgagagagaaggcctgcaagggcgacaagaccaaggaggccgtgagcatcctgaagcacaagtag

SEQ ID NO: 304173 - DNA, 1356 bp, Artificial Sequence
  derived and/or modified sequence
gccggcggcagccccgagagcctgctgttcttccagaagcccgtgaccttcgaggacgtggccgtgaacttcacccaggaggagtgggactgcctggacgccagccagagagtgctgtaccaggacgtgatgagcgagaccttcaagaacctgaccagcgtggccagaatcttcctgcacaagcccgagctgatcaccaagctggagcaggaggaggagcagtggagagagaccagagtgctgcaggccagccaggccggcccccccttcttctgctacacctgcggcaagtgcttcagcagaagaagctacctgtacagccaccagttcgtgcacaaccccaagctgaccaacagctgcagccagtgcggcaagctgttcagaagccccaagagcctgagctaccacagaagaatgcacctgggcgagagacccttctgctgcaccctgtgcgacaagacctactgcgacgccagcggcctgagcagacacagaagagtgcacctgggctacagaccccacagctgcagcgtgtgcggcaagagcttcagagaccagagcgagctgaagagacaccagaagatccaccagaaccaggagcccgtggacggcaaccaggagtgcaccctgagaatccccggcacccaggccgagttccagacccccatcgccagaagccagagaagcatccagggcctgctggacgtgaaccacgcccccgtggccagaagccaggagcccatcttcagaaccgagggccccatggcccagaaccaggccagcgtgctgaagaaccaggcccccgtgaccagaacccaggcccccatcaccggcaccctgtgccaggacgccagaagcaacagccaccccgtgaagcccagcagactgaacgtgttctgctgcccccactgcagcctgaccttcagcaagaagagctacctgagcagacaccagaaggcccacctgaccgagccccccaactactgcttccactgcagcaagagcttcagcagcttcagcagactggtgagacaccagcagacccactggaagcagaagagctacctgtgccccatctgcgacctgagcttcggcgagaaggagggcctgatggaccactggagaggctacaagggcaaggacctgtgccagagcagccaccacaagtgcagagtgatcctgggccagtggctgggcttcagccacgacgtgcccaccatggccggcgaggagtggaagcacggcggcgaccagagcccccccagaatccacacccccagaagaagaggcctgagagagaaggcctgcaagggcgacaagaccaaggaggccgtgagcatcctgaagcacaagtag

SEQ ID NO: 304174 - DNA, 1551 bp, Artificial Sequence
  derived and/or modified sequence
atgtttgagcagctgaagcccattgagccccgagactgttggagggaagccagagtcaagaaaaaacctgtaacatttgaggacgtagcggtgaatttcacacaagaagagtgggactgcctggacgcatcacagcgtgttctgtaccaggatgtaatgtccgaaaccttcaagaatcttacatccgtggcccggatattcctgcacaagcccgagttgatcacgaagttggaacaggaggaagagcagtggagggaattcgtccacctcccaaataccgaagggctgtcagagggcaaaaagaaggagctgcgcgagcagcacccgtctctgcgtgatgagggaacttccgatgataaggtcttcctggcttgcagaggagcaggtcagtgtccactctctgccccagcggggacaatggaccggaccagagtcctacaggcatcacaagctggccccccttttttctgctatacttgtggcaaatgcttttcaagacggagttacctgtacagtcatcagttcgtacataatcccaagttaactaacagctgtagccaatgcgggaaactcttcaggagtcccaagagcctgtcctaccatcggaggatgcatctgggggagcggccgttctgctgtaccctgtgcgacaaaacctactgcgacgcctccggcctttctaggcaccggcgcgtccaccttggctacaggccgcatagctgctccgtctgcgggaagagcttcagggaccagagtgagctgaagaggcatcaaaagattcaccaaaatcaggaaccggtcgatgggaaccaggagtgcacactgcgtatcccgggcactcaggctgagtttcagaccccaattgctagatcccagaggtccatccagggtttacttgacgtcaatcatgctccagtggcaaggagtcaggagccaatctttcggacggaggggcccatggctcagaaccaggcctctgtgcttaagaaccaggcgccagtgactcgaactcaagcgcccatcaccggcactctgtgtcaggatgcccggtctaacagtcacccagtgaaacctagccgtcttaatgttttttgctgcccccactgtagtttaacctttagcaagaaatcctaccttagtaggcatcaaaaggcccacctgacagaacccccaaactactgcttccactgttctaagtctttttcttctttctcgaggctggtgaggcaccagcagacgcactggaagcagaagagttatctctgtcctatatgtgacctgtctttcggtgaaaaggaggggctcatggaccactggagggggtacaagggaaaggacctctgccaatcatcacaccacaagtgtcgcgtcattctcggccaatggttgggattctctcacgatgtcccaactatggccggggaagaatggaagcatggtggagaccaatcccctcctagaattcatacccctcggcgcaggggtctgcgggagaaagcttgtaaaggggacaaaactaaggaggccgtgagcatactgaaacataagtag

SEQ ID NO: 304175 - DNA, 1551 bp, Artificial Sequence
  derived and/or modified sequence
atgtttgagcagttaaagccaatcgaacccagagactgctggcgggaggctagagtgaaaaaaaagccagtgaccttcgaggatgtggctgtcaacttcactcaggaggagtgggactgccttgacgcatctcagcgggtgttatatcaggacgtgatgagcgagacatttaaaaacttgacaagtgtggccagaattttcttgcacaaaccagagcttataacaaagctcgagcaggaggaagagcagtggagagagtttgtgcacctgcctaatacggaaggcctgtctgagggaaagaagaaggagctccgtgaacagcatccatccttaagagacgaagggacatcagacgataaggtgtttctcgcatgtcgaggcgcaggacagtgtcctctgtcagcgcccgccggtactatggaccgtacgcgggtgctgcaggcttcccaggctggaccacctttcttctgctacacctgcggaaagtgttttagccgccgcagctatctgtattcccatcagtttgtacacaatcccaagctcactaattcctgctctcagtgcggcaagctgtttcgctccccaaagagcctttcataccaccggaggatgcatcttggagaacgcccgttttgttgcaccctgtgcgacaagacttattgtgacgccagtggcttgtcccgacatagaagggttcatttaggctatcgtccccactcatgcagcgtgtgtgggaagtccttccgggatcagtccgagctgaagagacaccagaaaattcatcagaatcaggaacctgtagacggcaatcaagagtgtaccttacggattcctggcacccaggcagagtttcagacccctatcgccaggtcccagcggtctattcagggcctcctcgacgtgaatcatgcccccgtggcccgctcccaggagcccatcttccggacagaaggacctatggcccagaaccaagccagcgttctcaaaaaccaagcacctgttacgaggacacaggcgccaattacaggtacgctgtgccaggatgcacgatccaacagtcaccccgtgaagccatcccggctgaacgttttctgttgccctcattgtagcctgactttctcaaagaaaagctacctctcccgacaccaaaaggcccacctaacagagcctcccaactactgtttccactgcagcaagtcctttagttcattcagtcgtctggttcgccaccagcagacccactggaagcagaagagctatctctgcccaatttgcgatctcagtttcggggagaaagaggggttgatggaccactggcggggctacaaaggaaaggacctgtgccagagcagccatcacaaatgtagggtgattcttgggcagtggctgggcttcagccatgacgttcctaccatggccggagaggagtggaagcatgggggggatcagtcaccaccgcggattcacactcctaggaggagaggcttacgggagaaggcttgcaaaggggacaagacaaaagaagctgtgtcaattttaaagcataagtag

SEQ ID NO: 304176 - DNA, 1551 bp, Artificial Sequence
  derived and/or modified sequence
atgttcgaacagctgaagcctattgaaccaagggattgctggcgggaggctagggtaaaaaagaaacctgtcactttcgaggacgtggctgtgaatttcacccaggaggagtgggactgccttgatgcctcgcagcgagtgttgtaccaagacgtgatgtccgaaacattcaagaacctcacttccgtcgcccgtattttccttcataaacccgaacttatcaccaaactcgagcaagaagaggagcagtggagagaatttgtgcatctgccaaacactgagggtctctctgagggaaaaaagaaggagctaagagagcagcaccctagtctgagagacgaggggacttctgacgataaggttttccttgcgtgccggggggcaggccaatgtcctctctcagcacccgctgggacaatggacagaactagggtactacaagcaagccaagccgggccgcctttcttctgctacacctgcggtaagtgctttagtcgcaggtcttatctctatagccatcagtttgtgcacaacccaaagctcacaaattcgtgcagtcagtgcggtaagctgtttaggagccccaaatccctctcttaccataggcgaatgcacctgggcgaacgccctttttgctgcactctgtgtgacaagacatactgcgatgcttcaggtttgagcaggcatagacgagtgcacctgggctaccgaccacatagctgttccgtgtgcggcaagagcttcagggatcagtccgaactgaagcgccatcaaaaaattcatcagaaccaggaaccagtggacggcaaccaggagtgcacactccgaattcccgggacgcaggccgagttccaaacgccgatagcacgcagccagcgatctatccaaggcctgctggatgttaatcacgcgccagtggccagatcgcaggagccaattttccggaccgagggccctatggctcaaaatcaggccagtgttctcaaaaatcaagcccccgtaactaggacccaggcaccgattacaggtaccttgtgtcaggacgccagatcaaactcacatccagtaaaaccctcaagactgaatgtgttctgttgcccacattgctccttaacatttagcaagaagtcatatttgtcaagacaccaaaaggcccacttgaccgagcctccaaactactgctttcactgcagtaaaagctttagctcattctcaaggctggtcagacaccagcaaacccactggaagcagaaatcctatctatgcccaatctgtgatctaagctttggagagaaagaagggctcatggatcattggagagggtacaaaggcaaggatctttgtcagtcctctcatcacaaatgtagggtcattctcggccagtggctcgggttctcacacgatgtgccaacgatggcaggcgaagagtggaagcacggcggcgatcagagccctcctagaatacacacccctagacgtcgaggtctccgagaaaaagcctgcaagggggacaagactaaagaagcggttagcatcctgaaacacaagtag

SEQ ID NO: 304177 - DNA, 1551 bp, Artificial Sequence
  derived and/or modified sequence
atgtttgaacagctgaaacccattgaacctagggactgttggagagaggcccgggtgaaaaaaaaacccgtgacctttgaggatgtggctgtcaatttcacgcaggaagagtgggattgcttagacgcatcccagcgcgtcttgtatcaagatgtaatgagcgagacttttaaaaacctgacatccgtagctcgaatctttttgcacaaacccgagttgatcaccaaattggaacaggaggaggaacaatggcgggagttcgttcacttgcctaataccgaaggactgtccgagggcaagaagaaagagctgcgggagcagcatccctctttacgcgacgaggggacctctgatgataaagtgttcttagcatgccgcggagcggggcaatgtccactgagcgcaccagccggaacgatggaccggaccagagtcctgcaagctagtcaggcaggacctcctttcttctgttatacctgcggaaagtgctttagcagaagatcgtatctctattcacatcagtttgtgcataatccgaaactaaccaattcctgtagccagtgtggcaagctgtttcgttcgcctaagtccctgtcataccataggagaatgcatctgggagagagacctttctgttgcactctctgtgacaaaacctattgtgacgcctcggggcttagtcgccatagacgcgtgcatctggggtatagacctcactcgtgctccgtgtgcgggaagagttttagagatcaatcagagctcaagcgtcatcagaagatccatcaaaaccaggaaccagtcgacggcaaccaggaatgtaccctgcgtattccaggaacccaggctgagttccagacgccaatagccagatcacagcgtagcatccagggcctgctggatgtgaatcacgctccagtggcgcgcagccaggaacccatctttcggacagaaggcccaatggcacagaatcaggctagcgtgttgaagaatcaggccccggtgacacggacacaggcccctataacaggtactctttgtcaagatgcaaggtctaactcacatcccgtcaagccatctcggctgaacgtcttttgttgtccacactgcagcctgactttttcaaagaaaagttatctgtccaggcatcagaaggcccatctcactgaaccaccaaattactgttttcattgctccaagagtttctcgtctttctcaagactggtcaggcatcagcagacacactggaagcagaaaagttacctttgcccaatctgcgacctgagcttcggagagaaggaaggcctaatggatcactggaggggctataaagggaaggacttatgccagtctagtcaccataaatgcagagttatcctaggtcagtggttgggcttttcgcacgacgtgcctaccatggccggtgaagaatggaaacatgggggcgatcagtcaccccccagaatccatacgcctcgaaggagggggctgagggaaaaggcctgcaaaggcgataaaacgaaagaagcggtctccatactcaagcacaaatag

SEQ ID NO: 304178 - DNA, 1551 bp, Artificial Sequence
  derived and/or modified sequence
atgttcgaacagctgaaaccaattgagccaagagactgctggagagaggcaagagttaagaaaaagcctgtcactttcgaagacgtggccgtgaacttcactcaggaggagtgggactgccttgatgccagccagcgggtgttgtaccaagatgtaatgagcgaaacgtttaaaaacctaactagcgtggcccgaattttcttacataaacctgaacttattaccaaacttgaacaagaggaggagcagtggcgagaattcgtccacctgccaaacacggaaggcttaagtgaagggaaaaagaaggagttaagagaacagcaccctagtctccgcgacgaagggaccagcgacgataaagtgtttctggcatgccgaggtgctgggcagtgtccactctctgcacctgccggaaccatggatcggacaagagtactacaagcgagccaggcaggccccccatttttctgctatacctgtgggaaatgtttcagtcggcgctcctacttgtacagccatcagttcgtgcacaaccctaaattgactaacagctgctcccagtgtgggaagctgttccgatcccctaagtcactatcctatcaccgcagaatgcacctgggggagagacccttctgctgtaccctgtgtgataagacatattgtgacgcttcggggctctcgagacacaggcgtgtgcacttgggctataggccccactcctgtagcgtttgtggtaaatccttccgcgaccaaagcgaactcaagagacaccagaagattcaccagaatcaggaacctgtggacgggaatcaggagtgcacattaagaataccaggcacccaagctgagttccagacaccaatcgcccggtcccagcggtctatccagggcttgttggatgtcaaccatgcccctgtggcccgatcacaggaaccaatcttcagaaccgaaggacccatggcccagaatcaagcctctgtactcaaaaaccaagctccggtaacgaggacacaggctcctatcacagggacactctgccaggacgctcgaagtaattcccacccggtgaagccttctcgcctgaacgtgttttgctgcccacattgtagcctgacattttctaaaaagtcttatctgtctagacaccagaaggcccatctgaccgagcctcccaattattgttttcattgtagcaaatccttctcatctttttctcgtctggtcagacaccagcagacacactggaaacagaagtcctatctttgccccatatgcgacctcagtttcggagaaaaagaagggctgatggaccactggagagggtataaaggaaaagatttgtgtcaatccagtcaccataagtgtcgagtcattttagggcagtggctcggtttttctcatgacgtgcctacgatggcaggagaggaatggaagcacgggggagaccaatcgcctcctagaatccacaccccccggcggcggggtctcagggagaaggcctgtaaaggagacaagacaaaggaggccgtgtctatcctcaaacacaaatag

SEQ ID NO: 304179 - DNA, 1551 bp, Artificial Sequence
  derived and/or modified sequence
atgttcgaacagttgaagcctattgaaccgagagactgctggagggaagcccgggtgaaaaagaagcccgtcaccttcgaggatgttgcagttaatttcactcaagaagagtgggactgcctggatgcaagtcagcgggtgctgtaccaggacgtgatgagcgagactttcaagaatctcacatccgtggctagaatctttctccacaagcctgagttgatcaccaaactggaacaggaggaggaacagtggcgcgagtttgtgcacctgcctaatacagaaggtctgagcgaggggaagaaaaaggaactgagggaacagcacccatccctcagggacgaaggcacgtcagatgataaggtgtttttagcctgccggggtgcaggtcagtgtcctctatctgctccagccggaacgatggataggaccagagtcctgcaggccagtcaggctggccctcccttcttctgctatacgtgtggcaagtgtttctccaggagaagctacctttactctcaccagttcgtgcacaatccaaagctgaccaactcttgttcccagtgcggcaaactattccgcagccctaagtccctttcctatcaccggcggatgcatcttggggagcgcccattctgctgcacactctgtgataaaacctactgcgacgcctctgggcttagtagacacaggcgagttcatctgggttatcgtcctcatagctgcagtgtttgtggaaaaagcttcagggatcagtccgaacttaagagacaccaaaaaattcatcaaaatcaagaaccagtggacggcaaccaggagtgcacgctgaggatccctggaacccaggccgagtttcagactcccatcgcccggtcccagcggtccatacagggactgctcgacgttaaccacgcacccgttgcccggtcccaggagcctattttccgcacagagggaccgatggcccaaaatcaggcctctgtcttgaagaatcaggccccggttaccagaactcaagcaccgataacaggaacactttgccaggacgcgcgtagcaactctcatcctgtcaagccttcaaggctgaatgtgttctgttgtccgcattgtagcttgacattctcaaaaaagagttacctgagtaggcaccagaaggcacacctgactgagcctccaaattattgcttccattgctccaagagcttcagcagcttttctcgcctggtccgccatcagcagacccattggaagcagaagagttacctctgcccgatttgtgatctgagcttcggagagaaggagggattgatggatcattggcgcgggtataaggggaaagatttgtgtcaatcctcccaccacaagtgtagggtgattctggggcagtggctggggttctcccacgacgtccctacgatggcaggggaggagtggaagcatggtggggatcaatccccacccagaatccatactccccgcagacgggggctgagagaaaaggcctgtaagggggataaaaccaaagaagcggtcagcattctgaaacataagtag

SEQ ID NO: 304180 - DNA, 1551 bp, Artificial Sequence
  derived and/or modified sequence
atgttcgagcaactcaagccgattgagcctagagactgctggagagaagctagagtcaagaaaaaacctgtcacttttgaagacgtagctgtgaacttcacccaggaagaatgggactgtttggacgccagtcagcgagtgctgtatcaggacgtgatgtcggagacgttcaagaacctcacttccgtggccagaatctttctccacaaaccagaattaatcaccaagctggaacaggaggaggagcagtggcgggagttcgtacacttaccgaacaccgagggcttatctgaggggaaaaaaaaggaactgcgcgaacaacacccttcactacgtgatgaagggacatccgacgacaaggtcttccttgcctgccggggtgcaggccagtgccccttaagcgcccctgcaggaaccatggaccgcaccagggtgttgcaggcctcgcaggcaggcccccctttcttctgctatacgtgcggaaaatgcttttcacggcggagttatctgtattctcaccagttcgttcacaatcccaagttgacaaactcatgcagtcagtgtggcaagctgttcagatcacctaagagtctgtcataccaccggaggatgcacctgggagaacggcctttttgctgcacactgtgcgacaaaacctattgcgatgccagcggcctgagcaggcaccgcagggtacatcttggctacagaccgcactcatgctctgtgtgtggcaagagtttccgggatcaaagcgagctcaaacgccatcaaaagatccaccagaatcaggaacccgtggatggcaaccaggagtgcacactgcgcatccccgggacccaggccgagttccagactcccatagctcgatcccagagaagtatccaggggctcttggatgttaaccatgccccggtcgctcgatcccaagagcctatattccgaactgaaggcccgatggctcagaatcaggccagcgtgctaaagaatcaagctccggttacacgcacacaggcgcctattaccggaacgctgtgccaggacgcgaggagtaattctcatcccgtaaaacctagccgtctcaatgttttctgctgcccacattgttccctcacattcagcaaaaaatcctacctgagtcggcatcaaaaagcgcaccttactgagcccccaaactattgctttcactgttccaagtcttttagctccttctcccgccttgtgcggcaccagcaaacgcattggaagcagaagagctacctctgtcccatctgcgacctgagctttggcgaaaaagaaggcctcatggaccattggcggggctataaaggcaaagatctatgccaaagttcacatcataaatgtagggttatcctcgggcagtggttaggcttcagccacgacgtgcccacaatggctggtgaggaatggaagcacgggggagatcaaagcccccctagaattcatacaccacgccgcagaggcttgcgcgagaaggcatgtaagggggataagactaaagaagcggtgagtatactcaaacataaatag

SEQ ID NO: 304181 - DNA, 1551 bp, Artificial Sequence
  derived and/or modified sequence
atgtttgagcagctgaaaccaatcgaacctagggattgttggcgggaagccagagtaaaaaagaaacctgtaacttttgaggacgtcgctgttaattttacgcaggaggaatgggactgcctggatgcatcacaacgcgttctttaccaggatgtaatgtccgaaactttcaaaaatctcactagtgtggcccggatctttctccacaaaccagagcttattactaagttagagcaggaagaggagcaatggagagagttcgtgcacctgcccaacactgaggggctttcagaaggcaagaaaaaagagctccgcgaacagcacccaagcctgcgcgacgagggaacaagtgatgacaaagttttcctggcttgtcgcggcgctggccagtgccccctttctgccccagctggcacgatggatagaaccagagtgctgcaagcaagccaggctggacctcctttcttctgctatacatgtggaaaatgcttctcccggcgctcttacctttattctcatcagtttgttcacaaccccaagcttacaaactcatgctctcagtgcggcaaactcttcaggtccccgaaatccctgagttatcatagaaggatgcacttgggagaacgcccattttgctgcacactctgtgataaaacctattgtgatgcatccggcctctctcggcacaggagagtgcacctgggctatcgcccgcatagttgcagtgtttgcggaaaaagctttagagaccagtctgagcttaagcggcaccagaagatccatcaaaaccaagagcccgtcgacggtaaccaggagtgtactttgagaatacccggaacacaagcggagtttcagactccaattgcaaggtcacagcggtccatccagggcctccttgatgtgaaccacgctccagttgcgagatcccaggagccaattttcaggacagagggaccgatggcccagaatcaagccagcgtcctcaaaaatcaagcccccgtcactcggactcaggctcctatcaccggcacactgtgccaggatgcccgcagtaattcacacccagttaagcctagcagattaaatgtgttttgctgtccccactgttcgttaacctttagtaaaaaaagctatctgtccagacatcagaaggcccatctgacagaaccgccaaactattgtttccactgcagcaagagtttttcatcttttagcaggctcgtgcgccaccagcagactcactggaaacagaagtcctatctctgtcctatctgcgatctgtcttttggggaaaaagagggactaatggaccactggagaggttacaaggggaaggacctctgccagtcctctcaccacaagtgccgcgtgatcctgggtcagtggttgggcttctctcacgatgtcccaactatggctggggaggagtggaagcatgggggcgaccagtctccaccaaggatacataccccaaggcggcgcgggctgcgtgaaaaggcctgcaagggagacaaaaccaaagaagccgtctcaattctgaagcacaagtag

SEQ ID NO: 304182 - DNA, 1611 bp, Artificial Sequence
  derived and/or modified sequence
atgttcgagcagcttaagcccattgagcccgtccaaaagactcttccatgggtaggggaggtggctgcaacactgcaggaggctatgaagagggattgttggcgcgaggcacgggttaagaagaaacccgtgacatttgaagatgtggctgtgaatttcactcaagaggaatgggactgtttggatgcttcccagcgggttctttaccaggatgtcatgagcgaaacgtttaaaaatttaacatccgtggctcgaatattcttacacaagccagaactaattacaaagctcgaacaggaggaggaacagtggcgcgagtttgtgcatttgcccaatactgaggggctctctgagggcaagaaaaaagaactgcgggaacaacatcccagcttgagagatgaggggacctctgacgacaaggtgttcctggcctgtcggggggcgggtcagtgccccctttccgcccctgccgggactatggacagaactcgggtgctgcaggcatcccaggccgggcctccctttttttgttacacctgtggcaagtgcttctcacgccgatcttacctgtactctcatcagttcgtacataatccaaagctgactaattcttgctcccaatgcggcaagctctttagatcccccaagtctttaagttatcataggaggatgcaccttggggaaagaccattttgttgcacactttgcgataagacgtattgcgacgcttcagggcttagtagacacagacgcgttcatcttggatatcgcccccactcttgcagtgtatgtggtaaaagtttccgcgaccagtccgaactaaagcggcaccagaagatccaccaaaatcaggaaccggtggacggtaaccaagagtgcacgttgcgtatccccggcacgcaggcggagttccagaccccgatcgcaagatctcagaggagcattcaggggcttcttgatgtgaatcatgccccagtggccagatcccaggagccaatcttccgcactgaaggtccaatggcccagaatcaggcctctgtactcaaaaaccaggctcctgtgactagaactcaggccccgattaccggcaccttgtgtcaggacgctaggtccaactcgcacccggttaagcctagtaggctgaatgtgttttgctgcccacactgctccttgactttcagcaaaaagtcgtatctgtcaaggcatcagaaggctcacctcacagagccccctaattactgttttcactgttcgaaatccttttccagtttcagccgactggtgaggcatcagcagacccattggaaacagaaatcctatctgtgtccgatatgcgacctgagctttggtgagaaggaaggattgatggaccactggaggggctataaaggaaaagacctctgtcagagcagtcatcataagtgcagagtgatcctcggacaatggctgggtttttcccatgacgtgccaacaatggccggagaagaatggaagcatggtggcgatcaaagcccacctcgcatccatacgccccggagacggggattaagggaaaaggcctgtaaaggggataaaactaaggaagcagtaagcatacttaagcacaagtag

SEQ ID NO: 304183 - DNA, 1551 bp, Artificial Sequence
  derived and/or modified sequence
atgtttgagcagctcaaacctattgagcctcgtgattgctggagagaggccagggtgaagaaaaagcctgtgaccttcgaagacgtagccgtcaactttacacaggaagagtgggattgtctggatgcatcccaacgcgtattgtaccaggacgtaatgtcagaaacgtttaaaaatctgactagcgtggcccgcatattcctgcacaaacctgagctgatcaccaagctcgaacaagaagaggagcagtggcgcgaattcgtgcacctgcccaacaccgagggcctctccgaggggaaaaagaaggagctgagagaacagcatccatccctaagggatgagggaactagcgatgacaaggtcttcttggcttgccgcggagctggtcaatgtcctctttccgcccccgccgggactatggataggacacgcgttctgcaggcttctcaggctggtccgccgttcttctgctacacatgtggaaaatgcttttccaggcgaagctacttgtactctcatcagttcgtccataatcccaagctgactaacagctgctctcagtgcggtaaactgttcaggtctcccaaatcactcagttatcacagaaggatgcacctgggggagcggcctttctgttgtaccctgtgtgataagacctactgtgatgcttcaggtctgagcagacacagacgggtgcatttggggtaccgaccgcattcttgcagcgtctgcgggaaatcatttagggatcagtccgagttaaaaaggcaccagaagatacaccagaaccaggaaccagtggacgggaatcaggagtgtacgttgagaattccaggaacgcaggctgagttccagacacccatagcccggtcccaaaggagtatacaaggcctactggacgtgaaccacgctccagtagcgagatcccaggaaccgatttttcgtacagaagggccgatggcccagaatcaagctagtgtcttaaaaaaccaggcacctgtgacacgcacccaggcccccataacagggactctgtgtcaagatgcgcggtctaactcccatcccgtcaagccttccaggctcaacgtcttctgctgtccccattgttccttaactttctctaaaaagagctacttgagtcgtcatcagaaagctcacttgaccgagcccccaaactattgcttccactgtagcaagagtttctccagcttttccagattagtgcgccatcagcagacacactggaagcagaagagttacctatgtcctatttgcgatctgtcttttggcgagaaagaagggctgatggatcactggagaggctataaaggcaaagatttgtgccagtcttctcatcataagtgtagagtcatcctcgggcaatggttgggctttagccatgacgtgcctactatggccggcgaagagtggaagcatggcggtgatcagtcaccaccacgtatccacactccccgcaggcgggggctgcgcgagaaggcctgcaagggagataaaactaaagaggctgtgtccattcttaagcataaatag

SEQ ID NO: 304184 - DNA, 1356 bp, Artificial Sequence
  derived and/or modified sequence
gcgggcggctcaccagaaagcctgttgttctttcagaagcccgtgacttttgaagatgtggcagtgaactttacacaggaggagtgggactgcttggatgcctcccagcgcgtgctctaccaggacgtaatgtccgaaaccttcaaaaacttaacatccgtggcacgaatcttcctccataagccagaacttatcactaaacttgagcaggaagaggagcagtggcgcgagacccgcgtgttgcaggcaagccaggctggacctccatttttttgttacacttgtggaaaatgtttttctcgccgatcttatctgtactcacaccaatttgttcataaccctaaactgaccaatagctgctctcagtgtggaaagcttttccggagccccaaatcattatcttaccacagaagaatgcatctgggtgagcgccccttttgttgcacactctgtgataagacttactgtgacgcctcgggactttccagacatcgccgagtacacctgggctaccgtccccatagctgctccgtttgcgggaagtccttcagggatcaatcagagctcaagagacatcagaaaattcaccagaaccaggagccagtggacgggaatcaggaatgtactttacgcataccaggtactcaggcagagtttcagacccccattgctcgaagtcagagatcgattcagggacttcttgacgttaaccatgcccccgtggcaagaagtcaagaacccatattccggactgaaggccctatggcgcagaatcaggcctcagtgcttaagaatcaagcaccggtgacacgtacgcaggcgcccatcaccggcactctgtgtcaagacgcacggtcaaattctcatccggtgaaaccaagcaggctcaatgtattctgctgccctcactgctctctgacatttagcaagaaatcttatctgtccagacaccaaaaagcccatctgaccgagccacctaattattgttttcattgcagcaagagtttctctagcttcagcagactcgtccgacaccagcagacccactggaagcagaagagctatctgtgtcctatctgcgacctcagcttcggtgagaaggaggggctgatggaccattggaggggatacaagggcaaggatctctgtcagtcttcacaccacaagtgtagagtcatcctcggtcagtggttgggattcagccacgacgtgcccaccatggctggcgaggaatggaaacatggaggagaccagtccccccctagaatacacacacctagaagaaggggccttcgggaaaaggcctgtaaaggcgataagacgaaagaggcggtttccattctcaaacacaaatag

SEQ ID NO: 304185 - DNA, 1551 bp, Artificial Sequence
  derived and/or modified sequence
atgttcgaacagctaaagccgattgaaccaagagactgttggagagaggcccgagtcaagaagaagcctgtcaccttcgaagatgttgccgtcaattttacacaggaggagtgggactgcttggacgctagccagagggtgttgtaccaagacgttatgagcgagaccttcaagaacctaacaagtgtggcccgaatctttctccacaagcctgagctgattaccaaactcgagcaggaggaggaacagtggagagaattcgtacatctgccaaataccgagggattgtccgaggggaaaaaaaaggaattgcgagagcagcatccttctctgagggacgaaggcactagcgatgataaggtgttccttgcttgccggggcgctggacagtgtccgctaagtgccccagcagggaccatggacaggacacgggttttacaggcctcgcaggccggaccgcccttcttttgctacacgtgcggcaagtgcttctcacggcgctcttacttgtacagccatcagtttgtgcataaccccaaactgacgaacagctgtagccagtgcggaaagttgttccgcagccccaaatcccttagctatcatagacgaatgcacctgggggaaagacccttctgttgcaccctgtgcgataagacctattgcgacgcatccggactgtccagacataggcgggtgcacttagggtaccgacctcactcgtgttccgtatgcggcaagagcttccgcgaccagagtgagcttaaacgacaccagaagattcaccagaatcaagagcctgtggatggaaatcaggaatgcacactgcgcatcccaggcactcaagcagaatttcagactccaattgcacgctctcagagatcaatccagggtctcctggatgtgaatcatgctcccgtggcgcgttcgcaagaacccattttcagaaccgaagggccaatggcccagaaccaagcaagcgtgctgaagaatcaggctcctgtgacccggacacaggcgcctattaccggaactttatgccaagacgctaggtccaatagccaccctgtcaagccttcaagattgaatgtgttctgctgcccccactgtagcctgacattttcaaagaagtcctacctgtcccgccaccagaaggcgcacctgacggagcctccaaactactgttttcattgttctaagtcattttccagcttttcacgcttggtccgacaccagcagacccattggaaacaaaagtcctacttgtgtcccatatgcgacttatccttcggcgagaaggagggcctaatggatcattggcgggggtacaaggggaaggacctgtgccagagctcccaccataagtgtagagtgatattgggccagtggctaggcttcagtcatgacgtacccacgatggctggcgaagagtggaaacacggcggcgaccagtctccgcctagaattcataccccccgccggcgaggcctgagagagaaagcttgcaagggcgacaaaacaaaagaagcagtgtccatactcaagcataagtag

SEQ ID NO: 304186 - DNA, 1611 bp, Artificial Sequence
  derived and/or modified sequence
atgtttgagcagcttaaacccatcgaacctgtccagaagacgctgccctgggtcggtgaggttgccgcgacactgcaagaggcgatgaaaagagactgctggcgcgaagctcgggtcaagaaaaagccggtgaccttcgaagacgttgccgtgaatttcacgcaggaggagtgggattgccttgacgcaagccagagggtgctctaccaggatgttatgagtgaaacattcaagaacttgacaagcgtggcacgtatttttctacacaaacccgagctgatcactaaactggaacaagaagaggaacagtggagagaattcgttcatttgccgaatactgagggactcagcgaagggaagaagaaagagctgagggagcagcacccaagcctcagagatgagggcacctctgacgataaggtcttccttgcttgtcggggtgccggtcagtgcccgctgtcagctcctgccggaaccatggatagaactcgtgtgcttcaggcttcccaagccggaccgccctttttttgctacacgtgcggcaaatgcttctccaggcgctcttatctgtacagccaccagttcgtccacaaccccaagctcacaaactcctgcagccaatgtggaaaattatttaggtctccaaagtctctgagttatcatcgcagaatgcatctcggcgagcgcccattctgttgcactctctgtgacaaaacctattgtgacgccagcggtctctcaagacaccgccgcgtgcatttaggctaccgacctcattcatgttcagtgtgcggcaagagtttcagggaccagtccgagctcaagcgacaccagaagatacatcagaatcaggagccagtggatggtaaccaagagtgcaccttgcgcatccctggaactcaagccgaattccagaccccaatagctcgcagccagcgctccatacagggattgctagatgtgaaccacgctcccgtggctaggtcacaagaaccaatttttcggactgagggaccaatggcacagaatcaggcaagcgtgctaaaaaatcaggccccggtgacgcgcactcaggcccccatcacaggcactctttgtcaggacgctcgctccaattcacacccagttaaaccctcccggctcaatgtgttttgctgtccccattgtagcctaactttctcaaaaaaaagctatctgtccaggcatcagaaggctcacctcaccgagccacctaattactgctttcattgcagcaagagtttctcttcatttagtaggctggtcaggcaccagcagactcattggaagcagaagtcatatctgtgtccgatttgtgatctgtcgttcggcgaaaaggaaggactcatggaccactggaggggctacaaaggtaaagacctttgccagagtagccatcataagtgcagagttatcctaggacagtggctgggatttagccatgacgtaccaaccatggccggcgaggaatggaaacacggtggcgaccagtctccccccaggatccacacaccaagaagaagggggttaagagagaaggcttgcaagggcgataagacaaaagaggccgtgagcatcctgaaacacaagtag

SEQ ID NO: 304187 - DNA, 1611 bp, Artificial Sequence
  derived and/or modified sequence
atgttcgaacaactcaaacctattgagcctgttcaaaagactcttccttgggtgggagaggtggccgccacactacaggaggctatgaaaagagactgttggcgggaagctcgcgtcaagaagaagcccgtgacgttcgaggatgtggctgtgaacttcacgcaggaggagtgggactgcttggatgcctctcagagagtgctctatcaagacgttatgtctgagacctttaaaaacttgaccagcgtggcccgtatatttctgcacaaaccagagctcattacaaagttggagcaggaggaggagcagtggagggaatttgttcatttacccaatactgaggggctcagcgagggcaaaaagaaagagctgcgggagcagcatccctcgctacgtgacgaggggacttccgacgacaaagtcttcctggcttgccgaggcgcgggacagtgtcctttatcagctccggctggcacaatggaccgcacccgggtgctccaagcatcgcaggccggtccaccttttttttgctatacgtgtggtaaatgtttctcccgcagaagttatctgtattcacatcagttcgttcacaatcctaagctcacaaattcgtgcagccagtgtgggaaattgttccgaagcccaaagagcctgtcctatcatcgaaggatgcacttaggggagaggcctttctgctgcacgttatgtgataaaacatactgcgacgcttcagggctgtctagacatagacgagttcacttgggttacagaccccattcttgctccgtgtgcggaaagtcattccgcgaccagagcgagttgaagcgccaccagaagatccaccagaatcaagaaccagttgacggaaaccaggagtgcacactaagaatacccggcacacaggctgagttccaaactcccatcgctcgatcccagcgcagcattcaaggattgctggacgttaaccacgccccggtagcaaggtctcaagaacctatcttccgaactgagggccctatggcgcagaatcaggcttccgtgctgaagaatcaggcacccgtgaccaggactcaggctccaatcaccgggactctttgtcaggacgctagaagtaacagccatcctgtgaagccgagtcgtctgaatgtgttctgctgcccgcactgttcactaacattcagtaaaaaaagctatctaagcaggcaccaaaaggcccacctgacagaaccaccaaactattgctttcactgttccaagagcttctcgagcttcagcaggctggtccgacaccagcaaacacactggaagcagaagtcatatctttgtccaatttgcgatctgtcattcggagaaaaggagggcttgatggaccattggcgaggctataagggcaaggatctgtgtcaatcatcccaccacaagtgtcgtgtcattttagggcagtggctgggattttcacacgacgtccctaccatggccggtgaggaatggaaacacggcggggaccagagccccccgaggatacacacacctcgacgcaggggactcagagagaaagcgtgtaagggcgacaagaccaaagaagcagtttccatcctaaagcacaaatag

SEQ ID NO: 304188 - DNA, 1611 bp, Artificial Sequence
  derived and/or modified sequence
atgttcgaacagctgaaacctatagaacctgttcagaagactctgccatgggtgggagaagtagctgctactctgcaggaagcgatgaagagagattgttggcgtgaggctcgcgttaaaaagaagcctgtaacattcgaagacgtggcggtgaatttcacccaagaggagtgggactgcttagatgcctctcagcgtgtgctttatcaagacgtcatgagcgagacgttcaagaatctcacatccgtggcacgcatctttctgcacaaacccgagctgattacgaaattagagcaagaagaggagcagtggcgcgaattcgtccacctccctaacacagaaggcctgagtgaggggaaaaagaaagagctccgtgaacagcacccttccttgcgggacgagggcacctccgatgacaaagtgtttttagcctgtagaggcgctggtcagtgccccctctcagcccctgcaggcacaatggataggacgagggtgctgcaagcatctcaagctggcccaccatttttttgctatacatgtggtaaatgcttctccagacggtcatatttgtactcacaccagtttgtccataatcctaaattaacaaacagctgctcacaatgtggtaaactgtttagaagccccaaatctctgtcttaccaccggaggatgcatctcggcgaaaggcccttctgctgcacactgtgcgataaaacatattgcgacgctagtggcctgtcccggcatagacgagtgcaccttggctacaggccccatagctgctctgtgtgtgggaagtctttccgggatcagtctgagctcaaaaggcaccagaagatccatcagaaccaagaacccgttgatggtaaccaagaatgcaccctgcgcatcccgggtacacaagcagaattccaaactcctattgcgagaagccaacggagtattcaaggtctgctagacgtcaaccatgcccctgtggcaaggagtcaggaacctattttccgaactgagggccccatggctcaaaatcaggcttctgtactgaagaatcaggctccggtcacgagaacccaagcccccataacaggtacgctttgtcaggacgctaggtctaactctcatcctgtaaagcccagccggttgaatgtgttttgttgcccccattgttcactgactttttctaaaaaatcctacctgtcaagacaccaaaaggcacacctgaccgaaccaccaaactattgcttccattgtagtaaatccttctcttcttttagcaggctggtgagacatcaacagacccattggaaacaaaaaagttatctgtgccctatatgcgacctcagcttcggagagaaagaaggcttgatggatcattggagagggtataaaggcaaggacttgtgccagtccagccatcacaagtgtagagttattctagggcaatggttgggattcagccacgatgtaccaaccatggcaggcgaagaatggaagcacggcggcgatcagtctcccccacggattcacaccccaagacgccggggactgcgggaaaaggcctgcaaaggggacaagaccaaggaggcagtctcaatcctgaagcacaaatag

SEQ ID NO: 304189 - DNA, 1611 bp, Artificial Sequence
  derived and/or modified sequence
atgtttgagcaactgaagccgattgagcctgtgcagaagactctcccatgggtaggggaagtggccgccaccctgcaggaggctatgaagagggactgctggcgcgaggcacgagtaaagaaaaagcccgtgacgtttgaagacgttgccgtgaactttacgcaggaggagtgggattgtctggacgcctctcagcgcgtgctgtaccaggatgtgatgagcgagaccttcaagaatctcactagcgtggcccgcatattccttcacaagcccgagctgatcactaaactggagcaggaggaggaacagtggcgcgagtttgtgcatctgcccaataccgaagggctaagcgagggtaaaaaaaaggagctccgagaacagcacccaagtctcagggatgagggaaccagcgatgataaagtgttcctggcttgccggggcgctggtcagtgccccctgtcagcgcctgccggtactatggaccgcacccgggtgcttcaagccagccaggccggcccgcccttcttctgctacacatgtggtaaatgtttctccaggaggtcctatctgtatagccatcagtttgtccacaatcccaaactcacaaatagctgcagtcagtgtggaaagttatttcgatcccctaaatcactgagttatcacaggcgcatgcacctgggtgaaagacccttctgctgcactttgtgtgataagacatactgcgatgcatccgggctgtcccgacacaggcgcgtgcacttaggctatagaccacacagttgcagtgtgtgtggcaaatctttccgggaccagtctgagctgaagagacaccagaaaattcaccaaaaccaggaaccagttgacgggaaccaggaatgcaccttgcgtattcctggtacccaggcagaatttcaaacacctattgcacgctcccagcgcagtatccagggcttactagacgtgaaccacgcaccagtggccagatcccaggaaccaattttccgaactgagggaccaatggcccaaaaccaggcttcagtgctgaagaaccaggcccccgtgactcgcacacaggcccctatcactggcaccctgtgtcaggacgcaaggtcaaactctcatcctgtcaaaccttctcgcctcaatgtcttctgctgtccacactgttccctcactttcagtaaaaagagttacctctcgcgccatcaaaaggcccacttgaccgagcctcccaactactgtttccactgctccaagagcttctcttcgttctcccgactcgtcaggcaccagcagacccactggaaacaaaaaagctatctgtgtccaatatgtgacctatcgtttggggagaaggaaggccttatggaccactggaggggctataaaggcaaagacttgtgtcaatcgagtcaccacaagtgccgggtcattttaggtcagtggctcggcttcagtcatgatgtcccaacaatggcgggtgaggagtggaaacacgggggggaccaatccccacctcggattcacacccccagacgcagagggctcagagaaaaagcttgcaaaggggacaagactaaagaggcggtttcgattctgaaacacaagtag

SEQ ID NO: 304190 - DNA, 1551 bp, Artificial Sequence
  derived and/or modified sequence
atgtttgaacaactcaagcccatcgagccccgagactgctggcgagaggcacgagtgaagaaaaagcccgtgacttttgaggatgttgccgtgaattttactcaagaagagtgggattgtctggacgcctcccaacgggtcctgtatcaggacgtgatgtccgagacattcaaaaatctcacatctgtcgccaggatctttctgcataaaccagaactgattaccaaactagagcaggaagaggaacaatggcgagaatttgtccatctgcccaataccgaaggtctgtcagagggcaaaaagaaagagctcagggaacagcacccttcccttcgcgatgagggcacttcggacgataaggtgtttctcgcttgccggggagctggccagtgccccttgtctgctccagccgggactatggatcgtacccgtgtattgcaggcctctcaggctgggccgccatttttttgctacacctgcgggaagtgtttcagcagacgctcttacctgtactcccatcagttcgtccacaaccctaaattaaccaactcttgcagccagtgcggtaaattgttcaggagcccgaaatctttatcttaccaccgcagaatgcacttaggcgaacggcccttttgctgcaccctgtgcgataagacatactgcgacgcgtcaggcctgagtcggcatcgcagggtgcaccttggctatcgtcctcattcctgctcagtgtgcgggaaaagctttagggatcaaagcgagctgaagagacatcagaagattcaccaaaaccaggaacctgtcgacggcaaccaggagtgcacactgcgaataccaggcacccaagcggagttccagacacctattgctaggtcccagaggagtattcagggacttctggatgtgaaccacgctccagtcgccaggagtcaagagcccatattccggacggagggccccatggcccagaaccaggcctccgtgctaaaaaaccaggcccctgtgacgcggacacaggctcccatcactggtactctgtgccaggacgcgagatccaactctcatcctgtgaagccttctcgcttaaacgtcttttgctgcccccactgctcgctcacgttttctaagaagagctacttatccagacaccagaaggctcacctgacagaacccccgaactattgcttccattgtagcaaatctttctcaagcttttctagattggtgaggcaccaacaaacccactggaaacagaagtcctatctgtgccccatctgcgatctgtctttcggcgagaaagagggactaatggatcattggcgggggtacaaaggaaaagatctgtgtcaatctagccaccacaaatgcagggtaatactggggcagtggctgggcttctcccatgatgtgccaactatggcaggtgaagaatggaagcatgggggcgatcagagtcctcccaggatccacaccccgcgccgcaggggactacgggagaaggcatgcaagggggacaaaaccaaagaggccgtatcgattctgaagcacaagtag

SEQ ID NO: 304191 - DNA, 1551 bp, Artificial Sequence
  derived and/or modified sequence
atgtttgaacaactgaagccaatcgaaccccgagattgctggagggaggcacgcgtaaaaaaaaaacccgtcacctttgaggacgtggcagtaaattttacgcaggaagaatgggactgtttagacgcctcgcagcgtgtactttatcaggacgtgatgagtgagactttcaagaatctcacatctgtggcacgaatctttctgcacaaacctgagttgattaccaaactcgagcaggaagaggagcagtggagggagttcgttcacttacccaatactgaaggactgagcgagggcaaaaagaaggagcttcgagaacagcatccgtcactacgcgacgagggcacgtccgatgataaagtattccttgcttgcagaggggcggggcagtgcccactgtctgctcccgccggtacgatggacagaaccagggtcctgcaggcatcccaggccgggcccccttttttttgctacacctgcggcaagtgttttagcagaaggagctacctttactcccaccaattcgtccataaccccaagctgacaaattcatgttcacagtgtgggaagctttttaggtctcctaaatcgctcagctatcatcggagaatgcatctgggagagcgccctttttgttgtacgctctgcgataaaacatactgtgacgctagcggactttcaaggcatcgccgtgtacatctgggctataggccacattcatgcagtgtgtgcgggaaatcattcagagatcagtcggagctaaaaagacaccagaaaatccatcagaaccaggagcccgtggacggaaatcaggagtgtacattacgtattccagggacacaggccgagttccaaacccccatagcacgctcccagcgctcaatacaaggcctgctggacgtgaatcatgccccagtagcccgatctcaggagccgatattcaggacagagggtccaatggcccagaaccaggcctccgtgttgaagaaccaggcacctgtgaccaggacccaggcccctattaccggaaccctgtgtcaggatgcgagaagcaacagccaccctgtgaaaccctctcgcttgaatgttttttgttgcccccactgttcattgacttttagcaaaaagagctacctctccagacatcagaaggcccacctcacagagccccccaactactgcttccactgcagcaagtcttttagctccttctcacgcctcgtccggcatcagcaaacccattggaaacagaagtcatatctttgtcccatctgcgacctgagtttcggagaaaaagaggggctgatggaccactggagaggctataaaggaaaggacttgtgccagagctcacaccataagtgtcgcgtcatcctgggacaatggcttggattcagccacgacgtaccaacaatggccggggaagaatggaaacatgggggcgaccaatcaccacccaggattcatactccgcgtaggaggggcctgcgcgagaaagcatgtaaaggagacaagaccaaagaagcagtaagtatcctgaaacacaaatag

SEQ ID NO: 304192 - DNA, 1611 bp, Artificial Sequence
  derived and/or modified sequence
atgtttgagcagctgaaaccaatcgagcccgtacagaagactttgccttgggttggtgaggttgctgctacactgcaggaagccatgaagcgagactgttggcgtgaggcacgcgtaaagaaaaagccagtgacgtttgaggacgtggccgtgaattttacacaagaagaatgggactgtctagacgcctcacaaagggttttatatcaggacgtgatgagtgagacgtttaagaatttaacctcggtggcccgcatctttctgcacaagccagaactcataaccaaactggagcaggaagaagagcagtggagagagttcgtccatctgcctaacacggaaggcctatcagagggaaagaagaaggagttgagagaacagcaccctagcctgagagatgaaggcacgtccgatgacaaggtttttctcgcttgccgcggcgctggacaatgcccactatccgctccagccggaaccatggaccgcacaagggtcctccaggcatctcaagcgggacctcctttcttctgctacacttgtgggaagtgtttttcgaggcgctcctacttgtactctcaccagtttgttcataatcctaaactgacaaacagttgttctcagtgcggaaaactcttccgatctccgaagtctctaagctaccatcggaggatgcatctgggagagcgtcccttctgctgcaccctttgcgataaaacatattgtgatgcctccggactgagtcggcacaggagagtgcacttgggttatcgacctcactcatgcagcgtgtgtggcaagtcattcagggaccagtcggaattaaagagacaccaaaagatccatcagaatcaggagccagtggatgggaatcaggaatgcaccctcagaatcccaggcacccaggcggaatttcagacgcctatcgcccgctcacagagaagtattcagggattgctcgacgtgaaccacgcgcctgtggcacgctcacaggaaccgatctttcgcactgaggggccaatggcccagaatcaggcaagtgtcctaaagaatcaggccccagtgactcggactcaggccccaattactgggaccctctgccaagacgctaggtccaattctcatccagtcaaaccgagtagactgaatgtgttttgctgcccccattgctctctgacattttccaaaaaaagctatttgtcccggcatcagaaagctcacctgacagaaccccctaattattgcttccactgcagtaaaagcttctctagcttctcccgcctggttcggcatcagcagacgcactggaaacagaagagctatctgtgccctatttgtgacttatcattcggcgagaaggaaggactcatggaccattggagggggtacaagggcaaggacctatgtcagagctcccaccataaatgtagggttattcttggccagtggctcgggtttagccatgatgttcctacaatggccggcgaggagtggaaacacggcggtgatcagagtccccctaggatccatactccacgtcgaagaggcctgcgcgagaaggcctgcaagggtgataagactaaggaagctgtgtctattctgaagcataaatag

SEQ ID NO: 304193 - DNA, 1551 bp, Artificial Sequence
  derived and/or modified sequence
atgtttgagcagttaaagcctattgagcccagggactgctggagggaggcaagggtcaagaaaaagcccgtgaccttcgaggacgtcgcggtgaacttcacgcaagaagagtgggactgcctcgatgccagccagagagtactgtaccaggatgtgatgtctgagacttttaaaaatctcacaagcgtggcaaggatattcctgcacaagcctgagttaattaccaaactggagcaggaagaagagcagtggagagagtttgtacacttgccaaacacagagggactctctgagggaaaaaagaaagaactccgggagcagcatccctccctgcgcgacgagggtacttccgatgataaggtgttcctagcttgcagaggagcaggccaatgccctctgtcagcaccagcgggtacaatggacaggacccgggtccttcaggcctcccaggctgggcctccttttttttgctacacatgcggcaagtgtttctccagacgcagttacctgtattcccatcagttcgtacacaaccccaaactgacgaattcatgctcacagtgcggaaagctgttccgcagtccaaagtctctgtcttaccacaggcgcatgcatctgggagagcgaccattttgctgtactctgtgtgacaagacatactgcgatgcctccggcctttccaggcatcggcgcgtccacctgggctatcgccctcactcctgctccgtatgcgggaaaagttttcgcgaccagtcagaattaaagcggcaccagaaaatccaccaaaaccaggagcccgtggatggcaatcaggaatgtacactccgaatccctgggacacaagctgagtttcagaccccgatcgctagaagccagcgaagcatacaaggactgctagacgttaatcatgcccctgtggctaggtctcaggagccaatcttcagaaccgaaggtccaatggcccagaaccaggcttcagtgttgaagaaccaggcacctgtgacacgcacccaggcacccatcaccggaacactgtgccaggacgccaggtccaattcacaccctgtcaagccttctcgactgaacgtcttctgctgtccgcactgttcactgacgttctcaaagaaaagttacctgtctagacaccaaaaagcgcatcttaccgaaccaccaaattactgctttcattgttcaaagagtttctcatcattctctcggctggtgcgacaccaacaaacacactggaagcaaaaatcctacctttgtcctatttgtgacctctcctttggcgaaaaagagggcctgatggaccattggagaggttataaaggtaaggatctgtgccagagctcacaccacaagtgtcgcgtgatcctggggcaatggctggggttctcacacgacgtgccaactatggcgggcgaggaatggaaacatggaggagaccagagccctcctagaatccacactccgcgtcgccgggggttgagagagaaggcatgtaagggggataagaccaaggaagcggtgtcgatcttaaagcacaaatag

SEQ ID NO: 304194 - DNA, 1551 bp, Artificial Sequence
  derived and/or modified sequence
atgtttgagcagctcaagccaatcgagccgagggattgctggcgtgaggctagagtcaagaaaaagccagtcacgttcgaggacgttgcagtcaatttcacacaggaagaatgggactgtcttgacgcaagtcagcgggttctatatcaagacgtgatgtctgagaccttcaaaaacctcacaagcgttgcgcggatcttccttcacaagcccgaactgataacgaagctcgagcaagaggaagaacaatggcgcgaatttgtacatctgcccaataccgaggggctatcagagggcaagaaaaaagagctcagagagcaacatccatctttgagagacgagggtactagtgatgataaggtgtttcttgcctgccgtggcgctggccaatgtccactgagcgctcccgcaggcactatggatagaacacgggtgttacaagcatctcaggctggcccccccttcttctgttatacatgcggaaagtgttttagccgtcgctcttacctgtactcacatcaatttgtacacaatcctaaactgactaatagttgcagtcaatgtggaaagctatttcggtccccgaaatctctatcttaccacaggagaatgcacctcggggaacgacccttttgctgcacgctgtgcgataaaacctactgcgacgccagcggactttcaaggcatcgacgagtccacctaggatacaggcctcattcatgtagcgtctgcggaaagagcttccgcgatcagtcagagcttaaacgccaccagaagatccatcaaaaccaagagcccgtcgacggcaatcaagagtgtactctgcgcattccagggacacaggctgaatttcagaccccaatcgcccgctctcagcggtctatccagggcctgcttgatgtaaatcatgccccagtagcacggtcgcaggagccaatattccgcacagagggacctatggcacagaatcaggccagcgttctcaaaaatcaggccccagtgacccggacccaagcaccaataaccggaacactttgccaggacgcaagaagtaacagccaccctgtgaagccctctagacttaatgttttttgttgcccacactgctcactcaccttttcgaaaaaatcctaccttagcagacaccagaaggcccacctgaccgagccgcccaattactgttttcattgttccaaaagcttttcaagttttagtcgactggtccggcatcaacaaactcattggaagcaaaagtcctatctgtgtccaatatgcgatctcagctttggtgagaaagaagggctgatggaccactggcgcggctataaaggaaaagatctttgtcagtcctcacatcacaaatgccgcgtgatcctgggccagtggctgggcttctcccacgacgtcccaaccatggcaggagaggaatggaagcacggaggcgatcagagcccccccaggattcacacccctcgtcgtcggggtctgcgggaaaaagcatgtaagggcgacaaaactaaagaagccgtgtctatcctcaaacataaatag

SEQ ID NO: 304195 - DNA, 1611 bp, Artificial Sequence
  derived and/or modified sequence
atgttcgagcaactcaagccaattgaacccgtccaaaagactctgccctgggttggagaggttgccgctacactgcaagaagctatgaagagggactgctggcgggaagcgcgggttaagaaaaaacccgtaaccttcgaggacgtcgccgttaattttacgcaggaggagtgggattgcctggacgcctctcagagggtcttgtaccaggacgtcatgtccgagacttttaagaatttaacctccgtagctagaattttcctgcataagcctgaactcatcaccaaacttgaacaggaagaggagcagtggagagagttcgtgcatctgcctaacactgaaggtttgagcgaaggtaaaaaaaaggagctgcgggagcaacacccgtcccttagggatgaaggtaccagcgatgacaaagtgttcttagcttgtcgaggtgccggacagtgccccctaagtgctccagccggaaccatggaccggaccagggtgttgcaagcctctcaggccggacccccattcttttgttacacctgcgggaaatgcttcagtaggcgaagctatctgtactcacaccagtttgtacataatcctaagctcaccaattcttgctctcagtgcgggaaactatttcgaagcccaaaatctctctcttaccatcgccggatgcacctgggcgagcgtcctttttgctgtacactgtgtgacaagacatattgtgacgctagcggcctgagtcgtcacaggcgggttcatcttggataccgcccccatagctgctctgtctgtgggaaaagtttccgcgatcagtcggagcttaagcgccatcagaaaattcatcaaaaccaggaacccgtcgacggtaatcaagagtgcacacttaggattccagggactcaggcagagtttcagactcccatagctaggtcgcaaaggtcaattcaagggttactggatgtgaatcatgcccctgtagcccggtcccaggagcccattttccggacggagggacctatggcacaaaatcaggcttcagtgctgaaaaaccaggcccccgtgaccaggacccaggctcctatcaccggaaccctttgccaggatgcgcgctctaatagtcacccagtgaaacccagccgacttaacgtcttttgctgtccccactgctctctgaccttttcgaagaagagctatctgtcccgccaccaaaaagctcatttgaccgagccccctaattattgttttcactgctccaagagcttttcaagtttctcgcggctggttcggcatcaacagacacattggaaacaaaagtcttacttatgtcccatctgtgatttaagtttcggggaaaaagaagggctaatggaccactggcgtggctacaagggcaaagacttatgtcaaagctcacaccacaagtgtcgggtgatactgggacagtggttaggcttttcacacgatgtaccgaccatggctggggaagaatggaaacatggtggagaccagtctccacctcggatccacacacctaggagaagagggctgcgagagaaagcatgtaaaggcgacaaaactaaggaagctgtcagcatcctcaaacacaaatag

SEQ ID NO: 304196 - DNA, 1551 bp, Artificial Sequence
  derived and/or modified sequence
atgtttgagcagctgaagcccatcgagccccgggactgctggagggaggcccgggtgaagaagaagcctgtgacctttgaagatgtggccgtgaacttcacccaggaggagtgggactgcctggatgccagccagagggtgctgtaccaggatgtgatgtctgagaccttcaagaacctgacctctgtggcccgcatcttcctgcacaagccagagctgatcaccaagctggagcaggaggaggagcagtggagggagtttgtgcacctgcccaacacagagggcctgtctgagggcaagaagaaggagctgcgggagcagcaccccagcctgagagatgagggcaccagtgatgacaaggtgttcctggcctgccgcggggccggccagtgccccctgagcgccccagctggcaccatggacaggaccagggtgctgcaggccagccaggccggcccccccttcttctgctacacctgtgggaagtgcttcagccgccgcagctacctgtacagccaccagtttgtgcacaaccccaagctgaccaacagctgcagccagtgtgggaagctgttccgcagccccaagagcctgagctaccacaggaggatgcacctgggggagcggcccttctgctgcaccctgtgtgacaagacctactgtgatgccagcggcctgagccgccaccggcgggtgcacctgggctaccggccccacagctgcagcgtgtgtgggaagagcttccgggaccagagcgagctgaagaggcaccagaagatccaccagaaccaggagcctgtggatggcaaccaggagtgcaccctgcgcatccctggcacccaggccgagttccagacccccatcgcccggagccagaggagcatccagggcctgctggatgtgaaccacgcccctgtggcccggagccaggagcccatcttcagaacagagggccccatggcccagaaccaggcctctgtgctgaagaaccaggcccctgtgaccaggacccaggcccccatcaccggcaccctgtgccaggatgcccggagcaacagccaccctgtgaagcccagccggctgaatgtgttctgctgcccccactgcagcctgaccttcagcaagaagagctacctgagccgccaccagaaggcccacctgacagagccccccaactactgcttccactgcagcaagagcttcagcagcttcagccggctggtgcgccaccagcagacccactggaagcagaagagctacctgtgccccatctgtgacctgagctttggagagaaggagggcctgatggaccactggaggggctacaagggcaaggacctgtgccagagcagccaccacaagtgcagggtcatcctgggccagtggctgggcttcagccatgatgtgcccaccatggccggggaggagtggaagcatggaggagaccagagccccccacgcatccacacccccaggagaagaggcctgcgggagaaggcctgcaagggggacaagaccaaggaggccgtgtccatcctgaagcacaagtag

SEQ ID NO: 304197 - DNA, 1611 bp, Artificial Sequence
  derived and/or modified sequence
atgtttgagcagctgaagcccatcgagcctgtgcagaagaccctgccctgggtgggggaggtggccgccaccctgcaggaggccatgaagagggactgctggagggaggcccgggtgaagaagaagcctgtgacctttgaagatgtggccgtgaacttcacccaggaggagtgggactgcctggatgccagccagagggtgctgtaccaggatgtgatgtctgagaccttcaagaacctgacctctgtggcccgcatcttcctgcacaagccagagctgatcaccaagctggagcaggaggaggagcagtggagggagtttgtgcacctgcccaacacagagggcctgtctgagggcaagaagaaggagctgcgggagcagcaccccagcctgagagatgagggcaccagtgatgacaaggtgttcctggcctgccgcggggccggccagtgccccctgagcgccccagctggcaccatggacaggaccagggtgctgcaggccagccaggccggcccccccttcttctgctacacctgtgggaagtgcttcagccgccgcagctacctgtacagccaccagtttgtgcacaaccccaagctgaccaacagctgcagccagtgtgggaagctgttccgcagccccaagagcctgagctaccacaggaggatgcacctgggggagcggcccttctgctgcaccctgtgtgacaagacctactgtgatgccagcggcctgagccgccaccggcgggtgcacctgggctaccggccccacagctgcagcgtgtgtgggaagagcttccgggaccagagcgagctgaagaggcaccagaagatccaccagaaccaggagcctgtggatggcaaccaggagtgcaccctgcgcatccctggcacccaggccgagttccagacccccatcgcccggagccagaggagcatccagggcctgctggatgtgaaccacgcccctgtggcccggagccaggagcccatcttcagaacagagggccccatggcccagaaccaggcctctgtgctgaagaaccaggcccctgtgaccaggacccaggcccccatcaccggcaccctgtgccaggatgcccggagcaacagccaccctgtgaagcccagccggctgaatgtgttctgctgcccccactgcagcctgaccttcagcaagaagagctacctgagccgccaccagaaggcccacctgacagagccccccaactactgcttccactgcagcaagagcttcagcagcttcagccggctggtgcgccaccagcagacccactggaagcagaagagctacctgtgccccatctgtgacctgagctttggagagaaggagggcctgatggaccactggaggggctacaagggcaaggacctgtgccagagcagccaccacaagtgcagggtcatcctgggccagtggctgggcttcagccatgatgtgcccaccatggccggggaggagtggaagcatggaggagaccagagccccccacgcatccacacccccaggagaagaggcctgcgggagaaggcctgcaagggggacaagaccaaggaggccgtgtccatcctgaagcacaagtag

SEQ ID NO: 304198 - DNA, 1356 bp, Artificial Sequence
  derived and/or modified sequence
gctgggggcagccctgagagcctgctcttcttccagaagcctgtgacctttgaagatgtggccgtgaacttcacccaggaggagtgggactgcctggatgccagccagagggtgctgtaccaggatgtgatgtctgagaccttcaagaacctgacctctgtggcccgcatcttcctgcacaagccagagctgatcaccaagctggagcaggaggaggagcagtggagggagaccagggtgctgcaggccagccaggccggcccccccttcttctgctacacctgtgggaagtgcttcagcagaagaagctacctgtacagccaccagtttgtgcacaaccccaagctgaccaacagctgcagccagtgtgggaagctgttccgcagccccaagagcctgagctaccacaggaggatgcacctgggggagcggcccttctgctgcaccctgtgtgacaagacctactgtgatgccagcggcctgagccgccacagaagagtgcacctgggctaccggccccacagctgcagcgtgtgtgggaagagcttccgggaccagagcgagctgaagaggcaccagaagatccaccagaaccaggagcctgtggatggcaaccaggagtgcaccctgcgcatccctggcacccaggccgagttccagacccccatcgcccggagccagaggagcatccagggcctgctggatgtgaaccacgcccctgtggcccggagccaggagcccatcttcagaacagagggccccatggcccagaaccaggcctctgtgctgaagaaccaggcccctgtgaccaggacccaggcccccatcaccggcaccctgtgccaggatgcccggagcaacagccaccctgtgaagcccagccggctgaatgtgttctgctgcccccactgcagcctgaccttcagcaagaagagctacctgagccgccaccagaaggcccacctgacagagccccccaactactgcttccactgcagcaagagcttcagcagcttcagccggctggtgcgccaccagcagacccactggaagcagaagagctacctgtgccccatctgtgacctgagctttggagagaaggagggcctgatggaccactggaggggctacaagggcaaggacctgtgccagagcagccaccacaagtgcagggtcatcctgggccagtggctgggcttcagccatgatgtgcccaccatggccggggaggagtggaagcacggcggggaccagagccccccacgcatccacaccccaagaagaagaggcctgcgggagaaggcctgcaagggggacaagaccaaggaggccgtgtccatcctgaagcacaagtag

SEQ ID NO: 304199 - DNA, 1551 bp, Artificial Sequence
  derived and/or modified sequence
atgttcgagcagctgaagcccatcgagccccgggactgctggcgggaggctcgcgttaaaaagaaaccggttacgtttgaagacgttgccgtgaattttacccaagaagagtgggactgtttagacgccagccagcgggtgctgtaccaggatgtcatgtccgagacatttaaaaacctgactagcgttgcgaggattttcctgcataaacccgagctgatcacgaagctggaacaggaggaagagcagtggcgagaattcgtgcatctgcccaacaccgagggcctgagtgagggcaagaagaaagaactgcgagaacagcaccccagcctgagggatgagggaacaagcgacgataaagtctttttggcatgccggggagcaggccaatgtcccctctcagcccctgccgggaccatggatagaaccagagtgctgcaagcgagtcaagcaggccctccgttcttctgctatacctgtgggaaatgtttcagccgacgctcttacctctactcgcaccagtttgttcataatcctaagctgacaaactcatgtagccaatgcggaaaactgttcagatcccccaaatctttgtcttatcaccgaagaatgcacctaggggagcgccccttttgctgcaccctctgcgacaagacctattgtgacgcatccggcctctcccgacaccggcgggttcacctcggctatcggccccattcgtgctccgtgtgtggcaagagctttcgcgatcagtctgagctcaagcggcatcaaaagattcaccagaaccaggaacccgtggatgggaaccaagagtgcaccctacgcattcccgggactcaggctgagtttcaaacccctattgccagaagccagaggtcgattcagggtcttttagatgtcaatcacgcccctgtggcgcgaagtcaggagcccatctttcgtactgagggacccatggctcagaatcaggcatcggtgctgaaaaaccaagctccagtgacaaggacccaagcaccgattacaggcacactgtgccaggacgcccgttctaactcccaccccgtcaagccctcaaggctcaacgtgttttgctgccctcactgttccctgacattttccaaaaagagctatcttagcagacatcagaaggctcatctgactgaacctccaaattactgtttccactgctcaaaaagtttcagttccttcagcaggcttgttcggcatcagcagacacattggaaacagaaatcatatctatgtccaatctgcgatctgagcttcggggagaaagagggcctcatggaccactggcgaggctacaaaggaaaagacttatgtcagagctctcaccataaatgccgtgtcatcctgggacaatggctggggttctctcatgatgtcccgacgatggccggcgaggagtggaaacatggtggggatcaaagtccacccaggatccacacaccacgacgacgcgggcttcgagagaaggcgtgcaagggagacaagactaaggaagccgtctcaatcctgaaacacaagtag

SEQ ID NO: 304200 - DNA, 1551 bp, Artificial Sequence
  derived and/or modified sequence
atgttcgagcagctgaagcccatcgagccccgggactgctggcgggaggccagggtcaagaaaaagcccgtgacttttgaggacgttgccgtgaatttcacccaggaggagtgggattgtctggacgcttcacaaagagttctatatcaggacgttatgtccgaaacattcaagaatctgacatcagtggcaagaatcttcctacacaagccagagctgattaccaaactggagcaggaggaggagcagtggcgcgaattcgtgcacttgcccaacaccgagggtctcagcgaggggaaaaaaaaggaactcagagagcaacacccctccttaagggacgaggggacgagcgacgataaagtgttcctggcatgtaggggcgctggacagtgcccgctgtctgccccagccggaacaatggacagaacgagagtcttacaagcctctcaagccgggcctccatttttttgttatacgtgtggcaagtgcttcagtcgaaggtcctatctgtactcgcaccaatttgtccacaatccgaagctgactaattcatgtagccaatgcgggaaactgttccggtcgcctaagagcctctcctaccaccgtcgaatgcatctaggcgagcgcccattttgctgtaccctatgtgacaagacatactgtgatgccagtgggctgtcacggcaccgacgtgtccatctgggatacaggccgcactcctgtagcgtgtgcggaaagagttttcgcgaccagtccgaactgaaacgccaccaaaaaatacatcagaatcaggagccagtcgatggcaatcaggaatgcactttgcggataccaggtacccaggctgaatttcagactcccatcgcccgatcacagcgttctatacagggtctgttggatgtgaaccacgccccggtagcacgaagccaggagcccatcttcagaacggaaggtccgatggcgcagaaccaagccagcgtgttgaagaaccaggcacccgtgacacgaacgcaagctcccattaccgggaccttgtgccaggacgcccgttcaaactcacaccctgttaaacctagtagactgaatgtcttttgctgtccgcattgtagcctgacatttagtaagaagtcctatctgtctcggcaccagaaagcacacctcactgagccacctaactattgtttccattgctcaaaatctttcagctcattctctcggttggttaggcaccagcagacccactggaagcagaagagctacttgtgcccaatctgtgacttaagcttcggagaaaaggagggcctgatggaccattggaggggatataaagggaaggacctctgccaatcgtcccatcataagtgtagagttatcctgggtcagtggctgggattctctcatgatgtccctaccatggccggcgaggagtggaagcatggtggagaccaatcccctcccagaattcacactccaaggcgcagaggcctgagggagaaggcttgtaagggagacaagaccaaggaagcggtgagtatcttgaaacataaatag

SEQ ID NO: 304201 - DNA, 1551 bp, Artificial Sequence
  derived and/or modified sequence
atgttcgagcagctgaagcccatcgagccccgggactgctggcgggaggcccgcgttaaaaaaaagccagtcacattcgaggacgttgctgtaaattttacccaggaagagtgggactgtctcgacgctagccagcgggtgctgtaccaggatgtaatgagtgaaactttcaagaatttaacctctgtggcccggatctttctccataagccagagctcatcacaaagttagaacaggaggaagaacaatggcgcgagtttgtgcacctgcccaatacagaaggcttaagtgagggcaagaagaaggaactgcgtgagcagcatccttctctgcgtgatgagggaacatctgatgacaaagtcttcctagcctgtcgcggtgcaggccagtgtcctctcagcgctccagccggaactatggatcggacacgcgtactgcaggctagccaggcgggccccccattcttctgctacacttgcggaaagtgcttttcacggagatcatacctgtactcccaccaattcgtgcataatcccaaactgacaaatagctgctcacagtgtggtaaattattccgatctcctaagtcactgagctaccatcggcgcatgcacttaggcgagcggcctttttgttgcactctgtgcgacaaaacgtactgcgacgcaagtggcctgtccaggcataggagagtgcatttgggataccggccccatagctgctccgtatgcggaaaatcgtttcgggatcagagtgagctcaaacgtcaccagaagatccaccaaaaccaggaacccgtcgacgggaatcaagaatgcacgctccggatcccaggaacacaagcggagtttcaaacgcccatagcccggagccagcggagtatccagggtctgctagacgtgaatcatgcccctgtcgccaggtctcaggaaccaattttccgcactgagggcccaatggcccagaaccaggcgtccgtcctgaaaaatcaggctccagtgactcgaacacaggcacctatcacaggcacgctgtgccaggatgctcgttctaatagtcaccctgtgaaaccatcaaggctgaacgtgttctgctgtcctcactgcagtttaactttctcaaagaagtcttatctgtcacgccaccaaaaggctcacttgaccgaaccccctaactactgctttcattgctcaaagtcgttttcttccttctcaagattggttcgacaccagcagacccattggaagcagaagtcctatctgtgtccaatatgtgatttgtcttttggggagaaagagggccttatggatcattggcgtggatacaagggcaaggatctttgccagagcagtcaccacaaatgtagggttattctggggcagtggcttgggtttagtcatgatgtccctactatggccggtgaggaatggaaacacggaggagaccagtcccctccaagaatccacacacccaggcgccgtgggctgcgggagaaggcttgtaagggagataaaacgaaggaggcagtttctatccttaaacataagtag

SEQ ID NO: 304202 - DNA, 1551 bp, Artificial Sequence
  derived and/or modified sequence
atgttcgagcagctgaagcccatcgagccccgggactgctggcgggaagccagggtgaaaaaaaagcccgttaccttcgaagatgtggctgtaaacttcacccaagaagagtgggattgcctcgacgcgtcgcagagagtgctttaccaggacgttatgagcgaaacctttaaaaacctgacgtccgttgcaagaatcttcctgcacaaacccgagttgatcactaaactggaacaggaggaggaacagtggagggagtttgtgcatctgccaaacaccgagggcttaagcgagggtaagaagaaagaactgcgggagcagcaccccagtctaagagatgagggtacttcagacgacaaagtgtttcttgcctgccggggagctgggcagtgccctttaagcgcccctgctggtaccatggaccggacaagggtgctgcaggcctctcaggcaggccccccattcttctgttatacgtgcggaaaatgtttcagcaggcggagttacctgtacagtcaccaattcgtccataaccccaaattgacaaatagttgctcccagtgcggcaaactattccgcagccctaagtctctgagctaccatcgtcgaatgcatctaggcgaaagacccttctgttgcactttgtgtgacaagacctattgtgatgcctctggcctttcgcggcaccggcgggtgcacttgggctatagaccacattcttgcagtgtgtgcggtaaatcctttcgagaccagtcagagctcaagagacaccagaaaatccaccagaaccaagaaccggtggacggtaatcaggaatgtacgttgcggatccccgggacgcaagcagagtttcagacccctatagcaaggtcgcagagaagcatccaaggactccttgatgtgaatcatgcaccggtggctcggtcccaggagcccatcttcagaacggagggtccaatggcacagaaccaagctagtgtgctaaaaaaccaggctccagtcacaagaactcaggccccaatcactggcaccctgtgccaggatgccaggtccaactcacatcctgttaagccctcaagattaaacgtgttctgctgccctcattgcagcttaaccttctctaaaaagagttacctgagtaggcaccagaaagcccacttgactgaacccccaaattattgctttcattgttctaagagtttctcctctttttcccggttggttcggcatcagcagactcattggaagcagaagtcatatctgtgtcctatctgcgacctgtcattcggggagaaagagggcctgatggaccactggcggggctacaagggaaaagatctgtgccagtcttctcatcataagtgtcgagttattctgggacagtggcttggcttcagccatgacgtccctactatggccggggaagagtggaaacatggtggggatcaaagcccccctaggatacacacacctcggaggcgcggtctgagagaaaaagcttgcaaaggtgacaagacaaaggaggccgtgtccatcctaaagcataagtag

SEQ ID NO: 304203 - DNA, 1551 bp, Artificial Sequence
  derived and/or modified sequence
atgttcgagcagctgaagcccatcgagccccgggactgctggcgggaggctcgtgtgaagaagaaacccgtgaccttcgaggacgtggcagtgaactttacccaggaggaatgggattgcctggacgccagccaaagggttctttatcaggatgtgatgagtgaaaccttcaaaaaccttaccagcgttgctcgtatcttcctgcacaagcctgagcttataacgaagctcgagcaagaagaagagcaatggagggaatttgtgcatttgccaaataccgagggtctgagcgagggaaagaagaaggagctgcgggagcaacaccccagcctccgagacgaaggaacgtccgatgataaggtgttccttgcgtgtcgcggagccggacagtgtccattgtcggcccccgccggaacgatggacaggactcgcgtcttacaagcaagccaggccggcccccccttcttctgttacacgtgtggtaagtgcttctccagacgttcttacctttactcccatcagtttgttcataaccctaagctcacaaatagctgttcccagtgcgggaaacttttccgaagccccaaatcattgagctaccacagacgtatgcacctgggggagcggcctttttgctgtaccctgtgcgacaaaacctactgtgatgcaagcggactgtcccggcataggcgcgtccacttgggctatagaccccacagttgcagcgtttgcgggaagtcatttcgcgatcagtcagaattgaaacgccatcagaagattcaccagaatcaggagccagtcgacgggaatcaggaatgtacgcttcggatccccggtacccaagctgagttccagacaccaattgcaaggtcacaaagatccattcagggcctccttgatgtaaatcatgcgccagttgctcggagtcaagaacccatcttccgcaccgaaggacccatggcccaaaatcaggctagtgtgctgaagaaccaagccccagtgaccagaacgcaggctcccataacggggactctgtgtcaggatgctcggtccaactctcatcctgtcaagccttccaggctcaacgtcttttgctgtccccactgtagtctgacattcagcaaaaagtcatacctatccagacatcagaaggctcatctgactgagcccccaaattattgtttccactgcagcaaaagtttttcttcattctctaggctggtccgccaccagcaaacgcactggaaacagaagtcctacctctgccctatttgcgatctgtcatttggggagaaggagggcctaatggaccactggcgcgggtacaagggcaaagatctgtgccagtccagtcatcacaagtgtcgagtgatcctgggacagtggcttggcttctcccatgacgtacccacaatggctggagaagagtggaagcatggcggcgaccagagtcctcccaggatccacaccccccgcaggcgcggcctacgcgaaaaggcctgtaagggggacaaaactaaagaggcggtgagcattttgaaacacaagtag

SEQ ID NO: 304204 - DNA, 1551 bp, Artificial Sequence
  derived and/or modified sequence
atgttcgagcagctgaagcccatcgagccccgggactgctggcgggaagcccgggttaagaaaaagcccgtaaccttcgaggatgttgcggtcaactttacccaggaagagtgggactgcctcgacgcctctcagcgggtgctgtatcaggatgtgatgtcagagacatttaaaaatctgacctcagtcgcccgcatttttctccacaagcctgaactcatcacgaaactggagcaggaggaggaacagtggagagagtttgtgcacctaccgaacacggaaggcttgagtgagggaaagaaaaaagagctgcgcgagcaacacccttcattgcgtgacgaaggcacttccgacgacaaagtgttcttggcatgtagaggagccggccagtgccctctgtctgcccccgcaggcaccatggatagaactcgggtcctgcaagccagccaggccggtccacccttcttctgctacacgtgtggaaaatgtttctcacgtcgctcctacctgtatagtcatcagttcgttcacaacccaaaattgactaacagctgctcacaatgtgggaaactgtttcgttctcccaagagcctatcatatcatagacggatgcacctgggagaaagacctttttgctgtactctgtgtgacaaaacttattgcgatgcgagcggacttagcaggcatcggagagtacacctgggatacaggccacactcctgctctgtgtgtggtaaatcttttagagatcagtccgagttaaaacgccaccagaagatccatcaaaatcaggagccagtggacggcaatcaagagtgcaccctgagaatcccgggcacgcaggccgaattccaaacacccatagcccgttcgcagaggtccattcagggccttctcgacgtgaaccacgcacctgtggcccgatcacaggagccaatatttagaactgaaggtcctatggcacaaaaccaagcctcggtacttaaaaatcaggcccctgtcaccagaacgcaagctcctataactggcacactgtgtcaggacgccagatcgaatagccatcctgtcaagccctcccggcttaacgtgttttgctgtccacactgcagcctaacatttagtaagaagtcttatctgtcgcgccaccagaaggcgcaccttacggagccccctaattattgcttccactgctcgaagtcttttagctccttcagtcgactcgtccgccatcagcagacccattggaaacagaaatcttacttatgtcccatctgcgacctctcattcggggaaaaagaagggctgatggatcactggagggggtacaaaggcaaggacttgtgtcagtcaagccaccataagtgtcgggtcatcctgggacagtggctcggtttctctcacgatgtaccaactatggctggggaagagtggaagcatgggggcgatcagagtccaccccgcatccacacgccacggaggcgggggctgcgcgagaaggcgtgcaagggggataaaacaaaggaggccgtgagcatcctgaagcataaatag

SEQ ID NO: 304205 - DNA, 1551 bp, Artificial Sequence
  derived and/or modified sequence
atgttcgagcagctgaagcccatcgagccccgggactgctggcgggaggctagagttaaaaaaaagccagtgacattcgaagacgtcgcagtaaacttcacacaggaagagtgggactgccttgatgcctcccagcgagtactctatcaggacgtcatgagcgaaacattcaagaacctaaccagcgtggccaggattttcttacacaagccagaattaataaccaagctggagcaggaggaggagcagtggcgcgaattcgtacacctccccaatacagaagggctgagcgagggaaagaagaaggagctccgcgagcagcacccctctctccgcgacgagggcacctccgatgataaagtctttttggcttgccgaggagcaggacaatgccccctgagtgctccagcagggacgatggaccgtactagagtgctgcaagcctcacaggcaggtccaccttttttctgctatacttgcggaaagtgcttttccagacgctcttacctgtacagtcatcagttcgttcataaccccaaactgacaaattcatgtagccagtgcgggaaactgttccgcagtccaaaatcactgagttaccaccgcagaatgcaccttggcgagcgacccttctgttgtactctgtgtgacaaaacctattgtgacgcctcaggactgagtcggcatcggagggtacacctgggatacaggcctcattcatgttctgtatgcggtaaatccttcagagatcagagcgaattaaaacgacatcagaaaatccaccagaatcaagaacccgtcgatggaaatcaggaatgtacattgcgtattccgggcacacaggccgaattccaaaccccaatagcccggtcccagcgctcaatccaggggctgctcgacgttaaccatgctcccgtggccaggtcccaagaaccaatctttagaacagaagggcccatggcccaaaatcaggcaagtgtcctgaagaatcaggcgcccgttactcgcacacaggcccctattactgggacgttgtgccaagatgccagaagtaatagtcaccctgtgaagccgtcacggttgaacgttttctgctgcccccactgctcactgacatttagcaaaaagtcttacttgtctagacaccagaaggcccatcttactgagcctcccaattactgtttccattgctcgaaatcattttccagcttttctaggctcgtgcggcaccagcagactcattggaagcaaaaaagttacctgtgccccatttgtgacctgtcattcggggaaaaggagggtcttatggatcactggagaggctataaaggcaaggacttgtgtcagagctcgcatcataagtgcagggtcatcctggggcagtggctgggattttctcatgatgtcccgactatggccggcgaggaatggaagcacggtggcgatcaatccccaccaaggattcatactcctcgtagacgagggctgagagagaaggcatgcaagggcgataaaaccaaggaggcggtgagtattcttaagcacaaatag

SEQ ID NO: 304206 - DNA, 1551 bp, Artificial Sequence
  derived and/or modified sequence
atgttcgagcagctgaagcccatcgagccccgggactgctggcgggaggccagagtaaagaaaaaacctgtcacatttgaggatgtagcagtcaatttcacccaggaagagtgggattgtctcgacgcctctcaaagagttttgtatcaggacgtgatgtcagaaaccttcaagaacctgaccagtgttgcaaggatctttctgcacaagccagaactgatcaccaagctggaacaagaagaagaacagtggagagaattcgtgcatctccctaacaccgagggcttgtcagaaggcaagaagaaagagcttagagagcagcatccctctttacgtgacgagggtacgtccgatgacaaagtgttccttgcctgtcgcggagctggacagtgccctctgtcagctcctgccggcactatggaccggacacgggtgctgcaggcgtcccaggcgggccctccttttttttgctatacctgcgggaagtgcttttctagacgaagctacctttattcacaccagtttgtccataaccctaaactcaccaacagctgtagccaatgcggcaagctgttcaggtctccaaagtccctgtcttatcaccggcggatgcacctgggcgagagacctttctgttgtaccttatgcgataaaacttattgcgatgcatccggcctcagtaggcaccgcagagtgcacctggggtacagaccccacagctgtagcgtgtgcggcaagagttttcgggatcaatcagagttaaagcgccaccagaaaattcaccaaaaccaagagccggtggacgggaatcaagaatgcacactccgcattcccggcactcaggcagagttccagactcctattgcccggagtcagcggtccatccagggtctgttggatgttaaccatgcacccgtagcccgcagtcaggaaccaatctttcgcacggagggtcctatggcccagaaccaggccagcgtgcttaagaatcaggccccagtgacacggacacaggctcctatcaccggtactctgtgtcaggacgctcgaagcaactctcaccctgtcaaaccttctcgcctgaacgtcttctgttgtccccactgttcattgaccttttcgaaaaaaagctatctgtcccggcatcaaaaagcacacttaacagagcctccaaactattgtttccattgcagcaagagtttttcgtcgttctcccgcctcgtaaggcatcagcagacccactggaagcagaagtcctacttatgcccaatatgtgacctgtcctttggagaaaaggagggccttatggatcactggagagggtacaaaggtaaggatctgtgccaatctagtcatcacaagtgcagggtgatcctgggccagtggctcggcttttctcacgatgtccccaccatggcaggggaggaatggaagcacggaggagatcagagccccccccgtatacacacaccccggagaagaggcctccgggagaaggcttgtaagggggataagacaaaggaagccgtcagcatcctcaaacataaatag

SEQ ID NO: 304207 - DNA, 1611 bp, Artificial Sequence
  derived and/or modified sequence
atgttcgagcagctgaagcccatcgagcccgtgcagaagaccctgccatgggtgggcgaggtcgccgccaccctgcaggaggctatgaagcgagattgttggcgagaagcccgcgtcaaaaaaaaacctgtgaccttcgaagatgttgcagttaatttcacacaggaggagtgggactgccttgatgcttctcagcgagtgctgtatcaggacgtgatgtccgagacattcaaaaacctgaccagtgtggcccgcatctttctgcacaaacctgagctgatcaccaaactagaacaggaagaggagcagtggcgcgagttcgtccacctcccaaataccgaaggcctctcagagggaaagaagaaggaactgagagagcagcacccttcactccgggatgaagggacctctgatgacaaagtgttcctggcctgtcggggtgctggccagtgtcccctttcagctcccgctggcaccatggataggactcgtgtgttacaggccagccaagccggacctccatttttctgttatacttgcggcaagtgcttttccagaagatcttatctttactcccatcagttcgttcacaaccctaagctgaccaattcatgctcacaatgtggcaaactgtttaggagccccaagtctctctcctatcacagacgcatgcacctgggagagaggcccttttgttgtacattgtgtgacaagacatactgtgacgcatccggattatcaaggcaccgccgggtgcacctggggtatcggccccactcctgttccgtttgcggcaaatctttccgagaccagtcagagttaaaacgacaccaaaaaatccaccagaatcaagaacccgtggacggcaaccaggaatgcacactgaggatcccgggcacccaagccgaatttcagacccccatcgctaggagccagcggtccattcagggactgctagacgtgaatcacgctcccgtggctcgctcccaggaaccgattttccgaactgaggggcccatggcccagaaccaggcctctgtgttaaagaaccaggcccccgtcacacgcactcaagcacctataactggcacgttgtgccaggacgcccggtccaatagccatccggtgaaaccatcaagactcaacgtcttctgctgtccccactgcagcctgaccttctctaaaaagtcttacctaagtcgccaccaaaaggcccatctaaccgagcctccaaattactgttttcattgctctaaaagtttctcgtctttctctagattagttcggcatcagcagactcattggaagcagaagtcttacttgtgccccatctgtgacctgtcctttggggaaaaggagggattaatggaccattggcggggatataaggggaaagacctgtgccaatctagccatcacaaatgccgggttatcctcgggcaatggctcggtttttcccacgatgtgccaacgatggcaggagaggaatggaagcacggcggcgaccaatctcccccaaggattcatactcctagaaggcgtggtctgcgagagaaggcatgcaagggcgataaaactaaagaagcagtgtccatcctaaagcataagtag

SEQ ID NO: 304208 - DNA, 1551 bp, Artificial Sequence
  derived and/or modified sequence
atgttcgagcagctgaagcccatcgagccccgggactgctggcgggaagcacgggtgaaaaagaagcctgtgacctttgaggacgtagcggtgaattttacacaagaagagtgggattgtctagatgcatcacagagggtcctataccaggacgtcatgtccgagacttttaaaaacctgacaagcgtcgcacggattttcctccataagcctgagctgatcacaaaactcgaacaggaagaagaacaatggcgggaatttgtgcatttgcccaacactgagggtctgagcgaaggaaaaaagaaggagctgagagaacaacatccaagtcttagagatgaaggtacctctgacgataaggtgttcttggcatgccggggcgctggccagtgtccattgagcgctcctgcaggtactatggataggacccgggtgctacaagcctcgcaggcgggcccaccattcttctgctatacttgtggcaagtgctttagtagacgctcatacctgtattcacatcaatttgtgcacaatcctaagttgactaattcttgttcacagtgcggcaagttgttccgctctccgaagtctctgtcctatcatcgaagaatgcacctaggtgaaaggcctttctgctgtacactctgcgataagacttactgtgacgcaagcggcttgtcccgtcaccgccgtgtgcacctcgggtacaggcctcattcttgctctgtttgcggaaaatcttttcgcgaccaatctgagctcaagcgacatcagaagattcatcagaaccaagagcccgtagacggaaaccaggagtgtacccttcgcattcctggcacgcaggccgagttccagacccccatcgctcgatctcagaggtctatacagggcctgctagatgtgaaccacgctcctgttgcacgcagtcaggagccgatctttaggactgaagggcctatggcacaaaatcaggccagcgtgctgaaaaatcaggccccagttacacgcacccaggcaccgataaccggaacattgtgccaggatgccaggtctaactcccacccggtgaaaccctctcggctgaacgttttctgttgcccacactgctcgttgactttctccaagaaaagctacttgtctagacaccagaaagcacatctcacagagcctcctaattactgctttcattgcagtaaatccttttcttcttttagtcgactggtgaggcatcagcaaactcactggaagcaaaaaagttacctgtgccctatatgcgacctgtcctttggcgaaaaggagggcctgatggatcattggcggggttataaggggaaagatttgtgccagagttcacatcacaagtgtagggtgatcctgggccagtggctcggattttcacacgatgtgccaactatggccggagaggagtggaagcacggaggcgaccaaagcccccctcggatccatacccctcgcagacggggactgagggagaaggcctgtaagggcgataaaacaaaagaggcagtgtctattctgaagcataaatag

SEQ ID NO: 304209 - DNA, 1356 bp, Artificial Sequence
  derived and/or modified sequence
gccggcggcagccccgagagcctgctgttcttccagaagcccgtgacgttcgaagatgtggccgtgaacttcacccaggaggaatgggactgtctggatgcctcacagagggtgctgtaccaagatgtgatgtccgaaacctttaaaaatctgacatcggttgccaggatcttcctgcataagcccgaacttattacaaagctggagcaggaagaagagcagtggcgtgaaaccagagtacttcaagcgtcacaggcgggcccaccgttcttttgctacacctgcgggaagtgcttctctagacgctcgtacctgtattctcaccagttcgtccataatcccaaattgaccaattcatgtagtcaatgcggaaaactttttcggtcgcctaaatcactatcatatcatcgtcgcatgcacctgggggagagacctttctgttgcactttgtgtgacaagacctattgcgacgctagtggcttgagcagacaccgccgggtgcacctcggatacaggcctcacagttgcagcgtgtgcggcaagtccttcagagaccagagcgagcttaagcggcaccagaaaattcatcaaaatcaggagcctgtcgacggtaatcaagagtgtacgctccggatcccgggaactcaggccgagttccagacccctattgctagatctcagaggtccattcagggcctgttggatgtcaaccatgccccagtggcgcggagtcaggaaccgatattcaggacagaagggcctatggctcagaatcaggcttctgtgctcaagaaccaagcccctgtaacacgcactcaagccccaattacagggacactctgccaagatgcgcggagtaacagccatcccgtgaagccttctcgccttaacgtattctgttgccctcactgttccctgacctttagcaagaaatcttacttatcacggcatcaaaaagcacacttaacagagccacctaactattgtttccattgttccaagtcctttagtagcttcagtcgactagtgagacaccagcagacgcactggaagcagaagtcttacttgtgtccgatctgtgacctgagctttggggaaaaggaggggttgatggatcactggagaggctacaaaggtaaagatctctgccaaagttcccaccataaatgccgcgtgattctgggacagtggctgggattctcccatgacgttcctacaatggccggcgaagaatggaaacacggaggcgatcagagcccaccccggatccacacaccacggcggcgtggtctgcgcgaaaaagcctgcaaaggggacaaaactaaagaagccgtgagtattttgaagcataagtag

SEQ ID NO: 304210 - DNA, 1551 bp, Artificial Sequence
  derived and/or modified sequence
atgttcgagcagctgaagcccatcgagccccgggactgctggcgggaggcccgcgtcaaaaaaaaaccagttacgttcgaagatgttgctgttaacttcacacaggaggaatgggattgtctcgatgcctctcagcgggtcctttaccaggacgtcatgagcgagacctttaagaatctgacatctgtggcccggatattcctgcacaaacctgagctgatcacaaaattggaacaggaggaggagcagtggcgggagttcgtgcacctcccaaatacagaggggctctctgaaggcaagaagaaggaactgagggaacagcacccatctttacgcgacgaggggacatctgatgataaggtttttctggcatgcaggggcgctggacaatgccccctgagtgcacccgccggcaccatggatagaactcgggtcctgcaggcatcccaagcaggaccacctttcttttgttacacttgcgggaaatgcttttcacggaggtcttacctttattcccaccagttcgttcacaatccgaaattgaccaacagctgctcacagtgcggcaaactgttccggtcacccaaaagcttaagctatcaccggcgcatgcaccttggcgagaggcccttttgttgcactctttgtgacaaaacctattgcgatgccagtggactgagcaggcataggagagtccacctggggtatagacctcattcttgtagtgtgtgtgggaaatcttttagggaccagtcagaactcaaacgtcatcagaagatccatcagaaccaggagcccgtcgacggtaaccaggagtgcacactaaggatacccggtactcaggccgagttccagacccccatagctagatcccagagatcgatacaggggctgttggacgtgaaccacgcccctgtggccagaagccaggagcctatctttaggacagaaggtccgatggcccagaatcaagccagcgtgctgaaaaatcaggcacctgtcacccggactcaagcacctattacaggcactctatgccaggatgcccgctctaatagccatccggtcaaaccctctcgtttgaacgtgttttgctgtccccattgctcactgacctttagtaaaaagagctatttgtctcgccaccaaaaagcgcacctgaccgaaccccctaattactgcttccactgtagcaagagtttctcatcattttcccgacttgtgcgccaccaacagacacattggaagcagaagtcatacctgtgcccgatatgcgatctgagcttcggggagaaggaaggattgatggaccattggagaggctataagggcaaggacctgtgccagagttcccaccacaaatgcagggtgatcctgggtcagtggcttggctttagccacgacgtccccaccatggccggggaggaatggaaacatggtggggaccagagcccaccacgtatccacacacccagaaggcggggtctgagggaaaaagcatgtaagggtgataagacgaaagaggcagttagcatattgaaacacaaatag

SEQ ID NO: 304211 - DNA, 1611 bp, Artificial Sequence
  derived and/or modified sequence
atgttcgagcagctgaagcccatcgagcccgtgcagaagaccctgccctgggtgggtgaggtggccgccacgcttcaggaagccatgaagagggattgttggcgagaggccagagtgaagaagaaaccagtgacattcgaggacgtcgccgtgaacttcacccaggaagaatgggattgcctggatgcgtcccaaagggttttataccaagacgttatgtccgagactttcaaaaatctcactagtgtcgccagaatttttctccacaagcccgagctgatcaccaaattggagcaggaagaagaacaatggcgcgagttcgtccatcttccaaacactgaaggactaagcgagggtaaaaagaaagagttacgcgagcaacacccctcacttcgggacgagggaacatcggacgataaggtctttctggcatgtcggggggcaggtcagtgccctctgtcagcgccagcagggactatggatcgcactagggtactccaggcctctcaggctgggcccccctttttctgttacacatgtgggaagtgcttctctcgaagaagctatttgtacagccatcaattcgtccacaatcccaaactgacaaactcttgcagtcagtgtggtaaactgtttcggtcgcccaagagcctgtcttatcaccggcggatgcacctgggtgagaggccattttgctgcaccctgtgtgataagacttattgcgatgcttctggacttagccgacacagaagagtgcatctaggatatcggccacattcttgttccgtgtgcggtaaatctttccgggatcagagtgaactaaagagacaccaaaaaatccaccagaaccaggagcctgtggatggcaatcaggagtgtaccctgaggattccgggcacccaggcagagttccagactcctatagctaggtcccagcgctctattcagggccttcttgatgtgaatcacgcaccagtagctcgcagccaggagcctatttttagaacagagggaccgatggctcagaatcaagcctccgttctgaaaaaccaggctcccgtgacacgaactcaggctcctatcacgggaacactgtgccaggatgcccgctctaactcgcatccagtcaagccttcacggctaaatgttttctgctgcccgcattgcagccttactttctccaagaagtcatatctgtctcgacaccaaaaggcacatttaaccgagcctccgaattattgcttccactgttccaagtcatttagcagcttctctcgcctagtgcgacaccaacaaacacattggaagcagaaatcctatctgtgtcccatttgtgacctctcatttggggagaaagagggacttatggatcactggcggggttataaagggaaagatctttgccaaagttctcaccataagtgccgggtgatactggggcaatggctgggattctcacacgacgtgccaacgatggcaggagaagagtggaagcacgggggggatcagtcaccgccccggatacataccccccggcgaagaggcctccgggaaaaagcatgtaaaggcgacaagactaaggaggcagtcagcattctaaagcacaaatag

SEQ ID NO: 304212 - DNA, 1611 bp, Artificial Sequence
  derived and/or modified sequence
atgttcgagcagctgaagcccatcgagcccgtgcagaagaccctgccctgggtgggcgaggttgccgctacccttcaggaggccatgaagcgcgattgttggcgggaggccagagttaagaagaagccagtgactttcgaggatgttgcagttaattttacccaggaggagtgggactgtctcgatgcaagtcagagggtcctttaccaggacgtgatgtccgagacttttaagaatctgacctcggtggcaaggattttcctgcacaaacctgagttgattaccaaattggagcaggaggaagagcagtggagagagtttgtgcatttgccaaacacagagggtctgtccgagggcaagaagaaagagctcagggaacagcatcccagcctgcgggatgaaggaacgtctgacgataaggtattcctggcttgtagaggtgccggccagtgcccattatcggctcctgccggaactatggacaggaccagagtgctgcaggcttcccaagcggggcctcccttcttctgttatacttgcggcaagtgtttcagccgcagaagctacctgtatagtcaccaatttgtgcacaacccaaaactcactaacagctgcagtcagtgcggcaagctctttcggagcccaaagagcctgtcgtatcatcgacggatgcacttgggcgaaaggcccttttgttgcacattatgcgacaaaacctactgtgatgcgtccgggttgtccagacatcgccgagtgcatctaggatacaggcctcactcctgcagcgtctgcggaaagtcattccgagatcagtcagaattgaagagacaccagaagattcaccagaaccaggaaccagtggatggaaatcaggagtgcacactgagaatccccggcacccaggccgagttccagacccccatcgcccgaagtcagaggtccatccagggcctactcgacgtgaaccatgccccagtagccaggtcgcaagagcccatatttcgtaccgagggcccaatggcacagaatcaggcctccgtgcttaagaatcaagcgccggtgacacgtacccaggcacccattaccgggaccctgtgtcaagacgccaggtctaatagtcacccagtgaagccatctcgattaaatgttttctgttgcccccactgcagtctcactttcagtaagaagagctacctgtcgcgccaccagaaggctcacttgaccgaaccacctaactactgctttcattgctctaagtcttttagctcttttagtagacttgtaaggcatcagcagacacactggaaacagaagtcctacctgtgcccaatatgcgatctcagttttggagagaaagagggactaatggaccactggagaggctacaagggaaaggacctctgccagagtagccaccacaaatgccgcgtaattctgggacagtggttgggcttcagccacgatgtccctactatggcaggcgaggagtggaaacacggtggcgaccagagtccacccaggattcacactccacggagaagaggactgcgcgaaaaagcctgcaagggtgataaaactaaagaggcggtatcgattctcaagcacaagtag

SEQ ID NO: 304213 - DNA, 1611 bp, Artificial Sequence
  derived and/or modified sequence
atgttcgagcagctgaagcccatcgagcccgtgcagaagaccctgccctgggtaggtgaagtggcggccacacttcaggaagcaatgaagagagactgttggcgtgaggcacgcgtaaaaaaaaaaccggtgacctttgaggacgtggcagtaaattttacacaggaagagtgggactgtcttgatgcgtcacaacgggtgctctaccaggacgtgatgtctgagacctttaagaacttgacttcagtagctcgcatctttctgcacaaacctgagctcattactaagctcgaacaggaagaagagcagtggcgcgagtttgtccacctgccaaataccgagggcctctctgaggggaaaaaaaaggagcttcgtgagcagcaccccagtcttagggacgaaggcacaagcgatgataaggtttttcttgcatgtcggggagccggacagtgtccgctgagtgctcccgccggcacaatggatcgtacccgcgttctccaggcctcacaagcgggcccacccttcttttgctatacgtgcggcaagtgctttagccgcaggagctacctctacagccatcagtttgtacataacccaaaacttacgaacagctgcagccagtgcggtaagttatttaggagccccaaatccctttcttaccatcgcagaatgcatcttggggaaaggcccttttgctgtacactctgtgacaaaacctactgcgacgcatccggtctgtccagacacaggagagtccacctggggtacaggccgcattcttgtagcgtttgcgggaagtcttttcgggaccaatccgagttaaagcgccaccagaaaatccaccagaatcaggagcctgtggacggaaatcaagagtgcaccctgcggattcctggcacacaggccgaattccagacccctattgctcgcagccagcgcagcatacagggtctgctagatgttaatcacgcccctgtggcaagatctcaggagcccatctttcgcaccgaagggcctatggctcagaatcaagcatcagttctgaagaaccaggcccctgtgactcgcacccaggctcccattacaggcacgctctgtcaggatgcccggtctaacagccaccccgtgaaaccatccaggttgaatgtcttctgttgtccacactgcagtctgacattcagcaagaaaagctacctgagcagacatcagaaggctcacttaacagagccaccaaattattgctttcattgttctaagagcttctccagcttctcaagattggtgaggcaccagcaaacgcactggaagcagaaaagctacctgtgtccaatctgtgacttgtctttcggtgaaaaagaggggctgatggatcactggcgcggttacaagggaaaggacctctgtcagtcaagtcatcataaatgtcgagtgatcctgggacaatggctgggattcagccacgacgtaccgaccatggctggcgaggaatggaaacatggcggggatcagtctcccccgcggatacacactccacggcggcggggtctccgcgagaaggcctgcaaaggagacaagacgaaagaagcagtaagtattttgaagcataaatag

SEQ ID NO: 304214 - DNA, 1611 bp, Artificial Sequence
  derived and/or modified sequence
atgttcgagcagctgaagcccatcgagcccgtgcagaagaccctgccgtgggttggcgaagtagccgcaacactgcaggaagccatgaagagagactgctggcgcgaagcacgcgtgaagaagaagcctgtaacttttgaagacgtagcagtaaacttcacccaggaggagtgggactgtctggatgcctcccaacgtgtgttgtatcaggacgttatgagcgaaacatttaaaaacctgacttccgtagcacggatctttctccacaagccagagttgattactaagcttgagcaggaagaggagcaatggcgcgagtttgtccatctgccaaacacagagggattgagcgagggaaagaagaaggagctgcgagagcagcatccatcccttagggatgaagggacaagcgatgacaaggtgttcctcgcctgcagaggtgctggccagtgtcccctgagtgccccagcaggtacaatggaccggactagggtcttacaggccagccaggctggtcctccttttttttgttacacatgcgggaagtgttttagcagacgctcttacctgtatagtcaccagttcgttcacaacccgaagttgactaacagttgttcccaatgtggtaagctatttcggtcacccaagagcctgagctaccaccgccgcatgcatctcggtgagagacctttttgttgtaccctttgtgataagacctattgtgatgcgtctggactcagtaggcatcgccgcgtgcatctcggttacagacctcattcctgctcagtctgtggtaagtcatttagagatcaatccgaattaaagagacatcaaaagatccatcagaaccaggaacccgtggacggaaatcaggagtgtactcttcggattccgggtacccaagcagaatttcagacaccgatagcacgaagccagcggtcgatacaagggctgttagacgtgaaccacgcaccagtggccagatctcaggaacctattttccgcacagagggacccatggctcagaatcaggcatccgtgctgaaaaaccaggctcccgtgacccggacacaggcccctatcactgggacactctgccaggacgccaggtccaactcccatcccgtgaagcccagtagactcaatgtcttttgctgcccccattgtagccttacattcagcaagaaaagttacctgagtcggcatcaaaaggctcacctgaccgagcctccaaattattgttttcactgcagcaaaagtttctcttccttctcaaggctggtgcgacatcagcagacacactggaaacagaagtcttatttatgcccaatctgtgatctctcttttggggagaaagagggtttgatggatcactggcgcggctacaaggggaaagatctgtgtcagagcagtcatcacaagtgcagggtgatcctgggacagtggttaggcttctctcacgatgtgccgacgatggctggcgaggagtggaagcacggaggggaccagtctcctcctagaatacatacgccacggagacgggggctccgcgagaaggcctgcaaaggggacaaaaccaaggaagctgtgtctatcttaaagcataagtag

SEQ ID NO: 304215 - DNA, 1551 bp, Artificial Sequence
  derived and/or modified sequence
atgttcgagcagctgaagcccatcgagccccgggactgctggcgggaagcccgtgtaaagaaaaaacccgtgacatttgaagacgttgccgtcaatttcacccaggaggaatgggactgcctggacgcgagtcagcgcgtgttataccaagatgtgatgtcagagacttttaaaaacctaactagcgtcgccaggatctttttacacaagccagagctgattaccaaactggagcaagaggaagaacagtggcgtgaatttgtgcatcttccaaacacagaaggactatctgagggcaagaagaaagaactcagagagcagcatccatcactgcgggatgagggcacttccgatgacaaggtcttcttggcatgtaggggagcggggcagtgcccattgagcgctcccgcgggtactatggaccgcaccagggttctacaggcctcgcaggccggtcccccgttcttctgttacacctgcggcaagtgtttctcaagaagaagctacctttactcccaccagtttgttcacaatcctaagttgacaaactcctgttcacagtgcggcaaattgttcagatccccgaagtctctttcctatcataggcgcatgcacttgggggagcgacccttttgctgcaccctgtgcgacaagacttattgtgatgcctcaggtctgtctcgacacagacgcgtgcatctggggtacaggccccactcgtgttctgtgtgtggtaagagctttcgggatcaaagcgagctgaagcgccatcagaaaattcaccagaatcaggaacccgtggatggcaaccaggagtgtaccttacgaattcctgggacacaggccgaatttcaaacacctattgctcgttcacagcgcagcatccaaggcctattagacgtgaaccatgccccagtggctagaagtcaagaaccgatcttcaggacggagggacctatggcccagaaccaggcgagcgtgttaaagaatcaggcacccgtcactcggactcaagcgccaatcacaggcactctgtgtcaggacgccaggagcaacagtcaccctgtgaagccttcacgcctcaacgtgttctgttgtccacactgctcactgaccttcagtaagaaatcatacctgtcaaggcaccagaaagcacacctaaccgaaccccccaactactgcttccactgctctaagagtttttcctccttctcccgcctcgtgcgccatcaacagacgcactggaaacagaagtcatatttatgtcccatctgcgacctatcttttggggaaaaggaaggacttatggaccattggagggggtataagggaaaagacctgtgccagagctcccatcataagtgccgggtaatcttgggtcagtggctgggtttttcccatgatgtgccaacaatggccggagaggaatggaagcatggaggcgatcaaagccctcctaggatccataccccacgacgcaggggcctgagggagaaggcatgtaagggagataaaaccaaggaggccgtgtcgatccttaagcacaaatag

SEQ ID NO: 304216 - DNA, 1551 bp, Artificial Sequence
  derived and/or modified sequence
atgttcgagcagctgaagcccatcgagccccgggactgctggcgggaggcgcgggtgaaaaaaaagcctgtgacttttgaggatgtggcagtaaactttacgcaggaggaatgggactgcctcgatgcttctcagcgcgtattgtaccaggacgtcatgagcgaaacatttaagaacctaacctccgtggcccgtatctttttgcacaagcccgaactcataaccaaactcgagcaggaggaggagcagtggagggaattcgtgcacttaccaaacaccgaggggttatccgagggaaagaaaaaagagttgagggagcaacacccttctctccgcgatgagggaacctccgatgacaaagtctttctcgcatgtagaggggctggccaatgtcctctcagtgcccctgctgggactatggaccgtacgcgggttttgcaggcttcacaggccggcccccccttcttctgctacacatgcggaaaatgtttttctcgcaggtcttatctctattcgcaccagtttgtgcacaaccctaagttaactaattcttgtagccaatgcggcaaactgttcaggagtcctaaaagcctgagttaccataggcgaatgcacctgggggaacggcccttctgctgtaccctgtgcgacaaaacatactgcgatgcctcgggcttgtcacgacaccggagggtgcacctcggctatcgtcctcacagttgtagcgtgtgtgggaaatcatttcgcgatcagtcggaattgaagagacaccagaagatccaccaaaaccaggagccggtggatggcaaccaggagtgtacactgaggatccctggcacccaagcggaatttcagacgcctattgcccgctcgcagagatccattcaaggcttactagatgtgaatcatgccccagtagccaggagtcaggagcccatcttccggacagagggccccatggcacaaaatcaagcaagcgttctcaagaatcaggcgccagttactcgcactcaagcaccaattacaggcacactatgccaggacgcccgatctaacagccaccctgtgaaacccagccggctgaatgtgttttgttgtccacactgttctctgacattctctaaaaagtcctacttgtctcgccaccagaaagctcatctgactgagcccccaaattattgtttccactgttctaaaagtttttcctccttttcccgcctagttaggcaccagcagacacactggaaacagaaatcttatctgtgtccaatttgtgacctgtcatttggtgaaaaggaaggcctgatggaccactggaggggatacaagggcaaagatttatgccagtcctctcaccacaaatgccgggttatactaggtcagtggcttgggttctcacatgacgttcccacgatggctggcgaggaatggaaacacgggggggatcagtccccaccgcgcattcatacaccgagacgcagagggcttcgggagaaagcgtgcaagggagacaaaacgaaggaggccgtcagcatcttgaaacacaagtag

SEQ ID NO: 304217 - DNA, 1611 bp, Artificial Sequence
  derived and/or modified sequence
atgttcgagcagctgaagcccatcgagcccgtgcagaagaccctgccctgggttggcgaggttgcagccacccttcaggaagctatgaagagggactgttggcgtgaggcccgggtcaagaagaagcctgttaccttcgaagacgtggcagtgaactttacccaggaggagtgggactgtcttgatgcctcacagcgagttctatatcaggacgtcatgtctgaaactttcaaaaacctcactagcgtggctaggatattccttcataagccggagctgatcaccaagctagaacaggaagaagagcagtggcgagagttcgtgcatctgcccaacaccgaggggcttagcgagggaaaaaagaaggagctccgggagcaacaccccagcctgagagatgagggcacctcagacgataaagtctttctcgcatgtaggggcgccggccagtgtcctttgtctgccccggccggtacaatggatagaaccagggtgctgcaggctagccaggcagggccacctttcttttgctacacgtgcgggaaatgcttctcaaggcggtcatatctttattctcatcagtttgttcacaatcctaagctgaccaacagctgttcccagtgcgggaaattgtttcggagccctaagagtctgtcttaccatcgccgtatgcacctgggggagcggccgttctgctgcacattgtgcgacaaaacatactgtgacgcatccggcttatccaggcaccgccgggttcatctgggatatcgaccccattcctgttccgtgtgcggaaagtcattccgcgaccagtccgagctcaaacggcatcagaagatccatcagaaccaagaaccagtggatgggaatcaggaatgcactctcaggatccccgggactcaggccgaattccagactcctatcgcaagaagccagcgatccatccaagggctgctcgacgtcaatcacgcgccggtcgcacggtcccaggagccaatttttagaaccgaaggccctatggctcaaaaccaggccagtgtgctgaaaaatcaggccccagtcacgcgtacacaagccccgatcaccggtacgttgtgtcaggatgcacgctctaattcacaccccgtgaaaccaagcagactgaatgtcttttgttgcccacactgtagtctgacctttagtaagaaatcttacctgtcgcgccaccagaaagcgcacctgactgagcctccaaattattgcttccattgttctaaatcattctcctctttctcccgtttagtgaggcatcagcagacccattggaaacagaaatcctacctgtgccctatctgcgatctatcctttggcgaaaaggagggactgatggatcactggcgggggtacaagggaaaggatctctgtcaaagttctcaccataagtgccgcgtgattctcggccaatggctgggcttcagccacgacgtcccaaccatggcgggcgaagagtggaaacacgggggagaccagtctccgcctcgaatccacacaccccggagaagaggcctgcgtgagaaggcttgcaaaggtgataaaacgaaagaggcagtctctatcctcaagcacaagtag

SEQ ID NO: 304218 - DNA, 1551 bp, Artificial Sequence
  derived and/or modified sequence
atgttcgagcagctgaagcccatcgagccccgggactgctggcgggaggcgcgagtaaagaaaaaacccgttacttttgaagatgtcgcggtaaactttacacaggaggaatgggactgccttgacgcttctcagagggtactctatcaggatgtcatgagcgaaaccttcaagaacttaacatcagtagctcggatctttctgcacaagccagaacttatcactaaacttgagcaggaagaggagcagtggcgcgagttcgtgcatctcccaaacaccgaaggcctgagcgaaggcaaaaagaaggagctccgtgaacagcacccatcactaagagacgagggcaccagcgacgacaaggtcttcctggcctgccgtggcgccggtcagtgccccctctctgcccctgctggaacaatggacaggacaagggtgctacaggcctcacaagctggtcctccttttttttgttacacctgcggaaagtgcttctcccgaagatcatacctgtactcccatcagttcgtgcataatcccaagttaaccaacagctgctcccagtgcggaaagttattcaggagcccgaagtctcttagctaccataggaggatgcacctgggcgaacgcccattttgctgtacactttgtgataagacctactgcgacgcctccggcctgagtagacacagacgagtgcacctgggataccgcccacactcttgcagtgtgtgcggaaaaagcttcagagaccagtctgagctgaagcgccaccagaaaatccaccagaatcaagagccagtggatggcaaccaggaatgcacattgcggattcccggtacccaggccgaattccagacgcccatcgctagaagtcagaggtcgatacaggggctgctggacgttaatcacgcccccgtggctcgatcccaggagcccatcttccgcaccgagggtcccatggcccagaatcaggcttcagtccttaaaaatcaagcgccagttacccggacacaagctcctattactggaactctgtgccaggacgccaggtccaactcacatccagtgaagcccagtcgactcaatgttttctgctgcccccattgctctttaacctttagcaaaaaatcgtatctgtcacgacaccagaaggctcacttgacagaaccccccaattattgctttcactgttcgaaatcgttcagtagtttctcacgcctcgtgcgccaccagcagacgcattggaaacagaagagctacctttgtccaatctgcgatttgagttttggcgagaaggaaggtctgatggatcactggcgcgggtataaaggcaaggatctgtgtcagagctcccaccacaaatgcagagtgattctggggcagtggcttgggttctcacacgacgttccaactatggctggggaggagtggaaacatgggggtgatcaatcgcctccacggatacatacccccagaagacgtggtctccgggaaaaggcatgcaagggtgataagactaaggaagcggtgagcatactcaaacacaagtag

SEQ ID NO: 304219 - DNA, 1551 bp, Artificial Sequence
  derived and/or modified sequence
atgttcgagcagctgaagcccatcgagccccgggactgctggcgggaggccagggtcaaaaaaaagcctgtcacatttgaggatgttgccgtaaacttcacccaggaggagtgggattgcctggacgcaagccagagagtgctgtaccaggacgttatgtccgaaacctttaagaacctgacctcagtggcccgcattttcctccacaagcccgaattgattactaaactcgagcaagaggaggagcagtggcgagagtttgtgcatcttccaaacacggagggactgtccgagggtaagaagaaagaactacgggagcagcacccatcacttagagacgaaggcacctcagacgataaagtgttcctagcctgtagaggcgccggtcaatgcccactgagcgcccctgcaggaactatggacagaacaagggtcctgcaggccagccaggctggccccccgtttttttgctatacatgtggcaagtgcttctcacgacggtcctatctgtactcacaccagtttgttcacaatcctaaactaaccaactcctgctcccagtgcgggaagcttttcaggtcccctaagtcgctctcttatcaccgcaggatgcacttgggggaaaggccattctgctgcaccttgtgcgataagacatattgcgacgccagcgggctctcccgccataggcgcgtccacctaggatacaggccgcattcatgttcagtgtgcgggaagtcgtttagagaccagtccgagcttaagaggcatcagaaaatccaccagaatcaggagccagtggatggcaaccaggaatgtactctgaggattcccggaactcaagcagagtttcagactcccatagctcgttcccaaaggtctattcagggcctccttgacgtcaatcatgcccccgtcgcccgcagccaggagcctatttttcgcactgaaggaccgatggcccaaaatcaggcctcagtcctcaagaaccaggctccagtcaccaggacacaggcccctatcactggcaccctgtgccaggacgcccgatccaattctcaccccgtgaaaccctcccgcctgaacgtgttttgttgcccccattgctcccttacattctctaaaaagtcatacctttcccggcaccagaaggcacatttgacagagccgcccaactattgcttccactgcagtaagtccttctcatctttttcacgtctggtgaggcatcaacagacgcattggaagcagaagagctatctgtgccccatttgtgacctgtctttcggtgagaaagaaggtttgatggaccattggagaggttacaaggggaaggatctctgccagtcctctcatcataagtgtcgcgtgatcttaggccagtggctgggtttctcgcatgacgttccaacaatggccggggaggagtggaagcatggtggagaccagagtcccccaagaatccacacacctaggaggaggggactgagggaaaaagcgtgtaaaggcgataaaacgaaggaagcagtttccattctcaagcacaaatag

SEQ ID NO: 304220 - DNA, 1611 bp, Artificial Sequence
  derived and/or modified sequence
atgttcgagcagctgaagcccatcgagcccgtgcagaagaccctgccatgggtaggcgaggttgcggctaccctccaggaggccatgaaaagggactgctggcgcgaagcccgagtcaagaagaagcctgttactttcgaggacgtggccgtgaattttacgcaagaagagtgggattgcctggacgcctctcagagagtgctgtatcaggatgtcatgagtgagacattcaagaaccttacctccgtcgcccggatcttcttacacaaaccagaactcattacaaagctcgaacaggaagaagagcaatggcgggaatttgtgcatttgccgaataccgaaggtctcagtgagggcaaaaaaaaggaactgcgggaacagcatccatcgctacgggatgaaggtacctccgatgataaggtgtttctggcttgcagaggtgccggtcagtgccccctgtcagcacctgccggaacaatggatagaacgcgagttttacaagcctcccaggccggtccaccatttttttgttatacgtgtggaaaatgctttagccgcagatcatacctgtactcacatcagttcgttcacaacccgaaactgaccaatagttgttcacaatgcgggaagctttttagaagccccaagtctctaagttaccacaggagaatgcacctcggcgaacggcccttttgttgtaccctgtgtgataagacgtattgtgacgcgtccgggcttagtcgccacaggagggtacacctgggatatcgtcctcatagctgctctgtgtgtgggaagtccttccgagatcagagcgaactcaagcgacatcaaaagattcatcaaaatcaggaacccgtggacggtaaccaggagtgcacattaagaatcccaggaacacaagctgagttccaaacccctatcgctaggagtcagcgatcaattcagggactgcttgacgtaaatcacgccccagtggcgcgcagtcaagagcctatttttcgtacagagggaccaatggcccagaaccaggcctccgtgctgaagaaccaggctcccgtcactcgtacccaggcacccatcaccggcaccctgtgccaagatgctagatccaatagccatcccgtgaagccgtcacgcctgaatgttttttgttgcccgcattgctctctgactttttctaagaagtcatatctgtctagacatcagaaggcacacctcacagagccgcctaactattgtttccattgctcgaagagcttctcttccttcagtaggctagtccggcaccaacagacccattggaaacaaaagagctacttatgtcctatttgcgacttaagtttcggtgagaaggaggggctgatggaccactggcgggggtacaagggcaaagacctctgccagtcatcacaccataagtgcagggttatcttaggccaatggttggggttcagccatgacgtgccaaccatggcaggagaggagtggaagcatggcggcgatcagtccccaccacgcattcatactcctcgcaggagaggactgagagagaaagcctgtaagggggacaaaaccaaagaagcagtgtccatcctgaagcacaagtag

SEQ ID NO: 304221 - DNA, 1551 bp, Artificial Sequence
  derived and/or modified sequence
atgttcgagcagcttaaacctatcgaacccagagactgttggcgtgaggcaagagtgaaaaagaaacccgtgacattcgaggacgttgcagtgaactttacgcaagaagaatgggactgtctggatgcatcccaacgagtactgtaccaggatgttatgtcggagacctttaagaatctgacaagtgtcgcccgaatctttctccataaaccggagctcattaccaagctcgagcaagaggaagagcaatggcgggagttcgtacacctgccgaataccgagggcctctcagaaggtaagaaaaaagagctgcgggagcagcatccttctctcagagacgaaggcacttcagatgacaaggttttcctggcttgccgcggtgccggacagtgccctctgtcggcccctgccggaacaatggaccgtacgcgcgtgcttcaagcaagtcaggcaggaccgccattcttttgttacacctgcggtaagtgcttcagccgccgatcctacttgtactctcaccagttcgtgcataatcccaaactcacaaatagctgcagccagtgcggaaagctcttccgttccccgaaaagcctgtcttaccatagacgcatgcacctgggagaacgcccattttgctgcaccctctgcgacaaaacctactgtgacgcctctggcctgtcaagacaccgacgagtgcacttagggtaccgccctcattcctgttcagtctgcggaaagagtttccgcgaccagtccgagctgaaacggcatcagaaaatccatcagaatcaggagcctgttgatgggaatcaggaatgtaccctgcgcattccaggtacccaagcggagtttcagacgccaatagcacgaagtcagcggagcatacagggcttgctcgatgtcaaccatgcccctgttgccagaagccaagaacccatattccggacagagggcccaatggcacaaaatcaggcctctgtgctgaagaaccaggctccggttacacgaacccaggctccaattactggtactctctgtcaggatgcaagatcaaatagccaccctgttaaaccgtccagactcaacgtgttctgctgtccccattgctctctaactttttcgaagaaatcctacctgagccgccaccagaaagcccacctaaccgagccgccaaattactgcttccactgctccaagtctttttcatccttcagccgactggtccggcaccaacagacgcattggaaacaaaaaagttacctctgtcccatctgtgatttgtcatttggtgaaaaggagggcttaatggaccattggaggggctacaagggcaaagatctctgccaatccagccaccataagtgtagagtgatcttagggcagtggctgggcttctcccacgatgtaccaaccatggctggggaggaatggaaacacgggggagaccaatctcctcccagaattcacacgccaaggcgccgaggcctgagagaaaaggcttgcaagggcgacaagacaaaagaagcagtgtcgatccttaaacacaagtag

SEQ ID NO: 304222 - DNA, 1551 bp, Artificial Sequence
  derived and/or modified sequence
atgtttgagcaactgaaaccgattgaaccacgcgattgctggagggaggctcgagtgaaaaaaaagcctgtcaccttcgaggatgtggccgtcaattttacacaggaagagtgggattgtctcgacgcctcacaaagggtcttgtatcaggatgtcatgtctgaaacattcaagaacctcaccagtgtggcacgaatctttcttcataaaccagagttgatcacaaaactcgaacaggaggaagagcagtggagagaatttgtgcacctgccaaacaccgaaggcctaagcgaaggcaaaaagaaagagttacgcgagcagcacccatccctcagggacgagggaacttcagacgacaaagtcttcctcgcgtgccgaggtgctgggcagtgtcccttatccgcacccgctggaaccatggatagaacgcgcgtcctccaagcatcccaagccggtccccctttcttctgttatacgtgtgggaagtgtttcagtaggcgatcatacctgtattctcaccagttcgttcacaatccaaagctgacaaatagctgttctcagtgcgggaaattattccggtcacccaaaagcctcagctatcacaggcgcatgcatctgggagaacgcccattttgctgtaccctgtgtgataaaacctactgtgacgcctctggcctatctagacatcgacgcgttcatcttgggtacaggcctcacagttgctcggtgtgcggtaaatctttccgggatcaaagtgagctaaagagacaccaaaagatccaccagaatcaagagccagtggatgggaaccaggagtgcactctgagaattcctggaactcaagctgagtttcagacccctattgcaagaagccaacgctcgatccaggggcttcttgacgtcaatcatgccccagttgcaaggtcacaagagcctattttccgcactgagggtccgatggcacagaaccaagcttcagtcctgaagaaccaggccccagtgacgcgaacacaagcccctatcaccggcacactctgccaggatgccaggtccaactcccaccctgttaaacctagtcgcttgaacgtgttttgttgcccacactgcagccttacatttagcaagaagagttatctaagcagacaccagaaagctcacttgactgagccacccaattactgctttcactgtagtaaatcatttagcagtttcagtaggctggtgcgacaccagcagacccactggaaacagaagtcctatctctgtcccatttgcgatttgtcctttggtgaaaaagaagggttgatggatcactggcggggatataagggcaaagatctgtgccaaagctcccaccataaatgccgggtgattctcggacagtggctcggctttagccatgacgtccccactatggcaggcgaagagtggaaacacggcggagatcagtctccaccccgaattcacactccccgtagaagaggacttcgcgagaaggcctgtaaaggagacaagaccaaggaagccgtctccatcctgaagcacaaatag

SEQ ID NO: 304223 - DNA, 1551 bp, Artificial Sequence
  derived and/or modified sequence
atgttcgagcagctcaagccaatagaaccccgagattgttggcgggaagcgagagttaaaaagaaacctgttaccttcgaggatgtcgcggtcaactttacccaagaggaatgggactgcctggatgcatctcagcgcgtgctctaccaagacgtcatgagcgagacatttaaaaacctgactagcgtggctagaatctttctgcataaacccgaattgatcacaaaactcgagcaggaggaggaacagtggcgggaattcgtccacctccctaacactgaagggctttctgaaggcaaaaagaaagagttgcgagagcagcatccctctctccgcgatgaggggacttcagacgacaaagtgttcctggcttgccggggtgccggacagtgtccgctgtctgcccctgctggcaccatggaccgtacacgtgttcttcaggcctctcaagctgggcctccctttttttgctacacatgcggtaaatgtttctccagacgttcgtatttgtacagtcaccagtttgtgcacaatcctaagcttaccaacagctgttctcaatgtgggaaacttttccgctcaccaaaatcccttagttatcacaggcgaatgcacttaggtgagcggcctttctgttgcaccctgtgcgacaagacatactgcgacgccagcggactgagcagacacaggcgggtgcatctcggctaccggcctcactcttgctctgtgtgcggcaagtcctttagagaccagagtgagctaaaacggcatcaaaaaattcaccagaaccaagaacccgtcgacgggaatcaagagtgcacactaagaattcccggaacccaggccgaattccagacaccaattgcacgcagtcagcgctcaatccagggccttttggatgttaaccatgccccagtagccaggagtcaggagcccatattccgtactgagggaccaatggcacaaaaccaggctagcgtccttaagaaccaagctcctgtcacaaggacccaggcccctatcacgggcacgctgtgtcaggatgcccgttctaatagccatccagtgaagccctcaagacttaatgtgttttgttgtccccactgctctctcaccttttctaagaaaagctacttaagtagacaccagaaggcacatctgacagagcccccaaactactgcttccattgctcgaagtcttttagtagtttttctcggctcgtgagacaccagcagacccattggaagcagaagtcttacttatgccccatctgtgatctcagtttcggagagaaggagggactgatggatcactggcggggatacaaagggaaggatttgtgccagtcatcacatcataaatgccgcgtgatattaggccagtggctgggatttagccacgatgttcccactatggccggagaagagtggaagcatggcggagaccagagtccacccagaattcacaccccccgtcgcagaggtctgagggaaaaggcatgcaaaggtgataaaaccaaagaagcggtatctattctcaagcacaaatag

SEQ ID NO: 304224 - DNA, 1551 bp, Artificial Sequence
  derived and/or modified sequence
atgttcgaacagctgaaacctatcgagcccagggactgctggagagaagcgagggtgaaaaagaagcccgttaccttcgaggatgtggccgtgaatttcacccaggaagagtgggattgcctcgatgcgtctcagagggttttgtaccaggacgttatgtcggaaacatttaaaaatctgacgagcgtcgccagaatcttcctccataagccggaattaattaccaagcttgagcaggaggaggaacagtggcgggaattcgtgcatctcccaaataccgagggcctgagcgagggaaagaagaaggagcttcgggagcagcatccatcgctgcgggacgaaggtacttctgacgataaggtctttctcgcctgtcggggagccggacagtgtcctctatccgcacccgctgggactatggatcggactcgagtgctgcaggccagccaagctgggccacccttcttttgttacacctgcggcaaatgcttcagccggcgaagctacctctattcccatcagttcgtgcataacccgaaactgacaaattcctgctcacagtgtggaaagctgtttcgtagcccgaagagccttagctaccataggcgcatgcatttaggtgaacggcctttctgttgcacgctgtgtgacaagacatattgcgatgcatccggattaagtaggcaccgcagagttcacttggggtatagaccacactcatgctctgtctgcggcaaatccttccgcgaccagtctgaacttaaaagacaccagaaaatccatcagaatcaggagcctgtggacggaaatcaggagtgtacgctgagaattcccggaacacaggcagagtttcaaacccccatcgcacgcagtcaaaggtccatccaggggttgctggatgtgaaccacgctccagtggcccgtagccaggaacccatcttcaggaccgaggggccaatggcccaaaaccaggcttctgtattgaaaaatcaggcccctgttacaaggactcaggcccctatcacaggaacactctgccaagacgccaggagcaattcccatccagtgaaacctagccgtctcaatgtcttctgttgccctcattgttctctcaccttttcaaaaaagtcctacctttcccgccaccaaaaagctcacttgacggaacctcccaactactgctttcactgcagtaagtctttcagttcattctcaaggctggtgagacatcagcagacgcactggaaacaaaaatcatatttgtgccccatatgtgacttgtcattcggggaaaaagaggggctcatggaccattggagaggatataagggcaaggatctttgtcagtcttcacaccataaatgcagggtcatcttgggccaatggctcggcttctctcatgacgtgccaacaatggctggtgaggagtggaaacatggcggagaccaatcgccccctagaatccatacgccccgacgcagaggccttcgggagaaggcgtgtaaaggagacaagacaaaggaggcagtgtccatactcaaacacaaatag

SEQ ID NO: 304225 - DNA, 1551 bp, Artificial Sequence
  derived and/or modified sequence
atgtttgagcagcttaagcccattgaacctcgggattgctggcgagaggctcgagttaagaagaaacccgtgacgttcgaagatgtcgcggtcaactttactcaggaggagtgggattgccttgacgctagtcaaagggtactgtaccaggatgtgatgagcgaaacattcaagaatctgactagcgtagcacggatcttccttcataagcctgagctcataacaaaactggaacaggaagaagagcagtggcgggaattcgtccacctccccaataccgagggtctatcagagggcaagaagaaggagctgcgggaacagcacccaagtctgcgggatgagggcaccagcgatgacaaagttttcctggcctgtcgaggcgcagggcagtgtcccctgtccgcccctgccggaacaatggaccgaacgagagtgcttcaggcctcccaagctggacctccctttttctgttatacctgcggtaagtgttttagcaggagatcctacctgtactcccaccagtttgtgcataatcccaagctcaccaattcatgttctcagtgcggtaaactttttaggtccccaaaaagcctctcataccatcgcagaatgcacctgggagagcgacctttctgctgtaccttatgtgataaaacttactgcgatgcttctgggctgtctcgccatcgtcgagttcatttaggctataggcctcattcatgttctgtctgtggaaaatcctttcgcgaccagagtgaattgaaaagacaccagaagatacatcagaaccaggagcccgtggacgggaaccaggaatgcacgctgcgtattcccggtacgcaggccgaattccaaacaccgattgcgagatcacagcgatctattcagggcttgctggacgtgaatcacgctcctgtcgcccgtagccaagagccaatcttcaggacagaaggaccgatggctcagaatcaggctagtgtgcttaaaaaccaggctccagttacacggacccaggcccctatcactgggacactgtgtcaggatgctcgaagcaattctcatccagtgaaaccctcacgtttgaatgtgttttgttgcccacattgcagtctcacattcagcaaaaagtcatatctaagtaggcaccaaaaggcccacctaactgagccaccaaactactgcttccactgctccaaaagcttcagctccttttccaggctcgtgcggcatcagcagactcattggaagcaaaaaagctacctgtgtcccatatgtgacctgtctttcggcgagaaagaagggctgatggaccattggcgcggatacaaaggcaaagatctgtgtcaatcctcacaccacaaatgtcgtgtcattctgggtcaatggttgggattttcccacgacgtcccaactatggccggtgaggaatggaagcatggaggagatcagagccctccacgtattcacactcctcggaggaggggtttgagggaaaaggcttgcaagggcgataaaactaaagaggccgtaagtatcctcaaacacaaatag

SEQ ID NO: 304226 - DNA, 1551 bp, Artificial Sequence
  derived and/or modified sequence
atgttcgaacagctgaagcccattgagccccgtgactgttggagagaggcacgagtaaagaagaaacctgtgacttttgaggatgttgctgttaacttcacacaagaggaatgggattgcttggacgcctctcagagagtcctataccaggatgttatgtcagagaccttcaaaaacctcacatcggtagctagaatcttccttcacaaacccgaactcatcaccaaactggaacaggaagaggagcaatggagagagtttgtccatcttcctaacactgaaggcctgagcgaaggcaagaaaaaggagctgagggaacaacaccctagcctcagggatgagggcacatcagacgataaagtttttctggcctgtcgtggcgcagggcagtgtccgctgtcagctcctgcaggcactatggaccgcactcgagtgttacaggcaagtcaggctggacccccattcttttgttacacttgtggtaaatgcttttctcggcgttcctatctatacagccatcaattcgttcacaatccaaagctgacgaactcttgctctcagtgtggcaaactgtttcggtcaccgaagtccctgtcttaccatcggcgaatgcacttgggcgagagaccattttgctgcaccctctgtgacaagacctattgcgatgcttccggcttgtcccgccaccgcagggtccacctgggttatagaccccactcttgcagcgtatgcggaaaatcattccgggaccagagcgaactgaaacggcatcaaaagatccaccaaaaccaagaacctgtggatggaaatcaggaatgcaccttacgtatcccgggaactcaggctgagtttcagaccccaatagcaaggagccagcggagcatccaggggctgctggatgtgaaccacgccccagtcgccagatcacaggagcccattttccgtaccgaaggcccaatggcccagaatcaggctagcgttctcaaaaatcaggcccctgtgacaagaacacaggcccctattaccggcacgctatgccaggacgcaaggtccaactcacaccctgtgaagcctagcagactgaacgtattctgttgtccccattgctccctgacattctcaaagaagagttacctctccagacaccagaaggcccacctgacggaaccgccaaattattgttttcattgttccaaatccttctcctccttctcgcggctggtccggcaccagcaaacgcattggaagcaaaaatcttatctgtgcccgatctgtgacttgagctttggagaaaaagaagggcttatggaccattggagagggtataaagggaaggatctctgtcagtccagccaccacaagtgtagagtgattttgggacagtggctaggtttctctcacgacgtgccgaccatggcgggagaggaatggaagcacgggggagaccaatccccccctcggatacacacgccgagaaggcgcggattgcgggaaaaggcctgtaaaggtgacaagacaaaagaagctgtatctatattgaagcataaatag

SEQ ID NO: 304227 - DNA, 1551 bp, Artificial Sequence
  derived and/or modified sequence
atgttcgagcagcttaagcccatcgagccacgggactgttggcgggaggctcgggtaaagaaaaaacccgtgacctttgaagacgtagccgtaaactttacccaagaagaatgggactgtctcgacgcttcccagagagtcctttatcaagacgttatgagtgagacttttaaaaacctaacgtccgtcgccagaatatttctgcacaaaccagagctcataaccaagttggaacaagaagaagagcaatggcgtgaattcgtgcatctaccgaacaccgagggcttgtccgagggtaaaaagaaagagctgcgagagcagcacccaagcctaagggacgagggcacctctgacgacaaggtcttcctggcatgtaggggtgccggtcagtgtcccttatccgccccagccggtaccatggatcggacacgggttttacaagcgtctcaggctggacctcccttcttttgctatacttgcgggaagtgtttcagccgacgctcgtatctctacagccaccaattcgtgcacaacccaaaacttaccaatagctgcagtcagtgcggcaagctgtttcgctcacctaagtccctctcctatcatagacgcatgcatctcggcgagcgcccattttgctgcactctgtgtgacaaaacgtactgcgacgcctctggcctgtcaagacacaggcgcgtgcacttgggttaccgcccacacagctgcagcgtttgcgggaaatcattccgcgatcagtcggagctgaagaggcaccagaaaattcaccagaatcaggaaccagttgatgggaaccaggagtgcacactcaggataccgggaacacaggctgagttccagaccccaattgccagatcgcagcgcagtattcagggcctgctcgacgtaaaccatgctcctgtcgccaggagtcaggagccaatctttcgcacagagggcccaatggcacagaaccaagcttcagtgttaaagaatcaagccccagtgaccagaactcaggcccctattactggaacactatgtcaggacgccaggtcaaactcacaccctgtgaaacctagccgcctgaatgtgttttgttgcccccactgttcattgaccttcagcaaaaagagctacttgagtcgccatcaaaaggcccacctcaccgaaccccctaattattgctttcattgctcaaagagcttttcgagtttctcacgccttgttcgccaccagcagacccattggaagcaaaaatcatatctgtgtccgatttgtgatctatcttttggggaaaaggagggcctgatggaccattggagagggtacaagggtaaggatctgtgtcagagctcccaccacaaatgccgcgtgattctgggccagtggcttggattcagccatgacgtacccactatggccggtgaggagtggaagcatggaggtgatcagagccccccacggattcacacaccgaggaggagaggccttagggaaaaagcctgcaaaggcgataagacaaaagaggcagtgtccattttgaagcacaagtag

SEQ ID NO: 304228 - DNA, 1551 bp, Artificial Sequence
  derived and/or modified sequence
atgtttgaacaactgaaacccattgagcctagggactgctggagagaagcacgagtaaagaagaaacctgtgaccttcgaggatgtagccgtaaactttacacaggaggaatgggactgccttgatgcatctcaacgcgttctgtatcaggacgtcatgtccgaaacttttaagaacctcactagcgttgcccgtatctttctgcacaagcccgagctgattacaaaacttgagcaggaagaggagcagtggcgcgagttcgtccacttgcctaataccgagggactgagcgagggaaaaaagaaagagctccgtgagcagcacccctctctccgagacgaagggacttcagatgataaggtgtttttggcctgcaggggcgctgggcagtgtccactgagcgcaccagctgggaccatggatcgcacccgcgtgctgcaggcctcccaggccggtccacccttcttttgttatacatgtggcaagtgcttcagccgtcgatcctacctttattcgcatcagtttgtgcacaaccccaagctcaccaattcttgctctcagtgtggaaaattgtttagaagcccaaagtccttgtcctatcaccgcagaatgcacctgggggagcgacccttctgttgtacgctctgtgataagacttactgtgatgccagcggactatctaggcatagaagggtgcacctcggctataggccacattcctgttccgtctgcggcaaatcctttagggaccagagcgagctgaaaaggcatcagaagatacatcagaaccaagagcccgtggacggtaatcaagagtgtaccctccgcatcccaggcactcaggccgaatttcagacccctattgccaggtcgcagcgcagtattcagggactactggacgtgaaccatgccccagtcgcacgatcccaggaacccatattcaggacagaaggccctatggcacagaatcaagcgagcgtgctgaagaaccaggctccggttactcgaacacaggctcccatcacagggactctgtgccaggatgcgcgaagtaactcccatccagtgaagccctcccggcttaacgtgttctgctgtccccactgttccctgacctttagcaagaagtcatatctgtcaaggcatcaaaaggcacatcttactgagcctccaaactattgtttccattgcagtaagtcctttagtagcttttctcggcttgtgcgccatcaacaaacccattggaagcagaagtcctacttatgccccatctgcgatctgtcattcggagagaaggagggcctaatggaccattggagagggtataagggcaaggacctgtgccagtcctcacatcacaaatgtcgcgttatcttagggcagtggctaggcttctctcatgatgtgcctactatggcaggcgaggagtggaagcatggaggggatcagagccctccacgcattcatacacccagacggaggggcctccgtgaaaaagcgtgcaagggagataaaactaaggaagccgtgtccatcctgaaacataaatag

SEQ ID NO: 304229 - DNA, 1611 bp, Artificial Sequence
  derived and/or modified sequence
atgtttgagcagctgaagcccatcgagcccgtgcagaagacactgccttgggtcggcgaagtcgcagcaactcttcaggaggccatgaaaagggactgttggcgggaggcaagagtcaagaaaaagccagtgactttcgaagacgtagccgtgaatttcactcaagaggagtgggactgcttggatgcttcccagagggtgctgtatcaagacgttatgtccgagacttttaaaaacttaactagcgtggccagaatttttctgcataagcctgaactaatcacgaaattggagcaagaagaagagcaatggcgggagttcgtgcatctgcctaacaccgaagggctgtccgaaggtaaaaaaaaggaactccgggagcagcacccatccttgcgggatgagggcacctcagacgataaagtcttcctcgcatgccggggagcgggtcagtgtccattaagtgctccagccggaaccatggaccggacacgggtgttacaggcatcacaagctggtccaccattcttttgttatacgtgtggaaagtgttttagtcgcaggagctacctatacagtcaccagtttgtgcataatcccaagctgacaaactcttgcagtcaatgcggtaaactattccgctcgccaaaatcgctgagttaccatcgacggatgcacctcggggaacgacccttctgctgcactctgtgcgacaagacgtactgcgacgcgagtggcctgtctaggcatcggagggtgcatttaggatataggccccacagctgctccgtctgcggaaaatcttttagggaccagtccgagttaaagcggcaccagaagatccatcagaatcaagaacctgttgacggaaatcaggagtgtacgcttaggatacccggaactcaggcggaattccagactccaattgccagatcccagagaagcatccagggattgctggatgtaaaccacgcacctgtagccagaagccaggagccaatttttcggacggaaggcccaatggctcaaaatcaagcatccgtgcttaaaaaccaagccccagtcacaaggactcaggcccctattactgggacgctctgtcaggatgcacgctctaactcacaccctgtgaaacctagtcggttaaacgtattctgttgtcctcattgtagccttacattctccaaaaaatcctacctctcccggcaccaaaaagcccacttgaccgaacctcctaattattgtttccactgtagtaaaagcttctcatcctttagccgcctggttagacaccagcagacccactggaagcagaagagctacctgtgcccgatctgcgacctttccttcggggagaaggaaggtctcatggaccactggagggggtataaaggcaaggacctctgtcaatcttcacatcacaagtgtcgagtgatcctgggccagtggctgggcttcagtcatgatgtgccaaccatggccggagaggaatggaagcacggcggagatcaatctccgccacgcatccatactccaaggaggcgcggactgagagagaaggcctgtaagggtgataagacaaaagaagccgtgagtattttgaaacacaagtag

SEQ ID NO: 304230 - DNA, 1551 bp, Artificial Sequence
  derived and/or modified sequence
atgttcgaacagttgaaacccatcgaacctagggattgctggagggaggctcgggttaaaaagaagccggtcacattcgaagacgtcgccgtgaattttacccaggaggagtgggactgcctggatgcctcacagcgagtactgtaccaagacgtcatgtctgagacgttcaagaatctgacctcagtcgcgcgaatctttctccataaacccgagctgataaccaagctcgagcaggaggaggagcaatggagggaattcgttcacctccccaacactgaaggacttagcgagggaaaaaagaaagaattacgagaacagcacccatccctgcgtgacgagggtacgagcgacgacaaagtgttcttggcatgcagaggtgcgggtcagtgccccttgtccgctccagccggaactatggaccgtactagagtacttcaagcttcgcaggcaggacctcccttcttttgttacacttgtggcaaatgtttttccaggagatcttatttgtacagccaccagtttgtgcataatcccaaactgacgaactcatgcagccagtgcggaaagctgtttcgatcgccgaagtccctctcttaccatcgccgaatgcacttgggcgaaaggcccttttgttgcactctatgcgataaaacctactgtgatgccagcgggctgagtagacaccgcagggtccatctgggatatcggccacatagttgtagcgtgtgtggcaaaagcttcagggaccagtccgagctgaaaaggcatcagaaaatccatcagaatcaggaacccgtggacgggaaccaggaatgcactctgaggatccctggaacgcaggccgaatttcagacccccattgctagatctcaacgcagtatacagggactcctggatgtgaatcacgcccctgtggctaggtcacaagagccaatctttcggacggaaggacctatggcgcagaaccaggcatccgtgctgaagaaccaagcaccagtcactcgaacacaggcaccaattacaggcacactgtgccaagacgcacgatccaattcacaccccgtgaagcctagccggctgaatgtcttctgctgccctcactgcagcctgacattttccaagaaatcctacctgagtagacaccaaaaagcccacctaactgaacctccaaactattgtttccattgtagcaagagcttctcatcctttagccggttggtgagacatcagcagacacactggaaacagaaatcctacctgtgtcctatctgtgacctgtcatttggtgagaaagagggcctgatggatcattggcggggatacaaagggaaagacttgtgtcagagtagccatcataagtgtagagtaattttaggacagtggctcggattcagtcacgacgtgcccacaatggctggggaggagtggaagcatggaggtgaccagagccccccaagaattcacacaccgcgaagacgtggcctaagggagaaggcctgcaagggcgataagaccaaagaggcagtttcgatacttaaacacaagtag

SEQ ID NO: 304231 - DNA, 1356 bp, Artificial Sequence
  derived and/or modified sequence
gccggtggatcaccggagagcctcctgttttttcaaaagcctgttacctttgaggacgttgcagttaattttactcaggaggaatgggactgcctggatgcatcccaaagagtgctgtatcaggatgtcatgagtgaaacattcaaaaatctgacatcagttgcacggattttcctgcataaacccgagctgataacaaagttagaacaggaagaggagcagtggcgggaaacacgtgttctccaagcttcacaggctggccctcccttcttctgttatacatgcggtaaatgcttctcaaggcgatcgtacctttattcccaccaattcgtccataatcccaagctgaccaactcatgtagccagtgcggaaaactctttagatcacctaaatccctatcctatcaccggaggatgcacctaggtgaacgccctttttgctgtactctgtgcgacaagacatactgcgatgcatcaggcctaagcagacatcgaagggttcacttgggatatcgtccacattcatgcagtgtgtgcggaaagtcattccgagatcaatccgaactcaagcgccaccagaaaattcatcaaaatcaggaacccgtggacggtaaccaggaatgcactctaaggataccgggtacccaggctgagttccagaccccaattgctcgtagccagaggtccatacaaggtttactggatgtgaatcatgccccagtggctagatcccaggagcctatcttccgaaccgagggccctatggcccagaatcaagccagtgttttgaaaaatcaagcccctgtaacgaggacccaggccccaataacaggaacactgtgccaagatgcacggtcaaactcgcatcccgtgaagcccagccggctgaatgttttctgctgcccacactgctccctgaccttttctaaaaaatcttacctgtcgcgtcatcagaaagctcatctgacagaaccgccaaattactgctttcattgcagcaaatcctttagcagcttcagcaggttagtgcgtcaccagcagacgcattggaaacaaaagagttacctttgtcctatctgcgacctgtccttcggggagaaggaagggttgatggaccattggcgtggttataaaggaaaagacctctgccagagttcccaccacaagtgcagagtgatcttggggcagtggttgggcttttctcatgatgtccccacaatggctggtgaggaatggaaacacgggggtgaccagtctcccccacggatccacactccccgtcggcgaggcctgagagaaaaggcttgcaaaggtgacaagaccaaagaggccgtgagtatcctgaagcataaatag

SEQ ID NO: 304232 - DNA, 1551 bp, Artificial Sequence
  derived and/or modified sequence
atgttcgaacagctgaaacccattgaacccagggattgctggcgagaggccagagtaaaaaagaagccagtgacctttgaggatgtcgccgtgaacttcacacaggaggaatgggactgcctagatgccagccagcgcgtcttgtatcaggacgtgatgtccgagaccttcaagaacctgacatcagtagctaggatattcttacataagccggagctcattaccaagctcgagcaggaggaagagcagtggcgcgagtttgtacacttgccaaacacagaggggctatccgaaggcaagaagaaagaactgagggagcagcatccatctctgcgagatgaaggcaccagtgacgataaagtattcttagcttgtagaggcgcaggtcaatgtccgctcagcgccccagccggaaccatggaccgcactagggtgctacaggcttcccaggccggaccgccattcttctgttatacatgcggaaagtgcttttccagaaggtcttacctttatagccatcagtttgtccacaacccaaaactgaccaacagctgttcacaatgcggcaagctcttccgatctcccaaatccctgtcttaccacaggcgtatgcacctcggcgaaaggccattctgttgcacactgtgtgataagacatactgtgatgccagtgggctctcaaggcacagaagggtccaccttggatacagaccccactcatgttcagtgtgtgggaagtctttccgagatcaatccgaactcaagcgacaccagaagattcaccagaatcaagagcctgtggacgggaatcaggaatgcaccctgcgcatccccggtacacaagccgaatttcaaacgccgattgcgcgatcgcagcgctcaattcaaggcctgctagacgttaaccatgccccagtggctcgatcacaagagccaatctttaggaccgagggtccaatggcccagaaccaggcctctgtcctgaagaatcaagccccagttactcgcacacaggctccaatcaccggaaccctctgccaggacgcccgtagcaactcacacccagtcaagccttctaggctgaatgtgttttgctgtccacattgctcactcaccttctccaagaaaagctacctcagcagacaccagaaagcccacctcacagagcctccaaactattgctttcactgttctaaaagcttcagttccttctcacgtctcgttaggcaccagcagacccattggaagcagaagtcatacttgtgccctatatgtgatctgtccttcggtgagaaagagggccttatggatcactggcggggatataagggaaaagatctgtgccaatcaagtcaccacaagtgccgcgtaatcttgggtcagtggctggggttttcccacgatgtccctactatggctggcgaagagtggaaacatggcggagatcagagcccacctcgcatccacacccctcgtcggagggggctgagggagaaagcctgcaaaggcgataaaacaaaggaggcggtctcgatcctgaaacataagtag

SEQ ID NO: 304233 - DNA, 1611 bp, Artificial Sequence
  derived and/or modified sequence
atgtttgaacaactgaagcccatagagcccgtacagaaaacattgccttgggtgggcgaggtggccgctactctgcaggaggccatgaaaagggactgctggagagaggcaagggttaagaaaaaaccagtgacattcgaagacgtggccgtcaactttacccaggaagaatgggactgcctagatgctagtcagagagtgctctatcaggatgtgatgtctgaaactttcaagaatttgacgtccgttgctcgaattttcctgcacaaaccggagctgataaccaagctcgaacaggaagaggaacagtggagagagttcgtccacctgccaaacacagaaggcctctccgaggggaaaaagaaggaattgcgggaacagcacccttcacttcgcgatgagggcacctccgacgacaaggtgttcctcgcttgtcgaggcgctgggcagtgtccactctcagccccagctggtaccatggatcgcacccgggtgctgcaagcgtcccaggccggaccacctttcttttgttacacctgtggcaagtgcttctcccggcgtagttatctctatagccatcagtttgtccacaatcctaaactgacgaatagctgctcacagtgtggcaaactttttcgctctccaaaaagtttgtcatatcacagaaggatgcatcttggtgagagacctttctgctgcacactctgcgataaaacgtattgcgacgcttccggactgtcccgtcacaggcgcgtccacctgggatacagaccacactcttgctctgtgtgtggaaagagttttcgggatcagtccgagctgaagagacaccagaaaatccaccagaatcaagagcctgtggatgggaaccaggagtgtacactgcgtatccccggtacgcaagctgaattccagactccgatcgctcgatcccagaggagtatacagggccttctggacgtcaatcacgcccctgtggcccgatcccaggaacccatttttaggactgaggggccaatggctcagaatcaggctagcgtcttgaaaaatcaggcgcctgtgacccggactcaagcacctatcactggaacactgtgtcaggacgccaggtctaattcacacccagtaaagccatccagacttaatgtgttctgttgccctcattgctctttaacgttcagtaaaaagtcgtatctctctcgccatcaaaaagctcatcttactgagccacctaactactgctttcactgcagcaagtctttctcctcttttagccggctggtcaggcatcagcaaacacactggaaacaaaaatcctatctgtgccctatctgtgacctaagctttggtgagaaggaagggttgatggatcactggagagggtacaaaggtaaagacctgtgtcagagtagtcaccataaatgcagagtgattctcgggcagtggctggggttcagtcacgatgtcccaacaatggcgggagaagagtggaaacacgggggagatcagtcccctcccagaatccacactccccgaaggagagggctgcgcgaaaaggcttgcaagggtgataagactaaggaagccgtctctatcctgaagcacaagtag

SEQ ID NO: 304234 - DNA, 1611 bp, Artificial Sequence
  derived and/or modified sequence
atgtttgagcaactcaaacccattgagcccgtacagaaaactttaccttgggttggtgaagtagccgcaacactccaggaagcaatgaaacgggactgctggcgggaggcacgggtgaagaagaagccagtgactttcgaggatgtcgccgttaacttcacacaggaagagtgggactgcttggacgcctcgcaaagagttttgtaccaagacgtcatgagcgagaccttcaaaaacctcacctccgtggcccgtatcttcttgcacaagcccgaactgataacaaagctggaacaggaagaggaacagtggcgggaattcgtccacctgccaaacacagagggcctgagcgaagggaagaagaaggaactccgtgagcagcatcctagcttaagggacgaaggcacttctgacgataaagtcttcctggcgtgccgaggcgctggtcagtgtcctctatctgcgcctgccggaaccatggacaggacacgcgtgctgcaggcatcccaagccggaccccctttcttctgttacacctgcgggaagtgcttcagccgtaggagttatctatactctcatcaatttgtgcataacccaaagctgactaacagctgctctcagtgtggaaaactgtttcgctcgcccaaatccttgtcctaccataggagaatgcaccttggagagagacccttttgctgtaccttgtgcgataaaacctattgcgacgcatcgggtctgagcagacaccgccgagttcacctcggctatcgaccccacagttgctctgtctgcggaaagtcgttcagagatcagagcgagttaaagagacatcagaagattcatcaaaatcaggagccagtcgatggaaatcaggaatgcaccctccgaatccccggaacccaggccgaattccaaacacctatcgccagatcacagcgcagtatccagggattgcttgacgtcaaccacgctcccgtggcacgttcccaggaacctatcttccgcaccgagggaccaatggcccagaatcaggcatccgtgttgaagaaccaggcaccagttacacgcactcaggccccaattactggaaccctatgccaggatgccagatctaatagtcatcctgtgaaaccatcacggcttaacgtattttgctgcccacactgctcattgacttttagcaaaaagtcatacctaagtcggcatcagaaggcccatctgacagagcctccgaattattgtttccactgttccaaaagttttagcagcttctctagattagtcagacaccagcagactcattggaagcagaaatcatacctgtgcccaatctgtgacctgtccttcggcgagaaagaaggactgatggatcactggcgcggatacaagggcaaagacttatgccagtcctctcaccataaatgccgcgtcattcttggccagtggttggggttttctcatgacgtccctaccatggcaggagaggagtggaaacacggaggggatcagtcccctccccgaatccatacccccagaaggcggggattgcgcgagaaggcgtgtaaaggcgataagaccaaagaggctgtgagcattctcaaacataagtag

SEQ ID NO: 304235 - DNA, 1611 bp, Artificial Sequence
  derived and/or modified sequence
atgtttgaacagctgaagcccatcgagcccgttcagaaaacacttccatgggtgggcgaggtggccgcaacactccaggaagctatgaagagggattgttggcgcgaagcacgagtgaagaaaaaacccgtcacgttcgaagatgtcgctgttaactttacgcaagaggagtgggactgcctcgacgcgtcacagcgagtcctataccaagatgtcatgagtgaaactttcaaaaacctgaccagtgtagcgaggatattccttcacaagccagaattaattacaaagctggagcaggaagaggaacaatggagggagttcgtacacctccctaatactgagggactctccgaagggaagaagaaggagctgagagaacagcatccctccctgagggatgaggggaccagtgatgacaaggtctttctggcatgccgcggtgcagggcagtgccccctatccgcacccgcaggtactatggatcgtacccgggtgctgcaggcatctcaggcgggtccaccttttttttgttacacatgtgggaagtgctttagcaggcggagctacctgtacagccatcagtttgtccataacccaaagcttacaaacagctgcagccagtgcggcaagctgttccggagtcctaagtcactgtcataccaccggaggatgcacctgggtgagaggccattctgctgtaccctgtgcgataagacctactgtgacgcctctggactgtcacgccacaggcgagtgcatttgggataccgtccccatagctgcagcgtgtgcggcaagtcctttcgcgatcagtccgaattgaagcggcaccagaagatccatcagaatcaagaaccagtggacggcaatcaagaatgtactctaagaatccccggaactcaagccgagttccaaactccaattgctagatcccaaaggagtatccagggcttgctcgacgtaaaccatgcacccgttgctcgctcccaggagcccatcttcagaaccgaggggccaatggctcagaaccaggcgtcggtgctaaaaaatcaagcccctgttactcgcactcaggcacctatcacaggaactctttgccaggatgctcgctccaatagccaccccgtgaagccatctcgccttaacgtcttttgttgcccccactgtagccttacatttagtaaaaaatcctacctatctcggcaccagaaagctcatctgaccgaaccaccgaattattgctttcactgcagtaaatccttttcatcatttagccgtctcgttcgtcatcaacagacacactggaaacagaagtcttacctttgccccatctgcgacctcagtttcggggaaaaggagggtctgatggaccattggcgcggatacaagggcaaggacttgtgccagagcagccaccacaaatgccgagtgatccttgggcagtggttaggattctctcatgatgtgcctaccatggccggagaggagtggaaacacggcggtgatcaaagtccccctcgtatccacaccccccgtcgacgcggactaagggaaaaggcctgcaaaggtgataagaccaaagaggccgtgagcattctgaagcataagtag

SEQ ID NO: 304236 - DNA, 1611 bp, Artificial Sequence
  derived and/or modified sequence
atgttcgagcagctcaaaccaattgagcccgtgcagaagacactcccttgggtcggagaggtggccgcaacactccaggaggccatgaagcgcgactgttggcgagaggcgagggttaagaaaaagccagtcacttttgaggacgtagctgtgaatttcacacaggaggagtgggactgcttagatgcctctcaacgggttttgtatcaagatgtgatgagcgaaaccttcaaaaatcttacctccgtcgcacggatcttcctgcataaaccagagctgatcaccaaactggaacaagaggaagaacagtggcgggagtttgtgcacttaccaaataccgaaggcctcagcgaagggaaaaaaaaggaattacgcgagcagcacccgtctctgcgggacgaaggaacatccgatgacaaagtgtttctggcttgtcggggagccggacagtgccctctgagcgccccagcgggtaccatggacagaacccgggtgctgcaagcaagccaagcaggtccgccattcttctgttacacctgcggtaagtgtttctctaggcgctcttatttgtactcccaccagttcgtgcacaaccccaagttgactaactcatgtagtcagtgcggcaaactcttcaggtccccaaagtcactcagctaccaccggagaatgcatcttggtgagagaccattctgctgcacgctctgtgacaaaacatactgcgacgcaagcgggctaagcagacacagacgagttcacctgggatataggccccatagctgctctgtgtgcggcaaatcctttagagaccaaagcgaactaaagaggcatcaaaaaattcaccagaaccaagaaccagtagatggcaatcaagagtgcacgctgagaatcccgggtacacaggcagagttccagacccctattgctcggagccagcgcagcattcagggactgctcgacgtgaaccacgcgccagtcgcaagatcacaggaacccatcttcaggactgagggcccaatggcacaaaaccaagcctcagtccttaaaaaccaggccccagtgacccggacgcaggcaccaataacaggcacgctatgtcaggatgcaaggtctaactcccacccagtgaagccctctagacttaacgttttttgctgtccgcactgttccctgaccttttcgaagaaaagttatctgagccgtcatcagaaggcccatcttacagagccgccaaactactgttttcactgtagcaaatcgttctcgtcgttttcccgtctggtgcgacaccaacagactcactggaaacaaaaaagctacctgtgtccaatttgcgacctgtcttttggagaaaaggaaggattaatggatcactggagaggctacaagggcaaagatctgtgtcagagcagtcaccataagtgtcgcgttattctgggacagtggctgggattcagtcacgacgtccccactatggctggagaggagtggaaacatgggggagaccaatctccgcctaggattcataccccgagaagacggggtctgcgtgaaaaggcctgcaagggcgacaagactaaagaagcggtgagtatattgaagcacaagtag

SEQ ID NO: 304237 - DNA, 1551 bp, Artificial Sequence
  derived and/or modified sequence
atgttcgaacagcttaagccaatagaacccagggactgctggagagaggcccgtgtcaagaagaaacccgtgaccttcgaggacgtggctgttaatttcacccaggaggagtgggactgcctagatgcttcccaaagagtgctgtaccaggacgtaatgagcgagactttcaaaaatctgacatctgttgcgaggatatttctgcacaaaccagaattaattactaaactcgagcaagaggaagagcagtggagagagtttgtgcacctgcctaatacagagggcctgtctgaagggaagaagaaagaactgagagagcagcacccgagcctcagggacgaaggcacctcagacgacaaggtgttcctcgcatgccgcggtgcgggacagtgccccctctccgcacccgctggtaccatggatagaacacgcgttttgcaagcatcccaagcaggtccaccctttttttgttatacgtgcggaaagtgttttagccgacggagctatctgtatagccatcagtttgtgcacaatcctaagctcacgaattcatgcagccaatgcggaaagttgttccgatctcccaagtctctgagctaccataggagaatgcacctgggggagaggccgttttgctgtaccctatgtgataagacctactgtgacgcttccggtctatcaaggcacagacgagtgcacctgggctataggccacatagctgtagcgtgtgcggtaagtcatttagggatcagtctgagttgaagagacaccagaaaatacaccagaaccaggagccagtcgatggtaaccaggaatgcactttgcggatccccggaacacaggctgagtttcagacccccatcgccaggagtcagcggtccatccaaggccttctggacgtgaaccacgcccctgtagccaggagccaggagcccatcttccggaccgagggccctatggcgcaaaatcaagccagcgtgctgaaaaatcaggccccagtgaccaggacacaagcaccaatcaccggaactttgtgtcaggacgccaggagtaattcccatcccgttaaaccaagcaggcttaatgtcttctgctgtcctcattgctccctgactttttccaaaaagtcatacctctctcgacatcagaaagcccacctgaccgagcccccaaactactgtttccactgttctaaaagctttagcagcttcagtagactggtgcgacaccagcagacacattggaagcagaagtcatacctctgtccgatatgcgacttgagtttcggagagaaggagggtctgatggatcactggcggggatacaagggaaaagacctgtgccagtcttcccatcacaagtgccgcgtgatattgggccagtggctcggcttctcacatgacgtacccactatggccggagaggaatggaaacatggtggcgaccaatcaccgcctcgcatccacactcctcggagacgtggactgagggaaaaggcgtgcaagggcgacaagacgaaggaggcagtgagtatcctcaaacataaatag

SEQ ID NO: 304238 - DNA, 1551 bp, Artificial Sequence
  derived and/or modified sequence
atgtttgagcaattgaaaccaatcgagccacgcgattgctggcgggaggctcgggtgaagaagaagccagtgaccttcgaagacgttgctgtcaacttcacacaagaggaatgggattgcctggacgcctctcaacgggtgttataccaggatgtaatgtcggaaacatttaaaaacttgacctctgtggccagaatcttcctacacaaaccagagcttataaccaaactggaacaggaagaggagcaatggcgggaatttgtgcacctaccgaacaccgagggtctctcagaaggtaagaagaaggagctcagagagcagcacccttccctgcgtgacgagggcaccagtgatgacaaggtattcctcgcctgtcgaggcgcaggccagtgtccactcagcgcccctgcgggaacaatggatcgtacccgagtacttcaggcttcacaagcagggccaccgttcttttgttacacatgcggaaagtgttttagccgcaggagttacctctactcccaccagtttgtccacaatcctaaactgaccaacagttgtagtcagtgtggcaagcttttccggagtccaaaatctctgtcataccatcgacgaatgcatctgggagagagaccgttctgctgtactctgtgcgataagacgtattgtgatgctagcggactatcccgtcatagacgagtgcacctgggataccgaccccattcctgctctgtgtgcggtaagtccttccgggatcagtccgaattaaagcgtcaccagaaaatccatcaaaatcaggagcccgtggatggcaaccaagaatgcactttgcgtatccctggcacccaggccgagtttcaaactccaatcgccagatcccagaggtctatccaggggctcctggatgtgaaccatgcacccgttgccaggtcgcaggagccgatatttcgcactgagggtcccatggcacagaatcaggcttccgtgctaaaaaaccaggcgccagtgactcggacccaagctccgatcactgggacattatgccaagatgctaggtcgaactctcaccctgtgaagccatctcgtcttaatgtgttttgctgtccccactgcagtttgacttttagcaaaaaatcttacttatctaggcaccagaaggcgcacctgactgagccgccaaactactgttttcattgcagtaagagcttctcttcgttctcccgcttagttaggcaccaacagacccactggaagcagaagagctacctttgccccatctgcgacctgtcttttggcgaaaaggaaggcctgatggatcattggaggggatacaaagggaaggacctgtgccaatcatctcatcataaatgtcgagtcattcttggccagtggttgggctttagccacgatgtccctacaatggccggagaagaatggaagcacggaggcgaccagtcaccacccaggatacataccccacgcaggcgaggactgcgcgaaaaggcttgtaagggcgataaaactaaggaggcggtatccattctgaagcataaatag

SEQ ID NO: 304239 - DNA, 1611 bp, Artificial Sequence
  derived and/or modified sequence
atgttcgaacagctgaaaccgatagaaccggttcagaagactctcccctgggtcggtgaagttgctgcaaccctccaggaggccatgaaaagagattgctggcgagaggcacgagttaagaaaaaacctgtgacattcgaggacgtggctgtgaacttcacgcaggaggagtgggactgtctcgatgccagtcagcgtgttctctaccaggatgtcatgtccgaaactttcaaaaatcttacttcggtggcaagaatctttcttcacaaaccggagttgataactaagctcgagcaggaggaggaacagtggcgggagttcgttcatcttccgaatacggagggactgtccgaggggaaaaagaaggagcttcgagaacagcacccaagcctgcgtgatgaaggtacaagcgacgacaaagtgttcctggcttgtaggggcgcaggacaatgtccactcagtgccccagccggtaccatggaccgcactagagtgctacaggcctcccaggcaggcccaccttttttttgttacacctgtgggaagtgttttagccggcgatcttatctttactcccatcagttcgtccataaccctaaattgactaacagctgttcacaatgtggtaagcttttcagatccccaaagagtctttcctaccacaggcggatgcatctgggggagcggccattttgttgcacattgtgtgataaaacctactgcgatgcgagcggtctgagccgccaccggagggtgcatctaggatatcgaccacactcctgcagcgtctgtggcaaatcttttagggaccagtccgagcttaagcggcaccagaagattcaccagaaccaggagcctgtggatggaaatcaggagtgtacgcttcggatccctggcacacaggccgagtttcaaacgccaatcgcacggtctcagcgcagcatccagggactgctggatgtgaatcacgcccctgtggcgaggagccaagaacccattttcaggacagagggacccatggctcagaatcaggcctccgtgctgaagaatcaggccccagtgactcggactcaggcaccaataacgggcactctgtgccaagacgctagatccaactcccaccccgtgaagccctcacggttgaacgtcttctgttgcccacactgcagcctgaccttctctaaaaagagctacctctccagacaccagaaagcccatctgaccgaaccgcctaactactgttttcactgttccaaaagtttctctagcttctcacgcctggtgcggcaccagcagacgcattggaaacagaagagctatctgtgcccgatttgcgacctgtcattcggtgaaaaggaagggctgatggaccattggcgcggttacaaagggaaggacctctgccaatcatctcaccataaatgtcgggtgattctcggccagtggctgggcttctcccatgatgttcctacaatggccggagaagaatggaaacacgggggagatcagtccccgcctagaattcacactccaaggcggcgaggattgcgcgagaaagcatgcaagggcgacaagactaaggaagctgtgagcattctgaaacacaaatag

SEQ ID NO: 304240 - DNA, 1551 bp, Artificial Sequence
  derived and/or modified sequence
atgtttgagcagttgaaacccatcgagccgagggactgctggagggaggcaagagtgaagaaaaagccggtgactttcgaagatgttgctgtaaactttacgcaggaggagtgggactgcttggacgcatcacagcgcgtgctgtaccaggacgttatgtccgagacctttaaaaacctgaccagtgtcgctcggatttttctccataaaccagagctcatcacaaaactggaacaagaagaagagcagtggagggaatttgttcacttgccgaatacggaaggattgtccgaggggaaaaaaaaagagctgcgcgagcagcatccttctctccgggacgaagggactagcgacgacaaagtgtttcttgcctgtcggggagcgggtcagtgccccctcagcgccccagctggcacgatggatcggactcgcgttctgcaggcttcacaggcaggcccaccattcttttgctacacatgtggcaagtgcttcagtcgacgctcatatctctactctcaccagtttgttcacaacccaaagttgacgaattcctgttcacagtgcggcaaactgtttcgatcccccaaatcattgtcctaccacagacgcatgcacctgggtgagcgccctttttgctgcacgctgtgcgataagacatactgtgacgcaagcgggctgtctcggcatcggagggtccatcttggttacagacctcacagctgcagcgtctgtggcaaaagttttcgagaccagtctgagctcaagcgccaccagaaaatacaccagaatcaggagccggttgatggcaaccaggaatgcacacttaggattcctgggacccaggctgaatttcagacccccatcgcacgaagtcagaggagtattcaaggactcctcgatgtcaaccatgctccagtggctcgttctcaggagccgatattcagaactgagggtcctatggcgcagaaccaagcatctgtgctcaagaatcaggcgcctgtgacgaggacccaggcccctatcacggggactctgtgtcaggacgccagatcaaatagtcaccctgtcaagccatcccggctcaatgtgttttgctgcccccactgctctctcactttctcgaaaaagtcatatctgtcacggcaccaaaaggcgcaccttacagagccacctaactattgctttcattgcagcaagtcatttagtagcttcagcagactcgtgaggcaccaacagacacactggaagcagaagtcctatttgtgccctatttgtgacctgtcgttcggcgagaaggaaggcttaatggatcactggcggggttacaaagggaaggacctatgccagtcatcacatcacaagtgccgcgttatactcggccaatggttggggttctctcatgacgtcccaacaatggccggagaagaatggaaacacggcggagatcagagccctccgcgtatccatacaccaaggagaagagggcttagagaaaaagcctgcaagggcgacaaaactaaggaagctgtgagcatccttaaacacaagtag

SEQ ID NO: 304241 - DNA, 1551 bp, Artificial Sequence
  derived and/or modified sequence
atgttcgaacagctgaagcccatcgaaccacgcgattgctggcgcgaggccagagtaaaaaaaaagcctgttacctttgaggacgttgccgtgaactttacccaggaagagtgggattgtctggacgcaagccagcgcgtactgtatcaggatgtcatgtctgagacatttaagaatctcacatccgtggcccgaatctttttacacaagcccgagctcattactaaactggagcaagaggaggagcagtggagagaattcgtgcatttgcctaatactgaagggctgtcggaaggtaagaagaaggagttgcgcgagcagcatccctctctgcgtgacgagggcacctctgatgataaagtgttcctcgcttgccgcggagccggtcagtgtcctctgagtgccccagccggaacaatggaccgcacacgcgtgctgcaggccagccaggcgggtccaccctttttctgctacacctgtgggaaatgcttctccaggcggtcttatctgtattcacatcagttcgtccacaatcccaaacttactaacagctgttcacaatgtgggaagctatttaggtcccctaagagcctttcctaccatcggaggatgcacttgggtgaaagaccgttttgctgtaccctctgtgacaaaacttattgcgacgctagcggattgtctcgacacaggagggttcatctggggtatcgaccccattcttgtagtgtttgcggaaaatcattcagggaccaatctgagcttaagcggcaccagaagatccatcagaatcaggaacctgtcgacggcaatcaggaatgtactttaagaatccctgggacccaggcagaattccagaccccaatcgcccgatctcagaggagtatccagggtcttctagatgtaaatcacgccccagtggcaaggtctcaagaacccatatttcgaaccgagggccctatggcccaaaatcaggccagcgtcctaaagaatcaagcccctgtgacgagaactcaggcccctataactggaaccctgtgccaggatgctaggtctaacagtcacccagtgaagccatctaggctcaatgtattctgctgccctcactgctcactcaccttttcgaaaaagagctacctgtcccgacaccaaaaggcacatctaactgaacctccaaattattgttttcactgtagcaagtctttctcttccttctcacggctggttaggcatcagcagactcactggaagcagaagagctacctgtgtcccatctgcgacctgagttttggggaaaaagagggtctcatggaccattggaggggctataagggcaaagacctgtgccagagttcacatcataagtgtagggttatattgggtcaatggttggggttctcgcacgatgtgcctactatggccggagaggaatggaagcacggtggcgatcagtcacctcccaggattcacacccccaggcggagaggcctgcgcgagaaagcttgtaagggggataagacaaaggaggcagtgagcatccttaagcataaatag

SEQ ID NO: 304242 - DNA, 1611 bp, Artificial Sequence
  derived and/or modified sequence
atgttcgagcagttaaaacccattgagccggtacagaaaacgttgccatgggtcggtgaggtggcagccacgctgcaagaagccatgaaaagggactgttggagagaagctcgagtaaaaaagaaacctgtcacttttgaggacgtggctgtcaactttacccaagaggagtgggattgcttagatgcctcacagagagtgctataccaagacgtaatgtccgaaaccttcaagaatctcaccagcgtggccaggatcttcctgcataaacccgagttgatcaccaaactggagcaggaggaagaacagtggcgggaattcgtgcatttgccaaacacagaggggctatccgaggggaagaagaaggaattacgagaacaacatccgagcttaagagacgaaggtacttcagacgacaaggtgttcttagcctgtcgaggggcaggacagtgccctctatcagctcccgctggcaccatggatagaacccgagtgcttcaggcctcccaagcaggaccgcctttcttctgttacacctgtggaaagtgttttagccgaagatcctacctgtattcccaccagttcgttcacaatcccaaactcacaaactcctgcagccagtgcggaaaacttttccgctctcctaagtctcttagctatcaccggcgtatgcatctgggtgaacggcctttttgttgcacactgtgcgacaaaacatattgcgatgctagcggactttccaggcacagacgtgttcacctgggatacagaccacattcctgcagcgtgtgcggcaaatcatttagggatcagtctgagcttaaaagacaccagaagattcaccagaaccaggagcccgtagacggcaaccaagagtgtactctccggatccccggtacacaggcagagttccagacccctatcgctcgctctcagcgcagcattcaggggctgttggatgtgaaccacgcgcctgttgctcggtcccaggagcctatcttccgtaccgaggggccaatggcccaaaatcaggcaagtgtcctcaagaatcaagccccagtaacacggacccaggcccctataacgggtacactgtgccaggatgctaggagcaattctcaccccgttaaacctagcaggcttaacgtcttttgttgcccccactgctcactgaccttttcaaaaaagagttacttatcccgtcatcagaaggcccacctgaccgagccacccaactattgtttccattgctcaaagtccttttctagcttttctcgtttggtcaggcaccagcagacgcactggaagcagaaatcatacctctgtcctatctgcgatctctccttcggcgagaaagagggattaatggaccactggcggggatacaagggcaaagatctttgtcagagcagccatcacaagtgccgggtgattttaggccagtggcttggattttcacacgatgtacccactatggcaggtgaagaatggaaacacggaggagatcagtcgccccctagaatccacacaccccgtaggcgcggattgagagagaaagcttgcaagggcgataaaactaaggaggccgtgtccatcctgaagcacaaatag

SEQ ID NO: 304243 - DNA, 1659 bp, Artificial Sequence
  derived and/or modified sequence
atgtttgaacagctgaagccaatcgaacctagagattgctggagggaggcacgggtgaagaagaagccagtcacctttgaggatgtggcagtgaatttcacccaggaagagtgggactgtctagatgccagccagagggtcctttaccaggatgttatgtcggaaacctttaagaatctaacatctgtggccagaatctttctgcataagccagagctaatcaccaagcttgagcaagaagaggaacagtggagagagtttgtccatctcccaaacacagaaggcctttcagaaggcaagaagaaagagcttcgagaacaacatcccagtctgagagatgaggggactagtgatgacaaggtcttccttgcatgcagaggggccggccagtgccccctatctgccccagctgggactatggacaggacccgggtgcttcaagcatcccaggctgggccaccctttttttgctacacctgtggcaaatgtttcagcaggcgctcctacctctatagccaccagtttgttcacaatcccaagctgactaacagctgcagtcagtgtgggaagttgtttcggagccccaagtccctcagctatcacagacgcatgcatcttggggagaggcccttctgttgcacgctctgtgacaagacctactgtgatgcttctggactaagtcgtcaccgccgcgtccatctgggttaccggccccattcatgctctgtgtgtgggaagagcttccgggaccagtctgagctcaaacgccaccagaagatacaccaaaaccaggagccagtggatggaaaccaggagtgtactttgaggattccaggcacccaggctgaattccagacacccatcgccagaagccagaggtccatccaggggcttttggatgtgaaccatgcaccagtggccaggtcccaggaacccatatttagaactgagggtcctatggcccagaaccaggcatctgtacttaagaaccaagcacctgtgaccaggacccaggcacccatcactggaaccctctgtcaggatgccagatccaactctcatccagtgaagccctcaagactcaatgtcttctgttgcccccattgttctttgacttttagcaagaaatcctatctctccagacaccagaaggcccacctcacagagccgcccaactactgcttccattgcagcaagtctttcagctcattttccaggctggtcagacaccagcagacccactggaagcagaagagctacctttgccctatctgtgacctctcctttggggagaaagagggccttatggatcactggaggggctataaaggcaaggacctgtgccagagcagccaccataaatgccgggtgatcctgggccagtggcttggcttctctcatgatgtccccactatggctggggaggaatggaagcatggaggtgatcaatctccccccaggatccatacccccaggagaagaggcctaagagagaaggcctgcaaaggagacaaaacaaaggaggcagtgagcatcttgaaacataaataaatggcctttctgactgagctctttctttgtgtttagttttcctgaggactgacctctggggtaatgaggctggagtagagggagacaggtgcgtggataaggaaggaa

SEQ ID NO: 304244 - DNA, 1980 bp, Artificial Sequence
  derived and/or modified sequence
tccccgggagaccctgtgcccctaaatcgcggtccactgcgcgcgtcaggtttctagaagcagggtagaacagacggcagacacctagcccaggctggtgttgttactaaacaatggcagctggtgagccaagggtgaccagggccctgaactcggtggcccagctttgagggaagcaaaattgttctcaattgtggaagaggagaatttggacagcagaacaaaaaaggaagacagcctcttggagcagatacatttgtcacaggaagccacatcaaaccctggggcctttgctgggcctctccatctgcccagttactgggaggtagatagccccaggaaggaatccagtcaggcctgggcaccaggccaggagtggataaagctagaaagagacaccacagaagagaagatgtttgaacagctgaagccaatcgaacctagagattgctggagggaggcacgggtgaagaagaagccagtcacctttgaggatgtggcagtgaatttcacccaggaagagtgggactgtctagatgccagccagagggtcctttaccaggatgttatgtcggaaacctttaagaatctaacatctgtggccagaatctttctgcataagccagagctaatcaccaagcttgagcaagaagaggaacagtggagagagtttgtccatctcccaaacacagaaggcctttcagaaggcaagaagaaagagcttcgagaacaacatcccagtctgagagatgaggggactagtgatgacaaggtcttccttgcatgcagaggggccggccagtgccccctatctgccccagctgggactatggacaggacccgggtgcttcaagcatcccaggctgggccaccctttttttgctacacctgtggcaaatgtttcagcaggcgctcctacctctatagccaccagtttgttcacaatcccaagctgactaacagctgcagtcagtgtgggaagttgtttcggagccccaagtccctcagctatcacagacgcatgcatcttggggagaggcccttctgttgcacgctctgtgacaagacctactgtgatgcttctggactaagtcgtcaccgccgcgtccatctgggttaccggccccattcatgctctgtgtgtgggaagagcttccgggaccagtctgagctcaaacgccaccagaagatacaccaaaaccaggagccagtggatggaaaccaggagtgtactttgaggattccaggcacccaggctgaattccagacacccatcgccagaagccagaggtccatccaggggcttttggatgtgaaccatgcaccagtggccaggtcccaggaacccatatttagaactgagggtcctatggcccagaaccaggcatctgtacttaagaaccaagcacctgtgaccaggacccaggcacccatcactggaaccctctgtcaggatgccagatccaactctcatccagtgaagccctcaagactcaatgtcttctgttgcccccattgttctttgacttttagcaagaaatcctatctctccagacaccagaaggcccacctcacagagccgcccaactactgcttccattgcagcaagtctttcagctcattttccaggctggtcagacaccagcagacccactggaagcagaagagctacctttgccctatctgtgacctctcctttggggagaaagagggccttatggatcactggaggggctataaaggcaaggacctgtgccagagcagccaccataaatgccgggtgatcctgggccagtggcttggcttctctcatgatgtccccactatggctggggaggaatggaagcatggaggtgatcaatctccccccaggatccatacccccaggagaagaggcctaagagagaaggcctgcaaaggagacaaaacaaaggaggcagtgagcatcttgaaacataaataaatggcctttctgactga

SEQ ID NO: 304245 - DNA, 1980 bp, Artificial Sequence
  derived and/or modified sequence
tccccgggagaccctgtgcccctaaatcgcggtccactgcgcgcgtcaggtttctagaagcagggtagaacagagggcagacacctagcccaggctggtgttgttactaaacaatggcagctggtgagccaagggtgaccagggccctgaactctgtggcccagctttgagggaagcaaaattgttctcaattgtggaagaggagaatttggacagcagaacaaaaaaggaagacagcctcttggagcagatacatttgtcacaggaagccacatcaaaccctggggcctttgctgggcctctccatctgcccagttactgggaggtagatagccccaggaaggaatccagtcaggcctgggcaccaggccaggagtggataaagctagaaagagacaccacagaagagaagatgtttgaacagctgaagccaatcgaacctagagattgctggagggaggcacgggtgaagaagaagccagtcacctttgaggatgtggcagtgaatttcacccaggaagagtgggactgtctagatgccagccagagggtcctttaccaggatgttatgtcggaaacctttaagaatctaacatctgtggccagaatctttctgcataagccagagctaatcaccaagcttgagcaagaagaggaacagtggagagagtttgtccatctcccaaacacagaaggcctttcagaaggcaagaagaaagagcttcgagaacaacatcccagtctgagagatgaggggactagtgatgacaaggtcttccttgcatgcagaggggccggccagtgccccctatctgccccagctgggactatggacaggacccgggtgcttcaagcatcccaggctgggccaccctttttttgctacacctgtggcaaatgtttcagcaggcgctcctacctctatagccaccagtttgttcacaatcccaagctgactaacagctgcagtcagtgtgggaagttgtttcggagccccaagtccctcagctatcacagacgcatgcatcttggggagaggcccttctgttgcacgctctgtgacaagacctactgtgatgcttctggactaagtcgtcaccgccgcgtccatctgggttaccggccccattcatgctctgtgtgtgggaagagcttccgggaccagtctgagctcaaacgccaccagaagatacaccaaaaccaggagccagtggatggaaaccaggagtgtactttgaggattccaggcacccaggctgaattccagacacccatcgccagaagccagaggtccatccaggggcttttggatgtgaaccatgcaccagtggccaggtcccaggaacccatatttagaactgagggtcctatggcccagaaccaggcatctgtacttaagaaccaagcacctgtgaccaggacccaggcacccatcactggaaccctctgtcaggatgccagatccaactctcatccagtgaagccctcaagactcaatgtcttctgttgcccccattgttctttgacttttagcaagaaatcctatctctccagacaccagaaggcccacctcacagagccgcccaactactgcttccattgcagcaagtctttcagctcattttccaggctggtcagacaccagcagacccactggaagcagaagagctacctttgccctatctgtgacctctcctttggggagaaagagggccttatggatcactggaggggctataaaggcaaggacctgtgccagagcagccaccataaatgccgggtgatcctgggccagtggcttggcttctctcatgatgtccccactatggctggggaggaatggaagcatggaggtgatcaatctccccccaggatccatacccccaggagaagaggcctaagagagaaggcctgcaaaggagacaaaacaaaggaggcagtgagcatcttgaaacataaataaatggcctttctgactga

SEQ ID NO: 304246 - DNA, 1870 bp, Artificial Sequence
  derived and/or modified sequence
acaggaagccacatcaaaccctggggcctttgctgggcctctccatctgcccagttactgggaggtagatagccccaggaaggaatccagtcaggcctgggcaccaggccaggagtggataaagctagaaagagacaccacagaagagaagatgtttgaacagctgaagccaatcgaacctgtacagaagacgctcccatgggtgggcgaggtagctgccaccctgcaggaagccatgaagagagattgctggagggaggcacgggtgaagaagaagccagtcacctttgaggatgtggcagtgaatttcacccaggaagagtgggactgtctagatgccagccagagggtcctttaccaggatgttatgtcggaaacctttaagaatctaacatctgtggccagaatctttctgcataagccagagctaatcaccaagcttgagcaagaagaggaacagtggagagagtttgtccatctcccaaacacagaaggcctttcagaaggcaagaagaaagagcttcgagaacaacatcccagtctgagagatgaggggactagtgatgacaaggtcttccttgcatgcagaggggccggccagtgccccctatctgccccagctgggactatggacaggacccgggtgcttcaagcatcccaggctgggccaccctttttttgctacacctgtggcaaatgtttcagcaggcgctcctacctctatagccaccagtttgttcacaatcccaagctgactaacagctgcagtcagtgtgggaagttgtttcggagccccaagtccctcagctatcacagacgcatgcatcttggggagaggcccttctgttgcacgctctgtgacaagacctactgtgatgcttctggactaagtcgtcaccgccgcgtccatctgggttaccggccccattcatgctctgtgtgtgggaagagcttccgggaccagtctgagctcaaacgccaccagaagatacaccaaaaccaggagccagtggatggaaaccaggagtgtactttgaggattccaggcacccaggctgaattccagacacccatcgccagaagccagaggtccatccaggggcttttggatgtgaaccatgcaccagtggccaggtcccaggaacccatatttagaactgagggtcctatggcccagaaccaggcatctgtacttaagaaccaagcacctgtgaccaggacccaggcacccatcactggaaccctctgtcaggatgccagatccaactctcatccagtgaagccctcaagactcaatgtcttctgttgcccccattgttctttgacttttagcaagaaatcctatctctccagacaccagaaggcccacctcacagagccgcccaactactgcttccattgcagcaagtctttcagctcattttccaggctggtcagacaccagcagacccactggaagcagaagagctacctttgccctatctgtgacctctcctttggggagaaagagggccttatggatcactggaggggctataaaggcaaggacctgtgccagagcagccaccataaatgccgggtgatcctgggccagtggcttggcttctctcatgatgtccccactatggctggggaggaatggaagcatggaggtgatcaatctccccccaggatccatacccccaggagaagaggcctaagagagaaggcctgcaaaggagacaaaacaaaggaggcagtgagcatcttgaaacataaataaatggcctttctgactgagctctttctttgtgtttagttttcctgaggactgacctctggggtaatgaggctggagtagagggagacaggtgcgtggataaggaaggaa

SEQ ID NO: 304247 - DNA, 1356 bp, Artificial Sequence
  derived and/or modified sequence
gccggcggatcacctgagtctctcctgttcttccagaagccagtcacctttgaggatgtggcagtgaatttcacccaggaagagtgggactgtctagatgccagccagagggtcctttaccaggatgttatgtcggaaacctttaagaatctaacatctgtggccagaatctttctgcataagccagagctaatcaccaagcttgagcaagaagaggaacagtggagagagacccgggtgcttcaagcatcccaggctgggccaccctttttttgctacacctgtggcaaatgtttcagcaggcgctcctacctctatagccaccagtttgttcacaatcccaagctgactaacagctgcagtcagtgtgggaagttgtttcggagccccaagtccctcagctatcacagacgcatgcatcttggggagaggcccttctgttgcacgctctgtgacaagacctactgtgatgcttctggactaagtcgtcaccgccgcgtccatctgggttaccggccccattcatgctctgtgtgtgggaagagcttccgggaccagtctgagctcaaacgccaccagaagatacaccaaaaccaggagccagtggatggaaaccaggagtgtactttgaggattccaggcacccaggctgaattccagacacccatcgccagaagccagaggtccatccaggggcttttggatgtgaaccatgcaccagtggccaggtcccaggaacccatatttagaactgagggtcctatggcccagaaccaggcatctgtacttaagaaccaagcacctgtgaccaggacccaggcacccatcactggaaccctctgtcaggatgccagatccaactctcatccagtgaagccctcaagactcaatgtcttctgttgcccccattgttctttgacttttagcaagaaatcctatctctccagacaccagaaggcccacctcacagagccgcccaactactgcttccattgcagcaagtctttcagctcattttccaggctggtcagacaccagcagacccactggaagcagaagagctacctttgccctatctgtgacctctcctttggggagaaagagggccttatggatcactggaggggctataaaggcaaggacctgtgccagagcagccaccataaatgccgggtgatcctgggccagtggcttggcttctctcatgatgtccccactatggctggggaggaatggaagcatggaggtgatcaatctccccccaggatccatacccccaggagaagaggcctaagagagaaggcctgcaaaggagacaaaacaaaggaggcagtgagcatcttgaaacataaataa

SEQ ID NO: 304248 - protein, 1074 aa, Artificial Sequence
  derived and/or modified sequence
MVYFGSSQDEEEVEEEDDETEDVKTATNNASSSCQSTPRKGKTHKHVHNGHVFNGSSRSTREKEPVQKHKSKEATPAKEKHSDHRADSRREQASANHPAAAPSTGSSAKGLAATHHHPPLHRSAQDLRKQVSKVNGVTRMSSLGAGVTSAKKMREVRPSPSKTVKYTATVTKGAVTYTKAKRELVKDTKPNHHKPSSAVNHTISGKTESSNAKTRKQVLSLGGASKSTGPAVNGLKVSGRLNPKSCTKEVGGRQLREGLQLREGLRNSKRRLEEAHQAEKPQSPPKKMKGAAGPAEGPGKKAPAERGLLNGHVKKEVPERSLERNRPKRATAGKSTPGRQAHGKADSASCENRSTSQPESVHKPQDSGKAEKGGGKAGWAAMDEIPVLRPSAKEFHDPLIYIESVRAQVEKFGMCRVIPPPDWRPECKLNDEMRFVTQIQHIHKLGRRWGPNVQRLACIKKHLKSQGITMDELPLIGGCELDLACFFRLINEMGGMQQVTDLKKWNKLADMLRIPRTAQDRLAKLQEAYCQYLLSYDSLSPEEHRRLEKEVLMEKEILEKRKGPLEGHTENDHHKFHPLPRFEPKNGLIHGVAPRNGFRSKLKEVGQAQLKTGRRRLFAQEKEVVKEEEEDKGVLNDFHKCIYKGRSVSLTTFYRTARNIMSMCFSKEPAPAEIEQEYWRLVEEKDCHVAVHCGKVDTNTHGSGFPVGKSEPFSRHGWNLTVLPNNTGSILRHLGAVPGVTIPWLNIGMVFSTSCWSRDQNHLPYIDYLHTGADCIWYCIPAEEENKLEDVVHTLLQANGTPGLQMLESNVMISPEVLCKEGIKVHRTVQQSGQFVVCFPGSFVSKVCCGYSVSETVHFATTQWTSMGFETAKEMKRRHIAKPFSMEKLLYQIAQAEAKKENGPTLSTISALLDELRDTELRQRRQLFEAGLHSSARYGSHDGSSTVADGKKKPRKWLQLETSERRCQICQHLCYLSMVVQENENVVFCLECALRHVEKQKSCRGLKLMYRYDEEQIISLVNQICGKVSGKNGSIENCLSKPTPKRGPRKRATVDVPPSRLSASSSSKSASSSS

SEQ ID NO: 304249 - DNA, 90 bp, Artificial Sequence
  derived and/or modified sequence
aagatagagttgaaacagtggacaattaaagagtaatttggaagaatggtgaaattacagccatgctttgaatcaggcgggttcactggc

SEQ ID NO: 304250 - protein, 507 aa, Artificial Sequence
  derived and/or modified sequence
MKRTMHPKCPPLATMLVLQILKKGRRGKGSPALPNSMVYFGSSQDEEEVEEEDDETEDVKTATNNASSSCQSTPRKGKTHKHVHNGHVFNGSSRSTREKEPVQKHKSKEATPAKEKHSDHRADSRREQASANHPAAAPSTGSSAKGLAATHHHPPLHRSAQDLRKQVSKVNGVTRMSSLGAGVTSAKKMREVRPSPSKTVKYTATVTKGAVTYTKAKRELVKDTKPNHHKPSSAVNHTISGKTESSNAKTRKQVLSLGGASKSTGPAVNGLKVSGRLNPKSCTKEVGGRQLREGLQLREGLRNSKRRLEEAHQAEKPQSPPKKMKGAAGPAEGPGKKAPAERGLLNGHVKKEVPERSLERNRPKRATAGKSTPGRQAHGKADSASCENRSTSQPESVHKPQDSGKAEKGGGKAGWAAMDEIPVLRPSAKEFHDPLIYIESVRAQVEKFGMCRVIPPPDWRPECKLNDEMRFVTQIQHIHKLGRRWGPNVQRLACIKKHLKSLGGCGS

SEQ ID NO: 304251 - DNA, 1919 bp, Artificial Sequence
  derived and/or modified sequence
aacttccagaagatcaaggggaccattctaaggtgccccgggaataggcggctctccccggggccgggcgtcctggggcactcctacccagcagcccggctgcaggatgacagtgatgggattccgtggtcagaagaacgggtggtacgtaaagtcctttatttgtctctgaaggagttcaagaattcccagaagaggcagcatgcggaaggcattgctgggagcctgaaaactgtgaatgggctccttggtaatgaccagtctaagggattaggaccagcatcagaacagtcagagaatgaaaaggacgatgcatcccaagtgtcctccactagcaacgatgttagttcttcagattttgaagaagggccgtcgaggaaaaggttctcctgcgctgcccaacagcatggtgtattttggaagctctcaggatgaggaggaagtcgaggaggaagatgatgagacagaagacgtcaaaacagccaccaacaatgcttcatcttcatgccagtcgacccccaggaaaggaaaaacccacaaacatgttcacaacgggcatgttttcaatggttccagcaggtcaacacgggagaaggaacctgttcaaaaacacaaaagcaaagaggccactcccgcaaaggagaagcacagcgatcaccgggctgacagccgccgggagcaggcttcagctaaccaccccgcagcggccccctccacgggttcctcggccaaggggcttgctgccacccatcaccacccccctctgcatcggtcggctcaggacttacggaaacaggtttctaaggtaaacggagtcactcgaatgtcatctctgggtgcaggtgtaaccagtgccaaaaagatgcgcgaggtcagaccttcaccatccaaaactgtgaagtacactgccacggtgacgaagggggctgtcacatacaccaaagccaagagagaactggtcaaggacaccaaacccaatcaccacaagcccagttccgctgtcaaccacacaatctcagggaaaactgaaagtagcaatgcaaaaacccgcaaacaggtgctatccctcgggggggcgtccaagtccactgggcccgccgtcaatggcctcaaggtcagtggcaggttgaacccaaagtcatgcactaaggaggtgggggggcggcagctgcgggagggcctgcagctgcgggaggggctgcggaactccaagaggagactggaagaggcacaccaggcggagaagccgcagtcgccccccaagaagatgaaaggggcggctggccccgccgaaggccctggcaagaaggccccggccgagagaggtctgctgaacggacacgtgaagaaggaagtgccggagcgcagtctggagaggaatcggccgaagcgggccacggccgggaagagcacgccaggcagacaagcacatggcaaggcggacagcgcctcctgtgaaaatcgttctacctcgcaaccggagtccgtgcacaagccgcaggactcgggcaaggccgagaagggcggcggcaaggccgggtgggcggccatggacgagatccccgtcctcaggccctccgccaaggagttccacgatccgctcatctacatcgagtcggtccgcgctcaggtggagaagttcgggatgtgcagggtgatcccccctccggactggcggcccgagtgcaagctcaacgatgagatgcggtttgtcacgcagattcagcacatccacaagctgggccggcgctggggccccaacgtgcagcggctggcctgcatcaagaagcacctcaaatctctgggcggttgtggcagctgaaggcggacgttgtttcctaaccataggtggaacgaggagacgggagcgagtgggctctccaccagcacatcactatgcatctgttccaggaaagaag

SEQ ID NO: 304252 - DNA, 1524 bp, Artificial Sequence
  derived and/or modified sequence
atgaaaagaactatgcaccctaagtgcccacctttggctacaatgctcgtgctgcagattttgaaaaagggaagaagaggaaagggttctcccgcccttcctaacagcatggtttacttcggctccagtcaggacgaggaggaagtggaagaggaagatgatgaaaccgaggatgttaagaccgccactaataatgcaagcagcagttgccagagcacacccaggaaggggaagacacataaacatgtgcacaacggacacgtgtttaatggtagcagcagaagcactagggagaaagagcctgtgcaaaagcacaaatctaaagaagccacacccgccaaagagaaacatagtgaccatagagctgactcccggcgcgagcaggcttcggcaaatcatcctgctgccgcccccagcaccggatcttctgccaagggactggcagcaactcatcatcacccccccttgcatcggagtgcccaagacctgaggaagcaggtgagcaaggttaatggggtcaccaggatgagctcgcttggtgcaggggtcaccagcgccaaaaagatgcgcgaggtcagaccatcacctagtaaaaccgtaaagtacactgctacagtgactaagggtgccgtcacgtacactaaggctaaacgggagctggtaaaggatactaaaccaaatcaccataagccttcatcagctgttaaccataccatatccggaaaaacagaatcttcaaatgcgaagaccaggaagcaagttctcagtcttggtggtgcgtctaagagtactggccccgcggtgaacggacttaaggtcagcggacggctcaacccgaagtcctgcactaaagaggtcggcggtaggcagttgcgggagggactgcagctgcgggaaggattaagaaactcaaagcgccgactagaagaggcccaccaggctgagaaacctcaaagtccccccaagaagatgaaaggtgccgctggacccgcagaggggcccggtaagaaagcccccgctgaacgtgggctgctcaacggccacgtgaagaaggaagtaccggaacgctctctcgaacggaatcgcccaaagagggctacagctgggaaatcaactccaggtaggcaagcgcacggcaaagcagattccgcaagttgtgagaatcgatccactagccaacctgaaagcgtgcacaagccacaggattctgggaaggctgagaagggcggggggaaagcaggatgggccgccatggatgaaattcctgtgctgcgcccgagcgccaaagaatttcatgatcctcttatatacattgaaagcgtccgcgctcaggtagagaagtttggcatgtgcagggtgataccgcctccggactggaggccagaatgcaagcttaacgacgagatgagatttgtgactcagatccaacacattcataagctggggcggcgatggggtcctaatgtccagcgtctagcttgcatcaagaagcatttgaaaagccttggcggctgtgggagctag

SEQ ID NO: 304253 - DNA, 1524 bp, Artificial Sequence
  derived and/or modified sequence
atgaagaggaccatgcaccccaagtgcccccccctggccaccatgctggtgctgcagatcctgaagaagggcagaagaggcaagggcagccctgccctgcccaacagcatggtgtacttcggcagcagccaggatgaggaggaggtggaggaggaggatgatgaaacagaagatgtgaagacagccaccaacaatgccagcagcagctgccagagcacccccaggaagggcaagacccacaagcacgtgcacaatggacatgtgttcaacggcagcagccgcagcacccgggagaaggagcctgtgcagaagcacaagagcaaggaggccaccccagccaaggagaagcacagcgaccacagagctgacagcagaagagagcaggccagcgccaaccaccctgctgctgcccccagcacaggcagcagcgccaagggcctggccgccacccaccaccacccccccctgcacaggtctgcccaggacctgaggaagcaggtgtccaaggtgaatggagtgaccaggatgagcagcctgggcgctggggtgaccagcgccaagaagatgagggaggtgcggcccagccccagcaagacagtgaagtacacagccaccgtgaccaagggagctgtgacctacaccaaggccaagcgggagctggtgaaggacaccaagcccaaccaccacaagcccagcagcgctgtgaaccacaccatcagcggcaagacagagagcagcaatgccaagaccaggaagcaggtgctgagcctgggcggggccagcaagagcacaggccctgctgtgaatggcctgaaggtgtctggccgcctgaaccccaagagctgcaccaaggaggtgggcggccggcagctgcgggagggcctgcagctgcgggagggcctgaggaacagcaagaggcggctggaggaggcccaccaggccgagaagccccagagcccccccaagaagatgaagggagctgctggccctgctgagggccctgggaagaaggccccagctgagcggggcctgctgaatggccacgtgaagaaggaggtgcctgagaggagcctggagaggaaccggcccaagagggccacagctgggaagagcaccccaggccggcaggcccacggcaaggctgacagcgccagctgtgaaaatagaagcaccagccagcctgagagcgtgcacaagccccaggacagcggcaaggccgagaagggcggcggcaaggccggctgggccgccatggatgagatccctgtgctgcggcccagcgccaaggagttccatgaccccctcatctacatcgagagcgtgcgggcccaggtggagaagtttggcatgtgcagggtcatccccccaccagactggaggcctgagtgcaagctgaatgatgagatgagatttgtgacccagatccagcacatccacaagctgggccgccgctggggccccaacgtgcagaggctggcctgcatcaagaagcacctgaagagcctgggcggctgcggcagctag

SEQ ID NO: 304254 - DNA, 1524 bp, Artificial Sequence
  derived and/or modified sequence
atgaagcggaccatgcaccccaagtgcccccccctggccaccatgttggtccttcaaattttgaaaaaaggccgacgaggaaagggctctcccgccttacctaattccatggtctattttggaagctcacaggatgaggaggaagtcgaggaagaagacgatgagaccgaggatgtcaaaaccgctactaacaacgcgagttcgagctgtcagtccaccccccggaaggggaaaacccacaagcacgtccataacggacacgtctttaatgggtcatctcgtagcactcgggaaaaagagcctgtacagaagcataagtcaaaagaagccacacctgccaaggagaagcattccgatcacagagcagatagccggagggaacaggcctctgccaatcacccggcagctgcgccatctaccgggtcatcagccaagggattagcagccacccaccaccacccaccccttcataggtctgctcaggatctgcgaaagcaggtaagtaaggtgaacggtgtcactcggatgtcatcactgggggcaggggttactagcgccaagaaaatgcgcgaagtcagaccatctccgtctaaaacagtgaagtacacagctaccgtgactaaaggtgcagtgacctacaccaaggcaaagcgcgaattagtgaaagacacaaaaccaaaccaccacaagcctagctccgctgttaaccatactatctctggaaagacagaatcctctaatgccaagactcggaaacaggtgctcagtctgggtggagcctctaagtcaaccggcccagccgtgaatggtttgaaggtttcaggccgcctcaatccaaaatcatgcactaaggaggtgggaggtcggcaactacgtgaagggctgcagctaagagagggtttgcggaactctaaacgccgcttagaagaggcccaccaggccgaaaaacctcagagtccccctaagaaaatgaaaggagcggctggacccgccgaaggacccggaaaaaaggcgccagcagagagggggctgcttaacggccacgttaagaaggaagtgcccgaaagatcattggagcgtaaccgccccaagagagcaacggctggcaaaagcacccccggccggcaggcacacgggaaagccgatagcgcatcttgcgagaatagaagcacctctcagccggagagcgtacacaaaccccaggactccggaaaggccgagaagggaggtggaaaggccggttgggcagccatggacgagatccctgtgctgcgtccctccgccaaggagttccacgaccccttgatttatattgagagcgtgcgcgcccaggtggaaaagtttggaatgtgcagggttattcctccacctgactggcggcctgaatgcaagctaaatgatgagatgagatttgtgacccagatccagcacatccataagttgggccggagatggggtccaaatgttcagaggctcgcctgcatcaagaagcacctgaaaagtctaggagggtgcggcagctag

SEQ ID NO: 304255 - DNA, 1524 bp, Artificial Sequence
  derived and/or modified sequence
atgaaacgcactatgcacccaaaatgcccccctttggcaactatgctggtgctccagatccttaaaaaagggaggcgcggtaaaggcagccctgccctgccgaattctatggtatactttggcagcagtcaggatgaggaggaagtggaggaggaggacgatgaaactgaagacgtaaaaacggctactaataacgcctctagctcttgccagtctacccctaggaagggaaagacccacaaacacgtgcacaatgggcatgtctttaacggctcatcccgctcaacgagagagaaggagcctgtgcagaaacataaaagcaaagaagctacacctgcaaaggagaaacattccgatcaccgcgcagactccaggcgcgaacaggcgtctgccaaccatcccgcagctgcaccgtctaccggctccagcgccaaaggactggcagccacccatcatcatccaccattacatcgatcagcccaggacctgcgaaaacaggtgtctaaggtgaacggggtgacccggatgagttctctcggagccggagtgacttcagcgaagaagatgcgagaggtgcggccatctcctagcaaaaccgtgaaatataccgctacggtgactaagggggcagtcacttatacaaaggctaagcgtgaactcgtgaaagacaccaagcctaaccatcacaagcccagctcagcagtgaatcacaccatctccgggaagaccgaatcgagcaatgcaaaaacccgcaagcaggtgctttccctggggggtgcctctaaatccacaggccctgcagttaacggattgaaggtatcaggcaggcttaatccaaaaagctgtaccaaagaggtgggcggacgacagttgcgcgaaggcctgcaattacgtgaaggcctacgcaattccaaacgccgtctcgaagaggctcatcaagccgagaagccccagtctccgcctaaaaaaatgaaaggtgccgctggccctgcagaagggcctggcaagaaggcgcctgcggaaagaggtttacttaacggtcacgtcaagaaagaggtgcccgagagaagtttagagcgcaatcggcctaaaagagccaccgcaggcaagagtacacctggcaggcaggctcacgggaaggccgattctgcgtcttgcgaaaataggagcacaagtcagcccgagtcagtgcacaaaccccaagattcaggaaaggcggaaaaggggggtggtaaagccggatgggcagctatggacgaaatccctgtgcttcggcctagtgctaaagagtttcatgatccccttatttacatcgagtccgtgcgcgctcaggtagaaaaattcgggatgtgtagggttattcctccccctgattggcggcctgagtgcaagctaaacgatgagatgcgcttcgtgacccagatccagcatatccacaaacttggtaggcgttggggcccaaacgtgcagcggctagcgtgtattaaaaagcatctgaagtctttggggggatgcggaagctag

SEQ ID NO: 304256 - DNA, 1524 bp, Artificial Sequence
  derived and/or modified sequence
atgaagagaaccatgcaccccaagtgcccccccctggccaccatgctggtgctgcagatcctgaagaagggcagaagaggcaagggcagccccgccctgcccaacagcatggtgtacttcggcagcagccaggacgaggaggaggtggaggaggaggacgacgagaccgaggacgtgaagaccgccaccaacaacgccagcagcagctgccagagcacccccagaaagggcaagacccacaagcacgtgcacaacggccacgtgttcaacggcagcagcagaagcaccagagagaaggagcccgtgcagaagcacaagagcaaggaggccacccccgccaaggagaagcacagcgaccacagagccgacagcagaagagagcaggccagcgccaaccaccccgccgccgcccccagcaccggcagcagcgccaagggcctggccgccacccaccaccacccccccctgcacagaagcgcccaggacctgagaaagcaggtgagcaaggtgaacggcgtgaccagaatgagcagcctgggcgccggcgtgaccagcgccaagaagatgagagaggtgagacccagccccagcaagaccgtgaagtacaccgccaccgtgaccaagggcgccgtgacctacaccaaggccaagagagagctggtgaaggacaccaagcccaaccaccacaagcccagcagcgccgtgaaccacaccatcagcggcaagaccgagagcagcaacgccaagaccagaaagcaggtgctgagcctgggcggcgccagcaagagcaccggccccgccgtgaacggcctgaaggtgagcggcagactgaaccccaagagctgcaccaaggaggtgggcggcagacagctgagagagggcctgcagctgagagagggcctgagaaacagcaagagaagactggaggaggcccaccaggccgagaagccccagagcccccccaagaagatgaagggcgccgccggccccgccgagggccccggcaagaaggcccccgccgagagaggcctgctgaacggccacgtgaagaaggaggtgcccgagagaagcctggagagaaacagacccaagagagccaccgccggcaagagcacccccggcagacaggcccacggcaaggccgacagcgccagctgcgagaacagaagcaccagccagcccgagagcgtgcacaagccccaggacagcggcaaggccgagaagggcggcggcaaggccggctgggccgccatggacgagatccccgtgctgagacccagcgccaaggagttccacgaccccctgatctacatcgagagcgtgagagcccaggtggagaagttcggcatgtgcagagtgatccccccccccgactggagacccgagtgcaagctgaacgacgagatgagattcgtgacccagatccagcacatccacaagctgggcagaagatggggccccaacgtgcagagactggcctgcatcaagaagcacctgaagagcctgggcggctgcggcagctag

SEQ ID NO: 304257 - DNA, 222 bp, Artificial Sequence
  derived and/or modified sequence
atgcagttcgccgactggctgcaccccagcggctggaccatcgagatcctgaacgcctacggcatgggcgacagaaagagaaccaacagcatgagcaaggaggccttcacccccgagcagctgcacctggagaaggagctgggcgagatgagactgagacccaccgtgctgcacagccagaccgaccaccagggcttcagacccatccccatgatgcagtag

SEQ ID NO: 304258 - DNA, 222 bp, Artificial Sequence
  derived and/or modified sequence
atgcagtttgctgactggctgcaccccagcggctggaccatcgagatcctgaatgcctacggcatgggagacaggaagaggaccaacagcatgagcaaggaggccttcaccccagagcagctgcacctggagaaggagctgggggagatgaggctgcggcccaccgtgctgcacagccagacagaccaccagggcttccggcccatccccatgatgcagtag

SEQ ID NO: 304259 - DNA, 222 bp, Artificial Sequence
  derived and/or modified sequence
atgcagttcgccgactggctgcaccccagcggctggaccatcgagatattgaatgcctatgggatgggggataggaagagaaccaacagtatgtctaaggaagcctttactcccgagcagttacacctagaaaaagaactgggggagatgaggctccggcctaccgtgctgcattcacagaccgaccaccaaggctttaggcctatccctatgatgcagtag

SEQ ID NO: 304260 - DNA, 222 bp, Artificial Sequence
  derived and/or modified sequence
atgcagtttgctgactggctccatccatccggctggactatagaaatcctaaacgcatacggcatgggagatagaaagagaaccaattcgatgtcaaaggaggcattcactccagaacagcttcacctcgagaaggaactgggcgaaatgaggctgagaccaaccgtgcttcattctcagacagatcaccaaggcttccggcctattcccatgatgcaatag

SEQ ID NO: 304261 - protein, 203 aa, Artificial Sequence
  derived and/or modified sequence
MDPQRSPLLEVKGNIELKRPLIKAPSQLPLSGSRLKRRPDQMEDGLEPEKKRTRGLGATTKITTSHPRVPSLTTVPQTQGQTTGPSSHPLPWQCHHQPFLVTDPGGRSWGPGQKWHRLHLWCTSAQKVSKKTGPRCSTAIATGLKNQKPVPAVPVQKSGTSGVPPMAGGKKPSKRPAWDLKGQLCDLNAELKRCRERTQTLDQ

SEQ ID NO: 304262 - protein, 203 aa, Artificial Sequence
  derived and/or modified sequence
MDPQRSPLLEVKGNIELKRPLIKAPSQLPLSGSRLKRRPDQMEDGLEPEKKRTRGLGATTKITTSHPRVPSLTTVPQTQGQTTGPSSHPLPWQCHHQPFLETDPGGRSWGPGQKWHRLHLWCTSAQKVSKKTGPRCSTAIATGLKNQKPVPAVPVQKSGTSGVPPMAGGKKPSKRPAWDLKGQLCDLNAELKRCRERTQTLDQ

SEQ ID NO: 304263 - DNA, 612 bp, Artificial Sequence
  derived and/or modified sequence
atggatccccaacgcagtccccttctggaagtgaaagggaatatcgagctgaagcgccctctgatcaaggctccttcccagttgccgctgagcggaagccggttgaaaaggcgtccagatcagatggaagacgggctcgaacccgaaaagaagagaacacgcggactgggcgctaccactaagatcacaacaagtcatcccagggtgccgagcctgactaccgtaccccagacacagggccagacaactggcccaagctcccatccactcccatggcagtgccatcaccaacctttcttagtcacagatccaggcggtaggagctggggtcccggccagaagtggcacaggctccatctgtggtgtacctccgcccagaaagtgtctaaaaagacaggcccccgatgttctactgcaattgctacaggactgaagaatcagaaacctgtgccagccgtgccagtacagaagtctgggacgtcaggagtgccaccaatggctggaggcaaaaagccatccaaaagacctgcttgggacctcaaaggccaactctgcgatctgaatgcggaactgaagcggtgtcgggagagaactcaaacgttagatcaatag

SEQ ID NO: 304264 - DNA, 612 bp, Artificial Sequence
  derived and/or modified sequence
atggacccccagcggagccctctgctggaagttaagggcaatattgaactgaagcggcccctgatcaaggctccatcccagttaccacttagcggcagtcgcctaaagcgccgacccgaccagatggaagatggcctcgagcccgaaaagaaacgtacccggggactcggtgctaccactaagatcacaaccagtcaccctcgtgtgccctctctgactactgtgcctcaaacacaaggtcagacaaccggaccctcttcacacccccttccttggcagtgtcaccaccagcccttccttgagacagatccaggcggaagatcctggggtccaggccagaaatggcatcgtctgcatctatggtgcacgtctgcccagaaggtgagcaaaaaaactggaccgcgctgcagtacagctatcgcaacaggcctcaagaatcaaaagcccgttccggcagtcccagtacagaaaagtggaaccagcggagtgcccccaatggcgggcggcaaaaaaccaagcaaaaggccagcttgggatcttaagggccagttgtgcgacctgaacgcggaattaaagagatgcagggagcgcacccaaacccttgaccagtag

SEQ ID NO: 304265 - DNA, 612 bp, Artificial Sequence
  derived and/or modified sequence
atggacccacagcgcagccctctgttggaggttaaaggaaatatagagctcaagaggccgctgatcaaagccccctcccaactgcctctgagcggcagccggctaaagcgccgccctgatcagatggaagacggtttagaaccagagaagaaacgcacaagaggtttaggtgccaccaccaaaatcaccaccagccatcctcgggtacccagccttacaacggtcccacaaacgcaaggacagaccacgggaccctcctctcatccccttccttggcagtgtcaccatcagcctttcctcgagaccgaccccggaggaagaagctgggggccaggacagaagtggcaccgtctgcacctctggtgcactagcgcacagaaggtcagcaaaaaaactggaccgcgctgtagcacagccattgctacggggcttaagaaccaaaagcccgtgcccgccgtccctgtgcagaaatctgggacttccggcgtgcctcctatggcaggtggcaaaaagcccagcaagagaccagcttgggatttgaaaggtcaactgtgcgacctgaatgctgagcttaagcggtgtcgtgaaagaacccaaacgctggatcagtag

SEQ ID NO: 304266 - DNA, 734 bp, Artificial Sequence
  derived and/or modified sequence
cggccggagccgtgcgagttctctaccctgcttcgcgagcgggcgagagaacgcgagtcccaggatccccggcacccagttctcttccactgcattcccccggcgcgtgtgggaccgaggtggacatggatccgcagaggtcccccctattggaagtaaaggggaacatagaactgaagagacctctgattaaggccccttcccagctgcctctctcaggaagcagactcaagaggaggcctgaccagatggaagatggcctggagcctgagaagaaacggacaagaggcctgggtgcaacgaccaaaattaccacatcccacccaagagttccatccctcactacagtgccacagacacaaggccagaccacaggcccttccagtcacccgttgccttggcaatgtcatcaccaaccttttttggtgacagacccagggggccgatcttgggggccagggcagaagtggcaccgacttcacctctggtgcacctcagctcaaaaagtttccaagaagacaggaccccggtgttccacagctattgccacagggttgaagaaccagaagccagttcctgctgttcctgtccagaagtctggcacatcaggtgttcctcccatggcaggagggaagaaacccagcaaacgtccagcctgggacttaaagggtcagttatgtgacctaaatgcagaactaaaacggtgccgtgagaggactcaaacgttggaccaa

SEQ ID NO: 304267 - DNA, 734 bp, Artificial Sequence
  derived and/or modified sequence
cggccggagccgtgcgagttctctaccctgcttcgcgagcgggcgagagaacgcgagtcccaggatccccggcacccagttctcttccactgcattcccccggcgcgtgtgggaccgaggtggacatggatccgcagaggtcccccctattggaagtaaaggggaacatagaactgaagagacctctgattaaggccccttcccagctgcctctctcaggaagcagactcaagaggaggcctgaccagatggaagatggcctggagcctgagaagaaacggacaagaggcctgggtgcaacgaccaaaattaccacatcccacccaagagttccatccctcactacagtgccacagacacaaggccagaccacaggcccttccagtcacccgttgccttggcaatgtcatcaccaaccttttttggagacagacccagggggccgatcttgggggccagggcagaagtggcaccgacttcacctctggtgcacctcagctcaaaaagtttccaagaagacaggaccccggtgttccacagctattgccacagggttgaagaaccagaagccagttcctgctgttcctgtccagaagtctggcacatcaggtgttcctcccatggcaggagggaagaaacccagcaaacgtccagcctgggacttaaagggtcagttatgtgacctaaatgcagaactaaaacggtgccgtgagaggactcaaacgttggaccaa

SEQ ID NO: 304268 - DNA, 612 bp, Artificial Sequence
  derived and/or modified sequence
atggacccccagaggagccccctgctggaggtgaagggcaacatcgagctgaagaggcccctcatcaaggcccccagccagctgcccctgagcggcagccggctgaagagaagaccagaccagatggaggatggcctggagcctgagaagaagaggacccggggcctgggcgccaccaccaagatcaccaccagccacccccgggtgcccagcctgaccaccgtgccccagacccagggccagaccaccggccccagcagccaccccctgccctggcagtgccaccaccagcccttcctggtgacagaccccggcggccgctcctggggccctggccagaagtggcaccggctgcacctgtggtgcaccagcgcccagaaggtgtccaagaagacaggcccccgctgcagcacagccatcgccaccggcctgaagaaccagaagcctgtgcctgctgtgcctgtgcagaagagcggcaccagcggcgtgccccccatggccggcggcaagaagcccagcaagaggcctgcctgggacctgaagggccagctgtgtgacctgaatgctgagctgaagcgctgccgggagaggacccagaccctggaccagtag

SEQ ID NO: 304269 - DNA, 612 bp, Artificial Sequence
  derived and/or modified sequence
atggacccccagaggagccccctgctggaggtgaagggcaacatcgagctgaagaggcccctcatcaaggcccccagccagctgcccctgagcggcagccggctgaagagaagaccagaccagatggaggatggcctggagcctgagaagaagaggacccggggcctgggcgccaccaccaagatcaccaccagccacccccgggtgcccagcctgaccaccgtgccccagacccagggccagaccaccggccccagcagccaccccctgccctggcagtgccaccaccagcccttcctggagacagaccccggcggccgctcctggggccctggccagaagtggcaccggctgcacctgtggtgcaccagcgcccagaaggtgtccaagaagacaggcccccgctgcagcacagccatcgccaccggcctgaagaaccagaagcctgtgcctgctgtgcctgtgcagaagagcggcaccagcggcgtgccccccatggccggcggcaagaagcccagcaagaggcctgcctgggacctgaagggccagctgtgtgacctgaatgctgagctgaagcgctgccgggagaggacccagaccctggaccagtag

SEQ ID NO: 304270 - DNA, 612 bp, Artificial Sequence
  derived and/or modified sequence
atggacccccagcggagccccctgctggaggtgaagggcaacatcgagctgaagagacccctaattaaagccccttcgcagcttcccctgagcggcagtaggctaaagcgtaggcccgatcaaatggaagatggcctggaacctgaaaagaaaaggactagagggctcggtgcgactactaaaattacgacatcacacccaagggtgccttctctaaccactgtccctcaaactcagggccaaaccacagggccaagctctcatccgctgccctggcaatgtcatcaccagccctttctggtgactgaccctggggggcggtcatgggggccgggtcaaaagtggcacaggttacatctgtggtgcacttctgctcagaaggtgagcaagaagactggccctcgctgtagcaccgcaatagctaccgggttgaagaatcagaaaccagtgccagccgtccctgttcaaaagtccggaacttctggggtaccccctatggcagggggtaagaaaccctcaaaacgccctgcctgggatctcaaaggccagctttgtgatctgaacgccgagttgaagagatgccgggaacggacacaaaccttggaccagtag

SEQ ID NO: 304271 - DNA, 612 bp, Artificial Sequence
  derived and/or modified sequence
atggacccccagcggagccccctgctggaggtgaagggcaacatcgaactgaaacggcccctcattaaggctcccagccagcttccgctgtccggctcccggctgaagcgtagacccgaccagatggaggacgggctggaaccggagaaaaaacgcacgagaggtttgggggccacaacgaaaatcacgaccagccaccctagggtaccttcccttactaccgtgcctcagacccaaggtcagacaactggccctagctctcatcctctgccctggcagtgccatcaccagccttttctagagaccgaccctggaggccgctcttggggacccgggcaaaagtggcatcgactgcacctgtggtgcactagcgctcagaaagttagcaaaaaaaccggtccaagatgctccaccgcaatcgccactgggttgaagaaccagaagcccgtgcccgcggtacccgtgcaaaagtcaggaacaagcggggtacctcctatggccggtggtaaaaagccaagtaaacgtcctgcctgggacctgaaagggcagttatgtgatctaaacgctgagttgaagaggtgcagagagcgcactcagacactcgatcagtag

SEQ ID NO: 304272 - DNA, 612 bp, Artificial Sequence
  derived and/or modified sequence
atggacccccagcggagccccctgctggaggtgaagggcaacatcgaactcaagcgtccactcatcaaggccccttcccaactgcctctctcgggctcacgacttaaaagaaggcccgaccagatggaagacggactggaaccagagaaaaagaggacgcgggggttgggtgccactacaaagatcaccacctcccacccccgagtgccatcgctaaccactgttccccagactcaaggccagactactggtccttctagccaccccctcccctggcagtgccatcatcagccattccttgaaacagaccccgggggacggtcctggggaccaggccaaaaatggcaccgcttgcatttatggtgcacctctgcacagaaagtgtctaaaaaaaccggcccccgctgtagtactgccattgcaacaggactcaagaaccagaaacccgtgcctgccgtcccagttcagaaatccggcacctctggcgtccctcctatggccggcggtaagaaaccttcaaaacgtcccgcctgggatttaaagggccaattgtgcgatctgaacgccgagttaaaacgctgtcgtgaaaggacccagaccctggaccagtag

SEQ ID NO: 304273 - DNA, 612 bp, Artificial Sequence
  derived and/or modified sequence
atggaccctcaacggtctccgctgttagaggtcaaggggaatatcgaactcaagcgccctctaatcaaggcgcctagccaactccccttgagcggttctcggctcaagcggagaccagaccagatggaagacggcctcgaaccagagaaaaagagaaccaggggactcggcgcaactaccaagattaccaccagccaccctcgtgtcccaagcctgacaaccgtccctcagacacaggggcaaaccacagggccttcctcacacccactgccttggcaatgccaccatcaaccattcctagtgacagaccctggagggagatcgtggggtccaggccagaagtggcataggttacacctctggtgtacaagtgcgcaaaaagtcagcaaaaaaactggtccccgatgttctacggccattgctacaggcctgaagaaccaaaagccagtccccgctgtgcctgtccagaaatcgggaaccagcggagttccacccatggccggtggaaagaagcctagcaagcggcctgcgtgggacctcaaaggacagctttgcgacctcaatgcagagctcaagcggtgccgggaacgcacacaaacactggaccagtag

SEQ ID NO: 304274 - DNA, 612 bp, Artificial Sequence
  derived and/or modified sequence
atggacccccagcgctctcctcttctggaggtaaaaggaaatatagaactgaaacgaccacttataaaggcacctagccaactgcccctgagcggaagccgcctcaaacggcgtccagaccagatggaggatggtctggaaccagagaaaaaacgaactcggggactaggcgctactaccaagatcactaccagtcatcctagagtgcccagccttaccaccgttccacagacccaggggcagacaactggcccaagctcccatccactgccttggcagtgccatcaccagccatttctcgagactgatcccggtggcagatcttggggccctggacagaagtggcatcgtcttcacctgtggtgcaccagcgcacagaaggtgtcaaagaagacaggcccacgatgctcaacagccattgcaactgggctcaaaaaccagaagcctgtgcccgctgtaccagtgcagaaaagcggtacttcaggtgttcctcccatggctggagggaagaagcccagcaaaagacctgcatgggacctcaagggtcagttgtgcgacctgaacgcagagctcaagaggtgtagggaacgaacccaaactctggaccagtag

SEQ ID NO: 304275 - DNA, 612 bp, Artificial Sequence
  derived and/or modified sequence
atggaccctcagcggtcaccccttctcgaagttaagggcaacattgagctgaagcggccactgatcaaggcccctagtcagctcccattatccggttcacgccttaagcggcgacctgaccagatggaggacggcctagagccagagaagaagcgcacgcgagggctcggagcaaccacaaaaatcactactagtcacccgagggtgcccagtctcactacagtcccccagacgcagggccagacaaccggcccttccagtcatccattaccttggcaatgccaccaccagcccttcctagaaacagatcctgggggacgcagctggggacccggacagaagtggcataggctgcacctgtggtgtacctccgcccaaaaggtgtctaagaagactgggccaaggtgctctacagccatcgcgaccggactgaagaatcagaaaccggtgccggctgtgcccgtgcaaaaatccgggacgagtggagtgcccccaatggcagggggtaagaagccatctaagagacccgcatgggacctgaagggccagctgtgtgatctgaacgctgaactgaaacgatgtcgggaaagaacccagactctggatcagtag

SEQ ID NO: 304276 - DNA, 612 bp, Artificial Sequence
  derived and/or modified sequence
atggacccccagagaagccccctgctggaggtgaagggcaacatcgagctgaagagacccctgatcaaggcccccagccagctgcccctgagcggcagcagactgaagagaagacccgaccagatggaggacggcctggagcccgagaagaagagaaccagaggcctgggcgccaccaccaagatcaccaccagccaccccagagtgcccagcctgaccaccgtgccccagacccagggccagaccaccggccccagcagccaccccctgccctggcagtgccaccaccagcccttcctggtgaccgaccccggcggcagaagctggggccccggccagaagtggcacagactgcacctgtggtgcaccagcgcccagaaggtgagcaagaagaccggccccagatgcagcaccgccatcgccaccggcctgaagaaccagaagcccgtgcccgccgtgcccgtgcagaagagcggcaccagcggcgtgccccccatggccggcggcaagaagcccagcaagagacccgcctgggacctgaagggccagctgtgcgacctgaacgccgagctgaagagatgcagagagagaacccagaccctggaccagtag

SEQ ID NO: 304277 - DNA, 612 bp, Artificial Sequence
  derived and/or modified sequence
atggacccccagagaagccccctgctggaggtgaagggcaacatcgagctgaagagacccctgatcaaggcccccagccagctgcccctgagcggcagcagactgaagagaagacccgaccagatggaggacggcctggagcccgagaagaagagaaccagaggcctgggcgccaccaccaagatcaccaccagccaccccagagtgcccagcctgaccaccgtgccccagacccagggccagaccaccggccccagcagccaccccctgccctggcagtgccaccaccagcccttcctggagaccgaccccggcggcagaagctggggccccggccagaagtggcacagactgcacctgtggtgcaccagcgcccagaaggtgagcaagaagaccggccccagatgcagcaccgccatcgccaccggcctgaagaaccagaagcccgtgcccgccgtgcccgtgcagaagagcggcaccagcggcgtgccccccatggccggcggcaagaagcccagcaagagacccgcctgggacctgaagggccagctgtgcgacctgaacgccgagctgaagagatgcagagagagaacccagaccctggaccagtag

SEQ ID NO: 304278 - protein, 38 aa, Artificial Sequence
  derived and/or modified sequence
EPVYFAEKVMSLGRNWHRPCLRCQRCHKTLTAGSHAEV

SEQ ID NO: 304279 - DNA, 117 bp, Artificial Sequence
  derived and/or modified sequence
gagcccgtgtacttcgccgagaaggtgatgagcctgggcagaaactggcacagaccctgcctgagatgccagagatgccacaagaccctgaccgccggcagccacgccgaggtgtag

SEQ ID NO: 304280 - DNA, 117 bp, Artificial Sequence
  derived and/or modified sequence
gaacctgtgtatttcgccgagaaagttatgagtctggggagaaactggcatagaccctgcctgaggtgccagcggtgtcataaaaccctaacagctgggtctcatgcagaagtttag

SEQ ID NO: 304281 - DNA, 117 bp, Artificial Sequence
  derived and/or modified sequence
gagcctgtgtactttgctgagaaggtgatgagcctgggcaggaactggcaccggccctgcctgcgctgccagcgctgccacaagaccctgacagctggcagccacgccgaggtgtag

SEQ ID NO: 304282 - DNA, 117 bp, Artificial Sequence
  derived and/or modified sequence
gagcccgtgtacttcgccgagaaggtgatgagcctgggccggaactggcatcgcccttgtctgagatgtcagaggtgccataagactttgacggccggttctcatgcagaagtctag

SEQ ID NO: 304283 - DNA, 117 bp, Artificial Sequence
  derived and/or modified sequence
gaacccgtttactttgctgagaaggtgatgtcactggggcgaaactggcacaggccctgtctacggtgccagcggtgtcacaagaccttgactgctggatcccatgccgaggtgtag

SEQ ID NO: 304284 - protein, 119 aa, Artificial Sequence
  derived and/or modified sequence
YSCPKPCYGNMCCSTSPDHKYYLTDFCGSTSACGPKPSCSGKLYFTADSQRFGCGKHLNLCRGKKCVKAKVYDAGPAEWVEKDAGKMIIDASPTICHELTGGSSCGWSDKFEITATVTS

SEQ ID NO: 304285 - protein, 205 aa, Artificial Sequence
  derived and/or modified sequence
MTPPERLFLPRVCGTTLHLLLLGLLLVLLPGAQGLPGVGLTPSAAQTARQHPKMHLAHSTLKPAAHLIGDPSKQNSLLWRANTDRAFLQDGFSLSNNSLLVPTSGIYFVYSQVVFSGKAYSPKATSSPLYLAHEVQLFSSQYPFHVPLLSSQKMVYPGLQEPWLHSMYHGAAFQLTQGDQLSTHTDGIPHLVLSPSTVFFGAFAL

SEQ ID NO: 304286 - protein, 138 aa, Artificial Sequence
  derived and/or modified sequence
MTPPERLFLPRVCGTTLHLLLLGLLLVLLPGAQGLPGVGLTPSAAQTARQHPKMHLAHSTLKPAAHLIGDPSKQNSLLWRANTDRAFLQDGFSLSNNSLLVPTSGIYFVYSQGSSPPLLWPFQQLKSSLIKSPELSKK

SEQ ID NO: 304287 - DNA, 618 bp, Artificial Sequence
  derived and/or modified sequence
atgacacccccagaacgcctgtttctcccgagggtgtgtggaactactctgcaccttttgcttctggggttgttgctggtcttgttgcccggggcccaggggcttcccggggtcggtcttactccgtcggctgcccaaacagctcgacaacatccaaaaatgcacctcgctcatagcacattaaaaccagccgctcacctcattggagacccaagtaagcaaaactccctgttgtggagggccaacacggacagggctttccttcaagacggcttttcgctgtcgaacaattccctactggtcccaacttccggaatatactttgtctactcacaggtagtcttcagcggcaaagcctacagcccaaaggccaccagctctcctctatacttagcccatgaggttcagcttttctcctcccaatacccattccacgtccctctgttatcttcccagaaaatggtgtatcccggcttgcaggagccctggctgcactctatgtatcatggggcagcctttcagctgacgcaaggagaccagctgtctacacacacagacgggattccgcatttggttttaagtccttctactgttttttttggcgcctttgcgctctag

SEQ ID NO: 304288 - DNA, 618 bp, Artificial Sequence
  derived and/or modified sequence
atgacgcctcctgagagattgtttctgcccagagtttgtgggacgacattgcatttgctgttgctgggactcctgctggtgctcttacctggagcccagggattgcctggagtcggattgacacctagtgccgctcagaccgcaaggcagcatcccaaaatgcacctggcccactccactctaaagcccgcagcccacctgatcggcgatccaagcaaacagaactccctgctctggcgggctaataccgatagagcatttctgcaagatggctttagtctgagtaacaattctctgctggttccaacctcaggaatctactttgtttactctcaagtagtgtttagcggaaaagcttactctcccaaggccacgtcgagccccctgtatctggctcacgaagtgcagctcttctccagtcagtacccattccatgtgccactgctgagcagccagaaaatggtgtacccaggcttacaggaaccttggttgcacagtatgtatcacggtgcagcatttcaattgacacagggagaccagctgagcacacacaccgatggtatccctcatctggtccttagtcccagtacagtgttcttcggtgcttttgccctgtag

SEQ ID NO: 304289 - DNA, 618 bp, Artificial Sequence
  derived and/or modified sequence
atgaccccacctgagcgcctgttcctgccaagagtctgcggcacaactctgcacttactgctgttggggctactgttggtgctactgccgggagcgcaaggcctccccggggtgggactgacacctagtgccgcccagacagctcgccagcaccccaaaatgcacctggcccattcaactctcaagcccgccgcccacttgataggcgatccctcaaaacaaaattcccttctctggagggcaaacactgatcgcgcatttctccaggatgggttcagtctgtccaacaattcgcttctagtccctacttctgggatctacttcgtgtacagccaggtggtcttctctgggaaggcctactcgcctaaagcaacatcgtcccccctgtatttagcacacgaggtgcagctttttagttcacagtacccttttcatgtccctttgctgagctcccaaaagatggtgtacccggggcttcaggaaccctggctccatagcatgtaccacggagctgcgtttcaactcacccagggggaccaattgtctacacacactgacggaatccctcatcttgtgttgagtcccagtacggttttctttggcgcgttcgcactctag

SEQ ID NO: 304290 - DNA, 618 bp, Artificial Sequence
  derived and/or modified sequence
atgactccccccgagcgtctattcctgccgcgggtctgcggcactactcttcacctgttacttcttgggctgctcctcgtgctgctcccgggggcccagggcctgcccggagttggacttaccccctccgccgcccagacggccagacagcacccaaaaatgcatcttgcccatagcacacttaaacccgcagcccatctaatcggcgaccctagcaaacaaaatagcctcctgtggcgtgctaacaccgatagggccttcctgcaggatggattctccttatctaacaacagtctgctggtgccaacctccggaatctatttcgtctactcccaggtggtgttttccggcaaagcctactcgcctaaagccacctccagccctctgtacctggcacacgaggtgcagctgttttcctcacagtaccccttccacgtgcccctgctttcctcccagaagatggtctatcccggactgcaagagccatggcttcattcaatgtatcacggcgccgccttccagttaacacagggtgaccaattgtctacacataccgacggcattcctcatctggtcctgtccccatccacggtatttttcggagctttcgccctgtag

SEQ ID NO: 304291 - DNA, 417 bp, Artificial Sequence
  derived and/or modified sequence
atgaccccgcctgaaaggctgtttctgcctagagtgtgcggtacgaccctgcatttactcctgttagggctgcttctggtgctgttacccggtgcccaggggctgcccggcgtcggcctaaccccatctgctgcccagaccgcgagacagcaccctaagatgcatctggctcactctacgctgaaacccgcagcccacctgattggggacccttctaaacagaactcgctgctgtggcgcgcaaataccgatcgggcctttttacaggatggctttagcctcagcaataacagcttactcgtacccacctctggtatatactttgtctattcacagggatccagtccgccgttgctatggccttttcagcagctgaagtcctctttaattaagtctcccgagctgtctaagaagtag

SEQ ID NO: 304292 - DNA, 618 bp, Artificial Sequence
  derived and/or modified sequence
atgacacctccagagcgcttattcttgcctcgggtctgcgggaccacacttcacctcctgctgctggggcttttactcgtgctacttcctggcgcccaagggctccctggtgtcgggctgactccctccgcagcccagacagcccggcagcacccgaagatgcatttagcgcattcaactctcaagcccgctgcgcatctaatcggggacccgagtaagcaaaatagcctcctctggcgggcaaataccgatagggcgtttctgcaggacggtttcagtctgagtaataatagcctcctggtccccacgtccgggatatatttcgtatatagccaggtcgtgttttcaggaaaggcttactctccaaaggccactagctcacctctttaccttgctcacgaggtgcagctgttttccagccagtatcctttccatgtcccactgctcagctcccagaagatggtctacccaggacttcaggaaccctggctgcacagcatgtaccacggcgctgctttccagctcacacagggagaccagctcagcacccacaccgatggtatcccgcatttggtactttctccgtccacagtgttcttcggcgcttttgcgctttag

SEQ ID NO: 304293 - DNA, 618 bp, Artificial Sequence
  derived and/or modified sequence
atgaccccacctgagcgactgttccttccccgagtgtgtggaaccacactgcacctacttctactgggcttactgctggttttgcttcctggcgcgcaggggctgccaggcgtcggacttacaccaagtgccgcccagacagcccggcagcaccctaagatgcatttggcacacagtaccctaaagcccgctgctcatcttattggggacccctcaaaacagaatagcctgctgtggcgggcaaatacagacagagcgtttttacaggacggtttttctctctctaacaacagtctgctggtccctacatcaggcatatacttcgtgtactcacaggtggttttctctggtaaggcttacagtccaaaggcaaccagcagtccactttaccttgcgcatgaggtccagttgttcagttcccagtacccctttcacgtccctctgctttcatcccaaaaaatggtgtacccaggactgcaggagccatggctacattccatgtaccatggcgcagccttccaactcacgcagggtgatcagctgagtactcacactgatgggattcctcacctggtcctgagcccgtctacagtttttttcggcgctttcgcactttag

SEQ ID NO: 304294 - DNA, 417 bp, Artificial Sequence
  derived and/or modified sequence
atgaccccgccagagcggctatttctccccagagtctgcggcacgacgttgcacctcctcttgctcggcctcctgttggtgctcttacccggggctcaagggcttcccggcgttggtctgaccccctcagcagcccagacagcccggcagcaccctaaaatgcatctggcccactccaccttgaagccagctgcgcacctcataggagaccctagtaaacagaacagcttgctgtggcgtgcaaatactgacagagccttcctgcaggacggattctcactgtctaataacagcctgctggtgcctacaagcggcatctacttcgtttacagtcagggctcaagtccaccactcctttggcccttccagcagctgaaatctagtctgattaagagtcctgagctgtctaaaaaatag

SEQ ID NO: 304295 - DNA, 417 bp, Artificial Sequence
  derived and/or modified sequence
atgacaccacccgaacgcctgtttctcccacgagtctgtggaaccactcttcacctgctactgctgggactcttgctggtcctcctgccgggggcacaaggactacctggtgtggggctcactccttctgctgctcagactgcacgccagcaccccaagatgcatttagcccattctaccctcaaacctgctgcacacctaatcggcgatcctagcaaacagaattcgctgctctggagagcaaacacagaccgggctttcttgcaggacggcttcagtcttagtaataatagcttgctggtccccacctctggaatttacttcgtttactcccagggctcctctccaccccttctgtggccatttcagcaactgaaaagctcactgatcaagtcgcctgaactgagtaaaaaatag

SEQ ID NO: 304296 - DNA, 618 bp, Artificial Sequence
  derived and/or modified sequence
atgaccccacctgagcggctcttcctgccccgggtgtgtggcaccaccctgcacctgctgctgctgggcctgctgctggtgctgctgcccggggcccagggcctgcccggggtgggcctgaccccatctgctgcccagacagcccggcagcaccccaagatgcacctggcccacagcaccctgaagccagctgcccacctgattggagaccccagcaagcagaacagcctgctgtggagggccaacacagaccgggccttcctgcaggacggcttcagcctgagcaacaacagcctgctggtgcccaccagcggcatctactttgtgtacagccaggtggtgttcagcggcaaggcctacagccccaaggccaccagcagccccctgtacctggcccacgaggtgcagctgttcagcagccagtaccccttccacgtgcccctgctgagcagccagaagatggtgtacccaggcctgcaggagccctggctgcacagcatgtaccatggagctgccttccagctgacccagggcgaccagctgagcacccacacagatggcatcccccacctggtgctgagccccagcacagtgttcttcggggcctttgccctgtag

SEQ ID NO: 304297 - DNA, 417 bp, Artificial Sequence
  derived and/or modified sequence
atgaccccacctgagcggctcttcctgccccgggtgtgtggcaccaccctgcacctgctgctgctgggcctgctgctggtgctgctgcccggggcccagggcctgcccggggtgggcctgaccccatctgctgcccagacagcccggcagcaccccaagatgcacctggcccacagcaccctgaagccagctgcccacctgattggagaccccagcaagcagaacagcctgctgtggagggccaacacagaccgggccttcctgcaggacggcttcagcctgagcaacaacagcctgctggtgcccaccagcggcatctactttgtgtacagccagggcagcagcccccccctgctgtggcccttccagcagctgaagagcagcctcatcaagagccctgagctgagcaagaagtag

SEQ ID NO: 304298 - DNA, 1422 bp, Artificial Sequence
  derived and/or modified sequence
ccaggggctccgcacagcaggtgaggctctcctgccccatctccttgggctgcccgtgcttcgtgctttggactaccgcccagcagtgtcctgccctctgcctgggcctcggtccctcctgcacctgctgcctggatccccggcctgcctgggcctgggccttggttctccccatgacaccacctgaacgtctcttcctcccaagggtgtgtggcaccaccctacacctcctccttctggggctgctgctggttctgctgcctggggcccaggggctccctggtgttggcctcacaccttcagctgcccagactgcccgtcagcaccccaagatgcatcttgcccacagcaccctcaaacctgctgctcacctcattggagaccccagcaagcagaactcactgctctggagagcaaacacggaccgtgccttcctccaggatggtttctccttgagcaacaattctctcctggtccccaccagtggcatctacttcgtctactcccaggtggtcttctctgggaaagcctactctcccaaggccacctcctccccactctacctggcccatgaggtccagctcttctcctcccagtaccccttccatgtgcctctcctcagctcccagaagatggtgtatccagggctgcaggaaccctggctgcactcgatgtaccacggggctgcgttccagctcacccagggagaccagctatccacccacacagatggcatcccccacctagtcctcagccctagtactgtcttctttggagccttcgctctgtagaacttggaaaaatccagaaagaaaaaataattgatttcaagaccttctccccattctgcctccattctgaccatttcaggggtcgtcaccacctctcctttggccattccaacagctcaagtcttccctgatcaagtcaccggagctttcaaagaaggaattctaggcatcccaggggaccacacctccctgaaccatccctgatgtctgtctggctgaggatttcaagcctgcctaggaattcccagcccaaagctgttggtctgtcccaccagctaggtggggcctagatccacacacagaggaagagcaggcacatggaggagcttgggggatgactagaggcagggaggggactatttatgaaggcaaaaaaattaaattatttatttatggaggatggagagaggggaataatagaagaacatccaaggagaaacagagacaggcccaagagatgaagagtgagagggcatgcgcacaaggctgaccaagagagaaagaagtaggcatgagggatcacagggccccagaaggcagggaaaggctctgaaagccagctgccgaccagagccccacacggaggcatctgcaccctcgatgaagcccaataaacctcttttctctgaaa

SEQ ID NO: 304299 - DNA, 1507 bp, Artificial Sequence
  derived and/or modified sequence
tcccagcccacgattcccctgacccgactccctttcccagaactcagtcgcctgaacccccagcctgtggttctctcctaggcctcagcctttcctgcctttgactgaaacagcagtatcttctaagccctgggggcttccccgggccccagccccgacctagaacccgcccgctgcctgccacgctgccactgccgcttcctctataaagggacctgagcgtccgggcccaggggctccgcacagcaggttctccccatgacaccacctgaacgtctcttcctcccaagggtgtgtggcaccaccctacacctcctccttctggggctgctgctggttctgctgcctggggcccaggggctccctggtgttggcctcacaccttcagctgcccagactgcccgtcagcaccccaagatgcatcttgcccacagcaccctcaaacctgctgctcacctcattggagaccccagcaagcagaactcactgctctggagagcaaacacggaccgtgccttcctccaggatggtttctccttgagcaacaattctctcctggtccccaccagtggcatctacttcgtctactcccaggtggtcttctctgggaaagcctactctcccaaggccacctcctccccactctacctggcccatgaggtccagctcttctcctcccagtaccccttccatgtgcctctcctcagctcccagaagatggtgtatccagggctgcaggaaccctggctgcactcgatgtaccacggggctgcgttccagctcacccagggagaccagctatccacccacacagatggcatcccccacctagtcctcagccctagtactgtcttctttggagccttcgctctgtagaacttggaaaaatccagaaagaaaaaataattgatttcaagaccttctccccattctgcctccattctgaccatttcaggggtcgtcaccacctctcctttggccattccaacagctcaagtcttccctgatcaagtcaccggagctttcaaagaaggaattctaggcatcccaggggaccacacctccctgaaccatccctgatgtctgtctggctgaggatttcaagcctgcctaggaattcccagcccaaagctgttggtctgtcccaccagctaggtggggcctagatccacacacagaggaagagcaggcacatggaggagcttgggggatgactagaggcagggaggggactatttatgaaggcaaaaaaattaaattatttatttatggaggatggagagaggggaataatagaagaacatccaaggagaaacagagacaggcccaagagatgaagagtgagagggcatgcgcacaaggctgaccaagagagaaagaagtaggcatgagggatcacagggccccagaaggcagggaaaggctctgaaagccagctgccgaccagagccccacacggaggcatctgcaccctcgatgaagcccaataaacctcttttctctgaaa

SEQ ID NO: 304300 - DNA, 554 bp, Artificial Sequence
  derived and/or modified sequence
gccccatctccttgggctgcccgtgcttcgtgctttggactaccgcccagcagtgtcctgccctctgcctgggcctcggtccctcctgcacctgctgcctggatccccggcctgcctgggcctgggccttggttctccccatgacaccacctgaacgtctcttcctcccaagggtgtgtggcaccaccctacacctcctccttctggggctgctgctggttctgctgcctggggcccaggggctccctggtgttggcctcacaccttcagctgcccagactgcccgtcagcaccccaagatgcatcttgcccacagcaccctcaaacctgctgctcacctcattggagaccccagcaagcagaactcactgctctggagagcaaacacggaccgtgccttcctccaggatggtttctccttgagcaacaattctctcctggtccccaccagtggcatctacttcgtctactcccaggggtcgtcaccacctctcctttggccattccaacagctcaagtcttccctgatcaagtcaccggagctttcaaagaag

SEQ ID NO: 304301 - DNA, 618 bp, Artificial Sequence
  derived and/or modified sequence
atgaccccccccgagcggctgttcctgccccgggtgtgcggcaccacactgcacctcctccttctgggcctcctgctggtcctgctccccggtgcccagggattacccggggtgggactgacaccttcagcagcgcagaccgctcgacagcaccctaaaatgcatttagctcactccactttgaaacctgcagcacatctgattggtgaccccagcaagcagaattcccttctgtggcgtgccaacaccgatcgcgcctttctacaggatggcttcagtctttcaaataactcattgctggtccccacctccgggatctacttcgtgtattcccaagttgtgttctcaggcaaggcgtactctcccaaggctacctcttccccattgtaccttgcacacgaggtacagttgttcagctcccagtatcctttccacgtgcctcttctaagctctcagaagatggtctatcccggccttcaagagccgtggctgcactcaatgtatcacggcgcggcttttcagctgacccagggcgatcagttgagtacacatactgacggcatccctcatcttgtcctgtcaccttctaccgtgtttttcggggcattcgctctgtag

SEQ ID NO: 304302 - DNA, 618 bp, Artificial Sequence
  derived and/or modified sequence
atgaccccccccgagcggctgttcctgccccgggtgtgcggcaccacgttacatctgttgttgctgggtttactgctggtgcttctgcccggcgcccaggggctaccaggggtcgggttgacaccttccgcggctcagaccgcaagacagcaccccaagatgcaccttgctcattcaaccctcaagcctgccgcgcatctgattggcgacccatccaagcagaacagtctcctctggagagccaacactgacagagccttcctgcaggacggcttttccctcagtaataactctctgctcgttcccacctctggaatctatttcgtgtacagtcaggtggtgttcagtggcaaggcttattcccccaaggccaccagtagccctctgtatctggcccacgaagtacaactcttttcctctcagtacccattccacgtcccccttctttcttcccagaagatggtctatccgggtctccaggagccctggctgcactccatgtatcatggagcggcatttcagttgactcaaggagatcagctctccacccacacagatggtatcccccatttagtgctgagcccctccacagtttttttcggagcattcgccttgtag

SEQ ID NO: 304303 - DNA, 618 bp, Artificial Sequence
  derived and/or modified sequence
atgaccccccccgagcggctgttcctgccccgggtgtgcggcaccacactccatctcctgttacttgggctcctcctggtgctccttcccggcgcgcagggtctccccggagtgggcctgacaccttctgccgctcagactgccagacagcacccaaagatgcacctcgcccactcaacactgaaaccagcagcccaccttattggtgacccctctaagcaaaactctttgctgtggcgagccaacactgatcgggcattcttgcaggatgggttcagtctgagcaataatagcctgctggtccccactagcggaatctactttgtctacagtcaggtcgttttctcagggaaggcctacagccccaaagccacttcctctccgctgtacctagcccacgaggtgcagttgttcagcagccagtatcctttccatgttcctctgctgtcttcccagaaaatggtgtatcccggcttgcaggagccctggctacatagcatgtatcatggggccgcattccagctgacacagggtgatcagctgtccacccatacagacggcatccctcaccttgtattaagccctagcacggtgttttttggggcctttgccctgtag

SEQ ID NO: 304304 - DNA, 618 bp, Artificial Sequence
  derived and/or modified sequence
atgaccccccccgagcggctgttcctgccccgggtgtgcggcaccactctccatctactcctactaggtcttctgcttgtgttgctgcccggagcacaagggctgccaggggtcgggttgacccccagtgccgctcaaaccgcacggcagcaccccaagatgcatttagctcactccacgctcaagcccgctgctcatctaataggagacccatccaaacagaattccctactttggagagctaacacagatagggcttttcttcaggacgggttctctctgtctaacaacagcctgcttgttccgacctcaggaatctacttcgtgtattcacaggtggtcttttctggaaaggcttattcccccaaggctacctcctcgccactttatctcgctcatgaggtccagctcttctcctcccaatatccattccacgtcccactattgtcttcccagaaaatggtgtatcctggtctgcaggagccctggctccatagcatgtaccatggagctgcctttcagcttacccaaggggaccagctgtccacccacacagatggcattccacacctcgtgctgtctcctagcacagtgttcttcggcgcattcgccctgtag

SEQ ID NO: 304305 - DNA, 417 bp, Artificial Sequence
  derived and/or modified sequence
atgaccccccccgagcggctgttcctgccccgggtgtgcggcaccacactacacctgctccttctgggtcttttgctggtgctgctgcccggagcccagggcctcccaggtgtcgggctgaccccctccgcggcacagactgcaaggcagcacccaaaaatgcatttagcccatagtactttgaaaccggccgctcacttgattggtgacccctcaaaacagaacagcctgttgtggagggccaataccgaccgtgctttcttacaggatggtttctccctgagtaacaactccctgcttgtcccaacatcaggaatttacttcgtctattcccagggctcaagccctccgctgctgtggcccttccagcaactcaagtcatcactgatcaagtcaccagagctcagcaaaaaatag

SEQ ID NO: 304306 - DNA, 618 bp, Artificial Sequence
  derived and/or modified sequence
atgaccccccccgagcggctgttcctgccccgggtgtgcggcaccacattacatctgctgttgctcggattgttattagttcttctccctggggcccaaggactgcccggggtgggcctgacaccaagcgcggcacagactgcccgtcaacaccctaagatgcatctcgctcactctaccctgaaacccgcagcacacctgatcggggatccctccaaacagaattccctactatggagagcaaacacagacagagcatttttacaggacggattctctctgtctaacaattcccttctggtcccaacttcagggatctatttcgtctactctcaggtcgttttctccggtaaggcttacagccctaaagcgacaagcagcccgctgtacctagcccatgaggtgcaactcttcagcagtcaatacccgtttcacgtgcccctgctcagctctcagaaaatggtctacccaggtctgcaggaaccatggctgcacagtatgtatcacggggccgcttttcaacttacacagggtgatcagctgtcaacacacacagacgggatcccccacttagttttgtcacctagtaccgtgttcttcggcgcttttgccctctag

SEQ ID NO: 304307 - DNA, 618 bp, Artificial Sequence
  derived and/or modified sequence
atgaccccccccgagcggctgttcctgccccgggtgtgcggcaccactctgcacctgctgttactaggcctcttactggtactgcttccaggagctcaaggccttcccggagtgggtctcacaccaagcgccgcacagacagcaaggcagcaccccaagatgcatttggctcactcaactctcaaacccgcagcccacctgatcggggacccgtcgaaacagaacagcctgctgtggcgcgccaacactgacagggcgtttctgcaggatgggttctccctgagcaacaactccctcctcgtgccaactagcggcatctatttcgtgtatagccaagtggtcttttcagggaaggcttattctcctaaagccacctctagccccctgtacctggcacacgaagtgcagctattcagttcacaatatccttttcacgtgccactattgagcagccagaaaatggtctatccagggctgcaagagccatggcttcacagcatgtaccatggagccgcttttcagttgacacagggagatcagctatctacacataccgatgggatcccgcatttagtgctcagcccttctacagtctttttcggggctttcgccctttag

SEQ ID NO: 304308 - DNA, 417 bp, Artificial Sequence
  derived and/or modified sequence
atgaccccccccgagcggctgttcctgccccgggtgtgcggcaccacactgcacctccttttgctggggctccttcttgttctgttgcctggggcccaagggctgccaggcgtgggcctcacaccatcggccgcccagacagctagacagcatccaaaaatgcacctggcccactcaacattaaaaccagccgcccacctcattggggatccaagcaaacagaattctcttctgtggcgcgccaacactgatcgcgcctttctccaagatggattttcgttgagcaacaattcgctgctcgtacctactagtggaatttattttgtgtatagtcaggggagttctcccccgctgttgtggcctttccagcaacttaagagctccttgataaaatcaccagagctatctaaaaagtag

SEQ ID NO: 304309 - DNA, 417 bp, Artificial Sequence
  derived and/or modified sequence
atgaccccccccgagcggctgttcctgccccgggtgtgcggcaccaccttgcatctgctgctattgggcttgctgcttgtgctgttaccaggcgctcagggactgcctggcgtgggactcaccccgagtgcggctcagaccgccaggcagcacccgaagatgcatctggcccattccacactgaaaccagccgcacacctgatcggtgatcccagcaagcagaactctctgttatggcgcgccaataccgacagagcctttctgcaggacggattcagcctcagtaacaacagtttgcttgttccgacttcaggtatctactttgtgtattcacagggaagcagtcctccccttctatggccatttcagcagttaaagagttcactgatcaaatcccccgagctgtccaaaaaatag

SEQ ID NO: 304310 - DNA, 618 bp, Artificial Sequence
  derived and/or modified sequence
atgaccccacctgagagactgttcctcccgagagtgtgcggaactacccttcaccttttgctgctgggtttattgctggtactcttgcccggtgctcaaggtctcccaggggtggggttgaccccttcagctgcacagacagcacgtcagcaccctaagatgcatctggctcactccactttgaaacctgcggctcacctaataggagaccccagcaagcagaattcacttctctggagagcaaataccgacagggcctttctccaggatggcttctctctcagcaacaactccctactagtacctaccagcggcatttatttcgtgtactcacaagtggtttttagcgggaaagcttactcccccaaagccaccagcagccctctgtatctcgcccacgaagtccagctgttctcctcccaataccccttccacgtgccgctgctgtcatcacagaagatggtgtaccctggcctgcaagaaccatggcttcattctatgtaccatggtgccgctttccagctcacccagggcgaccagctcagtacgcatacagatggcatcccgcacctggtcttgagcccctccacggtttttttcggcgcatttgcgctttag

SEQ ID NO: 304311 - DNA, 618 bp, Artificial Sequence
  derived and/or modified sequence
atgaccccacccgaaaggctattcctgcccagagtgtgtggaacaacactgcacttgctcctgttaggcctcctgctggtcttattgcccggtgctcaaggtctcccaggcgtgggactaaccccgtcagccgcacagacagctaggcaacatcccaagatgcacctcgcacattcaacactcaagcctgccgctcatctgatcggtgacccctccaagcaaaattcactcctgtggcgggctaacactgaccgtgcttttctgcaagacggcttctcactgtctaacaacagcctattggttcccacttctggaatttatttcgtgtattctcaggtcgtattctccggcaaagcatactctccaaaagccacctcatctcctctttacttggcccatgaagtccagctgttctcttcccagtatccattccatgtgccactacttagctcacagaagatggtgtatccaggtttgcaagaaccttggctccacagcatgtaccatggcgcagcattccagcttacccagggcgaccagctgtccacccataccgacgggattccacacttggtcctgtccccctctacagtcttcttcggcgcttttgcgttatag

SEQ ID NO: 304312 - DNA, 618 bp, Artificial Sequence
  derived and/or modified sequence
atgacccctccggagagactgtttcttccaagggtgtgcgggacaacactccacctgttgctgctgggcctcttgcttgtgctgttaccaggcgctcaggggctccctggcgtggggctgactccctcagctgcccaaaccgctcgccagcatccgaaaatgcacctggcgcactccaccttaaaacctgctgcccatctgatcggcgatccttcaaagcagaattcgctgctttggcgggctaatacggatcgcgctttcctccaagacggattttccttatcgaataatagcctgctggtacctactagcggtatttactttgtctatagccaggtggtgttcagcggcaaggcttatagtcctaaggcgaccagcagtcccctttacctggctcatgaggtgcagctgttctcttcacagtatccttttcacgtgcctcttttatcgtcgcagaagatggtttaccctgggttacaggagccctggctgcattccatgtatcacggtgctgcctttcagctcactcagggcgaccaactgtcaactcatacagacggaattcctcaccttgtgctgagcccaagtacagtcttcttcggcgctttcgcgctgtag

SEQ ID NO: 304313 - DNA, 618 bp, Artificial Sequence
  derived and/or modified sequence
atgaccccgccagaacgactctttctccccagagtgtgcggcaccacactgcacctcctgcttctcggactgttgctcgtcttgctgcccggtgcacaaggactgccaggcgtgggtctgaccccctcagctgcccagactgcaaggcagcatccaaaaatgcacttagcccactctactctgaagccagctgcccacctcatcggggacccaagcaagcagaatagtctcctctggagagctaacacagaccgggcttttttgcaggatggtttctcacttagcaataactccctgctggtgcccacttccgggatctacttcgtttattcccaggttgttttcagtggaaaagcctactcccccaaggccacctcaagtccattgtaccttgcacacgaagttcagctcttctccagtcagtacccctttcatgtgccgttgttgagctctcagaaaatggtctatcctggcctgcaggaaccttggttacactccatgtaccatggagctgccttccagctgactcagggcgatcagttaagtacccatacagacggaatccctcatcttgtcctgtccccaagtaccgtctttttcggggcttttgccctctag

SEQ ID NO: 304314 - DNA, 417 bp, Artificial Sequence
  derived and/or modified sequence
atgaccccacccgagcgtctgtttcttccacgggtgtgtgggaccacattacacctgctgttgttggggttgttgctcgtcctgctacccggagcccaaggtctacccggtgtgggactgacaccctcggcggctcagacagcacggcagcacccgaaaatgcacctggcccactctacattgaagccggctgcccatcttatcggcgatccatccaagcaaaattcgctcctttggagggccaacacagatagagcattcctccaggatggcttcagtctgagtaataacagcctgctggtgccaacaagcggaatctattttgtctatagccagggctcctcgccccctctgctgtggcccttccagcaattgaaatcttcactgatcaagtctcctgaattaagtaagaagtag

SEQ ID NO: 304315 - DNA, 618 bp, Artificial Sequence
  derived and/or modified sequence
atgacaccccctgaacggctgttcttgcctcgcgtgtgtggaaccacattacacttattgctcctcggccttctgctcgttctgcttccgggagcgcagggcttgcctggtgtcggattgacaccctcggcagcccaaaccgcccgacagcatcccaagatgcacctagctcatagcacgctcaaacccgctgcccacctcatcggagatcccagtaagcagaactcccttttgtggagggctaacaccgatagggctttcctccaagatgggttctcactcagtaataactcactgctcgtgcctacctccggtatttattttgtttattcacaagtagttttcagcggtaaggcttacagtccaaaagctacctcctcccctctgtatctggcccatgaggtgcaactcttttccagccaatatccatttcacgtgcccctactgtcatcccagaagatggtgtaccccggtctgcaggaaccttggctccactccatgtaccatggcgcagcgtttcagttgacacaaggtgatcagctttctactcatactgacggcattcctcacctggttctgtcaccttccaccgtgttttttggtgctttcgccctatag

SEQ ID NO: 304316 - DNA, 618 bp, Artificial Sequence
  derived and/or modified sequence
atgacaccaccagagcgcttgtttctgcccagagtttgtggcaccactctgcacctcctgcttctagggcttctcctggtcctcttacctggtgctcagggcctccccggtgtgggactgacaccatccgctgctcagaccgcaagacagcatcccaagatgcacctggcgcattccacgctgaagcccgcagcccatctgatcggtgatcctagcaagcaaaactctctcctgtggcgcgctaatacggaccgggctttcctgcaggatggattctcactttctaacaactctctgctcgtgccaacgtccggaatctacttcgtgtatagtcaggtggtcttctccggtaaagcatactctccaaaagccacatcctctccactgtacctcgcccatgaggtgcagctttttagcagccagtatcccttccatgtgccccttctttctagccagaaaatggtatatcccggtctccaggagccctggttgcactccatgtatcatggcgctgctttccagttgactcagggagatcaactttctactcacaccgatggaatccctcatcttgtcctcagtccatccactgtgtttttcggtgccttcgcactctag

SEQ ID NO: 304317 - DNA, 417 bp, Artificial Sequence
  derived and/or modified sequence
atgactccacctgaacgtctgtttctcccaagggtttgtggtactaccctccacctcctcctcctggggctcctgctggttctgctgccaggcgcacagggtctccctggcgtgggactgaccccttccgctgctcagacagcaaggcagcatcccaagatgcatttggcccactcaacactgaaaccagctgcacacctgataggcgaccccagcaaacaaaactcattattatggagagcaaatacagacagagcttttctgcaggatggcttcagtctctccaacaactctttattggtgcccacatcaggcatatattttgtatattcacaaggcagcagtccacccctgctctggccatttcaacagctgaaaagttcactcattaaatccccagagctgtctaaaaaatag

SEQ ID NO: 304318 - DNA, 417 bp, Artificial Sequence
  derived and/or modified sequence
atgacccctcccgagaggctgttcttgccgagggtttgcggtaccactctacatttgctcctgctaggccttctgctcgtgctgttacccggtgctcagggacttcctggcgtcggcctgaccccgtctgccgcacaaacggccaggcaacacccaaaaatgcacctggctcactctacattgaagcctgcagcccacttgatcggtgaccccagcaaacagaacagtctcctgtggcgagccaatactgatcgagcttttctccaagacggcttttctctcagcaataactccttgttagtacctacctcaggaatttatttcgtctacagccagggaagttccccaccgctcctttggccattccaacagctgaagtcttcgttgataaagtctccagagctctccaagaaatag

SEQ ID NO: 304319 - DNA, 618 bp, Artificial Sequence
  derived and/or modified sequence
atgaccccccccgagagactgttcctgcccagagtgtgcggcaccaccctgcacctgctgctgctgggcctgctgctggtgctgctgcccggcgcccagggcctgcccggcgtgggcctgacccccagcgccgcccagaccgccagacagcaccccaagatgcacctggcccacagcaccctgaagcccgccgcccacctgatcggcgaccccagcaagcagaacagcctgctgtggagagccaacaccgacagagccttcctgcaggacggcttcagcctgagcaacaacagcctgctggtgcccaccagcggcatctacttcgtgtacagccaggtggtgttcagcggcaaggcctacagccccaaggccaccagcagccccctgtacctggcccacgaggtgcagctgttcagcagccagtaccccttccacgtgcccctgctgagcagccagaagatggtgtaccccggcctgcaggagccctggctgcacagcatgtaccacggcgccgccttccagctgacccagggcgaccagctgagcacccacaccgacggcatcccccacctggtgctgagccccagcaccgtgttcttcggcgccttcgccctgtag

SEQ ID NO: 304320 - DNA, 417 bp, Artificial Sequence
  derived and/or modified sequence
atgaccccccccgagagactgttcctgcccagagtgtgcggcaccaccctgcacctgctgctgctgggcctgctgctggtgctgctgcccggcgcccagggcctgcccggcgtgggcctgacccccagcgccgcccagaccgccagacagcaccccaagatgcacctggcccacagcaccctgaagcccgccgcccacctgatcggcgaccccagcaagcagaacagcctgctgtggagagccaacaccgacagagccttcctgcaggacggcttcagcctgagcaacaacagcctgctggtgcccaccagcggcatctacttcgtgtacagccagggcagcagcccccccctgctgtggcccttccagcagctgaagagcagcctgatcaagagccccgagctgagcaagaagtag

SEQ ID NO: 304321 - DNA, 867 bp, Artificial Sequence
  derived and/or modified sequence
atgaatcggtacacaaccatgcgacagctgggagatggaacttacggttccgtgctcatgggtaagagcaacgaatcaggagagttagtggctatcaaaaggatgaagcgaaaattttactcgtgggatgaatgtatgaatctgagagaggttaagtctctcaaaaaactcaatcatgctaatgttattaaactgaaggaagtgatccgggaaaacgatcatctgtacttcattttcgagtacatgaaggagaacctctaccagctgatgaaggatagaaataaactgtttccggaatccgtgatccgcaatataatgtatcagatccttcagggattggccttcattcacaagcacggtttttttcatagggatatgaagcccgagaacctattgtgtatgggacccgaactggtgaaaatcgcggattttggcctagctcgggagctgcgcagtcagccgccctatacagattacgtttctaccaggtggtatcgcgcaccagaggtgctacttcggtcctctgtgtattcctcccctattgatgtttgggctgtcggctcaatcatggcagagctgtacatgctgcggcctcttttcccggggacaagtgaggtagatgagatcttcaagatctgccaagtcttaggaacccccaaaaagagcgactggccagaagggtatcagctagccagtagtatgaatttcaggttccctcagtgtgttccgatcaatctcaagacactgattccaaatgcttctaacgaagcaatccagctgatgaccgagatgctgaattgggacccaaaaaaaaggcctacagcatctcagccttgttttctagttgaggttgagcggccgaactag

SEQ ID NO: 304322 - DNA, 1374 bp, Artificial Sequence
  derived and/or modified sequence
atgaacagatacactactatgaggcaattaggagacggcacttacggcagcgtattaatgggtaagagtaacgagtcgggtgaacttgtggctattaagcgaatgaaacggaagttttattcctgggacgaatgcatgaacctgagggaggttaagagcctcaagaaactcaatcacgcaaacgtgatcaagctgaaggaggtgatacgagagaacgatcatctgtattttatctttgaatacatgaaagaaaacctctatcagttaatgaaggacaggaacaagctattccctgaatctgtgatccggaacataatgtatcagattctccagggcctcgcctttatacacaaacatggattcttccatcgagatatgaagcctgaaaacctactttgtatgggaccagaactggtcaaaattgctgactttggcctggcgagagaactgcgttcccagcccccctacaccgattatgtgtctactagatggtatcgcgcccccgaagttctcctacgatctagtgtgtactcctcccctatcgacgtgtgggccgtcggaagtatcatggccgaactgtatatgctgaggcctctcttcccaggcacgtcggaagtggatgagatctttaagatttgtcaggtgttgggcaccccaaaaaaatccgactggccggaagggtatcagctcgcgtcctccatgaattttagattcccccagtgtgttcccataaacttgaaaacgcttataccgaacgcgtctaatgaggccattcaactgatgactgaaatgctgaactgggatccaaagaaacgtcctacagctagccaagcactcaagcatccttactttcaggtgggtcaggtcctgggccccagcagcaatcacctggaatccaaacagtctctgaacaaacagctgcagcctctggaatctaagccatctctggttgaggttgaacccaaacctctacctgacattatcgatcaagtggtaggacaaccgcagcccaaaaccagccagcagcccctacagccgatccagccaccccagaatctgtctgtccagcagccccccaagcagcaatcccaagaaaaacccccacagactctattcccctcaattgtgaaaaatatgccaaccaaacctaacggcactctgtcccacaagtccggacggcggagatgggggcagacaattttcaagtctggagactcttgggaggagctcgaggactacgatttcggggcatcccactcaaagaagccaagtatgggggtcttcaaggagaagagaaagaaggattcaccttttagacagcaggtaaaaatggcagttatttctctgtccgctcatcaattccccactttgtag

SEQ ID NO: 304323 - DNA, 867 bp, Artificial Sequence
  derived and/or modified sequence
atgaaccgctacaccaccatgaggcagctgggagatggcacctacggctctgtgctgatgggcaagagcaatgaaagtggagagctggtggccatcaagaggatgaagaggaagttctacagctgggatgagtgcatgaacctgcgggaggtgaagagcctgaagaagctgaaccacgccaacgtcatcaagctgaaggaggtgatcagagaaaatgaccacctgtacttcatctttgagtacatgaaggagaacctgtaccagctgatgaaggacaggaacaagctgtttcctgagagcgtcatccggaacatcatgtaccagatcctgcagggcctggccttcatccacaagcacggcttcttccaccgggacatgaagccagagaacctgctgtgcatgggccctgagctggtgaagattgctgactttggcctggcccgggagctgcggagccagcccccctacacagattatgtgtccacccgctggtaccgggcccctgaggtgctgctgcggagctctgtgtacagcagccccattgatgtgtgggccgtgggcagcatcatggccgagctgtacatgctgcggcccctcttccctggcaccagcgaggtggatgagatcttcaagatctgccaggtgctgggcacccccaagaagagtgactggccagagggctaccagctggccagctccatgaacttccgcttcccccagtgtgtgcccatcaacctgaagaccctcatccccaatgccagcaatgaggccatccagctgatgacagagatgctgaactgggaccccaagaagaggcccacagccagccagccctgcttcctggtggaggtggagcggcccaactag

SEQ ID NO: 304324 - DNA, 1374 bp, Artificial Sequence
  derived and/or modified sequence
atgaaccgctacaccaccatgaggcagctgggagatggcacctacggctctgtgctgatgggcaagagcaatgaaagtggagagctggtggccatcaagaggatgaagaggaagttctacagctgggatgagtgcatgaacctgcgggaggtgaagagcctgaagaagctgaaccacgccaacgtcatcaagctgaaggaggtgatcagagaaaatgaccacctgtacttcatctttgagtacatgaaggagaacctgtaccagctgatgaaggacaggaacaagctgtttcctgagagcgtcatccggaacatcatgtaccagatcctgcagggcctggccttcatccacaagcacggcttcttccaccgggacatgaagccagagaacctgctgtgcatgggccctgagctggtgaagattgctgactttggcctggcccgggagctgcggagccagcccccctacacagattatgtgtccacccgctggtaccgggcccctgaggtgctgctgcggagctctgtgtacagcagccccattgatgtgtgggccgtgggcagcatcatggccgagctgtacatgctgcggcccctcttccctggcaccagcgaggtggatgagatcttcaagatctgccaggtgctgggcacccccaagaagagtgactggccagagggctaccagctggccagctccatgaacttccgcttcccccagtgtgtgcccatcaacctgaagaccctcatccccaatgccagcaatgaggccatccagctgatgacagagatgctgaactgggaccccaagaagaggcccacagccagccaggccctgaagcacccctacttccaggtgggccaggtgctgggccccagcagcaaccacctggagagcaagcagagcctgaacaagcagctgcagcccctggagagcaagcccagcctggtggaggtggagcccaagcccctgcctgacatcatcgaccaggtggtgggccagccccagcccaagaccagccagcagcccctgcagcccatccagcccccccagaacctgtctgtgcagcagccccccaagcagcagagccaggagaagccaccccagaccctcttccccagcatcgtgaagaacatgcccaccaagcccaacggcaccctgagccacaagtctggaagaagacgctggggccagaccatcttcaagagcggggacagctgggaggagctggaggactatgactttggagccagccacagcaagaagcccagcatgggcgtcttcaaggagaagaggaagaaggacagccccttccggcagcaggtgaagatggctgtgatcagcctgagcgcccaccagttccccaccctgtag

SEQ ID NO: 304325 - DNA, 1788 bp, Artificial Sequence
  derived and/or modified sequence
acaagggagcgaacgagggtgtttataagaatggaagtgttgtttccttgcccgattccttcatgctatatctcatgaacctctgtaatcttgggggagagactatatttaatgatgacaaacctgtcaccagtgtagcaacaacagtgtgaggacaaaagcaaataaaaattaagaagcgttcaaatttatattcaacaaggaagtcatttcaatcaacaacttctgctgcattatttttccaagatgaaccgatacacaaccatgagacagttgggggacggcacgtatgggagtgtgcttatgggcaagagtaatgaatccggggagctggtggccatcaaaaggatgaagagaaagttctattcttgggatgaatgcatgaacttgagagaagttaagtctctgaagaaacttaatcatgccaatgttattaaattgaaagaagttatcagagaaaatgaccatctttattttatatttgaatatatgaaagaaaacctctatcaattaatgaaagacagaaacaagttgttccctgaatcagtcatcagaaatattatgtatcaaatattgcaagggctggcttttatccataaacatggcttttttcatagggacatgaaaccagaaaacttgctttgtatgggtccagagcttgtgaaaattgctgattttggacttgcaagagaattaaggtcacagccaccatacactgattatgtatctaccagatggtatcgtgcccctgaagttttactgagatcttcagtttatagttctcccattgatgtgtgggctgttggaagtatcatggctgaactctatatgttaaggccacttttcccagggacaagtgaggtcgatgaaatctttaaaatttgccaagttttagggactcccaaaaaaagtgactggccagaaggataccagctggcatcctctatgaacttccgttttccccagtgtgttcctataaacttaaaaactcttattcccaatgccagtaatgaagctattcagctcatgaccgaaatgttgaattgggatccaaagaaacgaccgacagcaagccagccctgctttttagtggaagtggaaagacctaattagggagagaggttggttaagttgtagaatatgaagaccatttaaagtaccaagctgccttctgttcctctaaaaactgcccttacacatgggaggagttaactgttggtcagggctatgttcccacctatgtggggactggctaaaggcaggaggttcaggggaacagagcttgaccatcttaaggaacccatccccccaaaaatgaccagctactttgcccaggcattgaaacacccatattttcaagttggtcaggtattaggcccttcgtcaaatcatctggaatcaaaacagtctttaaataagcagctgcaaccattagaatcaaagccatctttagttgaggtagagcctaagcctctgccggatataatcgatcaggttgttggacaaccccagccaaaaactagccagcagccactgcagcccattcagccgccacagaacctgagcgtccagcaacctccaaagcaacagagtcaggagaaaccgccacaaacgctattcccgagcatcgtcaaaaacatgccaactaagccaaatggcacactgagtcataaaagtggtaggaggcgttggggtcagactatcttcaagtctggagatagctgggaagagttggaggactatgatttcggagcctcccattccaagaagccaagcatgggtgttttt

SEQ ID NO: 304326 - DNA, 867 bp, Artificial Sequence
  derived and/or modified sequence
atgaaccggtacaccaccatgcggcagctgggcgacggcacctacggctccgtcctgatgggtaaatctaacgaatcaggggagctcgtagccatcaagaggatgaaacggaagttttatagttgggatgaatgtatgaacctccgagaagtgaaatctctgaagaagttgaaccacgctaacgtgatcaaattgaaagaggtgatccgggaaaacgatcacttgtatttcatatttgaatacatgaaagagaacctctatcagctcatgaaggatcgcaacaaactcttccccgagagcgtgattcggaatataatgtaccagattcttcagggactggcatttattcacaaacatggattcttccaccgcgacatgaagcctgaaaatctgttgtgcatgggaccagagctcgttaagattgccgactttgggctggcccgggagttacgtagccagcctccttatacagactatgtgtccactcggtggtatcgagctcctgaggtgttgctgcggagttctgtttacagcagccccattgacgtctgggcagtgggatccattatggccgagctgtacatgcttcggcctttattccctggcacaagcgaagtggatgagattttcaaaatatgtcaggtcctggggacacccaaaaagagcgactggcctgaaggctatcaattagcttcctctatgaactttagatttccacagtgtgtgcccattaacctgaaaactcttatccctaacgcatcgaatgaggccatccaactgatgacagagatgctaaactgggatcccaaaaaaaggcccacggcctcccaaccctgttttcttgtggaagtcgagagacccaactag

SEQ ID NO: 304327 - DNA, 1374 bp, Artificial Sequence
  derived and/or modified sequence
atgaaccggtacaccaccatgcggcagctgggcgacggcacctacggaagtgtactgatggggaagagcaacgaaagtggggaacttgtcgctatcaaacggatgaagagaaagttctattcatgggacgaatgcatgaatttacgggaggtgaagagcctgaaaaaactgaatcatgctaatgtaatcaagctgaaggaagttattcgggagaacgaccatttgtatttcatttttgagtacatgaaagagaacttgtaccaactcatgaaagatagaaacaaactttttcccgagtcagtcatcaggaatattatgtaccagattctccaaggtctggctttcattcacaagcacggattttttcatcgcgatatgaagcccgaaaatctcctatgtatggggcccgaattggtgaagattgctgactttggcctggcaagggagcttcgaagccagcctccctacaccgattatgtaagcacccgatggtaccgcgcccctgaagtcctcctgagaagctctgtgtatagctctcccattgatgtgtgggctgtgggctcaatcatggccgaattatatatgttgcgcccacttttcccaggcacttcagaggtcgatgagatttttaagatttgccaggttctgggaaccccaaaaaagtcagactggcctgaggggtaccagcttgctagttctatgaacttccggtttccccagtgtgtgcctatcaatcttaagactctgatacccaacgcctcgaatgaagcgatacaactgatgactgagatgctgaattgggatcctaagaagaggcctacggcttcccaagcactgaaacacccttactttcaggtgggccaagtcctggggccatcctccaaccacttagagtctaaacagtcactgaataagcagctccagccactggagagcaagccgtccctggttgaggtggaacctaaaccactgccagatattattgatcaggttgtaggacagcctcaaccaaaaactagccaacaacctctgcagcctatccaaccaccacagaatcttagtgtgcaacagcccccaaaacaacagagccaagagaaaccgccgcagaccctatttccttccattgtcaaaaatatgcctacaaagccaaacgggactctctcacataagtcaggcagaagacggtggggccagaccatattcaagagtggtgatagttgggaagagcttgaggactacgactttggagcctcgcacagtaaaaaaccttctatgggcgtgttcaaggagaagaggaagaaagactccccattccggcagcaggtgaaaatggccgttatttccctctccgcccaccagtttcctacattatag

SEQ ID NO: 304328 - DNA, 867 bp, Artificial Sequence
  derived and/or modified sequence
atgaaccgctatactactatgcggcaactcggggatggcacttatggaagtgtgctcatgggtaagtcaaacgaatccggcgagctggtcgcaattaagagaatgaagaggaaattctattcgtgggacgagtgcatgaatctgcgcgaggtcaagtctctgaagaaattaaaccacgctaacgttatcaaactgaaagaggtaatccgcgaaaatgaccatctatatttcatctttgagtatatgaaagagaacctgtaccagttaatgaaagaccgcaataagctgttcccggagtctgttattaggaatattatgtatcaaattctccagggcttggcttttattcacaaacacggattttttcaccgagacatgaagcccgaaaacctgttgtgtatgggccctgagttggtcaaaattgcggacttcggactcgctcgggaactcagatcacagcctccatatacagattatgtctccactcgctggtaccgggcaccagaagtgttgctccgcagttcagtctattcctctcccatagacgtgtgggccgttgggtcaatcatggcggaactgtatatgctgaggcctctgtttccgggaactagtgaggtagacgagatattcaaaatatgccaggtgttggggacgcccaaaaagagcgactggcctgaaggctatcaactggcaagcagcatgaactttcgctttccccagtgcgtacctatcaatcttaagaccctaataccgaatgcctctaacgaggccatacagttaatgactgagatgctgaactgggatccgaagaaacgtcctaccgcgagtcagccctgctttctagtggaagttgaacgccctaactag

SEQ ID NO: 304329 - DNA, 1374 bp, Artificial Sequence
  derived and/or modified sequence
atgaaccgatacaccactatgcgccagctgggggatgggacatacggatctgtattgatgggcaagtcaaacgagtcaggggaactggtcgccatcaaacggatgaaacgaaagttctattcctgggacgagtgcatgaacctgcgtgaagttaagagcttgaagaaactcaaccacgcgaacgtgatcaagctaaaagaggtgattcgagaaaatgatcatctttacttcatttttgagtatatgaaggagaatctctaccaactgatgaaagatcgcaataaactcttcccagagagcgtgataagaaatatcatgtatcagatcctgcaggggcttgcctttattcacaagcatggtttttttcatagggacatgaagcccgagaatctcctgtgcatggggcctgaactggttaaaatcgcggatttcggactggccagagagctgagatcccagcccccatacaccgattacgtctccacgcgctggtacagggcacctgaagtactactcaggtcctctgtgtattcgtcacccatcgacgtttgggcagtgggtagcattatggctgagctgtatatgctgcggccactgttcccagggacatccgaggtggacgaaattttcaaaatttgccaggtactgggcacaccgaagaagtctgactggcccgagggctatcagcttgcttcctcaatgaacttcaggtttcctcagtgcgtcccgatcaatttgaaaaccctgatccctaacgcctcaaatgaggcaatccaactcatgacagaaatgctgaattgggatcccaagaagcggcctactgcttcgcaagccctgaagcacccctacttccaagtgggccaggttttagggccatctagtaaccatctggagagcaagcaatccctgaataaacagctgcaaccgctggagtctaaacctagcctggtggaggtggagccaaaaccgttgccggatatcatcgatcaggttgtcggccagccgcagcccaaaacgtcccagcagccgctgcaacccattcagcctccccaaaacctatctgtgcaacaacccccaaagcagcaatctcaggaaaaacctccccaaacactgtttccaagcattgtcaagaatatgcccactaagcctaacggcaccctgtctcataaatccggacggaggaggtggggccagactatcttcaaaagcggcgactcctgggaagaattagaggattatgacttcggggcttctcactctaagaagccttccatgggcgtctttaaagaaaagcgtaagaaggacagtcccttccgccaacaggttaagatggcagtgatctccctgtcagcccaccagtttcccaccctatag

SEQ ID NO: 304330 - DNA, 867 bp, Artificial Sequence
  derived and/or modified sequence
atgaacagatacaccaccatgagacagctgggcgacggcacctacggcagcgtgctgatgggcaagagcaacgagagcggcgagctggtggccatcaagagaatgaagagaaagttctacagctgggacgagtgcatgaacctgagagaggtgaagagcctgaagaagctgaaccacgccaacgtgatcaagctgaaggaggtgatcagagagaacgaccacctgtacttcatcttcgagtacatgaaggagaacctgtaccagctgatgaaggacagaaacaagctgttccccgagagcgtgatcagaaacatcatgtaccagatcctgcagggcctggccttcatccacaagcacggcttcttccacagagacatgaagcccgagaacctgctgtgcatgggccccgagctggtgaagatcgccgacttcggcctggccagagagctgagaagccagcccccctacaccgactacgtgagcaccagatggtacagagcccccgaggtgctgctgagaagcagcgtgtacagcagccccatcgacgtgtgggccgtgggcagcatcatggccgagctgtacatgctgagacccctgttccccggcaccagcgaggtggacgagatcttcaagatctgccaggtgctgggcacccccaagaagagcgactggcccgagggctaccagctggccagcagcatgaacttcagattcccccagtgcgtgcccatcaacctgaagaccctgatccccaacgccagcaacgaggccatccagctgatgaccgagatgctgaactgggaccccaagaagagacccaccgccagccagccctgcttcctggtggaggtggagagacccaactag

SEQ ID NO: 304331 - DNA, 1374 bp, Artificial Sequence
  derived and/or modified sequence
atgaacagatacaccaccatgagacagctgggcgacggcacctacggcagcgtgctgatgggcaagagcaacgagagcggcgagctggtggccatcaagagaatgaagagaaagttctacagctgggacgagtgcatgaacctgagagaggtgaagagcctgaagaagctgaaccacgccaacgtgatcaagctgaaggaggtgatcagagagaacgaccacctgtacttcatcttcgagtacatgaaggagaacctgtaccagctgatgaaggacagaaacaagctgttccccgagagcgtgatcagaaacatcatgtaccagatcctgcagggcctggccttcatccacaagcacggcttcttccacagagacatgaagcccgagaacctgctgtgcatgggccccgagctggtgaagatcgccgacttcggcctggccagagagctgagaagccagcccccctacaccgactacgtgagcaccagatggtacagagcccccgaggtgctgctgagaagcagcgtgtacagcagccccatcgacgtgtgggccgtgggcagcatcatggccgagctgtacatgctgagacccctgttccccggcaccagcgaggtggacgagatcttcaagatctgccaggtgctgggcacccccaagaagagcgactggcccgagggctaccagctggccagcagcatgaacttcagattcccccagtgcgtgcccatcaacctgaagaccctgatccccaacgccagcaacgaggccatccagctgatgaccgagatgctgaactgggaccccaagaagagacccaccgccagccaggccctgaagcacccctacttccaggtgggccaggtgctgggccccagcagcaaccacctggagagcaagcagagcctgaacaagcagctgcagcccctggagagcaagcccagcctggtggaggtggagcccaagcccctgcccgacatcatcgaccaggtggtgggccagccccagcccaagaccagccagcagcccctgcagcccatccagcccccccagaacctgagcgtgcagcagccccccaagcagcagagccaggagaagcccccccagaccctgttccccagcatcgtgaagaacatgcccaccaagcccaacggcaccctgagccacaagagcggcagaagaagatggggccagaccatcttcaagagcggcgacagctgggaggagctggaggactacgacttcggcgccagccacagcaagaagcccagcatgggcgtgttcaaggagaagagaaagaaggacagccccttcagacagcaggtgaagatggccgtgatcagcctgagcgcccaccagttccccaccctgtag

SEQ ID NO: 304332 - DNA, 1056 bp, Artificial Sequence
  derived and/or modified sequence
atggttctgtcacaggacgggagcgtgcagagtggatttctggcagaggggcatctggacggccagcccttcctgagatatgaccggcagaagcgccgggctaaaccccaggggcagtgggccgagaatgttctgggcgctaagacatgggacaccgagaccgaggacctgactgaaaacggtcaggatctgcgacgcaccctgactcacatcaaggaccagaaggggggactacattccctgcaggaaatcagagtgtgtgagatccatgaggatagcagcactcggggtagcagacacttctattacgatggagaactctttttaagccaaaatcttgagacgcaggaatccacagtgccacagtcctcccgggcccaaactcttgctatgaatgtgaccaatttttggaaagaagatgccatgaaaacaaaaactcattatagggctatgcaagccgattgcttacagaaactccagcgatacttgaagtccggtgtggctataagaaggacggtccctccaatggtgaacgttacttgttccgaggtcagcgaaggtaatatcacagtgacgtgtagggcaagctccttctatccccgcaatatcacgctgacgtggaggcaggacggcgttagcctctcccacaatacccaacaatggggcgacgttctccccgacggaaacggcacctaccagacttgggtagcgacaaggattcggcagggtgaggaacagaggtttacatgttatatggaacactcagggaaccatggcactcaccccgtgcctagcggcaaagccctggtcctgcaatctcagaggactgactttccctatgtgtccgctgccatgccctgtttcgtcatcatcatcatcttatgcgtgccatgctgcaaaaagaaaactagcgcagctgaaggtccggagctggtgagcctccaggtgctggatcaacaccctgtcggtacaggggatcaccgagatgcggctcagctgggatttcagcccctgatgagcgccaccggtagtaccggatccaccgagggtacatag

SEQ ID NO: 304333 - DNA, 1056 bp, Artificial Sequence
  derived and/or modified sequence
atggtcttgtctcaggacggaagcgtgcagtccggttttctcgccgaaggtcacctggacggccagccgttcctgcgctacgataggcagaagcgccgagccaaaccgcagggacagtgggcagagaatgtccttggcgcgaaaacatgggatacagagacagaggatctcacagaaaacggccaagacctgcgtagaacactaacacacatcaaagaccagaagggtggactgcattcattgcaggaaattcgagtgtgcgaaattcacgaggactcgtctaccagaggctcccggcacttctattacgacggcgagttatttttatcccagaatcttgagacacaggaatccaccgttccccagtcttccagggcccagacactggccatgaacgtgactaacttctggaaggaggacgccatgaaaacaaaaacacactacagagctatgcaagccgattgtttgcagaaattgcagagatatttgaagagtggtgtggccatacgccgtacggttccccccatggtcaacgtaacctgttctgaggtgagcgaaggtaatatcactgttacctgtagggcttcctctttttaccctagaaatattactttaacatggcgacaggatggagtttctctgtctcacaatacacaacaatggggggacgtgctccccgacggtaatggaacataccagacctgggtggctaccagaattcggcagggagaggaacagcgttttacctgctacatggagcactccggcaaccacggaacccatcccgtcccaagtggtaaagctcttgtgttgcagtctcagcggacagattttccttatgtgagcgccgcgatgccatgcttcgtgatcatcattattctctgtgttccttgttgtaagaaaaagactagcgctgccgagggtcccgaactggttagcctgcaggtactggatcaacatcctgtggggaccggagaccacagggatgctgcccaactaggcttccagcccctgatgtctgctacagggtctactgggtcaacagaggggacctag

SEQ ID NO: 304334 - DNA, 1056 bp, Artificial Sequence
  derived and/or modified sequence
atggtgctgagccaggacggctctgtgcagagcggcttcctggccgagggccacctggatggccagcccttcctgcgctatgaccggcagaagaggcgggccaagccccagggccagtgggccgagaatgtgctgggcgccaagacctgggacacagaaacagaggacctgacagaaaatggccaggacctgcggaggaccctgacccacatcaaggaccagaagggcggcctgcacagcctgcaggagatccgggtgtgtgagatccacgaggacagcagcacccggggcagccgccacttctactatgatggagagctgttcctgagccagaacctggagacccaggagagcacagtgccccagagcagccgggcccagaccctggccatgaatgtgaccaacttctggaaggaggatgccatgaagaccaagacccactaccgggccatgcaggccgactgcctgcagaagctgcagcgctacctgaagtctggagtggccatccggaggacagtgccccccatggtgaatgtgacctgcagcgaggtgtctgagggcaacatcaccgtgacctgccgggccagcagcttctaccccaggaacatcaccctgacctggaggcaggatggagtgtccctgagccacaacacccagcagtggggagatgtgctgcctgatggaaatggcacctaccagacctgggtggccacccgcatccggcagggcgaggagcagcgcttcacctgctacatggagcacagcggcaaccacggcacccaccctgtgcccagcggcaaggccctggtgctgcagagccagaggacagacttcccctacgtgtctgctgccatgccctgcttcgtcatcatcatcatcctgtgtgtgccctgctgcaagaagaagaccagcgctgctgagggccctgagctggtgtccctgcaggtgctggaccagcaccctgtgggcaccggggaccacagagatgctgcccagctgggcttccagcccctgatgtctgccaccggcagcacaggcagcacagagggcacctag

SEQ ID NO: 304335 - DNA, 1056 bp, Artificial Sequence
  derived and/or modified sequence
atggtgctgagccaggacggcagcgtgcagagcggcttcctggccgagggccacttagatgggcaacctttccttcgatatgatcggcagaagagacgtgcaaagccacagggacaatgggccgagaacgtcctaggtgctaaaacgtgggacacagagaccgaagacctcacagaaaacggacaggatttaagaagaacattaacacatattaaagaccagaagggcgggttgcacagcctgcaggagattagagtatgcgaaattcatgaggacagttctactcgcggatcaaggcatttttattatgacggcgaattgttcctcagtcagaacctagaaactcaggaaagtacagtgccccaatcctctagggcacagactctggcgatgaatgtcactaatttttggaaggaggacgctatgaaaacaaagacccactacagggccatgcaggccgactgtcttcagaaactgcagcgctacctcaagagtggagttgctatcaggcgaactgtgcctcccatggtgaatgtcacatgttcagaagtgtctgagggtaatattaccgtcacctgcagggcatcttcattttaccctaggaacattactttgacctggcgacaggatggggtgagtctgtcacataacactcagcaatggggcgacgtcctgcccgacggcaacggaacgtatcaaacctgggtggccacgcggatcaggcagggagaagaacaaagatttacctgttatatggagcattctgggaaccacggcacccaccccgtgccttccggcaaagccctggtgttgcagtcgcaacgaaccgatttcccatatgtctctgccgccatgccatgcttcgttatcatcatcattctctgcgtcccatgttgcaagaaaaagacctctgcagccgaaggcccagaactcgtgagcctccaggtgctggaccaacatccggttgggaccggggaccatcgagatgcagcacaactcggatttcagcccctcatgagcgccacgggttcgactggcagcaccgagggtacctag

SEQ ID NO: 304336 - DNA, 1056 bp, Artificial Sequence
  derived and/or modified sequence
atggtgctgagccaggacggcagcgtgcagagcggcttcctggccgaggggcacctcgacgggcagccctttctgcggtatgatcgccagaaaagacgagccaaaccacagggacagtgggcggaaaatgtcctgggcgcgaaaacgtgggatacagaaaccgaagatctgacggagaacggccaggacttgcgacgtactttgacccacattaaggaccagaagggaggactgcatagcctacaggaaatccgcgtgtgcgagatccacgaagactccagcaccaggggtagtcgtcatttttattacgatggcgagctgtttctatcacagaatctggaaacccaagagagtactgtgccacagtccagccgagcacagaccctggccatgaatgttactaacttttggaaggaagacgcgatgaagacaaagacccactaccgtgcaatgcaggctgattgccttcagaagttacagaggtacttgaaaagtggagtggcgattaggagaactgtgccccctatggtgaacgtgacatgttctgaagtttccgaagggaacatcacagtcacctgccgggcctcgagcttctaccccaggaatattacacttacatggcggcaggacggagtttcattaagtcataatactcagcagtggggtgacgtgttgccggatggcaacggaacctaccagacttgggtggcaacccggatccgccaaggagaagagcaaagatttacctgctatatggagcattctgggaaccacggaacacacccggtcccaagtggcaaagctttagtcctccagagccagcgtactgattttccatatgtaagcgccgcgatgccatgttttgtaatcatcatcatcttgtgcgtgccttgctgcaaaaagaagacatccgcagctgaagggcctgagctggtttcacttcaagtcctggaccaacatcctgttggcactggcgatcaccgggatgctgcacagttgggcttccagcccctgatgtccgctactggttcgactggttcgaccgaggggacttag

SEQ ID NO: 304337 - DNA, 1056 bp, Artificial Sequence
  derived and/or modified sequence
atggtgctttcacaggacggcagcgttcagtctggctttctcgcagaagggcacctcgatgggcagcccttcctccgttacgaccgccagaagagacgtgcgaaaccacagggtcagtgggccgagaatgtcttgggcgctaaaacttgggacaccgaaaccgaggatctcactgaaaacgggcaggatctgcgacgaacactgactcacattaaggatcagaagggcggactgcactcactgcaggaaattcgcgtctgtgaaatccacgaggactctagcactcggggatccaggcacttttactatgacggggaactgttcctctctcagaatttagagacacaggaatccacagtgccacagtccagtcgcgctcagaccctcgccatgaatgtgaccaatttctggaaagaggacgctatgaaaactaagacacattaccgagcgatgcaagccgattgtctacagaaactgcagaggtacctgaaatctggtgtggctatccggaggaccgtgccacctatggtgaacgtgacgtgttctgaagtgtcggaaggtaacatcactgtgacgtgcagagcgtcctccttctaccctaggaatatcacacttacttggagacaagatggagtgtctttgtctcataacactcagcagtggggtgatgttcttccggatggaaatggcacataccaaacttgggtcgcgacgcgaattaggcaaggtgaggagcagaggttcacgtgctatatggagcatagcggtaatcacggcactcatcccgttcccagcggcaaggcactagtgttgcaaagccaacggactgatttcccctatgtctcagcagcaatgccctgtttcgtgatcatcattattctgtgtgtgccctgctgcaaaaaaaaaacctccgcagccgaaggccctgaactagtgtccctccaggtacttgaccagcatcccgtgggcacaggggatcatagagacgcggctcagctgggcttccagcccctcatgagtgcaaccggctcaaccgggagcacggaaggtacttag

SEQ ID NO: 304338 - DNA, 1056 bp, Artificial Sequence
  derived and/or modified sequence
atggtgctgtcccaggacggatctgtgcagagcggattcctcgcagagggacacttggacggtcagcccttcctgagatacgacaggcaaaagcgacgagccaaaccacaaggacagtgggctgagaacgtcctgggcgcaaagacctgggacacagagacagaagaccttacggaaaatggccaagacctgagaaggactctcacacatattaaggaccagaagggcggattgcattctctacaggagatcagagtatgcgaaatccatgaagacagtagcacaagggggtctcgccacttttactacgacggggaactcttcttatctcaaaatctcgaaactcaagagtcaaccgtcccccagtcatctagggcccaaacactggcaatgaacgtgacaaacttttggaaggaggatgctatgaaaactaagacgcattatagagctatgcaagctgactgcctgcagaaattgcagaggtacctgaaatccggagtggcaatccgacgaaccgtgccccctatggttaacgtaacttgttcagaagtatcggaaggaaacatcacggtgacttgtagggcaagctcattttatcccagaaacattaccctgacatggcggcaagacggggtgagcctcagccacaatacccagcagtggggggacgttttgcctgacgggaatgggacatatcagacgtgggtggccacccgcatcagacagggtgaagagcagcgcttcacttgctacatggaacattcaggcaaccatgggacccatcccgtgccaagtggaaaggctctggtgctgcagtcacagcgtaccgattttccttacgtgtctgctgccatgccttgcttcgtcatcatcattatactctgcgtgccttgctgcaagaaaaagacctctgccgcagaagggcctgagctcgtcagcctccaggtcctggaccagcatccagtgggaaccggtgatcatagagacgctgcccaattgggtttccagcctttaatgtcagccaccggtagtactggatcgacggagggaacttag

SEQ ID NO: 304339 - DNA, 1056 bp, Artificial Sequence
  derived and/or modified sequence
atggtgctgagccaggacggcagcgtgcagagcggcttcctggccgagggccacctggacggccagcccttcctgagatacgacagacagaagagaagagccaagccccagggccagtgggccgagaacgtgctgggcgccaagacctgggacaccgagaccgaggacctgaccgagaacggccaggacctgagaagaaccctgacccacatcaaggaccagaagggcggcctgcacagcctgcaggagatcagagtgtgcgagatccacgaggacagcagcaccagaggcagcagacacttctactacgacggcgagctgttcctgagccagaacctggagacccaggagagcaccgtgccccagagcagcagagcccagaccctggccatgaacgtgaccaacttctggaaggaggacgccatgaagaccaagacccactacagagccatgcaggccgactgcctgcagaagctgcagagatacctgaagagcggcgtggccatcagaagaaccgtgccccccatggtgaacgtgacctgcagcgaggtgagcgagggcaacatcaccgtgacctgcagagccagcagcttctaccccagaaacatcaccctgacctggagacaggacggcgtgagcctgagccacaacacccagcagtggggcgacgtgctgcccgacggcaacggcacctaccagacctgggtggccaccagaatcagacagggcgaggagcagagattcacctgctacatggagcacagcggcaaccacggcacccaccccgtgcccagcggcaaggccctggtgctgcagagccagagaaccgacttcccctacgtgagcgccgccatgccctgcttcgtgatcatcatcatcctgtgcgtgccctgctgcaagaagaagaccagcgccgccgagggccccgagctggtgagcctgcaggtgctggaccagcaccccgtgggcaccggcgaccacagagacgccgcccagctgggcttccagcccctgatgagcgccaccggcagcaccggcagcaccgagggcacctag

SEQ ID NO: 304340 - protein, 636 aa, Artificial Sequence
  derived and/or modified sequence
MAARPLSRMLRRLLRSSARSCSSGAPVTQPCPGESARAASEEVSRRRQFLREHAAPFSAFLTDSFGRQHSYLRISLTEKCNLRCQYCMPEEGVPLTPKANLLTTEEILTLARLFVKEGIDKIRLTGGEPLIRPDVVDIVAQLQRLEGLRTIGVTTNGINLARLLPQLQKAGLSAINISLDTLVPAKFEFIVRRKGFHKVMEGIHKAIELGYNPVKVNCVVMRGLNEDELLDFAALTEGLPLDVRFIEYMPFDGNKWNFKKMVSYKEMLDTVRQQWPELEKVPEEESSTAKAFKIPGFQGQISFITSMSEHFCGTCNRLRITADGNLKVCLFGNSEVSLRDHLRAGASEQELLRIIGAAVGRKKRQHAGMFSISQMKNRPMILIELFLMFPNSPPANPSIFSWDPLHVQGLRPRMSFSSQVATLWKGCRVPQTPPLAQQRLGSGSFQRHYTSRADSDANSKCLSPGSWASAAPSGPQLTSEQLTHVDSEGRAAMVDVGRKPDTERVAVASAVVLLGPVAFKLVQQNQLKKGDALVVAQLAGVQAAKVTSQLIPLCHHVALSHIQVQLELDSTRHAVKIQASCRARGPTGVEMEALTSAAVAALTLYDMCKAVSRDIVLEEIKLISKTGGQRGDFHRA

SEQ ID NO: 304341 - protein, 636 aa, Artificial Sequence
  derived and/or modified sequence
MWKSWKLRTDVRVREGAGGSPCASSQPGSRGPCFLPGLSSQEVSRRRQFLREHAAPFSAFLTDSFGRQHSYLRISLTEKCNLRCQYCMPEEGVPLTPKANLLTTEEILTLARLFVKEGIDKIRLTGGEPLIRPDVVDIVAQLQRLEGLRTIGVTTNGINLARLLPQLQKAGLSAINISLDTLVPAKFEFIVRRKGFHKVMEGIHKAIELGYNPVKVNCVVMRGLNEDELLDFAALTEGLPLDVRFIEYMPFDGNKWNFKKMVSYKEMLDTVRQQWPELEKVPEEESSTAKAFKIPGFQGQISFITSMSEHFCGTCNRLRITADGNLKVCLFGNSEVSLRDHLRAGASEQELLRIIGAAVGRKKRQHAGMFSISQMKNRPMILIELFLMFPNSPPANPSIFSWDPLHVQGLRPRMSFSSQVATLWKGCRVPQTPPLAQQRLGSGSFQRHYTSRADSDANSKCLSPGSWASAAPSGPQLTSEQLTHVDSEGRAAMVDVGRKPDTERVAVASAVVLLGPVAFKLVQQNQLKKGDALVVAQLAGVQAAKVTSQLIPLCHHVALSHIQVQLELDSTRHAVKIQASCRARGPTGVEMEALTSAAVAALTLYDMCKAVSRDIVLEEIKLISKTGGQRGDFHRA

SEQ ID NO: 304342 - DNA, 1911 bp, Artificial Sequence
  derived and/or modified sequence
atggctgcgagacctcttagcagaatgctgcgtcggctgcttagatcttctgcacgcagctgcagcagcggggcccctgttacacagccatgcccgggagaatcagctagggcagcttccgaggaggtgtcacggcgccgacaattcttgcgcgaacatgcggccccattctctgcctttttgacagattccttcggtaggcagcacagctatttgagaatctctctcacggaaaaatgcaatttgcggtgtcagtattgcatgccagaggagggtgtccccctaacccccaaggccaacctcctgactactgaggaaattctcactctggcgagactctttgtgaaagagggtatcgacaagatacgtctgaccggcggcgagccccttatacgccccgatgtcgtggacatagtcgctcaactacagcggctggaagggctccgtacgataggggtgaccactaacggaatcaacctggctcggcttctgccacagctccagaaagccggattgagcgcaatcaatatctccctcgatacacttgtgcctgctaagtttgagttcattgtgcgccgaaaaggattccacaaagttatggaaggcatacataaggcaattgagctcggctataatccagttaaggttaattgcgtggtcatgaggggattgaatgaggatgaattgcttgatttcgcagctctaactgaagggctgccattagacgtgagatttatcgagtatatgccattcgacggtaacaaatggaacttcaagaaaatggtgagttataaggagatgttagacactgtgaggcaacagtggccagaattggaaaaagtccccgaagaggaatccagcaccgccaaagctttcaagatccccggcttccaggggcagatctccttcatcacctcaatgtccgaacatttttgcggaacttgcaatcgcctaagaatcacagccgacggcaacctcaaagtgtgcctgttcggcaattcagaagtcagcctgagagaccacctgcgcgcaggcgcatccgagcaggaactgctgcggattatcggggccgccgtggggcgcaagaagcggcaacacgctggcatgttttctatctcccagatgaaaaatcggccaatgatcttgattgaacttttcttgatgttcccaaattctccacccgcgaatccatctatcttctcgtgggatccattacacgtgcagggcctgcgaccccgcatgtccttcagcagtcaggtggctaccctgtggaagggctgccgggttccccaaacccccccactcgcacagcagcggttgggaagtggtagttttcaaaggcattacacttctcgggccgatagcgacgccaactccaaatgtctgtctccaggctcctgggccagcgccgctccctctggacctcaattaacctcagagcaattaactcatgtggactctgaaggaagggccgcaatggtagacgttggacgcaagccagatacagaacgggtggccgttgccagtgccgttgtgttgcttggccctgtggcctttaagctcgtgcagcagaatcaactgaaaaagggcgacgctctggtggtcgctcagctggccggggtgcaggctgccaaagttacaagtcagttgatccctttgtgccatcacgtggcactgtcccacatccaggttcaactcgaacttgactccacacggcatgcagtgaagatccaggcatcctgtcgggcccgcggacctacaggggtggagatggaagccttgacctccgccgccgtagccgccttgaccctgtatgatatgtgtaaagctgtgagccgggatatcgttctggaggagattaaactcattagcaagacaggaggccagaggggagatttccaccgggcatag

SEQ ID NO: 304343 - DNA, 1911 bp, Artificial Sequence
  derived and/or modified sequence
atgtggaagagctggaaactgaggaccgacgttcgagtccgagagggagcgggtgggtctccatgcgcttcaagtcagcccggctcacgcggaccatgctttctgcccggacttagtagccaggaagtgtcacgacggaggcaatttcttcgcgaacacgccgcgccttttagcgcttttctcactgacagcttcggccggcagcatagctacctgcggatcagcctcaccgagaagtgcaacctgcgttgccaatattgcatgccagaggaaggggttcccctgaccccaaaggccaatctgctgaccactgaggaaatcttaaccctggctagattatttgttaaggagggtatcgacaagatacgattaacagggggagaacccttaattcgaccagatgtcgtcgacatcgtggctcagctgcagcgcttagaggggctacggactatcggggtcacaacaaacggtattaacctagccagactcctgccccagcttcagaaagcagggctttctgcaattaacatctcattggatactctggttcctgcaaaattcgagttcattgtgcgacggaaaggcttccataaagttatggaaggcatccataaggctatcgagctcgggtacaatccagtaaaagtgaactgtgttgtaatgcggggcctgaacgaggatgaactgttagatttcgctgcattaacggaggggctgccacttgatgtgcgcttcatcgaatacatgccctttgatggcaacaaatggaacttcaagaagatggtcagctataaagagatgttggatactgtccggcagcagtggcctgaactggagaaagtgcctgaagaagagtccagtactgccaaagcctttaagattccagggttccaaggccagattagcttcataacatcaatgagtgagcacttctgtgggacctgcaatcggctaagaatcaccgcagatgggaacttgaaggtgtgcctttttggcaattcagaagtgtctctcagagaccatcttcgcgccggggcctctgaacaggaactgctgcggatcatcggcgcggccgtaggcaggaagaagcgccagcacgccggcatgttctccattagtcaaatgaaaaaccgccctatgatcttgattgagttattcctcatgtttcctaactcaccaccagcgaatcccagtatatttagctgggatcctcttcatgtccagggcttgcgccctcgcatgtcattttcttcccaggtggcaactttgtggaaggggtgtcgggtcccccaaaccccaccactggctcagcagagactgggaagcggaagtttccagcgtcactacacaagtagagcggactcagacgccaactcgaagtgcctgtcacccggctcgtgggcctctgccgccccctccggcccccaactcacgtccgagcaactgacgcacgtagattcggagggaagagctgcaatggttgatgtggggcggaagccagatactgaaagagttgctgttgcaagcgctgtggtactgttaggtccagtggccttcaagctcgtccagcagaaccagctcaagaaaggggacgcccttgtggttgcacagctcgccggagtacaggctgctaaggtgacatctcagcttatcccattgtgtcatcatgtcgcactgtcacatatccaggtgcaattagagttggacagcactcggcacgctgtgaagattcaggccagttgtagggctaggggccccacaggcgtggaaatggaagccctgacaagcgcagccgtcgctgctctgaccctgtatgacatgtgcaaggcagtcagcagggacattgtgttggaggagatcaagcttatttcaaaaaccggcggacagaggggcgacttccatagggcctag

SEQ ID NO: 304344 - DNA, 1911 bp, Artificial Sequence
  derived and/or modified sequence
atggccgcccggcccctgagcaggatgctgcggcggctgctgcggagcagcgcccggagctgcagcagcggggcccctgtgacccagccctgccctggagagagcgcccgggccgccagcgaggaggtgtccagaagacggcagttcctgcgggagcacgccgcccccttcagcgccttcctgacagacagctttggccggcagcacagctacctgcgcatcagcctgacagagaagtgcaacctgcgctgccagtactgcatgcctgaggagggcgtgcccctgacccccaaggccaacctgctgaccacagaggagatcctgaccctggcccggctgtttgtgaaggagggcatcgacaagatccggctgactggaggagagcccctcatccggccagatgtggtggacatcgtggcccagctgcagaggctggagggcctgcggaccatcggcgtgaccaccaacggcatcaacctggcccggctgctgccccagctgcagaaggccggcctgagcgccatcaacatcagcctggacaccctggtgcctgccaagtttgagttcatcgtgcggaggaagggcttccacaaggtgatggagggcatccacaaggccatcgagctgggctacaaccctgtgaaggtgaactgtgtggtgatgaggggcctgaatgaagatgagctgctggactttgctgccctgacagagggcctgcccctggatgtgcgcttcatcgagtacatgccctttgatggcaacaagtggaacttcaagaagatggtgtcctacaaggagatgctggacacagtgcggcagcagtggccagagctggagaaggtgcctgaggaggagagcagcacagccaaggccttcaagatccctggcttccagggccagatctccttcatcacctccatgtctgagcacttctgtggcacctgcaaccggctgcgcatcacagcagatggcaacctgaaggtgtgcctgtttggaaacagcgaggtgtccctgcgggaccacctgcgggccggggccagcgagcaggagctgctgcgcatcattggagctgctgtgggcaggaagaagaggcagcacgccggcatgttcagcatcagccagatgaagaaccggcccatgatcctgattgagctgttcctgatgttccccaacagccccccagccaaccccagcatcttctcctgggaccccctgcacgtgcagggcctgcggcccaggatgtccttcagcagccaggtggccaccctgtggaagggctgccgggtgccccagaccccacccctggcccagcagaggctgggcagcggcagcttccagaggcactacaccagcagagctgacagtgatgccaacagcaagtgcctgagccctggctcctgggccagcgctgcccccagcggcccccagctgaccagcgagcagctgacccacgtggacagcgagggccgggccgccatggtggatgtgggcaggaagccagacacagagcgggtggccgtggccagcgctgtggtgctgctgggccctgtggccttcaagctggtgcagcagaaccagctgaagaagggagatgccctggtggtggcccagctggccggcgtgcaggccgccaaggtgaccagccagctgatccccctgtgccaccacgtggccctgagccacatccaggtgcagctggagctggacagcaccaggcatgctgtgaagatccaggccagctgccgggcccggggccccactggagtggagatggaggccctgaccagcgctgctgtggccgccctgaccctgtatgacatgtgcaaggctgtgtcccgggacatcgtgctggaggagatcaagctgatcagcaagacaggaggccagagaggagacttccaccgggcctag

SEQ ID NO: 304345 - DNA, 1911 bp, Artificial Sequence
  derived and/or modified sequence
atgtggaagtcctggaagctgaggacagatgtgcgggtgcgggagggcgccggcggcagcccctgtgccagcagccagcccggcagccggggcccctgcttcctgcccggcctgagcagccaggaggtgtccagaagacggcagttcctgcgggagcacgccgcccccttcagcgccttcctgacagacagctttggccggcagcacagctacctgcgcatcagcctgacagagaagtgcaacctgcgctgccagtactgcatgcctgaggagggcgtgcccctgacccccaaggccaacctgctgaccacagaggagatcctgaccctggcccggctgtttgtgaaggagggcatcgacaagatccggctgactggaggagagcccctcatccggccagatgtggtggacatcgtggcccagctgcagaggctggagggcctgcggaccatcggcgtgaccaccaacggcatcaacctggcccggctgctgccccagctgcagaaggccggcctgagcgccatcaacatcagcctggacaccctggtgcctgccaagtttgagttcatcgtgcggaggaagggcttccacaaggtgatggagggcatccacaaggccatcgagctgggctacaaccctgtgaaggtgaactgtgtggtgatgaggggcctgaatgaagatgagctgctggactttgctgccctgacagagggcctgcccctggatgtgcgcttcatcgagtacatgccctttgatggcaacaagtggaacttcaagaagatggtgtcctacaaggagatgctggacacagtgcggcagcagtggccagagctggagaaggtgcctgaggaggagagcagcacagccaaggccttcaagatccctggcttccagggccagatctccttcatcacctccatgtctgagcacttctgtggcacctgcaaccggctgcgcatcacagcagatggcaacctgaaggtgtgcctgtttggaaacagcgaggtgtccctgcgggaccacctgcgggccggggccagcgagcaggagctgctgcgcatcattggagctgctgtgggcaggaagaagaggcagcacgccggcatgttcagcatcagccagatgaagaaccggcccatgatcctgattgagctgttcctgatgttccccaacagccccccagccaaccccagcatcttctcctgggaccccctgcacgtgcagggcctgcggcccaggatgtccttcagcagccaggtggccaccctgtggaagggctgccgggtgccccagaccccacccctggcccagcagaggctgggcagcggcagcttccagaggcactacaccagcagagctgacagtgatgccaacagcaagtgcctgagccctggctcctgggccagcgctgcccccagcggcccccagctgaccagcgagcagctgacccacgtggacagcgagggccgggccgccatggtggatgtgggcaggaagccagacacagagcgggtggccgtggccagcgctgtggtgctgctgggccctgtggccttcaagctggtgcagcagaaccagctgaagaagggagatgccctggtggtggcccagctggccggcgtgcaggccgccaaggtgaccagccagctgatccccctgtgccaccacgtggccctgagccacatccaggtgcagctggagctggacagcaccaggcatgctgtgaagatccaggccagctgccgggcccggggccccactggagtggagatggaggccctgaccagcgctgctgtggccgccctgaccctgtatgacatgtgcaaggctgtgtcccgggacatcgtgctggaggagatcaagctgatcagcaagacaggaggccagagaggagacttccaccgggcctag

SEQ ID NO: 304346 - DNA, 2747 bp, Artificial Sequence
  derived and/or modified sequence
cttcatggcggcgcggccactgtcccggatgctgcggcggcttctgaggtccagcgcccggagctgcagctcaggggctccggtgacccagccctgccccggggagtccgcgcgagctgcctcggaggaggtgtccaggcggaggcagttcctgcgggagcatgcggcccccttctccgccttcctcacagacagcttcggccggcagcacagctacctgcggatctccctcacagagaagtgcaacctcagatgtcagtactgcatgcccgaggagggggtcccgctgacccccaaagccaacctgctgaccacagaggagatcctgaccctcgcccggctctttgtgaaggaaggcatcgacaagatccggctcacaggtggagagccgcttatccggccggacgtggtggacattgtggcccagctccagcggctggaagggctgagaaccataggtgttaccaccaatggcatcaacctggcccggctactgccccagcttcagaaggctggtctcagtgccatcaacatcagcctggacaccctggtgcctgccaagtttgagttcattgtccgcaggaaaggcttccacaaggtcatggagggcatccacaaggccatcgagctgggctacaaccctgtgaaggtgaactgtgtggtgatgcgaggccttaacgaggatgaactcctggactttgcggccttgactgagggcctccccctggatgtgcgcttcatagagtatatgccctttgatggcaacaagtggaacttcaagaagatggtcagctataaggagatgctagacactgtccggcagcagtggccagagctggagaaggtgccagaggaggaatccagcacagccaaggcctttaaaatccctggcttccaaggccagatcagcttcatcacatccatgtctgagcatttctgtgggacctgcaaccgcctgcgaatcacagctgatgggaacctcaaggtctgcctctttggaaactctgaggtatccctgcgggatcacctgcgagctggggcctctgagcaggagctgctgagaatcattggggctgctgtgggcaggaagaagcggcagcatgcaggcatgttcagtatttcccagatgaagaaccggcccatgatcctcatcgagttatttttgatgttccccaattccccaccagccaatccaagcattttctcctgggacccgctccatgttcagggtctaagacccagaatgagtttctccagccaggtggccactttatggaaaggatgcagggtcccccagacccctcctctagcccagcagcggctggggtctggctcctttcagagacactacacttcccgtgcagactcagatgccaactcaaagtgccttagcccaggttcctgggcttctgctgccccctcaggaccccagctaacctcagaacaactaactcatgtggactcggaaggacgggcagctatggtagatgtgggcaggaagccagacacagagcgggtggctgtggcttcagccgtggtcctcctgggaccggtagccttcaagcttgtccagcagaaccagctcaagaaaggagatgccctagtggtggcccagctggctggagtccaggcagccaaggtgaccagccagctgatccctctgtgccaccacgtggccctgagccacatccaggtgcagctggagctggacagcacacgccatgccgtgaagatccaggcatcttgccgggctcggggccccaccggggtggagatggaggccctgacctctgctgcagtggccgccctcaccctgtatgacatgtgcaaggctgtcagcagggacatcgtgttggaggagatcaagctcattagcaagactggtggtcagcggggggacttccatcgggcttagcacctgcccttctcacccatggcccacccaggcctggagctgggatgcaatgtaggctgagggaaagacgtcaggttcctttaatcacagtcactgtttgtttaccttgagcagtaaacccgaagtcagcctgctctactactaacaaacaggcctgctgctagatgatctctaatgaccaatggggcttcctttctatagggaggataccagcaggcccttaagccttccaggacactaaggtcgtgggagcgggactgcaacaagcaatgccagataactgagaaatcatgttctttgtggactatttcagacaaccaggttccgacagtccagcccagaacttttccttctcattttgggttttctcttctcctgctttcctggggagagattaagcgctcattaagcagaggagcccactttgaggagagcaaagcacaagcttgcctgaagaatggatcccaacttctccccggcagctctgcctccctaagtctgtgaagccgcagccctgccctgtcctgtcctgtcctgacttcatctctccttctgcccaagtctgtgtcccatcagacttgcagcctttcagcttaacagttgcccggtcctgctggccccttttcctctggcccccctcttctgaaacaggatgtgcacacatgggccatagccctaaggactcctgccagaccacacagcccacacctggccctgttcacggctgttccacccacccctctttattctggagcatatcagggaaagaaaagttgatgatagattgccttcaccctcacagcgcacaaataaagctacgatgccaactttg

SEQ ID NO: 304347 - DNA, 3938 bp, Artificial Sequence
  derived and/or modified sequence
atgtggaagagttggaagctccgcacagatgtcagagaggtgtccaggcggaggcagttcctgcgggagcatgcggcccccttctccgccttcctcacagacagcttcggccggcagcacagctacctgcggatctccctcacagagaagtgcaacctcagatgtcagtactgcatgcccgaggagggggtcccgctgacccccaaagccaacctgctgaccacagaggagatcctgaccctcgcccggctctttgtgaaggaaggcatcgacaagatccggctcacaggtggagagccgcttatccggccggacgtggtggacattgtggcccagctccagcggctggaagggctgagaaccataggtgttaccaccaatggcatcaacctggcccggctactgccccagcttcagaaggctggtctcagtgccatcaacatcagcctggacaccctggtgcctgccaagtttgagttcattgtccgcaggaaaggcttccacaaggtcatggagggcatccacaaggccatcgagctgggctacaaccctgtgaaggtgaactgtgtggtgatgcgaggccttaacgaggatgaactcctggactttgcggccttgactgagggcctccccctggatgtgcgcttcatagagtatatgccctttgatggcaacaagtggaacttcaagaagatggtcagctataaggagatgctagacactgtccggcagcagtggccagagctggagaaggtgccagaggaggaatccagcacagccaaggcctttaaaatccctggcttccaaggccagatcagcttcatcacatccatgtctgagcatttctgtgggacctgcaaccgcctgcgaatcacagctgatgggaacctcaaggtctgcctctttggaaactctgaggtatccctgcgggatcacctgcgagctggggcctctgagcaggagctgctgagaatcattggggctgctgtgggcaggaagaagcggcagcatgcaggcatgttcagtatttcccagatgaagaaccggcccatgatcctcatcggtgggtgacccatcaagttatttttgatgttccccaattccccaccagccaatccaagcattttctcctgggacccgctccatgttcagggtctaagacccagaatgagtttctccagccaggtggccactttatggaaaggatgcagggtcccccagacccctcctctagcccagcagcggctggggtctggctcctttcagagacactacacttcccgtgcagactcagatgccaactcaaagtgccttagcccaggttcctgggcttctgctgccccctcaggaccccagctaacctcagaacaactaactcatgtggactcggaaggacgggcagctatggtagatgtgggcaggaagccagacacagagcgggtggctgtggcttcagccgtggtcctcctgggaccggtagccttcaagcttgtccagcagaaccagctcaagaaaggagatgccctagtggtggcccagctggctggagtccaggcagccaaggtgaccagccagctgatccctctgtgccaccacgtggccctgagccacatccaggtgcagctggagctggacagcacacgccatgccgtgaagatccaggcatcttgccgggctcggggccccaccggggtggagatggaggccctgacctctgctgcagtggccgccctcaccctgtatgacatgtgcaaggctgtcagcagggacatcgtgttggaggagatcaagctcattagcaagactggtggtcagcggggggacttccatcgggcttagcacctgcccttctcacccatggcccacccaggcctggagctgggatgcaatgtaggctgagggaaagacgtcaggttcctttaatcacagtcactgtttgtttaccttgagcagtaaacccgaagtcagcctgctctactactaacaaacaggcctgctgctagatgatctctaatgaccaatggggcttcctttctatagggaggataccagcaggcccttaagccttccaggacactaaggtcgtgggagcgggactgcaacaagcaatgccagataactgagaaatcatgttctttgtggactatttcagacaaccaggttccgacagtccagcccagaacttttccttctcattttgggttttctcttctcctgctttcctggggagagattaagcgctcattaagcagaggagcccactttgaggagagcaaagcacaagcttgcctgaagaatggatcccaacttctccccggcagctctgcctccctaagtctgtgaagccgcagccctgccctgtcctgtcctgtcctgacttcatctctccttctgcccaagtctgtgtcccatcagacttgcagcctttcagcttaacagttgcccggtcctgctggccccttttcctctggcccccctcttctgaaacaggatgtgcacacatgggccatagccctaaggactcctgccagaccacacagcccacacctggccctgttcacggctgttccacccacccctctttattctggagcatatcagggaaagaaaagttgatgatagattgccttcaccctcacagcgcacaaataaagctacgatgccaactttgcagatgcaagaatgaagacactgtgtgggtagggcactgagctgctgcagtttcacagggaaggctgcacctatcaatcaatcaatcaatcctatcccaagacacagttccctgagggaagaagaggagggacctggaaaggcctaagggtgtactctctgtatagccccgctatgggaaaataaagtggagtagggggcatagaaatgcaccatctaagggaaatcttttgtcaggtggtggccaggggtgttcaaagctcattgcttgcattaccagctattagagagatcagagagggcaattaattagaggctcctggttctcacatcccaaacacacacagttctggcctgctgggctctctaacttggatgtctttgagtcctcagtggtgccccctgcctgcctcccctctgccctatgccaaggtgtgctggcaaatattaaacaaccagctctctggaaaagacaatttgtgatataaatactcccatgttgaataatttcaagctaccagtatgtcaaatggcttgcaaaatttctgaaaatgtaaacaattggttctcacagagctggtacaagctggctccagcacactctcagcccaccccagatcccctcataggaagaaggcacaagtttaaaggcagactgggtagggatggtatgaatttaatattttttagtattacaatatattcttataaaaaaggtgcaagtgaaaaaggacactgtagattatgtccattagcctcatttgtcatctgaggcagctggtgagaacagccttggcgtgaaggcatccctggtagaagtcgggggagatagatagtcacagttccccagttggtggaaatgggatgggagtagggagaggctggaacagacccttccccattcacctggagaattttctcctcccactgccctaaacactttatttccatcacaggggagaaatgctgctgagaaggttgtgtttgttaggttgatgacgaattttacattggccacaaaattagctagagaaacttatctaaaggtggcaggagcagtggggagggcatgaagaaagcaagaccaagaaacaacctattaaggaccagctcagccaccccgactgggcaccagccccttcttactcagttgagtatgagtccatggtccaaggcactgttggagatctggctacagtggcatctagcaccagagccactggccagatgtagaaaataaatagaaaaatatctttcttttagagtga

SEQ ID NO: 304348 - DNA, 4256 bp, Artificial Sequence
  derived and/or modified sequence
gccagaaatcttcccagtagagatcaccatccgcccccgacccccaagctgaatacttaaggggtgggtccttcccatcaagctgatttctcaacgagagggacaatcccagcttccccaacattgcagagcccaaacatgtggaagagttggaagctccgcacagatgtcagagtaagggagggggcaggcggttctccttgtgcctcttcccagcccggtagcaggggcccatgcttcctccctggtctgtcctcgcaggaggtgtccaggcggaggcagttcctgcgggagcatgcggcccccttctccgccttcctcacagacagcttcggccggcagcacagctacctgcggatctccctcacagagaagtgcaacctcagatgtcagtactgcatgcccgaggagggggtcccgctgacccccaaagccaacctgctgaccacagaggagatcctgaccctcgcccggctctttgtgaaggaaggcatcgacaagatccggctcacaggtggagagccgcttatccggccggacgtggtggacattgtggcccagctccagcggctggaagggctgagaaccataggtgttaccaccaatggcatcaacctggcccggctactgccccagcttcagaaggctggtctcagtgccatcaacatcagcctggacaccctggtgcctgccaagtttgagttcattgtccgcaggaaaggcttccacaaggtcatggagggcatccacaaggccatcgagctgggctacaaccctgtgaaggtgaactgtgtggtgatgcgaggccttaacgaggatgaactcctggactttgcggccttgactgagggcctccccctggatgtgcgcttcatagagtatatgccctttgatggcaacaagtggaacttcaagaagatggtcagctataaggagatgctagacactgtccggcagcagtggccagagctggagaaggtgccagaggaggaatccagcacagccaaggcctttaaaatccctggcttccaaggccagatcagcttcatcacatccatgtctgagcatttctgtgggacctgcaaccgcctgcgaatcacagctgatgggaacctcaaggtctgcctctttggaaactctgaggtatccctgcgggatcacctgcgagctggggcctctgagcaggagctgctgagaatcattggggctgctgtgggcaggaagaagcggcagcatgcaggcatgttcagtatttcccagatgaagaaccggcccatgatcctcatcggtgggtgacccatcaagttatttttgatgttccccaattccccaccagccaatccaagcattttctcctgggacccgctccatgttcagggtctaagacccagaatgagtttctccagccaggtggccactttatggaaaggatgcagggtcccccagacccctcctctagcccagcagcggctggggtctggctcctttcagagacactacacttcccgtgcagactcagatgccaactcaaagtgccttagcccaggttcctgggcttctgctgccccctcaggaccccagctaacctcagaacaactaactcatgtggactcggaaggacgggcagctatggtagatgtgggcaggaagccagacacagagcgggtggctgtggcttcagccgtggtcctcctgggaccggtagccttcaagcttgtccagcagaaccagctcaagaaaggagatgccctagtggtggcccagctggctggagtccaggcagccaaggtgaccagccagctgatccctctgtgccaccacgtggccctgagccacatccaggtgcagctggagctggacagcacacgccatgccgtgaagatccaggcatcttgccgggctcggggccccaccggggtggagatggaggccctgacctctgctgcagtggccgccctcaccctgtatgacatgtgcaaggctgtcagcagggacatcgtgttggaggagatcaagctcattagcaagactggtggtcagcggggggacttccatcgggcttagcacctgcccttctcacccatggcccacccaggcctggagctgggatgcaatgtaggctgagggaaagacgtcaggttcctttaatcacagtcactgtttgtttaccttgagcagtaaacccgaagtcagcctgctctactactaacaaacaggcctgctgctagatgatctctaatgaccaatggggcttcctttctatagggaggataccagcaggcccttaagccttccaggacactaaggtcgtgggagcgggactgcaacaagcaatgccagataactgagaaatcatgttctttgtggactatttcagacaaccaggttccgacagtccagcccagaacttttccttctcattttgggttttctcttctcctgctttcctggggagagattaagcgctcattaagcagaggagcccactttgaggagagcaaagcacaagcttgcctgaagaatggatcccaacttctccccggcagctctgcctccctaagtctgtgaagccgcagccctgccctgtcctgtcctgtcctgacttcatctctccttctgcccaagtctgtgtcccatcagacttgcagcctttcagcttaacagttgcccggtcctgctggccccttttcctctggcccccctcttctgaaacaggatgtgcacacatgggccatagccctaaggactcctgccagaccacacagcccacacctggccctgttcacggctgttccacccacccctctttattctggagcatatcagggaaagaaaagttgatgatagattgccttcaccctcacagcgcacaaataaagctacgatgccaactttgcagatgcaagaatgaagacactgtgtgggtagggcactgagctgctgcagtttcacagggaaggctgcacctatcaatcaatcaatcaatcctatcccaagacacagttccctgagggaagaagaggagggacctggaaaggcctaagggtgtactctctgtatagccccgctatgggaaaataaagtggagtagggggcatagaaatgcaccatctaagggaaatcttttgtcaggtggtggccaggggtgttcaaagctcattgcttgcattaccagctattagagagatcagagagggcaattaattagaggctcctggttctcacatcccaaacacacacagttctggcctgctgggctctctaacttggatgtctttgagtcctcagtggtgccccctgcctgcctcccctctgccctatgccaaggtgtgctggcaaatattaaacaaccagctctctggaaaagacaatttgtgatataaatactcccatgttgaataatttcaagctaccagtatgtcaaatggcttgcaaaatttctgaaaatgtaaacaattggttctcacagagctggtacaagctggctccagcacactctcagcccaccccagatcccctcataggaagaaggcacaagtttaaaggcagactgggtagggatggtatgaatttaatattttttagtattacaatatattcttataaaaaaggtgcaagtgaaaaaggacactgtagattatgtccattagcctcatttgtcatctgaggcagctggtgagaacagccttggcgtgaaggcatccctggtagaagtcgggggagatagatagtcacagttccccagttggtggaaatgggatgggagtagggagaggctggaacagacccttccccattcacctggagaattttctcctcccactgccctaaacactttatttccatcacaggggagaaatgctgctgagaaggttgtgtttgttaggttgatgacgaattttacattggccacaaaattagctagagaaacttatctaaaggtggcaggagcagtggggagggcatgaagaaagcaagaccaagaaacaacctattaaggaccagctcagccaccccgactgggcaccagccccttcttactcagttgagtatgagtccatggtccaaggcactgttggagatctggctacagtggcatctagcaccagagccactggccagatgtagaaaataaatagaaaaatatctttcttttagagtgagaaggctgagctctggaacaacgtatttgtgtcctctgtcaacagttgaaccaaattctgcttttctgaagatcaaatgtatcttgaacagct

SEQ ID NO: 304349 - DNA, 3358 bp, Artificial Sequence
  derived and/or modified sequence
gcgtcctcgcctattggctgcgcgggtcccgccctccccctgcccctccccgcccttgctgggatgaccccgggggcgagtgcccggccagtgtgctcccgaagcgggctgcggttccgctcgtatcaggcttcatggcggcgcggccactgtcccggatgctgcggcggcttctgaggtccagcgcccggagctgcagctcaggggctccggtgacccagccctgccccggggagtccgcgcgagctgcctcggaggaggtgtccaggcggaggcagttcctgcgggagcatgcggcccccttctccgccttcctcacagacagcttcggccggcagcacagctacctgcggatctccctcacagagaagtgcaacctcagatgtcagtactgcatgcccgaggagggggtcccgctgacccccaaagccaacctgctgaccacagaggagatcctgaccctcgcccggctctttgtgaaggaaggcatcgacaagatccggctcacaggtggagagccgcttatccggccggacgtggtggacattgtggcccagctccagcggctggaagggctgagaaccataggtgttaccaccaatggcatcaacctggcccggctactgccccagcttcagaaggctggtctcagtgccatcaacatcagcctggacaccctggtgcctgccaagtttgagttcattgtccgcaggaaaggcttccacaaggtcatggagggcatccacaaggccatcgagctgggctacaaccctgtgaaggtgaactgtgtggtgatgcgaggccttaacgaggatgaactcctggactttgcggccttgactgagggcctccccctggatgtgcgcttcatagagtatatgccctttgatggcaacaagtggaacttcaagaagatggtcagctataaggagatgctagacactgtccggcagcagtggccagagctggagaaggtgccagaggaggaatccagcacagccaaggcctttaaaatccctggcttccaaggccagatcagcttcatcacatccatgtctgagcatttctgtgggacctgcaaccgcctgcgaatcacagctgatgggaacctcaaggtctgcctctttggaaactctgaggtatccctgcgggatcacctgcgagctggggcctctgagcaggagctgctgagaatcattggggctgctgtgggcaggaagaagcggcagcatgcaggcatgttcagtatttcccagatgaagaaccggcccatgatcctcatcggtgggtgacccatcaagttatttttgatgttccccaattccccaccagccaatccaagcattttctcctgggacccgctccatgttcagggtctaagacccagaatgagtttctccagccaggtggccactttatggaaaggatgcagggtcccccagacccctcctctagcccagcagcggctggggtctggctcctttcagagacactacacttcccgtgcagactcagatgccaactcaaagtgccttagcccaggttcctgggcttctgctgccccctcaggaccccagctaacctcagaacaactaactcatgtggactcggaaggacgggcagctatggtagatgtgggcaggaagccagacacagagcgggtggctgtggcttcagccgtggtcctcctgggaccggtagccttcaagcttgtccagcagaaccagctcaagaaaggagatgccctagtggtggcccagctggctggagtccaggcagccaaggtgaccagccagctgatccctctgtgccaccacgtggccctgagccacatccaggtgcagctggagctggacagcacacgccatgccgtgaagatccaggcatcttgccgggctcggggccccaccggggtggagatggaggccctgacctctgctgcagtggccgccctcaccctgtatgacatgtgcaaggctgtcagcagggacatcgtgttggaggagatcaagctcattagcaagactggtggtcagcggggggacttccatcgggcttagcacctgcccttctcacccatggcccacccaggcctggagctgggatgcaatgtaggctgagggaaagacgtcaggttcctttaatcacagtcactgtttgtttaccttgagcagtaaacccgaagtcagcctgctctactactaacaaacaggcctgctgctagatgatctctaatgaccaatggggcttcctttctatagggaggataccagcaggcccttaagccttccaggacactaaggtcgtgggagcgggactgcaacaagcaatgccagataactgagaaatcatgttctttgtggactatttcagacaaccaggttccgacagtccagcccagaacttttccttctcattttgggttttctcttctcctgctttcctggggagagattaagcgctcattaagcagaggagcccactttgaggagagcaaagcacaagcttgcctgaagaatggatcccaacttctccccggcagctctgcctccctaagtctgtgaagccgcagccctgccctgtcctgtcctgtcctgacttcatctctccttctgcccaagtctgtgtcccatcagacttgcagcctttcagcttaacagttgcccggtcctgctggccccttttcctctggcccccctcttctgaaacaggatgtgcacacatgggccatagccctaaggactcctgccagaccacacagcccacacctggccctgttcacggctgttccacccacccctctttattctggagcatatcagggaaagaaaagttgatgatagattgccttcaccctcacagcgcacaaataaagctacgatgccaactttgcagatgcaagaatgaagacactgtgtgggtagggcactgagctgctgcagtttcacagggaaggctgcacctatcaatcaatcaatcaatcctatcccaagacacagttccctgagggaagaagaggagggacctggaaaggcctaagggtgtactctctgtatagccccgctatgggaaaataaagtggagtagggggcatagaaatgcaccatctaagggaaatcttttgtcaggtggtggccaggggtgttcaaagctcattgcttgcattaccagctattagagagatcagagagggcaattaattagaggctcctggttctcacatcccaaacacacacagttctggcctgctgggctctctaacttggatgtctttgagtcctcagtggtgccccctgcctgcctcccctctgccctatgccaaggtgtgctggcaaatattaaacaaccagctctctgg

SEQ ID NO: 304350 - DNA, 1920 bp, Artificial Sequence
  derived and/or modified sequence
agcccaaacatgtggaagagttggaagctccgcacagatgtcagagtaagggagggggcaggcggttctccttgtgcctcttcccagcccggtagcaggggcccatgcttcctccctggtctgtcctcgcaggaggtgtccaggcggaggcagttcctgcgggagcatgcggcccccttctccgccttcctcacagacagcttcggccggcagcacagctacctgcggatctccctcacagagaagtgcaacctcagatgtcagtactgcatgcccgaggagggggtcccgctgacccccaaagccaacctgctgaccacagaggagatcctgaccctcgcccggctctttgtgaaggaaggcatcgacaagatccggctcacaggtggagagccgcttatccggccggacgtggtggacattgtggcccagctccagcggctggaagggctgagaaccataggtgttaccaccaatggcatcaacctggcccggctactgccccagcttcagaaggctggtctcagtgccatcaacatcagcctggacaccctggtgcctgccaagtttgagttcattgtccgcaggaaaggcttccacaaggtcatggagggcatccacaaggccatcgagctgggctacaaccctgtgaaggtgaactgtgtggtgatgcgaggccttaacgaggatgaactcctggactttgcggccttgactgagggcctccccctggatgtgcgcttcatagagtatatgccctttgatggcaacaagtggaacttcaagaagatggtcagctataaggagatgctagacactgtccggcagcagtggccagagctggagaaggtgccagaggaggaatccagcacagccaaggcctttaaaatccctggcttccaaggccagatcagcttcatcacatccatgtctgagcatttctgtgggacctgcaaccgcctgcgaatcacagctgatgggaacctcaaggtctgcctctttggaaactctgaggtatccctgcgggatcacctgcgagctggggcctctgagcaggagctgctgagaatcattggggctgctgtgggcaggaagaagcggcagcatgcaggcatgttcagtatttcccagatgaagaaccggcccatgatcctcatcgagttatttttgatgttccccaattccccaccagccaatccaagcattttctcctgggacccgctccatgttcagggtctaagacccagaatgagtttctccagccaggtggccactttatggaaaggatgcagggtcccccagacccctcctctagcccagcagcggctggggtctggctcctttcagagacactacacttcccgtgcagactcagatgccaactcaaagtgccttagcccaggttcctgggcttctgctgccccctcaggaccccagctaacctcagaacaactaactcatgtggactcggaaggacgggcagctatggtagatgtgggcaggaagccagacacagagcgggtggctgtggcttcagccgtggtcctcctgggaccggtagccttcaagcttgtccagcagaaccagctcaagaaaggagatgccctagtggtggcccagctggctggagtccaggcagccaaggtgaccagccagctgatccctctgtgccaccacgtggccctgagccacatccaggtgcagctggagctggacagcacacgccatgccgtgaagatccaggcatcttgccgggctcggggccccaccggggtggagatggaggccctgacctctgctgcagtggccgccctcaccctgtatgacatgtgcaaggctgtcagcagggacatcgtgttggaggagatcaagctcattagcaagactggtggtcagcggggggacttccatcgggcttag

SEQ ID NO: 304351 - DNA, 1911 bp, Artificial Sequence
  derived and/or modified sequence
atggccgcccggcccctgagccggatgctgcggcggctgctgcggtcaagcgctaggtcctgttcctccggggcaccagtcacacagccttgtcccggggaatcagcacgggctgcctcagaagaggtcagccgtcgcagacagttcttgcgtgagcatgctgcccctttctcagcgttcctgaccgactcttttggaaggcaacatagctatctgaggatttccctgaccgagaagtgcaatcttcgttgccagtactgtatgccagaagagggagtgcctttaactcccaaagccaacttgttaacaactgaagagatacttactctggcacggttgtttgttaaggaaggcattgataagatcagactaaccggcggcgagcccttgattcggcccgacgttgtcgatatcgtagcacagctacaaagactcgaagggcttaggacaatcggagtgactacaaacggtataaacttggcaagactgctcccccagttgcaaaaagctgggttgagcgctattaacatctccctggataccctcgtgcctgctaagtttgagtttattgtgcggcgaaaaggattccacaaggtaatggagggcatacacaaggcaattgagctaggctataacccagtcaaggtcaactgcgtcgtgatgaggggtctcaatgaagatgaattgctggattttgctgctctgacagaaggcctaccacttgacgttagatttatcgagtacatgcctttcgacggcaataagtggaacttcaaaaagatggtgtcctacaaagagatgctggatacagtaagacaacaatggccggagcttgaaaaagtaccggaagaggaaagcagcaccgctaaggcttttaagatccccggatttcaaggccaaatctcattcataacctccatgtccgaacatttctgcgggacatgcaacagattaaggataacagccgatgggaacctcaaagtttgcctattcggcaactccgaagtgtcccttagagaccatctaagagccggagcgagtgagcaggaactcctgcgtatcataggagctgcggtggggcggaaaaaaagacaacatgctggcatgttttctatctctcagatgaagaaccggcccatgattttgattgaactctttcttatgtttcctaattctcctcccgcgaacccctccatctttagttgggatcccctacatgttcagggcctgagaccgagaatgagttttagttctcaagtcgctaccctctggaaggggtgccgggtccctcaaactccaccacttgcacaacagcgcctggggagcggtagttttcagaggcactataccagcagggccgatagtgacgcaaattctaaatgcttgtctcccggttcctgggcctccgcagccccttctggccctcagctaacttcggaacagcttacacatgtagatagcgagggacgcgctgccatggttgatgtgggcaggaaacccgataccgagagagtcgcagtggcctccgcagtcgttctcctgggtccagtggcctttaagcttgtgcagcagaaccagctgaaaaagggagacgcgctcgtggtggcacagctggctggagtgcaggctgccaaggtgacgagccagctcatcccactgtgtcaccacgttgccctctcccatatccaggtccaactggagctggacagcacccgccacgctgtgaaaattcaggcatcatgcagagctagggggccaaccggggtggagatggaagccctgaccagtgcagctgtcgccgccttgaccctgtatgacatgtgcaaggccgtgagtagggacatcgttctagaagagattaaattgatttccaagacgggaggacagcgcggggacttccaccgggcctag

SEQ ID NO: 304352 - DNA, 1911 bp, Artificial Sequence
  derived and/or modified sequence
atgtggaagagctggaagctgcggaccgacgtgcgggtgcgggagggcgctggtggatctccctgcgctagcagtcagccagggagtcgtggtccatgctttcttccaggcctgtcttctcaggaggtctcccgcaggagacagttcctacgagagcacgctgcaccattctccgcctttctgaccgactcattcgggcggcagcactcatacttgcgtatttctcttaccgaaaaatgtaaccttcggtgccagtactgtatgcctgaggagggcgtgcctctgacgccaaaagcgaatcttcttacgacagaggagatcctgactttagcacggctcttcgtaaaagaaggaattgataaaatcagactaaccggcggagagcctttgattcgacctgacgtggtagacatcgtggcgcagttgcagcggctggaaggtcttcgcactataggagtgactacaaatggcatcaacttagctcgcctcctcccccaattacagaaggctggcctcagcgccatcaatatctctctggacaccctagtccccgccaagtttgagttcatcgtgcggcggaaggggttccataaagttatggaaggaatccataaggctattgaattggggtacaatccagtcaaggtgaattgcgtcgtgatgcgaggccttaacgaagacgaattgcttgactttgccgccctgacagaaggactgcctttagatgtccgtttcatcgagtacatgcccttcgacggaaataaatggaactttaagaagatggtcagctataaggagatgctcgatacagtccgtcagcagtggcccgagctggaaaaagtgcccgaagaagaaagctccaccgcaaaggctttcaaaatccccgggtttcagggccagatcagcttcattacctcgatgtcagagcacttctgcggcacatgtaaccggctccgcattaccgcagatggcaacttgaaggtatgtctatttggaaactcagaagttagcctgcgagaccacctgcgagccggagcatccgagcaggaattactgcgtattatcggggctgcagtcgggcgaaagaaacgacagcacgccggcatgttttcaattagccaaatgaaaaatcgccccatgatcttgatcgagctcttcctaatgtttccaaattcgcctcctgccaacccctcaatatttagctgggacccgctacacgtgcaaggcctcagaccccgaatgagcttctcatctcaggtcgcgaccctgtggaagggctgcagagttccgcagacaccgccattggcccagcagcgcctgggctccggatcctttcagagacattatacgtctcgcgcagacagtgacgcaaactcgaagtgtctcagccccgggagttgggcctctgccgccccctctggcccccagctgacaagcgagcaactgacacatgtcgactctgaggggcgcgcggccatggtagatgtggggagaaagcccgacacagaacgcgtggccgtggcctcggcggttgtgcttctgggacccgtcgctttcaagctcgttcaacagaatcaactgaagaagggggatgccctcgtggtcgctcagctggccggtgttcaagcagccaaagtcacatcgcagttgatcccgctctgccatcacgtggctctttcccacatccaggttcaactggaactcgacagcacacgacatgccgtgaaaattcaagcctcttgtcgggcccgtgggccaactggggttgaaatggaggctttgacgagtgcagcagtggctgccctcactctgtacgatatgtgcaaagcggtttctcgggacatcgtgctggaggagattaaactaatttccaaaacaggggggcaaagaggggactttcaccgggcctag

SEQ ID NO: 304353 - DNA, 1911 bp, Artificial Sequence
  derived and/or modified sequence
atggctgccagacctctgagcagaatgctgcgcagactcctgagaagctctgccagatcttgttcctccggggcaccagtcacacaaccatgccctggggagtctgccagagcggctagcgaagaggtcagccgccgaagacagtttctgcgagagcatgccgcaccattttctgcgttcctgaccgacagctttgggcgacagcatagctacctgagaatttctctcacagaaaagtgtaacttgaggtgtcagtattgcatgccagaggagggcgttccattaaccccaaaagccaacttgctaactaccgaggagattcttacgctcgctcgcctgtttgtcaaggaagggattgacaaaattaggctcacgggaggggagcctctgatcaggcctgacgttgtggatatcgttgcacaactccaaagactggagggacttaggactattggagttactaccaatggcattaatctggctagattactgcctcagctacagaaagccggtttgtccgcgatcaacatctctttggataccctggtgcctgcaaaatttgagttcattgtacgcaggaaggggttccacaaggttatggaaggaatccacaaggctatagaattaggatataatccagttaaagtcaactgtgtcgttatgcgcggtctgaatgaggatgagctgttggattttgccgctcttactgaaggattgcccctagatgtcaggtttatagagtatatgccttttgatggaaacaaatggaattttaaaaagatggtgtcttataaagagatgttggacaccgtgcgccaacagtggcccgagctggagaaagtgcctgaggaagaatcgagcactgcgaaagcattcaaaatcccaggctttcagggtcagatatcatttattacatcaatgtccgaacacttctgcggtacctgcaatcgtctgcgcattacggccgatgggaatctcaaagtctgcctgtttggcaacagcgaagttagcctgcgggaccacctccgcgcaggggcatcagagcaggaactgctgcgaatcatcggcgctgcggtgggtcgcaaaaaaaggcaacatgcgggaatgttcagcattagccagatgaagaaccgcccaatgatcctcatcgagcttttcctgatgttcccgaattcacctcctgccaatccaagcatcttcagctgggatccgctccacgtgcagggccttcgccctagaatgagtttctcgtcccaagtggccacactgtggaagggctgtagagtgccacaaacccctccccttgcccagcagagattaggctctggttccttccagcggcattatacttcccgtgcagactcagatgctaactctaagtgcctttcccctgggagttgggcctctgccgcaccatccggccctcagctgaccagtgaacaacttactcatgttgacagtgagggtcgtgctgcgatggtagacgtgggcagaaaaccggatacagagagggttgctgtggcctcagctgtcgtcctgctgggcccagtggcattcaaattggtccagcaaaaccagctgaagaagggggatgcgctcgtggtggctcaactagcaggcgttcaagccgctaaagtgacgagccagctgatacccctttgccaccacgtggccctcagtcacatacaggtacaactcgagcttgattcaaccaggcacgccgtcaaaatacaggcctcctgtcgagctcgcggtcctacgggtgtcgaaatggaggccctaactagcgcagcggtggctgcactgactctgtatgacatgtgcaaagccgtgagtagagatatagtcttggaggaaatcaaactcatctctaagacaggtggacagcgcggagatttccaccgagcgtag

SEQ ID NO: 304354 - DNA, 1911 bp, Artificial Sequence
  derived and/or modified sequence
atgtggaagtcttggaaactgcgtacggatgttagagtcagagaaggggcagggggtagtccttgtgcatctagccaacccggtagtcgcggaccttgtttcctcccaggactgagctcccaagaggtgtcgcgacgtagacaatttctccgcgaacacgccgcacccttctccgcttttctgactgattcgtttgggagacaacactcttaccttcggatttcattaacagaaaagtgcaacttgcgctgtcagtactgtatgccagaagagggggtgcctcttaccccaaaagctaacctcctcacgacagaggaaattctgacactggccagactcttcgtgaaagagggcatagacaaaattcggctaaccgggggagaaccattgattagaccagatgtggttgatattgttgctcagctgcagcgtttggaaggtctgcgcacgatcggggtcacaactaatggtattaacttagcgaggctgctaccgcagctccaaaaggccggactgtcggcgataaacatcagtctggacactctggtgcctgctaagttcgaatttatcgtccggcgaaaaggcttccataaggtcatggaagggatacacaaggcgattgagctgggctacaacccagtcaaagtgaactgcgtagtcatgcgagggctgaatgaggatgaactcctcgatttcgcagccctgaccgaaggcctacccctggacgtccgatttatcgagtacatgccattcgatggcaacaaatggaactttaagaagatggtatcttacaaagaaatgctcgacacagtccggcagcagtggcccgagctggagaaagtgcccgaagaggaaagctcaacagccaaggcgttcaaaatccccggttttcagggccagatatcattcattacttctatgtcagagcacttctgcggcacctgtaaccgactccggatcactgcggatgggaatctaaaggtttgcctctttggtaatagtgaggtgagcctgcgagatcacctgcgcgctggagcctccgagcaggaacttctccgcatcatcggagccgcagttggtcggaaaaaaaggcagcatgctggaatgttttctatctcccaaatgaagaaccggccaatgattctgatagaactgttcctcatgtttcctaactcccctcctgccaacccctcgatctttagctgggatccgcttcacgtgcagggtctccgaccccgaatgtcattttcttcacaggtcgccacactgtggaagggctgccgcgtgccgcagaccccgccactggcccagcagagactgggtagtggatcattccagcggcactataccagtagggctgactctgacgctaacagtaaatgcctgtcccccggatcgtgggctagtgccgcaccgtcaggtcctcagctcacctcagagcagctgacacatgtcgatagtgaaggccgagcggcaatggttgacgtcggcagaaaacccgacactgagagggtagcagttgcctcggccgtggtactgctggggcctgtggcgtttaaactcgtgcaacagaaccaactgaagaagggtgatgcattggtcgttgctcagctcgctggcgtccaagctgcaaaggtgaccagccagctgattccactctgccatcacgtcgccctgtcccacatacaggtccagcttgagttggacagcacccgccacgccgtgaaaatccaggcttcctgtagagctcggggtccaaccggtgtggagatggaggcactcacctcagccgctgtcgccgcactcaccctctatgatatgtgtaaggctgtgagtcgtgatatcgtcctcgaggaaataaaactcatctctaagacgggagggcagcgaggggattttcatagagcgtag

SEQ ID NO: 304355 - DNA, 1911 bp, Artificial Sequence
  derived and/or modified sequence
atggccgccagacccctgagcagaatgctgagaagactgctgagaagcagcgccagaagctgcagcagcggcgcccccgtgacccagccctgccccggcgagagcgccagagccgccagcgaggaggtgagcagaagaagacagttcctgagagagcacgccgcccccttcagcgccttcctgaccgacagcttcggcagacagcacagctacctgagaatcagcctgaccgagaagtgcaacctgagatgccagtactgcatgcccgaggagggcgtgcccctgacccccaaggccaacctgctgaccaccgaggagatcctgaccctggccagactgttcgtgaaggagggcatcgacaagatcagactgaccggcggcgagcccctgatcagacccgacgtggtggacatcgtggcccagctgcagagactggagggcctgagaaccatcggcgtgaccaccaacggcatcaacctggccagactgctgccccagctgcagaaggccggcctgagcgccatcaacatcagcctggacaccctggtgcccgccaagttcgagttcatcgtgagaagaaagggcttccacaaggtgatggagggcatccacaaggccatcgagctgggctacaaccccgtgaaggtgaactgcgtggtgatgagaggcctgaacgaggacgagctgctggacttcgccgccctgaccgagggcctgcccctggacgtgagattcatcgagtacatgcccttcgacggcaacaagtggaacttcaagaagatggtgagctacaaggagatgctggacaccgtgagacagcagtggcccgagctggagaaggtgcccgaggaggagagcagcaccgccaaggccttcaagatccccggcttccagggccagatcagcttcatcaccagcatgagcgagcacttctgcggcacctgcaacagactgagaatcaccgccgacggcaacctgaaggtgtgcctgttcggcaacagcgaggtgagcctgagagaccacctgagagccggcgccagcgagcaggagctgctgagaatcatcggcgccgccgtgggcagaaagaagagacagcacgccggcatgttcagcatcagccagatgaagaacagacccatgatcctgatcgagctgttcctgatgttccccaacagcccccccgccaaccccagcatcttcagctgggaccccctgcacgtgcagggcctgagacccagaatgagcttcagcagccaggtggccaccctgtggaagggctgcagagtgccccagaccccccccctggcccagcagagactgggcagcggcagcttccagagacactacaccagcagagccgacagcgacgccaacagcaagtgcctgagccccggcagctgggccagcgccgcccccagcggcccccagctgaccagcgagcagctgacccacgtggacagcgagggcagagccgccatggtggacgtgggcagaaagcccgacaccgagagagtggccgtggccagcgccgtggtgctgctgggccccgtggccttcaagctggtgcagcagaaccagctgaagaagggcgacgccctggtggtggcccagctggccggcgtgcaggccgccaaggtgaccagccagctgatccccctgtgccaccacgtggccctgagccacatccaggtgcagctggagctggacagcaccagacacgccgtgaagatccaggccagctgcagagccagaggccccaccggcgtggagatggaggccctgaccagcgccgccgtggccgccctgaccctgtacgacatgtgcaaggccgtgagcagagacatcgtgctggaggagatcaagctgatcagcaagaccggcggccagagaggcgacttccacagagcctag

SEQ ID NO: 304356 - DNA, 1911 bp, Artificial Sequence
  derived and/or modified sequence
atgtggaagagctggaagctgagaaccgacgtgagagtgagagagggcgccggcggcagcccctgcgccagcagccagcccggcagcagaggcccctgcttcctgcccggcctgagcagccaggaggtgagcagaagaagacagttcctgagagagcacgccgcccccttcagcgccttcctgaccgacagcttcggcagacagcacagctacctgagaatcagcctgaccgagaagtgcaacctgagatgccagtactgcatgcccgaggagggcgtgcccctgacccccaaggccaacctgctgaccaccgaggagatcctgaccctggccagactgttcgtgaaggagggcatcgacaagatcagactgaccggcggcgagcccctgatcagacccgacgtggtggacatcgtggcccagctgcagagactggagggcctgagaaccatcggcgtgaccaccaacggcatcaacctggccagactgctgccccagctgcagaaggccggcctgagcgccatcaacatcagcctggacaccctggtgcccgccaagttcgagttcatcgtgagaagaaagggcttccacaaggtgatggagggcatccacaaggccatcgagctgggctacaaccccgtgaaggtgaactgcgtggtgatgagaggcctgaacgaggacgagctgctggacttcgccgccctgaccgagggcctgcccctggacgtgagattcatcgagtacatgcccttcgacggcaacaagtggaacttcaagaagatggtgagctacaaggagatgctggacaccgtgagacagcagtggcccgagctggagaaggtgcccgaggaggagagcagcaccgccaaggccttcaagatccccggcttccagggccagatcagcttcatcaccagcatgagcgagcacttctgcggcacctgcaacagactgagaatcaccgccgacggcaacctgaaggtgtgcctgttcggcaacagcgaggtgagcctgagagaccacctgagagccggcgccagcgagcaggagctgctgagaatcatcggcgccgccgtgggcagaaagaagagacagcacgccggcatgttcagcatcagccagatgaagaacagacccatgatcctgatcgagctgttcctgatgttccccaacagcccccccgccaaccccagcatcttcagctgggaccccctgcacgtgcagggcctgagacccagaatgagcttcagcagccaggtggccaccctgtggaagggctgcagagtgccccagaccccccccctggcccagcagagactgggcagcggcagcttccagagacactacaccagcagagccgacagcgacgccaacagcaagtgcctgagccccggcagctgggccagcgccgcccccagcggcccccagctgaccagcgagcagctgacccacgtggacagcgagggcagagccgccatggtggacgtgggcagaaagcccgacaccgagagagtggccgtggccagcgccgtggtgctgctgggccccgtggccttcaagctggtgcagcagaaccagctgaagaagggcgacgccctggtggtggcccagctggccggcgtgcaggccgccaaggtgaccagccagctgatccccctgtgccaccacgtggccctgagccacatccaggtgcagctggagctggacagcaccagacacgccgtgaagatccaggccagctgcagagccagaggccccaccggcgtggagatggaggccctgaccagcgccgccgtggccgccctgaccctgtacgacatgtgcaaggccgtgagcagagacatcgtgctggaggagatcaagctgatcagcaagaccggcggccagagaggcgacttccacagagcctag

SEQ ID NO: 304357 - protein, 620 aa, Artificial Sequence
  derived and/or modified sequence
MAARPLSRMLRRLLRSSARSCSSGAPVTQPCPGESARAASEEVSRRRQFLREHAAPFSAFLTDSFGRQHSYLRISLTEKCNLRCQYCMPEEGVPLTPKANLLTTEEILTLARLFVKEGIDKIRLTGGEPLIRPDVVDIVAQLQRLEGLRTIGVTTNGINLARLLPQLQKAGLSAINISLDTLVPAKFEFIVRRKGFHKVMEGIHKAIELGYNPVKVNCVVMRGLNEDELLDFAALTEGLPLDVRFIEYMPFDGNKWNFKKMVSYKEMLDTVRQQWPELEKVPEEESSTAKAFKIPGFQGQISFITSMSEHFCGTCNRLRITADGNLKVCLFGNSEVSLRDHLRAGASEQELLRIIGAAVGRKKRQHAELFLMFPNSPPANPSIFSWDPLHVQGLRPRMSFSSQVATLWKGCRVPQTPPLAQQRLGSGSFQRHYTSRADSDANSKCLSPGSWASAAPSGPQLTSEQLTHVDSEGRAAMVDVGRKPDTERVAVASAVVLLGPVAFKLVQQNQLKKGDALVVAQLAGVQAAKVTSQLIPLCHHVALSHIQVQLELDSTRHAVKIQASCRARGPTGVEMEALTSAAVAALTLYDMCKAVSRDIVLEEIKLISKTGGQRGDFHRA

SEQ ID NO: 304358 - protein, 533 aa, Artificial Sequence
  derived and/or modified sequence
MPEEGVPLTPKANLLTTEEILTLARLFVKEGIDKIRLTGGEPLIRPDVVDIVAQLQRLEGLRTIGVTTNGINLARLLPQLQKAGLSAINISLDTLVPAKFEFIVRRKGFHKVMEGIHKAIELGYNPVKVNCVVMRGLNEDELLDFAALTEGLPLDVRFIEYMPFDGNKWNFKKMVSYKEMLDTVRQQWPELEKVPEEESSTAKAFKIPGFQGQISFITSMSEHFCGTCNRLRITADGNLKVCLFGNSEVSLRDHLRAGASEQELLRIIGAAVGRKKRQHAELFLMFPNSPPANPSIFSWDPLHVQGLRPRMSFSSQVATLWKGCRVPQTPPLAQQRLGSGSFQRHYTSRADSDANSKCLSPGSWASAAPSGPQLTSEQLTHVDSEGRAAMVDVGRKPDTERVAVASAVVLLGPVAFKLVQQNQLKKGDALVVAQLAGVQAAKVTSQLIPLCHHVALSHIQVQLELDSTRHAVKIQASCRARGPTGVEMEALTSAAVAALTLYDMCKAVSRDIVLEEIKLISKTGGQRGDFHRA

SEQ ID NO: 304359 - DNA, 1863 bp, Artificial Sequence
  derived and/or modified sequence
atggcagctcgcccgctctcccggatgcttcgacgactgctgcgcagctctgccaggtcctgtagctcaggagccccagttacacagccttgccctggagagtccgcaagagccgcgagcgaagaagtctcacgaaggagacagtttttgagggagcatgcagcgccatttagtgctttcctcacggacagcttcggaaggcagcacagctacctgagaatatccctgacggagaaatgtaacctgaggtgccagtattgcatgcccgaggagggggtccctctcacacccaaagcgaatctcctaacaacggaagagatactcacgcttgctcgcttatttgttaaggagggtatcgacaagatccgcctgacagggggagagcctttaatccgacctgatgtcgtcgacatagtagcccagctgcaacgcttggagggcctcagaacaataggcgtgactaccaacggcataaatctggcacggctcctgcctcagctgcagaaagccgggttatcagctatcaacatctcgctggacactctcgtgcccgccaaatttgagttcatagtaaggcggaagggctttcataaagtcatggagggtatacataaagccatcgagctcggctacaatccggtgaaagtcaattgtgtggttatgcgcggactgaacgaagatgaacttctggacttcgccgcactgaccgaagggttgccactcgatgtgcggtttatcgaatacatgcccttcgacgggaacaaatggaacttcaaaaaaatggtgagttacaaagagatgctggacacggtacgtcaacagtggcctgagctagaaaaagtccctgaagaggaatcgtctaccgccaaggcatttaaaattcctggctttcagggccagatatcattcataacctctatgtcagaacatttttgcggtacatgtaatcgcctgcgcattacagcagacggcaaccttaaggtctgcctctttggcaatagcgaagttagcctgagggaccacctccgggcaggagcatcagaacaggaacttctaagaatcatcggagcagccgtcgggcggaagaagaggcagcatgccgagctttttctgatgttcccaaatagtccaccggccaacccctcaatcttctcctgggatcctcttcacgttcagggcctgcgccctcgcatgtctttcagcagccaggtcgcaaccctgtggaaaggatgcagagtccctcaaacacctcctcttgcgcagcaaagactcgggtcgggaagctttcagaggcactacaccagcagagctgattctgatgccaattcaaagtgcttgtcaccaggctcatgggcatccgccgctcccagcggcccccaattgacatctgaacaactcacacacgtagattctgagggacgagcggctatggtggacgtgggccggaagccggacacagagagagtggcagtcgcatcagccgtcgtgctgctcggtccggtagcatttaaacttgtccagcagaatcagctgaaaaaaggcgacgcactggtcgtcgcccaactggcaggggtgcaagctgctaaggttacctcacagctcattcctttgtgtcatcacgtcgccctgtcgcatattcaggtgcagctcgagctggatagcacccgtcacgcggtgaagatccaggcatcatgcagagctcggggtcctaccggggtggagatggaggcactcacttcagccgccgttgccgccctgacactgtatgatatgtgcaaggccgtttctagagacatcgtgctagaggaaatcaagctgatctcaaaaaccggaggacagagaggagactttcacagggcctag

SEQ ID NO: 304360 - DNA, 1602 bp, Artificial Sequence
  derived and/or modified sequence
atgcccgaggagggcgtccctctcacaccaaaggctaatttgctgaccacggaggaaattctgaccttggctcgcctatttgtgaaggaaggcatcgataaaattcgcctgaccggtggagagcccctgataagaccggacgttgtggacatcgttgcccagctgcaaagactcgagggcctgaggacaataggggtgacgactaacggcattaatcttgctcgcttgcttccccagctacaaaaggctggcctatccgccataaatatctctctcgataccctggtgcccgcaaaattcgagttcattgtgcggcggaaggggtttcacaaagtgatggagggtattcacaaagccattgagctgggatataaccccgtgaaggtcaattgcgttgtcatgcggggcctaaatgaggacgagctgctcgactttgctgcactcactgaggggctgcctttggatgtgagattcatcgaatacatgcctttcgacgggaacaagtggaatttcaagaaaatggtgagctacaaagaaatgctagacacagtgcgtcagcagtggcctgaattggaaaaggtgccggaggaggaatcatcaaccgctaaggcgtttaaaataccgggattccagggacagatttccttcataacttccatgagcgaacatttttgtgggacttgtaatcggcttcggattaccgccgacggtaatctcaaagtatgtctcttcggaaattccgaggtctctttgagagaccaccttagggcaggtgcctcagaacaggaacttctgagaatcattggcgccgctgtgggccggaaaaagaggcagcacgctgagttgttcctcatgtttccgaactctccacctgcaaacccctccatattcagctgggacccactccatgtgcaaggcctgcggcctcgcatgagtttcagctcacaggtagctaccctttggaaaggatgccgcgtgccacagacccccccgctggcccagcagaggctcggttccggcagcttccagaggcattacacaagtagagccgattcagacgctaattccaagtgtctgagtccgggaagctgggctagtgcagctccatccggaccccagttgactagcgaacagctgacccacgtagactctgaggggagagccgccatggtggacgtgggccgcaaaccagacactgagagggttgccgtggcctccgccgtagtcctgctggggccagttgcattcaagcttgttcagcaaaaccagctgaagaaaggtgatgcactagtggtggctcaactggccggggtgcaggcggctaaggtcacctcccagctgatacccctctgtcatcacgtggccctgtctcacatccaggtgcaacttgagctggattctactagacatgcagtcaagatccaggcatcctgccgcgctcgggggcccacaggggtggaaatggaggcgcttactagtgcagctgttgctgcattaacactgtacgatatgtgtaaagcagtgtcgcgcgacatcgtgctcgaagagataaaactgatcagcaagactggcgggcaacgcggggatttccaccgcgcatag

SEQ ID NO: 304361 - DNA, 1863 bp, Artificial Sequence
  derived and/or modified sequence
atggccgcccggcccctgagcaggatgctgcggcggctgctgcggagcagcgcccggagctgcagcagcggggcccctgtgacccagccctgccctggagagagcgcccgggccgccagcgaggaggtgtccagaagacggcagttcctgcgggagcacgccgcccccttcagcgccttcctgacagacagctttggccggcagcacagctacctgcgcatcagcctgacagagaagtgcaacctgcgctgccagtactgcatgcctgaggagggcgtgcccctgacccccaaggccaacctgctgaccacagaggagatcctgaccctggcccggctgtttgtgaaggagggcatcgacaagatccggctgactggaggagagcccctcatccggccagatgtggtggacatcgtggcccagctgcagaggctggagggcctgcggaccatcggcgtgaccaccaacggcatcaacctggcccggctgctgccccagctgcagaaggccggcctgagcgccatcaacatcagcctggacaccctggtgcctgccaagtttgagttcatcgtgcggaggaagggcttccacaaggtgatggagggcatccacaaggccatcgagctgggctacaaccctgtgaaggtgaactgtgtggtgatgaggggcctgaatgaagatgagctgctggactttgctgccctgacagagggcctgcccctggatgtgcgcttcatcgagtacatgccctttgatggcaacaagtggaacttcaagaagatggtgtcctacaaggagatgctggacacagtgcggcagcagtggccagagctggagaaggtgcctgaggaggagagcagcacagccaaggccttcaagatccctggcttccagggccagatctccttcatcacctccatgtctgagcacttctgtggcacctgcaaccggctgcgcatcacagcagatggcaacctgaaggtgtgcctgtttggaaacagcgaggtgtccctgcgggaccacctgcgggccggggccagcgagcaggagctgctgcgcatcattggagctgctgtgggcaggaagaagaggcagcacgccgagctgttcctgatgttccccaacagccccccagccaaccccagcatcttctcctgggaccccctgcacgtgcagggcctgcggcccaggatgtccttcagcagccaggtggccaccctgtggaagggctgccgggtgccccagaccccacccctggcccagcagaggctgggcagcggcagcttccagaggcactacaccagcagagctgacagtgatgccaacagcaagtgcctgagccctggctcctgggccagcgctgcccccagcggcccccagctgaccagcgagcagctgacccacgtggacagcgagggccgggccgccatggtggatgtgggcaggaagccagacacagagcgggtggccgtggccagcgctgtggtgctgctgggccctgtggccttcaagctggtgcagcagaaccagctgaagaagggagatgccctggtggtggcccagctggccggcgtgcaggccgccaaggtgaccagccagctgatccccctgtgccaccacgtggccctgagccacatccaggtgcagctggagctggacagcaccaggcatgctgtgaagatccaggccagctgccgggcccggggccccactggagtggagatggaggccctgaccagcgctgctgtggccgccctgaccctgtatgacatgtgcaaggctgtgtcccgggacatcgtgctggaggagatcaagctgatcagcaagacaggaggccagagaggagacttccaccgggcctag

SEQ ID NO: 304362 - DNA, 1602 bp, Artificial Sequence
  derived and/or modified sequence
atgcctgaggagggcgtgcccctgacccccaaggccaacctgctgaccacagaggagatcctgaccctggcccggctgtttgtgaaggagggcatcgacaagatccggctgaccggcggggagcccctcatccggccagatgtggtggacatcgtggcccagctgcagaggctggagggcctgcggaccatcggcgtgaccaccaacggcatcaacctggcccggctgctgccccagctgcagaaggccggcctgagcgccatcaacatcagcctggacaccctggtgcctgccaagtttgagttcatcgtgcggaggaagggcttccacaaggtgatggagggcatccacaaggccatcgagctgggctacaaccctgtgaaggtgaactgtgtggtgatgaggggcctgaatgaagatgagctgctggactttgctgccctgacagagggcctgcccctggatgtgcgcttcatcgagtacatgccctttgatggcaacaagtggaacttcaagaagatggtgtcctacaaggagatgctggacacagtgcggcagcagtggccagagctggagaaggtgcctgaggaggagagcagcacagccaaggccttcaagatccctggcttccagggccagatctccttcatcacctccatgtctgagcacttctgtggcacctgcaaccggctgcgcatcacagcagatggcaacctgaaggtgtgcctgtttggaaattctgaggtgtccctgcgggaccacctgcgggccggggccagcgagcaggagctgctgcgcatcatcggggctgctgtgggcaggaagaagaggcagcacgccgagctgttcctgatgttccccaacagccccccagccaaccccagcatcttctcctgggaccccctgcacgtgcagggcctgcggcccaggatgtccttcagcagccaggtggccaccctgtggaagggctgccgggtgccccagaccccacccctggcccagcagaggctgggcagcggcagcttccagaggcactacaccagcagagctgacagtgatgccaacagcaagtgcctgagccctggctcctgggccagcgctgcccccagcggcccccagctgaccagcgagcagctgacccacgtggacagcgagggccgggccgccatggtggatgtgggcaggaagccagacacagagcgggtggccgtggccagcgctgtggtgctgctgggccctgtggccttcaagctggtgcagcagaaccagctgaagaagggagatgccctggtggtggcccagctggccggcgtgcaggccgccaaggtgaccagccagctgatccccctgtgccaccacgtggccctgagccacatccaggtgcagctggagctggacagcaccaggcatgctgtgaagatccaggccagctgccgggcccggggccccaccggggtggagatggaggccctgaccagcgctgctgtggccgccctgaccctgtatgacatgtgcaaggctgtgtcccgggacatcgtgctggaggagatcaagctgatcagcaagacaggaggccagagaggagacttccaccgggcctag

SEQ ID NO: 304363 - DNA, 4096 bp, Artificial Sequence
  derived and/or modified sequence
gcgtcctcgcctattggctgcgcgggtcccgccctccccctgcccctccccgcccttgctgggatgaccccgggggcgagtgcccggccagtgtgctcccgaagcgggctgcggttccgctcgtatcaggcttcatggcggcgcggccactgtcccggatgctgcggcggcttctgaggtccagcgcccggagctgcagctcaggggctccggtgacccagccctgccccggggagtccgcgcgagctgcctcggaggaggtgtccaggcggaggcagttcctgcgggagcatgcggcccccttctccgccttcctcacagacagcttcggccggcagcacagctacctgcggatctccctcacagagaagtgcaacctcagatgtcagtactgcatgcccgaggagggggtcccgctgacccccaaagccaacctgctgaccacagaggagatcctgaccctcgcccggctctttgtgaaggaaggcatcgacaagatccggctcacaggtggagagccgcttatccggccggacgtggtggacattgtggcccagctccagcggctggaagggctgagaaccataggtgttaccaccaatggcatcaacctggcccggctactgccccagcttcagaaggctggtctcagtgccatcaacatcagcctggacaccctggtgcctgccaagtttgagttcattgtccgcaggaaaggcttccacaaggtcatggagggcatccacaaggccatcgagctgggctacaaccctgtgaaggtgaactgtgtggtgatgcgaggccttaacgaggatgaactcctggactttgcggccttgactgagggcctccccctggatgtgcgcttcatagagtatatgccctttgatggcaacaagtggaacttcaagaagatggtcagctataaggagatgctagacactgtccggcagcagtggccagagctggagaaggtgccagaggaggaatccagcacagccaaggcctttaaaatccctggcttccaaggccagatcagcttcatcacatccatgtctgagcatttctgtgggacctgcaaccgcctgcgaatcacagctgatgggaacctcaaggtctgcctctttggaaactctgaggtatccctgcgggatcacctgcgagctggggcctctgagcaggagctgctgagaatcattggggctgctgtgggcaggaagaagcggcagcatgcagagttatttttgatgttccccaattccccaccagccaatccaagcattttctcctgggacccgctccatgttcagggtctaagacccagaatgagtttctccagccaggtggccactttatggaaaggatgcagggtcccccagacccctcctctagcccagcagcggctggggtctggctcctttcagagacactacacttcccgtgcagactcagatgccaactcaaagtgccttagcccaggttcctgggcttctgctgccccctcaggaccccagctaacctcagaacaactaactcatgtggactcggaaggacgggcagctatggtagatgtgggcaggaagccagacacagagcgggtggctgtggcttcagccgtggtcctcctgggaccggtagccttcaagcttgtccagcagaaccagctcaagaaaggagatgccctagtggtggcccagctggctggagtccaggcagccaaggtgaccagccagctgatccctctgtgccaccacgtggccctgagccacatccaggtgcagctggagctggacagcacacgccatgccgtgaagatccaggcatcttgccgggctcggggccccaccggggtggagatggaggccctgacctctgctgcagtggccgccctcaccctgtatgacatgtgcaaggctgtcagcagggacatcgtgttggaggagatcaagctcattagcaagactggtggtcagcggggggacttccatcgggcttagcacctgcccttctcacccatggcccacccaggcctggagctgggatgcaatgtaggctgagggaaagacgtcaggttcctttaatcacagtcactgtttgtttaccttgagcagtaaacccgaagtcagcctgctctactactaacaaacaggcctgctgctagatgatctctaatgaccaatggggcttcctttctatagggaggataccagcaggcccttaagccttccaggacactaaggtcgtgggagcgggactgcaacaagcaatgccagataactgagaaatcatgttctttgtggactatttcagacaaccaggttccgacagtccagcccagaacttttccttctcattttgggttttctcttctcctgctttcctggggagagattaagcgctcattaagcagaggagcccactttgaggagagcaaagcacaagcttgcctgaagaatggatcccaacttctccccggcagctctgcctccctaagtctgtgaagccgcagccctgccctgtcctgtcctgtcctgacttcatctctccttctgcccaagtctgtgtcccatcagacttgcagcctttcagcttaacagttgcccggtcctgctggccccttttcctctggcccccctcttctgaaacaggatgtgcacacatgggccatagccctaaggactcctgccagaccacacagcccacacctggccctgttcacggctgttccacccacccctctttattctggagcatatcagggaaagaaaagttgatgatagattgccttcaccctcacagcgcacaaataaagctacgatgccaactttgcagatgcaagaatgaagacactgtgtgggtagggcactgagctgctgcagtttcacagggaaggctgcacctatcaatcaatcaatcaatcctatcccaagacacagttccctgagggaagaagaggagggacctggaaaggcctaagggtgtactctctgtatagccccgctatgggaaaataaagtggagtagggggcatagaaatgcaccatctaagggaaatcttttgtcaggtggtggccaggggtgttcaaagctcattgcttgcattaccagctattagagagatcagagagggcaattaattagaggctcctggttctcacatcccaaacacacacagttctggcctgctgggctctctaacttggatgtctttgagtcctcagtggtgccccctgcctgcctcccctctgccctatgccaaggtgtgctggcaaatattaaacaaccagctctctggaaaagacaatttgtgatataaatactcccatgttgaataatttcaagctaccagtatgtcaaatggcttgcaaaatttctgaaaatgtaaacaattggttctcacagagctggtacaagctggctccagcacactctcagcccaccccagatcccctcataggaagaaggcacaagtttaaaggcagactgggtagggatggtatgaatttaatattttttagtattacaatatattcttataaaaaaggtgcaagtgaaaaaggacactgtagattatgtccattagcctcatttgtcatctgaggcagctggtgagaacagccttggcgtgaaggcatccctggtagaagtcgggggagatagatagtcacagttccccagttggtggaaatgggatgggagtagggagaggctggaacagacccttccccattcacctggagaattttctcctcccactgccctaaacactttatttccatcacaggggagaaatgctgctgagaaggttgtgtttgttaggttgatgacgaattttacattggccacaaaattagctagagaaacttatctaaaggtggcaggagcagtggggagggcatgaagaaagcaagaccaagaaacaacctattaaggaccagctcagccaccccgactgggcaccagccccttcttactcagttgagtatgagtccatggtccaaggcactgttggagatctggctacagtggcatctagcaccagagccactggccagatgtagaaaataaatagaaaaatatctttcttttagagtga

SEQ ID NO: 304364 - DNA, 2852 bp, Artificial Sequence
  derived and/or modified sequence
cttgctgggatgaccccgggggcgagtgcccggccagtgtgctcccgaagcgggctgcggttccgctcgtatcaggcttcatggcggcgcggccactgtcccggatgctgcggcggcttctgaggtccagcgcccggagctgcagctcaggggctccggtgacccagccctgccccggggagtccgcgcgagctgcctcggaggtcagtactgcatgcccgaggagggggtcccgctgacccccaaagccaacctgctgaccacagaggagatcctgaccctcgcccggctctttgtgaaggaaggcatcgacaagatccggctcacaggtggagagccgcttatccggccggacgtggtggacattgtggcccagctccagcggctggaagggctgagaaccataggtgttaccaccaatggcatcaacctggcccggctactgccccagcttcagaaggctggtctcagtgccatcaacatcagcctggacaccctggtgcctgccaagtttgagttcattgtccgcaggaaaggcttccacaaggtcatggagggcatccacaaggccatcgagctgggctacaaccctgtgaaggtgaactgtgtggtgatgcgaggccttaacgaggatgaactcctggactttgcggccttgactgagggcctccccctggatgtgcgcttcatagagtatatgccctttgatggcaacaagtggaacttcaagaagatggtcagctataaggagatgctagacactgtccggcagcagtggccagagctggagaaggtgccagaggaggaatccagcacagccaaggcctttaaaatccctggcttccaaggccagatcagcttcatcacatccatgtctgagcatttctgtgggacctgcaaccgcctgcgaatcacagctgatgggaacctcaaggtctgcctctttggaaactctgaggtatccctgcgggatcacctgcgagctggggcctctgagcaggagctgctgagaatcattggggctgctgtgggcaggaagaagcggcagcatgcagagttatttttgatgttccccaattccccaccagccaatccaagcattttctcctgggacccgctccatgttcagggtctaagacccagaatgagtttctccagccaggtggccactttatggaaaggatgcagggtcccccagacccctcctctagcccagcagcggctggggtctggctcctttcagagacactacacttcccgtgcagactcagatgccaactcaaagtgccttagcccaggttcctgggcttctgctgccccctcaggaccccagctaacctcagaacaactaactcatgtggactcggaaggacgggcagctatggtagatgtgggcaggaagccagacacagagcgggtggctgtggcttcagccgtggtcctcctgggaccggtagccttcaagcttgtccagcagaaccagctcaagaaaggagatgccctagtggtggcccagctggctggagtccaggcagccaaggtgaccagccagctgatccctctgtgccaccacgtggccctgagccacatccaggtgcagctggagctggacagcacacgccatgccgtgaagatccaggcatcttgccgggctcggggccccaccggggtggagatggaggccctgacctctgctgcagtggccgccctcaccctgtatgacatgtgcaaggctgtcagcagggacatcgtgttggaggagatcaagctcattagcaagactggtggtcagcggggggacttccatcgggcttagcacctgcccttctcacccatggcccacccaggcctggagctgggatgcaatgtaggctgagggaaagacgtcaggttcctttaatcacagtcactgtttgtttaccttgagcagtaaacccgaagtcagcctgctctactactaacaaacaggcctgctgctagatgatctctaatgaccaatggggcttcctttctatagggaggataccagcaggcccttaagccttccaggacactaaggtcgtgggagcgggactgcaacaagcaatgccagataactgagaaatcatgttctttgtggactatttcagacaaccaggttccgacagtccagcccagaacttttccttctcattttgggttttctcttctcctgctttcctggggagagattaagcgctcattaagcagaggagcccactttgaggagagcaaagcacaagcttgcctgaagaatggatcccaacttctccccggcagctctgcctccctaagtctgtgaagccgcagccctgccctgtcctgtcctgtcctgacttcatctctccttctgcccaagtctgtgtcccatcagacttgcagcctttcagcttaacagttgcccggtcctgctggccccttttcctctggcccccctcttctgaaacaggatgtgcacacatgggccatagccctaaggactcctgccagaccacacagcccacacctggccctgttcacggctgttccacccacccctctttattctggagcatatcagggaaagaaaagttgatgatagattgccttcaccctcacagcgcacaaataaagctacgatgccaactttgcagatgcaagaatgaagacactgtgtgggtagggcactgagctgctgcagtttcacagggaaggctgcacctatcaatcaatcaatcaatcctatcccaagacacagttccctgagggaagaagaggagggacctggaaaggcctaagggtgtactctctgtatagccccgctatgggaaaataaagtggagtagggggcatag

SEQ ID NO: 304365 - DNA, 1863 bp, Artificial Sequence
  derived and/or modified sequence
atggccgcccggcccctgagccggatgctgcggcggctgctgcggagcagcgccaggagctgctcctcaggtgcccccgtgacgcagccctgtcccggggagtccgctcgcgctgcctcagaggaagtgtctcggaggaggcagttcctgagagagcacgcggcaccttttagcgcctttctgacggactccttcgggcgtcagcacagctacctgcggataagcctcaccgagaagtgcaacctgcggtgtcagtattgtatgcccgaggagggcgtgcctctgactcctaaggctaacctcctcactaccgaagaaattctgactctggctcgactgttcgtgaaagaggggattgacaaaattcgcctcacaggcggtgaaccattgattcgccccgacgtcgtcgacatagtagcacagcttcagcgccttgaaggcctgaggacaattggcgtgactacgaatggcatcaaccttgccagactgttgccacaactacaaaaagcggggttatccgctatcaacatctcattggacaccttggtacccgcaaagtttgagttcatcgtgcgtaggaaggggtttcacaaagttatggaaggtattcacaaagcaattgagctgggttataatcccgtgaaagttaattgtgtggtcatgcgagggctaaacgaggacgaactgctggatttcgcagctctgacggagggccttcccctagacgtcaggtttatagagtatatgcctttcgatggcaacaagtggaacttcaagaaaatggtgagctataaagagatgctggatacagtgcgccagcagtggcccgaactggagaaagtccccgaggaggagtcatccacagccaaggcatttaagattccaggattccaggggcaaatcagctttatcacctccatgtctgaacatttctgtggaacatgtaaccggctgaggatcaccgccgacggaaacttgaaagtctgccttttcggcaacagcgaagtgagcctgcgcgatcatctgcgggccggcgcttctgagcaagagcttctgcggatcatcggggcagcggtgggacgcaaaaagcgacagcatgctgaacttttcctcatgttcccaaatagtccaccagcgaacccatccattttttcttgggaccctttgcatgtgcagggactgaggcccaggatgtctttctcttcccaggtcgcgacactctggaagggatgtcgcgtgccccagaccccacccctcgcccagcagcgtctgggctccggctccttccagcggcattataccagtcgggccgactccgacgctaacagcaagtgtctctcgcctggaagctgggcttctgctgctccctctggcccgcagctcaccagcgagcagttaacccacgttgactccgagggccgtgccgctatggttgacgtcggaagaaaacccgacacggaaagggtcgcagtggcttcggctgtggtgctcctgggacccgtggcatttaaactcgttcagcagaatcagttgaagaagggggacgccctggtggttgctcaactggcaggcgttcaggccgcaaaggtgactagccaactgattccattgtgccatcacgttgccctgagccacatccaggttcagttagagctggacagcacacgtcacgccgtgaaaattcaggcgtcctgcagagccaggggccctacaggcgtggaaatggaggctctaacatccgccgcagttgccgcactgactctgtacgacatgtgcaaagctgtctcccgtgatatcgttttagaagagataaaactcatcagcaagacggggggacagcgcggagatttccaccgcgcttag

SEQ ID NO: 304366 - DNA, 1602 bp, Artificial Sequence
  derived and/or modified sequence
atgcccgaggagggcgtgcccctgacccccaaggccaacctgctgacaactgaggagatcctgacactggcacggttgtttgtgaaagaaggtatcgataagatccgccttacaggaggagagccgttgattcggcccgacgtggtcgatatcgttgctcagttgcagagactcgaggggctgcgtaccatcggtgtgaccacaaatggaattaatttggctaggctgcttccccaactccagaaagctgggttgtctgctatcaacatttcactagatactctggtgcccgctaagtttgagtttatcgtgagaagaaaggggttccacaaggttatggagggaatacataaagctatcgaactgggctataatcctgtgaaggtgaattgcgtcgtgatgagaggacttaacgaggatgagctgctggacttcgcagcattaacggaaggccttcctctggacgtcaggtttatcgagtatatgccgtttgacggaaacaagtggaatttcaagaagatggtgtcatataaggagatgcttgacacggtccggcagcaatggcccgaactggaaaaggtccctgaagaggaatctagcactgcgaaggcattcaagatacctgggttccaggggcagatatcttttataacaagcatgtccgaacatttttgtgggacgtgcaaccgtcttcggatcaccgccgacggtaacttgaaggtctgcctgtttgggaatagcgaggtcagcctccgggatcatctgcgggccggcgcctccgagcaagagttgttgagaattataggtgctgcagtgggtcggaaaaagagacaacacgctgagcttttcttgatgttccccaattcaccgcccgcaaacccctcaattttttcctgggacccactgcacgtccaaggcctccggccccgcatgtctttttcaagccaggttgccacactgtggaagggttgtcgcgtgcctcagacaccaccgctggcgcagcagcgccttgggtccgggtccttccagaggcattacacatcaagggcagactccgacgctaactctaaatgcttgtcccccggaagctgggcttccgccgcacctagcggcccccagctcacatccgagcaactcacccatgttgacagtgaaggccgcgctgccatggtggatgtcggacggaagccggatactgagagagtcgctgtggcgagcgctgtcgtgttactagggccagtagcctttaaactagtacaacagaatcagcttaaaaagggcgatgctttagtggttgcccagcttgccggggttcaggccgctaaggtgacttcacagctaattccattgtgccaccacgtagcgctgtcacatatccaggtccagctggagcttgattccacacggcacgcagttaagatccaggcctcctgcagggctaggggcccgacaggcgtcgagatggaggctctgacgtctgctgcagtggcagcattaactctgtacgacatgtgcaaggccgtgtcaagagatattgtactagaggagatcaagctgatatccaagaccggcgggcagcggggagattttcaccgggcctag

SEQ ID NO: 304367 - DNA, 1863 bp, Artificial Sequence
  derived and/or modified sequence
atggcagctcgacctttgtcccgcatgctgagaaggcttctgcgtagtagtgcacgcagctgctcctcgggagcccctgtgacacagccctgtcccggtgagagcgctcgcgcagccagcgaggaggtttccagacggaggcagtttctgagagagcatgctgccccattctccgcattcctgactgattccttcgggagacaacactcttatctgaggatcagcctgaccgaaaaatgcaacctgaggtgccagtattgcatgcctgaggaaggcgttcctttgacccccaaagcaaacctgcttacaacggaagagatcctgaccttggccaggctgttcgtgaaagaaggtatagataagatccgattgacaggaggagagccattaatccgccctgacgtggttgacatcgttgcacagctgcagcgactcgaaggactgaggacaattggggtgacaactaacgggattaacttagctaggctcttgcctcagttgcaaaaagccggactcagcgctatcaatatcagcctggatacactagtgcccgcaaaatttgaatttattgttcggaggaagggattccacaaagtgatggaagggattcacaaggccatagagcttgggtacaaccccgtaaaggttaattgcgtagtcatgcggggtttaaatgaggacgagctcctagattttgccgcactgaccgagggactccctctggatgtcaggtttatcgagtatatgcctttcgatggtaataaatggaatttcaagaagatggttagttacaaggagatgcttgacaccgttagacaacagtggcctgagctggaaaaagttcctgaagaggagtccagcacggcgaaggcattcaagatccctggatttcagggacagatctccttcataacctccatgtccgagcacttctgcggaacctgcaaccggctgcgaataactgctgatggcaatctcaaagtgtgcctcttcggaaacagcgaggttagtttgcgcgatcacctgcgcgctggagcctccgaacaggagctactaagaatcattggggctgccgttggcaggaagaagcgccagcacgctgagctcttccttatgttccccaattccccacccgcaaatccaagcattttttcctgggacccgttgcatgtccagggcctccgcccacgcatgtctttctccagtcaggttgctacactgtggaaaggctgcagggttccacagacaccacctctggcacagcagcgtttaggatctggaagctttcagcgccactacacttcccgggctgattcagatgcgaattctaagtgcctgtctccaggttcttgggcctccgctgccccttccggaccccagctcacatccgagcagctcactcatgtagacagcgaaggtagggcagctatggtggatgtggggcgtaaaccggacaccgaacgcgtagctgtcgcatcagccgtggtattactcggcccagtagcgtttaaactcgtacagcagaatcaactgaagaagggcgatgccctagttgtggctcagctggcaggagtacaggccgctaaagtgactagccagctgattcccctttgccatcacgtggcattgagccacattcaagtccaactggaattggattccacaagacatgctgtcaagatccaagccagttgccgcgctcggggtcctacgggcgtggagatggaggccctgacttctgccgcagtggctgctcttaccctatacgatatgtgtaaagccgtcagtagggatattgttctggaggagatcaagctgatctccaagacaggcggtcagaggggcgacttccaccgggcttag

SEQ ID NO: 304368 - DNA, 1602 bp, Artificial Sequence
  derived and/or modified sequence
atgccagaggagggcgttccactgacacctaaagcaaatctcctgactaccgaggaaattctgactctcgcacggctctttgtgaaggagggaatagataaaatcagactcaccgggggagagcccttgattaggcccgatgtagtggatattgtggcccaactccagagactagagggcctcagaaccataggggtgacgaccaacgggatcaatctagcacggttgctgccacagttgcagaaagccggactctccgccattaacatcagtctcgacaccctggtgccagcgaagtttgagttcatcgtccgcaggaagggtttccacaaggttatggagggtatccacaaagcaatagagctcggatataatccagtaaaagtcaattgcgtggtgatgagaggcttaaatgaagacgagctgcttgacttcgcagcactgacagagggtcttcccctggatgtcaggtttattgagtacatgccctttgatggtaacaagtggaactttaagaagatggttagctacaaagaaatgctggacactgtgaggcagcagtggcctgaactggaaaaggttcctgaagaggagtcctccaccgccaaggcctttaagattccagggtttcagggccagatctctttcatcacatcaatgtcggagcatttttgcggcacctgcaacagattgagaatcacggccgacgggaacctaaaggtgtgcttgtttggaaattcggaagtgagcctcagggatcatctgagggctggagcttccgaacaagagctgctcagaataatcggagccgcagtaggcaggaagaagcgccagcacgccgaactgttcctcatgttcccaaacagtcctcccgcaaacccctcaattttttcttgggaccctcttcatgtccagggcctccgcccacgcatgtctttctcaagccaagtcgccaccctatggaaaggctgtcgagtgccccagacacccccactggcccagcaacggttaggaagcggatcattccaacggcattacaccagcagagccgactccgatgccaattctaaatgtctgagccccggatcctgggcctctgcagcaccttccggtccacagctgactagcgagcagcttacacatgtggatagcgagggaagagcagctatggtggatgtggggagaaaacccgacacagagcgcgtagcagtggcctctgccgtggtcctcctgggtccggtagcttttaagctcgttcagcagaaccagctgaagaagggtgacgctctggtggtggctcagctggcaggtgtgcaggctgccaaggtcacctctcagctcataccgttgtgtcatcatgtggccctttcacatatccaggtgcagctggaacttgattcgactcgccacgccgtgaagattcaagccagttgccgcgcacgcggacccactggcgtcgaaatggaggcactgaccagcgcagccgtcgcagcgctaactctctatgacatgtgcaaagcggtgagcagagatatcgtgctagaggagataaagcttatttcaaaaactggcggacagagaggggacttccatcgagcttag

SEQ ID NO: 304369 - DNA, 1863 bp, Artificial Sequence
  derived and/or modified sequence
atggccgccagacccctgagcagaatgctgagaagactgctgagaagcagcgccagaagctgcagcagcggcgcccccgtgacccagccctgccccggcgagagcgccagagccgccagcgaggaggtgagcagaagaagacagttcctgagagagcacgccgcccccttcagcgccttcctgaccgacagcttcggcagacagcacagctacctgagaatcagcctgaccgagaagtgcaacctgagatgccagtactgcatgcccgaggagggcgtgcccctgacccccaaggccaacctgctgaccaccgaggagatcctgaccctggccagactgttcgtgaaggagggcatcgacaagatcagactgaccggcggcgagcccctgatcagacccgacgtggtggacatcgtggcccagctgcagagactggagggcctgagaaccatcggcgtgaccaccaacggcatcaacctggccagactgctgccccagctgcagaaggccggcctgagcgccatcaacatcagcctggacaccctggtgcccgccaagttcgagttcatcgtgagaagaaagggcttccacaaggtgatggagggcatccacaaggccatcgagctgggctacaaccccgtgaaggtgaactgcgtggtgatgagaggcctgaacgaggacgagctgctggacttcgccgccctgaccgagggcctgcccctggacgtgagattcatcgagtacatgcccttcgacggcaacaagtggaacttcaagaagatggtgagctacaaggagatgctggacaccgtgagacagcagtggcccgagctggagaaggtgcccgaggaggagagcagcaccgccaaggccttcaagatccccggcttccagggccagatcagcttcatcaccagcatgagcgagcacttctgcggcacctgcaacagactgagaatcaccgccgacggcaacctgaaggtgtgcctgttcggcaacagcgaggtgagcctgagagaccacctgagagccggcgccagcgagcaggagctgctgagaatcatcggcgccgccgtgggcagaaagaagagacagcacgccgagctgttcctgatgttccccaacagcccccccgccaaccccagcatcttcagctgggaccccctgcacgtgcagggcctgagacccagaatgagcttcagcagccaggtggccaccctgtggaagggctgcagagtgccccagaccccccccctggcccagcagagactgggcagcggcagcttccagagacactacaccagcagagccgacagcgacgccaacagcaagtgcctgagccccggcagctgggccagcgccgcccccagcggcccccagctgaccagcgagcagctgacccacgtggacagcgagggcagagccgccatggtggacgtgggcagaaagcccgacaccgagagagtggccgtggccagcgccgtggtgctgctgggccccgtggccttcaagctggtgcagcagaaccagctgaagaagggcgacgccctggtggtggcccagctggccggcgtgcaggccgccaaggtgaccagccagctgatccccctgtgccaccacgtggccctgagccacatccaggtgcagctggagctggacagcaccagacacgccgtgaagatccaggccagctgcagagccagaggccccaccggcgtggagatggaggccctgaccagcgccgccgtggccgccctgaccctgtacgacatgtgcaaggccgtgagcagagacatcgtgctggaggagatcaagctgatcagcaagaccggcggccagagaggcgacttccacagagcctag

SEQ ID NO: 304370 - DNA, 1602 bp, Artificial Sequence
  derived and/or modified sequence
atgcccgaggagggcgtgcccctgacccccaaggccaacctgctgaccaccgaggagatcctgaccctggccagactgttcgtgaaggagggcatcgacaagatcagactgaccggcggcgagcccctgatcagacccgacgtggtggacatcgtggcccagctgcagagactggagggcctgagaaccatcggcgtgaccaccaacggcatcaacctggccagactgctgccccagctgcagaaggccggcctgagcgccatcaacatcagcctggacaccctggtgcccgccaagttcgagttcatcgtgagaagaaagggcttccacaaggtgatggagggcatccacaaggccatcgagctgggctacaaccccgtgaaggtgaactgcgtggtgatgagaggcctgaacgaggacgagctgctggacttcgccgccctgaccgagggcctgcccctggacgtgagattcatcgagtacatgcccttcgacggcaacaagtggaacttcaagaagatggtgagctacaaggagatgctggacaccgtgagacagcagtggcccgagctggagaaggtgcccgaggaggagagcagcaccgccaaggccttcaagatccccggcttccagggccagatcagcttcatcaccagcatgagcgagcacttctgcggcacctgcaacagactgagaatcaccgccgacggcaacctgaaggtgtgcctgttcggcaacagcgaggtgagcctgagagaccacctgagagccggcgccagcgagcaggagctgctgagaatcatcggcgccgccgtgggcagaaagaagagacagcacgccgagctgttcctgatgttccccaacagcccccccgccaaccccagcatcttcagctgggaccccctgcacgtgcagggcctgagacccagaatgagcttcagcagccaggtggccaccctgtggaagggctgcagagtgccccagaccccccccctggcccagcagagactgggcagcggcagcttccagagacactacaccagcagagccgacagcgacgccaacagcaagtgcctgagccccggcagctgggccagcgccgcccccagcggcccccagctgaccagcgagcagctgacccacgtggacagcgagggcagagccgccatggtggacgtgggcagaaagcccgacaccgagagagtggccgtggccagcgccgtggtgctgctgggccccgtggccttcaagctggtgcagcagaaccagctgaagaagggcgacgccctggtggtggcccagctggccggcgtgcaggccgccaaggtgaccagccagctgatccccctgtgccaccacgtggccctgagccacatccaggtgcagctggagctggacagcaccagacacgccgtgaagatccaggccagctgcagagccagaggccccaccggcgtggagatggaggccctgaccagcgccgccgtggccgccctgaccctgtacgacatgtgcaaggccgtgagcagagacatcgtgctggaggagatcaagctgatcagcaagaccggcggccagagaggcgacttccacagagcctag

SEQ ID NO: 304371 - protein, 151 aa, Artificial Sequence
  derived and/or modified sequence
MPFDGNKWNFKKMVSYKEMLDTVRQQWPELEKVPEEESSTAKAFKIPGFQGQISFITSILTVARSCWPLFLWPPSSETGCAHMGHSPKDSCQTTQPTPGPVHGCSTHPSLFWSISGKEKLMIDCLHPHSAQIKLRCQLCRCKNEDTVWVGH

SEQ ID NO: 304372 - DNA, 456 bp, Artificial Sequence
  derived and/or modified sequence
atgccctttgatgggaacaagtggaactttaagaaaatggtcagctacaaagagatgctcgatacagtgagacagcagtggcccgagctcgaaaaagtcccggaagaagagagcagtactgccaaggctttcaagattcccgggtttcagggacagatttcatttattacctctattttgacagttgcgagatcctgctggccacttttcctctggcctccgtctagcgagacaggctgcgctcacatgggtcactcacccaaggattcctgccaaaccactcagccaactccaggcccagtgcacggctgttccactcatccttctcttttctggagcatcagcgggaaagagaaacttatgattgactgcctgcacccacatagtgcccagattaagctgagatgccagctgtgtaggtgtaaaaacgaggacacagtctgggtgggtcattag

SEQ ID NO: 304373 - DNA, 456 bp, Artificial Sequence
  derived and/or modified sequence
atgccctttgatggcaacaagtggaacttcaagaagatggtgtcctacaaggagatgctggacacagtgcggcagcagtggccagagctggagaaggtgcctgaggaggagagcagcacagccaaggccttcaagatccctggcttccagggccagatctccttcatcaccagcatcctgactgtggcccggagctgctggcccctcttcctgtggccacccagcagcgagaccggctgtgcccacatgggccacagccccaaggacagctgccagaccacccagcccaccccaggccctgtgcacggctgcagcacccaccccagcctcttctggagcatcagcggcaaggagaagctgatgattgactgcctgcacccccacagcgcccagatcaagctgcgctgccagctgtgccgctgcaagaatgaagacacagtgtgggtgggccactag

SEQ ID NO: 304374 - DNA, 1334 bp, Artificial Sequence
  derived and/or modified sequence
gcgtcctcgcctattggctgcgcgggtcccgccctccccctgcccctccccgcccttgctgggatgaccccgggggcgagtgcccggccagtgtgctcccgaagcgggctgcggttccgctcgtatcaggcttcatggcggcgcggccactgtcccggatgctgcggcggcttctgaggtccagcgcccggagctgcagctcaggggctccggtgacccagccctgccccggggagtccgcgcgagctgcctcggaggaggtgtccaggcggaggcagttcctgcgggagcatgcggcccccttctccgccttcctcacagacagcttcggccggcagcacagctacctgcggatctccctcacagagaagtgcaacctcagatgtcagtactgcatgcccgaggagggggtcccgctgacccccaaagccaacctgctgaccacagaggagatcctgaccctcgcccggctctttgtgaaggaaggcatcgacaagatccggctcacaggtggagagccgcttatccggccggacgtggtggacattgtggcccagctccagcggctggaagggctgagaaccataggtgttaccaccaatggcatcaacctggcccggctactgccccagcttcagaaggctggtctcagtgccatcaacatcagcctggacaccctggtgcctgccaagtttgagttcattgtccgcaggaaaggcttccacaaggtcatggagggcatccacaaggccatcgagctgggctacaaccctgtgaaggtgaactgtgtggtgatgcgaggccttaacgaggatgaactcctggactttgcggccttgactgagggcctccccctggatgtgcgcttcatagagtatatgccctttgatggcaacaagtggaacttcaagaagatggtcagctataaggagatgctagacactgtccggcagcagtggccagagctggagaaggtgccagaggaggaatccagcacagccaaggcctttaaaatccctggcttccaaggccagatcagcttcatcacatccatcttaacagttgcccggtcctgctggccccttttcctctggcccccctcttctgaaacaggatgtgcacacatgggccatagccctaaggactcctgccagaccacacagcccacacctggccctgttcacggctgttccacccacccctctttattctggagcatatcagggaaagaaaagttgatgatagattgccttcaccctcacagcgcacaaataaagctacgatgccaactttgcagatgcaagaatgaagacactgtgtgggtagggcactga

SEQ ID NO: 304375 - DNA, 456 bp, Artificial Sequence
  derived and/or modified sequence
atgcccttcgacggcaacaagtggaacttcaagaagatggtgagctacaaagaaatgctggatacagttaggcagcaatggccagaactggagaaggtccctgaagaggagagtagcactgccaaggcgtttaaaattcccgggttccaaggacagatctcttttatcacttcaatactgaccgtcgcgcgttcctgttggccattgtttctctggccgccaagcagtgagaccggctgtgcacatatgggccatagtccaaaagatagctgtcagacaacccagcctaccccaggacccgtgcacggctgctccactcatccgtctctgttctggtcgatctcaggaaaagaaaaattgatgatcgactgcctgcatcctcactccgctcagatcaaactgagatgccaactgtgtcgctgcaaaaatgaggacactgtctgggttgggcactag

SEQ ID NO: 304376 - DNA, 456 bp, Artificial Sequence
  derived and/or modified sequence
atgcctttcgatggtaataagtggaattttaagaagatggtgagctacaaagaaatgctggacactgttcgacagcaatggccagagcttgaaaaagtgcctgaggaggagtccagcaccgcaaaggcgttcaagatacccggattccagggccagatatccttcatcacctccattctgacagtagctcgatcctgttggccactctttctgtggcccccttcatccgagaccggatgtgcgcacatgggacattcacctaaggactcgtgccagaccacacagcccaccccaggccctgttcatgggtgctctactcacccaagcctgttttggtccatttccggcaaggagaagttaatgattgactgcttgcacccacactctgctcagataaagctcaggtgtcaactatgcaggtgcaagaatgaagatactgtgtgggtgggccattag

SEQ ID NO: 304377 - DNA, 456 bp, Artificial Sequence
  derived and/or modified sequence
atgcccttcgacggcaacaagtggaacttcaagaagatggtgagctacaaggagatgctggacaccgtgagacagcagtggcccgagctggagaaggtgcccgaggaggagagcagcaccgccaaggccttcaagatccccggcttccagggccagatcagcttcatcaccagcatcctgaccgtggccagaagctgctggcccctgttcctgtggccccccagcagcgagaccggctgcgcccacatgggccacagccccaaggacagctgccagaccacccagcccacccccggccccgtgcacggctgcagcacccaccccagcctgttctggagcatcagcggcaaggagaagctgatgatcgactgcctgcacccccacagcgcccagatcaagctgagatgccagctgtgcagatgcaagaacgaggacaccgtgtgggtgggccactag

SEQ ID NO: 304378 - protein, 139 aa, Artificial Sequence
  derived and/or modified sequence
MAGKKVLIVYAHQEPKSFNGSLKNVAVDELSRQGCTVTVSDLYAMNLEPRATDKDITGTLSNPEVFNYGVETHEAYKQRSLASDITDEQKKVREADLVIFQFPLYWFSVPAILKGWMDRVLCQGFAFDIPGFYDSGLLQ

SEQ ID NO: 304379 - DNA, 420 bp, Artificial Sequence
  derived and/or modified sequence
atggccggaaagaaggtgctcattgtatacgcacaccaagagccgaagtccttcaatggtagcctaaaaaacgtagctgtggatgaactctcacggcagggctgcaccgtgactgtctctgacttatacgctatgaacttggaaccccgagcgactgacaaagatattactgggactttgtcaaacccggaagtcttcaactacggagtggagacgcacgaggcctataagcagcggtccctggcttccgatatcacggacgagcagaagaaggttagggaggcagaccttgtgatctttcaatttcctctgtattggttcagcgttccagcaattttgaaaggatggatggaccgggtgctgtgtcaagggttcgcctttgacatcccaggcttttacgacagtgggctcctccagtag

SEQ ID NO: 304380 - DNA, 420 bp, Artificial Sequence
  derived and/or modified sequence
atggctgggaagaaggtattaatcgtctatgcacatcaagaacccaaaagtttcaacggatctttgaagaacgttgcagtcgatgaactgagcagacagggttgtactgtaacagttagcgacctgtacgcaatgaacctcgagccgagagcaacagacaaagatatcaccggcacactgtccaaccccgaggtctttaattatggcgtggagacacatgaggcctataaacagcgctccctggcctccgatattactgacgaacagaagaaggtaagagaggctgatctagtgatcttccagttcccgctgtactggtttagcgtacccgcaatccttaaaggctggatggatcgggttctgtgtcagggcttcgcatttgacatcccagggttctacgactccggtctgctgcagtag

SEQ ID NO: 304381 - DNA, 192 bp, Artificial Sequence
  derived and/or modified sequence
atggccggaaaaaaggtgctgatcgtttacgcccatcaggagcctaagtcctttaatgggtctctcaaaaatgtcgcggtggatgaattatccaggcagggatgcaccgtcactgtgagcgacctgtacgccatgaatctcgagcctcgcgctacagataaagacatcacagggaccctctcgaatccatag

SEQ ID NO: 304382 - DNA, 420 bp, Artificial Sequence
  derived and/or modified sequence
atggccggcaagaaggtgctgattgtgtatgcccaccaggagcccaagagcttcaacggcagcctgaagaatgtggccgtggatgagctgagccggcagggctgcaccgtgacagtgtctgacctgtatgccatgaacctggagccccgggccacagacaaggacatcaccggcaccctgagcaaccctgaggtgttcaactacggcgtggagacccatgaggcctacaagcagaggagcctggccagtgacatcacagatgagcagaagaaggtgcgggaggccgacctggtgatcttccagttccccctgtactggttctctgtgcctgccatcctgaagggctggatggacagagtgctgtgccagggctttgcctttgacatccctggcttctatgattctggcctgctgcagtag

SEQ ID NO: 304383 - DNA, 192 bp, Artificial Sequence
  derived and/or modified sequence
atggccggcaagaaggtgctgattgtgtatgcccaccaggagcccaagagcttcaacggcagcctgaagaatgtggccgtggatgagctgagccggcagggctgcaccgtgacagtgtctgacctgtatgccatgaacctggagccccgggccacagacaaggacatcaccggcaccctgagcaacccctag

SEQ ID NO: 304384 - DNA, 689 bp, Artificial Sequence
  derived and/or modified sequence
gtaggggaggcggggctggagggagatggcgccgcgctcccggatgaacagagaaagcgacaggataagggcctcgctctgttacccaggctggagtgctgtggtgtgtttgtgactcaccgtagccttgaactcctgggctcaagcaatcctcccacctaagcctctggagtagctgggactacagattgctggactcgctgaagagagactacgcaggaaagccccagccacccatcaaatcagagagaaggaatccaccttcttacgctatggcaggtaagaaagtactcattgtctatgcacaccaggaacccaagtctttcaacggatccttgaagaatgtggctgtagatgaactgagcaggcagggctgcaccgtcacagtgtctgatttgtatgccatgaaccttgagccgagggccacagacaaagatatcactggtactctttctaatcctgaggttttcaattatggagtggaaacccacgaagcctacaagcaaaggtctctggctagcgacatcactgatgagcagaaaaaggttcgggaggctgacctagtgatatttcagttcccgctgtactggttcagcgtgccagccatcctgaagggctggatggatagggtgctgtgccagggctttgcctttgacatcccaggattctacgattccggtttgctccag

SEQ ID NO: 304385 - DNA, 833 bp, Artificial Sequence
  derived and/or modified sequence
gcagtcccgcggcgcggggcaggttccgggctgcttaggttggcaccggtccgtggtccccgggggcgcagtcgcagcgctcccgccctccaggcgtcagcgagtgcgcggtccagtgcggccggaacctggcgcaactcctagagcggtccttggggagacgcgggtcccagtcctgcggctcctactggggagtgcgctggtcggaagctttaggttcattcttgtaagtgttgctggtgtcagaataggaacctccctgcgctttgaagggatgaatgtgacctctcccacattctccggtgctgtgatgtaccttaaacacagcaagattgctggactcgctgaagagagactacgcaggaaagccccagccacccatcaaatcagagagaaggaatccaccttcttacgctatggcaggtaagaaagtactcattgtctatgcacaccaggaacccaagtctttcaacggatccttgaagaatgtggctgtagatgaactgagcaggcagggctgcaccgtcacagtgtctgatttgtatgccatgaaccttgagccgagggccacagacaaagatatcactggtactctttctaatcctgaggttttcaattatggagtggaaacccacgaagcctacaagcaaaggtctctggctagcgacatcactgatgagcagaaaaaggttcgggaggctgacctagtgatatttcagttcccgctgtactggttcagcgtgccagccatcctgaagggctggatggatagggtgctgtgccagggctttgcctttgacatcccaggattctacgattccggtttgctccag

SEQ ID NO: 304386 - DNA, 626 bp, Artificial Sequence
  derived and/or modified sequence
caggggaatggctgtgacaataaataagattgggaaaacaagaagacgcccttgcatacattaagatatgtatatatggaaatgttaccgggagtcccggttatcccaaaaagggttgtttcctgttgcgtggtgaggccaatgcacgaaaccgaaagggagtgtgtcaagcagtgcaggctgtattcaatggctatggaattggaagatctgaaatcaacttagcttataagggcctcgctctgttacccaggctggagtgctgtggtgtgtttgtgactcaccgtagccttgaactcctgggctcaagcaatcctcccacctaagcctctggagtagctgggactacagattgctggactcgctgaagagagactacgcaggaaagccccagccacccatcaaatcagagagaaggaatccaccttcttacgctatggcaggtaagaaagtactcattgtctatgcacaccaggaacccaagtctttcaacggatccttgaagaatgtggctgtagatgaactgagcaggcagggctgcaccgtcacagtgtctgatttgtatgccatgaaccttgagccgagggccacagacaaagatatcactggtactctttctaatcctg

SEQ ID NO: 304387 - DNA, 420 bp, Artificial Sequence
  derived and/or modified sequence
atggccggcaagaaggtgctgatcgtgtacgcccaccaggagcccaagtcattcaatgggtctctaaagaatgtggcagtagacgaattgagccgccaagggtgcactgtaactgtttccgatctgtacgctatgaacctggaacctagagccacagacaaggacattacaggcaccctctccaatcccgaggtgtttaactacggagtggagactcatgaagcatacaaacagcggagccttgcctccgatataactgacgagcagaagaaagtccgcgaggctgaccttgtgatttttcaatttccgttgtactggttctccgtgcctgctattttgaagggctggatggacagagtactgtgtcaaggattcgccttcgacataccaggattctatgattctggacttctccagtag

SEQ ID NO: 304388 - DNA, 420 bp, Artificial Sequence
  derived and/or modified sequence
atggccggcaagaaggtgctgatcgtgtacgcccaccaggagcccaagagctttaacggatctcttaagaatgtggctgtcgatgagctctcccgtcaggggtgtactgtcaccgtcagtgatctgtacgctatgaacttagagcctcgcgccaccgacaaagacattaccggaacactttcaaacccagaggtgttcaactatggcgttgagactcatgaggcctacaaacagagaagcctggctagtgatattacagacgagcagaagaaggtgagagaggcagatctggtcatcttccagtttccattgtattggttctcggttccggccatattgaagggatggatggatcgcgtactgtgtcagggttttgcgttcgacatccccggcttctacgacagcggacttttgcaatag

SEQ ID NO: 304389 - DNA, 192 bp, Artificial Sequence
  derived and/or modified sequence
atggccggcaagaaggtgctgatcgtgtacgcccaccaggagcccaagtcttttaatggcagcctgaaaaatgtggctgtggacgagctgtcccggcaagggtgcaccgtgacggtgtctgacctctatgccatgaacttggagcctagagccactgacaaggatatcacggggactttgtcaaatccatag

SEQ ID NO: 304390 - DNA, 420 bp, Artificial Sequence
  derived and/or modified sequence
atggcaggcaagaaggtcttgattgtctatgcacaccaagagcccaaatctttcaatggcagcctgaaaaatgtggcagtggacgagctgagtaggcaggggtgtaccgtcaccgtaagtgacctgtatgcaatgaacctggagccgagagcaactgataaggacatcacgggtacactgtctaatcccgaagtttttaactatggggtggaaacccacgaggcgtataagcaacggagtctggcttctgatattaccgacgagcagaaaaaggtacgagaggcagacctcgtaattttccagtttcccctgtactggttttctgttcccgctatcctgaaaggctggatggatagagtgctttgccagggattcgcctttgacatcccaggattctatgactccggactactccagtag

SEQ ID NO: 304391 - DNA, 420 bp, Artificial Sequence
  derived and/or modified sequence
atggccggaaaaaaggtgctgattgtctacgcccaccaagagcctaaatcttttaatggttcccttaaaaacgtagctgtcgatgagttgtctcgccagggctgcacagtaactgtgtccgatctgtatgcaatgaacttagaacccagggctacagataaagatataaccggaaccctgagcaaccctgaggtctttaattacggcgtggaaacacatgaggcctataaacagaggagtcttgcgagcgatatcacagatgagcaaaagaaggtgcgcgaggccgatttggtgatctttcagttcccactgtattggttttctgtacctgcaatcctgaagggctggatggaccgcgtcctttgccagggcttcgccttcgatataccaggcttctacgactccgggctgctccagtag

SEQ ID NO: 304392 - DNA, 192 bp, Artificial Sequence
  derived and/or modified sequence
atggcgggaaagaaggtcttaatcgtttatgcgcatcaggaacccaagagctttaatggtagtctgaaaaacgtggcagtggacgaattgtcacgtcagggatgcacagttaccgtgagtgacctgtatgcaatgaatcttgagccacgtgccactgacaaggacattacggggactctgagcaacccctag

SEQ ID NO: 304393 - DNA, 420 bp, Artificial Sequence
  derived and/or modified sequence
atggccggcaagaaggtgctgatcgtgtacgcccaccaggagcccaagagcttcaacggcagcctgaagaacgtggccgtggacgagctgagcagacagggctgcaccgtgaccgtgagcgacctgtacgccatgaacctggagcccagagccaccgacaaggacatcaccggcaccctgagcaaccccgaggtgttcaactacggcgtggagacccacgaggcctacaagcagagaagcctggccagcgacatcaccgacgagcagaagaaggtgagagaggccgacctggtgatcttccagttccccctgtactggttcagcgtgcccgccatcctgaagggctggatggacagagtgctgtgccagggcttcgccttcgacatccccggcttctacgacagcggcctgctgcagtag

SEQ ID NO: 304394 - DNA, 192 bp, Artificial Sequence
  derived and/or modified sequence
atggccggcaagaaggtgctgatcgtgtacgcccaccaggagcccaagagcttcaacggcagcctgaagaacgtggccgtggacgagctgagcagacagggctgcaccgtgaccgtgagcgacctgtacgccatgaacctggagcccagagccaccgacaaggacatcaccggcaccctgagcaacccctag

SEQ ID NO: 304395 - DNA, 546 bp, Artificial Sequence
  derived and/or modified sequence
tggggccacccccagcagtgtgccatcagccccagccccaggagccggggcagcggcctcatctgccggggccactgccggccccagtgcctgcaccaccccccagccctgaccagggtgaccagggctgctgctgccaccaccagcggcccccagatgcctgctgcctgccccggccaccccatccgcatgtttgccagcttccaccccagcgccagcacagctggcaccagcggggacagcggccccccagacaggagccccctggagctgcacatcggcttccccacagacatccccaagagcgccccccacagcatgacagccagcagcagctctgtgagcagccccagccctggcctgcccaggagaagtgccccacccagccccctgtgccgcagcctgagccctggcactggaggcggcgtgcggggcggcgtgggctacctgagcagaggagaccctgtgcgggtgctggccaggagagtgcggccagatggctctgtgcagtacctggtggagtggggcggcggcggcatcttctag

SEQ ID NO: 304396 - DNA, 222 bp, Artificial Sequence
  derived and/or modified sequence
atgtcctaccaacagcagcagtgtaagcaaccctgtcagcctccccctgtgtgccccacacccaaatgccccgagccttgcccacccccaaaatgtccggaaccttacctacctcctccctgccctccagagcactgcccccctcctccgtgtcaggataagtgcccacccgtgcagccttaccccccttgtcaacagaaatacccgcctaagtccaagtag

SEQ ID NO: 304397 - protein, 567 aa, Artificial Sequence
  derived and/or modified sequence
MAQPPRLSRSGASSLWDPASPAPTSGPRPRLWEGQDVLARWTDGLLYLGTIKKVDSAREVCLVQFEDDSQFLVLWKDISPAALPGEELLCCVCRSETVVPGNRLVSCEKCRHAYHQDCHVPRAPAPGEGEGTSWVCRQCVFAIATKRGGALKKGPYARAMLGMKLSLPYGLKGLDWDAGHLSNRQQSYCYCGGPGEWNLKMLQCRSCLQWFHEACTQCLSKPLLYGDRFYEFECCVCRGGPEKVRRLQLRWVDVAHLVLYHLSVCCKKKYFDFDREILPFTSENWDSLLLGELSDTPKGERSSRLLSALNSHKDRFISGREIKKRKCLFGLHARMPPPVEPPTGDGALTSFPSGQGPGGGVSRPLGKRRRPEPEPLRRRQKGKVEELGPPSAVRNQPEPQEQRERAHLQRALQASVSPPSPSPNQSYQGSSGYNFRPTDARCLPSSPIRMFASFHPSASTAGTSGDSGPPDRSPLELHIGFPTDIPKSAPHSMTASSSSVSSPSPGLPRRSAPPSPLCRSLSPGTGGGVRGGVGYLSRGDPVRVLARRVRPDGSVQYLVEWGGGGIF

SEQ ID NO: 304398 - protein, 227 aa, Artificial Sequence
  derived and/or modified sequence
MAQPPRLSRSGASSLWDPASPAPTSGPRPRLWEGQDVLARWTDGLLYLGTIKKVDSAREVCLVQFEDDSQFLVLWKDISPAALPGEELLCCVCRSETVVPGNRLVSCEKCRHAYHQDCHVPRAPAPGEGEGTSWVCRQCVFAIATKRGGALKKGPYARAMLGMKLSLPYGLKGLDWDAGHLSNRQQSYCYCGGPGEWNLKMLQCRSCLQWFHEACTQCLSKPLLYGD

SEQ ID NO: 304399 - DNA, 1704 bp, Artificial Sequence
  derived and/or modified sequence
atggcccaacccccccggctttcacgcagtggggcctccagtctctgggatccagcatctccagcacccactagcggccctcgcccacggctctgggaggggcaggatgttctagctcgatggactgatggcttactctatttaggtaccataaaaaaggttgattcggccagagaggtgtgtctcgtccaattcgaagacgattctcaattcctcgtgctgtggaaggatatctcacccgccgccctgcccggggaggagctgctgtgctgtgtatgtcggagcgagacagtagtgcccgggaaccgcctggtgtcctgtgaaaagtgccgccatgcctaccatcaggattgccacgtgcccagagctcccgcccctggtgagggagaggggaccagttgggtctgccggcagtgcgtgtttgcaatcgcgacaaaaagaggaggagccctgaagaaaggaccatacgcgcgtgccatgttaggtatgaaattaagtctgccttatggcctcaaaggcctagattgggacgccggacacctgtccaaccggcaacagtcttactgctactgtggcgggccgggtgagtggaatctcaaaatgctgcaatgtcggtcttgtctgcaatggtttcacgaggcctgcacacaatgcctgtccaaacctctgctttacggggacagattctacgagtttgagtgttgcgtttgccggggaggtcctgagaaggttcggcgcttgcagttaagatgggtggacgtggctcatttagtcctttatcaccttagcgtatgctgcaagaagaagtacttcgactttgacagagagatactgcccttcactagcgagaactgggactccctgctgttgggagagctgtccgacacccccaagggcgagcggtcatcgaggctcctgagtgccctgaactcccacaaagatcggttcatcagcggacgggagatcaaaaagcgaaagtgtctgtttggcctgcacgctagaatgcccccgcccgtcgagcccccaactggcgacggggctctgacttccttcccgagcggccaaggaccggggggcggagtctcacgccctcttggcaagcgacgccgtccagaacccgaacccctccgccggagacaaaaaggtaaagttgaggagctaggcccaccgtcagctgtgaggaaccagccagaacctcaggagcagagagaacgcgcacatctgcagagagccttgcaggcctctgtctcaccaccatcccctagcccaaatcaatcctaccaggggagcagcgggtataatttcaggcccaccgacgcaaggtgccttccgtcatctcccataaggatgtttgcctcttttcaccctagtgccagcacagccggcacgtccggtgattccggccccccagacagatccccgttggagcttcatattggcttcccaaccgacatcccgaagtctgcgccgcatagcatgacagcatccagctcatccgtaagttcaccaagcccagggttgccacgtcggtcagcacctccctctccattgtgtagaagcctgtcgcccggcactggaggcggggtcaggggaggcgtagggtatctgtcgcgcggtgacccagtccgcgtgctggccaggcgcgtgcgacccgacggatcggtacagtatctggtcgagtggggcggaggcggaattttttag

SEQ ID NO: 304400 - DNA, 1704 bp, Artificial Sequence
  derived and/or modified sequence
atggcccagcccccccggctgagccgcagcggggccagcagcctgtgggaccctgccagccctgcccccaccagcggcccccggccccggctgtgggagggccaggatgtgctggcccgctggacagatggcctgctgtacctgggcaccatcaagaaggtggacagcgcccgggaggtgtgcctggtgcagtttgaagatgacagccagttcctggtgctgtggaaggacatcagccctgctgccctgcccggggaggagctgctgtgctgcgtgtgccgctcagaaacagtggtgcccggcaaccggctggtgtcctgtgagaagtgcagacatgcctaccaccaggactgccacgtgccccgggccccagcccctggagagggggagggcacctcctgggtgtgccggcagtgtgtgtttgccatcgccaccaagaggggcggggccctgaagaagggcccctatgcccgggccatgctgggcatgaagctgagcctgccctacggcctgaagggcctggactgggatgctggccacctgagcaaccggcagcagagctactgctactgcggcggccctggagagtggaacctgaagatgctgcagtgccgcagctgcctgcagtggttccacgaggcctgcacccagtgcctgagcaagcccctgctgtatggagaccgcttctatgaatttgagtgctgcgtgtgccggggcggccctgagaaggtgcggcggctgcagctgcgctgggtggatgtggcccacctggtgctgtaccacctgtctgtgtgctgcaagaagaagtactttgattttgaccgggagatcctgcccttcaccagcgagaactgggacagcctgctgctgggggagctgagtgacacccccaagggggagaggagcagccggctgctgagcgccctgaacagccacaaggaccgcttcatcagcggccgggagatcaagaagaggaagtgcctgtttggcctgcacgccaggatgcctcctcctgtggagcccccaactggagatggagccctgaccagcttccccagcggccagggccctgggggcggcgtgtcccggcccctgggcaagagaagaagacctgagcctgagcccctgcggcggcggcagaagggcaaggtggaggagctgggccccccatctgctgtgaggaaccagcctgagccccaggagcagcgggagcgggcccacctgcagagggccctgcaggcctctgtgagcccccccagccccagccccaaccagagctaccagggcagcagcggctacaacttccggcccacagatgcccgctgcctgcccagcagccccatccgcatgtttgccagcttccaccccagcgccagcacagctggcaccagcggggacagcggccccccagacaggagccccctggagctgcacatcggcttccccacagacatccccaagagcgccccccacagcatgacagccagcagcagctctgtgagcagccccagccctggcctgcccaggagaagtgccccacccagccccctgtgccgcagcctgagccctggcactggaggcggcgtgcggggcggcgtgggctacctgagcagaggagaccctgtgcgggtgctggccaggagagtgcggccagatggctctgtgcagtacctggtggagtggggcggcggcggcatcttctag

SEQ ID NO: 304401 - DNA, 1704 bp, Artificial Sequence
  derived and/or modified sequence
atggcccagcccccccggctgagccggagcggcgccagcagcctgtgggatcccgcttctcccgccccaacctcaggacctcggcctaggttgtgggagggccaggatgtgctggccagatggaccgacggactgctctacctcggtaccatcaagaaggttgacagcgctcgcgaggtctgtctcgttcagttcgaggacgactcacagtttctggtactgtggaaagacatatctcccgccgccctgccgggagaggagcttctctgctgtgtgtgcaggagcgagacagtggtgccaggaaacaggctcgttagctgcgagaagtgcaggcacgcgtatcaccaggattgccatgtcccacgcgctcccgcaccaggggaaggagaaggtacctcctgggtctgtaggcagtgcgtatttgccatcgccacaaaacgtggaggcgcacttaagaagggcccttacgcgagagccatgcttggtatgaaacttagtctgccttatggtttgaagggactggattgggatgccgggcatctctcaaacagacagcaatcttactgttattgtggaggcccgggagagtggaacctcaagatgctgcaatgtagaagctgcctccaatggttccacgaggcgtgtacccaatgcctctccaaaccactgctatacggcgacagattctacgagtttgaatgctgtgtatgccggggtggaccagagaaggtcaggcggctgcagctgcgctgggtggatgtggcgcacctggtcctgtatcacttgagcgtgtgctgtaagaagaagtactttgactttgatagggagatcctccccttcacgtcggaaaattgggactccctgctgctcggcgagttatccgacactccgaaaggtgagcgttcgtccaggctcctgagcgccctgaactcacacaaggatcggttcatatctgggagagaaatcaagaagaggaagtgtctgttcggactgcatgcacggatgcctccccccgtggagcctcccaccggagacggggccctaacgagcttccctagtggccagggaccaggcggaggagtgtcgagacccctgggaaagcggaggcggccagagccagagcccctccggcgccgacagaagggaaaggttgaggaattgggccctccctctgccgtgcgcaaccagcctgagccacaggagcagcgggagagagcgcatctacagcgggctctgcaggccagcgtgtcacccccgagcccttcccccaaccagtcctaccagggctcttctggatataactttcggcctacagacgcaagatgtttgccctcgtctccaatcagaatgttcgccagcttccatccatcagcaagcacagccgggacatctggggatagcggtcctccagatagaagcccactggagctccacattgggttcccaaccgatataccaaaaagtgcacctcacagtatgacagccagttcctcctccgtgtcgtctccttcgccaggcctgcccagacgcagtgcaccccctagcccactgtgcagatccctcagcccaggaaccgggggcggcgtgcggggcggcgttgggtatctctctagaggcgaccctgtgagagttttggcccgcagggtccgccccgacggtagcgtacagtacctcgtggaatggggaggcggcgggattttctag

SEQ ID NO: 304402 - DNA, 2330 bp, Artificial Sequence
  derived and/or modified sequence
caccctcccccccaaccggtccgtccctcccctccctccctcccccccgccgcctcctcctcctgccgctgccgctgctttggctgctgcgtcatacgccccagagccgccgggacggaggggctgggcctggggaccccccggcctccgcctgcacgcccccccacgcccggacgtgccctctccgcgcgggggactcgcctaggtctcctacgtctgcccctgcccggctcccggcggccccagctgtcaccggcccccccaggatgcaatggcgcagcccccccggctgagccgctctggtgcctcctcactttgggacccagcttctcctgctcccacctctggccccaggcctcggctttgggagggtcaagatgtgctggccagatggactgatgggctgctatacttgggtaccatcaaaaaggtggacagtgctagggaggtgtgtctggtccagtttgaggatgattcgcagtttctggttctatggaaagacattagccctgctgccctccctggagaggaactcctctgttgtgtctgtcgctctgagactgtggtccctgggaaccggctggtcagctgtgagaagtgtcgccatgcttatcaccaggactgccatgttcccagggctccagcccctggagagggagagggcacatcctgggtatgccgccagtgtgtctttgcgatcgccaccaagaggggaggtgccctgaagaagggcccctatgcccgggccatgctgggtatgaagctttctctgccatatggactgaaggggctggactgggatgctggacatctgagcaaccgacagcagagttactgttactgtggtggccctggggagtggaacctgaaaatgctgcagtgccggagctgcctgcagtggttccatgaggcctgcacccagtgtctgagcaagcccctcctctatggggacaggttctatgaatttgaatgctgtgtgtgtcgcgggggccctgagaaagtccggagactacagcttcgctgggtggatgtggcccatcttgtcctgtatcacctcagtgtttgctgtaagaagaaatactttgattttgatcgtgagatcctccccttcacttctgagaattgggacagtttgctcctgggggagctttcagacacccccaaaggagaacgttcttccaggctcctctctgctcttaacagccacaaggaccgtttcatttcagggagagagattaagaagaggaaatgtttgtttggtctccatgctcggatgcctccccctgtggagccccctactggagatggagcactcaccagcttcccttcagggcagggccctgggggaggggtctcacgtcccctggggaagcgccggaggccggagccagagcccctgaggaggaggcagaaggggaaagtggaggagctggggccaccctcagcagtgcgcaatcagcccgagccccaggagcagagggagcgggctcatctgcagagggcactgcaggcctcagtgtctccaccatcccccagccctaaccagagttaccagggcagcagcggctacaacttccggcccacagatgcccgctgcctgcccagcagccccatccggatgtttgcttccttccacccttctgccagcaccgcagggacctctggggacagtggacccccagacaggtcacccctggaacttcacattggtttccccacagacatccctaaaagtgccccccactcgatgactgcctcatcttcctcagtttcatccccatccccaggtcttcctagacgctcagcacccccttctcccctgtgccgtagtttgtctcctgggactgggggaggagtccgaggtggggttggttacctgtcccgaggggaccctgtccgggtccttgctcggagagtacggcctgatggctctgtgcagtacctggttgagtggggaggagggggcatcttctgaacagcctgcctctgcccagctccccattcacacacaccggcactttcataccctgacctctgacctcacctacagctgggatgtacctggagagatagggggtagttctccctactgcccaggctggaatccaagagtggggagtggggaagaggccctcttctctaccctccttcatgattcctgacccctcccatccttcccatttcctttgatgttattttgttacagctttttaaatattttttaaaattatttaacccctgggggcagagactgaggagggaggatgataagggatcccggactctgtatgattgaaataaagagaaataaacaaatctagcagctctga

SEQ ID NO: 304403 - DNA, 862 bp, Artificial Sequence
  derived and/or modified sequence
tggggccaccctcagcagtgcgcaatcagcccgagccccaggagcagagggagcgggctcatctgcagagggcactgcaggcctcagtgtctccaccatcccccagccctaaccagagttaccagggcagcagcggctacaacttccggcccacagatgcccgctgcctgcccaggtcaccccatccggatgtttgcttccttccacccttctgccagcaccgcagggacctctggggacagtggacccccagacaggtcacccctggaacttcacattggtttccccacagacatccctaaaagtgccccccactcgatgactgcctcatcttcctcagtttcatccccatccccaggtcttcctagacgctcagcacccccttctcccctgtgccgtagtttgtctcctgggactgggggaggagtccgaggtggggttggttacctgtcccgaggggaccctgtccgggtccttgctcggagagtacggcctgatggctctgtgcagtacctggttgagtggggaggagggggcatcttctgaacagcctgcctctgcccagctccccattcacacacaccggcactttcataccctgacctctgacctcacctacagctgggatgtacctggagagatagggggtagttctccctactgcccaggctggaatccaagagtggggagtggggaagaggccctcttctctaccctccttcatgattcctgacccctcccatccttcccatttcctttgatgttattttgttacagctttttaaatattttttaaaattatttaacccctgggggcagagactgaggagggaggatgataagggatcccggactctgtatg

SEQ ID NO: 304404 - DNA, 1704 bp, Artificial Sequence
  derived and/or modified sequence
atggcgcagccaccgaggctgtccagatccggcgcaagtagtctatgggaccctgcttctccagcacctacctcaggaccaagaccaagactctgggagggccaggatgtgctcgccaggtggacggacgggttgctatatctggggaccataaagaaggttgactcggcacgggaagtgtgcttggttcaatttgaagacgattcccagttcctggtcctctggaaagacatctctcccgctgcactgccgggagaggagctgctctgctgcgtgtgccgaagtgagaccgtcgtgcccggtaaccgcttagtctcctgcgagaagtgcaggcacgcctaccaccaggactgtcacgtgcccagggcccctgcccctggcgagggagaaggcacttcgtgggtgtgtcgacaatgtgtcttcgcaatcgccactaagcgaggaggtgcactgaaaaagggaccttatgcacgcgcaatgctcggcatgaaattgagtctgccatacggcctgaagggcctggattgggacgccggtcacctaagcaatagacagcagtcctattgttactgtggcggacccggagagtggaatttaaaaatgctgcagtgtagatcctgtctgcaatggtttcacgaggcttgcacccagtgtctgagcaagccactcctgtacggcgatagattttacgaattcgaatgctgtgtgtgtagaggtggcccagagaaagttcggcgtttacaactccgatgggtcgacgtggcccatttagtactctatcacttatcggtttgttgtaagaagaagtattttgacttcgacagggagatcctgccattcacctccgagaactgggatagcctgttgctcggagagctgtccgatactccaaagggtgaaaggtcctcacgcctcctatcggcactgaactctcacaaagatcggttcatttccgggagagagatcaaaaagcgcaagtgcctgttcggccttcacgcccgtatgcctcccccagtcgaaccgccaactggcgacggggcactcacaagctttcccagcggacaagggcctggtggcggtgtttccagaccgttaggtaagaggcgacgacccgagccagagcccttacgccgtaggcaaaaaggtaaggtagaagaactgggcccaccgtcagctgtgcgcaatcaacctgagccccaagagcagcgagagcgcgctcatttacaacgggcattacaggcatcagtgagtccaccctcaccatcccccaatcagagctaccagggatcctccggttacaatttccgcccaacggacgccagatgtctgccctcaagtcctataaggatgtttgcctctttccacccaagcgcctctacggcaggcacttccggtgatagcgggcctcccgatagatcgccactagaactgcacattgggtttcctaccgacattcccaagtcagctccccactccatgaccgcgtccagcagctccgtgagctctccctctccgggactgcccaggagatccgctcccccttctcctctctgccggagcctgagtccaggaacagggggaggagtcaggggaggcgtgggctacctcagccggggagaccccgtccgcgttctggcgaggagggtcaggcccgatggcagtgtacagtatttggtagaatggggagggggagggatattttag

SEQ ID NO: 304405 - DNA, 1704 bp, Artificial Sequence
  derived and/or modified sequence
atggcccagccccccagactgagcagaagcggcgccagcagcctgtgggaccccgccagccccgcccccaccagcggccccagacccagactgtgggagggccaggacgtgctggccagatggaccgacggcctgctgtacctgggcaccatcaagaaggtggacagcgccagagaggtgtgcctggtgcagttcgaggacgacagccagttcctggtgctgtggaaggacatcagccccgccgccctgcccggcgaggagctgctgtgctgcgtgtgcagaagcgagaccgtggtgcccggcaacagactggtgagctgcgagaagtgcagacacgcctaccaccaggactgccacgtgcccagagcccccgcccccggcgagggcgagggcaccagctgggtgtgcagacagtgcgtgttcgccatcgccaccaagagaggcggcgccctgaagaagggcccctacgccagagccatgctgggcatgaagctgagcctgccctacggcctgaagggcctggactgggacgccggccacctgagcaacagacagcagagctactgctactgcggcggccccggcgagtggaacctgaagatgctgcagtgcagaagctgcctgcagtggttccacgaggcctgcacccagtgcctgagcaagcccctgctgtacggcgacagattctacgagttcgagtgctgcgtgtgcagaggcggccccgagaaggtgagaagactgcagctgagatgggtggacgtggcccacctggtgctgtaccacctgagcgtgtgctgcaagaagaagtacttcgacttcgacagagagatcctgcccttcaccagcgagaactgggacagcctgctgctgggcgagctgagcgacacccccaagggcgagagaagcagcagactgctgagcgccctgaacagccacaaggacagattcatcagcggcagagagatcaagaagagaaagtgcctgttcggcctgcacgccagaatgcccccccccgtggagccccccaccggcgacggcgccctgaccagcttccccagcggccagggccccggcggcggcgtgagcagacccctgggcaagagaagaagacccgagcccgagcccctgagaagaagacagaagggcaaggtggaggagctgggcccccccagcgccgtgagaaaccagcccgagccccaggagcagagagagagagcccacctgcagagagccctgcaggccagcgtgagcccccccagccccagccccaaccagagctaccagggcagcagcggctacaacttcagacccaccgacgccagatgcctgcccagcagccccatcagaatgttcgccagcttccaccccagcgccagcaccgccggcaccagcggcgacagcggcccccccgacagaagccccctggagctgcacatcggcttccccaccgacatccccaagagcgccccccacagcatgaccgccagcagcagcagcgtgagcagccccagccccggcctgcccagaagaagcgccccccccagccccctgtgcagaagcctgagccccggcaccggcggcggcgtgagaggcggcgtgggctacctgagcagaggcgaccccgtgagagtgctggccagaagagtgagacccgacggcagcgtgcagtacctggtggagtggggcggcggcggcatcttctag

SEQ ID NO: 304406 - DNA, 438 bp, Artificial Sequence
  derived and/or modified sequence
atggctcaacctccacgactgagcagatctggcgctagcagcctctgggaccctgcctcacccgcgcccacaagcggccctcgcccacgactctgggaagggcaagacgtgcttgcccgctggacagacggcctcctctacttgggtacaatcaagaaggtagattcagcccgcgaagtgtgtcttgtgcagtttgaggacgactcccaatttctggttctatggaaagacattagccccgctgccctgcccggggaggagttgctttgttgcgtctgtcgtagtgagaccgtcgtgcccgggaaccgcctagtgagctgtgaaaagtgccggcatgcctatcatcaggattgccacgtccccagagcgccagccccgggggaaggtgagggaacatcctgggtctgccgccagtgtgtgttcgctatagcaacatag

SEQ ID NO: 304407 - DNA, 438 bp, Artificial Sequence
  derived and/or modified sequence
atggcccagcctccccggctgagccgaagtggagcctcatccctgtgggatccagcatcacctgctcccacgagcggtccccggccaaggctgtgggaaggacaggacgtgctagcaaggtggacagatggccttttatatctggggacgattaagaaagtggacagcgcacgagaggtctgtttagttcaattcgaggatgattcccagttcctggtcttgtggaaagatatcagccccgcagctctcccaggagaggagctgctttgttgcgtgtgcagatccgaaaccgtggtgcccgggaatcggctggtgtcttgcgaaaaatgtagacatgcttatcaccaggactgccatgtccctcgtgctcccgcgccaggcgagggggaagggacaagctgggtctgccgccagtgtgttttcgccatagccacttag

SEQ ID NO: 304408 - DNA, 684 bp, Artificial Sequence
  derived and/or modified sequence
atggcccaacccccccgtctctcacgatctggagcaagcagcctctgggacccagcttcccccgcaccaacctcaggacctcggcctaggctgtgggaagggcaggacgtgctagctagatggactgacggcctgttatacctgggaacgattaagaaagtcgattcggctagggaggtgtgccttgtacaattcgaggatgactcccagttcctcgtgctctggaaggacatatctcctgctgcattacccggcgaggaactattgtgttgtgtgtgtaggagtgagactgttgtacccggtaacaggctggtcagctgcgagaaatgtcgtcacgcctaccatcaggactgtcacgtgccccgggctccagctccaggagagggtgaaggtacctcttgggtgtgccgccagtgcgttttcgccatcgccactaaacggggaggagccctgaaaaaagggccctatgcaagagcaatgctgggtatgaaactgagtcttccttatggactaaaagggttggattgggacgccggccacttatccaatcgacagcagagctactgttactgtggcggccccggcgaatggaatctgaaaatgttgcagtgtcggagctgcttgcagtggttccacgaggcctgtacccagtgcttaagtaagccactcctctatggggattag

SEQ ID NO: 304409 - DNA, 684 bp, Artificial Sequence
  derived and/or modified sequence
atggctcagcctccgagactatcaaggtccggagcgagttctctgtgggaccccgcctctccagcccccacctctggcccaaggcctcgcttgtgggaagggcaggacgtcctggcgcgctggacagatggtctgctatacttgggaacgataaagaaggtagacagtgcccgggaggtatgtctggtccaattcgaagacgactctcagttcttagttctttggaaagacatcagccctgccgcgttgccaggcgaggagcttttgtgttgcgtatgtcgcagcgagactgtggtcccaggcaataggctggtttcgtgcgagaaatgcaggcatgcttaccaccaggattgtcatgtgccgcgagctccagcgccaggagagggcgaggggacctcgtgggtctgtcgacaatgcgtttttgctatcgcaactaagcgggggggtgccctcaaaaaaggcccatatgcccgcgcaatgttggggatgaagctgagcctgccatatggcctgaagggcctagattgggatgccggtcatctgagcaaccgacaacagtcttactgttactgtgggggtccaggggaatggaaccttaaaatgctgcagtgtcgttcttgcctgcagtggttccacgaagcctgcactcagtgcctgagtaaaccactcctgtatggggactag

SEQ ID NO: 304410 - DNA, 438 bp, Artificial Sequence
  derived and/or modified sequence
atggcccagcccccccggctgagccgcagcggggccagcagcctgtgggaccctgccagccctgcccccaccagcggcccccggccccggctgtgggagggccaggatgtgctggcccgctggacagatggcctgctgtacctgggcaccatcaagaaggtggacagcgcccgggaggtgtgcctggtgcagtttgaagatgacagccagttcctggtgctgtggaaggacatcagccctgctgccctgcccggggaggagctgctgtgctgcgtgtgccgctcagaaacagtggtgcccggcaaccggctggtgtcctgtgagaagtgcagacatgcctaccaccaggactgccacgtgccccgggccccagcccctggagagggggagggcacctcctgggtgtgccggcagtgtgtgtttgccatcgccacctag

SEQ ID NO: 304411 - DNA, 684 bp, Artificial Sequence
  derived and/or modified sequence
atggcccagcccccccggctgagccgcagcggggccagcagcctgtgggaccctgccagccctgcccccaccagcggcccccggccccggctgtgggagggccaggatgtgctggcccgctggacagatggcctgctgtacctgggcaccatcaagaaggtggacagcgcccgggaggtgtgcctggtgcagtttgaagatgacagccagttcctggtgctgtggaaggacatcagccctgctgccctgcccggggaggagctgctgtgctgcgtgtgccgctcagaaacagtggtgcccggcaaccggctggtgtcctgtgagaagtgcagacatgcctaccaccaggactgccacgtgccccgggccccagcccctggagagggggagggcacctcctgggtgtgccggcagtgtgtgtttgccatcgccaccaagaggggcggggccctgaagaagggcccctatgcccgggccatgctgggcatgaagctgagcctgccctacggcctgaagggcctggactgggatgctggccacctgagcaaccggcagcagagctactgctactgcggcggccctggagagtggaacctgaagatgctgcagtgccgcagctgcctgcagtggttccacgaggcctgcacccagtgcctgagcaagcccctgctgtatggagactag

SEQ ID NO: 304412 - DNA, 438 bp, Artificial Sequence
  derived and/or modified sequence
atggcccagcccccccggctgagccggagcggcgccagcagcctgtgggatcctgcttcccccgcaccgacatctgggccccggcctcggctgtgggagggacaggatgtactggcacggtggaccgatgggctcctgtacctgggcacgatcaaaaaagtggactccgcccgggaagtttgtctggtgcaatttgaggatgatagccagtttcttgtgctgtggaaggatatcagccctgccgcccttcctggggaggaactgctgtgctgcgtttgtcgtagcgagaccgtggttccaggtaaccgattggtgagctgcgagaagtgccgccacgcttatcaccaggattgccacgttcctagagcaccggctccgggtgagggcgagggaaccagctgggtctgccgccagtgtgtattcgcaatcgccacctag

SEQ ID NO: 304413 - DNA, 438 bp, Artificial Sequence
  derived and/or modified sequence
atggcccagcccccccggctgagccggagcggcgccagcagcctgtgggaccccgccagccccgcccctacttcaggtcccaggcctaggctgtgggaaggccaggatgtgctggctcgctggaccgatgggctgttgtatctgggtactattaagaaggttgattcagcgagggaggtttgcctggtacagttcgaagacgatagtcagtttctggtactttggaaagatatttccccagccgcactgcctggcgaagaactgctgtgttgtgtgtgcagaagcgagacagtggtacccgggaatcggttagtttcctgtgagaagtgtagacacgcttatcaccaggactgtcacgtgccccgcgccccagccccgggcgagggtgagggtactagctgggtgtgccgtcagtgtgtttttgcgatagccacttag

SEQ ID NO: 304414 - DNA, 684 bp, Artificial Sequence
  derived and/or modified sequence
atggcccagcccccccggctgagccggagcggcgccagcagcctgtgggaccccgcatcccctgctccaacctctgggccccgtcccaggttgtgggaaggccaggatgtgctggcacgctggaccgacggcctgctgtacctgggaactattaaaaaagtcgatagcgcccgagaagtctgtctcgttcagttcgaggacgactctcagtttcttgttctgtggaaggacatctcacccgccgccctgcctggtgaagaattactttgttgtgtgtgcagaagtgagaccgtggtgcccggcaaccgcctggtgtcctgtgaaaaatgtcggcatgcgtatcaccaagactgtcatgtccccagggcgccggcaccaggagaaggcgagggaacgagctgggtctgccgccagtgtgtgttcgcaatagctaccaagaggggtggggcgctcaagaaagggccctatgctcgggccatgctagggatgaagctgtctttgccctatggcctcaagggcctggattgggacgccgggcacttatcaaacaggcaacaatcatactgttattgcggaggcccgggtgagtggaaccttaagatgttacaatgtcgttcatgcctccagtggttccatgaggcctgcacacagtgcctgagcaagcccctcctgtatggcgattag

SEQ ID NO: 304415 - DNA, 684 bp, Artificial Sequence
  derived and/or modified sequence
atggcccagcccccccggctgagccggagcggcgccagcagcctgtgggaccctgccagcccagcaccaactagcgggccacgcccacggctgtgggagggacaggatgttctggcccggtggacagacggcttgctgtacctcggcactatcaagaaggtggatagcgcgcgagaagtctgtctggtacagttcgaggatgactcacagttcctggttttgtggaaagacatttccccagccgctttgcccggagaggaacttctgtgctgtgtctgtagaagcgagaccgtcgtgcccggtaacagactggtcagctgcgaaaagtgccgccacgcttaccaccaagattgccatgtgccacgggctccggcccctggggaaggagaaggcacctcttgggtctgccgacagtgcgtgttcgccatcgcgactaagcggggcggcgccctgaagaaaggcccctatgcgagagcaatgctaggcatgaaattgtcattgccgtacggacttaaagggttagattgggatgcaggtcacctctccaacagacagcagtcatactgctactgcggtgggcccggggaatggaatttgaagatgctgcagtgtcgctcttgccttcagtggttccacgaagcctgtacacagtgcttgtccaaacccctcctctacggagactag

SEQ ID NO: 304416 - DNA, 609 bp, Artificial Sequence
  derived and/or modified sequence
aagcacggggcgggacgtccacgggaagcggcgcgcacgcccgccgactccctcgcgccaaccgccgacggccgccgcccggtgaaggaggggctcagtcctcccaggtctcctacgtctgcccctgcccggctcccggcggccccagctgtcaccggcccccccaggatgcaatggcgcagcccccccggctgagccgctctggtgcctcctcactttgggacccagcttctcctgctcccacctctggccccaggcctcggctttgggagggtcaagatgtgctggccagatggactgatgggctgctatacttgggtaccatcaaaaaggtggacagtgctagggaggtgtgtctggtccagtttgaggatgattcgcagtttctggttctatggaaagacattagccctgctgccctccctggagaggaactcctctgttgtgtctgtcgctctgagactgtggtccctgggaaccggctggtcagctgtgagaagtgtcgccatgcttatcaccaggactgccatgttcccagggctccagcccctggagagggagagggcacatcctgggtatgccgccagtgtgtctttgcgatcgccacca

SEQ ID NO: 304417 - DNA, 836 bp, Artificial Sequence
  derived and/or modified sequence
ttccctcgtgccccaagggcgaatctcaggtcggaggaaggggctgaggggattccctctcccaccgggtccgactcttcgctccccaagccgcggagggccagcctcttcttcggcgccctccaggcctgttggaggcccccccaggatgcaatggcgcagcccccccggctgagccgctctggtgcctcctcactttgggacccagcttctcctgctcccacctctggccccaggcctcggctttgggagggtcaagatgtgctggccagatggactgatgggctgctatacttgggtaccatcaaaaaggtggacagtgctagggaggtgtgtctggtccagtttgaggatgattcgcagtttctggttctatggaaagacattagccctgctgccctccctggagaggaactcctctgttgtgtctgtcgctctgagactgtggtccctgggaaccggctggtcagctgtgagaagtgtcgccatgcttatcaccaggactgccatgttcccagggctccagcccctggagagggagagggcacatcctgggtatgccgccagtgtgtctttgcgatcgccaccaagaggggaggtgccctgaagaagggcccctatgcccgggccatgctgggtatgaagctttctctgccatatggactgaaggggctggactgggatgctggacatctgagcaaccgacagcagagttactgttactgtggtggccctggggagtggaacctgaaaatgctgcagtgccggagctgcctgcagtggttccatgaggcctgcacccagtgtctgagcaagcccctcctctatggggacag

SEQ ID NO: 304418 - DNA, 438 bp, Artificial Sequence
  derived and/or modified sequence
atggcccaacctcctaggctcagtagatctggagctagctccctctgggatcccgcatccccggcacccacatccggccctaggccgagattgtgggagggtcaggatgtcctggcaaggtggaccgatggtctgctgtaccttggaacaattaaaaaggtggactcagcgagggaagtgtgtctggttcagttcgaggacgatagccagtttcttgtgctatggaaggacatctctccagccgctctacctggcgaagaactgctgtgctgcgtgtgccgatccgaaaccgttgtgcccggtaaccgcttagtgtcttgtgagaaatgccgccacgcataccaccaggattgccatgtgcccagggcccctgcaccaggcgagggcgaagggaccagctgggtctgtcggcagtgcgtctttgcaatcgctacctag

SEQ ID NO: 304419 - DNA, 438 bp, Artificial Sequence
  derived and/or modified sequence
atggcgcagcctccccgattgagtaggtccggcgctagttccttatgggatccggcatctccggcacctacatctgggcctcggccaaggttatgggaagggcaggatgtgctcgctcgctggacagacgggttactgtatctcgggaccataaagaaagtcgactctgctagagaggtttgcctcgtccaattcgaagacgactcccagtttttagtgctctggaaggatatctctcctgcagcactgcccggagaagaactattgtgctgcgtctgtagaagcgaaactgtggtgccgggaaatcgactcgtatcctgcgaaaaatgtaggcacgcataccatcaggattgtcacgtgccacgagcacctgccccaggcgagggggaggggacttcatgggtgtgtcggcagtgtgtgttcgccatagcgacctag

SEQ ID NO: 304420 - DNA, 684 bp, Artificial Sequence
  derived and/or modified sequence
atggcacaaccacctcgcctttctagatctggagcttcttcactgtgggacccagcaagccctgccccaacatcaggtcctcgtcctcgattatgggaagggcaggatgttttggcacgctggacagacggtctgctgtatctgggtacaatcaagaaggttgatagtgcacgggaagtttgtctcgtccaattcgaggacgatagtcagtttctcgtgctttggaaagatatcagccccgctgcgctgcctggggaagaacttctgtgctgcgtttgccgctccgagactgtggtgcccggtaacaggctggtgagctgtgagaaatgccgacacgcctaccaccaagactgccacgttccacgggcaccggcaccaggagagggtgagggtacctcatgggtgtgcaggcagtgcgtgtttgctattgccactaagcgaggaggggcactgaaaaaaggcccatacgcacgcgcaatgctcggaatgaaattatcgcttccgtacggtctgaagggattagattgggacgccggacatctgtccaacagacagcagtcctattgctattgcgggggacccggtgagtggaatctgaaaatgctccaatgcagatcatgtctgcagtggttccacgaagcctgcacccagtgtctgtcaaagccattgctatatggtgactag

SEQ ID NO: 304421 - DNA, 684 bp, Artificial Sequence
  derived and/or modified sequence
atggctcagcctcctcgactcagccgctctggagcatcctcgctctgggacccagcctctcccgctcctacatccgggcctcgcccacgactttgggaagggcaagacgtcttggcacgttggacagatggcctgctatacctggggactatcaagaaggtggacagtgcaagagaggtttgcctggtgcaatttgaggacgatagccagttcctcgtattgtggaaggacatttctcccgcagcactgcctggtgaggaactgctgtgctgtgtgtgtagatctgaaaccgtggtgccagggaatcggctggtcagctgcgagaaatgtcgacacgcataccatcaagattgccatgttccccgtgcgccagcccctggggagggagaggggacatcatgggtttgtcggcagtgtgttttcgccattgccactaaacggggtggagcccttaaaaaaggcccttacgcccgagccatgctggggatgaagctgagccttccatacgggttgaaaggtctggactgggacgccggacacctttctaatagacaacagagttactgttactgtggaggcccaggggaatggaacttgaagatgctacagtgcaggtcctgcctccagtggttccacgaggcctgcacccagtgcctgagtaagcctctcttatacggagattag

SEQ ID NO: 304422 - DNA, 438 bp, Artificial Sequence
  derived and/or modified sequence
atggcccagccccccagactgagcagaagcggcgccagcagcctgtgggaccccgccagccccgcccccaccagcggccccagacccagactgtgggagggccaggacgtgctggccagatggaccgacggcctgctgtacctgggcaccatcaagaaggtggacagcgccagagaggtgtgcctggtgcagttcgaggacgacagccagttcctggtgctgtggaaggacatcagccccgccgccctgcccggcgaggagctgctgtgctgcgtgtgcagaagcgagaccgtggtgcccggcaacagactggtgagctgcgagaagtgcagacacgcctaccaccaggactgccacgtgcccagagcccccgcccccggcgagggcgagggcaccagctgggtgtgcagacagtgcgtgttcgccatcgccacctag

SEQ ID NO: 304423 - DNA, 684 bp, Artificial Sequence
  derived and/or modified sequence
atggcccagccccccagactgagcagaagcggcgccagcagcctgtgggaccccgccagccccgcccccaccagcggccccagacccagactgtgggagggccaggacgtgctggccagatggaccgacggcctgctgtacctgggcaccatcaagaaggtggacagcgccagagaggtgtgcctggtgcagttcgaggacgacagccagttcctggtgctgtggaaggacatcagccccgccgccctgcccggcgaggagctgctgtgctgcgtgtgcagaagcgagaccgtggtgcccggcaacagactggtgagctgcgagaagtgcagacacgcctaccaccaggactgccacgtgcccagagcccccgcccccggcgagggcgagggcaccagctgggtgtgcagacagtgcgtgttcgccatcgccaccaagagaggcggcgccctgaagaagggcccctacgccagagccatgctgggcatgaagctgagcctgccctacggcctgaagggcctggactgggacgccggccacctgagcaacagacagcagagctactgctactgcggcggccccggcgagtggaacctgaagatgctgcagtgcagaagctgcctgcagtggttccacgaggcctgcacccagtgcctgagcaagcccctgctgtacggcgactag

SEQ ID NO: 304424 - DNA, 732 bp, Artificial Sequence
  derived and/or modified sequence
tagagtcttttgttgactgccacccggaccgtgtcgttccaaggagaacgtctaaggaggggtaacgtttgcctggtgtcgatgcttggctgcttgcctttatggtcaccactcctagaaatggagcattcgcctggccagggacccggcggcggtgtcagcagacctctaggtaagaggagacgcccagagccggagcctctccgcaggcggcagaaggggaaagtagaggagttagggcctccttcagccgtaaggaaccagcccgaaccacaggagcagcgagagagagctcacctccaaagagccttgcaggcgtccgtttcccccccttcgccatctccaaaccaatcttatcaagggtcatccggatacaattttaggcccactgacgctcgttgtctacctagtcctatccggatgtttgcttctttccaccctagcgccagcacagcaggcacttctggcgacagcggcccaccagaccggtcgccccttgagctgcacatcggcttcccaacagatattcctaagagcgcaccccattctatgacagcttcttcatcaagcgtgtcttccccatctcccgggctcccaagaagaagcgcccccccatcacccttatgccgtagcctttcaccaggcactggggggggagtcagaggcggtgtgggttacttatctcgcggggaccctgttagagtgctggcacggcgtgtccggcctgactag

SEQ ID NO: 304425 - DNA, 546 bp, Artificial Sequence
  derived and/or modified sequence
tggggccatcctcagcaatgtgcaatctcaccatctcccagaagcagagggagcggtctgatctgtaggggacattgtagacctcagtgtctccaccacccccctgccctcacgcgcgtgacgcgtgcggcagcagctacaacctccggaccccagatgcctgcagcctgtccaggtcatcctatccgcatgttcgcatcttttcatccttctgcctccacagctggcacttctggcgacagtgggcctcccgaccggtcgccgctggaactgcacatcggctttcccaccgatatccctaaaagcgcaccgcacagcatgaccgcttcatcctcctctgttagcagtccgtctccggggctcccgcgacggtcagcccctccctccccactctgcagaagtttatccccagggaccggcggaggcgtgcgtggcggagtgggatatctttcccgcggcgacccagtgagggtgctggcaagacgggtgcgccccgatggctcagtgcaatatcttgtggaatggggaggtggcggcattttttag

SEQ ID NO: 304426 - DNA, 732 bp, Artificial Sequence
  derived and/or modified sequence
tgaagcctgctgctgacagccaccaggacagtgtccttccagggcgagcggctgcggagaggaaatgtgtgcctggtgtccatgctgggctgcctgcccctgtggagccccctgctggagatggagcacagccctggccagggccctgggggcggcgtgtcccggcccctgggcaagagaagaagacctgagcctgagcccctgcggcggcggcagaagggcaaggtggaggagctgggccccccatctgctgtgaggaaccagcctgagccccaggagcagcgggagcgggcccacctgcagagggccctgcaggcctctgtgagcccccccagccccagccccaaccagagctaccagggcagcagcggctacaacttccggcccacagatgcccgctgcctgcccagccccatccgcatgtttgccagcttccaccccagcgccagcacagctggcaccagcggggacagcggccccccagacaggagccccctggagctgcacatcggcttccccacagacatccccaagagcgccccccacagcatgacagccagcagcagctctgtgagcagccccagccctggcctgccccggcgcagcgccccacccagccccctgtgccgcagcctgagccctggcaccggcggcggcgtgcggggcggcgtgggctacctgagcagaggagaccctgtgcgggtgctggcccggcgggtgcggccagactag

SEQ ID NO: 304427 - DNA, 732 bp, Artificial Sequence
  derived and/or modified sequence
tgaagcctgctgctgaccgccacccggaccgtgagcttccagggcgagcgccttaggcggggaaacgtgtgtctcgtgtctatgctcggatgcctacctctctggtcaccactgctggagatggagcattcacccggccaggggcccgggggtggggtatctaggcccctgggcaagcgccgccgtccagagccagagcccctgaggcggcgccagaaaggaaaagtcgaggagcttggccccccttcagccgtccgaaatcagccagagccacaggaacagcgggagagggcgcacttgcagagggccctgcaggccagtgtcagtcctccctcacccagccctaaccaatcctatcagggttcttccggttataattttcgcccgacagacgcgagatgccttccaagcccaatccggatgtttgcctccttccaccccagcgcttccacagcagggacctctggtgatagcggtccccccgatcgatccccgctagaactgcacatagggttcccgacagatatccccaagagtgcaccccacagcatgaccgcctcatcatcatctgtttcctcccctagccccggtctgccacgacggagtgctcccccatcaccactatgccggagtctgtcacccggaacaggcggaggcgtgcgagggggagtcggctacctgtcacggggcgacccagtgcgcgtcctcgcgcgcagagtccgacccgattag

SEQ ID NO: 304428 - DNA, 546 bp, Artificial Sequence
  derived and/or modified sequence
tggggccacccccagcagtgcgccatcagccccagcccccggagccggggatcgggccttatctgtcgtgggcactgtagacctcaatgcctgcaccaccctccagcgcttacaagggtgactagggctgctgccgccactacaagcgggccccagatgccagccgcctgccctggacatccaatccgcatgttcgcctcttttcatccctccgcctcaacagccgggacttccggtgatagtggtcctcctgacaggtccccactggagttgcatatcggctttcccacagacatccccaagtctgcaccccactctatgaccgcctcctcctcttctgtgtcaagtccgtccccaggactgccacgtcgatcggccccaccaagtcccctgtgcaggtccttgtcaccaggaacaggtggaggggttcgaggaggtgtgggttacctctctcgtggcgacccggtacgcgttttggccaggcgggttcggcccgacggctccgtgcagtatcttgtggaatggggtggcggcgggatcttttag

SEQ ID NO: 304429 - DNA, 728 bp, Artificial Sequence
  derived and/or modified sequence
ctctctgctcttaacagccacaaggaccgtttcatttcagggagagagattaagaagaggaaatgtttgtttggtctccatgctcggatgcctccccctgtggagccccctactggagatggagcactcaccagggcagggccctgggggaggggtctcacgtcccctggggaagcgccggaggccggagccagagcccctgaggaggaggcagaaggggaaagtggaggagctggggccaccctcagcagtgcgcaatcagcccgagccccaggagcagagggagcgggctcatctgcagagggcactgcaggcctcagtgtctccaccatcccccagccctaaccagagttaccagggcagcagcggctacaacttccggcccacagatgcccgctgcctgcccagccccatccggatgtttgcttccttccacccttctgccagcaccgcagggacctctggggacagtggacccccagacaggtcacccctggaacttcacattggtttccccacagacatccctaaaagtgccccccactcgatgactgcctcatcttcctcagtttcatccccatccccaggtcttcctagacgctcagcacccccttctcccctgtgccgtagtttgtctcctgggactgggggaggagtccgaggtggggttggttacctgtcccgaggggaccctgtccgggtccttgctcggagagtacggcctgatg

SEQ ID NO: 304430 - DNA, 732 bp, Artificial Sequence
  derived and/or modified sequence
tagtccttgctgctgactgcaacacgtacagtgtcctttcaaggtgaaaggttgaggcggggaaatgtatgtctcgtcagcatgttaggatgcctgcccctctggagccctctgttagagatggagcattctcccggacagggaccagggggaggggtgagcagacctctggggaaaaggagacgccctgagcctgaacctttgcggcgacggcaaaaggggaaggtggaagagcttgggccaccctcagcagtgcggaatcagcccgaaccgcaggagcagagggagcgcgcacacctgcagcgggcactccaagcctcggtcagccctccttccccttcacctaaccagtcctaccagggctcgtctggatacaacttcagacccactgatgctaggtgtctgccttctcccataagaatgttcgcttccttccacccttcagccagcacggctggcacctctggcgactccggcccacccgacagaagcccgctggaactccatataggcttccctactgatatccctaagtctgctccacattccatgacagccagttcctcctctgtatccagccccagtcctggccttcctcgccgatccgccccaccatcccccctgtgcaggtccttatcacctggtacgggcggtggggtcaggggcggagtgggctacttaagccgtggggacccagtgcgcgtattggctagaagagtgcggcctgattag

SEQ ID NO: 304431 - DNA, 546 bp, Artificial Sequence
  derived and/or modified sequence
tgggggcacccacagcagtgcgccatttctcctagcccgcgatctagaggctcagggctcatctgccgcggacactgtagaccacagtgcctccaccatccgccagcacttacaagagttaccagggctgcggcagcgacaacttctggaccccagatgcccgcagcatgccccggtcaccctattcggatgtttgctagttttcacccctccgccagcacggccggtacatcaggagatagcgggccacctgaccgatctcccctggagctacacattggttttcccacagatattcccaagagtgctccacattcgatgacggccagctcatcatccgtgagcagcccctcaccaggattaccacgcaggtccgccccaccgagccccttgtgccgttcgctgtcgccgggtacgggcggaggtgtaagaggtggggttggctatcttagcaggggcgaccctgtgagagtcctggcacggcgagtccgtcctgatggctcagtgcagtatctcgtggagtggggcggtgggggaatattttag

SEQ ID NO: 304432 - DNA, 732 bp, Artificial Sequence
  derived and/or modified sequence
tgaagcctgctgctgaccgccaccagaaccgtgagcttccagggcgagagactgagaagaggcaacgtgtgcctggtgagcatgctgggctgcctgcccctgtggagccccctgctggagatggagcacagccccggccagggccccggcggcggcgtgagcagacccctgggcaagagaagaagacccgagcccgagcccctgagaagaagacagaagggcaaggtggaggagctgggcccccccagcgccgtgagaaaccagcccgagccccaggagcagagagagagagcccacctgcagagagccctgcaggccagcgtgagcccccccagccccagccccaaccagagctaccagggcagcagcggctacaacttcagacccaccgacgccagatgcctgcccagccccatcagaatgttcgccagcttccaccccagcgccagcaccgccggcaccagcggcgacagcggcccccccgacagaagccccctggagctgcacatcggcttccccaccgacatccccaagagcgccccccacagcatgaccgccagcagcagcagcgtgagcagccccagccccggcctgcccagaagaagcgccccccccagccccctgtgcagaagcctgagccccggcaccggcggcggcgtgagaggcggcgtgggctacctgagcagaggcgaccccgtgagagtgctggccagaagagtgagacccgactag

SEQ ID NO: 304433 - DNA, 546 bp, Artificial Sequence
  derived and/or modified sequence
tggggccacccccagcagtgcgccatcagccccagccccagaagcagaggcagcggcctgatctgcagaggccactgcagaccccagtgcctgcaccacccccccgccctgaccagagtgaccagagccgccgccgccaccaccagcggcccccagatgcccgccgcctgccccggccaccccatcagaatgttcgccagcttccaccccagcgccagcaccgccggcaccagcggcgacagcggcccccccgacagaagccccctggagctgcacatcggcttccccaccgacatccccaagagcgccccccacagcatgaccgccagcagcagcagcgtgagcagccccagccccggcctgcccagaagaagcgccccccccagccccctgtgcagaagcctgagccccggcaccggcggcggcgtgagaggcggcgtgggctacctgagcagaggcgaccccgtgagagtgctggccagaagagtgagacccgacggcagcgtgcagtacctggtggagtggggcggcggcggcatcttctag

SEQ ID NO: 304434 - DNA, 546 bp, Artificial Sequence
  derived and/or modified sequence
taacttaatctgctgaaaactctgggcaaagataacagcaagaatgtgttctttagccccatgagcatgagctgtgcgctggccatggtgtatatgggagctaaagggaatacggctgcccaaatggcacagatactcagcttcaataaatcaggcggagggggagacatacaccagggatttcaatccctgttaaccgaggtcaacaaaacaggcacacagtatctgctgaggatggcaaatcgagagagttacgacatggagtcagtgttaagaaatcttgggatgactgacgcgtttgaactgggcaaagctgacttttctggtatgtcacaaaccgatctgtctttgtccaaagtcgtgcacaagagctttgtagaagtgaatgaggaaggaaccgaagcagctgccgcaacagccgctataatgatgatgagatgtgcgcggttcgtgccgagattttgcgcagatcacccttttctattcttcatccaacacagcaaaactaatggtatcctcttctgtggcagattttcctctccttag

SEQ ID NO: 304435 - DNA, 546 bp, Artificial Sequence
  derived and/or modified sequence
tgactgaacctgctgaagaccctgggcaaggacaacagcaagaatgtgttcttcagccccatgtccatgagctgtgccctggccatggtgtacatgggcgccaagggcaacacagctgcccagatggcccagatcctgtccttcaacaagagcggcggcggcggggacatccaccagggcttccagagcctgctgacagaggtgaacaagacaggcacccagtacctgctgaggatggccaaccgggagagctatgacatggagagcgtgctgaggaacctgggcatgacagatgcctttgagctgggcaaggctgacttcagcggcatgagccagacagacctgagcctgagcaaggtggtgcacaagagctttgtggaggtgaatgaggagggcacagaagctgctgctgccacagctgccatcatgatgatgagatgtgccaggtttgtgccccgcttctgtgccgaccaccccttcctgttcttcatccagcacagcaagaccaacggcatcctcttctgtggccgcttcagcagcccctag

SEQ ID NO: 304436 - DNA, 546 bp, Artificial Sequence
  derived and/or modified sequence
tgactgaacctgctgaagaccctgggcaaggacaacagcaagaacgtgtttttttctccaatgtccatgagctgtgcgctggctatggtctacatgggagccaaagggaacaccgcagcccagatggcccagatcctgagttttaacaaatctggggggggaggcgacattcatcagggctttcagtctttactgaccgaggttaataagacaggaacccagtacctcttaagaatggccaatagggaatcctatgatatggaaagtgtgctccgtaacctcggaatgactgacgcattcgaacttggcaaagccgattttagcggcatgtcccaaaccgacctgagcctgtctaaggtggtgcataagtccttcgtggaagttaacgaagaaggaaccgaagcggcggctgctaccgcagccatcatgatgatgagatgcgcgcgctttgtgccaaggttctgtgccgaccacccatttctgttcttcattcagcattcgaagacaaacggtatcctcttttgcggcagatttagcagtccttag

SEQ ID NO: 304437 - DNA, 546 bp, Artificial Sequence
  derived and/or modified sequence
tgactgaatctcttgaaaactctgggcaaggataattccaagaacgtctttttttcgccaatgtcgatgagctgtgctctcgctatggtgtacatgggcgctaaaggcaacacagccgctcagatggctcagattctgtcttttaataaatccggtggagggggagacatccaccaagggttccagagcttgctgaccgaggtcaataagactggaacccaatacttactccgcatggcgaaccgcgaaagttatgatatggagtctgtactgagaaatctggggatgaccgacgcttttgaactgggcaaggcagatttctcggggatgagccaaaccgatttatctctgagcaaagtggttcacaaatcattcgtagaggtgaatgaagaggggacagaagccgctgccgctaccgccgcaatcatgatgatgcgctgtgctagatttgtgccacggttttgtgccgatcatcctttcctctttttcatacagcactccaagactaatggtatacttttttgtggtcgtttttcaagcccgtag

SEQ ID NO: 304438 - DNA, 684 bp, Artificial Sequence
  derived and/or modified sequence
ccttaaaccttttgaaaacgctgggtaaagacaactcgaagaatgtgtttttctcacccatgagcatgtcctgtgccctggccatggtctacatgggggcaaagggaaacaccgctgcacagatggcccagatactttctttcaataaaagtggcggtggtggagacatccaccagggcttccagtctcttctcaccgaagtgaacaagactggcacgcagtacttgcttaggatggccaacagggaaagctacgacatggagagtgtcctgcgcaacctgggcatgactgatgccttcgagctgggcaaggcagacttctctggaatgtcccagacagacctgtctctgtccaaggtcgtgcacaagtcttttgtggaggtcaatgaggaaggcacggaggctgcagccgccacagctgccatcatgatgatgcggtgtgccagattcgtcccccgcttctgcgccgaccaccccttccttttcttcatccagcacagcaagaccaacgggattctcttctgcggccgcttttcctctccgtgaggacagggcagtcttggtgtgcagcccctctcctctctgtcccctgacactccacagtgtgcctgcaacccaagtggccttatccgtgcagtggtggcagttcagaaataaagggcccatttgtgggatgccgcattca

SEQ ID NO: 304439 - DNA, 546 bp, Artificial Sequence
  derived and/or modified sequence
tgactgaacctgctgaagaccctgggcaaggacaacagcaagaacgtgttcttcagccccatgagcatgagctgcgccctggccatggtgtacatgggcgccaagggcaacaccgccgcccagatggcccagatcctgagcttcaacaagagcggcggcggcggcgacatccaccagggcttccagagcctgctgaccgaggtgaacaagaccggcacccagtacctgctgagaatggccaacagagagagctacgacatggagagcgtgctgagaaacctgggcatgaccgacgccttcgagctgggcaaggccgacttcagcggcatgagccagaccgacctgagcctgagcaaggtggtgcacaagagcttcgtggaggtgaacgaggagggcaccgaggccgccgccgccaccgccgccatcatgatgatgagatgcgccagattcgtgcccagattctgcgccgaccaccccttcctgttcttcatccagcacagcaagaccaacggcatcctgttctgcggcagattcagcagcccctag

SEQ ID NO: 304440 - DNA, 558 bp, Artificial Sequence
  derived and/or modified sequence
cactcaccctcccagtgtgcttgagaaacaaactgcacccactgaactccgcagctagcatccaaatcagcccttgagatttgaggccttggagactcagagagaccacaagaggagcaagcaagagagctgggactaactctgtctgctacatattgccagaaattgggagactgaaggtgcaaagaagaaataatttcttggaagggctaacagcttggttggactgagatgggctgaaaagcacagagggaagggaaatcctgaacaagagagaacaaaatctctactttgatggaacttccattctgtggggaagagactgacaataagcaattaaataaataagaactcagcagtaggccttgcctcagatccaaggtcactcggaagaggccatgtctaccctcaatgacactcatggaggaaatgctgagagaagcattcagatgcatgacacaaggtaagactgccaaaaatcttgttcttgctctcctcattttgttatttgttttatttttaggagttttgagagcaaaatgacaacacccagaaatt

SEQ ID NO: 304441 - protein, 4074 aa, Artificial Sequence
  derived and/or modified sequence
MTAWLISLMSIEVLLLAVRHLSLHIEPEEGSLAGGTWITVIFDGLELGVLYPNNGSQLEIHLVNVNMVVPALRSVPCDVFPVFLDLPVVTCRTRSVLSEAHEGLYFLEAYFGGQLVSSPNPGPRDSCTFKFSKAQTPIVHQVYPPSGVPGKLIHVYGWIITGRLETFDFDAEYIDSPVILEAQGDKWVTPCSLINRQMGSCYPIQEDHGLGTLQCHVEGDYIGSQNVSFSVFNKGKSMVHKKAWLISAKQDLFLYQTHSEILSVFPETGSLGGRTNITITGDFFDNSAQVTIAGIPCDIRHVSPRKIECTTRAPGKDVRLTTPQPGNRGLLFEVGDAVEGLELTEATPGYRWQIVPNASSPFGFWSQEGQPFRARLSGFFVAPETNNYTFWIQADSQASLHFSWSEEPRTKVKVASISVGTADWFDSWEQNRDEGTWQQKTPKLELLGGAMYYLEAEHHGIAPSRGMRIGVQIHNTWLNPDVVTTYLREKHQIRVRAQRLPEVQVLNVSGRGNFFLTWDNVSSQPIPANATAHLIQTTIEELLAVKCKLEPLWSNILLRLGFERGPEVSNSDGDLTSGTEPFCGRFSLRQPRHLVLTPPAAQKGYRLDQYTHLCLAYKGHMNKILKMIVSFTIGFQNMVKNTTCDWSLTRTSPESWQFDCTDLWETCVRCFGDLQPPPANSPVLVHQINLLPLAQETGLFYVDEIIIADTNVTVSQADSGTARPGGNLVESVSVVGSPPVYSVTSWLAGCGTELPLITARSVPTEGTEEGSGLVLVTTQRRQRTSPPLGGHFRIQLPNTVISDVPVQISAHHLHQLLQNNADDFTSRYLNASDFTVKEDLYTCYEHVWTLSWSTQIGDLPNFIRVSDENLTGVNPAAATRVVYDGGVFLGPIFGDMLATANQHTQVVVRVNDVPAHCPGSCSFQYLQGSTPCVHSVWYSIDGDINLMIYITGTGFSGDSQFLQVTVNKTSCKVIFSNQTNVVCQTDLLPVGMHRILMLVRPSGLAISATGEDLFLNVKPRLDMVEPSRAADIGGLWATIRGSSLEGVSLILFGSYSCAINVATSNSSRIQCKVPPRGKDGRIVNVTVIRGDYSAVLPRAFTYVSSLNPVIVTLSRNISNIAGGETLVIGVARLMNYTDLDVEVHVQDALAPVHTQSAWGLEVALPPLPAGLHRISVSINGVSIHSQGVDLHIQYLTEVFSIEPCCGSLLGGTILSISGIGFSRDPALVWVLVGNRSCDIVNLTEASIWCETLPAPQIPDAGAPTVPAAVEVWAGNRFFARGPSPSLVGKGFTFMYEAAATPVVTAMQGEITNSSLSLHVGGSNLSNSVILLGNLNCDVETQSFQGNVSLSGCSIPLHSLEAGIYPLQVRQKQMGFANMSVVLQQFAVMPRIMAIFPSQGSACGGTILTVRGLLLNSRRRSVRVDLSGPFTCVILSLGDHTILCQVSLEGDPLPGASFSLNVTVLVNGLTSECQGNCTLFIREEASPVMDALSTNTSGSLTTVLIRGQRLATTADEPMVFVDDQLPCNVTFFNASHVVCQTRDLAPGPHYLSVFYTRNGYACSGNVSRHFYIMPQVFHYFPKNFSLHGGSLLTIEGTGLRGQNTTSVYIDQQTCLTVNIGAELIRCIVPTGNGSVALEIEVDGLWYHIGVIGYNKAFTPELISISQSDDILTFAVAQISGAANIDIFIGMSPCVGVSGNHTVLQCVVPSLPAGEYHVRGYDCIRGWASSALVFTSRVIITAVTENFGCLGGRLVHVFGAGFSPGNVSAAVCGAPCRVLANATVSAFSCLVLPLDVSLAFLCGLKREEDSCEAARHTYVQCDLTVAMATEQLLESWPYLYICEESSQCLFVPDHWAESMFPSFSGLFISPKLERDEVLIYNSSCNITMETEAEMECETPNQPITVKITEIRKRWGQNTQGNFSLQFCRRWSRTHSWFPERLPQDGDNVTVENGQLLLLDTNTSILNLLHIKGGKLIFMAPGPIELRAHAILVSDGGELRIGSEDKPFQGRAQITLYGSSYSTPFFPYGVKFLAVRNGTLSLHGSLPEVIVTCLRATAHALDTVLALEDAVDWNPGDEVVIISGTGVKGAKPMEEIVTVETVQDTDLYLKSPLRYSHNFTENWVAGEHHILKATVALLSRSITIQGNLTNEREKLLVSCQEANAPEGNLQHCLYSMSEKMLGSRDMGARVIVQSFPEEPSQVQLKGVQFQVLGQAFHKHLSSLTLVGAMRESFIQGCTVRNSFSRGLSMCGTLGLKVDSNVFYNILGHALLVGTCTEMRYISWEAIHGRKDDWSGHGNIIRNNVIIQVSGAEGLSNPEMLTPSGIYICSPTNVIEGNRVCGAGYGYFFHLMTNQTSQAPLLSFTQNIAHSCTRYGLFVYPKFQPPWDNVTGTTLFQSFTVWESAGGAQIFRSSNLRLKNFKVYSCRDFGIDVLESDANTSVTDSLLLGHFAHKGSLCMSSGIKTPKRWELMVSNTTFVNFDLINCVAIRTCSDCSQGQGGFTVKTSQLKFTNSSNLVAFPFPHAAILEDLDGSLSGKNRSHILASMETLSASCLVNSSFGRVVHGSACGGGVLFHRMSIGLANTPEVSYDLTMTDSRNKTTTVNYVRDTLSNPRGWMALLLDQETYSLQSENLWINRSLQYSATFDNFAPGNYLLLVHTDLPPYPDILLRCGSRVGLSFPFLPSPGQNQGCDWFFNSQLRQLTYLVSGEGQVQVILRVKEGMPPTISASTSAPESALKWSLPETWQGVEEGWGGYNNTIPGPGDDVLILPNRTVLVDTDLPFFKGLYVMGTLDFPVDRSNVLSVACMVIAGGELKVGTLENPLEKEQKLLILLRASEGVFCDRMNGIHIDPGTIGVYGKVHLYSAYPKNSWTHLGADIASGNERIIVEDAVDWRPHDKIVLSSSSYEPHEAEVLTVKEVKGHHVRIYERLKHRHIGSVHVTEDGRHIRLAAEVGLLTRNIQIQPDVSCRGRLFVGSFRKSSREEFSGVLQLLNVEIQNFGSPLYSSVEFSNVSAGSWIISSTLHQSCGGGIHAAASHGVLLNDNIVFGTAGHGIDLEGQAYTVTNNLVVLMTQPAWSTIWVAGIKVNQVKDINLHGNVVAGSERLGFHIRGHKCSSCELLWSDNVAHSSLHGLHLYKESGLDNCTRISGFLAFKNFDYGAMLHVENSVEIENITLVDNTIGLLAVVYVFSAPQNSVKKVQIVLRNSVIVATSSSFDCIQDKVKPHSANLTSTDRAPSNPRGGRIGILWPVFTSEPNQWPQEPWHKVRNDHSISGIMKLQDVTFSSFVKSCYSDDLDVCILPNAENSGIMHPITAERTRMLKIKDKNKFYFPSLQPRKDLGKVVCPELDCASPRKYLFKDLDGRALGLPPPVSVFPKTEAEWTASFFNAGTFREEQKCTYQFLMQGFICKQTDQVVLILDSADAIWAIQKLYPVVSVTSGFVDVFSSVNANIPCSTSGSVSTFYSILPIRQITKVCFMDQTPQVLRFFLLGNKSTSKLLLAVFYHELQSPHVFLGESFIPPTLVQSASLLLNESIGANYFNIMDNLLYVVLQGEEPIEIRSGVSIHLALTVMVSVLEKGWEIVILERLTNFLQIGQNQIRFIHEMPGHEETLKAIADSRAKRKRNCPTVTCTSHYRRVGQRRPLMMEMNSHRASPPMTVETISKVIVIEIGDSPTVRSTGMISSLSSNKLQNLAHRVITAQQTGVLENVLNMTIGALLVTQSKGVIGYGNTSSFKTGNLIYIRPYALSILVQPSDGEVGNELPVQPQLVFLDEQNRRVESLGPPSEPWTISASLEGASDSVLKGCTQAETQDGYVSFYNLAVLISGSNWHFIFTVTSPPGVNFTARSKPFAVLPVTRKEKSTIILAASLSSVASWLALSCLVCCWLKRSKSRKTKPEEIPESQTNNQNIHIHISSKRRESQGPKKEDTVVGEDMRMKVMLGKVNQCPHQLMNGVSRRKVSRHIVREEEAAVPAPGTTGITSHGHICAPGAPAQQVYLQETGNWKEGQEQLLRYQLAGQNQLLLLCPDFRQERQQLPGQSRLSKQSGSLGLSQEKKASCGATEAFCLHSVHPETIQEQL

SEQ ID NO: 304442 - protein, 3396 aa, Artificial Sequence
  derived and/or modified sequence
MTAWLISLMSIEVLLLAVRHLSLHIEPEEGSLAGGTWITVIFDGLELGVLYPNNGSQLEIHLVNVNMVVPALRSVPCDVFPVFLDLPVVTCRTRSVLSEAHEGLYFLEAYFGGQLVSSPNPGPRDSCTFKFSKAQTPIVHQVYPPSGVPGKLIHVYGWIITGRLETFDFDAEYIDSPVILEAQGDKWVTPCSLINRQMGSCYPIQEDHGLGTLQCHVEGDYIGSQNVSFSVFNKGKSMVHKKAWLISAKQDLFLYQTHSEILSVFPETGSLGGRTNITITGDFFDNSAQVTIAGIPCDIRHVSPRKIECTTRAPGKDVRLTTPQPGNRGLLFEVGDAVEGLELTEATPGYRWQIVPNASSPFGFWSQEGQPFRARLSGFFVAPETNNYTFWIQADSQASLHFSWSEEPRTKVKVASISVGTADWFDSWEQNRDEGTWQQKTPKLELLGGAMYYLEAEHHGIAPSRGMRIGVQIHNTWLNPDVVTTYLREKHQIRVRAQRLPEVQVLNVSGRGNFFLTWDNVSSQPIPANATAHLIQTTIEELLAVKCKLEPLWSNILLRLGFERGPEVSNSDGDLTSGTEPFCGRFSLRQPRHLVLTPPAAQKGYRLDQYTHLCLAYKGHMNKILKMIVSFTIGFQNMVKNTTCDWSLTRTSPESWQFDCTDLWETCVRCFGDLQPPPANSPVLVHQINLLPLAQETGLFYVDEIIIADTNVTVSQADSGTARPGGNLVESVSVVGSPPVYSVTSWLAGCGTELPLITARSVPTEGTEEGSGLVLVTTQRRQRTSPPLGGHFRIQLPNTVISDVPVQISAHHLHQLLQNNADDFTSRYLNASDFTVKEDLYTCYEHVWTLSWSTQIGDLPNFIRVSDENLTGVNPAAATRVVYDGGVFLGPIFGDMLATANQHTQVVVRVNDVPAHCPGSCSFQYLQGSTPCVHSVWYSIDGDINLMIYITGTGFSGDSQFLQVTVNKTSCKVIFSNQTNVVCQTDLLPVGMHRILMLVRPSGLAISATGEDLFLNVKPRLDMVEPSRAADIGGLWATIRGSSLEGVSLILFGSYSCAINVATSNSSRIQCKVPPRGKDGRIVNVTVIRGDYSAVLPRAFTYVSSLNPVIVTLSRNISNIAGGETLVIGVARLMNYTDLDVEVHVQDALAPVHTQSAWGLEVALPPLPAGLHRISVSINGVSIHSQGVDLHIQYLTEVFSIEPCCGSLLGGTILSISGIGFSRDPALVWVLVGNRSCDIVNLTEASIWCETLPAPQIPDAGAPTVPAAVEVWAGNRFFARGPSPSLVGKGFTFMYEAAATPVVTAMQGEITNSSLSLHVGGSNLSNSVILLGNLNCDVETQSFQGNVSLSGCSIPLHSLEAGIYPLQVRQKQMGFANMSVVLQQFAVMPRIMAIFPSQGSACGGTILTVRGLLLNSRRRSVRVDLSGPFTCVILSLGDHTILCQVSLEGDPLPGASFSLNVTVLVNGLTSECQGNCTLFIREEASPVMDALSTNTSGSLTTVLIRGQRLATTADEPMVFVDDQLPCNVTFFNASHVVCQTRDLAPGPHYLSVFYTRNGYACSGNVSRHFYIMPQVFHYFPKNFSLHGGSLLTIEGTGLRGQNTTSVYIDQQTCLTVNIGAELIRCIVPTGNGSVALEIEVDGLWYHIGVIGYNKAFTPELISISQSDDILTFAVAQISGAANIDIFIGMSPCVGVSGNHTVLQCVVPSLPAGEYHVRGYDCIRGWASSALVFTSRVIITAVTENFGCLGGRLVHVFGAGFSPGNVSAAVCGAPCRVLANATVSAFSCLVLPLDVSLAFLCGLKREEDSCEAARHTYVQCDLTVAMATEQLLESWPYLYICEESSQCLFVPDHWAESMFPSFSGLFISPKLERDEVLIYNSSCNITMETEAEMECETPNQPITVKITEIRKRWGQNTQGNFSLQFCRRWSRTHSWFPERLPQDGDNVTVENGQLLLLDTNTSILNLLHIKGGKLIFMAPGPIELRAHAILVSDGGELRIGSEDKPFQGRAQITLYGSSYSTPFFPYGVKFLAVRNGTLSLHGSLPEVIVTCLRATAHALDTVLALEDAVDWNPGDEVVIISGTGVKGAKPMEEIVTVETVQDTDLYLKSPLRYSHNFTENWVAGEHHILKATVALLSRSITIQGNLTNEREKLLVSCQEANAPEGNLQHCLYSMSEKMLGSRDMGARVIVQSFPEEPSQVQLKGVQFQVLGQAFHKHLSSLTLVGAMRESFIQGCTVRNSFSRGLSMCGTLGLKVDSNVFYNILGHALLVGTCTEMRYISWEAIHGRKDDWSGHGNIIRNNVIIQVSGAEGLSNPEMLTPSGIYICSPTNVIEGNRVCGAGYGYFFHLMTNQTSQAPLLSFTQNIAHSCTRYGLFVYPKFQPPWDNVTGTTLFQSFTVWESAGGAQIFRSSNLRLKNFKVYSCRDFGIDVLESDANTSVTDSLLLGHFAHKGSLCMSSGIKTPKRWELMVSNTTFVNFDLINCVAIRTCSDCSQGQGGFTVKTSQLKFTNSSNLVAFPFPHAAILEDLDGSLSGKNRSHILASMETLSASCLVNSSFGRVVHGSACGGGVLFHRMSIGLANTPEVSYDLTMTDSRNKTTTVNYVRDTLSNPRGWMALLLDQETYSLQSENLWINRSLQYSATFDNFAPGNYLLLVHTDLPPYPDILLRCGSRVGLSFPFLPSPGQNQGCDWFFNSQLRQLTYLVSGEGQVQVILRVKEGMPPTISASTSAPESALKWSLPETWQGVEEGWGGYNNTIPGPGDDVLILPNRTVLVDTDLPFFKGLYVMGTLDFPVDRSNVLSVACMVIAGGELKVGTLENPLEKEQKLLILLRASEGVFCDRMNGIHIDPGTIGVYGKVHLYSAYPKNSWTHLGADIASGNERIIVEDAVDWRPHDKIVLSSSSYEPHEAEVLTVKEVKGHHVRIYERLKHRHIGSVHVTEDGRHIRLAAEVGLLTRNIQIQPDVSCRGRLFVGSFRKSSREEFSGVLQLLNVEIQNFGSPLYSSVEFSNVSAGSWIISSTLHQSCGGGIHAAASHGVLLNDNIVFGTAGHGIDLEGQAYTVTNNLVVLMTQPAWSTIWVAGIKVNQVKDINLHGNVVAGSERLGFHIRGHKCSSCELLWSDNVAHSSLHGLHLYKESGLDNCTRISGFLAFKNFDYGAMLHVENSVEIENITLVDNTIGLLAVVYVFSAPQNSVKKVQIVLRNSVIVATSSSFDCIQDKVKPHSANLTSTDRAPSNPRGGRIGILWPVFTSEPNQWPQEPWHKVRNDHSISGIMKLQDVTFSSFVKSCYSDDLDVCILPNAENSGIMHPITAERTRMLKIKDKNKFYFPSLQPRKDLGKVVCPELDCASPRKYLFKDLDGRALGLPPPVSVFPKTEAEWTASFFNAGTKEQSIEINV

SEQ ID NO: 304443 - DNA, 12225 bp, Artificial Sequence
  derived and/or modified sequence
atgaccgcttggctcatcagcctcatgtcaattgaggtcctgctactggccgtcaggcatctgagcctgcacattgaacctgaagagggctccttagcagggggcacgtggatcaccgttatatttgacggtttagagctgggcgtgctgtacccaaataacgggagtcaattagagattcatctggtgaatgtgaatatggtggtacctgcgcttcgctctgtgccatgtgatgtgtttccagtgtttctcgacctgcccgtcgtgacctgtagaactcgtagcgtactatctgaggctcacgaaggcctgtactttttggaggcatatttcggagggcagctggtgtccagcccgaatcccgggccacgagactcatgcacgttcaagttctctaaagcgcagaccccgatcgtccatcaggtgtatccaccaagcggagttcctgggaagttgatccatgtctatggctggatcattacagggagactggaaacatttgacttcgatgcagagtacatcgactctccggtgattttggaggcccagggagataaatgggtgacaccctgcagtctgatcaatcgccagatgggcagctgttaccccatacaggaagaccacgggttaggaacactgcagtgccatgtggagggagactacatcgggtcccagaatgtttcattttcagtgtttaacaaaggaaaaagtatggtccacaagaaggcttggctaatctcagctaagcaagatctctttctgtaccaaacacatagcgagattctcagtgtgttcccggaaactgggagcttgggcggcagaacgaacatcaccatcaccggcgatttctttgacaatagcgcacaggtcacgatcgccggtatcccttgcgatatccgccatgtgtccccgcgaaaaatagagtgcacgacgcgggctcctgggaaggacgttaggcttacgacgccccaacctggtaatagaggccttcttttcgaagtaggcgatgcggtggagggcctggagctcactgaggcaacccccggatacagatggcagattgtacccaacgcgtcaagccccttcggattttggagccaggaggggcaacctttccgcgcccgcctcagtggatttttcgtggcccctgagactaacaattacaccttctggattcaggcggatagtcaggcgtcacttcacttctcctggagcgaggagccccgcacaaaagtgaaagtggccagcatttcagtcggcacagccgactggttcgatagctgggaacaaaatcgagacgagggtacctggcagcagaaaacgcctaaattggagttactcggcggggcaatgtactaccttgaggcagagcaccacggaattgccccctctcgcgggatgagaatcggagtccagattcacaatacttggctgaaccccgatgtagtgacgacgtatctgagagaaaagcatcagattagagtgagggctcagaggctgcccgaagtacaggtcctaaacgtcagtgggcgggggaattttttcctcacttgggataatgtatctagccagccaatccctgctaacgctaccgcccacttaatacagactactatagaagagcttctggcggtaaaatgcaagctggagccactgtggtcaaatattttgctcaggttaggctttgagcgaggtccagaggtgagtaacagtgatggagacttgacctcgggaacggagcctttttgcggacggttttctctgcgccagccacgacacctagttctgactcctcctgccgctcagaaaggttacaggctggaccagtatacacatctgtgcctggcctacaagggacacatgaataagatcttgaagatgatagtcagcttcactattggattccagaatatggttaagaacactacgtgcgattggtctctgacgaggacgtcacccgagtcctggcagtttgattgcacagacttgtgggagacatgtgtcaggtgttttggggacctgcagccaccccctgcaaacagcccagtgttagtccaccagattaacctcttgccactggctcaagaaaccggcctgttttacgtggatgagatcataatcgccgatactaatgtgaccgtgtctcaggccgactcaggcaccgccaggcccggtggaaacctggtggaaagcgtgtcagttgtggggtcccccccagtatactccgtcactagttggctcgcaggctgtggaacggaactgcccctaattaccgccagatcagtgcccacggaagggaccgaagagggttcaggattagtgctggtcacgacccagcgacggcagagaacctctccaccattaggcggccatttccggattcaactgcccaataccgttatctccgatgtccccgtccagatttctgcccatcacctccatcaacttctgcagaataatgcggatgatttcacatcccgctacttaaatgcctcagatttcaccgtgaaagaagacctatacacctgctatgaacatgtgtggactttatcttggtcaactcagataggcgaccttcctaattttataagagtgagtgatgagaatctgaccggcgtgaatcctgctgctgcgacccgggtcgtttacgatgggggtgtttttttaggaccaatattcggcgacatgctagctacagctaaccagcacacacaggtggtggttcgcgtgaatgatgttccagcccactgcccaggttcctgctcgtttcagtatctgcagggtagtactccttgcgttcattcagtgtggtactctatcgatggcgatatcaatctcatgatatacatcaccggcactggcttctcgggcgatagccagttccttcaggtaacagtaaataaaacctcttgcaaggtgatcttcagtaaccagactaacgtcgtgtgtcaaacggaccttctccccgtaggaatgcacaggatcctaatgctagtcaggccctccgggctagccattagcgccaccggggaggacttgtttctgaatgtgaagccccggctggacatggttgaaccttctcgcgctgctgatatcgggggcctctgggcgaccatccgcggaagttccctcgagggagtatcccttatcctgttcggatcttacagctgcgccataaacgtggccacaagcaacagctccaggatccaatgcaaggtcccaccacgtgggaaggacggtcggattgtcaatgtcacagtgattcgcggcgattactccgctgtgctgcctcgcgccttcacctatgtctccagtttgaaccctgtgatagtgaccctgtcccgcaacatctccaacatcgccggaggcgaaactcttgttatcggtgttgctagacttatgaattatacagacctcgacgttgaggtgcatgtccaggacgccttagcaccagttcatacacagtccgcttggggacttgaggtggctcttcctccactgccggccggcttacataggatctccgtgtccatcaacggggtctcaattcacagccagggtgtggatcttcacattcagtatttgactgaggtcttctctatcgagccctgctgtggatcgctcctgggagggacgatcctgtctatctctgggatcggtttttcacgcgacccggccctcgtgtgggtgctcgtgggcaaccggtcttgtgatatcgtgaacctgacagaagcgagtatctggtgcgaaacactacccgcacctcaaatccctgacgccggggcccctacggtcccagctgcagtcgaagtctgggccggtaaccggtttttcgcgcgagggccaagtcctagcctggtgggaaagggtttcaccttcatgtacgaggctgccgctacgcctgttgttactgcgatgcagggggaaatcaccaattcatccctgtcacttcatgtggggggttcaaacctgtcgaactcagtcattctcctggggaacttaaattgtgacgtggaaactcagagtttccaagggaacgtttcactgtccggctgctctattcctctgcactccctggaggcagggatctaccctctacaagtgaggcagaaacagatggggttcgctaatatgagcgtcgtgctgcaacagtttgcggtgatgcctcgcataatggcaatctttccctctcaagggagtgcttgtggcgggaccatactcaccgttagaggcttactgctcaacagccggcgccgaagcgttcgggtggacttgtccgggccattcacatgcgttatcctctcgttaggcgatcacaccattctatgtcaggtctcattggagggggaccccctcccaggggcatcttttagcctgaatgtgacagtcctcgtgaatgggttgacttccgaatgccagggaaattgcaccctgttcattcgggaagaggcgagtccagtgatggatgcgctctctactaacacgagcgggtcccttaccacagtgctgatcaggggccagcggctagcaaccaccgctgacgagcccatggttttcgtggatgatcaactaccttgcaatgtcaccttttttaatgcaagccatgtggtatgtcagactagagatttggcccctgggcctcactacctgagcgtgttttacaccagaaacggatacgcttgcagcggaaatgtgtcccgacatttttatatcatgcctcaagtttttcattattttccaaaaaatttcagcttacacggcgggtcccttcttacaatcgaaggaactggcctgaggggacaaaatacgacttcagtgtacattgatcagcaaacatgcctgacagtgaatatcggggcagagttaattcggtgtatcgtccccaccgggaacgggtccgtcgccctggagatcgaagtagacggcttatggtatcatatcggcgtcatcgggtacaataaagcttttacccctgaacttattagcatcagccagtccgatgatatcctgacctttgctgtggcccagattagcggagcagcaaatatcgacatattcattggtatgtccccatgtgtgggggtctctggaaatcatacagtactgcaatgcgtggtgccttcactccccgcaggagagtaccacgtgcggggatacgattgcattcgtggctgggcatcatccgctttagtgttcacaagcagagtgatcatcactgccgttacagagaattttggctgcctgggcggaagacttgttcatgtgttcggcgccggcttctcacccggaaatgtaagtgccgctgtctgtggagctccatgtcgagtcttggccaacgccaccgtgagcgcattctcctgcctcgttctgcctctggatgtgtccctggctttcctgtgtgggttaaagagggaagaggattcctgtgaagcagcccggcatacttacgtgcagtgcgatctcactgtcgcaatggccacagagcagctgctcgaaagctggccatatctgtatatttgtgaggagtccagccagtgcttatttgtaccagatcactgggctgaaagcatgttcccctcattctcaggccttttcatctcacccaaactggagcgggatgaggttctgatctacaacagttcttgcaacatcactatggagactgaagcagagatggaatgcgagactcccaaccagcctataaccgttaaaatcacagaaatccgcaagaggtggggacagaacactcagggcaactttagtttgcagttctgtaggcggtggtctcgaacccatagctggttcccagagcgactgccccaggacggcgacaatgttacagtggaaaatggccagctcctactgctggatacaaacacaagcattctgaacctgctccatatcaagggtggcaaattgattttcatggcccccggccccatcgagctcagagcccatgccatactagttagcgacggcggagaattgcgaatcggatcggaagacaagccattccaggggcgagcacaaatcaccctatacgggtctagctactccactcctttttttccttatggcgttaagttcctggcagtcagaaatggaacccttagcctgcacggtagcctgccagaagtgattgtcacctgcctgagagcgacggctcacgccctggacaccgtgctggctcttgaggatgctgtggactggaatccaggagatgaagtcgtcatcatctcaggcaccggggtgaaaggggcgaagccaatggaggaaattgtcaccgtcgagactgtccaggacaccgacctgtatctgaagagcccactgaggtacagccataactttaccgagaactgggtggccggcgaacaccatatactgaaggctacagtggctttgctgtctcgctctatcacgatccagggaaaccttaccaatgagcgtgagaaactcctagtgagttgtcaggaagctaacgcacctgaaggcaaccttcaacactgcctgtatagtatgagcgaaaaaatgctcggaagcagggacatgggcgcacgcgttatcgtccaatcattcccagaagaaccctctcaagtccagcttaagggagttcagtttcaggttctcggtcaggcgtttcataagcatcttagctcgctgacactggtcggcgctatgcgagaatccttcatacaaggatgtacagtgagaaacagcttttctagaggcttatcaatgtgcggtacattgggcctcaaagtcgactcaaacgttttctataatattctgggccatgccctactggtcgggacctgcaccgagatgcgctacattagctgggaggcaatacacggacgaaaggatgactggtccggccacggaaacattatacgtaacaacgtgattattcaggtgtcaggtgctgaggggctttcaaatccggagatgttaactccttctggtatctacatctgttctccaactaatgtgatcgagggaaatagggtttgcggtgcaggatatgggtatttcttccacctgatgaccaatcagacgtctcaagcaccactgctgtctttcacccagaatatcgcccattcgtgcacacgctacggcctgtttgtataccctaagttccagcctccttgggacaatgtgacaggaacaactttattccagtcctttacagtgtgggaaagcgcagggggagcacagattttccgaagctcgaatttacggctgaagaatttcaaagtgtacagttgtagggattttgggattgacgtcttagagagcgacgccaacacttcagtgactgactccctgctgctcggacacttcgcccacaaaggatccctctgtatgtcgtccggcataaagacgccgaagagatgggaattgatggtctcaaacacgacatttgtgaactttgatctgattaactgcgtggctatcaggacttgctccgactgcagtcagggccaggggggcttcacagtaaagacctcgcagctgaaattcacaaattcatctaacttagtagctttcccatttccccacgcagccatccttgaggacctcgatggctccctcagtggtaaaaatagaagccacatcctggcgagtatggagacattatctgcctcttgtctcgttaactcctcattcggccgggtggtgcatggttctgcatgtggcggaggggtcctgttccaccgtatgagcattggacttgccaatacacctgaggtgtcctacgatctcacaatgacagattccaggaacaagaccactaccgttaattacgtgcgggataccttgtctaaccctcgaggctggatggcactcctgctcgaccaggagacatattccctccagagcgaaaacttatggataaataggagtctgcaatacagcgctacctttgataattttgcacctggcaactacctgctgctggtccacacagacctccctccgtatccggacatattattgaggtgtgggagcagagttggactatcatttcccttcctccccagccctggccaaaaccaaggctgtgactggttcttcaattctcaactccggcagctcacatacctggtgtccggcgaggggcaggtccaggtgattttgagggtgaaagaaggaatgccccccactatctctgcctcaacatcggcacctgaatccgctctgaagtggtccctgcccgaaacatggcagggcgtcgaagaaggctggggcggctacaacaatacgattcccggccctggtgacgacgtgctcattttgcccaatagaactgtacttgttgacacggacctccctttcttcaaggggctttatgttatggggacgctggatttcccagttgatcgcagcaatgtgctgtctgtggcatgtatggtgatcgcgggcggcgagcttaaagttggcacactagaaaacccactcgaaaaggaacaaaaactcctgattttacttcgggcaagtgagggagttttttgcgatcgcatgaacgggatccacattgatcctggaaccatcggcgtgtacgggaaagtacatctgtatagcgcttaccctaaaaattcatggactcacttaggcgctgacatcgcttcaggtaacgaacgcatcattgtcgaggacgccgtcgattggcgtcctcacgacaaaatcgtcttgtcttcatctagttatgaaccacacgaagccgaggtgctgacagtaaaagaggtcaaaggacaccacgtgaggatctacgaacgattaaaacatagacatatcgggtcagtccatgtgaccgaggatggcagacatatacgcttggcggccgaggttgggttactgaccaggaatatccaaattcagcccgatgtatcctgtcggggacggctgttcgtggggtcatttcgcaaatcctctcgggaagaattcagtggagtactccaattgctcaatgttgaaatccaaaatttcggatcaccactttatagttcagtggagttttccaacgtatctgctgggagttggataatctcgagcaccctgcatcagtcatgtgggggcggtatccatgccgctgcctctcatggcgtcctcctgaatgataacattgttttcggcacagctggccacggcatcgatctggaggggcaggcttataccgtaacaaacaatctagtggttctgatgacccagcccgcttggagtactatctgggtcgctggaatcaaggtaaatcaggtgaaggacatcaatctgcacggaaacgtagttgcagggagcgagcggctggggtttcacatcagaggacataagtgttcaagctgcgaactgctctggagcgacaatgtggcccactcttcattgcacggattacacctctacaaggaatctgggctggacaactgtactcgtatatccgggtttctcgccttcaagaactttgattacggagctatgctgcatgtggaaaatagcgtggaaatcgaaaacattacactggtagacaatactattggtctgctggcagtagtgtatgtattctccgctccccagaactcagtaaagaaggtgcagatcgtattgaggaattctgtaatcgtggccacctcttcttctttcgactgtatacaggataaggtgaagccacatagtgcaaatctgacctcaaccgatcgcgcaccatccaacccacgaggcggccgcattgggatactttggcctgtgttcacatcggagcctaatcagtggccgcaggagccgtggcacaaagtccgcaatgatcattccatctcaggtatcatgaaattacaggacgtgacatttagcagcttcgtgaagagttgctattctgatgacctggacgtctgtatcctccctaacgctgaaaacagcggtattatgcaccctattactgccgagcgaactcggatgcttaaaatcaaggacaaaaacaagttttattttccatcgcttcagccacgtaaggacttggggaaagtcgtctgtccggagctagattgcgcgagcccacgcaagtatttattcaaggacctggatgggagagccctgggtcttccaccgcccgtgagtgtgtttcccaagaccgaagccgaatggacagcctccttcttcaatgccgggaccttccgggaagaacaaaaatgtacgtaccagtttctgatgcaggggtttatatgcaagcagaccgaccaggtggtgctgatcctggactccgccgacgcaatctgggcaatccaaaaactgtatcctgtggtgtctgtgactagcggcttcgtcgatgtcttctcatctgtgaatgccaatatcccttgtagtacctccggatctgtgtcgacgttttacagcatcctccccatccggcaaatcaccaaagtctgcttcatggaccagaccccacaggttctgaggttctttctgctagggaataaatcaacctccaaactcctgttagccgtcttttatcatgagctgcagtccccccatgtttttctgggcgaatctttcattcctcctacacttgtccagagcgcctccctgctgctcaacgagtcgattggtgccaactatttcaacataatggacaacctgttgtacgtcgtgctgcagggcgaagagccgatcgaaatccggagcggcgttagcattcacctggctcttacagtgatggtgagcgtgttggagaaaggctgggagattgtgatcctcgagagattaactaatttccttcagattgggcagaatcagattaggttcatccatgagatgccaggacacgaagaaaccctgaaggccatcgctgacagccgagcgaaaagaaagagaaattgccccacagtaacctgcacgtcacattaccggagggtaggccagaggaggcctctaatgatggaaatgaattctcatcgtgcctcccctccgatgacagtggagacgataagtaaagttattgtgatcgagatcggcgactcacctacagtcaggtcgaccgggatgatcagcagtctgtcaagcaacaaactgcagaacctcgctcaccgcgtgatcaccgctcaacagacaggtgtactggaaaacgtcctcaacatgacaattggggctctcctagtcacccagtctaagggtgtgatcggctatggtaataccagttctttcaagacgggaaatctgatttatatcaggccttatgccttgagcattcttgttcagccctcagacggtgaggtcggaaacgagctgccagtccagcctcagctggtatttctagacgaacaaaaccgccgggttgagtctcttggaccaccttccgaaccctggacaatctctgcctctctggaaggagcatccgattccgtgctgaaaggttgcacacaggctgaaacccaggacggttacgttagcttctacaacttggccgttctcatttcaggctccaactggcattttatttttactgtcacgagccccccgggagtaaattttactgccagaagcaagcctttcgccgtgttgccggtcaccaggaaggaaaaatccacaattatactggccgcctccctgtcgagcgtagcatcctggctggcactttcatgccttgtatgttgctggctcaaacggagcaaatccagaaagaccaaaccagaagagatcccagaatctcagacaaacaatcaaaatatccacatccacatctcctctaagcgacgggagagccagggacccaaaaaggaagacaccgtggttggggaagatatgaggatgaaggtgatgctgggcaaagtcaaccagtgccctcaccaacttatgaacggcgtgtcccggcgtaaagtttcccgccacatcgttcgcgaggaggaggccgccgtgccagctcccggaacaactggcataacatctcatggccatatctgtgcccccggtgccccagcccagcaggtgtacctccaagaaactggaaactggaaggaaggccaagaacagctgcttagataccagttggcaggtcagaaccagctgcttctcctgtgtcctgacttccgccaggaacggcagcagctgccgggtcagtccagattgtccaaacagagcggatctctcggtctcagtcaagagaaaaaggccagctgcggtgctacagaagcattttgtcttcattctgtccatcccgagaccattcaagaacaactgtag

SEQ ID NO: 304444 - DNA, 12225 bp, Artificial Sequence
  derived and/or modified sequence
atgacagcctggctgatcagcctgatgagcattgaggtgctgctgctggccgtgcgccacctgagcctgcacatcgagcctgaggagggcagcctggccggcggcacctggatcaccgtcatctttgatggcctggagctgggcgtgctgtaccccaacaacggcagccagctggagatccacctggtgaatgtgaacatggtggtgcctgccctgcggtctgtgccctgtgatgtgtttcctgtgttcctggacctgcctgtggtgacctgcaggaccaggtctgtgctgtctgaggcccacgagggcctgtacttcctggaggcctactttggaggccagctggtgagcagccccaaccctggcccccgggacagctgcaccttcaagttcagcaaggcccagacccccatcgtgcaccaggtgtacccacccagcggcgtgcctgggaagctgatccacgtgtatggctggatcatcaccggccgcctggagacctttgattttgatgctgagtacatcgacagccctgtgatcctggaggcccagggcgacaagtgggtgaccccctgcagcctcatcaaccggcagatgggcagctgctaccccatccaggaggaccacggcctgggcaccctgcagtgccacgtggagggggactacatcggcagccagaatgtgtccttcagcgtcttcaacaagggcaagtccatggtgcacaagaaggcctggctgatcagcgccaagcaggacctcttcctgtaccagacccacagcgagatcctgtctgtgtttcctgagaccggcagcctgggcggccgcaccaacatcaccatcaccggggacttctttgacaacagcgcccaggtgaccatcgccggcatcccctgtgacatcagacatgtgagccccaggaagattgagtgcaccacccgggcccctgggaaggatgtgcggctgaccaccccccagcccggcaacagaggcctgctgtttgaggtgggagatgctgtggagggcctggagctgacagaggccaccccaggctaccgctggcagatcgtgcccaatgccagcagccccttcggcttctggagccaggagggccagcccttccgggcccggctgagcggcttctttgtggcccctgagaccaacaactacaccttctggatccaggccgacagccaggccagcctgcacttctcctggagcgaggagcccaggaccaaggtgaaggtggccagcatctctgtgggcacagctgactggtttgacagctgggagcagaacagagatgagggcacctggcagcagaagacccccaagctggagctgctgggcggggccatgtactacctggaggccgagcaccacggcatcgcccccagccggggcatgagaattggagtgcagatccacaacacctggctgaacccagatgtggtgaccacctacctgcgggagaagcaccagatccgggtgcgggcccagaggctgcctgaggtgcaggtgctgaatgtgtctggccggggcaacttcttcctgacctgggacaacgtgagcagccagcccatcccagccaatgccacagcccacctgatccagaccaccatcgaggagctgctggccgtgaagtgcaagctggagcccctgtggagcaacatcctgctgcggctgggctttgagcggggccctgaggtgagcaacagtgatggagacctgaccagcggcacagagcccttctgtggccgcttcagcctgcggcagcccaggcacctggtgctgaccccacctgctgcccagaagggctaccgcctggaccagtacacccacctgtgcctggcctacaagggccacatgaacaagatcctgaagatgattgtgtccttcaccatcggcttccagaacatggtgaagaacaccacctgtgactggagcctgaccaggaccagccctgagagctggcagtttgactgcacagacctgtgggagacctgtgtgcgctgctttggagacctgcagcccccaccagccaacagccctgtgctggtgcaccagatcaacctgctgcccctggcccaggagaccggcctcttctacgtggatgagatcatcatcgctgacaccaacgtgacagtgtcccaggccgacagcggcacagcccggcctgggggcaacctggtggagagcgtgtctgtggtgggcagcccccctgtgtacagcgtgacctcctggctggccggctgcggcacagagctgcccctcatcacagcccggtctgtgcccacagagggcacagaggagggcagcggcctggtgctggtgaccacccagaggcggcagaggaccagcccccccctgggcggccacttccgcatccagctgcccaacacagtcatcagtgatgtgcctgtgcagatcagcgcccaccacctgcaccagctgctgcagaacaatgctgatgacttcaccagccgctacctgaatgccagtgacttcaccgtgaaggaggacctgtacacctgctatgagcacgtgtggaccctgtcctggagcacccagatcggggacctgcccaacttcatccgggtgtctgatgagaacctgactggagtgaacccagctgctgccaccagggtggtgtatgatggcggcgtcttcctgggccccatctttggagacatgctggccacagccaaccagcacacccaggtggtggtgcgggtgaatgatgtgcctgcccactgccccggcagctgcagcttccagtacctgcagggcagcaccccctgtgtgcacagcgtgtggtacagcattgatggagacatcaacctgatgatctacatcactggaacaggcttcagcggggacagccagttcctgcaggtgacagtgaacaagaccagctgcaaggtgatcttcagcaaccagaccaacgtggtgtgccagacagacctgctgcctgtgggcatgcaccgcatcctgatgctggtgcggcccagcggcctggccatcagcgccactggagaagatctcttcctgaatgtgaagccccggctggacatggtggagcccagcagagctgctgacatcggcggcctgtgggccaccatccggggcagcagcctggagggcgtgtccctcatcctgtttggcagctacagctgtgccatcaacgtggccaccagcaacagcagccgcatccagtgcaaggtgcccccccggggcaaggatggccgcatcgtgaatgtgaccgtcatccggggggactacagcgctgtgctgccccgggccttcacctacgtgagcagcctgaaccctgtgattgtgaccctgagcaggaacatcagcaacattgctggaggagagaccctggtgattggagtggcccggctgatgaactacacagacctggatgtggaggtgcacgtgcaggatgccctggcccctgtgcacacccagagcgcctggggcctggaggtggccctgccccccctgcctgctggcctgcaccgcatctctgtgtccatcaatggagtgtccatccacagccagggcgtggacctgcacatccagtacctgacagaggtgttcagcattgagccctgctgcggcagcctgctgggcggcaccatcctgagcatctctggaattggcttcagccgggaccctgccctggtgtgggtgctggtgggcaacagaagctgtgacatcgtgaacctgacagaggccagcatctggtgtgagaccctgcctgccccccagatcccagatgctggggcccccaccgtgcctgctgctgtggaggtgtgggccggcaaccgcttctttgcccggggccccagccccagcctggtgggcaagggcttcaccttcatgtatgaagctgctgccacccctgtggtgacagccatgcagggcgagatcaccaacagcagcctgagcctgcacgtgggcggcagcaacctgagcaacagcgtcatcctgctgggcaacctgaactgtgatgtggagacccagagcttccagggcaatgtgtccctgagcggctgcagcatccccctgcacagcctggaggccggcatctaccccctgcaggtgcggcagaagcagatgggctttgccaacatgtctgtggtgctgcagcagtttgctgtgatgccccgcatcatggccatcttccccagccagggcagcgcctgtggcggcaccatcctgactgtgcggggcctgctgctgaacagcagaagaagatctgtgcgggtggacctgagcggccccttcacctgtgtgatcctgagcctgggggaccacaccatcctgtgccaggtgtccctggagggggaccccctgcccggggccagcttcagcctgaatgtgacagtgctggtgaatggcctgaccagcgagtgccagggcaactgcaccctcttcatccgggaggaggccagccctgtgatggatgccctgagcaccaacaccagcggcagcctgaccaccgtgctgatccggggccagaggctggccaccacagcagatgagcccatggtgtttgtggatgaccagctgccctgcaatgtgaccttcttcaatgccagccacgtggtgtgccagacccgggacctggcccctggcccccactacctgtctgtgttctacaccagaaatggctacgcctgcagcggaaatgtgagccgccacttctacatcatgccccaggtgttccactacttccccaagaacttcagcctgcacggcggcagcctgctgaccatcgagggcaccggcctgcggggccagaacaccacctctgtgtacatcgaccagcagacctgcctgactgtgaacatcggggctgagctgatccgctgcatcgtgcccactggaaatggatctgtggccctggagattgaggtggatggcctgtggtaccacatcggggtcatcggctacaacaaggccttcaccccagagctgatcagcatcagccagagtgatgacatcctgacctttgctgtggcccagatcagcggggccgccaacatcgacatcttcatcggcatgagcccctgtgtgggcgtgtctggcaaccacacagtgctgcagtgtgtggtgcccagcctgcctgctggggagtaccacgtgcggggctatgactgcatccggggctgggccagcagcgccctggtgttcaccagcagggtcatcatcacagctgtgacagaaaattttggctgcctgggcggccgcctggtgcacgtgtttggagctggcttcagccctggaaatgtgtctgctgctgtgtgtggggccccctgccgggtgctggccaatgccaccgtgtctgccttcagctgcctggtgctgcccctggatgtgtccctggccttcctgtgtggcctgaagcgggaggaggacagctgtgaggccgcccggcacacctacgtgcagtgtgacctgactgtggccatggccacagagcagctgctggagagctggccctacctgtacatctgtgaggagagcagccagtgcctgtttgtgcctgaccactgggccgagagcatgttccccagcttcagcggcctcttcatcagccccaagctggagagagatgaggtgctgatctacaacagcagctgcaacatcaccatggagacagaggccgagatggagtgtgagacccccaaccagcccatcaccgtgaagatcacagagatcaggaagcgctggggccagaacacccagggcaacttcagcctgcagttctgccgccgctggagcaggacccacagctggttccctgagcggctgccccaggatggagacaacgtgacagtggagaatggccagctgctgctgctggacaccaacaccagcatcctgaacctgctgcacatcaagggcggcaagctgatcttcatggcccctggccccatcgagctgcgggcccacgccatcctggtgtctgatggaggagagctgcgcatcggcagcgaggacaagcccttccagggccgggcccagatcaccctgtatggcagcagctacagcacccccttcttcccctatggagtgaagttcctggccgtgagaaatggcaccctgagcctgcacggcagcctgcctgaggtgattgtgacctgcctgcgggccacagcccacgccctggacacagtgctggccctggaggatgctgtggactggaaccctggagatgaggtggtgatcatcagcggcaccggggtgaagggggccaagcccatggaggagatcgtgacagtggagaccgtgcaggacacagacctgtacctgaagagccccctgcgctacagccacaacttcacagagaactgggtggccggggagcaccacatcctgaaggccaccgtggccctgctgagccgcagcatcaccatccagggcaacctgaccaatgaaagagagaagctgctggtgtcctgccaggaggccaatgcccctgagggcaacctgcagcactgcctgtacagcatgtctgagaagatgctgggcagccgggacatgggcgcccgggtcatcgtgcagagcttccctgaggagcccagccaggtgcagctgaagggcgtgcagttccaggtgctgggccaggccttccacaagcacctgagcagcctgaccctggtgggcgccatgagggagagcttcatccagggctgcaccgtgagaaattccttcagccggggcctgtccatgtgtggcaccctgggcctgaaggtggacagcaatgtgttctacaacatcctgggccacgccctgctggtgggcacctgcacagagatgagatacatctcctgggaggccatccacggcaggaaggatgactggagcggccacggcaacatcatccggaacaacgtcatcatccaggtgtctggagctgagggcctgagcaaccctgagatgctgacccccagcggcatctacatctgcagccccaccaacgtgattgagggcaacagagtgtgtggggccggctacggctacttcttccacctgatgaccaaccagaccagccaggcccccctgctgtccttcacccagaacatcgcccacagctgcaccaggtatggcctgtttgtgtaccccaagttccagcccccctgggacaacgtgacaggcaccaccctcttccagagcttcaccgtgtgggagagcgctggaggagcccagatcttccgcagcagcaacctgcggctgaagaacttcaaggtgtacagctgccgggactttggaattgatgtgctggagagtgatgccaacacctctgtgacagacagcctgctgctgggccactttgcccacaagggcagcctgtgcatgagcagcggcatcaagacccccaagcgctgggagctgatggtgagcaacaccacctttgtgaactttgacctgatcaactgtgtggccatccgcacctgcagcgactgcagccagggccagggcggcttcaccgtgaagaccagccagctgaagttcaccaacagcagcaacctggtggccttccccttcccccatgctgccatcctggaggacctggatggcagcctgagcggcaagaacagaagccacatcctggcctccatggagaccctgagcgccagctgcctggtgaacagcagctttggccgggtggtgcacggcagcgcctgtggcggcggcgtgctcttccacaggatgagcatcggcctggccaacaccccagaggtgtcctatgacctgaccatgacagacagcaggaacaagaccaccaccgtgaactacgtgcgggacaccctgagcaacccccggggctggatggccctgctgctggaccaggagacctacagcctgcagagcgagaacctgtggatcaacagaagcctgcagtacagcgccacctttgacaactttgcccctggcaactacctgctgctggtgcacacagacctgcccccctacccagacatcctgctgcgctgtggcagccgggtgggcctgtccttccccttcctgcccagccctggccagaaccagggctgtgactggttcttcaacagccagctgcggcagctgacctacctggtgtctggagagggccaggtgcaggtgatcctgcgggtgaaggagggcatgccacccaccatcagcgccagcaccagcgcccctgagagcgccctgaagtggagcctgcctgagacctggcagggcgtggaggagggctggggcggctacaacaacaccatccctggccctggagatgatgtgctgatcctgcccaacagaacagtgctggtggacacagacctgcccttcttcaagggcctgtatgtgatgggcaccctggacttccctgtggacaggagcaatgtgctgtctgtggcctgcatggtgattgctggaggagagctgaaggtgggcaccctggagaaccccctggagaaggagcagaagctgctgatcctgctgcgggccagcgagggcgtcttctgtgacaggatgaatggcatccacatcgaccccggcaccatcggcgtgtatggcaaggtgcacctgtacagcgcctaccccaagaacagctggacccacctgggcgctgacatcgccagcggaaatgaaagaatcatcgtggaggatgctgtggactggaggcctcatgacaagatcgtgctgagcagcagcagctatgagccccatgaggccgaggtgctgactgtgaaggaggtgaagggccaccacgtgcgcatctatgaaaggctgaagcaccgccacatcggctctgtgcacgtgacagaagatggccgccacatccggctggccgctgaggtgggcctgctgaccaggaacatccagatccagccagatgtgtcctgccggggccgcctgtttgtgggcagcttcaggaagagcagccgggaggagttctctggagtgctgcagctgctgaatgtggagatccagaactttggcagccccctgtacagctctgtggagttcagcaatgtgtctgctggctcctggatcatcagcagcaccctgcaccagagctgtggcggcggcatccacgccgccgccagccacggcgtgctgctgaatgacaacatcgtgtttggaacagctggccatggaattgacctggagggccaggcctacacagtgaccaacaacctggtggtgctgatgacccagcctgcctggagcaccatctgggtggccggcatcaaggtgaaccaggtgaaggacatcaacctgcacggcaatgtggtggccggcagcgagcggctgggcttccacatccggggccacaagtgcagcagctgtgagctgctgtggagcgacaacgtggcccacagcagcctgcacggcctgcacctgtacaaggagagcggcctggacaactgcacccgcatcagcggcttcctggccttcaagaactttgattatggagccatgctgcacgtggagaacagcgtggagattgagaacatcaccctggtggacaacaccatcggcctgctggccgtggtgtatgtgttttctgccccccagaacagcgtgaagaaggtgcagatcgtgctgagaaattctgtgattgtggccaccagcagcagctttgactgcatccaggacaaggtgaagccccacagcgccaacctgaccagcacagaccgggcccccagcaacccccggggcggcagaattggcatcctgtggcctgtgttcaccagcgagcccaaccagtggccccaggagccctggcacaaggtgagaaatgaccacagcatcagcggcatcatgaagctgcaggatgtgaccttcagcagctttgtgaagagctgctacagtgatgacctggatgtgtgcatcctgcccaatgcagaaaattctggcatcatgcaccccatcacagctgagaggaccaggatgctgaagatcaaggacaagaacaagttctacttccccagcctgcagcccaggaaggacctgggcaaggtggtgtgcccagagctggactgtgccagccccaggaagtacctgttcaaggacctggatggccgggccctgggcctgcccccacctgtgtctgtgttccccaagacagaggccgagtggacagccagcttcttcaatgccggcaccttccgggaggagcagaagtgcacctaccagttcctgatgcagggcttcatctgcaagcagacagaccaggtggtgctgatcctggacagcgcagatgccatctgggccatccagaagctgtaccctgtggtgtctgtgaccagcggctttgtggatgtgttcagctctgtgaatgccaacatcccctgcagcaccagcggctctgtgtccaccttctacagcatcctgcccatccggcagatcaccaaggtgtgcttcatggaccagaccccccaggtgctgcgcttcttcctgctgggcaacaagagcaccagcaagctgctgctggccgtgttctaccacgagctgcagagcccccacgtgttcctgggggagagcttcatcccccccaccctggtgcagagcgccagcctgctgctgaatgaaagcattggagccaactacttcaacatcatggacaacctgctgtatgtggtgctgcagggcgaggagcccatcgagatccgctctggagtgtccatccacctggccctgactgtgatggtgtctgtgctggagaagggctgggagatcgtcatcctggagcggctgaccaacttcctgcagatcggccagaaccagatccgcttcatccacgagatgcctggccacgaggagaccctgaaggccatcgctgacagccgggccaagaggaagaggaactgccccaccgtgacctgcaccagccactaccgccgggtgggccagaggcggcccctgatgatggagatgaacagccaccgggccagcccccccatgacagtggagaccatcagcaaggtgattgtcatcgagatcggggacagccccaccgtgcgcagcacaggcatgatcagcagcctgagcagcaacaagctgcagaacctggcccacagggtcatcacagcccagcagacaggagtgctggagaatgtgctgaacatgaccatcggggccctgctggtgacccagagcaaaggagtcatcggctacggcaacaccagcagcttcaagacaggcaacctgatctacatccggccctatgccctgagcatcctggtgcagcccagtgatggagaggtgggcaatgagctgcctgtgcagccccagctggtgttcctggatgagcagaacagaagagtggagagcctgggccccccatctgagccctggaccatcagcgccagcctggagggcgccagtgacagcgtgctgaagggctgcacccaggccgagacccaggacggctacgtgtccttctacaacctggccgtgctgatcagcggcagcaactggcacttcatcttcaccgtgaccagccccccaggagtgaacttcaccgcccggagcaagccctttgctgtgctgcctgtgaccaggaaggagaagagcaccatcatcctggccgccagcctgagctctgtggcctcctggctggccctgagctgcctggtgtgctgctggctgaagaggagcaagagcaggaagaccaagccagaggagatccctgagagccagaccaacaaccagaacatccacatccacatcagcagcaagagaagagagagccagggccccaagaaggaggacacagtggtgggggaggacatgaggatgaaggtgatgctgggcaaggtgaaccagtgcccccaccagctgatgaatggagtgtccaggaggaaggtgagccgccacatcgtgcgggaggaggaggccgctgtgcctgcccctggcaccaccggcatcaccagccacggccacatctgtgcccctggggccccagcccagcaggtgtacctgcaggagaccggcaactggaaggagggccaggagcagctgctgcgctaccagctggccggccagaaccagctgctgctgctgtgcccagacttccggcaggagcggcagcagctgcccggccagagccggctgagcaagcagagcggcagcctgggcctgagccaggagaagaaggccagctgtggggccacagaggccttctgcctgcacagcgtgcaccctgagaccatccaggagcagctgtag

SEQ ID NO: 304445 - DNA, 12225 bp, Artificial Sequence
  derived and/or modified sequence
atgaccgcctggctgatcagcctgatgagcatcgaggtgctgctgcttgctgtgaggcatcttagtctccatatcgagcccgaagaggggtctctcgcgggcgggacatggatcaccgtcatatttgatgggctggaactcggggttctatatccgaataatggatcacagttggaaattcacctggtaaacgtgaatatggtcgtccccgcactgcggagcgtgccatgtgatgtgttccccgtgttcttagatctccctgttgtgacttgccgtacccgctctgtgctgagcgaggcacatgagggcctctatttccttgaagcctacttcggtggccagcttgtttctagcccaaacccaggtccccgggattcctgcacctttaaatttagtaaagcccagacacctattgttcatcaggtgtaccctccgagcggggtccctgggaagttgattcacgtgtacggctggattatcacgggcagactggagacctttgacttcgatgccgaatatattgacagtcctgtgatccttgaggctcagggcgacaaatgggtgacaccctgctcactcattaaccgccagatgggctcctgctaccccatccaggaggatcacggcctgggcaccttacagtgtcatgtagaaggcgactacataggctcccagaacgtttcctttagcgtgttcaataagggcaagtctatggttcataaaaaggcgtggctcatatccgcgaagcaagacctcttcctctaccagacccacagcgagattctgtctgtgttcccggaaacaggaagcctgggcggacgtacaaatattactattacaggtgactttttcgacaatagcgctcaagtcacgatagctggtattccatgtgatattcgtcatgtctctccacggaagattgaatgtactaccagagcccccgggaaggacgtccgcctgacaactccgcagcccggcaaccgcggcctgttgttcgaggtgggggacgcggtggaaggcctggaactcacagaggcgacccccgggtacagatggcagattgtgcccaacgcatcgagtccgtttggcttttggagtcaggaaggacagccctttagagcacgactcagcggattttttgttgccccagaaaccaataactacacattttggatccaggctgattcccaggcttcactccacttttcttggtccgaggagccccggaccaaggtcaaggtcgcctccatttctgtcggtaccgccgactggtttgattcatgggagcagaaccgagacgagggaacgtggcagcagaaaacccccaagctcgaattgctgggtggcgcgatgtactatttggaagctgagcaccacggcatcgcgccctcaaggggtatgcgaatcggggtacagatccataacacatggctgaatccagatgtggtgacgacctatttacgagaaaaacatcagataagagtgagagcccagcggcttccagaggtgcaagtgcttaatgtcagtggaagagggaatttctttctcacctgggacaatgtgtccagtcaaccaatccctgctaatgcaaccgcccacctgattcagacaactattgaggaactgctcgccgtcaagtgtaagctggagcccctttggtcaaatatacttctgcgcttgggattcgagagaggacctgaagtgagcaatagtgatggcgatttgacatccggcaccgagcctttctgcggaagattttccctgcgtcagcctaggcacctggtgctgacgcctcctgcagcccagaaaggctacaggttggatcaatacacacacctgtgcctcgcatataaaggccacatgaacaaaatcttaaaaatgatagtgtcttttactatcggcttccagaacatggtgaagaacactacttgcgattggagcttaactcgaacttcacctgaatcctggcagttcgattgcacagatctgtgggaaacctgtgtgagatgtttcggcgatcttcagcctccaccagccaacagcccagtgctcgtgcatcagatcaaccttctgccacttgcccaggaaactggcctgttttatgtggatgaaattattatcgcagacactaacgtgacagtgtcccaagctgatagcggtactgcccggcccgggggaaaccttgtcgagtccgtttcagttgttggctctccccccgtgtactcagtgacttcttggctcgccgggtgtggaacggaacttcctctgattaccgcgaggtcggtgcccacggaaggtaccgaagagggctccggactagttcttgtcactacccaacgaaggcagaggacgagtccccccctgggcggtcacttcagaattcagctcccaaacacagtaatttccgacgtacccgttcagatctcagcgcatcacctgcatcaattgcttcagaacaacgctgatgatttcacgtcccggtacttgaatgcttctgacttcaccgtgaaggaggacttgtacacttgttacgagcatgtgtggacactttcatggtctacgcaaattggtgacctgccaaattttataagagtcagcgatgaaaatctgactggggtcaaccccgcagctgcaaccagggtcgtatacgatgggggggtgttcttaggtcctatattcggggacatgctggcaacagccaaccagcacacccaggtggtcgtgcgcgtcaatgacgtccccgcccattgccccgggtcgtgctcctttcagtatttacagggcagcacaccctgcgtccactccgtttggtactctattgacggagacattaatctgatgatttacattacaggaacagggttctctggggacagccagtttctgcaggtgactgtgaataagacttcttgtaaggtgatcttctccaaccaaaccaacgtcgtctgccagactgatcttttgcccgtaggaatgcaccggatacttatgctggtgaggccaagtggactggctatctctgccacaggtgaggacctgttcttaaacgtaaagccccgcctggacatggtggaaccatccagggcagccgacatcggcgggctctgggctaccatcaggggaagctccctggagggagtgtcccttatcctgttcggctcctatagttgcgcaataaatgtggccacaagcaacagctcccggattcagtgtaaggtaccaccccgcggtaaagacggtagaatagtgaacgtcaccgtgatacgaggcgattattcggccgtgctgcctagggccttcacttatgtgtcttctttgaatccagttattgtgacactgtctcgaaacatttcgaacattgccggcggagagaccctagttataggtgttgcccgcttgatgaattataccgacttggatgttgaggttcatgttcaagacgcccttgccccagtgcatacccaatcagcctggggactcgaggtggcgttgccacccctcccagcgggtctgcatcggataagcgtctccatcaacggcgtgtctatccactcccagggagttgacctgcacatccaatacctgaccgaggtcttttcgatagagccatgttgcggttccctgctgggagggactatcctctccatctccggcattgggttttctagagacccagccctggtatgggtgctagtgggcaatagaagctgcgatatcgtcaatcttacagaagcaagcatttggtgtgagacactgcccgccccccagattcccgatgcaggggcccctaccgtgccagccgccgtggaggtgtgggccggaaacaggtttttcgctcgcggcccatcgccatccttagtcggcaagggttttacgtttatgtatgaagctgcggccaccccggtcgtgactgccatgcaaggagagatcaccaatagttcactctcactgcatgtgggcggatctaatctctcgaactcagtcatcctactgggaaacttgaattgcgacgtagagacccagtcattccaaggcaacgtgagtctgtccggctgctccattccgttgcactctctggaggcggggatctaccccctacaggtgcgacagaaacaaatggggttcgccaatatgagcgtggtgttacagcagttcgccgtgatgcccaggatcatggccatcttcccctctcagggaagtgcctgtggtggaacaatcctcaccgtccgcggcctgcttctgaacagtagacgaaggtctgtgcgagtagacctttccggaccctttacatgtgtcatcctgagcctcggcgaccataccattctgtgtcaggtgtccctcgaaggggacccgttgccaggcgcttccttctcactcaacgtcacagtgcttgtgaacggactcacctcagagtgccaggggaactgcacgctgttcatccgggaagaggcatcgccagttatggatgctttgagtacaaacacaagcgggagcctgactaccgtcctgatcagggggcagcggctcgcaacaactgctgacgagccaatggtattcgtggacgatcaattgccgtgcaatgtgacgttcttcaacgcttcccatgtggtgtgccagactcgggacctcgcgccgggaccccattacctaagcgtgttctacactaggaacgggtacgcttgcagtgggaatgtgagccggcatttctacatcatgccgcaagttttccattatttcccaaagaatttctccctccacgggggctcgttgctaactatcgagggcacagggcttcgtgggcaaaacaccacttccgtctacattgatcagcagacgtgccttacggtgaatataggcgccgagcttatccggtgcattgtgcccacaggaaacggctctgtcgcacttgagattgaggtagatggtttgtggtaccatattggcgtgatcggatacaataaggccttcaccccggagctgatatcaatctctcagtctgacgacattctgactttcgccgtcgcccagatcagcggggccgccaatattgacatcttcatcggaatgagtccatgtgtcggagtttcagggaaccacactgtgctccagtgtgtagtgccctcgctgcccgccggagagtaccacgtgcggggctacgattgcatcaggggttgggcctcgtcagcactggtgtttacatccagggtgattattaccgctgtgaccgaaaacttcgggtgtctgggcggccggcttgtgcacgtgtttggcgccggttttagccctgggaatgtatcagccgcagtctgtggtgccccctgccgcgtattagcaaacgccaccgtatccgcattttcctgtctcgtgttgcctttagacgtgtcactcgccttcctttgtggtctgaaacgcgaggaggatagctgtgaagccgctagacatacttacgtgcaatgcgatctcaccgtcgctatggcaaccgaacagcttctggagtcctggccgtatctttacatctgtgaggaatcttcgcagtgtctgtttgtgcccgaccattgggctgagtcaatgttcccaagtttctccggtctgtttatcagccccaagctggagagggatgaggtgttgatctataatagctcctgcaacattacaatggagacagaggcggagatggagtgcgagactccgaatcagccaattactgtgaagatcaccgaaatccgaaaaaggtgggggcaaaatactcaggggaattttagcctccagttttgccgtcgatggtctcgcacgcattcctggttcccagagaggctccctcaagatggcgataacgttacggtggaaaacgggcagttgttgctcctggacacaaacacgtccatcctgaatctgctacatattaagggtggaaagttaatctttatggcccctggtcctatcgagttgcgggctcatgccatactggtctctgacggcggcgagttgcgaattggaagcgaggataaaccttttcagggcagagcccagatcacactgtatggttcttcttattctaccccttttttcccttacggggtaaaatttttagctgtgaggaatggcacacttagcttgcatggcagtctacccgaggtcatcgtgacttgccttcgcgccaccgctcacgccctggatacagtgcttgccttggaagacgcagttgactggaaccccggtgatgaggtggtcattatttccggcaccggggtgaagggcgcaaaaccgatggaggaaatcgtgactgtggagaccgtgcaggacaccgatctctatttaaaatccccattaagatattcccacaattttactgaaaactgggtggctggagaacatcatatcctcaaagctactgtggctctgctgtcaaggtccatcacaatacagggcaatctgaccaacgagagagaaaaactgctagtgagttgtcaggaggctaacgccccagagggtaatttgcagcactgcctgtatagcatgtctgagaagatgcttggatccagggatatgggcgctagggtgattgtgcagagtttccctgaggagccttctcaagtgcagctgaagggagtccaatttcaggtgctggggcaggcattccataaacacctctcatccctcactctggtgggggcgatgcgggaatcattcatccagggctgcactgtgagaaattcattctccagaggtctttctatgtgtggcactctgggtctcaaggtcgactcaaatgttttctataatatcctcggccacgctctcctcgtcggtacatgcactgaaatgaggtatatttcctgggaggccatccatgggaggaaggacgattggtctggacacgggaatatcattcgaaacaacgtgatcattcaagtgagtggagccgaaggactcagcaaccccgagatgcttacaccaagcggcatttacatctgttcgccaacaaatgtgatagagggaaaccgcgtttgcggagccggttacggctactttttccatttgatgacaaatcagacctcacaggcaccactgctgtccttcacccagaatatcgcgcatagctgcacgaggtacggacttttcgtttacccgaagttccagcccccttgggacaacgtcactggaacaaccctctttcagagcttcacagtgtgggagtctgcgggaggggctcaaatttttcgtagtagcaacttgaggttgaagaacttcaaggtgtactcatgtcgcgacttcggtatcgacgtcttggagtctgatgctaatacctcagtcactgattccctgttgctgggtcatttcgctcataagggctccttatgcatgtcctccggaatcaagaccccgaagaggtgggagctgatggtgagcaatacaacctttgtcaattttgacttaatcaactgtgtggctattagaacgtgcagtgattgttcacagggacagggagggtttactgtgaagacatcccagctgaaatttacaaattctagcaacttagtggccttcccatttccacatgcggccatactggaagacttggacggcagcctgtctggcaaaaatcgctcccacatcttagcttctatggaaacgctgtccgcttcctgtttagtcaacagcagtttcggcagagtcgttcatgggagcgcatgcggaggaggggtactattccatcggatgagcatcggccttgccaatacgcctgaagttagctatgatctgacaatgactgattcgcgaaacaaaaccaccacagttaactacgtgcgagacacactttctaatcctcgtggatggatggctctcctgctggaccaggaaacttacagcctccagagcgagaatctttggattaacaggtctctccagtattctgctacatttgacaatttcgcacccggtaattacctgctgctggtccacactgacctacccccctatccagatatcctgctaaggtgcgggagtagagtgggtctgtcttttccttttctcccttctcccggtcagaatcaaggctgcgattggttcttcaactcacagctgcggcaactcacttacctggtctcaggagagggtcaggttcaagtgatcctaagggttaaggagggcatgcctccgactatcagcgcatctacctcagcccctgagtcagccctcaagtggtctctgcccgagacatggcagggagtcgaggaggggtggggcggttacaacaacaccattccaggacctggtgacgacgtgctgattctcccaaacagaactgtgctggtcgacaccgacctccccttcttcaaagggctttatgtcatgggtacgctcgattttcctgtagaccgaagtaacgttttgtctgttgcatgtatggtaatcgctggcggcgaattgaaggtggggactctggaaaacccacttgaaaaagaacagaaattgctaatcctcctgagggctagtgagggcgtcttctgtgaccgcatgaacggcattcacatcgatccgggcactataggagtgtacgggaaggtacatctttactcagcataccctaaaaattcctggacccaccttggcgccgatattgcttctggcaatgaaagaatcattgtcgaggacgccgtggattggagacctcatgacaaaatcgttctctccagcagctcctatgaaccccacgaggctgaggtgctgaccgtgaaggaggtcaaaggacatcacgtccgcatctatgaacgcttgaagcacagacacatcggtagcgttcacgtaacagaagatggtaggcatattcgattggcagccgaggtggggttgctcactcgcaatattcagatccagcctgacgtgtcgtgtcgcggacggttgtttgtgggcagcttccgcaaatcctcaagggaagaatttagcggagtcctacagctgcttaatgtggagatacagaacttcggatccccgctgtactcctcagtggagttctctaacgtctccgctgggagctggattatatctagcactctgcatcagtcctgcggtggcggaatccacgcggctgccagtcacggcgtgctgttgaatgataatatcgtgttcggtacggcaggccacggcatcgacctggaggggcaggcttacaccgtaactaacaatctggttgtgttaatgacccaaccagcgtggtcaacgatctgggtggctgggatcaaggtaaaccaggtgaaggacatcaatctgcacggtaacgtggtggccggatccgagagactgggctttcatataaggggacataaatgctcatcatgtgaattgctgtggtccgacaacgtagcacacagcagtttacatggcctgcatctgtataaggagagtggcctggacaactgcaccaggatctctggtttcctggcattcaaaaactttgattatggtgccatgctccacgtagagaatagtgtggagatcgagaatataactttggtggacaataccatcgggctgttagccgttgtttacgtgtttagtgctccccaaaacagtgtgaaaaaggttcaaattgtgcttagaaactcagtcatcgtcgccaccagcagctctttcgactgcatacaggataaggtgaagccacactccgcaaacctgactagcacagacagagctccgtcaaaccctcgggggggccgcattgggatcctctggcctgttttcacatcggagcccaaccagtggccgcaggaaccctggcacaaggtgcgcaatgatcattccatctccggtattatgaagctccaggatgtgaccttttcaagcttcgtaaagtcctgttatagtgatgatttggacgtatgtattctgcccaatgcagaaaactcaggcatcatgcatccaataacagctgagagaacccgcatgctcaaaattaaggacaaaaacaaattctattttccctctctgcagccccgtaaggacttagggaaggtggtatgccctgagttggattgtgccagcccgaggaaatatttgtttaaagacctagacgggagggctctgggtctcccaccaccagtctccgtatttccaaagactgaagcagagtggacagcctcattctttaacgccggcacattcagggaggagcagaagtgtacctaccagttcctcatgcaggggttcatctgcaagcagacagaccaggtcgtcctaatcctggacagcgccgacgccatctgggccatccagaagctctaccctgtggtgtctgtgactagcggctttgtcgacgtcttctctagcgtcaatgccaatattccatgttccaccagcgggtccgtttctactttttactccattctccccatccggcagatcaccaaggtttgttttatggatcagaccccccaggttctgagattttttctactcggaaacaaaagcacttcaaagctcctactcgctgtgttttatcatgaacttcagagccctcacgtgtttttgggtgagtcttttatcccgccaacattagtgcaaagcgctagcctcctcctgaatgaatctatcggagccaattatttcaacattatggacaacctgctgtacgttgtgctccaaggggaggaacctatcgagattcgatcgggggtttccatccatctcgcgttgactgtgatggtgtccgtgctcgaaaagggctgggagatcgtgattctggagcggctgactaacttcttacagattggtcagaaccagattagatttatacatgagatgcccggacacgaggaaaccctgaaagcaatcgctgattctcgggcaaaacggaagcgcaattgcccgactgtgacttgcacgagccactaccggagggtcggccagagacggccactgatgatggagatgaattcccaccgtgccagcccgccaatgaccgtggagactataagtaaagtgatcgtcatcgaaattggggacagccctactgtgcggtcaactggtatgatatcatccttgtctagtaataagttacagaacctggcacatcgcgtcatcaccgcccagcagacaggagtgctagaaaacgtgctcaacatgactattggggccttgctggttacccagtccaaaggagtaattggttacggaaacacctcatctttcaaaaccggaaatctcatctacatcagaccgtacgctctcagcatcctggtgcagccaagcgatggtgaagtgggaaacgaactgccggtacagccacagcttgtctttctggacgagcagaaccggagggtggagtctttaggcccccctagtgagccttggaccatcagtgcctctcttgagggagcttctgactcagtactcaaaggttgcactcaagccgaaactcaagacgggtacgtttcgttttataatcttgccgttctcattagcggatccaactggcacttcatctttacagtgacctcaccgcccggcgtgaatttcactgcacggtctaagccattcgccgtgcttcctgtgacacgtaaggagaaatctactattattctggctgcaagtcttagttctgttgcctcttggctggccctaagctgtctggtctgttgctggctgaagcggagcaaaagccgtaagacgaaacctgaggaaattccggagtcacagaccaacaatcaaaacattcacatccacattagctctaaaaggagagagtcacaagggccaaagaaggaggacactgtggttggggaggacatgcggatgaaggtaatgttgggcaaggtcaaccaatgcccccaccaacttatgaatggcgtcagccgccgtaaggtaagccgtcacatcgtccgggaggaagaggccgctgtgccagccccgggcaccacgggaatcacttcccacggccatatttgtgctccaggagcacctgctcagcaggtctatctccaagagacaggaaattggaaggagggtcaggagcagcttctcaggtaccagctcgccggccagaatcagctcttactattatgccctgactttaggcaggagagacagcaactccccggtcagagcaggttgagcaaacaaagcggatccctgggcctatcacaggagaagaaagcttcatgcggagcaaccgaggccttttgcctgcattccgtgcaccctgaaaccatacaggaacagctgtag

SEQ ID NO: 304446 - DNA, 16282 bp, Artificial Sequence
  derived and/or modified sequence
acatttggctgggacacaaacgagttaggtgagttatagtctaacgtgagtgagttacctgcgtggtggctgcaggctgagctctaaccagataacatgtccacggattcttgacagagagaaataagatcacttagaaagaaaggatcatttctcccttgagtcacaaggagacagaaacagaaaaaaaagcacaaaagctatgctgctccaatcaaaactgaaaatgcttttaatgtctgagcaatcttaagagtattgatttaagtggacagaatgactgcctggctgatctctctgatgagtattgaagtactacttttggcagtacgtcacctgagtttacatattgaacctgaagaaggtagccttgcagggggaacgtggatcacagtcatttttgatggtttggagttgggtgttctttaccccaacaatggctctcaattggagatacacctggtgaacgtgaacatggtggtgcccgcactgcggagtgttccctgtgacgtctttcctgttttcttggatttgcctgtggtgacatgccggaccagatctgtgctgtctgaagcacatgagggtctgtacttcctggaagcatacttcgggggacagctggtaagcagtccaaatccaggaccacgagatagctgtactttcaagttttccaaggcgcagacacccatcgttcaccaagtttatccaccaagtggtgttccaggaaaactaatacatgtatatggctggattatcactggaagattggaaacttttgattttgatgctgagtacattgatagcccagtgatcttggaagctcaaggagacaaatgggttactccttgctctcttataaataggcagatgggaagctgttatcctattcaggaggaccatggtcttgggactctgcagtgccatgtggaaggcgactacatcggctcccagaatgttagcttctcagtatttaacaaaggaaagtcaatggtccacaagaaggcatggctgatcagtgctaaacaggatcttttcctataccagacacactcagaaatattatctgtgtttccagaaactgggagccttgggggaagaacaaacatcacaattacaggagacttttttgacaattctgcccaggttaccattgcaggcattccatgtgatattagacacgtgtctcccaggaagattgagtgcaccactcgggctccaggaaaagatgtgaggctcaccacccctcagccaggcaatcgagggcttctttttgaagttggagatgctgttgagggactggaactgactgaagccaccccagggtacaggtggcagattgtccctaatgccagttctccatttgggttttggtcacaggaaggacaacctttcagagcacggctcagtgggttctttgtggctccagagacaaataattacactttctggattcaggcagatagccaagcttccttgcatttcagttggtcagaggaaccaaggactaaggtgaaagtggcctccatcagcgtcggcactgctgactggtttgactcctgggagcagaatagggatgaagggacctggcagcagaagactcccaagttggagctgttgggtggagccatgtactacctggaagcagagcatcatgggatagccccaagcagggggatgaggattggtgtccagattcacaacacctggctgaatcctgatgtggtcaccacttacctacgggagaagcaccagatccgagtccgagcccagaggcttccagaagtacaggtgctgaatgtatcaggcagaggaaacttcttccttacttgggacaatgtctctagtcagccaatccctgcaaatgccacagcccatctgattcaaacaaccattgaggagttacttgcagtaaaatgcaaactggaacccctttggtctaacatccttctccggcttggatttgaacgaggcccagaagtttccaactctgatggggacctcaccagtgggacggagcccttctgtggcaggttcagcctccgtcagcctcgacaccttgtccttactcccccggctgcccagaagggctatcggctagatcagtatacacacctgtgtcttgcatacaaaggccacatgaacaagatcctgaagatgattgtgtccttcacaatcggctttcaaaacatggtaaagaataccacctgtgactggagtctcacgaggaccagccccgagagctggcagttcgattgcactgacctctgggagacttgtgtgcgttgcttcggggatctccagccccctccggcaaactccccagtgctggttcatcagatcaaccttctccctctggcccaggagacgggcctgttctatgtggatgaaattattattgcagacacaaacgtaacagtttctcaagctgattctggaacggctcgcccagggggcaatctggtggaatcagtctctgtggtgggatcccctccggtctacagtgtcacctcctggctggcggggtgtggcacggagctcccgctcatcactgcacgctctgtgcccactgaaggaacagaagagggatctggactggtcctggtgacgacacagagacgacagcggacaagtccacctctaggaggacactttcgcatccagcttcctaatacagtgatttctgatgtccctgtacaaatttctgctcatcaccttcaccagctcttacagaataatgccgatgacttcacatccaggtacctcaatgccagtgacttcactgtgaaggaggatctatacacttgctacgaacacgtgtggaccttgtcctggtccactcagattggggatttgcccaattttatcagggtctctgatgaaaaccttactggagtgaatcctgctgcagccacgcgtgtggtatatgatggtggagtttttcttggacccatatttggagacatgttggctactgccaaccagcatactcaggtggttgtgcgagtgaatgatgtaccagctcattgcccaggttcctgctctttccagtacctccaagggtcaactccctgtgtccattctgtgtggtactccattgatggtgacatcaacctaatgatttacattaccggaactggtttctctggtgactcccagttcttgcaggttacagtgaacaaaacgagttgcaaagttattttctcaaaccagaccaatgtagtctgtcagacagatttgctacctgttggaatgcatcggatcttgatgttggtgagaccctctggtcttgccatcagtgccactggagaagacctcttcctaaatgtgaaacctagactggatatggtggagccttccagagctgcggatattggagggctctgggccaccatccgaggctctagtttggaaggtgttagcctgatattatttggatcttactcgtgtgccatcaatgtcgctacaagcaattcaagcagaattcagtgcaaagttccacccagggggaaagatggacgcattgtgaatgtgactgtgatcagaggggactattctgcagttcttcccagagcatttacatatgtctcttccttaaatccagttattgtgactctgagcagaaacataagcaatatagcaggcggtgagaccctggtcattggagtggcgaggctgatgaactatacggatttggatgtggaagtccacgtccaggatgccttggctccggttcacacacagtcggcttggggcctggaggtggcactgcccccactgccagctggtctccacagaatttccgtctctatcaatggggtcagcattcactcacaaggggttgatctccacatccagtacctcacagaagttttcagcatcgagccttgctgtgggtccctgctgggagggaccatcctcagcatctcaggaataggcttcagcagggacccagctttggtttgggtacttgtgggcaatcggtcctgtgacattgtgaacttaacggaggcgagcatctggtgtgaaaccctgccagccccccagatacccgatgcgggcgctcccactgttccagctgccgtggaggtctgggctggcaacaggttcttcgcccgtggtccttcaccaagcttggtggggaaaggcttcaccttcatgtatgaagcggcagcaacaccagtagtcactgccatgcaaggagaaatcacaaatagcagcctgagcctgcatgtgggaggaagtaacctctccaactcagtcatccttctggggaacctgaactgtgatgttgagacacagtccttccagggcaacgtgagcctgtctggatgctccatccctcttcacagtctggaggctggcatctatcctctccaagtacgtcagaagcagatgggatttgctaatatgtctgtggtgctccagcaatttgcagtgatgcctcggataatggccatcttcccatcgcagggttcggcatgtggtgggaccatacttactgtgagggggttgcttcttaactctagaaggaggtcagttcgggttgacctctcgggtccttttacttgtgtgattttgagtttgggagaccacaccattctctgccaggttagcctggagggtgaccccttgcctggagcttccttctccctgaacgtcacagtcctggtcaatgggctaaccagcgagtgtcaggggaattgcactcttttcataagggaagaggcaagtcctgtcatggatgccttgtccacaaacaccagtgggtctctgaccactgtgctgattaggggtcagaggttagccaccacagctgatgagccgatggtatttgtggatgatcaacttccttgcaatgtaactttttttaatgcaagccacgttgtgtgccagacaagagacttggccccaggaccccactacctgtcagttttttatacaagaaatgggtatgcttgttctggtaatgtttccagacacttctacattatgccccaagtgtttcattattttcctaagaatttcagcttacatggtggaagcctcttgaccatagagggcacaggcctgagaggacagaacaccacgtcagtctatattgaccagcagacctgcctgacggtgaacatcggtgctgagctcatccggtgcattgttcccacagggaatggctctgttgccctggaaatagaggtagatggactttggtatcacataggagtcattggttataacaaggcctttaccccagaattgatctctatttctcagagcgatgacatcttaacctttgcagtggcccagatctcaggagctgcaaacattgacatttttataggaatgtcaccctgtgtgggtgtctctggtaaccacaccgttcttcagtgcgtggtcccttcccttccggccggggagtaccacgtcagaggctatgactgcatcagagggtgggcctcatctgccctggtgttcacctcaagagttattattacagcagtgacggagaacttcggctgcctgggtggaaggctggtgcatgtgtttggagcgggattttctccagggaatgtctcagctgctgtgtgtggtgctccctgccgagtcctggctaatgctacagtgtctgccttcagctgcttggttctgcccctggatgtgtccttggccttcctgtgtggcctgaagcgtgaggaggacagctgtgaggctgccagacacacctatgtgcagtgtgatttgacagttgccatggcgacagagcaactgcttgaatcgtggccttacctctacatttgcgaggaaagttcccaatgcctctttgtgccagatcattgggcagagtcaatgtttccatcattctcgggcctctttatcagccctaaattggaaagagatgaagttctcatctataatagctcctgtaacattaccatggaaactgaggcagagatggagtgtgagacgcccaatcagccaattaccgtcaagattactgagatacggaaacgctggggccagaacactcagggcaacttttctttacagttctgccggagatggtccaggactcacagctggtttcctgaaaggctgccacaagatggcgacaacgtcacagtggagaatggccaattgcttctgctggacactaacacaagcatcctcaacttactgcacattaaagggggcaagctgattttcatggccccaggacccatcgagctcagggcacacgccatccttgtttctgatggtggagagctccggattggatccgaagacaagcccttccaaggcagagctcagatcacactctacgggagttcctactcaactcccttctttccctatggagtcaagttcctggctgtgaggaatggaactctttctctgcacggttcactaccagaagtaattgtcacctgtcttagagcaactgcccatgccctagacacagtgctggctttagaagatgctgtggactggaaccctggggatgaagttgtcatcatcagtggaacaggtgttaaaggtgccaaaccgatggaagagattgtcactgtggaaactgtgcaggatacagacctctatcttaagtcacctttgagatattctcacaactttacagagaattgggtggctggagagcaccatattttaaaggccactgtggctctgctcagcaggagtattaccatacaaggaaatctcactaatgagagggagaagctgcttgtttcatgccaggaggccaatgctccagaaggtaatctgcagcactgtttgtattccatgagtgagaagatgctaggatccagggatatgggagccagagtgatcgttcagtccttcccagaagagcccagccaggtccagttgaagggagtgcagtttcaagtcttggggcaagccttccataagcatctgagctcactcactctggtgggagctatgagagagtctttcatacagggctgcacagtgaggaactccttcagtagaggcctcagcatgtgcgggaccttgggcctgaaggtggacagtaatgtattctacaatattttaggtcatgcgctgctagttgggacatgcacggagatgagatatatctcctgggaggcaattcatggaaggaaagatgactggtcaggacatggaaatataataagaaacaacgtgatcatccaggtttctggtgccgagggactctccaatcctgaaatgttgacaccatctggcatctatatctgcagtcccaccaatgttatagaggggaacagagtgtgtggtgctggctatggctactttttccatctcatgaccaaccaaacatcacaagctccgcttctttccttcactcagaacattgcacattcttgtaccaggtatggtctctttgtataccctaaatttcagccaccttgggataatgtcactggcaccactctgttccagagcttcacagtttgggaaagtgcaggtggtgcccagatttttagaagtagcaatcttcgcctgaaaaacttcaaagtttattcatgcagagattttggaattgacgtcttggaaagtgatgcaaatacttcagttactgacagcttattacttggtcattttgcccacaagggaagtctgtgtatgtcatctgggattaaaactcctaaaagatgggaactgatggtgtctaacacaacctttgttaattttgatctcatcaactgtgtggccattagaacctgttcagactgttcccaaggacaaggtggatttactgtgaagaccagccagttgaagtttacaaactcttcaaacttagtggcatttccatttcctcatgcagcaattttggaagacttggatgggtctctgtctgggaaaaacagaagtcacattcttgcttctatggaaaccctttcagcttcttgtttggtcaattcaagctttggtcgggttgtccatggcagtgcctgtggaggaggtgttctttttcatcgtatgtctattggtttagcgaatactcctgaagtttcttatgatttaaccatgactgacagcagaaataaaacaaccactgtcaattatgtacgtgatacattgtctaaccctcgtggctggatggctctgctcttggaccaagagacctactcattgcaatctgagaacctttggatcaacagatctctgcagtactcagcaacctttgacaactttgctcctggtaattacctactgctggtgcacacagatttgccgccttaccctgacatcctcctaagatgtgggagtcgagtgggtctgtcttttccatttcttccatcaccaggtcagaaccaaggctgtgactggttcttcaatagccagctgaggcaactcacctatctggtttcaggtgaaggccaagttcaagtcattctccgggtgaaggaaggtatgcccccaactatttcagcttctacctctgcccctgaatcagctttaaaatggtccctccctgaaacatggcaaggtgttgaagaaggctggggaggatacaacaataccattccaggccctggggatgacgttctcattttacccaacagaactgtccttgtggatacagatcttccattcttcaaagggctgtatgtgatggggaccttagacttccctgtggacagaagcaatgttctgagtgtggcatgcatggtcattgcaggcggggagctgaaagttggtactttagaaaatcccttagaaaaggaacaaaagcttctgattctccttagagcctcagagggagtcttttgtgaccgtatgaatggaattcatattgacccaggaacaattggggtttatgggaaagttcatctttacagtgcttatcctaagaactcctggacacatcttggagctgatattgcctcaggaaatgagagaattatagtagaagatgcagtggattggcgcccccatgacaaaatagtccttagctcctcttcttatgagcctcatgaagcagaggtcctcactgtgaaagaagtcaagggccaccatgtgaggatctatgaacggctcaaacaccggcatattggaagtgtacatgtcacggaggatggccgacacattcgtttggctgctgaggttggactgttgacccgaaatatacaaattcagcctgacgtatcatgtagggggagactgtttgtggggtccttcaggaagtccagccgagaagaattttcaggtgtccttcaacttcttaatgtggaaattcagaacttcgggtcaccattgtactcatctgttgaattcagtaatgtgtcagcaggatcctggatcatatcatctactctgcaccagagctgtggcgggggcattcatgcagctgccagtcatggagtacttttaaatgacaatattgtgtttggcacagctggccatggcatagatttagagggtcaggcctatactgtcactaataaccttgtggttctgatgacacagccagcgtggtccaccatttgggtggcgggaatcaaagtgaaccaggtaaaggacatcaacctccatggcaacgttgtggcaggatcagagagacttggctttcacatccgaggccacaagtgctcctcttgtgaactgctttggtctgacaatgtggcgcattcaagtcttcatggccttcatctctataaggaaagtggacttgacaactgtaccagaatctctggcttcttggctttcaagaactttgactatggtgccatgttacatgtagagaacagcgtggagatagagaacattactctggtagacaatactattggtcttttggcagtagtgtatgtattttctgctccacaaaattccgtcaaaaaagtgcagattgtgcttaggaattcagtcattgtggccaccagctcttcttttgactgcattcaggacaaagtgaagccgcactcagccaacttgacatcaacagatagagctccctccaatccaagaggaggtcgaattggtattctgtggcctgtattcacctcagaaccaaatcagtggcctcaggagccatggcacaaagtgaggaatgatcattcaatttcaggaatcatgaaacttcaagatgttaccttttctagttttgtgaagagttgctatagcgatgacctggatgtctgcattctaccaaatgcagagaacagtggaattatgcacccaataacagcagagaggaccaggatgctaaagataaaagataaaaacaagttctactttccttcattacaacccaggaaagatttaggaaaagtagtctgtcctgaattagactgtgcaagtccaagaaaatatctcttcaaggatctggatgggagagccctgggtctgcctccaccagtttctgtatttcctaaaacagaggcagaatggactgcatccttcttcaacgcaggtacatttagagaagaacagaaatgtacataccaatttctgatgcaaggattcatctgcaaacagactgaccaagtggtcctaattcttgatagcgctgatgccatttgggcaattcagaagttatatccagttgtatctgtgactagtggttttgttgatgtctttagcagtgtaaatgccaatattccctgctctacttctgggtcagtgtctactttctattctatcttacccatcaggcaaatcaccaaagtctgcttcatggatcaaactcctcaagttttgcgcttttttctattggggaacaaaagtacctccaagcttctcttggctgtattctaccatgagctccagagcccccacgtcttcttaggggaaagttttattccacccactctggttcagtcagcttccttattgctgaatgaatctattggtgccaactatttcaacatcatggataacctcttgtatgttgtcctacaaggagaggagcccattgaaatacgctcaggtgtttccattcacttggccctcactgtgatggtttcagtcttagaaaaaggctgggaaatagtaatactcgaaagactaactaacttcttacagattggccaaaaccaaatcaggtttattcacgagatgcctggccatgaagagaccttaaaggccattgctgacagtagagcaaaaagaaagcgcaattgccctactgtgacttgcactagtcattatagaagagttggtcaacgtaggcctctcatgatggaaatgaactcacatagggcttcacccccaatgactgtggaaactatctcaaaagtgattgtcattgaaattggtgattcgccaacagtaaggagcactggaatgatttcatccttatcaagtaacaaattacagaatttggctcatcgagtcatcactgctcaacagactggggtactagagaatgttctgaatatgactatcggggccttactagttactcagtcaaagggagtcattggctatggaaatacaagcagttttaaaactgggaacttgatatatattcggccctatgcactttccatcctagtccagccttcagatggagaagtgggaaatgagcttccagtgcagccacaattggtatttttggatgagcagaatcgaagagtagagtccctgggacctccttcagagccatggacaatttcagcttccctggaaggagcatcagactcagtgctaaaagggtgcacccaggcagaaactcaagatggttatgttagcttctacaacttggcagtcttgatctctgggtcaaactggcactttatttttactgtcacttctcctccaggagtcaattttacagctcgatccaagccatttgctgtcttgcctgtgactaggaaggagaagtcgaccatcatcctggctgcttccctgtcctctgtggcctcatggctggctctgagctgtctggtgtgctgttggcttaaaagaagcaaaagcagaaaaacaaaacctgaagagattcctgaatcccagactaataatcaaaatattcatatccacatctcatccaaacgccgagaatcacaagggcccaaaaaagaagacactgtggtgggagaagatatgagaatgaaggtcatgctgggcaaggtgaaccagtgcccccaccagttgatgaatggagtgtccagaaggaaagttagccgccacattgtccgagaggaagaggctgctgtgcctgctcctggtactactggcatcacatcccatgggcacatctgtgctccaggtgctcctgctcagcaggtgtacctgcaagagactgggaactggaaggagggccaagagcagttgctcagataccagctggcaggccaaaatcagctgctgctgctatgcccagacttcagacaagagaggcagcagttgccagggcaaagtcggctgagtaagcaaagtggcagcttggggctttcccaagagaagaaagcctcctgcggggccactgaggcattctgccttcattcagtacacccggaaactattcaggagcaactgtgatcagggaagttgggggcatttggcctgaaaggcagaatgttcccagtatttctggataataagctggggaagtgaggactgtcctgctgggacaactaagaagagagaatgtggactctgaatccctttttcaactttaaaatggaaaacagtcatataaatgcttacagactgaaaaatgtctcatacatattttgcagctatcatgatcctagttcaatgctaggcaaataatggcacttgttaattatttaccagtttttaacttaagcctgattttaacaacttgataatggtgtaatactgacttataccagcaggggttattattaagcattctctggattgaccacccacaatgctttgagcttcttttatagaagggatcatgaaaaggtctggtcagctacagtttaattccacactgttacagaaaagcatttctttatcctgtagtagcatttgaagggacagttcaacaccctgctccctgatctgtcagagcttaccttccaaccacaaggcaacttcctggctttttacaagtggattttatttcatggtttaaattcaatcattattgagaacctacagtagtgtgagcgtatcaaatttgcacttcatgaggatttacacatgaaaattgatattctcatgggctttgctgagagtttagttaaggacaaagatgtaaaaatgccaaatttgggaaaggaaattttgtatgaccactgttctatttttcagtgattctctctgttagtagctgggtcacatttacaactggaaaagaactacattgggagatcagagaaagccaagtggccaagtcctttatcaaaaagctgctttttggagaagatgatgcataaagctgtgatactaaggagaggagagattatgtcatatgcaactgctctaggctgtgcagggggtttaaatggagatcagaacaaaggctcacctggtattgatacatttggtaaggttgttaaaggcaatttcaccaaattcacacatttgtacggggcccatttcttttcaaactgaagaatactttaaacagcctgactgtgtccttggctctggatccagaaggccttatgctccaagcatgtaaagaaaagatcgcaggaatgtggagagcttccaaaaagagattgctctcagattttcctgaaaatcctgaaaaccaggattttccaatctctacaatgttaaggggttgttgtgtagttgcattggaagagagaaaggaaacacactctttcattgctgaattctaaataatgatgccctgaattagttctatgagaagtactggcagacagctgttatgtctgcagggcatcaaggggcaggtgtgtctcaccctactaagaattggcagaaatgttttaacctcttctttaggcatctggtgagtattgcagatcttcaggctgtccctaaaaggaggtaggtagccttctctgtggtcactgtgttggatttggaagaaaatataagtagatgttaaggtcagtgctctccaggagatttcaatccaggctatctgtgttcagggaatgatttgcaagaagttggtttatagacgtttactctggaggcacaagctggctgccatgctgagtaagtcctctttgtagatgatgtattttgcttgggcaccaacagaattaaaaacgaaaaacaaaaaaaaactcgaatgacttaggcagaacatgccttccctagtttaattagtccctgttataaccagttatttatctttttttgtagattctcggtcttgaagtcatttgcctttgcaatctctactttagtatactcattggatcctcaaagagccgtaagctttttggaaaaaaacatttcagaagtgaaggcttttgaggtttataaaatggtagcagtcttagtccttgccctgcctcagtttacctgcacatgctttctttcatttcctcggattctttcaccactttttaagttttttttccacaggtatttttcctgagctctataccatgcatttagctgcctagtgagaatatccagtaggttatcctatagttactatgaagttaacacagcccaaaaacctacttctccttgtgtttttttccaactcaatgaatgacatcactgcactcagaccagaaatctagaagtcagtcatgactcttcattctatttcgcccttcacaaagagttagctgccagctctgttatttctgccccttctttacccttcttccaatttttattatcttcttatttatcctctatgtgtcacaagaccagtctttctgggaggcatgttttatcctatccctctgcgtaggaataaccataattatcttactaattccatcccagaaaagcctgtgatccctgaggccagaattgactctttgggcctaaatagcagctataaacatcttcagtaacttgccaggctctagcatgtggcatggaattttggcatctagctaaaattcctcaacccatagttaagctactcctctttctcctaaaaaaaaaaaaaaatgagagaattagggaaacaccaaaagcaaagagagcagctctatgttcattcatgtctggagatgagccaatttgagcaccactgtaggccaactctaaatttattcagatcgttaacatgggtaacccagcaaatatttcccagcagtgacaatctacaccctttatctaaataaatattgagatgtgcttttttcctgtgttagttcaaagaatctcttcttgcctcccattgctgattttctgtattgatggactcatttctctcaagagattggacaagctaaaattctagagagttcaaaagtgtttgaaagtacattttaagtgttctcaccacaaaaaatgctagtgtgtgaggtgatacatatgttaattagttcaactgatccattccacaatgtatacatatttcaaactatcgagttgtacatgataaatatatacaatttttatttgtcaaataaagaacatctataaatatttatagatttcaaaattgagaaagaagtatatatggagccacggttgttttgaccatttctccatgctttttgtttggggagggggacattttttggggggcagggactgtgttcagggaaagtacctgaccaacagaacttcaagtctcttccagagtgcgagactcagcttatctgatcaaggtgaacttgcccttcaatagacttgcccttgttactgcccagtgaggccaccaaggaccaagaacagttgagctctctcagggccttcccctttcaacaatttagttgaatgactcccttccatctatcagtcttactccaaatatatgaaattactatacattgaaatgcctgcaaactatatgcaaaaatgagtatgaggaaatcaaatgtaaatcatatgcaaatattattcaaccaagcttctataaaattgtacgtgtcaataacagtaaagaattttaattaattctgtcatttaaaattcatgcattccatattttgctttcagaacttatagtctatgccaattttgaaaaaactataagcacaaggaattaaatactattgagtatagaactgttgatttcaacatacactatagcactttgactaattacagatatatttgatagaaaagtcacatttctacaaggtaattttcaaaaagaaataaaacatttctgtaaacttaaatgtggattaagtggcagaatacagagatttgaatgtttacaaat

SEQ ID NO: 304447 - DNA, 12225 bp, Artificial Sequence
  derived and/or modified sequence
atgactgcctggctcataagcctcatgagcatcgaggtcctactgttagcagttcggcatctcagccttcatattgaacctgaagagggatccctcgcaggcggaacatggatcacagtaatttttgacggattggagttgggagtgctgtatcctaacaacgggtctcagcttgagatccacttggtgaacgtaaatatggtggtgccagccctccggtcagtgccttgcgatgtatttcccgtgtttctggatcttcctgtcgttacttgtcggacacgctcggtattgagcgaggcccacgagggcctgtacttccttgaggcgtactttgggggtcagctcgtctccagccccaacccgggtcctagggatagctgtacattcaagttctccaaggctcagaccccaattgtccaccaggtttaccctccctctggtgtgccagggaaattaattcatgtctatgggtggatcatcactggacgtctggagacatttgatttcgatgccgaatacatagatagccctgttattctcgaagcccaaggcgacaagtgggtgacaccttgctcattaattaataggcagatgggctcctgctatcccattcaggaagatcacggccttggcacactgcagtgtcatgtggagggcgactacattgggtcacagaacgttagcttcagcgttttcaacaagggaaaaagcatggtgcataagaaggcctggcttataagcgctaagcaggacctgttcctataccagacacactcagagatcctttccgtgtttccagaaacaggctctctaggcggtcgcacaaatattaccatcactggggacttcttcgacaacagtgctcaagtcacaatagcgggaattccttgtgacatccgtcacgtttctccacgaaaaatagaatgtaccacccgggcacccggtaaggacgttcgcctgaccaccccccagcctgggaatagaggtctcctctttgaggtgggggacgccgttgaaggcctggaactgacagaggccacaccgggttataggtggcaaattgttcctaatgcctcatcaccttttggcttctggtcgcaggaaggacaaccattcagagctaggttgagtggcttcttcgttgcccctgagacaaataactacacattttggattcaggcggactcccaggctagccttcatttttcttggagcgaggagccgaggaccaaagtgaaagttgctagtatctccgtggggacagccgattggttcgatagttgggagcaaaaccgagatgagggcacatggcagcagaaaacaccaaagctcgaactgctggggggtgcgatgtactacttggaagccgaacatcacggaattgctccatccagaggaatgcgaataggagtgcaaatacacaatacatggcttaatcctgatgtggtaaccacctatcttcgggaaaagcaccagattcgtgtgcgcgcacagagactgccggaggtgcaggtgttgaacgtgtccggccgtgggaacttcttcctgacttgggataacgtctcttcacaaccaatcccggctaacgcgactgcccacctgatccagacaacaatcgaggagcttttggctgtcaagtgcaagcttgagcccctgtggagcaacattctgctgcgtctaggctttgaaagaggccctgaggtttccaattccgatggcgatctgacgtccggcacagaacctttctgtggtcgcttctctttgcgacagccgagacacctcgtcctgactccacctgccgctcagaagggctacaggctggaccagtatacccacttgtgcttggcttacaaagggcatatgaataagatattgaagatgatcgtgagctttactatcgggtttcaaaacatggtgaagaacactacatgcgactggagccttactcggacgtcacctgaatcatggcagtttgattgtactgacctgtgggaaacttgcgtccgctgttttggcgatctgcagccgccaccagccaacagcccggtcttggttcatcaaatcaatctgttacctctggcccaggaaacgggcctgttctacgtagatgaaatcatcattgctgacaccaacgtaaccgtgagtcaagctgactccggaacagctcggccagggggtaaccttgttgaaagcgttagcgtagtcggcagtccacccgtttactccgtgaccagctggcttgccggttgtgggactgagctgccactaattaccgcgcgatcggtccctaccgaaggcaccgaagaaggaagcggcctagtgttagtcaccacacagaggcggcagagaacaagtcccccattggggggtcatttccgaatacagttgcccaacactgttatcagtgatgtccctgtccagatcagtgctcaccatcttcaccaactgctgcagaacaatgctgacgattttaccagtcgatatctgaacgcttccgacttcaccgtgaaagaggacctgtacacctgttacgaacatgtttggaccttgtcttggagtacccagattggcgatttaccgaactttatccgggtgagcgacgaaaacctcacaggcgtcaacccagcggcagccacccgcgtggtgtatgacggcggagtcttccttggcccaattttcggggatatgcttgccaccgccaaccagcacacccaggtagttgtgcgcgtgaatgacgtgcccgcacattgtcccggtagctgtagcttccaatacctgcagggctctaccccatgcgtacattccgtgtggtactcaattgatggtgacatcaacctgatgatttatatcaccggtacgggattctctggtgactctcagtttctgcaagttaccgtgaataaaacctcctgcaaggtcattttttccaaccagactaatgtcgtttgtcagacagatttgctacccgtggggatgcatcgtatcctgatgctcgtcaggccatccggcttggctatctccgctacaggcgaggatttattcctcaacgtgaaacccagattggacatggtggaacctagtcgcgctgcagacattggcggactctgggccacgatcagaggaagttccctggaaggagtttccctgattctttttgggtcctacagctgtgctatcaacgttgcaactagcaactccagcagaatccagtgcaaggtcccgcctagagggaaagatgggaggatcgtgaatgtgaccgtgatcagaggggactacagtgccgtgcttcctcgtgcatttacctatgtgtcttcactgaaccctgtgatcgttaccctcagtcggaatatatccaatatagcagggggagagacactggtaataggtgttgctaggcttatgaattacaccgatttggacgttgaagtacatgtgcaggacgcactcgctcctgtgcacactcagagtgcatgggggctggaagtggcccttccgcctctgccggctgggctgcatcggatttccgtatctataaacggggtgagcatccattcccaaggcgtcgatctgcatatacaatatttaaccgaagtcttttccatcgagccatgctgtggttcacttctaggcggtacgattctgtcaatcagcgggattggattcagtcgcgacccggcactggtgtgggtgctcgtcgggaatcggtcctgtgatatcgtgaacctgaccgaagcctcaatatggtgtgaaaccttgccagccccacagatccccgacgcaggcgcacccacagtgccagctgcagtggaagtctgggccggaaaccgctttttcgcgcgaggcccttctccttcactcgtgggtaagggttttaccttcatgtatgaagcagcagcaacacctgttgtgaccgctatgcagggagagatcacaaactcgtccctatctctgcacgtggggggttcaaatttaagcaattctgtaatcctactggggaaccttaactgcgatgtggagactcagtcttttcaaggaaatgttagcctgagtgggtgcagtatccctcttcacagtttggaggcagggatttacccacttcaggtgcggcagaagcagatgggcttcgcaaacatgtcagtagtgctgcagcagttcgccgtgatgccccgaataatggccatctttcccagccaggggagtgcctgcgggggaaccattctcactgtaagggggcttctcctgaactcccgaagaaggtcagtccgggtagatctgagcggcccttttacatgtgttatccttagcttgggcgaccacactatcctttgccaggtgagcctggaaggagaccccttgccaggcgcttctttctcgctgaacgttactgtcctggtcaatggccttaccagtgagtgtcaaggaaactgcacgttatttatcagagaggaggctagtcccgtgatggacgctctgtctaccaatacctctggctcattgactactgttctaatcagggggcagagactggccacaactgcagatgagcccatggtgttcgttgacgatcagctgccttgcaacgtcactttttttaatgcatctcatgtagtgtgtcagactcgtgacttagcccctggtcctcattacctgagtgtgttttatactcggaacgggtacgcttgcagtgggaacgtaagcagacatttctacatcatgccccaggtattccattactttcctaagaattttagtttgcatggagggtccctgctgaccattgaaggtactggcctgaggggacaaaacactacatccgtttatattgaccaacagacttgcctgaccgtcaatatcggcgcagagttaatacgatgcatcgttccaacaggcaacggcagtgtcgctctcgagattgaggtggacggcttatggtatcatatcggagtgatcggctataataaggcgtttacaccggagcttatcagtatctcccaatccgacgacattctgaccttcgcagtagcacagatcagtggcgctgccaatattgacattttcatcgggatgtccccctgtgtgggcgtgtctggcaaccacacagtgctacagtgcgtggtgcctagccttcccgctggagagtatcatgtacgagggtatgattgtatccgcggttgggccagctccgcccttgtattcaccagtcgcgtgattattaccgctgtcactgagaattttggctgcttgggcggtagactagtgcacgtgttcggcgcaggattctctccaggtaacgtaagtgctgcagtgtgcggagccccttgccgagtgttggcaaacgctaccgtctccgccttctcctgcctggttttaccacttgacgtgagtctcgctttcctgtgcgggctgaagagggaggaggactcctgtgaagctgccagacacacttatgtgcagtgtgaccttacggtggccatggccaccgaacagctgctcgagtcctggccatacctctacatctgtgaggagtccagtcaatgtctgttcgtacctgaccattgggccgaaagcatgttcccaagcttcagtggccttttcatcagccccaagttggaaagagacgaagttctgatctacaactcttcttgcaacatcacgatggagaccgaagccgaaatggaatgcgaaactcccaatcaacctattacagtgaagattaccgagataaggaaaagatggggacagaacacccaaggcaacttcagcctgcagttctgcagacgatggtctcgaacccactcatggttccccgagagactgcctcaagatggcgacaacgtgacggttgagaatgggcagcttctcctccttgataccaacacctctattttaaatttgcttcatatcaaagggggtaagctcatatttatggcccctggtcccatcgagctgcgcgcacacgcaattctggtgtctgacggtggggaacttcggatcgggtcggaggacaagcccttccagggtcgtgctcagatcacactttacgggtcctcatacagtaccccattcttcccctacggggtcaagtttctcgcagttcggaatggcaccctgagtctccatgggtccctgcctgaggtcatcgtcacatgtctgcgggcaacagcccacgcgttagatacagtcctcgcactggaagacgcggtagactggaacccgggagacgaggttgtgatcatatcgggcaccggggtgaagggcgctaaacccatggaggagatagtaaccgttgaaactgtccaggacactgatctatatctcaaatcccctctgcgctattcccataacttcactgaaaactgggtggctggggagcaccacatactgaaggcaacggtggccctcttgagccggtccattaccattcagggtaatctgactaatgagagagaaaagctgctcgtttcctgtcaggaagccaacgccccagagggtaacttacagcactgtctgtacagcatgtcggaaaaaatgcttggcagccgggacatgggagcaagagtcatcgttcagtctttccccgaggagccctcgcaggtgcagctcaagggcgtacagttccaggtgcttggccaagccttccataaacacctgagctctcttacactggtgggggcaatgcgcgagagctttatacagggctgtacagtgcgcaattccttctcgagaggcttgagcatgtgtggcactcttgggctcaaagttgactcaaacgtcttctacaatattctgggtcatgcactgcttgtgggcacctgtacagaaatgagatacatatcatgggaggcaatacacggcaggaaggacgactggagtggacacgggaatatcatccgaaacaacgtgattatccaggtgtctggcgctgaggggttgagtaaccctgagatgcttactccatcagggatctacatctgtagccctactaacgtcatcgaaggcaacagagtgtgtggagctggatatggatacttctttcaccttatgactaaccaaacaagtcaggccccactcttgagcttcactcagaatattgctcactcttgcaccagatatgggttgtttgtttatcccaagtttcagccaccgtgggacaatgtgaccggcactaccctcttccagtccttcaccgtctgggagagtgccggtggtgcacagattttccggagcagcaatcttagactcaaaaatttcaaagtatactcttgccgcgacttcggcattgacgtgctggaatcggacgctaacacatctgttactgattctctgctattgggacatttcgcacacaaggggagtctttgcatgtccagtggtatcaaaactcccaagagatgggagctgatggtatctaatactacatttgtgaactttgacctcattaattgtgtcgctatcaggacatgctctgattgctcccaaggacagggcggtttcacagtgaaaacctcccagctgaaatttactaatagcagcaacctggtggcattcccttttcctcatgcagccattctcgaggacctcgatggatccttatcgggaaagaacaggtcacacatcttagcctcaatggaaactctttctgcctcatgtcttgtgaactccagctttgggcgagttgtacacggaagcgcctgtggagggggtgtgctgttccacaggatgtctatcggccttgccaataccccagaggtcagctacgatttgacgatgaccgacagcaggaataagaccacaactgtgaattatgtcagagacacactgagtaatccgcgaggttggatggctctgctactcgaccaagagacctactctctgcagtccgaaaacttatggattaatagatccctgcagtattcggcgacattcgataactttgctccaggtaactacttgctcctggtacatactgaccttccaccgtatcccgatattctcctccggtgtggctctcgggtaggcctgagcttcccatttctccctagccctgggcagaatcagggctgtgattggttcttcaacagccagctcagacagcttacttaccttgtgtcaggggaagggcaagtccaggtcattctgcgagtgaaagagggcatgccccctacaatttctgcatcaacgtccgccccagaaagcgcgctcaaatggtcactgcccgagacgtggcagggagtggaagagggctgggggggttacaataatacgattcccggaccaggcgacgacgtcttaatcttgcctaacagaaccgttctagtggacacagacttgcccttcttcaaaggtttatacgttatggggacactggattttcccgtggaccgtagcaacgtcctgagtgtggcatgtatggtcatcgctggtggagaattgaaggtaggcacactggagaacccgttggaaaaagaacaaaagctcctgattctgttgcgcgcttctgaaggggtgttctgtgaccgtatgaacgggatccacatcgatccgggaacgatcggggtgtacggcaaggtgcacctgtactccgcttaccccaagaattcatggactcacctcggggcagacattgcatccggtaacgaacggatcattgtcgaggacgccgttgattggcggccacatgacaagatagtcctgagcagctcttcttacgaaccacatgaggctgaagtgctgacagtgaaggaagtgaaagggcaccacgttcgcatttatgagagactgaagcaccgccacattggaagcgtgcacgtgaccgaagacggcaggcacatccgcctggccgctgaagtggggctgcttactcgcaatattcagattcaacctgacgtctcctgtcgcggtaggttattcgtggggtcatttcgtaaatcaagtcgagaggaattttcgggtgtgctccaactgcttaatgtcgagattcagaatttcggctccccactttactcgagcgttgagtttagcaacgtgtcagccggatcctggatcatatcttcaacactacaccagtcctgcggagggggaattcacgccgctgcctcccacggggtgttgctgaacgacaacattgtctttggcactgccggacatggcattgatctggaagggcaagcttatacggttaccaacaacctggtggtgctcatgactcagcctgcttggtctaccatctgggtggccggaataaaggtcaatcaggtgaaggatattaacctccacggcaatgtggtggccggatcagagaggctgggatttcacattcggggacacaagtgctcaagctgtgaactactatggtccgacaatgttgcccatagttctctgcacggcctgcacttgtacaaggagagtgggctggataattgtacccgtatttccgggttcttggccttcaaaaattttgactacggcgctatgttgcacgtggaaaacagtgtggagatcgagaacattaccctggttgataacacaatcgggctactggctgtggtctatgtgttcagtgcaccacagaatagtgtgaaaaaagtacagatagtgctgcgcaacagcgtcattgtcgccaccagctccagctttgattgtatccaggataaggttaagccccacagcgcaaacctgacctccaccgacagggccccttcaaatccacgtggaggcagaatcgggatcctgtggcctgtctttaccagtgagcctaatcaatggccacaggagccatggcacaaagtgcgaaacgaccatagcatttcaggaatcatgaagttgcaggacgtcaccttctcttctttcgtgaagagttgttatagtgacgatttggacgtatgtatcttgccaaacgccgagaacagcggaataatgcatccgatcaccgcggagcggacccgtatgttgaagatcaaagacaaaaacaagttctactttcccagcctgcagccacgcaaagatctgggaaaggtggtgtgtccagaactggattgcgcttcgccgcgaaagtacctgtttaaggacctggatggtcgggctctcggactgcccccacctgttagcgtgtttccaaagacagaggctgaatggacagctagtttcttcaacgcagggacatttcgcgaggagcagaaatgtacttaccagttcctgatgcagggatttatttgcaagcagaccgaccaagtggtgctgatactggactctgcagatgcaatatgggccattcagaagctatatcctgtggtgtccgttacgtccggattcgtcgatgtctttagcagtgtgaacgccaacatcccttgttctactagtgggtcagtctccaccttctatagcatcctgcctattcgccagattacaaaggtatgtttcatggaccaaactcctcaggtcttgcgctttttcctgctgggaaacaagagtacctcaaaactgttgttagccgtgttttatcacgaactgcagtcaccacatgtgttcctcggagaatcctttatcccacctaccctcgtccagtcggccagcttactgctgaacgagagtatcggagccaactattttaacatcatggataatctgctctacgtggtgcttcagggggaggagcctatagaaatccgaagcggcgtgagcattcatctagccttaaccgtcatggtttcagtgctggagaagggatgggaaatcgtgattctggagcgactgacaaattttctgcagatcggacagaaccagatccgcttcatccacgagatgcctggtcacgaggaaaccttaaaagccatcgccgacagccgagctaaaaggaaacgcaactgtccgaccgtgacctgtacctctcactatagacgcgttggccagcgcaggcccctgatgatggaaatgaactcacatcgcgcatcacccccaatgaccgtggagacaatttctaaggttatcgtaattgagataggcgatagtcccactgtccgatccactggcatgatcagctccctatccagcaataaactccagaacctggcacacagggtgatcactgctcaacagacaggcgtcttggagaacgtgctgaacatgaccattggtgccctgcttgtgacgcagagcaaaggcgtcatagggtacggcaatacctcatccttcaagactggaaaccttatatatattaggccctacgccctgtcaatcctggtgcaaccttctgacggcgaagtggggaatgagctgcctgtgcagccacagttagtattcttggatgagcagaatagacgggtggaatctcttggccctccaagcgagccctggacaatttctgcctcactggaaggggcttcagacagtgtactaaaggggtgcactcaggcagaaacccaggacggatatgtgtccttctataacctggctgtccttatatcaggttccaactggcacttcatattcacagtgacgagcccccctggcgtgaattttaccgcgcgatccaagccctttgctgtattgcccgtaacccgaaaagaaaagagcaccataatcctcgctgcatccctttcatccgtcgcctcgtggcttgccctttcttgcctggtctgctgctggctgaaacggagtaaatctcggaaaaccaagcccgaggaaattccggaatcacaaaccaacaatcagaatattcacattcacatcagctcgaagcggagagagagccagggaccgaagaaagaggacaccgtggttggagaagatatgaggatgaaggtgatgctcggtaaggtgaatcaatgcccacatcagctgatgaatggagtttctcggagaaaggtgtctaggcatatcgtccgggaggaagaggctgccgtgccagcccctgggaccactgggatcacttcccacggacatatctgcgctcccggagctcccgctcagcaggtgtatctccaggagactggaaactggaaggagggtcaggaacagctgttacgataccagctggctggccaaaatcaactcctcctgctgtgccctgactttaggcaggaacgacagcagctgcccggtcagtcaagactctcaaagcagtcgggcagcctcggcttatctcaggaaaagaaggcatcatgcggagctactgaggcattctgcctccactccgtgcaccccgagaccattcaggaacaattgtaa

SEQ ID NO: 304448 - DNA, 12225 bp, Artificial Sequence
  derived and/or modified sequence
atgaccgcctggctgatcagcctgatgagcatcgaggtgctgctgctggccgtgagacacctgagcctgcacatcgagcccgaggagggcagcctggccggcggcacctggatcaccgtgatcttcgacggcctggagctgggcgtgctgtaccccaacaacggcagccagctggagatccacctggtgaacgtgaacatggtggtgcccgccctgagaagcgtgccctgcgacgtgttccccgtgttcctggacctgcccgtggtgacctgcagaaccagaagcgtgctgagcgaggcccacgagggcctgtacttcctggaggcctacttcggcggccagctggtgagcagccccaaccccggccccagagacagctgcaccttcaagttcagcaaggcccagacccccatcgtgcaccaggtgtacccccccagcggcgtgcccggcaagctgatccacgtgtacggctggatcatcaccggcagactggagaccttcgacttcgacgccgagtacatcgacagccccgtgatcctggaggcccagggcgacaagtgggtgaccccctgcagcctgatcaacagacagatgggcagctgctaccccatccaggaggaccacggcctgggcaccctgcagtgccacgtggagggcgactacatcggcagccagaacgtgagcttcagcgtgttcaacaagggcaagagcatggtgcacaagaaggcctggctgatcagcgccaagcaggacctgttcctgtaccagacccacagcgagatcctgagcgtgttccccgagaccggcagcctgggcggcagaaccaacatcaccatcaccggcgacttcttcgacaacagcgcccaggtgaccatcgccggcatcccctgcgacatcagacacgtgagccccagaaagatcgagtgcaccaccagagcccccggcaaggacgtgagactgaccaccccccagcccggcaacagaggcctgctgttcgaggtgggcgacgccgtggagggcctggagctgaccgaggccacccccggctacagatggcagatcgtgcccaacgccagcagccccttcggcttctggagccaggagggccagcccttcagagccagactgagcggcttcttcgtggcccccgagaccaacaactacaccttctggatccaggccgacagccaggccagcctgcacttcagctggagcgaggagcccagaaccaaggtgaaggtggccagcatcagcgtgggcaccgccgactggttcgacagctgggagcagaacagagacgagggcacctggcagcagaagacccccaagctggagctgctgggcggcgccatgtactacctggaggccgagcaccacggcatcgcccccagcagaggcatgagaatcggcgtgcagatccacaacacctggctgaaccccgacgtggtgaccacctacctgagagagaagcaccagatcagagtgagagcccagagactgcccgaggtgcaggtgctgaacgtgagcggcagaggcaacttcttcctgacctgggacaacgtgagcagccagcccatccccgccaacgccaccgcccacctgatccagaccaccatcgaggagctgctggccgtgaagtgcaagctggagcccctgtggagcaacatcctgctgagactgggcttcgagagaggccccgaggtgagcaacagcgacggcgacctgaccagcggcaccgagcccttctgcggcagattcagcctgagacagcccagacacctggtgctgaccccccccgccgcccagaagggctacagactggaccagtacacccacctgtgcctggcctacaagggccacatgaacaagatcctgaagatgatcgtgagcttcaccatcggcttccagaacatggtgaagaacaccacctgcgactggagcctgaccagaaccagccccgagagctggcagttcgactgcaccgacctgtgggagacctgcgtgagatgcttcggcgacctgcagcccccccccgccaacagccccgtgctggtgcaccagatcaacctgctgcccctggcccaggagaccggcctgttctacgtggacgagatcatcatcgccgacaccaacgtgaccgtgagccaggccgacagcggcaccgccagacccggcggcaacctggtggagagcgtgagcgtggtgggcagcccccccgtgtacagcgtgaccagctggctggccggctgcggcaccgagctgcccctgatcaccgccagaagcgtgcccaccgagggcaccgaggagggcagcggcctggtgctggtgaccacccagagaagacagagaaccagcccccccctgggcggccacttcagaatccagctgcccaacaccgtgatcagcgacgtgcccgtgcagatcagcgcccaccacctgcaccagctgctgcagaacaacgccgacgacttcaccagcagatacctgaacgccagcgacttcaccgtgaaggaggacctgtacacctgctacgagcacgtgtggaccctgagctggagcacccagatcggcgacctgcccaacttcatcagagtgagcgacgagaacctgaccggcgtgaaccccgccgccgccaccagagtggtgtacgacggcggcgtgttcctgggccccatcttcggcgacatgctggccaccgccaaccagcacacccaggtggtggtgagagtgaacgacgtgcccgcccactgccccggcagctgcagcttccagtacctgcagggcagcaccccctgcgtgcacagcgtgtggtacagcatcgacggcgacatcaacctgatgatctacatcaccggcaccggcttcagcggcgacagccagttcctgcaggtgaccgtgaacaagaccagctgcaaggtgatcttcagcaaccagaccaacgtggtgtgccagaccgacctgctgcccgtgggcatgcacagaatcctgatgctggtgagacccagcggcctggccatcagcgccaccggcgaggacctgttcctgaacgtgaagcccagactggacatggtggagcccagcagagccgccgacatcggcggcctgtgggccaccatcagaggcagcagcctggagggcgtgagcctgatcctgttcggcagctacagctgcgccatcaacgtggccaccagcaacagcagcagaatccagtgcaaggtgccccccagaggcaaggacggcagaatcgtgaacgtgaccgtgatcagaggcgactacagcgccgtgctgcccagagccttcacctacgtgagcagcctgaaccccgtgatcgtgaccctgagcagaaacatcagcaacatcgccggcggcgagaccctggtgatcggcgtggccagactgatgaactacaccgacctggacgtggaggtgcacgtgcaggacgccctggcccccgtgcacacccagagcgcctggggcctggaggtggccctgccccccctgcccgccggcctgcacagaatcagcgtgagcatcaacggcgtgagcatccacagccagggcgtggacctgcacatccagtacctgaccgaggtgttcagcatcgagccctgctgcggcagcctgctgggcggcaccatcctgagcatcagcggcatcggcttcagcagagaccccgccctggtgtgggtgctggtgggcaacagaagctgcgacatcgtgaacctgaccgaggccagcatctggtgcgagaccctgcccgccccccagatccccgacgccggcgcccccaccgtgcccgccgccgtggaggtgtgggccggcaacagattcttcgccagaggccccagccccagcctggtgggcaagggcttcaccttcatgtacgaggccgccgccacccccgtggtgaccgccatgcagggcgagatcaccaacagcagcctgagcctgcacgtgggcggcagcaacctgagcaacagcgtgatcctgctgggcaacctgaactgcgacgtggagacccagagcttccagggcaacgtgagcctgagcggctgcagcatccccctgcacagcctggaggccggcatctaccccctgcaggtgagacagaagcagatgggcttcgccaacatgagcgtggtgctgcagcagttcgccgtgatgcccagaatcatggccatcttccccagccagggcagcgcctgcggcggcaccatcctgaccgtgagaggcctgctgctgaacagcagaagaagaagcgtgagagtggacctgagcggccccttcacctgcgtgatcctgagcctgggcgaccacaccatcctgtgccaggtgagcctggagggcgaccccctgcccggcgccagcttcagcctgaacgtgaccgtgctggtgaacggcctgaccagcgagtgccagggcaactgcaccctgttcatcagagaggaggccagccccgtgatggacgccctgagcaccaacaccagcggcagcctgaccaccgtgctgatcagaggccagagactggccaccaccgccgacgagcccatggtgttcgtggacgaccagctgccctgcaacgtgaccttcttcaacgccagccacgtggtgtgccagaccagagacctggcccccggcccccactacctgagcgtgttctacaccagaaacggctacgcctgcagcggcaacgtgagcagacacttctacatcatgccccaggtgttccactacttccccaagaacttcagcctgcacggcggcagcctgctgaccatcgagggcaccggcctgagaggccagaacaccaccagcgtgtacatcgaccagcagacctgcctgaccgtgaacatcggcgccgagctgatcagatgcatcgtgcccaccggcaacggcagcgtggccctggagatcgaggtggacggcctgtggtaccacatcggcgtgatcggctacaacaaggccttcacccccgagctgatcagcatcagccagagcgacgacatcctgaccttcgccgtggcccagatcagcggcgccgccaacatcgacatcttcatcggcatgagcccctgcgtgggcgtgagcggcaaccacaccgtgctgcagtgcgtggtgcccagcctgcccgccggcgagtaccacgtgagaggctacgactgcatcagaggctgggccagcagcgccctggtgttcaccagcagagtgatcatcaccgccgtgaccgagaacttcggctgcctgggcggcagactggtgcacgtgttcggcgccggcttcagccccggcaacgtgagcgccgccgtgtgcggcgccccctgcagagtgctggccaacgccaccgtgagcgccttcagctgcctggtgctgcccctggacgtgagcctggccttcctgtgcggcctgaagagagaggaggacagctgcgaggccgccagacacacctacgtgcagtgcgacctgaccgtggccatggccaccgagcagctgctggagagctggccctacctgtacatctgcgaggagagcagccagtgcctgttcgtgcccgaccactgggccgagagcatgttccccagcttcagcggcctgttcatcagccccaagctggagagagacgaggtgctgatctacaacagcagctgcaacatcaccatggagaccgaggccgagatggagtgcgagacccccaaccagcccatcaccgtgaagatcaccgagatcagaaagagatggggccagaacacccagggcaacttcagcctgcagttctgcagaagatggagcagaacccacagctggttccccgagagactgccccaggacggcgacaacgtgaccgtggagaacggccagctgctgctgctggacaccaacaccagcatcctgaacctgctgcacatcaagggcggcaagctgatcttcatggcccccggccccatcgagctgagagcccacgccatcctggtgagcgacggcggcgagctgagaatcggcagcgaggacaagcccttccagggcagagcccagatcaccctgtacggcagcagctacagcacccccttcttcccctacggcgtgaagttcctggccgtgagaaacggcaccctgagcctgcacggcagcctgcccgaggtgatcgtgacctgcctgagagccaccgcccacgccctggacaccgtgctggccctggaggacgccgtggactggaaccccggcgacgaggtggtgatcatcagcggcaccggcgtgaagggcgccaagcccatggaggagatcgtgaccgtggagaccgtgcaggacaccgacctgtacctgaagagccccctgagatacagccacaacttcaccgagaactgggtggccggcgagcaccacatcctgaaggccaccgtggccctgctgagcagaagcatcaccatccagggcaacctgaccaacgagagagagaagctgctggtgagctgccaggaggccaacgcccccgagggcaacctgcagcactgcctgtacagcatgagcgagaagatgctgggcagcagagacatgggcgccagagtgatcgtgcagagcttccccgaggagcccagccaggtgcagctgaagggcgtgcagttccaggtgctgggccaggccttccacaagcacctgagcagcctgaccctggtgggcgccatgagagagagcttcatccagggctgcaccgtgagaaacagcttcagcagaggcctgagcatgtgcggcaccctgggcctgaaggtggacagcaacgtgttctacaacatcctgggccacgccctgctggtgggcacctgcaccgagatgagatacatcagctgggaggccatccacggcagaaaggacgactggagcggccacggcaacatcatcagaaacaacgtgatcatccaggtgagcggcgccgagggcctgagcaaccccgagatgctgacccccagcggcatctacatctgcagccccaccaacgtgatcgagggcaacagagtgtgcggcgccggctacggctacttcttccacctgatgaccaaccagaccagccaggcccccctgctgagcttcacccagaacatcgcccacagctgcaccagatacggcctgttcgtgtaccccaagttccagcccccctgggacaacgtgaccggcaccaccctgttccagagcttcaccgtgtgggagagcgccggcggcgcccagatcttcagaagcagcaacctgagactgaagaacttcaaggtgtacagctgcagagacttcggcatcgacgtgctggagagcgacgccaacaccagcgtgaccgacagcctgctgctgggccacttcgcccacaagggcagcctgtgcatgagcagcggcatcaagacccccaagagatgggagctgatggtgagcaacaccaccttcgtgaacttcgacctgatcaactgcgtggccatcagaacctgcagcgactgcagccagggccagggcggcttcaccgtgaagaccagccagctgaagttcaccaacagcagcaacctggtggccttccccttcccccacgccgccatcctggaggacctggacggcagcctgagcggcaagaacagaagccacatcctggccagcatggagaccctgagcgccagctgcctggtgaacagcagcttcggcagagtggtgcacggcagcgcctgcggcggcggcgtgctgttccacagaatgagcatcggcctggccaacacccccgaggtgagctacgacctgaccatgaccgacagcagaaacaagaccaccaccgtgaactacgtgagagacaccctgagcaaccccagaggctggatggccctgctgctggaccaggagacctacagcctgcagagcgagaacctgtggatcaacagaagcctgcagtacagcgccaccttcgacaacttcgcccccggcaactacctgctgctggtgcacaccgacctgcccccctaccccgacatcctgctgagatgcggcagcagagtgggcctgagcttccccttcctgcccagccccggccagaaccagggctgcgactggttcttcaacagccagctgagacagctgacctacctggtgagcggcgagggccaggtgcaggtgatcctgagagtgaaggagggcatgccccccaccatcagcgccagcaccagcgcccccgagagcgccctgaagtggagcctgcccgagacctggcagggcgtggaggagggctggggcggctacaacaacaccatccccggccccggcgacgacgtgctgatcctgcccaacagaaccgtgctggtggacaccgacctgcccttcttcaagggcctgtacgtgatgggcaccctggacttccccgtggacagaagcaacgtgctgagcgtggcctgcatggtgatcgccggcggcgagctgaaggtgggcaccctggagaaccccctggagaaggagcagaagctgctgatcctgctgagagccagcgagggcgtgttctgcgacagaatgaacggcatccacatcgaccccggcaccatcggcgtgtacggcaaggtgcacctgtacagcgcctaccccaagaacagctggacccacctgggcgccgacatcgccagcggcaacgagagaatcatcgtggaggacgccgtggactggagaccccacgacaagatcgtgctgagcagcagcagctacgagccccacgaggccgaggtgctgaccgtgaaggaggtgaagggccaccacgtgagaatctacgagagactgaagcacagacacatcggcagcgtgcacgtgaccgaggacggcagacacatcagactggccgccgaggtgggcctgctgaccagaaacatccagatccagcccgacgtgagctgcagaggcagactgttcgtgggcagcttcagaaagagcagcagagaggagttcagcggcgtgctgcagctgctgaacgtggagatccagaacttcggcagccccctgtacagcagcgtggagttcagcaacgtgagcgccggcagctggatcatcagcagcaccctgcaccagagctgcggcggcggcatccacgccgccgccagccacggcgtgctgctgaacgacaacatcgtgttcggcaccgccggccacggcatcgacctggagggccaggcctacaccgtgaccaacaacctggtggtgctgatgacccagcccgcctggagcaccatctgggtggccggcatcaaggtgaaccaggtgaaggacatcaacctgcacggcaacgtggtggccggcagcgagagactgggcttccacatcagaggccacaagtgcagcagctgcgagctgctgtggagcgacaacgtggcccacagcagcctgcacggcctgcacctgtacaaggagagcggcctggacaactgcaccagaatcagcggcttcctggccttcaagaacttcgactacggcgccatgctgcacgtggagaacagcgtggagatcgagaacatcaccctggtggacaacaccatcggcctgctggccgtggtgtacgtgttcagcgccccccagaacagcgtgaagaaggtgcagatcgtgctgagaaacagcgtgatcgtggccaccagcagcagcttcgactgcatccaggacaaggtgaagccccacagcgccaacctgaccagcaccgacagagcccccagcaaccccagaggcggcagaatcggcatcctgtggcccgtgttcaccagcgagcccaaccagtggccccaggagccctggcacaaggtgagaaacgaccacagcatcagcggcatcatgaagctgcaggacgtgaccttcagcagcttcgtgaagagctgctacagcgacgacctggacgtgtgcatcctgcccaacgccgagaacagcggcatcatgcaccccatcaccgccgagagaaccagaatgctgaagatcaaggacaagaacaagttctacttccccagcctgcagcccagaaaggacctgggcaaggtggtgtgccccgagctggactgcgccagccccagaaagtacctgttcaaggacctggacggcagagccctgggcctgcccccccccgtgagcgtgttccccaagaccgaggccgagtggaccgccagcttcttcaacgccggcaccttcagagaggagcagaagtgcacctaccagttcctgatgcagggcttcatctgcaagcagaccgaccaggtggtgctgatcctggacagcgccgacgccatctgggccatccagaagctgtaccccgtggtgagcgtgaccagcggcttcgtggacgtgttcagcagcgtgaacgccaacatcccctgcagcaccagcggcagcgtgagcaccttctacagcatcctgcccatcagacagatcaccaaggtgtgcttcatggaccagaccccccaggtgctgagattcttcctgctgggcaacaagagcaccagcaagctgctgctggccgtgttctaccacgagctgcagagcccccacgtgttcctgggcgagagcttcatcccccccaccctggtgcagagcgccagcctgctgctgaacgagagcatcggcgccaactacttcaacatcatggacaacctgctgtacgtggtgctgcagggcgaggagcccatcgagatcagaagcggcgtgagcatccacctggccctgaccgtgatggtgagcgtgctggagaagggctgggagatcgtgatcctggagagactgaccaacttcctgcagatcggccagaaccagatcagattcatccacgagatgcccggccacgaggagaccctgaaggccatcgccgacagcagagccaagagaaagagaaactgccccaccgtgacctgcaccagccactacagaagagtgggccagagaagacccctgatgatggagatgaacagccacagagccagcccccccatgaccgtggagaccatcagcaaggtgatcgtgatcgagatcggcgacagccccaccgtgagaagcaccggcatgatcagcagcctgagcagcaacaagctgcagaacctggcccacagagtgatcaccgcccagcagaccggcgtgctggagaacgtgctgaacatgaccatcggcgccctgctggtgacccagagcaagggcgtgatcggctacggcaacaccagcagcttcaagaccggcaacctgatctacatcagaccctacgccctgagcatcctggtgcagcccagcgacggcgaggtgggcaacgagctgcccgtgcagccccagctggtgttcctggacgagcagaacagaagagtggagagcctgggcccccccagcgagccctggaccatcagcgccagcctggagggcgccagcgacagcgtgctgaagggctgcacccaggccgagacccaggacggctacgtgagcttctacaacctggccgtgctgatcagcggcagcaactggcacttcatcttcaccgtgaccagcccccccggcgtgaacttcaccgccagaagcaagcccttcgccgtgctgcccgtgaccagaaaggagaagagcaccatcatcctggccgccagcctgagcagcgtggccagctggctggccctgagctgcctggtgtgctgctggctgaagagaagcaagagcagaaagaccaagcccgaggagatccccgagagccagaccaacaaccagaacatccacatccacatcagcagcaagagaagagagagccagggccccaagaaggaggacaccgtggtgggcgaggacatgagaatgaaggtgatgctgggcaaggtgaaccagtgcccccaccagctgatgaacggcgtgagcagaagaaaggtgagcagacacatcgtgagagaggaggaggccgccgtgcccgcccccggcaccaccggcatcaccagccacggccacatctgcgcccccggcgcccccgcccagcaggtgtacctgcaggagaccggcaactggaaggagggccaggagcagctgctgagataccagctggccggccagaaccagctgctgctgctgtgccccgacttcagacaggagagacagcagctgcccggccagagcagactgagcaagcagagcggcagcctgggcctgagccaggagaagaaggccagctgcggcgccaccgaggccttctgcctgcacagcgtgcaccccgagaccatccaggagcagctgtag

SEQ ID NO: 304449 - DNA, 174 bp, Artificial Sequence
  derived and/or modified sequence
atgggcaccgccgtgggcccccaccacagccccgccccccacgacagcgcgctccctgcgaggctcttgacaagtgatttcccatacggtcgaagctgtcagattgaacaggtcaaatactcggttcccgatacaggactgttccagcactgggaaggcagtatacccacttag

SEQ ID NO: 304450 - DNA, 171 bp, Artificial Sequence
  derived and/or modified sequence
atgcggaggccatgggagaagaaggaggctacgcgaaacccgatagccgaggtactcgctagaaagaagagaactgaggagctgatctccttgcaagagcacggctcgaggaaacagaagattaaggaagctagcatttcctgggccgaaacttcccgccagattggatag

SEQ ID NO: 304451 - DNA, 171 bp, Artificial Sequence
  derived and/or modified sequence
atgcggcggccctgggagaagaaggaggccacccggaaccccatcgctgaggtgttggcccgcaaaaagcgtaccgaagaactgatcagtctgcaggagcacggttccaggaagcagaaaattaaggaagcttctatctcctgggcagagacctccagacagatcggctag

SEQ ID NO: 304452 - DNA, 171 bp, Artificial Sequence
  derived and/or modified sequence
atgcgtcgcccttgggaaaagaaggaggctacccggaatcccatcgcagaggttctggcccgaaaaaaaaggacagaagaactcatttccctgcaggagcatggctcgcgtaaacagaagattaaagaggcgtcaattagctgggctgagactagcagacaaatcgggtag

SEQ ID NO: 304453 - DNA, 664 bp, Artificial Sequence
  derived and/or modified sequence
gtagggggtgtggccaaagcgcagtagggggctctcgcggggaacatagatggctggagacagaatctagagccttcaaataatgtggagatgtttccaccttcaggccatcaagatgtctcagagaggcggctagacacccagagacctcaagtgaccatgtgggaacgggatgtttccagtgacaggcaggagccagggcggagaggcaggtcctgggggctggaggggtcacaggccctgagccagcaggctgaggtgatcgttcggcagctgcaagagctgcggcggctggaggaggaggtccggctcctgcgggagacctcgctgcagcagaagatgaggctagaggcccaggccatggagctagaggctctggcacgggcggagaaggccggccgagctgaggctgagggcctgcgtgctgctttggctggggctgaggttgtccggaagaacttggaagaggggagccagcgggagctggaagaggttcagaggctgcaccaagagcagctgtcctctttgacacaggctcacgaggaggctctttccagtttgaccagcaaggctgagggcttggagaagtctctgagtagtctggaaaccagaagagcaggggaagccaaggagctggccgaggctcagagggaggccgagctgc

SEQ ID NO: 304454 - DNA, 861 bp, Artificial Sequence
  derived and/or modified sequence
aagtgcccactatgtgttaggactcgagaaagaggaggcgggcagcaggcatggaagctaaggggatagtagagagaagctgagagaacagccgcaggaaagatttgaataagatgtcaggacgctggcttttctgcctggggatctaggcggcctggattcccaaggtcttggggagggtctagccctgcatgtggccacattcagctggggccaggccttgggccagcactttaacagggaaggacccaagagtcatggcctgctggtgtctggatgggcttccctcaggccttgctgagccatggagagaactctggagatggcgctcaagacccctgcactgtgtacctcctttctcacctctggccaggagcagcagggaccatagaaacttaaggaggagggtagaggcactgcccagaatcctgaaagtatgagtaaagcctcagagcccctctcagtctgtctctttcagtaaattctctccacttgatagttgcttgggttccatgaggaaccaggttgagacaagcaagtgaatttggggtatctcctactttggggaagtaggaaaagagctaagcatcgggtggacctggctataattcaaggattatgactttgttattgtaggggctttctctttggaaggtggcctgaaaattgaattggagtgtctttgtttctcctcttgtccaggggaacatagatggctggagacagaatctagagccttcaaataatgtggagatgtttccaccttcaggttccactgggctgattcccccctcccactttcaagctcggcccctttcaactctgccaagaatggctcccacctggctctcagacattccc

SEQ ID NO: 304455 - protein, 36 aa, Artificial Sequence
  derived and/or modified sequence
MFPPSGSTGLIPPSHFQARPLSTLPRMAPTWLSDIP

SEQ ID NO: 304456 - protein, 96 aa, Artificial Sequence
  derived and/or modified sequence
MFPPSGSTGLIPPSHFQARPLSTLPRMAPTWLSDIPLVQPPGHQDVSERRLDTQRPQVTMWERDVSSDRQEPGRRGRSWGLEGSQALSQQAEVIVR

SEQ ID NO: 304457 - protein, 116 aa, Artificial Sequence
  derived and/or modified sequence
MFPPSGSTGLIPPSHFQARPLSTLPRMAPTWLSDIPLVQPPGHQDVSERRLDTQRPQVTMWERDVSSDRQEPGRRGRSWGLEGSQALSQQAEVIVRQLQELRRLEEEVRLLRETSL

SEQ ID NO: 304458 - protein, 140 aa, Artificial Sequence
  derived and/or modified sequence
MAPTWLSDIPLVQPPGHQDVSERRLDTQRPQVTMWERDVSSDRQEPGRRGRSWGLEGSQALSQQAEVIVRQLQELRRLEEEVRLLRETSLQQKMRLEAQAMELEALARAEKAGRAEAEGLRAALAGAEVVRKNLEEGSQR

SEQ ID NO: 304459 - protein, 782 aa, Artificial Sequence
  derived and/or modified sequence
MFPPSGSTGLIPPSHFQARPLSTLPRMAPTWLSDIPLVQPPGHQDVSERRLDTQRPQVTMWERDVSSDRQEPGRRGRSWGLEGSQALSQQAEVIVRQLQELRRLEEEVRLLRETSLQQKMRLEAQAMELEALARAEKAGRAEAEGLRAALAGAEVVRKNLEEGSQRELEEVQRLHQEQLSSLTQAHEEALSSLTSKAEGLEKSLSSLETRRAGEAKELAEAQREAELLRKQLSKTQEDLEAQVTLVENLRKYVGEQVPSEVHSQTWELERQKLLETMQHLQEDRDSLHATAELLQVRVQSLTHILALQEEELTRKVQPSDSLEPEFTRKCQSLLNRWREKVFALMVQLKAQELEHSDSVKQLKGQVASLQEKVTSQSQEQAILQRSLQDKAAEVEVERMGAKGLQLELSRAQEARRRWQQQTASAEEQLRLVVNAVSSSQIWLETTMAKVEGAAAQLPSLNNRLSYAVRKVHTIRGLIARKLALAQLRQESCPLPPPVTDVSLELQQLREERNRLDAELQLSARLIQQEVGRAREQGEAERQQLSKVAQQLEQELQQTQESLASLGLQLEVARQGQQESTEEAASLRQELTQQQELYGQALQEKVAEVETRLREQLSDTERRLNEARREHAKAVVSLRQIQRRAAQEKERSQELRRLQEEARKEEGQRLARRLQELERDKNLMLATLQQEGLLSRYKQQRLLTVLPSLLDKKKSVVSSPRPPECSASAPVAAAVPTRESIKGSLSVLLDDLQDLSEAISKEEAVCQGDNLDRCSSSNPQMSS

SEQ ID NO: 304460 - protein, 729 aa, Artificial Sequence
  derived and/or modified sequence
MFPPSGSTGLIPPSHFQARPLSTLPRMAPTWLSDIPLVQPPGHQDVSERRLDTQRPQVTMWERDVSSDRQEPGRRGRSWGLEGSQALSQQAEVIVRQLQELRRLEEEVRLLRETSLQQKMRLEAQAMELEALARAEKAGRAEAEGLRAALAGAEVVRKNLEEGSQRELEEVQRLHQEQLSSLTQAHEEALSSLTSKAEGLEKSLSSLETRRAGEAKELAEAQREAELLRKQLSKTQEDLEAQVTLVENLRKYVGEQVPSEVHSQTWELERQKLLETMQHLQEDRDSLHATAELLQVRVQSLTHILALQEEELTRKVQPSDSLEPEFTRKCQSLLNRWREKVFALMVQLKAQELEHSDSVKQLKGQVASLQEKVTSQSQEQAILQRSLQDKAAEVEVERMGAKGLQLELSRAQEARRRWQQQTASAEEQLRLVVNAVSSCPLPPPVTDVSLELQQLREERNRLDAELQLSARLIQQEVGRAREQGEAERQQLSKVAQQLEQELQQTQESLASLGLQLEVARQGQQESTEEAASLRQELTQQQELYGQALQEKVAEVETRLREQLSDTERRLNEARREHAKAVVSLRQIQRRAAQEKERSQELRRLQEEARKEEGQRLARRLQELERDKNLMLATLQQEGLLSRYKQQRLLTVLPSLLDKKKSVVSSPRPPECSASAPVAAAVPTRESIKGSLSVLLDDLQDLSEAISKEEAVCQGDNLDRCSSSNPQMSS

SEQ ID NO: 304461 - protein, 171 aa, Artificial Sequence
  derived and/or modified sequence
MFPPSGQWDQTRGVVVVSAWETDHLCFCNSSGSTGLIPPSHFQARPLSTLPRMAPTWLSDIPLVQPPGHQDVSERRLDTQRPQVTMWERDVSSDRQEPGRRGRSWGLEGSQALSQQAEVIVRQLQELRRLEEEVRLLRETSLQQKMRLEAQAMELEALARAEKAGRAEAEG

SEQ ID NO: 304462 - protein, 127 aa, Artificial Sequence
  derived and/or modified sequence
MFPPSGQWDQTRGVVVVSAWETDHLCFCNSSGSTGLIPPSHFQARPLSTLPRMAPTWLSDIPLVQPPGHQDVSERRLDTQRPQVTMWERDVSSDRQEPGRRGRSWGLEGSQALSQQAEVIVRQLQEL

SEQ ID NO: 304463 - protein, 153 aa, Artificial Sequence
  derived and/or modified sequence
MFPPSGSTGLIPPSHFQARPLSTLPRMAPTWLSDIPLVQPPGHQDVSERRLDTQRPQVTMWERDVSSDRQEPGRRGRSWGLEGSQALSQQAEVIVRQLQELRRLEEEVRLLRETSLQQKMRLEAQAMELEALARAEKAGRAEAEGLRAALAGA

SEQ ID NO: 304464 - protein, 118 aa, Artificial Sequence
  derived and/or modified sequence
MFPPSGSTGLIPPSHFQARPLSTLPRMAPTWLSDIPLVQPPGHQDVSERRLDTQRPQVTMWERDVSSDRQEPGRRGRSWGLEGSQALSQQAEVIVRQLQELRRLEEEVRLLRETSLQQ

SEQ ID NO: 304465 - protein, 188 aa, Artificial Sequence
  derived and/or modified sequence
MFPPSGSTGLIPPSHFQARPLSTLPRMAPTWLSDIPLVQPPGHQDVSERRLDTQRPQVTMWERDVSSDRQEPGRRGRSWGLEGSQALSQQAEVIVRQLQELRRLEEEVRLLRETSLQQKMRLEAQAMELEALARAEKAGRAEAEGLRAALAGAEVVRKNLEEGSQRELEEVQRLHQEQLSSLTQAHEE

SEQ ID NO: 304466 - DNA, 2349 bp, Artificial Sequence
  derived and/or modified sequence
atgttcccccccagcggcagcaccggcctgatcccccccagccacttccaggccagacccctgagcaccctgcccagaatggcccccacctggctgagcgacatccccctggtgcagccccccggccaccaggacgtgagcgagagaagactggacacccagagaccccaggtgaccatgtgggagagagacgtgagcagcgacagacaggagcccggcagaagaggcagaagctggggcctggagggcagccaggccctgagccagcaggccgaggtgatcgtgagacagctgcaggagctgagaagactggaggaggaggtgagactgctgagagagaccagcctgcagcagaagatgagactggaggcccaggccatggagctggaggccctggccagagccgagaaggccggcagagccgaggccgagggcctgagagccgccctggccggcgccgaggtggtgagaaagaacctggaggagggcagccagagagagctggaggaggtgcagagactgcaccaggagcagctgagcagcctgacccaggcccacgaggaggccctgagcagcctgaccagcaaggccgagggcctggagaagagcctgagcagcctggagaccagaagagccggcgaggccaaggagctggccgaggcccagagagaggccgagctgctgagaaagcagctgagcaagacccaggaggacctggaggcccaggtgaccctggtggagaacctgagaaagtacgtgggcgagcaggtgcccagcgaggtgcacagccagacctgggagctggagagacagaagctgctggagaccatgcagcacctgcaggaggacagagacagcctgcacgccaccgccgagctgctgcaggtgagagtgcagagcctgacccacatcctggccctgcaggaggaggagctgaccagaaaggtgcagcccagcgacagcctggagcccgagttcaccagaaagtgccagagcctgctgaacagatggagagagaaggtgttcgccctgatggtgcagctgaaggcccaggagctggagcacagcgacagcgtgaagcagctgaagggccaggtggccagcctgcaggagaaggtgaccagccagagccaggagcaggccatcctgcagagaagcctgcaggacaaggccgccgaggtggaggtggagagaatgggcgccaagggcctgcagctggagctgagcagagcccaggaggccagaagaagatggcagcagcagaccgccagcgccgaggagcagctgagactggtggtgaacgccgtgagcagcagccagatctggctggagaccaccatggccaaggtggagggcgccgccgcccagctgcccagcctgaacaacagactgagctacgccgtgagaaaggtgcacaccatcagaggcctgatcgccagaaagctggccctggcccagctgagacaggagagctgccccctgcccccccccgtgaccgacgtgagcctggagctgcagcagctgagagaggagagaaacagactggacgccgagctgcagctgagcgccagactgatccagcaggaggtgggcagagccagagagcagggcgaggccgagagacagcagctgagcaaggtggcccagcagctggagcaggagctgcagcagacccaggagagcctggccagcctgggcctgcagctggaggtggccagacagggccagcaggagagcaccgaggaggccgccagcctgagacaggagctgacccagcagcaggagctgtacggccaggccctgcaggagaaggtggccgaggtggagaccagactgagagagcagctgagcgacaccgagagaagactgaacgaggccagaagagagcacgccaaggccgtggtgagcctgagacagatccagagaagagccgcccaggagaaggagagaagccaggagctgagaagactgcaggaggaggccagaaaggaggagggccagagactggccagaagactgcaggagctggagagagacaagaacctgatgctggccaccctgcagcaggagggcctgctgagcagatacaagcagcagagactgctgaccgtgctgcccagcctgctggacaagaagaagagcgtggtgagcagccccagaccccccgagtgcagcgccagcgcccccgtggccgccgccgtgcccaccagagagagcatcaagggcagcctgagcgtgctgctggacgacctgcaggacctgagcgaggccatcagcaaggaggaggccgtgtgccagggcgacaacctggacagatgcagcagcagcaacccccagatgagcagctag

SEQ ID NO: 304467 - DNA, 2190 bp, Artificial Sequence
  derived and/or modified sequence
atgttcccccccagcggcagcaccggcctgatcccccccagccacttccaggccagacccctgagcaccctgcccagaatggcccccacctggctgagcgacatccccctggtgcagccccccggccaccaggacgtgagcgagagaagactggacacccagagaccccaggtgaccatgtgggagagagacgtgagcagcgacagacaggagcccggcagaagaggcagaagctggggcctggagggcagccaggccctgagccagcaggccgaggtgatcgtgagacagctgcaggagctgagaagactggaggaggaggtgagactgctgagagagaccagcctgcagcagaagatgagactggaggcccaggccatggagctggaggccctggccagagccgagaaggccggcagagccgaggccgagggcctgagagccgccctggccggcgccgaggtggtgagaaagaacctggaggagggcagccagagagagctggaggaggtgcagagactgcaccaggagcagctgagcagcctgacccaggcccacgaggaggccctgagcagcctgaccagcaaggccgagggcctggagaagagcctgagcagcctggagaccagaagagccggcgaggccaaggagctggccgaggcccagagagaggccgagctgctgagaaagcagctgagcaagacccaggaggacctggaggcccaggtgaccctggtggagaacctgagaaagtacgtgggcgagcaggtgcccagcgaggtgcacagccagacctgggagctggagagacagaagctgctggagaccatgcagcacctgcaggaggacagagacagcctgcacgccaccgccgagctgctgcaggtgagagtgcagagcctgacccacatcctggccctgcaggaggaggagctgaccagaaaggtgcagcccagcgacagcctggagcccgagttcaccagaaagtgccagagcctgctgaacagatggagagagaaggtgttcgccctgatggtgcagctgaaggcccaggagctggagcacagcgacagcgtgaagcagctgaagggccaggtggccagcctgcaggagaaggtgaccagccagagccaggagcaggccatcctgcagagaagcctgcaggacaaggccgccgaggtggaggtggagagaatgggcgccaagggcctgcagctggagctgagcagagcccaggaggccagaagaagatggcagcagcagaccgccagcgccgaggagcagctgagactggtggtgaacgccgtgagcagctgccccctgcccccccccgtgaccgacgtgagcctggagctgcagcagctgagagaggagagaaacagactggacgccgagctgcagctgagcgccagactgatccagcaggaggtgggcagagccagagagcagggcgaggccgagagacagcagctgagcaaggtggcccagcagctggagcaggagctgcagcagacccaggagagcctggccagcctgggcctgcagctggaggtggccagacagggccagcaggagagcaccgaggaggccgccagcctgagacaggagctgacccagcagcaggagctgtacggccaggccctgcaggagaaggtggccgaggtggagaccagactgagagagcagctgagcgacaccgagagaagactgaacgaggccagaagagagcacgccaaggccgtggtgagcctgagacagatccagagaagagccgcccaggagaaggagagaagccaggagctgagaagactgcaggaggaggccagaaaggaggagggccagagactggccagaagactgcaggagctggagagagacaagaacctgatgctggccaccctgcagcaggagggcctgctgagcagatacaagcagcagagactgctgaccgtgctgcccagcctgctggacaagaagaagagcgtggtgagcagccccagaccccccgagtgcagcgccagcgcccccgtggccgccgccgtgcccaccagagagagcatcaagggcagcctgagcgtgctgctggacgacctgcaggacctgagcgaggccatcagcaaggaggaggccgtgtgccagggcgacaacctggacagatgcagcagcagcaacccccagatgagcagctag

SEQ ID NO: 304468 - DNA, 2349 bp, Artificial Sequence
  derived and/or modified sequence
atgttcccacccagtggcagcacagggctgattcctcctagccacttccaggcacgaccactgagcactctgccccgtatggctccaacatggctatcggatatccctctcgtccagccaccggggcatcaggacgtgtcggaacggcggttagacacgcagcggccccaagtgaccatgtgggaacgggatgtgtcctctgatagacaggaacccgggcgccgcggccggtcttggggtttggaaggttctcaggcactcagccagcaagcagaagtaatagtaagacagctgcaagagctaaggcggctcgaggaagaagtgcggcttctcagggagacttccttgcagcaaaagatgcggcttgaggcacaggccatggaactagaagcattggcacgcgcagagaaagccggcagagccgaggccgaggggctgagggccgcgctggctggggccgaagtcgtgaggaaaaacctcgaagaaggtagtcagcgtgaactcgaggaggtccagcgcctccaccaggagcagttgtctagcttaacccaggcacatgaggaagcgctttcctctttaacctccaaagctgaagggctggagaagtctctctccagcttggaaacacgtagagccggagaagctaaagagctggcagaagcacagagagaagcagaactgctgcggaagcagctcagcaagacgcaagaagacctggaggctcaggtgacgctcgtcgagaaccttcgtaagtatgtcggcgaacaagtgccgtcggaagtccactctcagacttgggaattggaaaggcagaagctcctggaaacaatgcagcaccttcaagaggatcgcgactcactgcatgccactgctgagcttcttcaggtgcgagtccagtctctgacccacatacttgccctgcaagaggaggaattgacaaggaaagtgcagccaagcgacagtctggaacctgagtttaccaggaagtgccaaagcctcctgaatcgatggcgggaaaaggtctttgccttgatggtgcaacttaaagcacaggagcttgagcacagtgactctgttaagcaactaaaggggcaggttgcgtccctgcaagaaaaggtgaccagccagagtcaggagcaggctattctccaacggtccctccaagataaagcggccgaggtggaagtagagaggatgggagcaaagggattgcagctggagttatcccgagcacaggaggccaggcggcgatggcagcagcagacagcatcagcggaagaacagctgaggctcgtagtgaacgcagtgtcatccagccagatctggttggagactaccatggccaaagtcgagggagctgctgcacaactgccctccctgaacaaccggctgtcctacgccgtgagaaaggttcatacaatcagaggtcttatcgcccgcaagctggccctcgctcaactccgacaggagtcttgtccactccccccaccagttaccgatgtgtccctggagctgcagcagctcagggaagaaagaaataggctcgacgccgagctccagctctccgccaggttgatacaacaggaagtggggagagcccgggaacagggggaggccgaaaggcaacagctgtctaaggtagcacagcaactcgaacaggagctgcagcagacacaagagtcactggcgagtctgggactccaactggaagtggcaagacaggggcagcaggaaagtaccgaggaggccgcatccctgaggcaggaacttactcagcagcaggaactgtacggccaggccctacaggaaaaagtagctgaagttgagactagactgagagaacagttatccgacactgaacgccggcttaatgaagcaagacgggaacatgccaaggccgtggtaagtctgagacagatccagcggcgggcagcccaggagaaggagcgaagccaggaactaaggagattgcaagaagaagcccggaaggaggaaggccagagactggctcggcggttacaggaactggagcgcgacaagaatctcatgctggctaccctgcagcaagaggggctgctctcacgatacaaacagcaacgccttctgaccgtccttcctagcctgctggacaaaaaaaaaagtgttgtctcaagtccaagacccccggagtgcagtgccagcgcacccgtcgcagcagccgtaccgaccagagaatcaattaaaggtagcctttcggtgcttctggatgatctccaggacctcagtgaggcaataagcaaggaggaagcagtttgtcagggcgacaatcttgaccgttgtagttcgtcgaacccacagatgtcttcttag

SEQ ID NO: 304469 - DNA, 2349 bp, Artificial Sequence
  derived and/or modified sequence
atgtttcctccctccggctctactgggctcatcccgccgagtcattttcaggcacgtcctctgtcaaccctgccgcgcatggctccaacctggctttcagatatcccgctggtccagccgccaggacaccaggatgtgagtgagcgccgcctggatacccagagaccacaggttaccatgtgggagagagacgtgagctccgatcgacaggagccaggtcgccgtggccgaagttggggtttggaagggtcccaggccctaagtcaacaagccgaagtgattgtcagacagctccaagagttgaggcgcctggaagaagaggtgcggttgcttcgggagacttccctgcagcagaagatgcgactcgaagcccaggccatggagctggaagccctggcaagagcagagaaagccggaagggccgaggccgaaggactaagggcagctctggctggtgcagaggtggtgcggaagaatctggaagaagggtctcagcgggaactggaggaagttcagcgattacaccaggaacaactgtcttcccttacacaggcgcacgaggaggccctaagcagtttgacctctaaggcagaaggcctggaaaagagcctgtcatccctggaaactaggagagcgggcgaggccaaggaactggccgaagcacagcgcgaagcggagctgctgcggaaacaattatccaaaacacaggaggacttagaggcacaagtcactctggtcgagaatctccggaagtatgtcggtgaacaggtgccatccgaggtccatagccaaacctgggaactcgaacgacaaaaactcctggagaccatgcaacatctccaggaggaccgggactctctgcacgcaacagccgagctcctgcaggtgcgagtccagtcacttacccatatattagctctccaggaagaagagcttacccgcaaggttcagccttcagattcgcttgagcccgagtttaccagaaagtgtcaatccttattgaatagatggagagagaaggttttcgctcttatggtacagctgaaggcgcaggagctcgaacactccgatagtgttaagcagctgaaaggccaggttgccagtctgcaagaaaaagtgacaagtcagtctcaagaacaggcgatcctccagcgcagtctgcaagataaggccgccgaagtcgaggtggaacgcatgggggccaaggggttgcaactagagctgtcacgggctcaagaggcccggcgtcgctggcagcaacagaccgcatcagccgaagagcagctgaggttggtggttaacgcagtgtcttcatcacagatttggttagaaaccacgatggccaaagtggagggcgccgccgcacagctgccaagcctgaataataggttgagctatgccgtgaggaaagttcacacaataagggggctgatagctaggaaactggccctggctcagctccgccaagagtcctgccctttgccaccacctgttactgacgtcagtctcgagcttcagcaattgcgcgaggagcgcaatcgcttggacgcggaactacaactgagcgcacgtctgattcaacaggaggtcggcagggcaagggaacagggtgaagccgagcgtcagcagctcagcaaagtagctcagcagctggaacaggagctgcagcaaacccaggagagcctggcgtcccttggcttacagctagaagtggctcgtcagggtcagcaagaaagcactgaggaagccgcatccttgcgccaggaactgactcagcagcaagagctgtacggacaggccctgcaagaaaaagtggccgaggtggagactcgtctgcgtgagcaattgagcgacaccgagcgtaggcttaacgaggcccgaagagagcacgctaaggccgtggtgagtctacgccaaattcaaagacgggcagctcaggaaaaagagcgctcccaggagctgagaagactacaggaggaagccagaaaagaggagggacagagacttgcgagacggctccaggaactggaacgtgacaaaaatctgatgctcgctacattacagcaggagggcttgctcagccggtataagcaacagaggttactgaccgtcctccctagcctgctcgataagaaaaagtcagtggtgtcttcaccccgcccacccgaatgctccgcgtccgcgcccgtcgctgctgctgtgcctacgcgcgagagcatcaagggctcgttgtcagtgctgctagatgacctgcaggatctgtccgaggcaattagtaaggaggaagcagtttgtcagggtgataacctggaccgctgttcttccagtaatccccagatgtcgagctag

SEQ ID NO: 304470 - DNA, 2190 bp, Artificial Sequence
  derived and/or modified sequence
atgttccctccgtcaggctcaacagggctgatcccaccctcccatttccaggcccgtcctctaagcaccctgcctcgaatggcccctacttggctgagcgatatacccctggtccagcctcccggccaccaggatgtgagtgaaaggcgtcttgatacccaacgtcctcaggtcacaatgtgggagagagatgtgtcctctgaccgacaggaaccgggtcggaggggacgatcctggggtctggaagggagtcaggccctgtcccagcaggcagaggtgatcgtgcgccagttgcaggaactccggcgcctggaagaggaggtccgcctgctgagggaaacctcactgcaacagaagatgcgactcgaagctcaggcaatggaactcgaggcattagctcgcgccgagaaggcaggacgcgccgaggcagaaggtctcagagcggccctcgcgggtgctgaggttgtgcggaagaatctggaggagggtagccagagagaactggaggaagtgcaaaggctgcaccaggaacagcttagctcccttactcaggcccatgaagaggccctgagttcactgacatctaaggcagaaggattggagaagtctttatcttcccttgaaacccggcgtgctggcgaggcaaaggaattagctgaagcccagagggaggctgaattgctgcggaagcagttgagcaagacccaggaggatctggaagcccaagtcaccttggtagagaatcttcggaaatacgtgggggagcaggtgccatccgaggtacacagtcagacctgggaattggagcgtcaaaaactgctggagactatgcagcatctgcaggaagatcgcgacagtctccatgcaaccgctgagctattgcaggtgcgcgtgcagagcttaacacatatactggcactgcaagaggaggagctgactaggaaagtgcagcccagtgattcccttgagccagagtttacaaggaagtgtcagagtctgctgaatcgctggcgcgagaaggtatttgctctcatggtgcaactgaaagcccaggaattggagcactctgatagtgtaaaacagctgaagggtcaagttgccagcctccaggagaaagtgacctcgcagtctcaggagcaggcaattctgcagaggagccttcaggataaagcagccgaggtggaggtcgagcgtatgggtgccaaggggcttcaacttgagctctctagagcccaggaagcacgtaggagatggcagcagcagactgcaagtgcggaagaacagctgcgacttgtggtgaatgccgtatcatcttgccccttgccaccccccgtcactgatgtgtctctggaattacagcagctgcgcgaggagcggaaccgcctcgatgctgagttacagctgagtgcacgcctcatccagcaagaggtaggacgggcccgagagcagggggaagccgagagacagcagctgtccaaggtggcacagcagctggaacaggaactgcagcagacgcaggaatcactggcctcactgggcctgcagctggaggtggcccgacagggccaacaagaaagcactgaggaggctgcttcgctgcgacaggagctaactcagcagcaggaattgtacggacaagcactccaggagaaggtcgccgaggtggaaacccgactgcgagagcaactgtccgatacagagagaagacttaatgaggctaggagagaacatgctaaagcagttgtgtcccttcggcagatccagagacgtgcagcccaggaaaaggaacggtctcaagagctccgacggctacaggaagaggcacggaaggaggaaggccaaaggcttgcgagacgactgcaggaactggagagagataaaaatcttatgttggctacccttcagcaggaggggctacttagcagatataaacagcagcggctattaactgtccttccaagcctgcttgacaaaaagaaatcagtcgtgtcttcaccacgaccccctgaatgttccgcttctgcccctgtggcggccgccgtcccaacccgcgaatccatcaaaggatcactgagcgttctgctggatgatctccaggatctgagcgaggccatatcgaaggaggaagcagtgtgccagggggataatctggatcgctgctcgagtagtaatccgcagatgtcaagttag

SEQ ID NO: 304471 - DNA, 2190 bp, Artificial Sequence
  derived and/or modified sequence
atgttccccccttccgggagtacgggcctaattccgccctcacattttcaggctagacccctaagcactctgccgcgcatggccccaacttggctctcagacatcccactggtgcagcccccaggccaccaggacgtctccgagcgcagactagatacacagaggccgcaggtgacgatgtgggagcgggacgtgtccagcgatcgtcaggagcccgggcgtaggggcagaagctggggtctggagggcagccaggcactgtcccagcaggcggaggtaatcgtgcgccagctgcaggaactgcggagactcgaagaagaagtgcggttgttacgcgaaacctcactgcaacaaaagatgaggctggaagcccaggcaatggaactcgaggccctggcccgggctgaaaaggcagggcgggctgaagctgagggactcagagcggccctggccggagccgaggtggtccgaaaaaacctggaagagggaagccaaagggaactggaggaggtgcagcgcctgcatcaagaacagctgagctcactgacccaggcccacgaggaggctctctccagtctgacttctaaagctgagggactagagaagagcttgagcagcctggaaacccggcgtgccggagaagcaaaggaactcgctgaagcgcagagagaggctgaattactcaggaagcagctttccaagactcaggaggatcttgaagcccaggttaccctggtggaaaacctgcgcaagtacgttggcgagcaagttccaagcgaggtccatagtcagacatgggaactcgagcggcagaaactcctggaaactatgcaacatttgcaggaagatagagacagcctgcacgcgaccgctgaattattgcaggttcgggttcaaagcctaacacacattcttgccctccaagaggaggaactgaccagaaaggtccagccctctgatagtctcgagccagaattcactcggaagtgtcagtcactgctgaaccgctggcgggagaaagttttcgccctcatggtccagctcaaggcacaagagctggaacacagtgatagcgtcaagcagctgaagggccaggtggcttcactccaggaaaaagtcacctcccagagccaggagcaagccatcttgcaaagatctttacaagacaaggcggccgaggtcgaggttgagcgcatgggcgctaaaggcttgcaactcgagttaagcagggcccaagaggcgaggcgacgttggcagcagcaaactgcctcagcagaggaacaacttcgtctcgtggtgaatgccgtgagtagttgtccgctgcctccaccagtgactgatgtctccctggagctgcagcagctgcgggaggagcggaatagactcgatgccgagctccagctgagcgccaggctgatccagcaggaggtcggacgcgcacgagagcagggtgaggctgaaaggcaacagcttagcaaagttgcgcaacaacttgaacaagaacttcagcagactcaggagtcgctggcaagccttggtttacagctagaagtggcgcgacaaggtcaacaagagtctaccgaagaagcagctagtctgcgacaagagcttacccaacagcaggaactgtatggccaagcactgcaagaaaaggtcgccgaagtggagactagacttagggaacagttgagtgacaccgagcggaggctgaatgaggctagaagggagcatgccaaggccgtcgttagccttagacagatacagcgacgagcggcccaggaaaaggagaggtctcaggagctgagacggctgcaggaggaggctaggaaggaagagggacaaagactcgcacgtaggttacaggaactggagcgggacaagaacctaatgcttgctacacttcagcaggagggtctgctgtcaaggtataagcagcagaggcttttgacagtattgccatccttgcttgacaagaagaagtccgtggtgtccagtcctcgtccccctgaatgtagcgcctccgcaccagtagctgccgccgtcccaactagagaatctatcaaagggtcactgtctgtcctgctggatgacctacaggatctgtcggaagctatctccaaggaagaggccgtatgtcagggagacaacctagaccgatgcagcagctctaatcctcagatgagctcatag

SEQ ID NO: 304472 - DNA, 2349 bp, Artificial Sequence
  derived and/or modified sequence
atgtttcctccttctggcagcacaggcctcatcccccccagccacttccaggcccggcccctgagcaccctgcccaggatggcccccacctggctgagtgacatccccctggtgcagcccccaggccaccaggatgtgtctgaaagaaggctggacacccagaggccccaggtgaccatgtgggagagagatgtgtccagtgaccggcaggagcccggccggcggggccgctcctggggcctggagggcagccaggccctgagccagcaggccgaggtgattgtgcggcagctgcaggagctgcggcggctggaggaggaggtgcggctgctgcgggagaccagcctgcagcagaagatgaggctggaggcccaggccatggagctggaggccctggcccgggcagagaaggccggccgggcagaggccgagggcctgcgggccgccctggccggggctgaggtggtgaggaagaacctggaggagggcagccagcgggagctggaggaggtgcagaggctgcaccaggagcagctgagcagcctgacccaggcccacgaggaggccctgagcagcctgaccagcaaggccgagggcctggagaagagcctgagcagcctggagacccggcgggccggggaggccaaggagctggccgaggcccagcgggaggccgagctgctgaggaagcagctgagcaagacccaggaggacctggaggcccaggtgaccctggtggagaacctgaggaaatatgtgggggagcaggtgcccagcgaggtgcacagccagacctgggagctggagcggcagaagctgctggagaccatgcagcacctgcaggaggaccgggacagcctgcacgccacagctgagctgctgcaggtgcgggtgcagagcctgacccacatcctggccctgcaggaggaggagctgaccaggaaggtgcagcccagcgacagcctggagcctgagttcaccaggaagtgccagagcctgctgaaccgctggagggagaaggtgtttgccctgatggtgcagctgaaggcccaggagctggagcacagcgacagcgtgaagcagctgaagggccaggtggccagcctgcaggagaaggtgaccagccagagccaggagcaggccatcctgcagaggagcctgcaggacaaggctgctgaggtggaggtggagaggatgggcgccaagggcctgcagctggagctgagccgggcccaggaggcccggcggcgctggcagcagcagacagccagcgctgaggagcagctgcggctggtggtgaatgctgtgagcagcagccagatctggctggagaccaccatggccaaggtggagggcgccgccgcccagctgcccagcctgaacaaccggctgtcctatgctgtgaggaaggtgcacaccatccggggcctcatcgccaggaagctggccctggcccagctgcggcaggagagctgccccctgcccccacctgtgacagatgtgtccctggagctgcagcagctgcgggaggagaggaaccggctggatgctgagctgcagctgagcgcccggctcatccagcaggaggtgggccgggcccgggagcagggcgaggccgagcggcagcagctgagcaaggtggcccagcagctggagcaggagctgcagcagacccaggagagcctggccagcctgggcctgcagctggaggtggcccggcagggccagcaggagagcacagaggaggccgccagcctgcggcaggagctgacccagcagcaggagctgtatggccaggccctgcaggagaaggtggccgaggtggagacccggctgcgggagcagctgagtgacacagaaagaaggctgaatgaggcccggcgggagcacgccaaggctgtggtgtccctgcggcagatccagaggcgggccgcccaggagaaggagaggagccaggagctgcggcggctgcaggaggaggccaggaaggaggagggccagaggctggcccggcggctgcaggagctggagcgggacaagaacctgatgctggccaccctgcagcaggagggcctgctgagccgctacaagcagcagaggctgctgactgtgctgcccagcctgctggacaagaagaagtctgtggtgagcagcccccggcccccagaatgttctgccagcgcccctgtggccgctgctgtgcccacccgggagagcatcaagggcagcctgtctgtgctgctggatgacctgcaggacctgtctgaggccatcagcaaggaggaggccgtgtgccagggcgacaacctggaccgctgcagcagcagcaacccccagatgagcagctag

SEQ ID NO: 304473 - DNA, 2190 bp, Artificial Sequence
  derived and/or modified sequence
atgtttcctccttctggcagcacaggcctcatcccccccagccacttccaggcccggcccctgagcaccctgcccaggatggcccccacctggctgagtgacatccccctggtgcagcccccaggccaccaggatgtgtctgaaagaaggctggacacccagaggccccaggtgaccatgtgggagagagatgtgtccagtgaccggcaggagcccggccggcggggccgctcctggggcctggagggcagccaggccctgagccagcaggccgaggtgattgtgcggcagctgcaggagctgcggcggctggaggaggaggtgcggctgctgcgggagaccagcctgcagcagaagatgaggctggaggcccaggccatggagctggaggccctggcccgggcagagaaggccggccgggcagaggccgagggcctgcgggccgccctggccggggctgaggtggtgaggaagaacctggaggagggcagccagcgggagctggaggaggtgcagaggctgcaccaggagcagctgagcagcctgacccaggcccacgaggaggccctgagcagcctgaccagcaaggccgagggcctggagaagagcctgagcagcctggagacccggcgggccggggaggccaaggagctggccgaggcccagcgggaggccgagctgctgaggaagcagctgagcaagacccaggaggacctggaggcccaggtgaccctggtggagaacctgaggaaatatgtgggggagcaggtgcccagcgaggtgcacagccagacctgggagctggagcggcagaagctgctggagaccatgcagcacctgcaggaggaccgggacagcctgcacgccacagctgagctgctgcaggtgcgggtgcagagcctgacccacatcctggccctgcaggaggaggagctgaccaggaaggtgcagcccagcgacagcctggagcctgagttcaccaggaagtgccagagcctgctgaaccgctggagggagaaggtgtttgccctgatggtgcagctgaaggcccaggagctggagcacagcgacagcgtgaagcagctgaagggccaggtggccagcctgcaggagaaggtgaccagccagagccaggagcaggccatcctgcagaggagcctgcaggacaaggctgctgaggtggaggtggagaggatgggcgccaagggcctgcagctggagctgagccgggcccaggaggcccggcggcgctggcagcagcagacagccagcgctgaggagcagctgcggctggtggtgaatgctgtgagcagctgccccctgcccccacctgtgacagatgtgtccctggagctgcagcagctgcgggaggagaggaaccggctggatgctgagctgcagctgagcgcccggctcatccagcaggaggtgggccgggcccgggagcagggcgaggccgagcggcagcagctgagcaaggtggcccagcagctggagcaggagctgcagcagacccaggagagcctggccagcctgggcctgcagctggaggtggcccggcagggccagcaggagagcacagaggaggccgccagcctgcggcaggagctgacccagcagcaggagctgtatggccaggccctgcaggagaaggtggccgaggtggagacccggctgcgggagcagctgagtgacacagagcggcggctgaatgaggcccggcgggagcacgccaaggctgtggtgtccctgcggcagatccagaggagagctgcccaggagaaggagaggagccaggagctgcggcggctgcaggaggaggccaggaaggaggagggccagaggctggcccggcggctgcaggagctggagcgggacaagaacctgatgctggccaccctgcagcaggagggcctgctgagccgctacaagcagcagaggctgctgactgtgctgcccagcctgctggacaagaagaagtctgtggtgagcagcccccggcccccagagtgcagcgccagcgcccctgtggccgctgctgtgcccacccgggagagcatcaagggcagcctgtctgtgctgctggatgacctgcaggacctgtctgaggccatcagcaaggaggaggccgtgtgccagggcgacaacctggaccgctgcagcagcagcaacccccagatgagcagctag

SEQ ID NO: 304474 - DNA, 2349 bp, Artificial Sequence
  derived and/or modified sequence
atgttcccccccagcggcagcaccggcctgatcccccccagccacttccaggcccggcccttaagcacattgccccgaatggccccaacatggctcagcgacattcccctcgtacagccaccaggacaccaagacgtgagcgaacggaggctggacacccagcggcctcaggtcactatgtgggagcgagacgtgtctagcgaccgccaggaacccggacggagggggcgaagctggggccttgaaggctcccaggctcttagccagcaagccgaggtgatagtcaggcagctccaggaactccgccgactggaagaagaagtgcgacttctgcgcgagacgtcgttgcagcagaaaatgagacttgaagcacaggctatggaactggaggccctagcccgggccgaaaaagcagggcgggctgaggccgaaggccttagggcagctctggccggtgctgaggtggtgaggaagaatttagaggagggctcccaacgggagctagaagaagtgcaacggctgcatcaggagcagctaagtagcctgacacaggcacacgaggaagccctttcaagtcttacatcaaaagctgagggattggagaaatcactgtctagcctagagaccaggagagcaggcgaagcaaaggaactggccgaagcacagcgcgaagcggaactgctccggaagcagctcagcaaaacccaggaagatctggaagcacaggtaacactagtcgaaaacctgaggaagtacgtgggcgagcaggtgcctagcgaggtgcactctcaaacatgggagctcgagaggcaaaagctgctagagaccatgcagcatctgcaggaagatcgcgattctctgcacgctacggctgaactgctacaggtgagggtccagtccctcacgcatatcctggccctccaggaagaggagctgacaaggaaggtgcaaccttctgatagtttggaacccgagttcacacggaaatgtcagtcgctcctgaataggtggagagagaaagtgttcgccctcatggtccagttaaaggcacaggaattggaacacagcgactcagtgaaacaactcaaaggacaggttgcctccctgcaggaaaaagttacctcgcagtcacaagagcaggccatcctacaacgcagtctgcaagacaaagccgctgaagtcgaggtggagcgcatgggagcgaaaggcctccaactggagctatccagagcgcaggaggccagaaggaggtggcaacagcagacagcctcagctgaagagcagctgcgactggttgtgaacgcagtgtcttcatcgcagatttggctggagacaacaatggccaaggtggaaggcgcagcagcccagctcccctctctaaacaacagactgagctatgccgtgcggaaggttcataccatacgagggctcattgctagaaagctagcacttgcgcagctgaggcaagaatcctgcccattgccccctccggtaacagacgtaagtctcgaactccagcagctgagagaggagcgcaatagactcgatgccgaactgcaactgtccgctcgattgatacagcaggaggtgggcagggcccgcgaacagggggaggcagaaaggcagcagctgtcaaaagtcgcacagcagcttgagcaggagctgcagcaaacgcaggaatccctggcgtccctgggactgcaacttgaagtcgccaggcagggccagcaggaatcgacagaggaggccgcctcgctgagacaggagctgacgcaacaacaagagctgtatggtcaggcattgcaggaaaaggtggccgaggttgagacccggctacgagagcagttgtctgatacagaaaggcgcttgaatgaggcacgcagggagcacgcgaaggccgttgtttctctccgccagatccagcgtagagctgctcaagagaaggagaggtcacaggagttacgaagactacaagaggaggcgcggaaggaagaaggtcagcggcttgcaaggagactacaagagctcgagagggacaaaaacctcatgttagcgactctccagcaggaaggcctgctttctcggtacaaacagcagcggctgctcaccgtgttgccttcattattggataaaaaaaagtcagttgtgtcatctcctcgccctcccgagtgctccgcaagcgcacctgtggccgccgcagtgcccactcgcgagagcatcaagggtagcctatctgtacttcttgatgacctgcaggatctctctgaggcaattagcaaggaggaggcagtctgccagggagacaacctggacaggtgtagctcatcgaacccccagatgtcctcctag

SEQ ID NO: 304475 - DNA, 2349 bp, Artificial Sequence
  derived and/or modified sequence
atgttcccccccagcggcagcaccggcctgatcccccccagccacttccaggcacgtcccctttccacactgcctcgcatggcccccacctggctgagcgatatccctcttgtgcagccaccgggtcatcaggatgtgtccgaaagaaggttggacacacagagaccacaagtcacaatgtgggagcgtgacgtatcctctgatcggcaggagcctggccggcgcggacgctcctggggacttgaagggtcccaagccctgagtcagcaggcagaagtcatagttcgccaacttcaggagcttcgtcgccttgaagaggaagtcaggctcttgagggagaccagccttcagcaaaagatgaggctggaggcccaagcaatggaactggaagcgttggcccgagcagaaaaggccgggagggccgaggctgagggtctgagggccgctcttgccggcgccgaagtagtccgtaagaacctggaagaggggagtcagagagaattagaggaagttcagaggctgcaccaggagcagctgtccagtttgacccaagcccatgaagaggcccttagtagtctgacttccaaggccgaaggtcttgaaaaatctctctcctcactcgaaacccgaagggcaggggaagccaaggagttagcagaggcacagagggaggctgagttgctgcgaaaacagctgtctaagactcaggaggaccttgaggcacaggttaccctggtggaaaatctccgcaagtacgtgggggagcaagtgcccagcgaagtgcactctcaaacatgggaattggagagacagaaactgttggagaccatgcagcatttacaggaggaccgcgacagtctccacgccactgctgaactgttacaggtgcgcgtgcagtcacttacacacatcctcgctcttcaggaggaagagcttaccaggaaagtccagcccagcgattccttggaaccagaattcacgagaaagtgccaatcactgctaaatcgctggcgtgagaaagtctttgccctgatggtgcagctcaaggctcaagaactagaacactcagattccgtgaaacagttgaagggccaggtagcctctttgcaggagaaagtcaccagtcaatcccaggagcaagctatcctgcaaaggtcactccaggataaggcagccgaggtggaggtggaacgaatgggcgcgaaaggcttacagctggagctgagcagagcccaggaagcccgtagaagatggcagcagcagactgcctccgctgaagagcaactaagattagttgttaatgctgtgagctcctcccaaatatggctagagacaactatggcgaaggtcgaaggggctgccgcccagttgccctctctgaacaacaggctgtcatacgcagtacgaaaggttcacaccatccggggcctcattgcacgaaagcttgcgttggcgcaattaagacaagaatcttgtcccctgccccccccggttacagacgtgagcctggaacttcagcaattgagggaggagcggaatcggctcgacgccgagctgcagctatctgccagacttattcagcaggaagtgggtcgcgcccgggagcagggggaggctgaacggcagcaattgagcaaggtagcccagcagcttgaacaggaactgcaacagactcaggagagcctcgcatccttaggcctgcaactggaggtggcacgacaggggcagcaagagtcaaccgaggaagccgccagtctgagacaggaactcactcaacagcaggaactttatggtcaggcactgcaagaaaaggtggcggaagtcgaaacccgccttagagagcagcttagtgacacagaacgtcggctgaacgaggcccgcagggagcacgctaaagctgttgtgtcactacggcagatccagcggagggccgcacaggagaaggaacgcagtcaggagcttcgtagactgcaagaagaagccaggaaggaagaagggcagcgcctggctaggaggctgcaagaacttgagcgcgataagaacttaatgctggccactctgcagcaggaaggcttgttatctagatataagcaacagcggcttctcaccgtgctgccatctttgctggataaaaaaaagagtgtagtaagcagtcccaggccccctgagtgttcggcaagtgctcccgtggccgcagctgtcccaacgagggagtcaatcaaaggcagcctgtccgtgcttctagatgatctgcaggatttaagtgaagccatcagcaaggaagaggccgtgtgccagggcgacaatctggaccgttgctcctctagcaatccacagatgtcaagctag

SEQ ID NO: 304476 - DNA, 2190 bp, Artificial Sequence
  derived and/or modified sequence
atgttcccccccagcggcagcaccggcctgatcccccccagccacttccaagcccgaccacttagcactctgcccaggatggctccaacatggctatctgacatccctctcgtgcaaccccccggccaccaggatgtttctgagcgaaggctcgatacccaacgaccccaggtgaccatgtgggagagggacgtgagcagtgaccggcaagagccaggtcgcagggggcggtcctggggcttggaaggctctcaagccctgtcacaacaggcagaggtcatcgtcaggcagctgcaggagctgcgccgcctggaggaagaagtccgactgctcagggaaacctcattacaacaaaaaatgcggttagaagcccaggccatggagctcgaggcactcgcccgggccgaaaaagctgggagagctgaggcagagggcctgagagcagcgctggccggcgcagaagtggtccggaagaatctcgaagagggctctcaaagggaattggaggaagtgcagcgtttgcatcaagagcagctgagctccttgactcaagcgcacgaagaggcactatcgtccttgacatcaaaggccgagggattggagaaaagtttaagctctctggagacacgcagggctggagaggcaaaggagctggcagaggcgcagcgtgaggccgagcttctgaggaaacagctgtcaaaaacccaggaggatctagaggcccaggtgacccttgtggagaatttgaggaaatatgtgggtgaacaggtgccgagcgaggtgcacagccagacttgggaactggagagacagaagctgttggaaacgatgcagcacctacaggaggacagagacagtttgcatgctaccgcagaactgctgcaagtgcgtgtgcaatctctgactcacatccttgctctgcaggaagaggagcttactcgcaaagtgcaaccatctgactcccttgagcccgagtttacacggaagtgtcaatctttgctgaatcgctggcgtgagaaggtgttcgctctgatggtgcaactgaaggcgcaggagcttgaacattcagatagcgtcaagcaactgaaaggtcaggtggcgagcctacaagagaaagtgacctcacagtctcaagaacaggcgatattacagcgctccctgcaggacaaagctgcagaggtagaggtggaaaggatgggggccaagggactgcaattggagttgagccgagcccaggaggccagaagacgctggcagcagcagactgcatctgccgaagagcaactgagattagtggtcaacgcagtgtcatcctgcccccttcctcccccagtcacagatgtctccctcgagctgcagcagctgagagaggagcggaacagactcgacgcagagctccagctctctgccaggttaatacaacaggaggtaggacgggcccgcgaacagggcgaagccgagcgacagcaactgagcaaagtggcccaacagctggaacaggagcttcagcaaacacaggagtcattagcatctctaggccttcagctcgaagtggccaggcagggccaacaggagagcacagaggaagccgcttcactcagacaggagctgacacagcagcaggagctgtatggacaggccctgcaggaaaaagtagccgaagttgagactaggctcagggaacagttatctgacaccgaaagaaggctgaatgaagctagacgcgagcacgccaaggcagtcgtcagccttagacagattcaaagacgcgcggcacaagaaaaagagcgctcacaggaactgcgcaggctccaagaagaagcccgtaaggaagagggacaacggcttgcccggagactgcaggagttggagcgggataagaacctcatgctggccacactgcagcaggaaggactcctgtccagatacaaacagcagcgtctcctgaccgtgcttccatcactgcttgacaaaaagaaatcggtcgttagcagcccaaggcctccggagtgcagcgcttcggctccagttgcagctgccgtacctactagggagtctattaagggttctctgtctgtgctattggatgacctgcaggatctttcggaggctatcagcaaggaagaagcggtttgccagggagacaatctggatcgatgcagcagttccaacccccagatgtctagttag

SEQ ID NO: 304477 - DNA, 2190 bp, Artificial Sequence
  derived and/or modified sequence
atgttcccccccagcggcagcaccggcctgatcccccccagccacttccaagcgcggccactctcaacactgccacgcatggctccaacatggctctctgacatacctctggtgcagccgccagggcaccaggacgtttctgagcggcgcttagacacccaacggcctcaggtgaccatgtgggaaagggacgtgagcagtgatcggcaagagcctggccgccggggccgcagctggggactggaaggatcgcaggctctatcccagcaagccgaggtaattgtgcgtcagctacaggaactcaggaggttggaggaggaggttagactgctcagggaaaccagcctgcagcagaaaatgaggttggaggcccaggctatggaactagaagccctggctagagctgagaaagctggcagggcggaggccgagggtttgcgcgcggccctggcaggcgcggaggtggtccgaaaaaatctggaagagggatctcaacgagagctggaggaagtacagcgtcttcaccaggaacagcttagctccttgacacaggcccatgaggaagcgcttagctctcttacctctaaagccgaaggactcgaaaaatcccttagttccctggagacccgccgggctggagaagctaaagaactcgccgaagcccagcgtgaagccgagctgctacggaagcagctgtccaaaactcaggaggatctcgaagcgcaggtaacgttggtggaaaacctgcgtaagtacgtgggcgaacaggtgccgtccgaggttcattctcagacgtgggagctcgagagacagaagcttctggaaacaatgcagcacttgcaggaggaccgggattcccttcatgccaccgccgagctcctgcaggtgcgagttcagtctctcacccatattctggccctacaggaagaagaattgactcgcaaggtgcaaccttccgacagcttagagcctgaattcacccgtaagtgccagtctctcctgaacagatggagggagaaagtgttcgccttgatggtgcagctaaaggctcaggagctggagcatagcgacagcgtcaaacagctgaaaggccaagtagcaagtctgcaagaaaaggttacatcccaatcccaagaacaagcaatactacagcgctccttgcaggacaaagcagccgaggttgaagttgaacggatgggtgcaaaggggctccaactggagctgtctagagctcaggaggccagacggagatggcaacagcagaccgcttctgccgaggaacagctgcgtttagttgtgaacgctgtgtcctcctgcccactgccaccaccagtcacagacgtgtccctcgagctccagcagctacgggaggagcgaaatcgtcttgatgcagagctccagctctctgcccgcctcatccagcaagaggttgggcgtgcaagagagcagggtgaggccgaacgccagcagttgtccaaagtagcccagcaactggagcaggagctgcagcagactcaagaatcactggcttcactcggtctgcagctggaggtggcccggcaagggcaacaggaatcaaccgaggaagcagcgtcccttaggcaagaattgactcagcaacaggaactctacggccaagctttacaggagaaagtagcagaagtggagacaagacttcgcgaacaactgtccgatacagagagacgccttaacgaggccagaagagagcatgcaaaggccgtggtatctctgcgtcagatacaaaggcgggctgcccaggagaaggagaggagccaggaactgcgcagactgcaggaggaggctcggaaggaagaaggtcagcgtcttgcaagacgcctgcaggagctggagagggataagaatctcatgttggccacactgcagcaggaggggctcctgtctcgatacaaacagcagaggctcctcactgtactaccatctctcctggataaaaaaaaatcggttgtgtcctcaccacggccgcctgagtgtagcgcaagtgctcccgtggctgcagctgtgccaacgagggaatccatcaaggggagtctctccgtcctgttggacgatcttcaggatctgagtgaggcgatctcaaaggaggaggccgtgtgccaaggcgacaatctcgacagatgctcatcgagcaacccccagatgtcatcctag

SEQ ID NO: 304478 - DNA, 2349 bp, Artificial Sequence
  derived and/or modified sequence
atgtttccgccttcgggaagcacaggcttgatacctcccagccattttcaagcacggcctctttcaaccttaccaaggatggcccctacctggttatcagacattcccctggtgcaaccacctggacatcaggatgtctccgaaaggcggctagatacccagcgccctcaggttacgatgtgggaaagggacgtgtccagtgatcggcaagagcccggacgtcgcggaagatcatggggtctcgaaggcagccaggctctcagccagcaagcagaggttattgtccgccaattgcaagagctgcgtcggcttgaagaggaggtgcggctcttacgcgaaacatccctccagcagaaaatgcgcctagaagcgcaagcaatggaactcgaagcgctagcaagggccgagaaggctggcagagctgaagcagagggtcttcgcgctgcactggccggagccgaggttgtcaggaagaatttagaggaaggaagccagcgcgaactagaggaggttcagagattgcaccaggagcagctgagttccctcacacaagcgcacgaggaagcactctcttccctcacctctaaagccgaagggctcgagaagagtctgtcaagcttggagacaagacgggctggcgaggcaaaggaacttgcggaagcccagagagaagccgaactcctgcgtaagcagctttctaagacacaggaggacttagaggctcaggtgacgctggtggagaatttacggaagtatgtgggtgagcaggtcccgtctgaagtacactcccaaacatgggagttggagaggcagaaactgctggagaccatgcaacacctccaggaagatagagactctttgcacgctactgcagaactgttgcaggtgagggtccagagcctgactcatattctggccttacaagaagaagaattaacccgtaaggtgcagccgtcagatagcctggagcctgaatttacccgtaaatgccagtcattgttgaaccggtggcgggagaaggtttttgcgctcatggtacaactgaaggcccaggaactcgagcacagtgattccgtgaaacagctgaaaggacaggtggcgtccttgcaagaaaaggtgacgagccaaagccaagaacaagctatccttcagcgtagcctgcaagataaggccgctgaagtggaggtcgagcggatgggggctaagggtttacagttggagctgagtagagcccaggaggccagaagaagatggcagcagcagactgcttctgccgaagaacagttgcgtttagtggttaatgctgtttccagctcccaaatatggctagagactacaatggccaaggttgaaggcgctgcagcccagctgccttctctgaacaataggctgtcctacgccgtaagaaaagtacacacaatacggggattgattgccagaaaacttgcacttgctcagctgcgccaggagagttgccctcttcctcctcccgtgacagatgtaagtctggagttgcagcagctccgcgaagagcgaaatagactcgacgccgagctgcagctcagtgcaaggctgatccagcaggaagtaggaagagcccgtgagcagggcgaagctgaacggcagcaactgtccaaggttgcacaacaactggaacaggaattacaacaaacacaggaatctctcgctagcctgggtctgcagcttgaggtggctaggcaggggcagcaggagtccacagaggaggcagcctccttgcgccaggaactgacgcagcaacaggaactgtatggtcaagcactccaggaaaaagtggcggaggttgaaactcggcttagagagcagttatccgatacagagcgcagactgaacgaggcccgaagagaacacgctaaagccgtggtgtccctccgacagatccagcgacgtgctgcccaggaaaaagaacgctcccaggagcttaggcggctgcaggaggaggcacgtaaggaagaaggacagaggctggccaggagactgcaggagctcgaacgcgataaaaatcttatgcttgcaaccctccagcaagaaggcctgcttagccggtacaagcaacagcgactgcttaccgtgctcccatcattactggacaaaaagaagagtgtcgtgtcaagccctcggcctcctgaatgtagcgcttcagcccctgtggccgctgctgtgccgaccagagaaagcattaaagggtctttaagtgtccttttggatgacctgcaagatctgtccgaagccatcagtaaagaagaggccgtgtgtcagggagacaatctggacaggtgctccagcagtaaccctcagatgtccagttag

SEQ ID NO: 304479 - DNA, 2349 bp, Artificial Sequence
  derived and/or modified sequence
atgttccccccatctgggtctactgggcttattcctccatcccactttcaggctcgccctctgagcaccctcccaaggatggctccaacatggctgagcgacatccctttagtccagccaccgggacaccaggatgtgtctgagaggcggttggacacgcagcgccctcaagtcaccatgtgggagagagacgtgagcagtgacaggcaggagcccggtcggaggggcagatcttggggattggaaggcagccaggccctgagtcagcaggccgaggtcatcgtgcgccaactgcaggaattgagaaggcttgaggaggaagttcgcctgttgcgggaaacgtcgctccagcagaaaatgcgcctggaggcccaagccatggagctggaggccttggccagggctgaaaaggctgggagggcggaggctgaaggtcttcgagccgcactggctggagctgaagtcgtcagaaagaacttggaggaaggctctcagcgggagctggaggaagtacaacggctccaccaggaacagctgtccagcctgacccaggcccatgaggaagccctcagcagcttgacgagtaaggcggagggacttgagaagtcattgtcttctctggaaacccgacgcgctggcgaggccaaggagctggcagaggctcagcgtgaagcagagctcctgcgaaaacagcttagtaaaacccaagaagatcttgaagcccaagtcacccttgttgagaaccttcgtaaatatgtaggggagcaggtgccttccgaggttcacagtcagacgtgggagctcgagcgacagaaactcttggagaccatgcagcatctccaggaagacagagattccctacacgctaccgccgaactgctacaagtcagggtacagtcccttacacacattctcgccctgcaggaggaggagctgacaagaaaagtccagccctcagatagcctggaacctgagtttacacgaaagtgccagtcactcctgaaccggtggcgagagaaagtttttgccctgatggtgcaactcaaggcacaggagttggagcacagcgacagcgttaagcaactgaaaggccaggttgcctctctgcaggaaaaggtaacctcccagtctcaggaacaggcgatacttcaaagaagcctccaggataaggccgcagaggtcgaggtggaaagaatgggggcaaaggggctccagttggaattgagccgggcacaggaggctagacgtaggtggcagcagcagacggccagcgccgaggagcagctgagactggtggtgaatgccgtgagtagcagtcagatatggttggaaaccactatggccaaagtcgagggtgcagctgcccagctcccaagtctgaataaccgtctcagctatgccgtgagaaaagtgcacactattcgaggattgatcgcgaggaagctggcattggcccagctccggcaagagtcatgtccgctccctcccccagtgacggacgtcagccttgagctacagcagctcagggaagaaagaaaccggctggatgccgagctccagctttctgcccgactgatacaacaggaagtgggccgagcaagggagcagggggaagcagaaagacagcagctctctaaggttgcccagcagcttgagcaggaactgcagcagactcaggaaagtctcgcgtccctcggattacagctagaagtcgcccgacagggtcagcaagagtccaccgaggaggcagctagtctgcgacaagaactgactcaacaacaagaactctatgggcaggccttacaggaaaaggtggccgaagtcgagaccaggttgcgcgaacagctgagcgacacggagcgcaggttgaatgaggcgagacgcgaacatgcaaaagcagtcgtgagcctgcgccagattcaaaggcgggcagcccaggagaaagagagatcacaggaacttcgcagactgcaagaagaagcaagaaaagaagaagggcagaggctcgcgaggaggctgcaggagctagaacgcgataagaatctgatgctggcgaccctgcagcaggaggggctgctgtcacggtataaacagcaacgactcctgaccgtgctaccctcactgctggacaagaagaaaagcgtcgtgtcctcgcctagaccgcctgagtgctctgcaagcgcacctgtggctgctgccgtcccaactcgggagtcgatcaagggatcactctcagtgcttctggacgacctgcaagacctgtcagaggccatttctaaggaagaagccgtgtgccagggggacaacctggaccggtgttcctctagcaaccctcaaatgtcaagctag

SEQ ID NO: 304480 - DNA, 2190 bp, Artificial Sequence
  derived and/or modified sequence
atgtttccaccatccggctctactgggctcattccaccctcccactttcaggcacgaccattgtccactctgccacgcatggcccctacttggctctccgatatacctctcgtgcagccacctgggcaccaggacgtgtccgaacgtaggctcgatacccaacggccacaggtcaccatgtgggagcgggatgtgtcttctgaccggcaggagcctggtagaagggggcgtagctgggggttggagggtagtcaagcgctttctcagcaggctgaagtcatcgtgagacagctgcaggagctccgcagattggaggaggaagttaggctgcttagagagacatctctgcagcaaaaaatgaggctggaggcccaggcaatggaacttgaggctcttgccagggctgagaaagccggacgagccgaagcagaaggacttcgcgctgcactggccggagctgaggtggtgcgaaaaaatttggaggagggctctcagagagagctggaagaagtccaacgactacaccaggaacagctgtccagcctcacacaggcccacgaagaggccctcagcagtttgacctccaaggccgagggtctagaaaaatccctgagcagcctcgagacacgtagggcaggtgaagccaaagaactggctgaagcccaacgcgaggcggagttacttcgaaagcaattatctaaaacacaggaggacctcgaagcccaggtaactctggtggaaaatcttagaaagtacgtcggggagcaagtgccctctgaggttcatagccagacatgggaactcgagcgacagaaattgctggaaactatgcagcatctgcaggaggatcgtgattccctacatgctaccgccgagctgcttcaggtgagggtccaatccctgactcatattctcgcacttcaagaggaggagctcacgagaaaagtacagccttcagactccctggagcccgaattcacccggaaatgccagtccctgctgaaccggtggagagagaaagtgtttgccttgatggttcagcttaaggctcaagagctcgagcacagcgattccgtcaagcagttaaaagggcaggtggccagcttacaagagaaagtcacctcgcagagccaggagcaggctatcctgcaacgatcgctgcaggataaagctgctgaggtcgaggtggaaagaatgggggctaaggggctccaattggagcttagccgggctcaagaagccagaaggcgctggcagcaacaaaccgcatcagctgaggagcagcttcggctggtggttaatgctgtctcttcttgccctttgccccctcccgtcaccgacgtcagcctggagctccagcagctccgtgaggaacgcaaccggctcgacgccgagctccagttgtccgccaggctcatccagcaggaagtaggccgtgccagggagcagggcgaggccgagcggcaacagctgtccaaggttgctcagcagctggaacaagaactgcaacagacccaggagagtttagcttcccttggattgcagttagaggtagcccgtcagggtcagcaggagtcaaccgaagaggctgctagcctgagacaggagctcacccagcagcaagagctgtatggccaggcactgcaggaaaaggtggctgaggtggaaacgaggctgcgggagcagctgtccgataccgagcggagactcaatgaggcaaggagggaacacgccaaggctgtggtcagtctgcggcagatccagcgccgagccgcacaggagaaagagagatcacaggaattacgacgtttgcaggaagaggcaagaaaagaggaggggcagcgcctggctaggagattacaggaactcgaacgcgacaagaaccttatgctcgcaacacttcagcaagaaggcctgctgagtcgatacaagcaacagagactcctgacagtgctgcctagcctattggataaaaagaagagcgtcgtttcatctccacggcctcccgagtgtagcgcatctgctcctgtcgccgctgccgtacccactagggagtccattaaggggtctctctcagtcttactcgacgatttgcaagatttgtctgaggccatatcgaaagaagaagccgtttgccaaggagacaatcttgatcgttgtagctctagcaatccacaaatgagttcttag

SEQ ID NO: 304481 - DNA, 2190 bp, Artificial Sequence
  derived and/or modified sequence
atgtttcctccatccgggtctactggcttaatcccgccatcccatttccaggcaagacctctgtctactctgccacgtatggcgcctacctggctgtcggatattccgctggtacaacccccagggcaccaagacgtaagcgagcggaggctggatacacagcgaccccaagtcacgatgtgggagcgagatgtcagttccgatcggcaggagcccggtaggagaggaaggagctggggtctcgagggctctcaggccctttctcaacaggccgaagtaatcgtaaggcagctccaggaactgcgtcgccttgaagaggaagtgagactactgcgcgagacttcgctccagcagaaaatgcgtctcgaagcgcaggcaatggaactggaggcgttggctagagccgaaaaggcaggtagggcagaggctgaagggctcagagcagcactggcaggcgctgaagttgtgcgaaaaaacttggaggagggttcacagagagagctcgaggaggttcagcgcctgcaccaggagcagctgtccagtctcacccaggctcacgaagaggccttgagtagtctgacgtccaaagcagagggcctggaaaaatccctttcatctctcgaaactagaagggctggcgaagctaaggagttggcagaggcccagcgcgaagctgaactccttaggaagcagctttctaagacacaggaggacctggaagcccaagtgaccctcgtggaaaacttaagaaagtacgtgggagaacaggtgccctccgaagtacattctcagacttgggaactggaacggcagaagcttctggaaacaatgcagcacctgcaggaggaccgcgattctctgcatgctaccgcggagctgctgcaagttcgggttcagtctctaacacacatcctggcactccaggaggaggagctgacccgtaaggttcagcccagtgacagtcttgagcctgagttcactagaaagtgtcagagcctgttaaatcgttggagagagaaggtgtttgccctcatggtgcagttgaaagcacaggagctcgagcacagtgatagtgtgaagcaattaaagggtcaagtagcatcccttcaggagaaagttactagccaatcccaagaacaggccattctccagagatcactccaggacaaggcagctgaagtggaagttgagaggatgggagccaagggccttcagctggaactgtcacgagcgcaggaggctagacgccgttggcagcaacaaacagctagcgcagaagagcagctgagattggtggtcaacgccgtgtcctcttgtcctttaccaccacccgtaactgacgtgtctcttgagctgcagcagttgcgggaagagcggaataggctagacgctgagctgcaactgagtgcaagactcatccagcaggaagtcgggagggcaagagagcagggggaggcagagaggcagcagctctctaaggtcgcacagcagctagaacaggaacttcaacaaacacaggagagcctggccagtctaggactacagctggaagtcgccagacaaggtcagcaggagagtaccgaggaagcagcttccctcagacaggaattaactcagcaacaggaactatacggacaagcactgcaggagaaggtcgccgaggtcgagacccgactgagagaacaactctccgacactgaaagaaggctaaacgaggccaggcgagaacacgctaaggcagtggttagtctacgacagattcagcgcagagcagcgcaggagaaggagcgctcccaggaattgagaagacttcaggaggaggccaggaaagaggaaggtcagaggctggctagacggcttcaggaacttgagagggacaaaaatttaatgttagctaccctgcaacaggaggggctgctctctcggtacaagcagcagcgcctcctgactgtgctgccatccttactggataaaaaaaagtctgtggtcagtagccctcgccctccagaatgttctgcatcagccccagtggccgctgctgtccccacaagggagagcattaaaggaagtttgtccgtgctgctcgatgatctacaggacctgagcgaagcaattagtaaggaggaagcagtgtgccaaggggacaacttagacaggtgctcaagtagcaaccctcagatgagttcctag

SEQ ID NO: 304482 - protein, 191 aa, Artificial Sequence
  derived and/or modified sequence
MFPPSGHQDVSERRLDTQRPQVTMWERDVSSDRQEPGRRGRSWGLEGSQALSQQAEVIVRQLQELRRLEEEVRLLRETSLQQKMRLEAQAMELEALARAEKAGRAEAEGLRAALAGAEVVRKNLEEGSQRELEEVQRLHQEQLSSLTQAHEEALSSLTSKAEGLEKSLSSLETRRAGEAKELAEAQREAEL

SEQ ID NO: 304483 - protein, 159 aa, Artificial Sequence
  derived and/or modified sequence
MFPPSGHQDVSERRLDTQRPQVTMWERDVSSDRQEPGRRGRSWGLEGSQALSQQAEVIVRQLQELRRLEEEVRLLRETSLQQKMRLEAQAMELEALARAEKAGRAEAEGLRAALAGAEVVRKNLEEGSQRELEEVQRLHQEQLSSLTQAHEEALSSLTS

SEQ ID NO: 304484 - protein, 316 aa, Artificial Sequence
  derived and/or modified sequence
MFPPSGHQDVSERRLDTQRPQVTMWERDVSSDRQEPGRRGRSWGLEGSQALSQQAEVIVRQLQELRRLEEEVRLLRETSLQQKMRLEAQAMELEALARAEKAGRAEAEGLRAALAGAEVVRKNLEEGSQRELEEVQRLHQEQLSSLTQAHEEALSSLTSKAEGLEKSLSSLETRRAGEAKELAEAQREAELLRKQLSKTQEDLEAQVTLVENLRKYVGEQVPSEVHSQTWELERQKLLETMQHLQEDRDSLHATAELLQVRVQSLTHILALQEEELTRKVQPSDSLEPEFTRKCQSLLNRWREKVFALMVQLKAQE

SEQ ID NO: 304485 - DNA, 951 bp, Artificial Sequence
  derived and/or modified sequence
atgttcccccccagcggccaccaggacgtgagcgagagaagactggacacccagagaccccaggtgaccatgtgggagagagacgtgagcagcgacagacaggagcccggcagaagaggcagaagctggggcctggagggcagccaggccctgagccagcaggccgaggtgatcgtgagacagctgcaggagctgagaagactggaggaggaggtgagactgctgagagagaccagcctgcagcagaagatgagactggaggcccaggccatggagctggaggccctggccagagccgagaaggccggcagagccgaggccgagggcctgagagccgccctggccggcgccgaggtggtgagaaagaacctggaggagggcagccagagagagctggaggaggtgcagagactgcaccaggagcagctgagcagcctgacccaggcccacgaggaggccctgagcagcctgaccagcaaggccgagggcctggagaagagcctgagcagcctggagaccagaagagccggcgaggccaaggagctggccgaggcccagagagaggccgagctgctgagaaagcagctgagcaagacccaggaggacctggaggcccaggtgaccctggtggagaacctgagaaagtacgtgggcgagcaggtgcccagcgaggtgcacagccagacctgggagctggagagacagaagctgctggagaccatgcagcacctgcaggaggacagagacagcctgcacgccaccgccgagctgctgcaggtgagagtgcagagcctgacccacatcctggccctgcaggaggaggagctgaccagaaaggtgcagcccagcgacagcctggagcccgagttcaccagaaagtgccagagcctgctgaacagatggagagagaaggtgttcgccctgatggtgcagctgaaggcccaggagtag

SEQ ID NO: 304486 - DNA, 576 bp, Artificial Sequence
  derived and/or modified sequence
atgttcccccccagcggccaccaggacgtgagcgagagaagactggacacccagagaccccaggtgaccatgtgggagagagacgtgagcagcgacagacaggagcccggcagaagaggcagaagctggggcctggagggcagccaggccctgagccagcaggccgaggtgatcgtgagacagctgcaggagctgagaagactggaggaggaggtgagactgctgagagagaccagcctgcagcagaagatgagactggaggcccaggccatggagctggaggccctggccagagccgagaaggccggcagagccgaggccgagggcctgagagccgccctggccggcgccgaggtggtgagaaagaacctggaggagggcagccagagagagctggaggaggtgcagagactgcaccaggagcagctgagcagcctgacccaggcccacgaggaggccctgagcagcctgaccagcaaggccgagggcctggagaagagcctgagcagcctggagaccagaagagccggcgaggccaaggagctggccgaggcccagagagaggccgagctgtag

SEQ ID NO: 304487 - DNA, 480 bp, Artificial Sequence
  derived and/or modified sequence
atgttcccccccagcggccaccaggacgtgagcgagagaagactggacacccagagaccccaggtgaccatgtgggagagagacgtgagcagcgacagacaggagcccggcagaagaggcagaagctggggcctggagggcagccaggccctgagccagcaggccgaggtgatcgtgagacagctgcaggagctgagaagactggaggaggaggtgagactgctgagagagaccagcctgcagcagaagatgagactggaggcccaggccatggagctggaggccctggccagagccgagaaggccggcagagccgaggccgagggcctgagagccgccctggccggcgccgaggtggtgagaaagaacctggaggagggcagccagagagagctggaggaggtgcagagactgcaccaggagcagctgagcagcctgacccaggcccacgaggaggccctgagcagcctgaccagctag

SEQ ID NO: 304488 - DNA, 951 bp, Artificial Sequence
  derived and/or modified sequence
atgtttccaccttccggacatcaggatgttagcgagcgacggctcgatacgcagagaccccaagtgacgatgtgggaacgggacgtgagctcagaccgccaggaacccggaaggcggggacggtcttggggactagagggatcccaggcactaagtcaacaggcagaggtcattgtgcgacagttacaggaactccgcaggctggaagaagaggtgcgtctgctgcgtgaaacctctctacagcagaaaatgagattggaagcccaggctatggaactggaagctttagcccgagccgaaaaggccggcagggccgaggctgagggccttagggcagcactcgcaggggccgaggtcgtccgaaagaacctggaggaaggctcccagagagagcttgaggaagtgcagcgccttcatcaggagcagcttagtagtctgactcaggcacacgaggaagccctgtcaagtctgacaagtaaagcagagggccttgaaaagtctctgagtagcttggaaactcgaagggctggcgaggcaaaggagctggctgaggcacagcgggaggcagagctgttaaggaagcagctctctaagactcaggaggatctggaggctcaggtgaccctggtagagaacctgaggaaatatgtgggagagcaggtaccgtccgaagtccacagccagacctgggaactggagcggcagaagttgctcgagaccatgcagcatctacaggaggaccgagactccttgcacgcgactgcagagctcctgcaggtcagagtgcagtcccttacgcatattctggctctgcaagaagaggaactgacaaggaaagttcagccctcagatagtctcgagcccgaatttacccggaaatgccagagtctcctgaatcgctggcgagagaaggtgtttgctttaatggtgcagctgaaggcccaagaatag

SEQ ID NO: 304489 - DNA, 576 bp, Artificial Sequence
  derived and/or modified sequence
atgttccctccttctggacatcaagatgtttccgagcgccgcctcgatacgcaacggcctcaggtaactatgtgggaacgcgatgtctcaagtgaccggcaggagcctgggaggagggggcgtagttggggactcgaaggaagccaggctctatctcagcaggccgaggtaatcgtaagacagctgcaagagcttagacgcctggaggaggaagtcagacttctgcgggagaccagcctgcagcagaaaatgagattggaagcccaggccatggaattggaggccctcgccagagctgaaaaggcgggaagggcagaagccgaaggcctgcgtgctgccttagctggtgctgaagttgtgagaaagaatcttgaggaaggctcacagcgggagttagaggaggtgcagcgattgcaccaggaacaattgtcttcactgactcaggcacatgaagaggccctatccagcctgacaagtaaagcagaagggttggagaagtccctatccagcctcgagacccgacgtgctggagaggctaaggagctcgctgaagcacagagagaagccgaactgtag

SEQ ID NO: 304490 - DNA, 480 bp, Artificial Sequence
  derived and/or modified sequence
atgttccccccaagcggacatcaggatgtcagtgagaggagattggatacccaaaggcctcaagtgaccatgtgggagagggacgtatcttcggaccgtcaagagccaggacgcaggggtagatcttggggattagagggcagtcaggccctgtcccagcaggccgaagtcattgttcgacaactgcaagaactgcggcgccttgaggaagaggtacggctcctgagggaaacctcactgcagcagaaaatgcgactggaagctcaggccatggaactggaagccctggctagagccgagaaggcaggccgtgccgaggcagaagggctgcgggcagctttagccggagcggaagttgtcaggaagaatctggaggagggaagtcagagagagctggaagaggtgcaacggctccaccaggagcagctgagttctctgactcaggcccatgaggaagccctgtcctccctcacctcctag

SEQ ID NO: 304491 - DNA, 951 bp, Artificial Sequence
  derived and/or modified sequence
atgtttcctccttctggccaccaggatgtgtctgaaagaaggctggacacccagaggccccaggtgaccatgtgggagagagatgtgtccagtgaccggcaggagcccggccggcggggccgctcctggggcctggagggcagccaggccctgagccagcaggccgaggtgattgtgcggcagctgcaggagctgcggcggctggaggaggaggtgcggctgctgcgggagaccagcctgcagcagaagatgaggctggaggcccaggccatggagctggaggccctggcccgggcagagaaggccggccgggcagaggccgagggcctgcgggccgccctggccggggctgaggtggtgaggaagaacctggaggagggcagccagcgggagctggaggaggtgcagaggctgcaccaggagcagctgagcagcctgacccaggcccacgaggaggccctgagcagcctgaccagcaaggccgagggcctggagaagagcctgagcagcctggagacccggcgggccggggaggccaaggagctggccgaggcccagcgggaggccgagctgctgaggaagcagctgagcaagacccaggaggacctggaggcccaggtgaccctggtggagaacctgaggaaatatgtgggggagcaggtgcccagcgaggtgcacagccagacctgggagctggagcggcagaagctgctggagaccatgcagcacctgcaggaggaccgggacagcctgcacgccacagctgagctgctgcaggtgcgggtgcagagcctgacccacatcctggccctgcaggaggaggagctgaccaggaaggtgcagcccagcgacagcctggagcctgagttcaccaggaagtgccagagcctgctgaaccgctggagggagaaggtgtttgccctgatggtgcagctgaaggcccaggagtag

SEQ ID NO: 304492 - DNA, 576 bp, Artificial Sequence
  derived and/or modified sequence
atgtttcctccttctggccaccaggatgtgtctgaaagaaggctggacacccagaggccccaggtgaccatgtgggagagagatgtgtccagtgaccggcaggagcccggccggcggggccgctcctggggcctggagggcagccaggccctgagccagcaggccgaggtgattgtgcggcagctgcaggagctgcggcggctggaggaggaggtgcggctgctgcgggagaccagcctgcagcagaagatgaggctggaggcccaggccatggagctggaggccctggcccgggcagagaaggccggccgggcagaggccgagggcctgcgggccgccctggccggggctgaggtggtgaggaagaacctggaggagggcagccagcgggagctggaggaggtgcagaggctgcaccaggagcagctgagcagcctgacccaggcccacgaggaggccctgagcagcctgaccagcaaggccgagggcctggagaagagcctgagcagcctggagacccggcgggccggggaggccaaggagctggccgaggcccagcgggaggccgagctgtag

SEQ ID NO: 304493 - DNA, 480 bp, Artificial Sequence
  derived and/or modified sequence
atgtttcctccttctggccaccaggatgtgtctgaaagaaggctggacacccagaggccccaggtgaccatgtgggagagagatgtgtccagtgaccggcaggagcccggccggcggggccgctcctggggcctggagggcagccaggccctgagccagcaggccgaggtgattgtgcggcagctgcaggagctgcggcggctggaggaggaggtgcggctgctgcgggagaccagcctgcagcagaagatgaggctggaggcccaggccatggagctggaggccctggcccgggcagagaaggccggccgggcagaggccgagggcctgcgggccgccctggccggggctgaggtggtgaggaagaacctggaggagggcagccagcgggagctggaggaggtgcagaggctgcaccaggagcagctgagcagcctgacccaggcccacgaggaggccctgagcagcctgaccagctag

SEQ ID NO: 304494 - DNA, 951 bp, Artificial Sequence
  derived and/or modified sequence
atgttcccccccagcggccaccaggacgtgagcgagcggcggctggacactcagcgaccgcaagtaacaatgtgggagcgagacgtgagttccgaccgacaggagccagggcgacgagggagaagctggggactggagggatctcaggccctctctcagcaggctgaagtgatcgttcggcaactgcaagagctccggcggctcgaagaagaggtgagactcctgagagaaacaagcctgcagcagaagatgagattagaggcacaggccatggagcttgaggcactggctcgggccgagaaggcaggaagagccgaggccgagggcttacgggcagcactggccggagctgaagtcgtgcggaagaatctcgaggagggaagccagcgggaactggaagaggtgcagaggctgcatcaggaacagctcagttctcttacccaagcccacgaagaggccctcagtagtttaacatccaaagccgaggggctggagaagtctctaagcagcctggagaccaggcgggcaggggaagctaaggagctggccgaggcccagagggaagcagaacttctcaggaagcagctctccaaaacgcaggaagacctggaggcacaagtcacactggttgagaacttgagaaaatatgtcggtgagcaggtgcccagcgaagtgcacagccagacgtgggagcttgagcgccagaagctgctggagacgatgcaacatctgcaggaggatagagattcccttcacgctactgcggagctgctccaggtacgcgtgcagagcctcacacatatcctggccctgcaggaggaagagctgacccggaaggtacagcccagcgattccctggagcctgaatttactcggaagtgccaatccttgcttaaccgctggcgcgagaaagtatttgccctgatggtccaacttaaggcacaggaatag

SEQ ID NO: 304495 - DNA, 576 bp, Artificial Sequence
  derived and/or modified sequence
atgttcccccccagcggccaccaggacgtgagcgagcggcggctggacactcagcgtcctcaggtcaccatgtgggagcgagacgtgagctctgaccgacaggaacccggtcgccgaggcaggtcttggggccttgaaggctcacaggcactttctcagcaggcagaggtgatcgttcgccagctgcaggaacttcgacggcttgaggaagaagtgaggctcctgagggagacatcccttcagcagaagatgaggctggaagctcaggccatggaactcgaagccttagcccgcgccgagaaggccggaagagcagaggccgagggcctgcgtgcagccctggccggcgcagaggtcgtccgcaagaacttagaagaggggagccagcgcgagctcgaggaggtacaaaggctgcaccaagaacagctgagctccctgacccaggcacatgaagaggctttaagctcccttacctcaaaggctgaggggttggagaaatccctatcttcgctagaaacccgcagggccggagaagccaaggaactggctgaagcccagagggaagcagagctctag

SEQ ID NO: 304496 - DNA, 480 bp, Artificial Sequence
  derived and/or modified sequence
atgttcccccccagcggccaccaggacgtgagcgagcggcggctggacacccaaaggccacaggtcacaatgtgggaaagggacgtgagctccgaccggcaggagcctggtcggcgcggccgctcttggggtctggaaggctcacaggctctgagccagcaggctgaagtgattgtccggcagttgcaagagctccgacgactggaggaggaagtgaggctcctccgggaaacttcgctacaacagaagatgcggttagaagcccaggctatggagttggaagccctggcgcgtgcagaaaaggctggtcgtgctgaagctgaagggctccgcgcagctttggcgggagctgaggtggtgcgtaaaaacctggaggagggatctcagcgcgagcttgaagaggtgcagaggcttcaccaggagcagctcagctctctgactcaggcccatgaagaggctctgagtagcctaaccagctag

SEQ ID NO: 304497 - DNA, 951 bp, Artificial Sequence
  derived and/or modified sequence
atgttcccaccatccggacaccaggacgtctccgagcggaggctggatacacagagaccacaggtgaccatgtgggaaagagacgtttccagtgatcgccaggaacctggaagacgtggcagatcttggggactggaggggtcccaggctctgtcgcagcaggccgaagtgattgtacgtcagctccaagagctgagacgactcgaagaggaagttagattgctacgcgagacatctttgcagcagaaaatgcgcctcgaagcccaggccatggagctcgaagcactggctagagccgaaaaagccggacgtgctgaagctgaaggtctacgggctgccctggcgggagcggaagtggtccgaaagaacctggaagaaggcagccagcgcgagcttgaggaggtccaacggctgcatcaagaacaactttcttctctcacccaggcacatgaggaggcattgagtagcctgacctccaaggcagagggactagaaaagagtctcagtagcctcgaaacccgccgtgccggagaggctaaagagcttgcagaggctcagagagaggccgaactcctcaggaaacagttgtcaaagacacaggaggatctggaggcacaggtcactctggtggagaacttacggaagtatgtgggagaacaggtgcccagcgaggtgcacagtcaaacatgggagctggagcgccaaaaactgctggagaccatgcaacacttgcaggaagacagagatagcctccacgccaccgccgagcttctccaagtgagagtccagtccctgacacacatactagcccttcaagaagaagaactaacaaggaaggtgcagcctagcgacagcctggagccggagtttacccgcaagtgtcaatcacttctgaatcgttggcgtgagaaagtttttgctctgatggtccagttgaaggctcaggagtag

SEQ ID NO: 304498 - DNA, 576 bp, Artificial Sequence
  derived and/or modified sequence
atgtttcccccatcgggacatcaggatgtgagtgaacggaggctagacacacagcgtcctcaagtgactatgtgggagcgtgatgtgtccagcgatcggcaagagccaggcaggcgtggaaggagctggggcttggaaggctctcaggccctatcacagcaggcagaagtcatcgtgaggcagctccaggagctgcgtcggcttgaggaggaggtgagattgttaagagagacgtcactccagcaaaaaatgcggctggaagctcaggccatggagctagaagcccttgcaagggctgaaaaggcaggacgcgcagaagctgaaggtctcagagctgctctggcaggcgctgaggtggtgagaaaaaatctcgaggaggggtctcaacgagaactagaggaagtgcagcgtctgcatcaggagcagctgtctagcctgacccaagcacacgaggaggccttgagttccttaacaagcaaggcagaaggtctggaaaaatccctcagcagccttgaaacacggcgagcgggtgaagcaaaagagctagcagaggcccagagggaagcagaactatag

SEQ ID NO: 304499 - DNA, 480 bp, Artificial Sequence
  derived and/or modified sequence
atgtttcctccttcgggccaccaagacgtttcggagaggaggctggatacacagcgccctcaagtgaccatgtgggagcgtgatgtgtcaagcgataggcaagaacctggacggcgtgggcgaagctggggcttagaggggagccaggccctgtctcagcaggcagaggtgattgtgcgacaactccaggagctaaggcggcttgaggaggaggtcagactcctgcgagagacctcgttgcagcaaaagatgaggctcgaggctcaagctatggagctggaggcactggccagggcagagaaggctggaagggccgaggccgaagggctccgtgctgcgctggcaggtgctgaagtggtccgcaagaatctagaggagggttcccaacgcgagctcgaagaggttcagcgtttgcatcaggaacagctgtcctccctgacacaggctcacgaggaagctctcagctccctcacttcttag

SEQ ID NO: 304500 - DNA, 516 bp, Artificial Sequence
  derived and/or modified sequence
atgttcccccccagcggccagtgggaccagaccagaggcgtggtggtggtgagcgcctgggagaccgaccacctgtgcttctgcaacagcagcggcagcaccggcctgatcccccccagccacttccaggccagacccctgagcaccctgcccagaatggcccccacctggctgagcgacatccccctggtgcagccccccggccaccaggacgtgagcgagagaagactggacacccagagaccccaggtgaccatgtgggagagagacgtgagcagcgacagacaggagcccggcagaagaggcagaagctggggcctggagggcagccaggccctgagccagcaggccgaggtgatcgtgagacagctgcaggagctgagaagactggaggaggaggtgagactgctgagagagaccagcctgcagcagaagatgagactggaggcccaggccatggagctggaggccctggccagagccgagaaggccggcagagccgaggccgagggctag

SEQ ID NO: 304501 - DNA, 384 bp, Artificial Sequence
  derived and/or modified sequence
atgttcccccccagcggccagtgggaccagaccagaggcgtggtggtggtgagcgcctgggagaccgaccacctgtgcttctgcaacagcagcggcagcaccggcctgatcccccccagccacttccaggccagacccctgagcaccctgcccagaatggcccccacctggctgagcgacatccccctggtgcagccccccggccaccaggacgtgagcgagagaagactggacacccagagaccccaggtgaccatgtgggagagagacgtgagcagcgacagacaggagcccggcagaagaggcagaagctggggcctggagggcagccaggccctgagccagcaggccgaggtgatcgtgagacagctgcaggagctgtag

SEQ ID NO: 304502 - DNA, 516 bp, Artificial Sequence
  derived and/or modified sequence
atgttcccccccagcggccagtgggaccagaccagaggcgtggtggtggtgagcgcctgggagaccgaccacctgtgcttctgcaacagcagcggcagcaccggcctgatcccccccagccacttccaggccagacccctgagcaccctgcccagaatggcccccacctggctgagcgacatccccctggtgcagccccccggccaccaggacgtgagcgagagaagactggacacccagagaccccaggtgaccatgtgggagagagacgtgagcagcgacagacaggagcccggcagaagaggcagaagctggggcctggagggcagccaggccctgagccagcaggccgaggtgatcgtgagacagctgcaggagctgagatggctggaggaggaggtgtggctgctgagagagaccagcctgcagcagaagatgagactggaggcccaggccatggagctggaggccctggccagagccgagaaggccggcagagccgaggccgagggctag

SEQ ID NO: 304503 - DNA, 462 bp, Artificial Sequence
  derived and/or modified sequence
atgttcccccccagcggcagcaccggcctgatcccccccagccacttccaggccagacccctgagcaccctgcccagaatggcccccacctggctgagcgacatccccctggtgcagccccccggccaccaggacgtgagcgagagaagactggacacccagagaccccaggtgaccatgtgggagagagacgtgagcagcgacagacaggagcccggcagaagaggcagaagctggggcctggagggcagccaggccctgagccagcaggccgaggtgatcgtgagacagctgcaggagctgagaagactggaggaggaggtgagactgctgagagagaccagcctgcagcagaagatgagactggaggcccaggccatggagctggaggccctggccagagccgagaaggccggcagagccgaggccgagggcctgagagccgccctggccggcgcctag

SEQ ID NO: 304504 - DNA, 357 bp, Artificial Sequence
  derived and/or modified sequence
atgttcccccccagcggcagcaccggcctgatcccccccagccacttccaggccagacccctgagcaccctgcccagaatggcccccacctggctgagcgacatccccctggtgcagccccccggccaccaggacgtgagcgagagaagactggacacccagagaccccaggtgaccatgtgggagagagacgtgagcagcgacagacaggagcccggcagaagaggcagaagctggggcctggagggcagccaggccctgagccagcaggccgaggtgatcgtgagacagctgcaggagctgagaagactggaggaggaggtgagactgctgagagagaccagcctgcagcagtag

SEQ ID NO: 304505 - DNA, 462 bp, Artificial Sequence
  derived and/or modified sequence
atgttcccccccagcggcagcaccggcctgatcccccccagccacttccaggccagacccctgagcaccctgcccagaatggcccccacctggctgagcgacatccccctggtgcagccccccggccaccaggacgtgagcgagagaagactggacacccagagaccccaggtgaccatgtgggagagagacgtgagcagcgacagacaggagcccggcagaagaggcagaagctggggcctggagggcagccaggccctgagccagcaggccgaggtgatcgtgagacagctgcaggagctgagatggctggaggaggaggtgtggctgctgagagagaccagcctgcagcagaagatgagactggaggcccaggccatggagctggaggccctggccagagccgagaaggccggcagagccgaggccgagggcctgagagccgccctggccggcgcctag

SEQ ID NO: 304506 - DNA, 567 bp, Artificial Sequence
  derived and/or modified sequence
atgttcccccccagcggcagcaccggcctgatcccccccagccacttccaggccagacccctgagcaccctgcccagaatggcccccacctggctgagcgacatccccctggtgcagccccccggccaccaggacgtgagcgagagaagactggacacccagagaccccaggtgaccatgtgggagagagacgtgagcagcgacagacaggagcccggcagaagaggcagaagctggggcctggagggcagccaggccctgagccagcaggccgaggtgatcgtgagacagctgcaggagctgagaagactggaggaggaggtgagactgctgagagagaccagcctgcagcagaagatgagactggaggcccaggccatggagctggaggccctggccagagccgagaaggccggcagagccgaggccgagggcctgagagccgccctggccggcgccgaggtggtgagaaagaacctggaggagggcagccagagagagctggaggaggtgcagagactgcaccaggagcagctgagcagcctgacccaggcccacgaggagtag

SEQ ID NO: 304507 - DNA, 357 bp, Artificial Sequence
  derived and/or modified sequence
atgttcccccccagcggcagcaccggcctgatcccccccagccacttccaggccagacccctgagcaccctgcccagaatggcccccacctggctgagcgacatccccctggtgcagccccccggccaccaggacgtgagcgagagaagactggacacccagagaccccaggtgaccatgtgggagagagacgtgagcagcgacagacaggagcccggcagaagaggcagaagctggggcctggagggcagccaggccctgagccagcaggccgaggtgatcgtgagacagctgcaggagctgagatggctggaggaggaggtgtggctgctgagagagaccagcctgcagcagtag

SEQ ID NO: 304508 - DNA, 423 bp, Artificial Sequence
  derived and/or modified sequence
atgttcccccccagcggcagcaccggcctgatcccccccagccacttccaggccagacccctgagcaccctgcccagaatggcccccacctggctgagcgacatccccctggtgcagccccccggccaccaggacgtgagcgagagaagactggacacccagagaccccaggtgaccatgtgggagagagacgtgagcagcgacagacaggagcccggcagaagaggcagaagctggggcctggagggcagccaggccctgagccagcaggccgaggtgatcgtgagacagctgcaggagctgagaagactggaggaggaggtgagactgctgagagagaccagcctgcagcagaagatgagactggaggcccaggccatggagctggaggccctggccagagccgagaaggccggcagatag

SEQ ID NO: 304509 - DNA, 291 bp, Artificial Sequence
  derived and/or modified sequence
atgttcccccccagcggcagcaccggcctgatcccccccagccacttccaggccagacccctgagcaccctgcccagaatggcccccacctggctgagcgacatccccctggtgcagccccccggccaccaggacgtgagcgagagaagactggacacccagagaccccaggtgaccatgtgggagagagacgtgagcagcgacagacaggagcccggcagaagaggcagaagctggggcctggagggcagccaggccctgagccagcaggccgaggtgatcgtgagatag

SEQ ID NO: 304510 - DNA, 477 bp, Artificial Sequence
  derived and/or modified sequence
atgttcccccccagcggcagcaccggcctgatcccccccagccacttccaggccagacccctgagcaccctgcccagaatggcccccacctggctgagcgacatccccctggtgcagccccccggccaccaggacgtgagcgagagaagactggacacccagagaccccaggtgaccatgtgggagagagacgtgagcagcgacagacaggagcccggcagaagaggcagaagctggggcctggagggcagccaggccctgagccagcaggccgaggtgatcgtgagacagctgcaggagctgagaagactggaggaggaggtgagactgctgagagagaccagcctgcagcagaagatgagactggaggcccaggccatggagctggaggccctggccagagccgagaaggccggcagagccgaggccgagggcctgagagccgccctggccggcgccgaggtggtgagaaagtag

SEQ ID NO: 304511 - DNA, 351 bp, Artificial Sequence
  derived and/or modified sequence
atgttcccccccagcggcagcaccggcctgatcccccccagccacttccaggccagacccctgagcaccctgcccagaatggcccccacctggctgagcgacatccccctggtgcagccccccggccaccaggacgtgagcgagagaagactggacacccagagaccccaggtgaccatgtgggagagagacgtgagcagcgacagacaggagcccggcagaagaggcagaagctggggcctggagggcagccaggccctgagccagcaggccgaggtgatcgtgagacagctgcaggagctgagaagactggaggaggaggtgagactgctgagagagaccagcctgtag

SEQ ID NO: 304512 - DNA, 126 bp, Artificial Sequence
  derived and/or modified sequence
atgttcccccccagcggcagcaccggcctgatcccccccagccacttccaggccagacccctgagcaccctgcccagaatggcccccacctggctgagcgacatccccctggtgcagcccccctag

SEQ ID NO: 304513 - DNA, 423 bp, Artificial Sequence
  derived and/or modified sequence
atggcccccacctggctgagcgacatccccctggtgcagccccccggccaccaggacgtgagcgagagaagactggacacccagagaccccaggtgaccatgtgggagagagacgtgagcagcgacagacaggagcccggcagaagaggcagaagctggggcctggagggcagccaggccctgagccagcaggccgaggtgatcgtgagacagctgcaggagctgagaagactggaggaggaggtgagactgctgagagagaccagcctgcagcagaagatgagactggaggcccaggccatggagctggaggccctggccagagccgagaaggccggcagagccgaggccgagggcctgagagccgccctggccggcgccgaggtggtgagaaagaacctggaggagggcagccagagatag

SEQ ID NO: 304514 - DNA, 480 bp, Artificial Sequence
  derived and/or modified sequence
atgttcccccccagcggcagcaccggcctgatcccccccagccacttccaggccagacccctgagcaccctgcccagaatggcccccacctggctgagcgacatccccctggtgcagccccccggccaccaggacgtgagcgagagaagactggacacccagagaccccaggtgaccatgtgggagagagacgtgagcagcgacagacaggagcccggcagaagaggcagaagctggggcctggagggcagccaggccctgagccagcaggccgaggtgatcgtgagacagctgcaggagctgagaagactggaggaggaggtgagactgctgagagagaccagcctgcagcagaagatgagactggaggcccaggccatggagctggaggccctggccagagccgagaaggccggcagagccgaggccgagggcctgagagccgccctggccggcgccgaggtggtgagaaagaactag

SEQ ID NO: 304515 - DNA, 516 bp, Artificial Sequence
  derived and/or modified sequence
atgtttccaccctctgggcaatgggatcagactcggggtgttgtggttgtctcggcctgggagaccgaccacctgtgcttctgcaattcttcaggttcaacagggctgattcccccctcacacttccaggccagaccgctgtccacactgcccagaatggcgcctacttggctgagcgacatccctctggtccaacctccaggtcaccaagatgtgagcgagaggcggctggacacgcaaagaccacaagtgaccatgtgggagcgcgacgtgagtagcgaccgtcaggagccaggccgaagaggcagatcttgggggttagaagggtctcaagcactttctcaacaggccgaggtgatcgtccggcagttacaggaactgcggcggctggaggaggaagtgcgcctgctgagagagacgtcattacagcagaagatgcggctggaggcgcaggcaatggagctggaagcactcgccagagccgagaaggccgggcgggccgaagcagagggctag

SEQ ID NO: 304516 - DNA, 516 bp, Artificial Sequence
  derived and/or modified sequence
atgttcccccctagtggccagtgggaccagacccgtggtgtggtcgtagtgagcgcctgggaaacagaccatttatgcttctgtaattcctctgggtctactggactgattccgcctagccatttccaggccaggcctctctccacccttcctcgcatggcccctacatggctgtctgatattccactggtgcagccgcctggccatcaagacgtttccgagcgccgcctggacactcagcgacctcaggtgaccatgtgggagagagacgtgtctagtgacaggcaagagcctggtcggagaggtcgctcctggggcctggaaggatctcaagcattgtctcagcaggctgaggtgatcgttagacagcttcaggaactgcgacgcttggaagaggaagtgaggctgctccgggaaaccagcctccagcagaagatgcgtctagaggcacaagctatggagttggaagcactcgctagagccgagaaggctggcagagccgaggcagagggttag

SEQ ID NO: 304517 - DNA, 384 bp, Artificial Sequence
  derived and/or modified sequence
atgttccctccttctgggcagtgggatcagaccaggggagttgtggtagtgtcggcgtgggaaaccgaccacctctgcttctgtaattcatcaggatcaaccgggcttattcccccctcccactttcaggctcggccgctgtcgacgcttcctcgcatggcccccacctggctgtccgatatccccttggtccagccgcctggtcatcaagacgtgagtgaaaggaggcttgacactcagagaccccaagtgactatgtgggaacgggacgtatcttccgaccggcaggaacccgggaggcgcgggaggtcgtgggggctggagggcagtcaggctctttctcagcaggctgaggtgattgtgcgccaactacaagaactatag

SEQ ID NO: 304518 - DNA, 384 bp, Artificial Sequence
  derived and/or modified sequence
atgttcccaccttctggacagtgggaccagactaggggggtggttgtggtctcggcttgggagacggaccacctctgtttctgcaactcttcaggcagtaccggactaattcctccatcacactttcaggccaggcctctaagcactctgccacggatggcacctacctggcttagtgatattccgctggtccaaccaccagggcatcaggatgtgagcgagaggcgactggacacccagaggccacaggtcactatgtgggaaagagacgtgagttccgatagacaggagccaggccgccgtggtaggagctggggtctcgagggatcccaagctctgtcccagcaagccgaagtcattgtaagacagctgcaggagctgtag

SEQ ID NO: 304519 - DNA, 516 bp, Artificial Sequence
  derived and/or modified sequence
atgtttcccccaagtggtcaatgggaccagacgcgcggggtggtggttgtgtcagcctgggaaaccgaccacctctgcttttgcaacagctcgggtagcaccgggttgatcccaccttcccatttccaagcaaggccgctgagtaccctccctaggatggctcctacctggttgtcggatatccccctggtgcagcccccaggccatcaagatgtgtcggaaaggcggctcgacacccagaggccgcaggtgaccatgtgggaaagagacgtgtcaagcgaccggcaggaacctggaagacggggccggagttggggattagagggatctcaggcgctgtctcagcaagcagaggtcattgtgagacagctgcaagagctgaggtggttggaggaggaagtttggctactccgggagacctctctccagcagaaaatgcgtctcgaggcccaagcaatggagcttgaagccctggccagggctgaaaaggcaggtcgggccgaggctgaagggtag

SEQ ID NO: 304520 - DNA, 516 bp, Artificial Sequence
  derived and/or modified sequence
atgtttccaccttctggccaatgggatcaaaccagaggcgtggtggtcgtgtccgcctgggaaacagaccacctgtgcttctgtaatagtagcggtagcaccggcttaattcctcctagccatttccaagccagacccctcagtaccctaccacgtatggcgccgacttggttgtcagatattcccctcgtgcaacctcctgggcaccaagacgtgtctgagcgccgactggatactcagcgccctcaggtcacgatgtgggaacgcgacgtctcctctgatcggcaggaaccgggacggcggggacgttcatgggggctggagggctcccaggctcttagccagcaggccgaggtcatcgtgcgtcagctccaggagctgcgtagactggaagaagaggtgcgtttgctgcgggagacttctttacaacagaagatgcgactggaagcccaggcgatggagctggaagcacttgcccgagctgagaaagccggtagggctgaagccgaaggctag

SEQ ID NO: 304521 - DNA, 462 bp, Artificial Sequence
  derived and/or modified sequence
atgttccctccatctggctcgaccggcctcattccaccatctcatttccaggcaaggcccctgagcacactaccccggatggccccaacatggctaagtgacatccccctagttcagcccccgggacatcaggacgtatctgagcggaggttggacacacagcgccctcaggtaactatgtgggagagggacgtatcctcagatcggcaggaacctggccgtagaggtaggtcttggggattagaagggagccaggccctgtctcaacaggcggaagtgatcgtgcggcagctgcaggagttgagaaggttggaggaagaagtaagactgctgagggagacctcattgcaacagaaaatgcggcttgaagcacaggctatggagctggaagctctggccagagccgaaaaagccgggagagcagaggcagagggattgcgcgcagctctcgctggagcctag

SEQ ID NO: 304522 - DNA, 462 bp, Artificial Sequence
  derived and/or modified sequence
atgttccctccatctggtagtactgggcttatccctccatctcattttcaggctagacccttatccacgctgcctcgaatggccccgacatggctgagtgacattcccctcgtacagccgccagggcaccaagatgtcagcgaacgtcgactcgacacacaacggccacaggtgaccatgtgggagagagacgtctcaagcgatcggcaagagccaggcagaagggggcgatcttgggggctcgagggcagtcaagccctcagtcagcaagctgaggtgatcgtgcgacaactgcaggaattacggaggctggaagaggaagtccggttactgagagaaacaagcctgcaacagaaaatgaggctggaggcccaggcgatggaactcgaggcactagctagagccgagaaggcaggacgcgcagaggcagagggcctgcgcgctgccctggctggtgcctag

SEQ ID NO: 304523 - DNA, 357 bp, Artificial Sequence
  derived and/or modified sequence
atgttcccgccatctggaagcaccggtctgattccaccctctcacttccaggctcgaccactgtccacgctgcccaggatggcccccacctggctgtccgacattccattagtgcagccaccgggccaccaggatgtgagcgagcgacgacttgatacacagagacctcaggtgacaatgtgggagcgagacgtttcctcagatcgccaagagccagggcgcaggggacgctcatgggggctggagggttcccaggcactgtcacagcaggctgaagtcattgtgcgccagttgcaggagctacgtcggctggaagaggaggtgcgcctgctgcgcgaaaccagccttcaacagtag

SEQ ID NO: 304524 - DNA, 384 bp, Artificial Sequence
  derived and/or modified sequence
atgttccccccatcaggacaatgggatcaaactagaggagtagtggtggtttccgcttgggaaacagaccatctgtgtttttgtaactctagtggctcaactggtctgattccgcccagccattttcaggcccggcctctgtctaccctgccgaggatggccccgacctggcttagtgatataccgctcgtgcaaccacctggccaccaggatgtgtcggagagaaggttagacacgcagaggccccaggttactatgtgggaacgcgatgtgagctctgaccgccaggaacccggccgaagggggcgctcctggggtctggagggatcccaggctctctcccaacaagccgaagttatcgtcaggcagttgcaggagctctag

SEQ ID NO: 304525 - DNA, 357 bp, Artificial Sequence
  derived and/or modified sequence
atgttccctccatccggctccacaggcttaattcccccctcccactttcaggcccgtcccctcagcaccctgccaaggatggcaccaacttggctcagcgatattccactggtgcagcctcctggccaccaggacgtatcagaacgtagacttgatacgcaacggcctcaggtgactatgtgggaacgagatgtgagttctgaccgacaggagccaggacggcgcggacgttcatggggactggaggggtcgcaagccctctcacagcaggccgaagtaatcgtgcggcagttgcaggagctgcgccgcctggaagaggaagtccgactgcttagagaaacttcattgcaacagtag

SEQ ID NO: 304526 - DNA, 384 bp, Artificial Sequence
  derived and/or modified sequence
atgtttccgccatcaggtcagtgggatcaaactaggggggtcgttgtcgtgagtgcgtgggaaactgaccatttatgcttttgtaactcttccggcagcaccggattgatcccacctagccatttccaggcccgccccctgtccacccttccccgcatggcacctacttggctgagtgacatacccctcgtccagccacctggacaccaggacgtcagtgagcggaggctcgacacccagcgtccacaagtgacaatgtgggaacgagacgtgtcttccgatcgccaggagccggggagaaggggaagatcctggggcctagaaggctcgcaagccctgagccagcaggcagaggtaatcgtacgccaactgcaggagttatag

SEQ ID NO: 304527 - DNA, 462 bp, Artificial Sequence
  derived and/or modified sequence
atgttccctcctagtggttccaccgggctgataccccccagccactttcaggccaggcctctctccactctccctagaatggccccaacatggttgtcagacattccactcgtgcagccgccgggccaccaggatgtcagtgaaaggcgcctggacactcagaggccccaggtaaccatgtgggagcgggacgtatccagcgaccgccaggagccagggcgcagaggacgatcttgggggctggaaggctcccaagccttatcccagcaggccgaagtgatcgtcaggcagctccaagagttgcggtggctggaggaggaagtgtggctgctcagggaaacgagtctccaacaaaaaatgcgactggaggcccaagcgatggagctggaagcgctcgctagggcggaaaaggccgggagagcagaagccgaagggctgcgcgcagctctggccggggcctag

SEQ ID NO: 304528 - DNA, 384 bp, Artificial Sequence
  derived and/or modified sequence
atgttccccccctctgggcagtgggatcagacaaggggagttgtcgtggtcagtgcttgggaaaccgatcatctctgcttttgtaacagctcggggtccacaggactcattccgccaagtcatttccaggcacgtcctctgtctactctgccgcgaatggcacctacatggctgagtgacattcccctggttcaaccccccggccaccaggatgtctcagagaggcgccttgatactcagcgacctcaagttacgatgtgggagagggacgtcagttccgaccgacaggaaccaggacgtaggggacggtcctggggactggagggctctcaggcgctgagccagcaggcagaggtcatcgtcagacagctccaagaactgtag

SEQ ID NO: 304529 - DNA, 567 bp, Artificial Sequence
  derived and/or modified sequence
atgttcccaccgtctggctccacgggcctcataccaccttcgcactttcaagcccgcccactcagtacactgcctcgtatggctccaacatggttaagcgatatacccctggttcaacccccaggccatcaggatgtcagcgaaaggagactggatacccaacgcccccaagtcacaatgtgggaaagggatgtgtctagcgaccggcaagagcccggaaggcgaggtaggagctggggcctggagggctcccaggcactgtctcaacaggcagaagtcatagtgcggcaattgcaggaattaaggcgattagaagaagaggtgcgcctgctccgcgagacgagtttgcagcagaagatgcgtcttgaggcccaggctatggagctcgaagctctagcccgtgccgagaaagcagggagggcagaggctgaaggcttgcgggccgcactagccggcgccgaagtggtgcggaagaacctcgaggagggctctcagcgagaactggaggaggtacagaggctgcaccaggagcaactttctagcttaacacaagcccatgaagagtag

SEQ ID NO: 304530 - DNA, 357 bp, Artificial Sequence
  derived and/or modified sequence
atgttcccccccagcggttctactggccttatccccccctcccactttcaggcccgaccactctctacactgccacggatggcacccacttggctgagtgacatacccctagtgcagcctcctggacaccaggacgtgtcggagcgccggctggacacccagcgcccacaggtgaccatgtgggagcgggacgtctctagcgaccggcaggaaccaggacggagaggccggtcctggggcctcgagggcagccaggcactgtcccagcaggcggaggttattgttcgccagctgcaggagctgaggtggctggaagaagaagtgtggctgctgcgcgagacctctctccagcaatag

SEQ ID NO: 304531 - DNA, 567 bp, Artificial Sequence
  derived and/or modified sequence
atgtttcctccttcaggctctactggacttatcccacccagccatttccaggcccgtcccctttccacccttcccagaatggctccaacgtggctctccgacatcccactggtacagcctccggggcaccaggatgtaagtgaaaggagactcgacacacagaggccacaggttactatgtgggagcgagacgtgtccagtgatcgacaagagcctggccggcgcggtagatcttggggtctggaaggtagtcaggcactgtcgcagcaggctgaagtgatcgtgcgccagctgcaggaactgcgtagactcgaagaggaagtcaggctgctccgtgaaactagtctgcaacaaaaaatgcgactggaggcccaggcaatggagcttgaagcacttgccagagcagagaaagcaggcagggcagaagcagaggggttgcgtgccgcattggcgggagccgaggtcgtgaggaagaatctggaggagggaagccagagagagcttgaagaagtgcaacggttgcaccaggaacagctgagctccctcacccaagcgcacgaggagtag

SEQ ID NO: 304532 - DNA, 516 bp, Artificial Sequence
  derived and/or modified sequence
atgttccctccatccggtcagtgggatcagacgaggggagtggtggttgtatctgcttgggagacagatcatctttgtttctgcaactcctccggctctaccggcctgatcccgccatctcacttccaagcgcggcccctgagcactctcccgcggatggccccaacctggctgtctgacattccactggtccaaccaccagggcaccaggacgtgagcgagcggcggttagacacgcaaagaccgcaggtcaccatgtgggagcgagatgtctcttccgatcgccaggaacccggccgacgaggcaggtcttggggactggaaggctcccaagccctgtcacaacaggcagaggtcattgtgagacagttacaagaactgagatggctcgaggaagaagtgtggttattgcgcgaaacttctttgcagcagaaaatgcgcctagaagctcaagctatggaacttgaggctttagctagggccgagaaggccggtcgcgcagaagccgagggatag

SEQ ID NO: 304533 - DNA, 357 bp, Artificial Sequence
  derived and/or modified sequence
atgtttcccccatccggtagcacagggcttattcccccatcacattttcaggcccgccctctgtctacccttcctcggatggctccaacttggctgagcgatatccctctcgtgcaaccgcctggacaccaggacgtctcagaaagacgcctcgatactcagaggccacaggtcacgatgtgggaacgggacgtcagctccgaccgccaagaacccggtcggaggggacgctcttggggacttgagggctcccaggccctgagtcagcaggccgaagtgatcgtccggcagctacaggagctgagatggctggaggaggaggtgtggctcctgcgagagacctctctgcagcagtag

SEQ ID NO: 304534 - DNA, 384 bp, Artificial Sequence
  derived and/or modified sequence
atgtttccgccatctggccaatgggatcagaccaggggcgttgtggtagtctccgcttgggaaaccgaccatctgtgcttctgtaactcctcaggcagtactggattgatcccacccagccattttcaggcacgccctctgagtacgctccctcgcatggcaccaacctggctgtcggatatccccctggtgcaaccaccagggcaccaggacgtgagtgaaagacgcctggacactcagcgaccccaggtaactatgtgggaacgcgatgtgtcttctgacagacaggaaccaggacggcgcggccgaagttggggtcttgagggctcccaggccctgagccagcaggcagaggttatcgtcagacagttacaggagctgtag

SEQ ID NO: 304535 - DNA, 462 bp, Artificial Sequence
  derived and/or modified sequence
atgtttccaccgtcaggctctaccggcctaatccctcctagccatttccaggctcggccactgtccactcttcctaggatggctcccacatggctgagcgatatcccgctggtccaacccccagggcaccaggacgtgagtgagagaaggcttgacacacagcgaccacaggttaccatgtgggaaagggacgtttcatccgatcggcaggagccgggaaggcggggaaggagctggggtctggagggcagtcaggcattgagccagcaggcagaagtgattgtgagacagctgcaagagctacgtaggctcgaggaagaggtgcgcctcctcagagagacatctctacagcagaagatgcgtctggaagctcaagcaatggagctggaggccctggcccgcgctgagaaagccggcagagctgaagccgaaggcctgcgcgcagcgctcgctggcgcctag

SEQ ID NO: 304536 - DNA, 462 bp, Artificial Sequence
  derived and/or modified sequence
atgtttccgcccagcggcagcactgggctgatcccccctagtcactttcaggctcgccctctgtcaacactgccaaggatggcgcccacatggctctcagatattccactagtgcaacctcctggacatcaggatgtgtcagagagacgcctcgacacacagcgccctcaggtaacaatgtgggagcgggatgtgagcagcgatcgtcaggagccaggtaggagaggtaggagctgggggctggaaggctcgcaggcactcagccagcaggcagaggtgatcgtgagacaactgcaggagctgcgcagactggaggaagaggtgcgtctcttgagagagacctcccttcagcagaagatgaggcttgaggcacaggccatggagttggaagcattggctcgggccgaaaaagccggcagggccgaagctgaggggctccgagccgctctggccggagcatag

SEQ ID NO: 304537 - DNA, 462 bp, Artificial Sequence
  derived and/or modified sequence
atgttccctccctccggctccaccgggctcattcccccgtcacacttccaggctaggccactcagtaccctcccccgaatggcccctacatggctatctgacatcccgctggtgcagccacctggccatcaggacgtctcagagagacggctggacactcagcgtcctcaggtgacgatgtgggagagggacgtttcttccgatagacaggaaccggggcgccggggtcgaagttggggcctggagggatctcaggcgctcagccagcaagcagaagtgatcgtacgccagcttcaggaactccgctggcttgaggaggaggtgtggttactccgagagacatctctgcagcagaaaatgcggcttgaagcgcaggcaatggaacttgaggctttggcacgtgccgagaaggcaggcagggcagaggccgaaggattaagggcagcactggctggcgcctag

SEQ ID NO: 304538 - DNA, 516 bp, Artificial Sequence
  derived and/or modified sequence
atgtttccaccatctggacagtgggaccagaccaggggagtggtcgttgtctccgcttgggaaaccgatcatctgtgtttttgcaactctagcggcagtacagggcttatcccacccagccactttcaggcgcgtcctctttcaaccttgccccgaatggctccaacctggctgtccgacataccactagtgcagccaccggggcatcaagatgttagcgagcggagactcgacacccagcgtccccaggtaaccatgtgggaacgagatgtatctagtgatcgacaggagcccggccggcgcggcaggagctggggcttagaagggtctcaggcgctcagccaacaagccgaggtgatcgtgcgtcaacttcaagaactccgccggctggaggaggaagtgaggctgttgcgggagaccagcttacagcagaaaatgcgcttggaggcccaagctatggaactggaagcactggccagagctgagaaggcgggtcgtgccgaggccgagggatag

SEQ ID NO: 304539 - DNA, 357 bp, Artificial Sequence
  derived and/or modified sequence
atgtttccaccttcaggtagcacaggtctgataccaccctcccactttcaggctcggcctctgtccacccttccccggatggctccaacctggctgagcgacattcctctggtccagccacccgggcatcaggatgtgagtgaaaggaggctggatactcagcgccctcaagtcacaatgtgggagcgtgacgttagcagcgatagacaggagcccgggcgccgcggtcgtagctggggtcttgaaggtagccaagctctctcacagcaggctgaggtgatcgtccgccagctccaggaacttcgaagacttgaagaggaggtgagactcctgagggagacctcgctacagcaatag

SEQ ID NO: 304540 - DNA, 423 bp, Artificial Sequence
  derived and/or modified sequence
atgtttccaccttctggctcgactggactgatccccccctcccattttcaggcacggcccctctccacgctcccgagaatggctcctacttggcttagtgacattcccctggttcaaccccccggccatcaggatgtttccgagcggcgcctggacacccagcgcccacaggttaccatgtgggagcgcgatgtctcttccgacaggcaggagcccggacggcggggccgctcttggggactggaggggtcccaagccctgagtcagcaagccgaagttatcgtgaggcagctgcaagagctgcgccgcctggaggaagaggtaagattactgcgagaaacctccctccagcagaagatgagactcgaggcccaggccatggaactcgaggctttagctagagccgaaaaagcaggccgatag

SEQ ID NO: 304541 - DNA, 291 bp, Artificial Sequence
  derived and/or modified sequence
atgtttccaccgagcggatctacagggctgattcccccttctcatttccaggcgcggcctttatcaaccttgccaagaatggcacccacttggctctctgacattcctctggttcaacccccaggccaccaagatgtttcagaaagacgcctagacacccagcggcctcaggtaacaatgtgggagagggatgtgagcagcgatcgtcaagagccgggcaggaggggcagatcatggggccttgaaggaagccaggctctgtcccagcaggccgaggtcatagtgcgatag

SEQ ID NO: 304542 - DNA, 477 bp, Artificial Sequence
  derived and/or modified sequence
atgttccccccgtccggatcaacaggactaatccctccctcccatttccaggctcgaccattgtcgaccttgcccagaatggcgccaacatggctcagcgatatccccctagtccagccccctggtcatcaagatgtctcagaacgcaggctggacacccagaggccacaagtaaccatgtgggagagagatgtatcatctgacagacaagagccaggccggagaggcagatcctggggcctggagggttcccaggcactgtctcagcaggcggaggtcattgttagacagctgcaggagttgcggcgtttggaggaggaggtacggctgctgagggagacttctctgcagcagaagatgcgtctcgaggcgcaggctatggagttggaggctctggctcgagcagaaaaagcgggaagagctgaggcagagggactgcgggcggcgctggccggggccgaggtagtgagaaagtag

SEQ ID NO: 304543 - DNA, 351 bp, Artificial Sequence
  derived and/or modified sequence
atgtttcccccctcagggagtaccggcctcatcccgccctcccattttcaggcccgccctctgagcaccctgccccgcatggcaccaacgtggcttagcgatatcccactggttcagcctccgggccatcaggacgtaagtgaaaggcggcttgacacccaacgaccccaggtgacaatgtgggagagggacgtgagctccgacagacaggagccaggcagacggggacgatcgtggggcctggaagggtctcaggcactgagccaacaagcggaggtgattgtgcggcaactccaagaactcagacgcctggaagaggaagtgcggttgctgcgggagacctctctgtag

SEQ ID NO: 304544 - DNA, 126 bp, Artificial Sequence
  derived and/or modified sequence
atgtttcccccaagcgggtccacgggcctgattcccccaagtcatttccaggcacgacctctcagcactctgccacgcatggctccaacttggctgtctgatattccattggtccagccaccatag

SEQ ID NO: 304545 - DNA, 423 bp, Artificial Sequence
  derived and/or modified sequence
atggcaccaacttggttgtcagatattccactcgtacaacctcctggccatcaagacgtttcggagcgccgtctcgatacccaaaggcctcaggtcaccatgtgggagagagatgtgagtagcgatcgccaggagccaggaagacgcggaagaagttggggactggagggtagccaagctctgtcccagcaggctgaggtgattgtcagacagctgcaagaacttcgacgcctggaggaagaggttaggctgcttcgggaaacatcacttcagcagaagatgagactcgaggcccaggcaatggagttagaggcacttgctagagctgagaaggccggcagagctgaggctgaggggctgagggccgccctggccggcgccgaggttgtccgaaaaaatctcgaggagggtagccagaggtag

SEQ ID NO: 304546 - DNA, 480 bp, Artificial Sequence
  derived and/or modified sequence
atgttcccgcccagtggaagcactggactgatccccccttcccatttccaagctcggcccctttcaaccctgcccagaatggcccctacttggctgtcagatatacctctcgttcagcctcctggccaccaggacgtctctgaacggagactggatactcagcggccacaggttactatgtgggaacgcgatgtcagttcagatcgacaggaacccggaaggcgagggagatcctggggcttggaaggctcccaggctctcagtcagcaggcagaggtcatcgtgcgccaactgcaggagctcagacggctggaggaggaagtgagactccttagagaaacctctctgcagcagaaaatgcggctggaagcacaggccatggagctggaggccctggcacgagccgagaaggctggtagggcagaggccgagggcctgagggctgctctggccggggccgaggtagtaaggaagaattag

SEQ ID NO: 304547 - DNA, 511 bp, Artificial Sequence
  derived and/or modified sequence
aaagcgcagtagggggctctcgcggttggttccactgggctgattcccccctcccactttcaagctcggcccctttcaactctgccaagaatggctcccacctggctctcagacattcccctggtccaacccccaggccatcaagatgtctcagagaggcggctagacacccagagacctcaagtgaccatgtgggaacgggatgtttccagtgacaggcaggagccagggcggagaggcaggtcctgggggctggaggggtcacaggccctgagccagcaggctgaggtgatcgttcggcagctgcaagagctgcggcggctggaggaggaggtccggctcctgcgggagacctcgctgcagcagaagatgaggctagaggcccaggccatggagctagaggctctggcacgggcggagaaggccggccgagctgaggctgagggcctgcgtgctgctttggctggggctgaggttgtccggaagaacttggaagaggggagccagcggg

SEQ ID NO: 304548 - DNA, 516 bp, Artificial Sequence
  derived and/or modified sequence
atgtttcctccttctggccagtgggaccagacccggggcgtggtggtggtgtctgcctgggagacagaccacctgtgcttctgcaacagcagcggcagcacaggcctcatcccccccagccacttccaggcccggcccctgagcaccctgcccaggatggcccccacctggctgagtgacatccccctggtgcagcccccaggccaccaggatgtgtctgaaagaaggctggacacccagaggccccaggtgaccatgtgggagagagatgtgtccagtgaccggcaggagcccggccggcggggccgctcctggggcctggagggcagccaggccctgagccagcaggccgaggtgattgtgcggcagctgcaggagctgcggcggctggaggaggaggtgcggctgctgcgggagaccagcctgcagcagaagatgaggctggaggcccaggccatggagctggaggccctggcccgggcagagaaggccggccgggcagaggccgagggctag

SEQ ID NO: 304549 - DNA, 384 bp, Artificial Sequence
  derived and/or modified sequence
atgtttcctccttctggccagtgggaccagacccggggcgtggtggtggtgtctgcctgggagacagaccacctgtgcttctgcaacagcagcggcagcacaggcctcatcccccccagccacttccaggcccggcccctgagcaccctgcccaggatggcccccacctggctgagtgacatccccctggtgcagcccccaggccaccaggatgtgtctgaaagaaggctggacacccagaggccccaggtgaccatgtgggagagagatgtgtccagtgaccggcaggagcccggccggcggggccgctcctggggcctggagggcagccaggccctgagccagcaggccgaggtgattgtgcggcagctgcaggagctgtag

SEQ ID NO: 304550 - DNA, 516 bp, Artificial Sequence
  derived and/or modified sequence
atgtttcctccttctggccagtgggaccagacccggggcgtggtggtggtgtctgcctgggagacagaccacctgtgcttctgcaacagcagcggcagcacaggcctcatcccccccagccacttccaggcccggcccctgagcaccctgcccaggatggcccccacctggctgagtgacatccccctggtgcagcccccaggccaccaggatgtgtctgaaagaaggctggacacccagaggccccaggtgaccatgtgggagagagatgtgtccagtgaccggcaggagcccggccggcggggccgctcctggggcctggagggcagccaggccctgagccagcaggccgaggtgattgtgcggcagctgcaggagctgcgctggctggaggaggaggtgtggctgctgcgggagaccagcctgcagcagaagatgaggctggaggcccaggccatggagctggaggccctggcccgggcagagaaggccggccgggcagaggccgagggctag

SEQ ID NO: 304551 - DNA, 462 bp, Artificial Sequence
  derived and/or modified sequence
atgtttcctccttctggcagcacaggcctcatcccccccagccacttccaggcccggcccctgagcaccctgcccaggatggcccccacctggctgagtgacatccccctggtgcagcccccaggccaccaggatgtgtctgaaagaaggctggacacccagaggccccaggtgaccatgtgggagagagatgtgtccagtgaccggcaggagcccggccggcggggccgctcctggggcctggagggcagccaggccctgagccagcaggccgaggtgattgtgcggcagctgcaggagctgcggcggctggaggaggaggtgcggctgctgcgggagaccagcctgcagcagaagatgaggctggaggcccaggccatggagctggaggccctggcccgggcagagaaggccggccgggcagaggccgagggcctgcgggccgccctggccggggcctag

SEQ ID NO: 304552 - DNA, 357 bp, Artificial Sequence
  derived and/or modified sequence
atgtttcctccttctggcagcacaggcctcatcccccccagccacttccaggcccggcccctgagcaccctgcccaggatggcccccacctggctgagtgacatccccctggtgcagcccccaggccaccaggatgtgtctgaaagaaggctggacacccagaggccccaggtgaccatgtgggagagagatgtgtccagtgaccggcaggagcccggccggcggggccgctcctggggcctggagggcagccaggccctgagccagcaggccgaggtgattgtgcggcagctgcaggagctgcggcggctggaggaggaggtgcggctgctgcgggagaccagcctgcagcagtag

SEQ ID NO: 304553 - DNA, 462 bp, Artificial Sequence
  derived and/or modified sequence
atgtttcctccttctggcagcacaggcctcatcccccccagccacttccaggcccggcccctgagcaccctgcccaggatggcccccacctggctgagtgacatccccctggtgcagcccccaggccaccaggatgtgtctgaaagaaggctggacacccagaggccccaggtgaccatgtgggagagagatgtgtccagtgaccggcaggagcccggccggcggggccgctcctggggcctggagggcagccaggccctgagccagcaggccgaggtgattgtgcggcagctgcaggagctgcgctggctggaggaggaggtgtggctgctgcgggagaccagcctgcagcagaagatgaggctggaggcccaggccatggagctggaggccctggcccgggcagagaaggccggccgggcagaggccgagggcctgcgggccgccctggccggggcctag

SEQ ID NO: 304554 - DNA, 567 bp, Artificial Sequence
  derived and/or modified sequence
atgtttcctccttctggcagcacaggcctcatcccccccagccacttccaggcccggcccctgagcaccctgcccaggatggcccccacctggctgagtgacatccccctggtgcagcccccaggccaccaggatgtgtctgaaagaaggctggacacccagaggccccaggtgaccatgtgggagagagatgtgtccagtgaccggcaggagcccggccggcggggccgctcctggggcctggagggcagccaggccctgagccagcaggccgaggtgattgtgcggcagctgcaggagctgcggcggctggaggaggaggtgcggctgctgcgggagaccagcctgcagcagaagatgaggctggaggcccaggccatggagctggaggccctggcccgggcagagaaggccggccgggcagaggccgagggcctgcgggccgccctggccggggctgaggtggtgaggaagaacctggaggagggcagccagcgggagctggaggaggtgcagaggctgcaccaggagcagctgagcagcctgacccaggcccacgaggagtag

SEQ ID NO: 304555 - DNA, 357 bp, Artificial Sequence
  derived and/or modified sequence
atgtttcctccttctggcagcacaggcctcatcccccccagccacttccaggcccggcccctgagcaccctgcccaggatggcccccacctggctgagtgacatccccctggtgcagcccccaggccaccaggatgtgtctgaaagaaggctggacacccagaggccccaggtgaccatgtgggagagagatgtgtccagtgaccggcaggagcccggccggcggggccgctcctggggcctggagggcagccaggccctgagccagcaggccgaggtgattgtgcggcagctgcaggagctgcgctggctggaggaggaggtgtggctgctgcgggagaccagcctgcagcagtag

SEQ ID NO: 304556 - DNA, 423 bp, Artificial Sequence
  derived and/or modified sequence
atgtttcctccttctggcagcacaggcctcatcccccccagccacttccaggcccggcccctgagcaccctgcccaggatggcccccacctggctgagtgacatccccctggtgcagcccccaggccaccaggatgtgtctgaaagaaggctggacacccagaggccccaggtgaccatgtgggagagagatgtgtccagtgaccggcaggagcccggccggcggggccgctcctggggcctggagggcagccaggccctgagccagcaggccgaggtgattgtgcggcagctgcaggagctgcggcggctggaggaggaggtgcggctgctgcgggagaccagcctgcagcagaagatgaggctggaggcccaggccatggagctggaggccctggcccgggcagagaaggccggccgctag

SEQ ID NO: 304557 - DNA, 291 bp, Artificial Sequence
  derived and/or modified sequence
atgtttcctccttctggcagcacaggcctcatcccccccagccacttccaggcccggcccctgagcaccctgcccaggatggcccccacctggctgagtgacatccccctggtgcagcccccaggccaccaggatgtgtctgaaagaaggctggacacccagaggccccaggtgaccatgtgggagagagatgtgtccagtgaccggcaggagcccggccggcggggccgctcctggggcctggagggcagccaggccctgagccagcaggccgaggtgattgtgaggtag

SEQ ID NO: 304558 - DNA, 477 bp, Artificial Sequence
  derived and/or modified sequence
atgtttcctccttctggcagcacaggcctcatcccccccagccacttccaggcccggcccctgagcaccctgcccaggatggcccccacctggctgagtgacatccccctggtgcagcccccaggccaccaggatgtgtctgaaagaaggctggacacccagaggccccaggtgaccatgtgggagagagatgtgtccagtgaccggcaggagcccggccggcggggccgctcctggggcctggagggcagccaggccctgagccagcaggccgaggtgattgtgcggcagctgcaggagctgcggcggctggaggaggaggtgcggctgctgcgggagaccagcctgcagcagaagatgaggctggaggcccaggccatggagctggaggccctggcccgggcagagaaggccggccgggcagaggccgagggcctgcgggccgccctggccggggctgaggtggtgaggaagtag

SEQ ID NO: 304559 - DNA, 351 bp, Artificial Sequence
  derived and/or modified sequence
atgtttcctccttctggcagcacaggcctcatcccccccagccacttccaggcccggcccctgagcaccctgcccaggatggcccccacctggctgagtgacatccccctggtgcagcccccaggccaccaggatgtgtctgaaagaaggctggacacccagaggccccaggtgaccatgtgggagagagatgtgtccagtgaccggcaggagcccggccggcggggccgctcctggggcctggagggcagccaggccctgagccagcaggccgaggtgattgtgcggcagctgcaggagctgcggcggctggaggaggaggtgcggctgctgcgggagaccagcctgtag

SEQ ID NO: 304560 - DNA, 126 bp, Artificial Sequence
  derived and/or modified sequence
atgtttcctccttctggcagcacaggcctcatcccccccagccacttccaggcccggcccctgagcaccctgcccaggatggcccccacctggctgagtgacatccccctggtgcagcccccatag

SEQ ID NO: 304561 - DNA, 423 bp, Artificial Sequence
  derived and/or modified sequence
atggcccccacctggctgagtgacatccccctggtgcagcccccaggccaccaggatgtgtctgaaagaaggctggacacccagaggccccaggtgaccatgtgggagagagatgtgtccagtgaccggcaggagcccggccggcggggccgctcctggggcctggagggcagccaggccctgagccagcaggccgaggtgattgtgcggcagctgcaggagctgcggcggctggaggaggaggtgcggctgctgcgggagaccagcctgcagcagaagatgaggctggaggcccaggccatggagctggaggccctggcccgggcagagaaggccggccgggcagaggccgagggcctgcgggccgccctggccggggctgaggtggtgaggaagaacctggaggagggcagccagaggtag

SEQ ID NO: 304562 - DNA, 480 bp, Artificial Sequence
  derived and/or modified sequence
atgtttcctccttctggcagcacaggcctcatcccccccagccacttccaggcccggcccctgagcaccctgcccaggatggcccccacctggctgagtgacatccccctggtgcagcccccaggccaccaggatgtgtctgaaagaaggctggacacccagaggccccaggtgaccatgtgggagagagatgtgtccagtgaccggcaggagcccggccggcggggccgctcctggggcctggagggcagccaggccctgagccagcaggccgaggtgattgtgcggcagctgcaggagctgcggcggctggaggaggaggtgcggctgctgcgggagaccagcctgcagcagaagatgaggctggaggcccaggccatggagctggaggccctggcccgggcagagaaggccggccgggcagaggccgagggcctgcgggccgccctggccggggctgaggtggtgaggaagaactag

SEQ ID NO: 304563 - DNA, 516 bp, Artificial Sequence
  derived and/or modified sequence
atgttcccccccagcggccagtgggaccagacccggggcgtggtggtggtttctgcctgggagacggatcatctctgcttttgcaattcttccggatccaccggactgatcccccccagccacttccaggcccgcccgctaagcacccttcctcggatggctccaacctggctgagtgatatacctctggtacagccacctgggcatcaggacgttagtgaacggcgcttagatacacagaggccccaagtcactatgtgggagcgtgacgtgagttcagatcggcaggagcctggacggagaggcagatcctgggggctcgaagggagtcaggctctatcacagcaggccgaagttattgttcggcagttacaggaattgcgaaggcttgaggaggaggtcaggctcttgcgcgagacatccctgcaacagaagatgagactggaggcccaggccatggaactcgaggcacttgccagggccgaaaaagctgggagggctgaggcggagggatag

SEQ ID NO: 304564 - DNA, 516 bp, Artificial Sequence
  derived and/or modified sequence
atgttcccccccagcggccagtgggaccagacccggggcgtggtggtcgtctctgcctgggagacggaccacctttgtttctgcaatagttctggatccacaggtctcatccctccatctcacttccaagctcggccactaagtacattgcctaggatggccccaacttggctgagcgacatcccgctcgttcagccacctggccaccaggatgtgtcagaacgtcggcttgacactcagcgcccacaggtgaccatgtgggaaagggacgtgagctcggaccggcaggaaccaggccgtagaggtcggagctggggcttggaagggagccaggcgctgagccagcaagccgaggtcatcgttcgccagctgcaagagctcaggagactcgaggaggaagtgcgcctactccgggaaacatcattacagcaaaagatgcgtttggaggcacaggccatggagctcgaggccctggcccgggctgaaaaggctggccgcgccgaagcagaggggtag

SEQ ID NO: 304565 - DNA, 384 bp, Artificial Sequence
  derived and/or modified sequence
atgttcccccccagcggccagtgggaccagacccggggcgtggtggtggttagtgcctgggagacggaccacctctgtttttgtaattcatccgggtctaccgggttaattccaccgtcacacttccaagctagacccctctctacgctgcctaggatggccccaacatggttgtctgatattcctcttgtgcagccaccaggacaccaagacgtctccgaaagacgcctggacacacaacgcccacaggtcacaatgtgggagagagacgtctccagtgacaggcaagaaccgggccggcgggggaggtcttgggggctcgaaggaagccaagcgctttcacaacaggccgaagtgattgttcggcaactgcaagagctttag

SEQ ID NO: 304566 - DNA, 384 bp, Artificial Sequence
  derived and/or modified sequence
atgttcccccccagcggccagtgggaccagacccggggcgtggtggtcgtatccgcctgggaaacagatcatctttgtttttgcaactcaagcgggtccaccggcctgatcccgccaagtcacttccaagccaggccactaagcaccttgccgagaatggcccctacctggctgtccgatatcccactggtgcagccgccaggacaccaggatgttagcgaaaggagactggatacgcagcggccccaggtgacgatgtgggagcgcgacgtatctagtgatcggcaagagcccggacgacgtggccgctcatgggggctggagggctcacaggccctatctcagcaagccgaggtgattgtgcgccaactgcaggagttgtag

SEQ ID NO: 304567 - DNA, 516 bp, Artificial Sequence
  derived and/or modified sequence
atgttcccccccagcggccagtgggaccagacccggggcgtggtggttgtctctgcgtgggaaacagaccatctgtgtttctgtaatagttctgggtctaccggactgatcccaccttcccatttccaggcaaggcccctttctacattaccgagaatggctccgacgtggttatcagatattccactcgttcagccccctggccaccaggatgtgtctgaaagacgcctggacacgcagagaccgcaggtgaccatgtgggagcgagacgtcagttctgacagacaggaacccggcagacggggcagatcctgggggctggagggatcacaggccctgagtcagcaggctgaggtgatcgtgcggcagctccaggagctacgctggttggaagaggaggtgtggctgctccgcgagacaagccttcagcagaagatgagattggaagcgcaggcaatggaactcgaagctctggccagggccgaaaaagcaggccgtgctgaggctgaggggtag

SEQ ID NO: 304568 - DNA, 516 bp, Artificial Sequence
  derived and/or modified sequence
atgttcccccccagcggccagtgggaccagacccggggcgtggtggttgtgtctgcctgggaaacggatcatctgtgcttttgtaattccagtggatcgacgggcctaattccaccttcccatttccaagctagaccactttccacactccccaggatggcccctacatggctctccgacatcccgcttgtgcagccaccaggacatcaagatgtgagtgagcgacgccttgacactcagcgtccccaggtgactatgtgggagcgtgatgtcagctccgaccgccaggaaccaggacgacgaggaagatcatgggggctggaggggagccaggccctgtcccagcaggccgaggtgattgtaaggcagttacaggaattgcgtcggttagaggaggaagtaaggcttctcagggagaccagccttcaacagaagatgcggttggaagcacaggcaatggaactcgaggccctagcaagggccgagaaggctgggagagctgaggcggagggctag

SEQ ID NO: 304569 - DNA, 462 bp, Artificial Sequence
  derived and/or modified sequence
atgttcccccccagcggcagcaccggcctgatcccccccagccactttcaggcccgcccactcagcacactgcccagaatggctccgacttggttatccgacataccgctggtgcaacctcctgggcaccaggatgtctcagagcggcggctggatacccagcgcccacaggtcactatgtgggagcgggacgtctcttctgatcgtcaggaaccgggacgcaggggacgctcttggggattagaaggttcccaggccttaagccagcaggccgaggtgattgttcggcagctacaggaactgaggcgcctcgaagaggaggtccgccttcttcgggaaacttctttgcagcagaaaatgaggctggaggcacaagctatggagctggaggccttggcccgtgctgagaaagcaggacgggccgaagcagagggactccgagccgccttagctggcgcctag

SEQ ID NO: 304570 - DNA, 462 bp, Artificial Sequence
  derived and/or modified sequence
atgttcccccccagcggcagcaccggcctgatcccccccagccactttcaggcgcgacccctgtctactctgccacggatggcgcccacctggctttcagatatcccccttgtacagcctccaggccaccaggacgtgagtgagcgcaggctggatactcagaggccacaggtgactatgtgggagcgagatgtgagctcagatcgtcaggagcctggaagaagaggaaggtcttggggactggaggggtcacaggctttgagtcaacaggctgaggtgatagtcagacagctgcaagagctgagaaggttagaggaggaagtgaggctgttacgggaaacgtcacttcagcaaaaaatgagactcgaagcacaggcgatggagctagaagccctggccagagccgagaaagccggcagagccgaagccgaaggtctcagggccgcccttgcaggcgcctag

SEQ ID NO: 304571 - DNA, 357 bp, Artificial Sequence
  derived and/or modified sequence
atgttcccccccagcggcagcaccggcctgatcccccccagccacttccaagctcggcctctctccacactccctcgtatggctcccacttggttgtcggacatccctctggtgcagccgcccggtcaccaagacgtgtcggagcgccggctggacactcaaaggcctcaagtcacgatgtgggagcgcgacgtgagctctgatcgccaagagcccggtcggaggggaagatcgtggggactggagggatctcaggctctctcccagcaggccgaggtgatcgtgagacaactgcaggagctgcgacgccttgaagaggaagtgcggctactccgagagacgtcgctccagcaatag

SEQ ID NO: 304572 - DNA, 384 bp, Artificial Sequence
  derived and/or modified sequence
atgttcccccccagcggccagtgggaccagacccggggcgtggtggtcgtaagcgcttgggaaactgatcacctttgcttctgcaactcatccggctcaaccggcctaatcccaccgtcgcactttcaggccagaccactgagcaccctgccacgtatggctcctacttggctttccgacatcccactggtccagccaccaggacaccaggatgtctccgagagacgcttggacacacagaggcctcaggtgacaatgtgggagagggatgtaagctccgacaggcaggagcccggccgtagaggcaggtcctggggcctggaagggtcccaggcactgtctcaacaagcggaggtgattgttcgtcagctacaggaactgtag

SEQ ID NO: 304573 - DNA, 357 bp, Artificial Sequence
  derived and/or modified sequence
atgttcccccccagcggcagcaccggcctgatcccccccagccactttcaggctcgtcccctctcaacactgccacggatggcccccacctggttgtctgacatccccctagtccagccacccgggcatcaggacgtgtccgagagacggttggacacacagcggccccaggttactatgtgggagagagacgtaagttcagaccgacaggagcccggtagacgaggaagaagctggggacttgaggggagccaggctctgagtcagcaagcagaagtcatcgtgcgacaactccaagaacttcgtcgacttgaggaagaagttcgcctgttgcgggagacatcactacagcagtag

SEQ ID NO: 304574 - DNA, 384 bp, Artificial Sequence
  derived and/or modified sequence
atgttcccccccagcggccagtgggaccagacccggggcgtggtggttgtgagcgcatgggagacagaccatctgtgtttctgtaattcttccggttcaacaggactgatacctcctagtcactttcaggcacgcccactgtccactctcccaaggatggcccccacttggctctctgacatacctctcgtgcagcctccgggccatcaagacgtgtcagaacgccgattggacacccagcggccccaggtgacaatgtgggaaagggatgtgtccagcgacaggcaggagcctggtcgaagaggaaggtcttggggactggagggctctcaggccctcagccagcaggccgaggtgatagtgcggcagctgcaagaactgtag

SEQ ID NO: 304575 - DNA, 462 bp, Artificial Sequence
  derived and/or modified sequence
atgttcccccccagcggcagcaccggcctgatcccccccagccactttcaggcccgaccactgagcactttgccgcggatggcaccaacttggctaagtgatattccgctcgtgcagccgcctggacaccaggatgtatccgagcggagactagatacgcagcgcccccaggtcacaatgtgggagcgggacgtgtcctctgaccgtcaggaacctgggcgaaggggtcgctcctgggggctcgagggcagccaagcactgtcccagcaggccgaggtgatcgtgcggcagcttcaggagctgagatggttggaggaggaggtatggcttctacgagagacttccttgcagcagaaaatgaggctcgaggctcaagctatggaactggaggccctggcccgcgctgaaaaggcagggagagccgaggcggaaggcctgcgcgcagccctggcgggtgcctag

SEQ ID NO: 304576 - DNA, 384 bp, Artificial Sequence
  derived and/or modified sequence
atgttcccccccagcggccagtgggaccagacccggggcgtggtggtagttagcgcctgggagacggatcatctgtgcttctgtaatagctcaggcagtacaggcctaatccccccaagtcacttccaagcgcgacctctttccactttgcctcgcatggccccgacctggctgtccgatatccccctggtccagccacctggacatcaggacgtaagcgagcggcgactcgacactcagcgacctcaggttactatgtgggaaagggacgtgtccagcgacagacaggaaccgggcaggaggggacggagctggggcttggagggctcccaggcacttagccaacaggcagaggtgattgtacgccaactgcaggagttgtag

SEQ ID NO: 304577 - DNA, 567 bp, Artificial Sequence
  derived and/or modified sequence
atgttcccccccagcggcagcaccggcctgatcccccccagccactttcaagctcgacccctttctaccttgcctagaatggcacccacctggctctccgacatcccgctagtgcagcctccaggtcaccaagacgtttccgaaagacgcctggatacacagcgcccacaggtcaccatgtgggaacgggatgtttctagtgaccggcaggaacccggacggagaggccggagctggggcttagagggctctcaggctctgagtcagcaagcggaagtgatcgtgagacaattgcaggagctacgaagactggaagaggaggtgcgcttgcttcgggaaaccagtctgcagcagaaaatgaggctggaggcccaggcgatggaactggaggccctagccagggccgagaaggccggcagggctgaagccgagggtcttagagccgcgttagctggtgccgaagtggtgagaaagaacctcgaggaaggctcgcaaagagaattggaagaggtccagagattacatcaagagcagctgtcatccctcacccaggcccacgaggaatag

SEQ ID NO: 304578 - DNA, 357 bp, Artificial Sequence
  derived and/or modified sequence
atgttcccccccagcggcagcaccggcctgatcccccccagccacttccaagcacgtccactgtcaacactgcctagaatggcacccacctggctgtctgacatccctttggtgcagccaccaggacaccaggacgtgtctgagcgacggctggacacacagcggccgcaggttacaatgtgggagagagacgtctccagtgaccgtcaggagccagggaggcgcgggagaagttggggtctagaaggttcgcaggctctgtctcagcaagctgaggttatcgtgcggcagctgcaggagctgcggtggctggaggaagaggtttggttgctccgcgagacttctcttcagcaatag

SEQ ID NO: 304579 - DNA, 567 bp, Artificial Sequence
  derived and/or modified sequence
atgttcccccccagcggcagcaccggcctgatcccccccagccacttccaggcacgccccctcagtacgctccctaggatggctcccacatggctgtccgatatcccactagtgcagccaccaggccaccaggacgtttcagagagacggctggacacccaacgcccgcaggtaaccatgtgggaaagagatgtgtcttccgatagacaggagccgggccgcagaggacgttcttggggactagagggctctcaggctttaagccagcaggccgaggtcattgtccgccagctccaggaactcagacgtctggaggaagaagtacgtttgctcagagagacctcattgcaacaaaaaatgcgcctagaggctcaagcaatggaactcgaggcattagcgcgggccgaaaaggcagggcgagccgaggcggaggggctccgcgccgcattggccggcgctgaggtggtgagaaagaacctggaggaagggtcccagcgcgaacttgaagaggttcaaagactgcaccaagagcagctaagctcgctcactcaggcacatgaagaatag

SEQ ID NO: 304580 - DNA, 516 bp, Artificial Sequence
  derived and/or modified sequence
atgttcccccccagcggccagtgggaccagacccggggcgtggtggtggtctccgcctgggaaacagaccacctctgtttttgcaacagcagtggctcgactgggctcattcctccatctcactttcaggcccggcccctatccaccctccccagaatggctcccacttggcttagcgacatccccctggtgcagccccccggccatcaggatgtgagcgagcgaagactggatactcagaggcctcaggtgacaatgtgggagcgcgatgtgtcctctgaccgtcaagaaccggggcggaggggtcgtagctggggcttggagggttcacaggccttgagccaacaggcagaggtcatagtaaggcagctgcaggagctccgttggctcgaggaggaagtttggctcctacgggagacctcgctacagcaaaaaatgcgactcgaagctcaagcaatggagctggaagctctcgcgcgcgccgagaaggccggccgggcggaggctgaaggatag

SEQ ID NO: 304581 - DNA, 357 bp, Artificial Sequence
  derived and/or modified sequence
atgttcccccccagcggcagcaccggcctgatcccccccagccacttccaggcacgccccttgagtacactacctaggatggcacccacttggcttagtgatatcccactggtgcagcctcccggccaccaggacgtttctgagcgccgcctcgatacccagaggccccaagtcacaatgtgggagcgggacgtgtcctccgaccgtcaggagcctgggaggcgtggaagatcctgggggctagagggatcacaggccctgagtcagcaggccgaagttatagtgaggcagctccaggagcttagatggttagaggaagaggtatggcttctgagggagacgagtctgcagcagtag

SEQ ID NO: 304582 - DNA, 384 bp, Artificial Sequence
  derived and/or modified sequence
atgttcccccccagcggccagtgggaccagacccggggcgtggtggtagtgtccgcttgggagactgaccacctatgcttctgtaattcttcagggagtactggcctaattccaccaagccactttcaggctagacctctcagcacgttgcccagaatggcacctacttggctctcagatatcccactcgtacagccaccgggccatcaagatgtgtccgagagaaggcttgacacccaacgcccacaagtgacaatgtgggagagggacgtgagttcagaccgccaggagcctggccgccggggcaggtcatggggtctggagggctcacaggcactctctcaacaggccgaggtgattgtacggcagttacaggagttgtag

SEQ ID NO: 304583 - DNA, 462 bp, Artificial Sequence
  derived and/or modified sequence
atgttcccccccagcggcagcaccggcctgatcccccccagccactttcaggcacgtcccttgtctacgttgcccagaatggctcccacctggctgtcagatatccctctggtgcagccacccggccaccaagacgttagtgaacgacgcctcgatacacagcgtcctcaggttactatgtgggagcgagacgttagctccgatcgccaagagccggggcgaagaggccggagttggggcctcgaaggctctcaagccttatcgcaacaggctgaggtcatagtcaggcagttgcaggagttacgcaggctggaagaagaagtccggctactgagagaaacgtcactgcagcagaagatgcgacttgaggcgcaagcaatggaactggaagctttggcccgtgccgagaaggcgggcagggccgaagccgaagggctgcgcgctgcactcgccggagcctag

SEQ ID NO: 304584 - DNA, 462 bp, Artificial Sequence
  derived and/or modified sequence
atgttcccccccagcggcagcaccggcctgatcccccccagccacttccaggccaggcccctgtccacactgccacgcatggctcccacatggcttagcgacattcccctggttcagccacctggacatcaggacgttagtgagcgtaggcttgacacacagcgtccccaggtgacaatgtgggaacgcgatgtatcctcagaccgtcaggaaccaggacgcaggggacgatcttgggggcttgaggggagtcaagcattgagccagcaggccgaggtcatagtcagacagttgcaggagttaaggagactagaagaggaagtcaggctgttgagagaaacctcgcttcaacaaaaaatgcgactggaagctcaggccatggaattggaagcacttgcgagagccgaaaaggcgggtagagccgaggctgagggcctaagggctgccctagcaggggcctag

SEQ ID NO: 304585 - DNA, 462 bp, Artificial Sequence
  derived and/or modified sequence
atgttcccccccagcggcagcaccggcctgatcccccccagccacttccaagcccgccccctgagcactttgccacgtatggccccaacctggctgtcagatatcccattggttcagccccctggccaccaggatgtgagcgaacggaggctcgacacccagaggcctcaagtgaccatgtgggaaagagatgtgtcctccgataggcaggagcccggccggagaggccggtcatgggggctggagggtagccaggcactcagccaacaagcagaggtgatagtcaggcagctacaggagcttcgatggctcgaggaagaggtttggttgctgagggaaacgtcactacagcagaaaatgcgtctggaggcccaggcgatggagctggaagctctcgcaagagccgaaaaggcaggccgcgccgaagccgaaggcctgcgggcagcccttgctggagcatag

SEQ ID NO: 304586 - DNA, 516 bp, Artificial Sequence
  derived and/or modified sequence
atgttcccccccagcggccagtgggaccagacccggggcgtggtggtggtctccgcctgggagactgaccatctatgtttctgcaattcttctggctcaaccgggcttatcccaccctctcattttcaggcacggccgctttcaactctacctcggatggcgcccacctggctatccgacattccgctggttcagcctcccggccaccaggacgtcagcgagcgccggctcgatactcaacggccacaggtcaccatgtgggagagagacgtgagttccgatcgacaggagcccggccgccgtgggagatcctggggactcgagggctcccaggctctcagtcagcaggccgaagtcatagtgcgccagctccaggagctgcgacggcttgaggaagaggtccggttattgagggagacaagcctccagcagaaaatgaggcttgaggcacaagcgatggaattagaagctctggctcgggccgagaaggccggccgagcggaagcagaaggctag

SEQ ID NO: 304587 - DNA, 357 bp, Artificial Sequence
  derived and/or modified sequence
atgttcccccccagcggcagcaccggcctgatcccccccagccactttcaggcccgtccactctcgacactgccgaggatggctccaacgtggctgtccgacattcctctggttcaaccccctggtcaccaggatgtctctgaacgccggctggacactcaacgaccccaggtaaccatgtgggagcgagacgtgtccagcgatagacaagaaccagggcgacgaggccggtcatggggcttggaaggcagtcaggccctgtcccagcaggccgaggtaattgtaagacagctgcaggaacttcggaggctggaggaggaagtgcgcctgctgcgggaaacctctctccagcagtag

SEQ ID NO: 304588 - DNA, 423 bp, Artificial Sequence
  derived and/or modified sequence
atgttcccccccagcggcagcaccggcctgatcccccccagccacttccaggcacgacccttgtctacgctcccccgaatggcgcccacctggctaagcgacataccattggtgcagccaccaggccatcaggacgtttcggaaagacgcctggacacccagcgcccacaggtcactatgtgggagagagacgtctcctcggacagacaggagcccgggcgtcggggcaggtcctggggtctggagggatcacaagccttgtcacaacaggccgaggtcattgttaggcagctccaggaactaaggaggctggaggaagaggtgagacttctgcgcgagacctctctacagcagaaaatgcgactggaagcacaggccatggaactggaagccctggctcgagctgagaaagcagggagatag

SEQ ID NO: 304589 - DNA, 291 bp, Artificial Sequence
  derived and/or modified sequence
atgttcccccccagcggcagcaccggcctgatcccccccagccactttcaagcccgaccgctgagtacgctcccacgcatggctccaacatggctttcagatatccccctggtgcagcctcctggacatcaggacgtttcggagaggcgcctcgatacacagcgccctcaggttaccatgtgggagcgcgacgtgtctagcgatcggcaggaacccgggagaagaggaagatcttggggcttagagggatctcaggctttgtcccagcaggccgaggtaatcgtccgctag

SEQ ID NO: 304590 - DNA, 477 bp, Artificial Sequence
  derived and/or modified sequence
atgttcccccccagcggcagcaccggcctgatcccccccagccactttcaagcccgccctctttctactcttccccggatggcacctacgtggctctccgatatacctctggtgcagccgccaggccatcaggacgttagcgaacgaagattggatacccagagaccgcaggttacaatgtgggagagagacgtatctagtgaccgccaggaaccaggaagacgaggaaggtcatggggcctggaaggctctcaggctctaagtcagcaggctgaggtcatcgtgcgccaactacaagaactccgcagattggaagaggaagtgcggttattgcgggaaactagtctccagcagaaaatgaggctggaagcccaagctatggagttagaagccctcgcacgcgcagaaaaagcaggaagagctgaagccgaggggctccgagcggctctggcaggagcggaagtggtcagaaagtag

SEQ ID NO: 304591 - DNA, 351 bp, Artificial Sequence
  derived and/or modified sequence
atgttcccccccagcggcagcaccggcctgatcccccccagccactttcaagctcgacctctcagcaccctccccaggatggccccaacttggctctccgatatcccgctcgttcagcctccaggacatcaggacgtcagtgagcgcaggctggatactcaaaggccacaagtgacaatgtgggaacgcgacgtttccagcgatcggcaagagccgggccgaaggggccgatcttggggtctggaggggagccaggcactctcccagcaggccgaagtgattgttcgccagcttcaggagcttcgaaggctcgaggaggaagtaagacttctgagggagacctctctttag

SEQ ID NO: 304592 - DNA, 126 bp, Artificial Sequence
  derived and/or modified sequence
atgttcccccccagcggcagcaccggcctgatcccccccagccactttcaagctagacccttatcaaccctccccagaatggcccccacttggctgtctgacattcccttagtgcagcccccatag

SEQ ID NO: 304593 - DNA, 423 bp, Artificial Sequence
  derived and/or modified sequence
atggcccccacctggctgagcgacatccccctggtgcagccccccggccaccaggatgtgtccgagaggaggctcgatacacagaggcctcaggtcacgatgtgggagcgcgatgtctcctccgatcgccaagagcccgggcggcgggggcgctcatgggggctcgaaggttcacaggcactttcgcagcaggcagaggtgattgtacgccaacttcaagaattgagaaggctcgaggaggaggtccgcctgcttcgggaaacatctctgcagcagaagatgcgcctcgaggcccaggccatggagctggaggcattagccagagcagagaaagcggggagagccgaggctgagggactgagagccgctctcgccggcgccgaagtggtgcgcaagaatcttgaggagggaagccagaggtag

SEQ ID NO: 304594 - DNA, 480 bp, Artificial Sequence
  derived and/or modified sequence
atgttcccccccagcggcagcaccggcctgatcccccccagccactttcaggcacgcccgctttccacgctccctaggatggctccgacatggttgtcagacatcccgctagttcagccacctggccaccaagacgtaagcgagaggcgcctggacacgcagcggccccaggtgacgatgtgggagcgcgacgtatccagcgatcggcaggaacctgggcgtcggggacggagctggggacttgagggatcacaagcactgtcccaacaggcggaggtgatcgtacgacaactacaggaactgcggaggctcgaggaggaagtacggctgttgagggagacttcactacagcaaaagatgaggttagaggctcaggcaatggaactggaggctcttgccagagcggaaaaagccggccgcgcggaagccgaaggcctcagagcggcccttgctggcgctgaagtggtgaggaaaaattag

SEQ ID NO: 304595 - DNA, 516 bp, Artificial Sequence
  derived and/or modified sequence
atgttcccacctagcggacagtgggatcagacacggggagtggtcgtggtgtctgcatgggagacagatcatctctgtttctgcaattcgagcggatccacggggctgatcccaccctctcactttcaagccagacccttgtcgacgcttcccagaatggcccctacctggctgtccgacataccactagtgcagccaccgggtcaccaggatgtcagcgagcggcgattggacacgcagcgccctcaagtgaccatgtgggagcgcgacgtatcatctgatcggcaggagcccggacggagagggagatcttggggcctggaggggagccaagccctgagccagcaggcagaggtgattgttaggcaactacaagagttaaggcgcctggaggaagaggttcggttgttgcgggagacgtcgctacagcaaaagatgaggttagaggcccaggctatggagctcgaagcccttgcgagagctgagaaggcagggagggctgaggccgagggctag

SEQ ID NO: 304596 - DNA, 516 bp, Artificial Sequence
  derived and/or modified sequence
atgttccctccctccgggcaatgggaccaaacacggggagtcgtggttgtgtccgcctgggaaacagaccatctgtgtttttgcaacagctccggatcgaccggccttattccccctagccacttccaggcgaggcctctgagcacattacccagaatggccccaacgtggctcagtgacattccacttgtccagccaccaggccatcaggacgtctccgagaggaggctggacacccagcgaccacaagtgactatgtgggagcgggacgtctcttccgaccgacaagaaccaggaagacgcggaagaagctggggattggagggaagtcaagccctctcccaacaagccgaggtgattgtcagacagttacaagagcttcggcgattagaagaagaggtgagactgctgcgggagaccagtctccagcagaagatgagacttgaggcacaggcaatggagctggaggctttggcacgcgctgagaaggcaggcagagcagaagctgagggatag

SEQ ID NO: 304597 - DNA, 384 bp, Artificial Sequence
  derived and/or modified sequence
atgttccccccttcgggccagtgggaccaaacaaggggcgtggtggtcgtctcagcttgggaaaccgaccatctctgcttttgtaacagtagtggctccactggtctcatccctcctagtcactttcaagccagacctctgagtacattacctaggatggcccctacatggctctccgacatacctttagtacaaccacctggacatcaggacgtttccgagcggcgtctggacacacaacgcccacaggtaaccatgtgggaacgggatgtgtcgtcagaccggcaggagccgggtcgcaggggcagatcgtgggggctggaagggtcacaagcactgtcccagcaggcagaagtgatcgttcgtcagttacaggagctgtag

SEQ ID NO: 304598 - DNA, 384 bp, Artificial Sequence
  derived and/or modified sequence
atgttccccccttcaggacagtgggaccagacaaggggcgtcgttgtagtgtcggcttgggaaacagatcatctgtgcttttgcaactcttccggctccacagggctcattcctccctcccacttccaggcacggcctttaagcaccctcccccgaatggcgccaacctggctaagcgatatccctttggtccaacctccaggccaccaggatgtgagtgagcgcaggctcgatacccaaaggccccaggtcaccatgtgggaacgggatgtgagttcagacagacaggagccaggcaggcgtggtcgatcctggggactggagggtagccaagcgctctcacagcaggccgaagtaattgtgaggcagcttcaggagctgtag

SEQ ID NO: 304599 - DNA, 516 bp, Artificial Sequence
  derived and/or modified sequence
atgttcccaccatcaggacaatgggaccagacacgcggagttgttgtcgtgtccgcctgggagaccgaccatctgtgtttctgcaattcttccgggagtacaggcctgatccctcctagccacttccaagccaggccactctctaccctgcctcggatggcccctacatggctctccgatataccgctagtgcaacctcctggtcatcaggacgtcagtgagaggcgcttggatactcaacggcctcaggtgaccatgtgggaaagagacgttagcagcgatcgccaggagcccggtagacgaggtagatcgtggggcctcgaggggtcccaggctctgtcccagcaagctgaagtaatcgtccggcaactccaagagttgaggtggttggaagaggaggtctggctgctcagagagactagcctgcagcagaagatgcgactcgaggcccaggctatggaactagaggccctagcccgtgctgagaaggccggacgcgcagaggccgagggttag

SEQ ID NO: 304600 - DNA, 516 bp, Artificial Sequence
  derived and/or modified sequence
atgtttccgccaagcgggcagtgggatcagacccgaggagtggtggtggtgtctgcatgggagacagaccacctgtgtttttgtaactccagcgggtccactgggctgatccccccatcccacttccaagccagacccttgtctaccctgcccagaatggctcctacttggctgtctgatatccccttagtgcagcctcccggtcaccaggacgttagcgaacgccgactcgacactcaacgccctcaggtcaccatgtgggagagggatgtttcctccgacaggcaggagcccggaaggcggggtcgtagctgggggttggagggctcccaagcattatcacagcaggcagaagtcatagttagacagcttcaggaattacgccgattggaagaggaagtaagactgctgcgggaaacctccctgcagcagaagatgcggttagaagcgcaagctatggagttggaagccttagcccgagccgagaaagctggcagggccgaggctgaggggtag

SEQ ID NO: 304601 - DNA, 462 bp, Artificial Sequence
  derived and/or modified sequence
atgttccctccctccggaagtacaggcctgattcccccaagccattttcaagccaggccccttagcactttaccacggatggccccaacctggctgtctgatataccgctggtgcagccacctggacaccaggacgttagtgaaaggaggctcgatacccagcgaccacaggtgaccatgtgggagcgggatgtgtccagcgatagacaggaacctggacgtagaggaagaagctggggtctggagggatctcaggcacttagccagcaagcagaagtcatagtgagacagctacaggaactacgtcggttagaggaagaggtaaggcttcttagagagacctcattacagcaaaagatgaggctggaggcccaggccatggagctcgaggctttggctagggcggagaaggctggtcgagccgaggccgaaggcctccgggctgccctcgccggtgcctag

SEQ ID NO: 304602 - DNA, 462 bp, Artificial Sequence
  derived and/or modified sequence
atgttccccccttcaggatctaccggcctcatacccccatcccatttccaggcgagacccctctctaccctgcctcgcatggcgcctacatggctgagcgatatacctctggtgcagcccccagggcatcaggatgtaagtgaacggagactcgacacccagcgccctcaagtgaccatgtgggagcgagatgtgagctcggaccgccaggagccaggtcgccgtgggagatcttggggcctggaaggatctcaggcactgtcacagcaagctgaagtcatagtgcgacagttgcaggagctgcggagactcgaggaagaggtaagactgctgagagagacatctttgcaacagaagatgaggctcgaagctcaggctatggaactggaagcgctggcaagggcggagaaggccggacgggctgaagctgaggggttaagagcagcgctggcaggtgcttag

SEQ ID NO: 304603 - DNA, 357 bp, Artificial Sequence
  derived and/or modified sequence
atgttccccccatctgggtctacaggcctgattccaccaagccactttcaggctcgccctctgtcaacactgccaaggatggccccaacgtggctcagtgatataccactggtccagcccccaggacatcaggacgttagcgagcgccgtcttgacacccagagaccccaggtcaccatgtgggaacgagacgtgtcttctgaccggcaggagccaggcagaaggggcaggtcttgggggcttgaaggatcccaggccctcagccagcaagcggaggttattgtccgccagctacaggagttaagacggctagaggaagaagttcgcctgctgagagagacatctctccagcagtag

SEQ ID NO: 304604 - DNA, 384 bp, Artificial Sequence
  derived and/or modified sequence
atgtttccgccatctgggcagtgggatcagaccaggggcgtcgttgttgtatctgcttgggaaacagatcacctttgcttctgtaactccagcggcagtacagggctgattccgccttcccacttccaggcaaggcccctgtccactctcccacggatggctcctacgtggctgtcagatatcccactggtccagcctcccggtcatcaagacgtgtcagaaagacgtttggacacacagagaccacaagtgaccatgtgggaacgcgacgtgtcttctgatagacaagagcccggaagaaggggacgctcatggggactcgagggcagccaggcgctatcacagcaggctgaagtgattgtgcgccagttgcaggagctgtag

SEQ ID NO: 304605 - DNA, 357 bp, Artificial Sequence
  derived and/or modified sequence
atgtttcccccttcgggcagcacaggcctgattccaccgtctcactttcaggcaagacctctgagtacactgccccgaatggctccaacttggctgtctgatattcccctagtgcagcccccagggcatcaggacgtgagtgagcgtcgcttggatacacaacgcccacaggtaaccatgtgggaaagggacgtgtcctctgatcggcaggagccaggaaggaggggacgaagctggggcctggagggttcacaagccctctctcagcaggcagaagtgatagtcaggcaattacaggagctgcggaggctagaagaggaagtgaggctgctgcgggagacaagcctgcagcagtag

SEQ ID NO: 304606 - DNA, 384 bp, Artificial Sequence
  derived and/or modified sequence
atgtttcccccttctggacagtgggaccaaacaagaggcgtggtcgtggtctctgcctgggagaccgatcacctgtgcttctgtaacagttccggatcgacagggctaatcccaccaagccatttccaggccagacctttgagtactctgccgaggatggctcctacatggctgagcgacatacctcttgtccagcctccaggacatcaggatgtgtcggagaggaggctggacacacagcggcctcaggtgacaatgtgggagagggatgtttccagtgacagacaggaacccggaagaagaggtagaagctggggtctggaaggtagtcaagccttatcccaacaggcagaggttatcgtcagacagttgcaggaactctag

SEQ ID NO: 304607 - DNA, 462 bp, Artificial Sequence
  derived and/or modified sequence
atgttccccccttccggatccactggcctgattccaccttcccatttccaggccaggccactgtctacacttcctaggatggctcctacatggttaagtgacatccccctggttcagccgcctggtcatcaagatgtcagcgagcggagactcgatacacagcggccacaggtgacaatgtgggagcgtgacgtctctagcgacaggcaggagcctggccgtcggggacgttcatggggacttgaagggagccaggctctctcacagcaagctgaagtcatagtgcggcagctccaagaacttagatggctggaggaggaagtctggctgctgagagagacttcattgcagcaaaagatgcgcttggaagcgcaggcgatggagcttgaagcccttgcgcgtgccgaaaaggctggaagggccgaagctgagggcctccgtgctgctctagctggcgcatag

SEQ ID NO: 304608 - DNA, 384 bp, Artificial Sequence
  derived and/or modified sequence
atgtttccccctagtggacagtgggaccaaacacgtggggtggtggttgtgtcagcctgggagactgatcacctatgcttctgtaacagtagcgggtccactggcctcatccctccctcccactttcaggctcggccactgtctaccctgccgaggatggcacctacatggctcagtgacattccacttgttcagccacctggacaccaggacgtcagtgagcggaggttggacacccagcgtccgcaggtcacaatgtgggagcgcgatgttagctcagataggcaggagcccggacggcgaggcagatcgtggggcctggaggggagtcaggctctctctcagcaggccgaagttatagttaggcaactgcaggagctgtag

SEQ ID NO: 304609 - DNA, 567 bp, Artificial Sequence
  derived and/or modified sequence
atgtttccaccatctgggagtaccggacttataccgccttctcacttccaggccaggccgctctccacacttccaagaatggctccaacctggttgagtgatataccactcgtgcagccccctggacaccaagacgtgagcgagcgtaggctcgacacacagcgccctcaggtgacgatgtgggaacgggacgttagctcagaccggcaagagccaggacggagggggcgatcatgggggctggaggggtcgcaggcgttgagtcaacaagccgaggtcatcgtaagacagctccaggaactgcggcgtttggaggaagaggtgcgactactcagagagactagcctccaacagaagatgagactggaggcacaggcaatggaactggaagctctcgccagagccgaaaaagcgggtagggctgaggccgaggggttgagagcagcccttgcaggcgctgaggtcgttcgtaagaatctcgaggaaggtagccaaagggagctggaggaagtacagcgtttacaccaggaacagctgagcagcctgacccaggcccacgaagaatag

SEQ ID NO: 304610 - DNA, 357 bp, Artificial Sequence
  derived and/or modified sequence
atgtttcccccttctgggtcaaccggtcttattccgccatcgcactttcaggcgcgtcccctgtcaaccctgcctaggatggcccctacatggctgtcggacattccgctggtgcagccacctgggcatcaagatgtgtcagagagacgattggatacccagagacctcaagttacaatgtgggaaagggatgtctcctcagatcgccaggagcccggacggagggggcgttcttggggactggagggtagtcaagccctttctcagcaagctgaagtgattgtaagacagctccaggagctccgttggctggaagaagaagtctggctgctgcgcgaaacgagcctgcagcagtag

SEQ ID NO: 304611 - DNA, 567 bp, Artificial Sequence
  derived and/or modified sequence
atgtttcccccttctgggagtaccgggctgattccaccctctcactttcaggcacgacccctgtctacactacccaggatggccccaacatggctctctgacattccccttgtgcagcccccaggccaccaagatgtatctgagcgtcgtttggatacccagagaccgcaggtcacgatgtgggagagagacgtctcctcagaccgacaggaacccggtcggcgtggcaggagttggggcttggaggggagtcaggctctgtcccagcaggccgaagtgattgtccgccagctccaggaactgcgtcgtctggaagaggaggttcggctgctgcgcgagacatcccttcagcagaagatgaggctcgaagctcaggctatggaactggaggccctcgcgagggccgagaaggctgggagggccgaagctgagggactcagggcagccttggcgggtgccgaagtggtgagaaagaatttggaggaagggagccagagggagctcgaggaagtccaaaggctacaccaggagcaactttcatcacttacccaggctcacgaagagtag

SEQ ID NO: 304612 - DNA, 516 bp, Artificial Sequence
  derived and/or modified sequence
atgttccctccctctgggcagtgggaccagacacgaggagttgttgtggtctctgcctgggagacagaccacctgtgtttttgtaacagcagtggcagtaccgggctcattcctccctcccactttcaagcgagaccgttatcaacgctgcccaggatggcccctacatggctttctgatatccctctagtccagccgcctggtcaccaggatgtttcagaacgccgtttggatacacaaaggccacaggtgactatgtgggagagggacgtgtcttcagaccgccaggaacccggtcgcagagggagaagttggggactggaaggctctcaggccctatctcaacaagcggaggtgattgtccgtcagttgcaagagttaaggtggctggaagaagaagtctggctcctgagggagacctccctgcagcaaaagatgcgcctcgaagctcaggctatggaactcgaggcacttgcacgggcagaaaaagcaggacgagccgaagcagaaggatag

SEQ ID NO: 304613 - DNA, 357 bp, Artificial Sequence
  derived and/or modified sequence
atgtttcctccatcaggctccaccggactcattccaccgagtcattttcaagccaggccgctgtcgaccttgcctagaatggccccaacatggctctccgacattcctttggtccaaccccctgggcatcaagatgtgagtgagaggagactggatacccagcggcctcaggtcacgatgtgggagagggacgtgagcagtgaccggcaggagcctgggagacgtggtagatcctggggcctagaaggctctcaggccttaagccaacaagcggaagtgatagtgaggcagctgcaggaactgcgctggctggaagaggaggtctggctgctgagagagacgtccctgcaacaatag

SEQ ID NO: 304614 - DNA, 384 bp, Artificial Sequence
  derived and/or modified sequence
atgtttccaccttctgggcagtgggatcagaccagaggtgtggtggtggtctcagcgtgggaaactgatcacctgtgcttttgcaactcctctgggagcactgggcttatacccccttcccactttcaggccaggcctctgagtactctgccacgtatggcaccaacctggctaagcgatatacctctcgtgcagcctcctgggcaccaggacgtgtctgagaggaggctggacactcagcgcccacaggtgacaatgtgggagcgtgacgtgagctcagaccggcaggagcccggacgcagggggcgttcctggggcttagaggggagccaagccttgagccagcaggctgaggtgattgtgaggcaattgcaggagctgtag

SEQ ID NO: 304615 - DNA, 462 bp, Artificial Sequence
  derived and/or modified sequence
atgttccctccttccgggtccaccggactgatccccccttctcactttcaggcgaggcccctcagcacactcccgcgaatggccccaacctggttaagcgacatcccattggtgcaacctcctggtcaccaggacgtgtccgagaggcgcctggacactcagcggccacaggtaaccatgtgggaaagagatgtttcatcagatcggcaagaaccaggcaggcgcggtcgaagctgggggttagaggggagtcaagctctcagtcagcaagcagaggtgattgttaggcagctgcaggaactaagacgccttgaagaggaagtccgactgcttcgggaaactagcctgcagcaaaagatgagattagaggcccaggctatggaacttgaggcacttgcaagggctgagaaggcaggcagggcggaagctgaggggctgagagccgcacttgcaggcgcttag

SEQ ID NO: 304616 - DNA, 462 bp, Artificial Sequence
  derived and/or modified sequence
atgtttcctccatctggctccacgggtctgatccctccgagccattttcaagccaggccattgtcaaccttaccacgcatggcacctacatggctctctgatatccctctcgtgcagccaccaggacatcaagacgtctccgagcgtaggctcgatacacagcgccctcaggtaacgatgtgggaaagggacgtgtctagcgacagacaggaacccggacgccgaggaagatcatggggactggaaggatcccaggcattgtcacagcaggccgaggtaattgtacgacaactgcaggagctacgaagattagaagaagaagtgcgtttgttgagggaaacatccctgcaacagaagatgcgcctggaggcgcaggccatggagttggaagcactggctcgggcagaaaaggccggtcgagctgaggcagaggggttgagagccgcactggcgggagcctag

SEQ ID NO: 304617 - DNA, 462 bp, Artificial Sequence
  derived and/or modified sequence
atgtttcctccctccggatcaactggcctgatcccgccttctcatttccaggctcgccctttaagcacactgccaaggatggccccaacttggctctctgacattcctctggtacaaccccctggccatcaggatgtatccgagagaaggttggatactcaacgccctcaggtaaccatgtgggagagggatgtctctagtgaccggcaggagccagggcgtcggggacggtcctggggcctagaggggtctcaggctctttcacaacaagccgaggtcatagtgaggcagctccaagagctgcggtggctggaggaagaagtatggcttctgcgcgaaacgagtcttcaacaaaaaatgcgtctggaagctcaagccatggaacttgaggccttagcacgggctgagaaggccggtagagcggaagcagaaggactgcgcgctgcgctggccggtgcctag

SEQ ID NO: 304618 - DNA, 516 bp, Artificial Sequence
  derived and/or modified sequence
atgttccctccaagcgggcagtgggatcaaacacggggagttgtcgttgtgtccgcctgggaaactgatcatctttgtttctgcaattcctcgggaagcacaggactaataccgccatcacactttcaggctagacccctatccacgcttcctcgcatggcccctacatggctgagtgacatcccacttgtgcaaccgccaggccatcaggatgtcagtgagaggcggcttgacacccaaaggccccaggtgactatgtgggagcgagacgtatcgagcgaccggcaggagcccggtaggcgtggtaggtcgtgggggctagaagggtcccaggctctgtcacagcaagcggaggtgattgtacgccagctgcaagaattaagaaggctggaagaggaggtgaggctgttgcgggaaacatctttgcagcaaaagatgagactggaggcccaagctatggagctggaggcgttggcacgtgccgaaaaagccggtagggctgaggcagaaggatag

SEQ ID NO: 304619 - DNA, 357 bp, Artificial Sequence
  derived and/or modified sequence
atgtttcctccatccggttctaccggtttaattccgccttcgcattttcaggccaggccactctccactcttcctagaatggcccctacctggctgtccgacatccccctagtgcagccacctgggcaccaggacgtaagtgagcgcagattggacacccagaggccacaggtgactatgtgggagagagatgtctctagcgatcgacaagaacccggacggcgaggacggtcctggggcctggagggaagccaggccctgtcccaacaggcagaggtgattgtgcggcagcttcaggagctacgcaggcttgaggaagaagtgcggctgttgagggaaacctcgctgcaacagtag

SEQ ID NO: 304620 - DNA, 423 bp, Artificial Sequence
  derived and/or modified sequence
atgtttcctccttctggctctacgggattgatccccccatctcactttcaggcacgtcccctgagtacccttcctcggatggcacctacgtggctaagtgacatccccctggttcagcctcccggtcatcaagacgtaagcgagaggagactggatacccaacggccacaagttacgatgtgggaaagagacgtgtcgtccgatcgtcaggagccaggtcggcgaggcagaagctgggggctggagggctcacaggccttatctcagcaggccgaggttattgtacggcagctccaggaactcagacgactggaagaagaggttagactgctgcgcgagacttcactgcagcagaagatgaggctcgaggcgcaggcaatggagctggaagcattggccagggctgaaaaagcaggaaggtag

SEQ ID NO: 304621 - DNA, 291 bp, Artificial Sequence
  derived and/or modified sequence
atgttccccccatctggaagtactggcctgattcccccttcccatttccaagcacgccctctgagcaccctaccacggatggctcctacttggctctccgatattcctttagtccagcccccaggccatcaggacgtgtcagaacggagattagacactcaaaggccacaagtcaccatgtgggagcgagatgtctctagcgaccggcaggaaccaggccgtcgcggaaggtcttgggggctcgagggcagtcaagctctttctcagcaagccgaagttatcgttaggtag

SEQ ID NO: 304622 - DNA, 477 bp, Artificial Sequence
  derived and/or modified sequence
atgtttccgcctagcggatccaccggcctcatacccccatcacacttccaagccaggccactatcaactcttcccagaatggcccctacttggctgtccgatattccactcgtccagcccccaggccaccaggatgtatctgagcgcaggttagatacacagaggccacaagtaaccatgtgggaaagagatgtgagtagcgatcgccaggagcccggacgccgtgggagaagctggggcctagagggctctcaagcactaagtcagcaggctgaggttatcgtccgacagctgcaagaactccggaggctcgaggaagaggtccgtctattgagggaaacatcgttacagcagaaaatgagactggaggcccaggccatggagctagaagcattggcccgagctgagaaggcagggcgtgctgaggctgaaggtctgcgggctgccttagctggtgccgaagttgtccgtaaatag

SEQ ID NO: 304623 - DNA, 351 bp, Artificial Sequence
  derived and/or modified sequence
atgtttcctccatcggggtcgactgggctaatcccaccgtcccacttccaagcgcgaccactgagtaccctgcctagaatggctcctacatggctgtccgatattccgctcgtccagcctccgggtcatcaggacgtgtctgagaggaggctggatacccaacggcctcaggttaccatgtgggaaagggatgtgagttctgaccgccaagagccgggtcgacgcggacgatcatggggcctggaaggcagccaggcactcagtcagcaggccgaggttatcgtacgacagctgcaggagctgagaagacttgaggaggaagtgaggcttctgagggagacaagtctatag

SEQ ID NO: 304624 - DNA, 126 bp, Artificial Sequence
  derived and/or modified sequence
atgtttcctccttcgggaagcactgggctcattcctccatctcattttcaagcaagacctttatctactcttcctcgtatggcacccacctggctgtccgacatccccctggtgcagcccccatag

SEQ ID NO: 304625 - DNA, 423 bp, Artificial Sequence
  derived and/or modified sequence
atggcgcctacatggctctcggacattcccctcgtgcagccccctgggcaccaagatgtatccgagcgcaggctagacactcagaggccacaggtgacgatgtgggaaagggatgtgtcatcagacaggcaggagccaggacggaggggtcgatcgtggggacttgagggaagccaggctctgtcccaacaggccgaagttattgtgagacagctgcaagagctcagaagacttgaggaagaagtcagacttttacgagaaacaagcttgcagcagaaaatgcggttagaagcccaggccatggaattggaggccctggccagagcggaaaaagccggtcgggcagaggcagagggcttgcgggctgcactggcaggcgctgaagttgtgaggaagaacctggaagaaggctctcagcggtag

SEQ ID NO: 304626 - DNA, 480 bp, Artificial Sequence
  derived and/or modified sequence
atgttccctccatctgggtctactggactcattcccccttcccactttcaggctaggcccttatcaaccctgccccgaatggccccaacctggctgtctgacatccccttggtgcagccacccggacaccaggatgtgagcgagagaaggctcgacacacaaaggccccaagtcacgatgtgggagagagatgttagttccgacaggcaggaacccggtagacggggaagaagttggggcctggaagggtcgcaagctctcagtcagcaggcagaggtcattgttcgacagctacaggaattacggcgtctggaggaagaggtgcgcctgctgagagaaacttctcttcaacaaaagatgcggttggaagcccaggccatggaattagaagccctcgccagagcggagaaagctggaagggccgaagcggaagggctgcgcgctgccttggctggcgctgaggtcgtgcgtaagaactag

SEQ ID NO: 304627 - DNA, 3997 bp, Artificial Sequence
  derived and/or modified sequence
gatagcgccgggcagagggacccggctaccctggacagcgcatcgccgcccgcccgggtcgccgcgccacagccgctgcggatcatggaacatctaaaggcctttgatgatgaaatcaatgcttttttggacaatatgtttggaccgcgagattctcgagtcagagggtggttcatgttggactcttaccttcctaccttttttcttactgtcatgtatctgctctcaatatggctgggtaacaagtatatgaagaacagacctgctctttctctcaggggtatcctcaccttgtataatcttggaatcacacttctctccgcgtacatgctggcagagctcattctctccacttgggaaggaggctacaacttacagtgtcaagatcttaccagcgcaggggaagctgacatccgggtagccaaggtgctttggtggtactatttctccaaatcagtagagttcctggacacaattttcttcgttttgcggaaaaaaacgagtcagattacttttcttcatgtatatcatcatgcttctatgtttaacatctggtggtgtgtcttgaactggataccttgtggacaaagtttctttggaccaacactgaacagttttatccacattcttatgtactcctactatggactttctgtgtttccatctatgcacaagtatctttggtggaagaaatatctcacacaggctcagctggtgcagttcgtgctcaccatcacgcacaccatgagcgccgtcgtgaaaccgtgtggcttccccttcggttgtctcatcttccagtcatcttatatgctaacgttagtcatcctcttcttaaatttttacgttcagacataccgaaaaaagccaatgaagaaagatatgcaagagccacctgcagggaaagaagtgaagaatggtttttccaaagcctacttcactgcagcaaatggagtgatgaacaagaaagcacaataaaaatgagtaacagaaaaagcacatatactagcctaacagattggcttgttttaaagcaaagactgaattgaaggttacatgttttaggataaactaatttcttttgagttcataaatcatttgtacccagaatgtattaatatattgctattaggttaatctgttaactgaatgctttgatcagcattgaggtgatgctcacctccgaggacctcagaactggtgcagcttctctctccctccctcccacagactgaacctttcgccagaagctgtccttataacgccttatacgcatacacagccaggaaacgtggagcattgtttctcacagagagtctccaaataaaaagggttttgttcagattaaaatgtttacaacaaaatgttaattatattctaaatacagggtatgttctaatctatattaagcaataatgccagtgcataatcattccatttgttcctttagcaatcaaccccagaaaatattaaaatgggatcatacacagaagatagaaaaatctagcaaaacttctctttctgtaagccagagtcttgtctatcagattcccacaaccactcctgattctaaatttagtgatatggtaatgaaattggtatttattttaaatattagttattctaaggagaaaaaaatgcttctgcaagattttcataattcaggggctgtggataggattgttcctctgtttccctaatcattcatctgttcatgtctccctcttgtgccagtcagcctaggttatacagatgccatgctccacaccacgagcagtgtacaaatctggctgcccgtttactttctgagcaagcactggagtccactccgacctttttctttgaacatgcatgctgctggaatatgtataaatcagaactagcagaagtagcagagtgatgggagcaaaataggcactgaattcgtcaactcttttttgtgagcctacttgtgaatattacctcagatacctgttgtcactcttcacaggttatttaagtttttgaagctgggaggaaaaagatggagtagcttggaaagattccagcactgagccgtgggccggtcatgagccacgataaaaaatgccagtttggcaaactcagcactcctgttccctgctcaggtatatgcgatctctaccgagaagcaagcacaaaagtagacaaaagtattaatgagtatttcctttctccataagtgcaggactgttactcactactaaactctaccaagaatggaaacaaagaatattttctgaagatttttttgaagattaatttataccctataaaataaaacttgttagcttcgatgaagtcacttcatcttctctcctgccttatttttttaaataagtttttaggtcctgacactgacatcaaatacatgcacaccagaaaggcatttccaccaccgtccccactcattagcgtccagagtgcctttctctctcggctttttttcccccctgagctctagttttaaactttctcctgttaaaaaaattgtacttttatttcatgtaaactgcccctctgaggatttgggcatattttttggaaggtgcctaatgcttaggatagtctctagggtgatgcactgcacctgcttccttcccttcagtgcggccgacccatttctgttgaacagatgtctcctgtgtgatgcccctgactcttacatttatctttctaaatcattttctgaagctgacttgctctagggtgcttcatcaccacttccatcttgcatcaccttataactgttctgtcttgttctctcccagcaatttattttaaaacaagggctagcttcaagcatgactgttaatggctcctctgtgacaaaacacaagttggaccaaggagaaagccctttggagaaactggaccctagttcagtttagatctcaaatataggctgaaatctcttaccaaagtgcgttccagataaaaatgagacttagaagacagactggtctaatatgctcactggtcatcacattcagcttattcttacgtgccagtgaggccctaaggtctcagtgcatagcatacctgccactctggatgttttcctgggcttcatatctgtatggcaaggagggagctgtccttcagcagacaaagtcaagcagctttaagtacaaggcagcttgaaacctctctgatgaaagtgaaaaatgtgggtagcttatactttcaaactaatgccagtgactagagagaggtttcattcatgatgtgtatttccaatttggtcttcaattcaagagatgcttcataaaacacttatagccttaaaccattcaagggctaattaaaaaaatagttatgaaatcttagccacaaaaaataaatcaggtaaacattttaacctgtcgttaagtgttgtaacttcaaaaaaccaaaatgcttattttaatgtgatttttctaaaactattgaaaaattaatatttctataatctattaaaaaaaatggagaatgttttctctcaaatttcctctgacccatgggaatgaaaatacttaaatactgtaaagcatatctattaataattcccccaattttttaaactaacaaaatggaatgttaactgaatggaattaaacatagcaattgtcaagccatcaaaattatatatcgaaccacttaggcatgttacggggtaaagtcctcacccctgcatttgagaaatattttattatttttattttaaggcaaaacagtgtttactgtgatgggcagaacagccttttgtatctaggagtccatttgagttctttccaatatttccatatcgttcataaatgtgtctgggggcttccttgtttggaaaatatggatatcgctttgttttcctttgaaagtaattatatcttaagaacatagtatcatgaatggagtagacagggaggctgcagaagccatttctctttgtagataaaaagcattatctatgattgttgtataataaattgatttttacattaaa

SEQ ID NO: 304628 - protein, 296 aa, Artificial Sequence
  derived and/or modified sequence
MEHLKAFDDEINAFLDNMFGPRDSRVRGWFMLDSYLPTFFLTVMYLLSIWLGNKYMKNRPALSLRGILTLYNLGITLLSAYMLAELILSTWEGGYNLQCQDLTSAGEADIRVAKVLWWYYFSKSVEFLDTIFFVLRKKTSQITFLHVYHHASMFNIWWCVLNWIPCGQSFFGPTLNSFIHILMYSYYGLSVFPSMHKYLWWKKYLTQAQLVQFVLTITHTMSAVVKPCGFPFGCLIFQSSYMLTLVILFLNFYVQTYRKKPMKKDMQEPPAGKEVKNGFSKAYFTAANGVMNKKAQ

SEQ ID NO: 304629 - protein, 488 aa, Artificial Sequence
  derived and/or modified sequence
MLSRRYEGEIPKNICKRKKTVHQVTENASDADLWLLNSCTVKNPAEDHFRNSIKKAQEENKKIVLAGCVPQAQPRQDYLKGLSIIGVQQIDRVVEVVEETIKGHSVRLLGQKKDNGRRLGGARLDLPKIRKNPLIEIISINTGCLNACTYCKTKHARGNLASYPIDELVDRAKQSFQEGVCEIWLTSEDTGAYGRDIGTNLPTLLWKLVEVIPEGAMLRLGMTNPPYILEHLEEMAKILNHPRVYAFLHIPVQSASDSVLMEMKREYCVADFKRVVDFLKEKVPGITIATDIICGFPGETDQDFQETVKLVEEYKFPSLFINQFYPRPGTPAAKMEQVPAQVIGERQQVLVTEESFDSKFYVAHNQFYEQVLVPKNPAFMGKMVEVDIYESGKHFMKGQPVSDAKVYTPSISKPLAKGEVSGLTKDFRNGLGNQLSSGSHTSAASQCDSASSRMVLPMPRLHQDCALRMSVGLALLGLLFAFFVKVYN

SEQ ID NO: 304630 - DNA, 1467 bp, Artificial Sequence
  derived and/or modified sequence
atgctatcaaggcgctacgaaggtgagattccgaaaaatatctgcaaacggaaaaagaccgtccaccaggttacagagaacgccagtgacgcggatctatggctactgaactcctgcaccgtcaagaacccggctgaggaccactttagaaatagtataaaaaaagcgcaagaagagaataaaaaaattgtgctagctggctgcgtaccacaggctcaaccccgccaggattacttgaaggggctgagtatcatcggtgtacagcagattgacagggtggtggaggtcgtagaggagacaatcaagggccatagcgttcggctgctgggacagaaaaaggataatgggcgtcgactggggggcgccaggctcgacctgcctaagatccgcaaaaatcccctgatcgaaattatctcaattaacaccggctgtctgaacgcctgcacatactgtaagacaaagcacgccagaggaaaccttgcttcttaccctatcgatgagctggtggacagggctaagcagagttttcaggagggcgtatgtgaaatttggctaacgagcgaagacactggtgcatacggccgtgatataggcaccaacctccccacactattatggaagctggttgaggtgataccagaaggcgccatgctgcggctgggcatgacaaaccctccctacattctcgagcacctcgaggaaatggctaagatcctgaatcacccccgtgtctatgccttcctgcacattcccgtccagtccgcctccgattctgtcctgatggaaatgaaacgagagtattgtgtggcagactttaagagggtagttgacttcctgaaagaaaaggttcccggcataacaattgccacagacatcatatgcggcttcccaggggagactgatcaagacttccaggaaaccgttaaattagttgaggaatacaagtttcccagtctgttcattaatcagttctatccgcggcccggaaccccggcagcaaagatggaacaagtgcccgcccaggtcataggtgagaggcagcaagtgttggtaaccgaagagagttttgattccaaattctacgttgcccataaccagttctatgagcaggtacttgtgccgaaaaaccccgccttcatggggaaaatggtggaagtggatatctacgaatccggcaagcatttcatgaagggacaaccggtttccgacgccaaagtgtataccccaagcatctcaaaacccttggccaaaggagaagtctccggtcttacaaaagactttaggaacggtctggggaaccagctaagttcagggagccacacatctgccgctagtcagtgcgatagcgcgtcatcccggatggtcctccccatgcctcggttacaccaagactgcgcactgcggatgtccgtgggtcttgcactcctcgggctcctttttgccttcttcgtgaaagtctacaattag

SEQ ID NO: 304631 - DNA, 1467 bp, Artificial Sequence
  derived and/or modified sequence
atgctgagccgccgctatgaaggagagatccccaagaacatctgcaagaggaagaagacagtgcaccaggtgacagaaaatgccagtgatgctgacctgtggctgctgaacagctgcaccgtgaagaacccagctgaggaccacttcaggaacagcatcaagaaggcccaggaggagaacaagaagatcgtgctggccggctgtgtgccccaggcccagccccggcaggactacctgaagggcctgagcatcattggagtgcagcagattgacagagtggtggaggtggtggaggagaccatcaagggccacagcgtgcggctgctgggccagaagaaggacaatggaagaaggctgggcggggcccggctggacctgcccaagatcaggaagaaccccctgattgagatcatcagcatcaacacaggctgcctgaatgcctgcacctactgcaagaccaagcacgcccggggcaacctggccagctaccccattgatgagctggtggaccgggccaagcagagcttccaggagggcgtgtgtgagatctggctgaccagcgaggacaccggggcctacggccgggacatcggcaccaacctgcccaccctgctgtggaagctggtggaggtgattcctgagggcgccatgctgcggctgggcatgaccaaccccccctacatcctggagcacctggaggagatggccaagatcctgaaccacccccgggtgtatgccttcctgcacatccctgtgcagagcgccagtgacagcgtgctgatggagatgaagcgggagtactgtgtggccgacttcaagagggtggtggacttcctgaaggagaaggtgcccggcatcaccatcgccacagacatcatctgtggcttccctggagaaacagaccaggacttccaggagaccgtgaagctggtggaggagtacaagttccccagcctcttcatcaaccagttctacccccggcccggcaccccagctgccaagatggagcaggtgcctgcccaggtgattggagagcggcagcaggtgctggtgacagaggagagctttgacagcaagttctacgtggcccacaaccagttctatgagcaggtgctggtgcccaagaacccagccttcatgggcaagatggtggaggtggacatctatgaaagtggcaagcacttcatgaagggccagcctgtgtctgatgccaaggtgtacacccccagcatcagcaagcccctggccaagggggaggtgtctggcctgaccaaggacttcagaaatggcctgggcaaccagctgagcagcggcagccacaccagcgctgccagccagtgtgacagcgccagcagcaggatggtgctgcccatgccccggctgcaccaggactgtgccctgaggatgtctgtgggcctggccctgctgggcctgctgtttgccttctttgtgaaggtgtacaactag

SEQ ID NO: 304632 - DNA, 1467 bp, Artificial Sequence
  derived and/or modified sequence
atgctgagccggcggtacgagggcgagatccccaagaacatctgcaaacgcaaaaaaaccgtgcatcaggtcactgagaatgctagtgatgccgatctttggcttttgaacagctgcacagtgaaaaatccagctgaagaccatttccgcaattcgatcaagaaggcacaggaagagaacaagaagatcgtattggcaggatgtgtcccacaggctcagccaagacaggattatctgaagggtttatcaatcatcggcgtccagcagattgatcgggtcgtagaggtggtggaagagacaatcaagggccactctgttcgacttcttggccagaaaaaggataatgggcggcgactaggcggtgcgcgcttagacctacccaaaatccgtaagaatccactgattgaaatcatctcaattaacactggttgcctgaatgcctgcacctactgcaagactaaacatgcccggggaaacctggctagctatcctatcgatgaactcgtggatcgggccaagcagagctttcaggagggcgtgtgtgagatctggttgacatccgaggatacaggagcttatggcagagacatcggcactaatctgcctaccctgttatggaaactcgtcgaagttatacctgagggtgcgatgttgcgtttggggatgactaacccaccatatatccttgagcatcttgaagaaatggccaaaatcctcaaccacccacgggtgtatgcatttctccacatccccgttcagtcagctagtgactcagtcttgatggaaatgaagcgcgagtattgtgtcgctgactttaaaagagtggtcgattttctgaaggagaaggtgcccggcatcacgattgcgaccgatatcatctgtgggttccccggtgagacagaccaggattttcaggagaccgtgaagctagttgaggagtacaagttcccatccctttttatcaaccagttctatccaaggccgggcacccctgccgccaagatggagcaggttccagcacaggtgatcggagaacgacagcaggtcctggtcaccgaagaatccttcgattccaagttctacgtcgcacataaccaattttatgaacaggtgctggtgccgaaaaaccccgcttttatggggaaaatggttgaggtggacatttatgagagtggcaagcacttcatgaagggacaacccgtgtccgatgccaaagtgtatactccttcaatctccaagcctcttgccaagggggaggtctccgggttgaccaaggacttccggaacggcctcgggaatcagttgtccagcggctctcatacatcagctgcgtcacagtgcgatagtgcctcctccagaatggtgctgccgatgccgcggctacaccaagactgcgcattgcggatgagcgtggggctggcactcctagggcttctctttgcattttttgtcaaggtctacaactag

SEQ ID NO: 304633 - DNA, 1467 bp, Artificial Sequence
  derived and/or modified sequence
atgctcagtagaagatatgaaggagagatccctaaaaacatctgcaaacgcaagaagaccgtgcaccaggtgacggagaacgcttctgatgctgacctgtggttgctcaacagctgcactgtgaaaaatccggcagaagaccactttcggaattctatcaagaaggcccaggaagagaacaagaaaattgtcctcgctgggtgcgttcctcaggcccagccccgtcaggactatctgaaaggtctgtcaattatcggcgttcaacagatagatcgggtcgtggaagtggtggaagagactatcaagggacactccgtgcggctcctcggccagaagaaggacaatgggaggaggctggggggagcccgtctggacctacccaagattagaaaaaacccactgatcgagattatctctatcaataccggatgcctgaacgcctgtacatattgcaagaccaaacacgcccgaggtaatttagctagctaccccattgacgagctcgtcgacagggctaaacagtcttttcaggaaggggtctgcgaaatatggttaaccagtgaggacacaggtgcctacggacgcgatatcgggactaacctgccaaccttgctgtggaagctggtggaagtcatcccagaaggcgcaatgttgcgtctgggtatgaccaaccctccgtacattttggaacacctagaagaaatggctaaaatcctaaatcacccaagggtgtatgcattcctccacatcccagtacagagtgcctccgatagtgtcctcatggagatgaagcgagaatactgcgtagcagattttaaacgtgtggtcgactttctgaaagagaaagtccccggaattaccattgcgaccgacatcatctgtggatttcccggtgagacggaccaggactttcaggagaccgttaagctggtcgaagaatataagttccccagtctgtttatcaatcagttttacccacggccaggtacccccgcagccaagatggaacaggtgcctgcccaagtgatcggcgaaagacagcaagtgctcgtgaccgaggagtcgttcgattctaagttttacgtagcacataatcagttctatgaacaggtcctggtgccaaagaaccccgcttttatgggaaaaatggtcgaggtggatatctatgaatcgggcaagcacttcatgaaagggcagccagtgtcggatgctaaagtttacaccccaagtattagcaagcccctggctaaaggggaggtgtccggcctgacgaaggatttcagaaacggcctgggaaaccagttgtcaagtggatcacataccagcgccgctagtcagtgtgattcagcatcttcccggatggtgctccccatgcccagattgcatcaggattgcgctttgcgcatgagcgtcggtctggcgctgctgggtcttctgttcgccttctttgtcaaggtgtataattag

SEQ ID NO: 304634 - DNA, 3096 bp, Artificial Sequence
  derived and/or modified sequence
aaataaacgtggcgggacgtatgtgtcatggcgctctccatctaaagtctgtgcagcttccggagagtggcgggttgattttctcactttggactggtttttacttcccgacttctggactcatctttcaagaggactttagactaattgcagataattaagagaatatgccttctgcatcctgtgatacactactggatgacatcgaagatatcgtgtctcaggaagattcaaaaccacaagataggcattttgtaagaaaggatgttgtcccgaaggtacgaaggcgaaatacccaaaaatatttgcaagaggaagaaaacagtccaccaagtgacagaaaatgcatccgatgcagatttatggctcctgaacagttgcactgtaaaaaacccagctgaagaccactttagaaactcaattaaaaaagctcaagaggagaacaagaaaatcgtactggctggatgcgttcctcaagcccagcctcgccaggactaccttaagggactgagtatcattggggttcagcagatagatcgtgtggtagaagttgtggaggagacaattaaaggtcactctgtgagactgctgggtcagaaaaaggataatggaaggcggcttgggggagcacgattggatttgccgaagattaggaagaatccactgatagaaatcatttccatcaataccgggtgtctcaatgcttgtacctactgcaaaactaaacacgccagaggaaatttggccagttatccaattgatgaactagtagatagagccaaacaatcttttcaagagggtgtttgtgagatatggttgaccagtgaagacacgggggcttatggcagagatattggcaccaatctccccacactcctgtggaaactggttgaagtgattcctgagggagcaatgctgaggcttggcatgacaaatccgccctatattttagagcatctggaggaaatggcaaaaatccttaatcaccccagagtctacgcttttctgcacataccagtccagtctgcctccgacagcgtactcatggaaatgaaaagagaatactgtgtggctgacttcaaaagagtagtggattttctgaaagagaaagttcctggaataactattgctacagatattatctgtggttttcctggagaaacagatcaggattttcaagaaacagtgaaacttgttgaagagtacaaattcccaagcctgtttattaaccaattttacccaagaccaggaactcctgctgcaaaaatggaacaagttccagcacaagtgattggtgaaagacaacaagtgttagtaacagaagaatcttttgattccaagttttatgttgcacacaatcaattctatgagcaggttttagtgccaaagaaccctgcgttcatggggaagatggttgaagtggacatctatgaatcaggcaaacattttatgaaagggcagccagtatctgatgccaaagtgtacacgccctccatcagcaaaccgctagcaaagggagaagtctcgggtttgacaaaggacttcagaaatgggcttgggaaccagctgagttcaggatcccacacctctgctgcatctcagtgtgactcagcgagttccagaatggtgctgcccatgccaaggctacatcaagactgtgcgctgaggatgtccgtgggcttggctctgctgggtcttctttttgctttttttgtcaaggtctataattagaatacaactaatggaaacatctataaagaagaatacatttctaattaaaatcttcaatgaacaggaaagcgacatctccattctccaagggcaataatttgtactggtcatgctgcctccttctcagccactcttcttaatgaggctccccctgtctcacattgagttgggcccattggttatttgacctaaaacctaatcaccgctaccatagcacatccttcaaattaaactgcttttggtttacttttagcaagaaatgcaagcggttgcatttttttctgtttgtttcaatctctaatctttaagtcagaacctaattgtacagtggctctggccatcttttcctcatgtggaagaattttctatctttaataaactttttctttgttttttttttccagatggagtttcgctcttgtcccccaggctggagtggtgcagtggcacgatctcaggtcactgcaacctctgcctcctgggttcaaacgattctcctgcctcagcctcccaagtagctgggattacaggcatgcgccaccaagcccagacaatttttttgtgttttcagtagagacggagtttcaccatgttggccaggctagtctcgaactcctgacctcaagtgatccgcccgcctcggcctcccaaagtgctaggattacaggcgtgagccactgcgcccggcctctttaataaatatttttaagtgcatcttccccttcaggctttgtttggagtcccagtgctacaaacattgtatttttcacagcagatgtgttcctgaaaagtgtatagaaacctgttctgggaacctgaatgcttttggaatgcacggggagagtctgccagctaaaggactcctggcaacattctgtgaaatatgaaactggaaaactggatttgtcgaaaactaattgtgcccattttctcacatttttgatccattggggttttttttttgtttttgtttttttttttttttgagtcaaggtctcactctgtcaccctggctggagtgcaatggcactatcttggctcactgcagccttgacctcctggactcaagcagtcctcctacctcagcctccctaatagccaggggctacaggcatataccaccatgcccaactaattttttaattttttgtagagatgagtgtcactatgttgcccaggcttgcctggaactcctagcctcaagcagtcttcttgcctcagcctcccaaagtgctgggattacaggcgtgagccactccacccagcccagattaaatgtttttatttctacctgccatcattggtctttactaagtgaagtgacttctttctttaacaataaatagaattggtatactaagcaaa

SEQ ID NO: 304635 - DNA, 1467 bp, Artificial Sequence
  derived and/or modified sequence
atgctgagcagaagatacgagggcgagatccccaagaacatctgcaagagaaagaagaccgtgcaccaggtgaccgagaacgccagcgacgccgacctgtggctgctgaacagctgcaccgtgaagaaccccgccgaggaccacttcagaaacagcatcaagaaggcccaggaggagaacaagaagatcgtgctggccggctgcgtgccccaggcccagcccagacaggactacctgaagggcctgagcatcatcggcgtgcagcagatcgacagagtggtggaggtggtggaggagaccatcaagggccacagcgtgagactgctgggccagaagaaggacaacggcagaagactgggcggcgccagactggacctgcccaagatcagaaagaaccccctgatcgagatcatcagcatcaacaccggctgcctgaacgcctgcacctactgcaagaccaagcacgccagaggcaacctggccagctaccccatcgacgagctggtggacagagccaagcagagcttccaggagggcgtgtgcgagatctggctgaccagcgaggacaccggcgcctacggcagagacatcggcaccaacctgcccaccctgctgtggaagctggtggaggtgatccccgagggcgccatgctgagactgggcatgaccaaccccccctacatcctggagcacctggaggagatggccaagatcctgaaccaccccagagtgtacgccttcctgcacatccccgtgcagagcgccagcgacagcgtgctgatggagatgaagagagagtactgcgtggccgacttcaagagagtggtggacttcctgaaggagaaggtgcccggcatcaccatcgccaccgacatcatctgcggcttccccggcgagaccgaccaggacttccaggagaccgtgaagctggtggaggagtacaagttccccagcctgttcatcaaccagttctaccccagacccggcacccccgccgccaagatggagcaggtgcccgcccaggtgatcggcgagagacagcaggtgctggtgaccgaggagagcttcgacagcaagttctacgtggcccacaaccagttctacgagcaggtgctggtgcccaagaaccccgccttcatgggcaagatggtggaggtggacatctacgagagcggcaagcacttcatgaagggccagcccgtgagcgacgccaaggtgtacacccccagcatcagcaagcccctggccaagggcgaggtgagcggcctgaccaaggacttcagaaacggcctgggcaaccagctgagcagcggcagccacaccagcgccgccagccagtgcgacagcgccagcagcagaatggtgctgcccatgcccagactgcaccaggactgcgccctgagaatgagcgtgggcctggccctgctgggcctgctgttcgccttcttcgtgaaggtgtacaactag

SEQ ID NO: 304636 - protein, 176 aa, Artificial Sequence
  derived and/or modified sequence
MYACVCDWLGFSYREEVQWDVDTIYLTQDTRELNLQDFSHLDHRDLIPIIAALEYNQWFTKLSSKDLKLSTDVCEQILRVVSRSNRLEELVLENAGLRTDFAQKLASALAHNPNSGLHTINLAGNPLEDRETTTKIKRQNVPTVLQTYLVVCPSDYQPCPLPLGKDNYYSDFSHDG

SEQ ID NO: 304637 - DNA, 531 bp, Artificial Sequence
  derived and/or modified sequence
atgtatgcatgcgtgtgtgattggcttggtttctcctacagggaagaggtccagtgggacgttgataccatttatctcacacaggataccagggagctgaacctgcaggatttcagtcacctggaccaccgagatttgatacctattatcgctgccttagaatataaccaatggttcacaaaattatcgtctaaagacctcaagctgtccacagatgtgtgtgagcagattctcagggtggtttcacgatctaatcggttagaagaattagttctggagaacgctggcctcagaaccgattttgctcagaaactggcctccgcccttgctcataacccaaattcaggattacacacaatcaatctggctggcaaccccctggaagaccgtgaaacaactacaaagataaaacggcaaaacgtgcctaccgtcttgcagacttatttggttgtctgtccctccgattaccaaccctgcccactccctctcggcaaggacaattactatagcgacttctctcatgatggctag

SEQ ID NO: 304638 - DNA, 531 bp, Artificial Sequence
  derived and/or modified sequence
atgtatgcctgtgtgtgtgactggctgggcttctcctaccgggaggaggtgcagtgggatgtggacaccatctacctgacccaggacacccgggagctgaacctgcaggacttcagccacctggaccaccgggacctgatccccatcatcgccgccctggagtacaaccagtggttcaccaagctgagcagcaaggacctgaagctgagcacagatgtgtgtgagcagatcctgcgggtggtgagccgcagcaaccggctggaggagctggtgctggagaatgccggcctgaggacagactttgcccagaagctggccagcgccctggcccacaaccccaacagcggcctgcacaccatcaacctggccggcaaccccctggaggaccgggagaccaccaccaagatcaagaggcagaatgtgcccaccgtgctgcagacctacctggtggtgtgccccagcgactaccagccctgccccctgcccctgggcaaggacaactactacagcgacttcagccatgatggatag

SEQ ID NO: 304639 - DNA, 1163 bp, Artificial Sequence
  derived and/or modified sequence
caaaattctgtctccgcccccccttttcttgcccacttccatttgcaagctgcatctgcctctctaaaaaaattgaggagttcggggaagggcagggggccataaatcagagttggacctgcaataacccccacacctacagggcaaccatgaccgaggagagctctgacgttcccagggagttgatagaaagcataaaggatgttattggcagaaagataaaaatttcagtgaagaagaaagtaaagttggaagttaagggagacaaagttgaaaacaaagtgctggtccttacatcatgccgagccttccttgtaacagcgcgaatccccaccaagctcgagttaaccttcagctacttggagattcatggcgtcgtttgcagcaagtcagctcagatgattgtggaaactgagaagtgcagcatttccatgaagatggcgtcacccgaggacgtgagtgaggtgctggctcacataggcacctgcctgaggaagatatttcctggcctctctccagtgagaatcatgaaaaaagtctccatggagccatctgagcgcctggctagtctccaggcgctgtgggacagccagaccgtggctgagcagggcccctgtggtggattttctcagatgtatgcctgtgtttgtgactggcttggattttcatacagggaagaagtacaatgggatgtggatacaatttatcttacccaagacaccagggaattgaatttacaagattttagtcatcttgaccacagggacctaatacctatcattgctgctctggaatataatcagtggttcacaaaactgtcctctaaggatctaaaactgtccactgatgtctgtgaacagatcttgagggtggtgagtaggtccaatcgactggaagaattggtgttggaaaatgctggacttagaacagattttgcacaaaaactggccagtgctctagcacataatcccaactcaggactccacacaattaaccttgctggcaacccactggaggatagagaaaccactaccaagatcaagagacagaatgttcccaccgttctccagacttaccttgtggtttgccccagtgattaccagccctgtcctctaccacttggaaaagataactactattctgacttctctcatgatggatga

SEQ ID NO: 304640 - DNA, 531 bp, Artificial Sequence
  derived and/or modified sequence
atgtacgcctgcgtgtgcgactggctgggcttcagctaccgggaggaggtgcagtgggacgtcgataccatttatcttacacaggataccagggagctgaatctgcaggatttttcccacctcgaccatcgcgacctgattccaattatagctgcgcttgaatataatcagtggttcactaaactttcctctaaggacctaaagctgagtacagatgtttgcgaacagatcctacgcgtagtgtcccgctccaatagacttgaagaactcgtgctggagaacgccggtctacgcaccgacttcgcacaaaaacttgcgagtgctttggctcataatccaaactctggcctccatactatcaacctggcgggaaaccccctggaggacagggaaacaacaactaagatcaagcgccagaacgtgcctaccgttttgcaaacatatctagtcgtctgcccatcagattatcagccgtgtcccctgcccttgggaaaagacaattattacagtgacttctcccacgatggctag

SEQ ID NO: 304641 - DNA, 531 bp, Artificial Sequence
  derived and/or modified sequence
atgtacgcatgtgtttgtgattggctgggattttcatacagagaagaggtgcagtgggacgtggatacgatatacctgacgcaggacacccgcgaactgaacctgcaggacttctcacacctggatcatcgggatctgattcctatcattgccgctctggagtacaatcagtggtttaccaaactgtctagtaaggacctgaagttgtctacggatgtatgcgaacagattctgcgcgttgtctcacgaagtaaccggctggaggagttggtgctcgagaacgcagggctgcggaccgattttgctcagaaattggcgagtgccctggcacataacccgaatagcggcctgcataccattaacctcgcgggaaacccactcgaagatagagaaacaaccactaagatcaaacgccagaacgtacccaccgtgctccagacttatctagtggtttgcccctcagattatcagccatgtcctctcccattgggcaaggataattactactcagactttagtcacgacggatag

SEQ ID NO: 304642 - DNA, 531 bp, Artificial Sequence
  derived and/or modified sequence
atgtacgcctgcgtgtgcgactggctgggcttcagctacagagaggaggtgcagtgggacgtggacaccatctacctgacccaggacaccagagagctgaacctgcaggacttcagccacctggaccacagagacctgatccccatcatcgccgccctggagtacaaccagtggttcaccaagctgagcagcaaggacctgaagctgagcaccgacgtgtgcgagcagatcctgagagtggtgagcagaagcaacagactggaggagctggtgctggagaacgccggcctgagaaccgacttcgcccagaagctggccagcgccctggcccacaaccccaacagcggcctgcacaccatcaacctggccggcaaccccctggaggacagagagaccaccaccaagatcaagagacagaacgtgcccaccgtgctgcagacctacctggtggtgtgccccagcgactaccagccctgccccctgcccctgggcaaggacaactactacagcgacttcagccacgacggctag

SEQ ID NO: 304643 - protein, 1220 aa, Artificial Sequence
  derived and/or modified sequence
MGDQQLYKTNHVAHGSENLFYQQPPLGVHSGLNHNYGNAVTGGGMDAPQASPISPHFPQDTRDGLGLPVGSKNLGQMDTSRQGGWGSHAGPGNHVQLRGNLANSNMMWGAPAQAEPTDGYQYTYSQASEIRTQKLTSGVLHKLDSFTQVFANQNLRIQVNNMAQVLHTQSAVMDGAPDSALRQLLSQKPMEPPAPAIPSRYQQVPQQPHPGFTGGLSKPALQVGQHPTQGHLYYDYQQPLAQVPVQGGQPLQAPQMLSQHMQQMQQHQYYPPQQQQQAGQQRISMQEIQTQPQQIRPSQPQPPPQQQQPQQLQLQQRQGSMQIPQYYQPQPMMQHLQEQQQQQMHLQPPSYHRDPHQYTPEQAHTVQLIPLGSMSQYYYQEPQQPYSHPLYQQSHLSQHQQREDSQLKTYSSDRQAQAMLSSHGDLGPPDTGMGDPASSDLTRVSSTLPHRPLLSPSGIHLNNMGPQHQQLSPSAMWPQMHLPDGRAQPGSPESSGQPKGAFGEQFDAKNKLTCSICLKEFKNLPALNGHMRSHGGMRASPNLKQEEGEKVLPPQPQPPLPPPPPPPPPPQLPPEAESLTPMVMPVSVPVKLLPPKPSSQGFTNSTVAAPSARDKPASSMSDDEMPVLVRMTLSPPHSPQGAAPRTPAEIPRKHQPSVPKAEEPLKTVQEKKKFRHRPEPLFIPPPPSYNPNPAASYSGATLYQSQLRSPRVLGDHLLLDPTHELPPYTPPPMLSPVRQGSGLFSNVLISGHGPGAHPQLPLTPLTPTPRVLLCRSNSIDGSNVTVTPGPGEQTVDVEPRINIGLRFQAEIPELQDISALAQDTHKATLVWKPWPELENHDLQQRVENLLNLCCSSALPGGGTNSEFALHSLFEAKGDVMVALEMLLLRKPVRLKCHPLANYHYAGSDKWTSLERKLFNKALATYSKDFIFVQKMVKSKTVAQCVEYYYTWKKIMRLGRKHRTRLAEIIDDCVTSEEEEELEEEEEEDPEEDRKSTKEEESEVPKSPEPPPVPVLAPTEGPPLQALGQPSGSFICEMPNCGAVFSSRQALNGHARIHGGTNQVTKARGAIPSGKQKPGGTQSGYCSVKSSPSHSTTSGETDPTTIFPCKECGKVFFKIKSRNAHMKTHRQQEEQQRQKAQKAAFAAEMAATIERTTGPVGAPGLLPLDQLSLIKPIKDVDILDDDVVQQLGGVMEEAEVVDTDLLLDDQDSVLLQGDAEL

SEQ ID NO: 304644 - DNA, 3663 bp, Artificial Sequence
  derived and/or modified sequence
atgggtgatcagcagctgtataagacaaatcatgttgcccacggttcggagaacctgttctatcagcaaccaccactgggagtacattcgggcttgaatcacaactacggcaacgccgtgaccggtgggggcatggatgcccctcaagcatcaccaatctcaccacactttccacaggatacccgagatggattaggtttaccagtcggcagcaaaaatctcggccagatggatacaagcagacaggggggctggggaagccacgcaggaccagggaaccatgtgcagcttcgcggaaacttagccaactcaaacatgatgtggggcgcgccggcccaggccgagcccaccgacgggtaccaatatacttacagtcaggcaagtgagattagaactcagaagctcacgtctggtgtgctgcataagttggactcatttacccaagtgttcgccaaccagaatctgcgcatccaggtcaacaacatggcccaggtactccacacgcagagtgcggtcatggacggagctcccgacagcgccttgagacaactgcttagtcagaaaccaatggaaccacccgcccctgcgattccgtctcggtaccagcaggttccacagcagccccaccctgggttcacggggggactgagcaaaccagctttacaagtcggtcagcacccaacacaaggccatctctattacgactatcagcagccgctcgcgcaggtcccagtgcaggggggacaaccacttcaagcaccacagatgctgtctcagcacatgcagcaaatgcagcaacatcaatactaccccccccaacagcaacagcaggccgggcaacagaggattagcatgcaagaaattcagacgcagccccagcagattagacctagtcagcctcagccgcccccacagcagcagcaaccgcagcagttacagcttcagcaacgccagggatctatgcagatcccacagtactaccagcctcaacccatgatgcagcatctccaagaacagcagcagcagcagatgcacctgcaaccacctagttatcatagagacccacatcagtatacgcctgaacaggctcacacagtgcagctcatccctcttggcagtatgagccaatactactaccaagagccacaacagccttactcacaccccttgtatcagcagtcgcatttgtcccagcaccaacaacgggaggacagtcagctgaagacttattccagcgaccggcaggcacaggccatgcttagctcgcatggggatctggggcctccagacaccggaatgggcgatcccgcttcatccgatttgacccgtgtatcctccaccttgccccacagacctctcctcagcccctctggcatccatctgaacaatatgggcccccaacatcagcagttaagcccgtctgctatgtggccacaaatgcatctgccagatggtcgcgcccagccaggcagcccagagtcctctgggcagcccaagggagcgttcggagaacaattcgatgctaaaaacaagctgacatgctctatatgtctgaaggagttcaaaaacctgcccgctctcaacggccatatgagatctcacggcggcatgcgagcttcccccaacctgaaacaggaagaaggggagaaggtgctgccacctcagccacaaccacctcttccaccccccccaccccctcccccaccccctcagcttccccccgaagctgaatctctgacccccatggtgatgcctgtttcagtgcctgtcaagctgctgcccccaaaaccctcatcacagggatttacaaactccacggtggctgctcccagcgctagggataagccagcatcttcaatgtccgatgacgagatgcctgtcttggtccgcatgactttgagcccccctcactccccacagggtgcagcaccccgtacacctgctgagatccctagaaagcaccagccaagcgttccaaaggctgaggagcctttgaagactgtccaggagaaaaaaaaattcagacaccggcccgaacccctttttatcccccccccaccctcttacaatcccaacccagctgctagctacagcggcgctacactgtaccagtctcaactgcgatcccctcgcgtcttaggagatcatctattgctggacccaacccacgagctgccaccttatacccccccacccatgctgagccctgtccggcaaggctccggactgttctccaatgtcctaatatccgggcacgggcccggcgcgcacccccagcttccactgaccccactgacacctacgcctagagtgctgttatgccgaagcaactccatcgatggatccaacgtcacagtcactccggggcctggcgaacaaactgtcgacgttgaaccaaggatcaatattggacttcggtttcaggccgagatccccgagctacaagatatctcagctctcgctcaagacacccacaaggccacgctggtttggaagccgtggcctgaattggagaatcacgacctgcagcaaagagtggaaaacctgctgaatctgtgttgcagcagtgcgttgcccggtggggggaccaactccgaattcgccttgcacagcttattcgaggcgaaaggtgacgtgatggttgctctggaaatgctcttgctccggaagcccgtccgcctgaagtgtcaccccttggccaactatcactacgcggggagcgataaatggacatcacttgaacggaaattatttaataaagctcttgctacctattcaaaagacttcatcttcgtgcagaagatggtcaaaagcaagactgttgcacaatgcgttgaatactactacacatggaaaaagattatgcgcttaggtagaaagcaccgcacaagactggcagagattatcgatgattgtgtcacttctgaggaggaggaagaactagaggaggaggaggaggaggaccctgaagaggaccgcaaatctacaaaagaggaggagtccgaagttcccaaaagccctgagccgccgcctgttcccgtgctggctcctacagaaggaccacccctccaagctctggggcagccctccggaagcttcatttgcgagatgcctaattgtggcgctgtgttttcttctaggcaagccctaaatggacatgcgagaatccacggcggcaccaatcaggttacaaaggctagaggcgccataccaagcgggaaacagaagcccggtggcacccagtctggttactgctcagtgaaatctagcccgagtcacagtaccacctctggcgagactgacccaacaactattttcccatgtaaagagtgcggaaaagtattttttaagatcaaatccaggaatgcacatatgaagactcaccggcagcaggaggagcaacagaggcaaaaggcgcagaaggccgcttttgctgccgagatggctgcaacaattgaacggaccacaggccccgtgggagcccccggcctgctcccgctcgatcagctcagcctgatcaaaccaattaaggatgtagatatactggatgatgatgtcgttcagcagctgggtggtgtaatggaggaggccgaagttgtggataccgacctgctgctagacgatcaggattccgtgttactgcagggcgatgccgaactgtag

SEQ ID NO: 304645 - DNA, 3663 bp, Artificial Sequence
  derived and/or modified sequence
atgggagaccagcagctgtacaagaccaaccacgtggcccacggctctgaaaatctcttctaccagcagccccccctgggcgtgcacagcggcctgaaccacaactatggaaatgctgtgactggaggcggcatggatgccccccaggccagccccatcagcccccacttcccccaggacaccagagatggcctgggcctgcctgtgggcagcaagaacctgggccagatggacaccagccggcagggcggctggggcagccatgctggccctggcaaccacgtgcagctgcggggcaacctggccaacagcaacatgatgtggggcgccccagcccaggccgagcccacagatggctaccagtacacctacagccaggccagcgagatccgcacccagaagctgaccagcggcgtgctgcacaagctggacagcttcacccaggtgtttgccaaccagaacctgcgcatccaggtgaacaacatggcccaggtgctgcacacccagagcgctgtgatggatggagccccagattctgccctgcggcagctgctgagccagaagcccatggagcccccagccccagccatccccagccgctaccagcaggtgccccagcagccccaccctggcttcaccggcggcctgagcaagccagccctgcaggtgggccagcaccccacccagggccacctgtactatgactaccagcagcccctggcccaggtgcctgtgcagggcggccagcccctgcaggccccccagatgctgagccagcacatgcagcagatgcagcagcaccagtactacccaccccagcagcagcagcaggccggccagcagaggatctccatgcaggagatccagacccagccccagcagatccggcccagccagccccagcccccaccccagcagcagcagccccagcagctgcagctgcagcagaggcagggctccatgcagatcccccagtactaccagccccagcccatgatgcagcacctgcaggagcagcagcagcagcagatgcacctgcagccccccagctaccaccgggacccccaccagtacaccccagagcaggcccacacagtgcagctgatccccctgggctccatgagccagtactactaccaggagccccagcagccctacagccaccccctgtaccagcagagccacctgagccagcaccagcagcgggaggacagccagctgaagacctacagcagtgaccggcaggcccaggccatgctgagcagccatggagacctgggccccccagacaccggcatgggagaccctgccagcagtgacctgaccagggtgagcagcaccctgccccaccggcccctgctgagccccagcggcatccacctgaacaacatgggcccccagcaccagcagctgagccccagcgccatgtggccccagatgcacctgcctgatggccgggcccagcccggcagccctgagagcagcggccagcccaagggggccttcggggagcagtttgatgccaagaacaagctgacctgcagcatctgcctgaaggagttcaagaacctgcctgccctgaatggccacatgaggagccacggcggcatgagggccagccccaacctgaagcaggaggagggggagaaggtgctgcccccccagccccagccccccctgcccccacctcctcctcctcctcctccaccccagctgcccccagaggccgagagcctgacccccatggtgatgcctgtgtctgtgcctgtgaagctgctgccccccaagcccagcagccagggcttcaccaacagcacagtggccgcccccagcgcccgggacaagccagccagctccatgtctgatgatgagatgcctgtgctggtgaggatgaccctgagccccccccacagcccccagggcgccgcccccaggaccccagctgagatccccaggaagcaccagcccagcgtgcccaaggccgaggagcccctgaagacagtgcaggagaagaagaagttccgccacaggcctgagcccctcttcatccccccaccacccagctacaaccccaacccagctgccagctacagcggggccaccctgtaccagagccagctgcggagcccccgggtgctgggggaccacctgctgctggaccccacccatgagctgcccccctacaccccaccacccatgctgagccctgtgcggcagggcagcggcctcttcagcaatgtgctgatcagcggccacggccctggggcccacccccagctgcccctgacccccctgacccccaccccccgggtgctgctgtgccgcagcaacagcattgatggcagcaatgtgacagtgaccccaggccctggagagcagacagtggatgtggagccccgcatcaacatcggcctgcgcttccaggccgagatccctgagctgcaggacatcagcgccctggcccaggacacccacaaggccaccctggtgtggaagccctggccagagctggagaaccacgacctgcagcagagggtggagaacctgctgaacctgtgctgcagcagcgccctgcccggcggcggcaccaacagcgagtttgccctgcacagcctgtttgaggccaagggagatgtgatggtggccctggagatgctgctgctgaggaagcctgtgcggctgaagtgccaccccctggccaactaccactacgccggcagtgacaagtggaccagcctggagaggaagctgttcaacaaggccctggccacctacagcaaggacttcatctttgtgcagaagatggtgaagagcaagacagtggcccagtgtgtggagtactactacacctggaagaagatcatgaggctgggcaggaagcacaggacccggctggccgagatcattgatgactgtgtgaccagcgaggaggaggaggagctggaggaggaggaggaggaggaccctgaggaggacaggaagagcaccaaggaggaggagagcgaggtgcccaagagccctgagcccccacctgtgcctgtgctggcccccacagagggcccccccctgcaggccctgggccagcccagcggcagcttcatctgtgagatgcccaactgtggggctgtgttcagcagccggcaggccctgaatggacatgcccgcatccatggaggcaccaaccaggtgaccaaggcccggggggccatccccagcggcaagcagaagccaggcggcacccagagcggctactgcagcgtgaagagcagccccagccacagcaccaccagcggggagacagaccccaccaccatcttcccctgcaaggaatgtgggaaggtgttcttcaagatcaagagcagaaatgcccacatgaagacccaccggcagcaggaggagcagcagaggcagaaggcccagaaggccgcctttgctgctgagatggccgccaccatcgagaggaccaccggccctgtgggcgcccctggcctgctgcccctggaccagctgagcctcatcaagcccatcaaggatgtggacatcctggatgatgatgtggtgcagcagctgggcggcgtgatggaggaggccgaggtggtggacacagacctgctgctggatgaccaggacagcgtgctgctgcagggagatgctgagctgtag

SEQ ID NO: 304646 - DNA, 3663 bp, Artificial Sequence
  derived and/or modified sequence
atgggcgaccagcagctgtacaagaccaaccacgtggcccacggctctgagaacctgttctaccagcagccacccttgggtgtgcattccggcctgaaccacaactatggaaatgccgtgactggaggaggcatggacgctccccaggcttcaccaattagccctcacttccctcaggacacacgagacggtctaggcctcccggtggggtccaagaatctaggccagatggatacttcccgccaggggggatggggctcacacgcaggccccggaaaccacgtccaactgcggggaaatttggctaacagcaacatgatgtggggcgcacccgcacaggccgagcctacagacggctaccagtacacctactcccaggcttcagagatcaggacgcagaaactaacatcgggcgtccttcataaacttgactcttttacgcaggtcttcgcgaatcagaacctccgcattcaggtcaataacatggcacaagtcctgcacacccagagcgcagtcatggatggggcacccgattctgcactcaggcagctgctgagccagaaacccatggaaccaccagccccagcgattccatctcgctatcagcaggtgccccagcagcctcaccccggattcacgggcggcctcagtaaacctgccttacaggtggggcagcatcctacacagggccatctgtattacgactatcagcagccactggctcaggtcccggtgcaagggggccagcctctgcaggcgcctcagatgctgagtcagcacatgcagcagatgcagcagcatcagtattaccctcctcaacagcagcagcaggcaggacaacagcgtataagcatgcaggaaatccagacgcagccacagcaaatccggcctagccagccccaaccccctccacaacaacagcagccccagcaactgcaacttcagcagcgccaggggtctatgcaaattccccagtactaccaacctcagcccatgatgcagcatcttcaggaacagcagcagcaacagatgcacttgcagccacccagttaccacagagacccacatcaatatactcccgaacaggctcacacagttcagctgataccgctgggatcgatgagccaatactactatcaggagccgcagcagccctattcccaccccctgtatcaacagtcccatctgtcgcaacaccaacagcgggaagattctcagctgaagacttatagctcggacaggcaggcccaggctatgttgtctagtcacggggacctgggtccgccagataccggaatgggcgaccccgcctcttctgacttgacacgggtgtctagtactctccctcatcgccctctcctttctccatctggaattcacctgaacaacatggggccgcagcaccagcagctctcacccagtgctatgtggccccagatgcacttgcccgatggacgagctcaacccggctctcctgaaagctcaggccagcccaagggggcattcggtgagcaattcgacgctaagaataaactgacctgctctatctgcttaaaggaattcaaaaacctcccagccctgaacggccacatgcgctcacatggaggaatgcgggcttcgcccaatctgaagcaagaggaaggcgaaaaagtcctgcctcctcagcctcagcctcccctgccgccacctcctccgccaccccccccccctcagttgcccccagaagccgaaagtttgaccccgatggtgatgcctgtgtcagtcccagtgaagctgctgccccccaaaccttcaagtcagggatttaccaactccactgtggcagcccctagcgctcgtgataagccagcatcatcaatgagtgacgacgagatgcccgtgctggtgcgtatgaccctgtccccaccccatagcccccagggagccgccccaagaactccagcagaaatcccacggaagcaccagcccagcgtccccaaggcagaggagccccttaagaccgtccaagaaaagaagaaatttagacacagacccgagcccctctttatcccccctcccccgtcatacaaccctaatcccgccgccagctacagcggcgccaccctctatcagtcccaactgagatctccaagagtgttaggcgatcacctgttgctggaccccacacacgaattacccccatatacaccacctccaatgctttcacccgtcaggcaggggtcggggctgttctcaaacgtattaataagcggacatggtcccggcgcgcaccctcaactgccccttactcctctgacccccacccccagggtcctactctgccgatctaatagcatcgatggctctaatgtgacagtgaccccagggccaggcgagcagactgtcgacgtagagccaaggataaatatcggtctccgtttccaggcagagattcccgaacttcaggatatcagcgcattagcccaagatacacataaagctacacttgtctggaagccctggcctgagctggaaaaccacgatctgcagcagcgcgtcgagaacctgttaaacctgtgctgttcaagcgctttgcccggcggcgggacaaattctgagttcgcccttcatagcctgttcgaagccaagggagacgtgatggtcgccttggagatgctcctgctcagaaagcccgttcggctgaagtgtcaccccctcgcgaactatcattacgcaggctccgacaagtggacttctctcgaaagaaagttgtttaataaggccctggccacttactcaaaagacttcatcttcgttcagaagatggtgaaatctaagaccgtcgctcaatgcgttgagtactactatacatggaagaagatcatgagactggggcgtaaacacagaacaagacttgccgaaatcatcgatgactgcgtgacttccgaggaggaggaggaactcgaggaggaggaagaagaagacccagaagaagatcgcaagagcacaaaggaagaggagtccgaagtccccaagtccccggagcccccaccagtgccagtcctcgcccctaccgaaggtccacctttgcaggccctgggccagcccagcggttccttcatctgcgaaatgcccaactgcggcgcagtattctcctccaggcaggccctgaatggccacgcgcgaatccacggtgggacgaaccaggtgaccaaagctcggggtgctattccttcagggaaacagaagcctggcggaacacaatccgggtattgtagcgtgaaaagctcgccaagccattcaacgacatcaggggaaaccgacccgactactatattcccctgcaaggaatgtggaaaggtcttcttcaaaataaaaagcaggaacgcgcatatgaaaacgcatcggcagcaggaggaacagcagcgccagaaagcccagaaagccgcttttgctgcggaaatggcagccaccatcgaaaggactactggtcccgtgggtgctcccggtcttcttccacttgatcagctctcactgataaagccgatcaaagatgttgacattttggatgacgatgtcgtccagcagctaggtggagtgatggaggaggctgaggtagtcgatactgatctgttactggatgaccaagattcagtcctccttcagggggatgctgagctgtag

SEQ ID NO: 304647 - DNA, 3663 bp, Artificial Sequence
  derived and/or modified sequence
atgggcgaccaacagctgtacaagaccaaccacgtcgctcatgggtcagagaatttattttatcagcagccgcctcttggagtccattcagggctaaatcacaattatggaaatgctgttacgggaggtggtatggacgcacctcaggcatctcccattagcccacatttcccccaggacactagggacgggctggggctacctgttggcagcaagaatctgggccagatggacacctctaggcaaggcggatggggcagccatgccggacctggcaatcacgtgcaattgagaggcaaccttgcaaatagcaacatgatgtggggcgcacctgctcaggccgaacccacggacgggtaccagtatacctattcgcaagcctccgaaattcgtactcagaaactgacttctggggtcctgcacaaattagatagctttacccaggtcttcgcgaaccaaaacctccgcattcaggtaaataacatggcgcaggtccttcatacacaaagcgccgttatggatggtgcccctgactccgcgctcagacagttgctgtcccagaaaccaatggaaccacctgctccagccatccctagccgataccagcaggtaccacagcagcctcaccccggttttactgggggactgtctaagcccgctctacaagtcgggcagcacccaacgcaaggacacctatattacgattatcagcaacctttggcccaggtgcccgtgcagggcggtcagcccctgcaagccccacagatgctttcccagcacatgcagcaaatgcagcagcatcagtactacccccctcaacagcagcagcaggcgggtcagcagcgcattagcatgcaggagattcaaactcaaccccaacagatccggccaagtcagcctcaaccccctccacaacaacagcagccccagcaattgcaactgcagcagaggcaagggagcatgcagatcccacaatattaccaacctcagcccatgatgcagcatcttcaggagcaacagcagcagcaaatgcacctccaacccccaagctatcaccgggatcctcatcaatatactcctgagcaggcgcacactgtgcagttgatcccactgggatctatgagccagtactattatcaggaacctcagcagccgtattctcaccctttgtaccagcaatcacatcttagccagcatcaacaacgggaggattcacaactgaaaacctattcttcagacagacaggcgcaggccatgctgtccagtcacggggacttaggaccccctgataccggtatgggcgacccggcatctagcgatctgacgcgggtgagtagtactcttccccaccgccctttattatctccttcaggaatccatctgaataacatgggccctcagcaccagcaactttcgccctctgctatgtggcctcagatgcaccttcctgacggtcgggctcagcctggctccccggagtcttccggacagcccaaaggggcatttggcgaacagtttgatgctaaaaataagctgacatgcagcatctgtcttaaagagttcaagaatctacctgctctcaacggccatatgcgaagccatggaggcatgcgggctagccccaacctgaaacaggaagaaggggagaaagtactgcccccacagcctcagcctccccttccaccgccaccccctccccctccacctccccagctaccgcctgaggccgagtcattgactccgatggttatgcctgtttctgttcccgtgaagctgctgccccctaagccctcgagccaggggttcaccaacagcacagtagcagctccaagcgcgagggataaacctgcctcatctatgagcgatgatgagatgcctgtgctggtcaggatgacactgagccctccccacagcccgcagggcgctgcgccaaggacccccgcagagatcccacgcaaacaccaaccttctgtgccgaaagctgaggagcctctgaaaaccgtacaggagaaaaagaaattcagacacaggccagagcctctgttcatccctcccccaccatcttacaatcctaacccagcagcttcatattcaggagctactctataccagtctcagctgcggtctccaagggtactgggcgaccatctcttgctagacccaactcacgagctgccaccttatacacctcctcccatgctgagcccagtgcggcagggaagtgggttgttctcaaacgtcctgatttccggtcacggccctggggctcacccccagcttcccttgaccccactgacaccaaccccacgagtacttttgtgccgatcgaacagcatagatggcagtaacgtaacagtgaccccagggcctggtgaacaaactgttgacgttgagccgaggattaatatcggacttcgattccaagccgagattcccgaactgcaagacattagtgctctagcacaggacacccataaggcaactctcgtgtggaagccatggcccgagctggaaaatcacgatctgcagcagcgcgtggaaaaccttctcaatctttgttgctcaagcgcactgcccggaggaggcacaaattcagagtttgccctacattcactattcgaggcgaagggggatgtgatggtggctctggagatgctgttactccgaaaaccagtacggctgaaatgtcatcccctcgccaattaccactatgctggcagcgacaagtggacatctctcgaacgaaaactgttcaacaaagcccttgcaacttatagcaaggattttatctttgtgcagaagatggtgaagtccaagaccgtggctcagtgtgtggagtattattacacctggaagaagatcatgaggctcggaaggaagcataggacgcggctggctgagattattgacgattgtgttacaagtgaagaagaagaagaacttgaagaggaagaagaagaggatcctgaagaggacagaaagagcacaaaggaagaagaatccgaggtgcctaaatcccctgagccccctcctgtccccgtgttagcgcctacggagggcccacctctgcaagccctgggacagccgagtgggtctttcatctgcgagatgcctaactgtggggctgttttttcatctaggcaggccttgaacggacacgccagaatacatggcggtaccaatcaggtcacaaaggcccgaggggctataccttcgggtaaacagaagccagggggaacccagtcaggctattgcagcgtgaagagtagcccttctcactcgacaacctccggtgagacagaccctacaaccatttttccctgcaaagagtgcggaaaagtgttcttcaagatcaaatccaggaatgctcacatgaaaacccacaggcagcaggaagagcagcagagacagaaggcacagaaagcagcgtttgcagctgagatggcagccacgattgagcgaacaaccggccctgttggcgctccgggtttactgcctcttgatcagctgagcttgatcaaaccaatcaaggacgtggacatacttgatgacgacgtcgtgcagcaactaggcggagtgatggaggaagccgaggtcgtggatactgaccttctgttggatgatcaggactcagtcctgttacagggggacgccgagctgtag

SEQ ID NO: 304648 - DNA, 7646 bp, Artificial Sequence
  derived and/or modified sequence
ggagggggcgaggatggggagcaatgcaaagctctgctcgccccccatctcaccccccaagcggatactggtcttctcgtcggattgcccatgcacttgttgcagaaacagccaaggccctggctgtggagaatgctgaaggaagaagacgcagaagcaggacgaccctgaaagattcagcctcttcatcctcaaacaggaccaggcctcctcttcccacctgtccagcagcatgaaagcagcatgattggccgaccgcaggagaagcccccagaaccaggcccccaactcagccatctgcggaggtcaaggtgtgagcgacgtctcctcaccacagtgctgtgtggtctatacctcagccagggagaggatgtgaaaccccccgccctgcacatgagtggtacaggccaacaggaacacctggctccagccacgttcacagacatgtcagccgtggagtagtgctgacacttttctctcagcttctcagggtttcagtccttttgggtttgttttatttaccttttttatggttttgtggctggacgttcacaaccaaggcagacagcatgggtgaccagcaactgtacaagaccaaccatgtggcccatggtagtgagaaccttttctaccaacagccaccacttggcgtccacagcgggctgaaccacaactatgggaatgcagttacagggggcggaatggatgcccctcaggcctcgccaatctccccccacttccctcaagatacacgggatggtctgggcttgcctgttggctccaaaaaccttggccaaatggatacctcgaggcagggagggtggggaagtcatgcagggcctggaaaccatgtccagctacgtggaaacctggccaactcaaacatgatgtggggggcaccagcccaggctgagcccactgatggctaccaatacacctactcccaggccagcgagatccggacccagaagcttaccagcggtgtcttacacaagctggactctttcacccaggtgtttgccaaccaaaacctgcgaattcaggtcaacaatatggcccaggtgctgcacactcagtcagcagtgatggatggagcccctgacagtgctctccgccagctgctgtctcagaagcccatggagcccccagcaccggctatcccttcccgctaccagcaggtgccccagcagcctcaccctggtttcactggtgggctgtccaaaccagctcttcaggtcgggcagcaccctacccaagggcacctgtattatgactaccagcagcctctggctcaggtgccagtgcagggaggacagccactgcaggccccacagatgctgtcacagcacatgcaacagatgcagcagcaccagtattacccaccgcagcaacagcagcaagccgggcaacagcgtatctccatgcaagaaatacagacgcagccgcaacaaattcgcccatcacagccacagccgccgccacagcagcagcagccgcagcagctacagctgcagcagcggcagggttcaatgcagatacctcagtattatcagccccaacccatgatgcagcacttgcaagagcagcagcagcaacagatgcacctgcagcctccttcttatcacagggaccctcaccagtataccccagagcaggcacacactgtccagctgattcccctgggctccatgtcccagtactactaccaggagccccagcagccctacagccaccccctctaccagcagagccacctgtcccagcaccagcagcgtgaggacagtcagctgaagacctactctagtgacagacaggcccaggccatgctgagctcccatggggacctggggcctcctgacacaggaatgggagacccagcgagctcagatctgacccgggtcagcagcaccctcccccatcgccccctcctatcccccagtgggatccacctcaacaacatggggcctcagcatcagcagctgtctcccagtgccatgtggccccagatgcacctacctgatgggagagcccagccagggtcccctgagtcaagtggccaacccaaaggagcgtttggggagcagtttgatgccaagaacaagctgacatgctccatctgcctgaaggagttcaagaacctgcctgccctgaatggccacatgcggtcccacgggggaatgagggcctcccccaacctcaaacaggaggaaggagagaaggtcctgccgcctcagccccagccaccactgccgcctccgcctccgcctccgccgccaccacagctccctcccgaggcagaaagcctcacgcctatggtcatgcccgtgtctgtccctgtcaagcttctcccgcccaagcccagctctcaggggttcaccaacagcaccgttgccgccccctccgccagagacaagccagccagctcgatgtcggacgacgagatgcctgtgctcgtgaggatgaccctctctcccccacactcaccccaaggggctgccccccgcacgcctgctgaaatccccaggaagcatcagccgagtgtgcccaaagccgaggagcccctcaagaccgtgcaggagaagaaaaagttccggcaccggccggaacctctcttcatcccgccgccgccctcctacaacccgaaccccgctgcctcctactcgggcgccaccctgtaccagagccagctgcgctccccgcgcgtcctcggggaccacctgctcctggaccccacccacgagctgcccccttacacgcccccacccatgctgagcccggtgcgccagggctcggggctcttcagcaatgtcctcatctccggccacggccctggcgcccacccgcagctgcccctgacgcccctgacgcccacaccacgggtgctgctgtgtcgctccaacagcatcgatggcagcaacgtgacggtcaccccagggcctggagagcagactgtagatgttgaaccacgcatcaacattggcttgagattccaagcagaaatccctgaactccaagatatctctgccctggcccaggacacacacaaggccacactggtatggaagccctggccagaactagaaaaccatgacctccagcaaagagtggagaatcttctgaatttgtgctgttccagtgcattgccaggtggagggaccaattctgaatttgctttgcactctctgtttgaggccaaaggtgatgtgatggttgctctggaaatgctgctactgcggaagcctgtcaggttaaaatgtcatcctttagcaaattaccactatgccggttcggacaagtggacctccctagaaagaaaactgtttaacaaagcactagccacttacagcaaagactttatttttgtacagaagatggtgaagtccaagacggtggctcagtgcgtggagtactactacacgtggaaaaagatcatgcggctggggcggaaacaccggacacgcctggcagaaatcatcgacgattgtgtgacaagtgaagaagaagaagagttagaggaggaggaggaggaggacccggaagaagataggaaatccacaaaagaagaagagagtgaggtgccgaagtccccggagccaccacccgtccccgtcctggctcccacggaggggccgcccctgcaggccctgggccagccctcaggctccttcatctgtgaaatgcccaactgtggggctgtgttcagctcccgacaggcactgaatggccatgcccgcatccacgggggcaccaaccaggtgaccaaggcccgaggtgccatcccctctgggaagcagaagcctggtggcacccagagtgggtactgttcggtaaagagctcaccctctcacagcaccaccagcggcgagacagaccccaccaccatcttcccctgcaaggagtgtggcaaagtcttcttcaagatcaaaagccgaaatgcacacatgaaaactcacaggcagcaggaggaacaacagaggcaaaaggctcagaaggcggcttttgcagctgagatggcagccacgattgagaggactacggggcccgtgggggcgccggggctgctgcccctggaccagctgagtctgatcaaacccatcaaggatgtggacatcctcgacgacgacgtcgtccagcagttgggaggtgtcatggaagaggctgaagttgtggacaccgatcttctcttggatgatcaagattcagtcttgcttcagggtgacgcagaactataaagccctgtgtgtcacttagagacagtgaaaacccacggcctccatcttcattaatcaggaaacctggactgcctgcttgttttgtaacccttttaaactacctgttttaaaagtggtcattttattcaggtttagaaaaaaaaatcctatttcttttccttttatttaaaaaaatttgtttttgtggggggttgggggaataaataattggcacaactatctttaagaggtgtttcatctgggctaccttctcatgaaatcattcccagtagggactgaagctgaccttcatgttccattgcattcagatgtcaaccatcccggttgccttttatcccaaagcttgctgtgagtgtgtgtgtgtgagacgcaggcgaccctcttagtactggggtcttggggccaacttttcccatcaagcgttactttgattctgttctgacctcattccatagtttgcagtgagcatggcatctttgcctggagatactatgctaggggcagctttccaggggcaaagcaagccctcgtgttacacggctctcctccagctcacacgacatgtgaggagatgaccaaatgtgaaaacaggtttcccctgtgttgcccgtcatcctttggcccgttcacaggaatggagtactgtataattttaggctttcattcccagcagtgtttactgaggacctggttttctagaacaggtgtgtcctgtcctcttccatgttccctgggggctggtcagctccaagttgtgggtggcagagctgtgtttcagcatgaactgactagagacccatctggaggcaaatattaagttgccaggactgctttcacttcagggtgattgaaggacacatattgaagtacctagaatgccagaaagtgttctattgcccaaaaaacaaatcagaaaagcctattcttttttgcaacgctgttaatgattagtggagttctgaaattactttgtgccacttggaagtactgtgaaaccgcattcactgggattttgctgtaattcacatccgctggactgaagtttaccttgatgttagctataagaaatagttttctaacacatacgatagcaaatacaagacaaatagcattgaaggccaacaaaaatggcttcagatacaccttagctataatgtttgcattcaaacaatgaatgtattcatcacaagtcacttaccaaagcacttctagacttctccaacctccatgactttgctctgcttcctcctgtccctgtcagcagggttgctgtttgtacttgaaggtaataaacctgtaatccttcaaaaatgccatttagccccaggcttctgagctgagtcagactgacccatcccaccgttagggcaaaagtcaggctgggacacagcgccagtacagagaggatcctgcttcatgcaactccccttttggagttaatgcagcgtgatttcctgggccggtgttttcaggcatcgcccaccccaggtatgctggttcccagctccacgtaggtgtgcctatcacgctgggccactttgctgacaacattcatagcttgacatgagagagaatatcagcagaagcatgagagtaggacctgacgtctttgactctgcaaaagcatttagcacacactcatgggggggaactggctgtgagccacagcagccccacacagacagtggtctctgaacttcaggaaagccatggacagaaaaaaaaataaaattcttttccatcattctattttcaaagaggtcttggcgttttcctacatcttttgtttagagggggaaaaaagtttcatttgctgccatttcagaaaggttatgctatcctgttttatccaagcagttgtgagtcaggaactgcctgggcagtgtgcatcaactttgtggccgaaccattacagctgtcatatccttggctgatcgtctctcccagggactactgccctccacttagtgtctgagggtaagcctagaagggtgctgctattgggtctatggaagcttatctatcaaaggagcaaacatccagaaaagtgtttataaagcaaatgtattgcctctgtttagagatttgcccagctgttccagttttaaacattaaaaaataaactcagttgccatggcaaaaatagaatgcacagcttacttataattttccatgcagtatagcataaggatttttgacttgaaacaaccaaagaactcctccttaacgagacagttcaaattcctgaattagtatttcttgactatcaacttaaagaatggacttcctagtacaatgttgcacttatttttttttctgaaataattctgcctgcatgtatgtgttgtgttttagcttctccccttaccccaccccaaagatcttttcttcctaatggttaatgtctcaactcggttactgtttactatcagatggtttttcattagtgaatttagacctctttgagaaagcttgtatataaaaagttaacagatatattttatggaaaaacccatcttattttcaaatatatttaactgctgttatattttattagaggaaggttgtaaatattttctaggagttctattgtaaagaaaagtatttttgaaaaaaattaatgtaataaaaaggaaaacatttttaaatagtggttgtgattgcttcctgttctggcttcgttatgttctattctcagcagatgaattgcatgccttccatatcaggatgtaatttattcaggtttgcactattataagttgacatcataatatctagtgtgcttaactgtattttcccggaatgcaagtcccttggtccatattaaagcactatgtatagcatattcataatttttcttttgtaacgtgtgtatttttaataaggattttatgtaacattttggcaacaagaggaccgtattttctagtgaattttataataacattttgctaaaaatgtttcttcctaggtcagtttttgttaaggtgaaccaaaagtcttattttaccaggggtttaaaaaaagtttgaagcttgaaagcaaagttatatttaaacatcatatgtaacaaataaataaagatgttttatagacttgtcctaaaaaggtgcattccttaaaaaaaaaaaaaagaaaaaaaaaggaaactggggcattctaggttgtttcccctccaagtgataagctttttttttttcttaattatcacaatgcttcttcaaaaagggaaccagggaaattttatttaacacattctaatcattagcctctcagaaagttattacagttcctatagatgggcattcatcaaatggagatgtaaccaaacagacactgtcatatttatttgtgaaaacctgattcaatattgcatcagctgctctgaaaataaaatattaatcttttgcgttt

SEQ ID NO: 304649 - DNA, 3663 bp, Artificial Sequence
  derived and/or modified sequence
atgggcgaccagcagctgtacaagaccaaccacgtggcccacggcagcgagaacctgttctaccagcagccccccctgggcgtgcacagcggcctgaaccacaactacggcaacgccgtgaccggcggcggcatggacgccccccaggccagccccatcagcccccacttcccccaggacaccagagacggcctgggcctgcccgtgggcagcaagaacctgggccagatggacaccagcagacagggcggctggggcagccacgccggccccggcaaccacgtgcagctgagaggcaacctggccaacagcaacatgatgtggggcgcccccgcccaggccgagcccaccgacggctaccagtacacctacagccaggccagcgagatcagaacccagaagctgaccagcggcgtgctgcacaagctggacagcttcacccaggtgttcgccaaccagaacctgagaatccaggtgaacaacatggcccaggtgctgcacacccagagcgccgtgatggacggcgcccccgacagcgccctgagacagctgctgagccagaagcccatggagccccccgcccccgccatccccagcagataccagcaggtgccccagcagccccaccccggcttcaccggcggcctgagcaagcccgccctgcaggtgggccagcaccccacccagggccacctgtactacgactaccagcagcccctggcccaggtgcccgtgcagggcggccagcccctgcaggccccccagatgctgagccagcacatgcagcagatgcagcagcaccagtactaccccccccagcagcagcagcaggccggccagcagagaatcagcatgcaggagatccagacccagccccagcagatcagacccagccagccccagccccccccccagcagcagcagccccagcagctgcagctgcagcagagacagggcagcatgcagatcccccagtactaccagccccagcccatgatgcagcacctgcaggagcagcagcagcagcagatgcacctgcagccccccagctaccacagagacccccaccagtacacccccgagcaggcccacaccgtgcagctgatccccctgggcagcatgagccagtactactaccaggagccccagcagccctacagccaccccctgtaccagcagagccacctgagccagcaccagcagagagaggacagccagctgaagacctacagcagcgacagacaggcccaggccatgctgagcagccacggcgacctgggcccccccgacaccggcatgggcgaccccgccagcagcgacctgaccagagtgagcagcaccctgccccacagacccctgctgagccccagcggcatccacctgaacaacatgggcccccagcaccagcagctgagccccagcgccatgtggccccagatgcacctgcccgacggcagagcccagcccggcagccccgagagcagcggccagcccaagggcgccttcggcgagcagttcgacgccaagaacaagctgacctgcagcatctgcctgaaggagttcaagaacctgcccgccctgaacggccacatgagaagccacggcggcatgagagccagccccaacctgaagcaggaggagggcgagaaggtgctgcccccccagccccagccccccctgcccccccccccccccccccccccccccccccagctgccccccgaggccgagagcctgacccccatggtgatgcccgtgagcgtgcccgtgaagctgctgccccccaagcccagcagccagggcttcaccaacagcaccgtggccgcccccagcgccagagacaagcccgccagcagcatgagcgacgacgagatgcccgtgctggtgagaatgaccctgagccccccccacagcccccagggcgccgcccccagaacccccgccgagatccccagaaagcaccagcccagcgtgcccaaggccgaggagcccctgaagaccgtgcaggagaagaagaagttcagacacagacccgagcccctgttcatcccccccccccccagctacaaccccaaccccgccgccagctacagcggcgccaccctgtaccagagccagctgagaagccccagagtgctgggcgaccacctgctgctggaccccacccacgagctgcccccctacacccccccccccatgctgagccccgtgagacagggcagcggcctgttcagcaacgtgctgatcagcggccacggccccggcgcccacccccagctgcccctgacccccctgacccccacccccagagtgctgctgtgcagaagcaacagcatcgacggcagcaacgtgaccgtgacccccggccccggcgagcagaccgtggacgtggagcccagaatcaacatcggcctgagattccaggccgagatccccgagctgcaggacatcagcgccctggcccaggacacccacaaggccaccctggtgtggaagccctggcccgagctggagaaccacgacctgcagcagagagtggagaacctgctgaacctgtgctgcagcagcgccctgcccggcggcggcaccaacagcgagttcgccctgcacagcctgttcgaggccaagggcgacgtgatggtggccctggagatgctgctgctgagaaagcccgtgagactgaagtgccaccccctggccaactaccactacgccggcagcgacaagtggaccagcctggagagaaagctgttcaacaaggccctggccacctacagcaaggacttcatcttcgtgcagaagatggtgaagagcaagaccgtggcccagtgcgtggagtactactacacctggaagaagatcatgagactgggcagaaagcacagaaccagactggccgagatcatcgacgactgcgtgaccagcgaggaggaggaggagctggaggaggaggaggaggaggaccccgaggaggacagaaagagcaccaaggaggaggagagcgaggtgcccaagagccccgagcccccccccgtgcccgtgctggcccccaccgagggcccccccctgcaggccctgggccagcccagcggcagcttcatctgcgagatgcccaactgcggcgccgtgttcagcagcagacaggccctgaacggccacgccagaatccacggcggcaccaaccaggtgaccaaggccagaggcgccatccccagcggcaagcagaagcccggcggcacccagagcggctactgcagcgtgaagagcagccccagccacagcaccaccagcggcgagaccgaccccaccaccatcttcccctgcaaggagtgcggcaaggtgttcttcaagatcaagagcagaaacgcccacatgaagacccacagacagcaggaggagcagcagagacagaaggcccagaaggccgccttcgccgccgagatggccgccaccatcgagagaaccaccggccccgtgggcgcccccggcctgctgcccctggaccagctgagcctgatcaagcccatcaaggacgtggacatcctggacgacgacgtggtgcagcagctgggcggcgtgatggaggaggccgaggtggtggacaccgacctgctgctggacgaccaggacagcgtgctgctgcagggcgacgccgagctgtag

SEQ ID NO: 304650 - DNA, 780 bp, Artificial Sequence
  derived and/or modified sequence
atggtcgatttccccggatacaatctgagtggcgctgtcgccagtttcctgtttatcctgctgacgatgaaacagagcgaagattttcgggtaattgggccagcacaccccatattggccggagtaggagaagatgccctacttacatgtcagctcctcccaaaacgcacaacaatgcacgttgaggttcggtggtacagaagcgaaccaagcacccccgtgtttgtccaccgggacggcgtggaagtgaccgagatgcagatggaagaatatcggggttgggtcgaatggatcgagaatggcatcgcaaaaggaaacgtcgcgctgaaaatacataacatccaacccagcgataacggacaatactggtgccatttccaggacggcaattactgtggagaaaccagtctcttgcttaaagtcgctggactcggctccgcaccttcgattcacatggagggaccaggcgagagcggtgtgcagctggtgtgcacagcacgcgggtggttcccagaacctcaggtgtactgggaggatatcagaggcgagaagctccttgccgtcagtgagcaccgaattcaagataaggatggcctcttctatgccgaggcaacactcgtcgttagaaacgcgtccgcagaatcagtttcttgcctcgtgcataaccctgtactgacagaagagaagggcagcgtgattagtctccccgagaagctccagaccgaactggggaagtacgaagttttagcacatacctgcggaggtagtctgtgcccctag

SEQ ID NO: 304651 - DNA, 780 bp, Artificial Sequence
  derived and/or modified sequence
atggtggatttcccaggctataaccttagcggggccgtcgcatcattcctgttcatccttcttactatgaaacagagcgaagattttcgtgtgatagggccagctcaccccatcctggccggcgtgggcgaggacgccttgcttacttgtcagcttttacccaaaagaactaccatgcatgtggaggtgcggtggtaccgctcagaaccttccacccctgtatttgttcaccgggatggagttgaagtcaccgaaatgcaaatggaggaatacaggggatgggtagaatggatagaaaacgggattgccaaggggaatgtggccctcaagattcacaacatccagccaagtgacaacggacaatattggtgtcactttcaagacggcaactactgcggggagacttcattactgctcaaggtggcggggctcgggtcggctccgtcgatacacatggagggccccggcgaatccggagtacagcttgtttgtaccgctagaggatggtttcctgagcctcaggtttattgggaagacatccgcggcgagaaactcttagcagtgagcgagcacagaattcaggataaagatggcctgttttacgccgaggccacactcgttgtgaggaacgcttccgccgagtccgtcagttgtctcgttcacaatccagtgctcactgaggagaagggtagcgttatctctctgcctgagaagctgcagactgagcttggaaagtatgaagtgctcgctcacacgtgcggtgggagcctgtgcccttag

SEQ ID NO: 304652 - DNA, 780 bp, Artificial Sequence
  derived and/or modified sequence
atggtcgattttccaggttacaatctatccggagccgtcgcgtcattcttgtttattcttctcacaatgaaacagagtgaagacttcagagtcatcggccctgctcatcccatcctagccggcgtgggcgaggacgccctcctgacatgccagctgctgccaaagagaacaaccatgcacgtggaggtgcgttggtatcgaagcgagcccagcactcccgttttcgttcaccgggatggggtcgaggtgactgagatgcagatggaggaataccgcggctgggtcgagtggattgagaatggtatagctaagggtaacgttgccctcaaaatacacaatatacagccctccgacaacggccagtactggtgtcactttcaggatgggaactactgcggcgaaacttctcttctgctgaaagtggctggactgggatctgcacccagcatccatatggaagggccaggggagagtggtgtgcagctggtgtgcacggcccgaggttggtttccggagccccaggtctactgggaagatatccgcggagaaaaactgcttgcagtcagcgaacacagaatacaagacaaggacggccttttttacgctgaggcaacattagtggtgcgcaatgcttcagccgagtcagtatcatgcctggttcacaacccggttttaaccgaagagaaaggatccgttatatctttacccgaaaaacttcaaactgaactgggcaaatatgaggtgctcgcccatacgtgcggcgggagtttgtgcccatag

SEQ ID NO: 304653 - DNA, 780 bp, Artificial Sequence
  derived and/or modified sequence
atggtagacttcccaggctacaatctgtctggggctgtcgcgtcattcctatttattctgctgacaatgaagcaatctgaggatttccgggttattggacccgctcatccgattctggcaggcgtgggggaagacgcactgctgacctgtcagctgctccctaaacgaaccacaatgcacgtggaagtcaggtggtatcgctctgagccatccactcctgtgttcgtccatcgcgatggcgtggaagtcaccgagatgcagatggaggagtaccgcgggtgggtggaatggatagagaacggaattgccaaaggaaacgtggcccttaagatacataatatacagccgagcgacaatggccagtattggtgccactttcaggacgggaattactgcggtgagacatctcttctcctgaaagtggccggactgggcagcgccccatccattcatatggaggggcctggcgaatctggcgtccaactggtgtgtacggcccgcggctggttccccgaaccacaggtatattgggaagatataagaggtgaaaaactactggcggtcagcgaacaccgaatccaggataaggatggcttgttctatgccgaggcgactctggtggtgagaaacgcatcagctgaaagtgtgtcctgcctggttcacaaccccgtactgaccgaagaaaaaggttccgtgatcagtcttcccgagaaactgcagaccgagctcggtaaatacgaagttctggctcacacatgtggcggatcattgtgtccctag

SEQ ID NO: 304654 - DNA, 780 bp, Artificial Sequence
  derived and/or modified sequence
atggtggacttccctggctacaacctgagcggggctgtggccagcttcctgttcatcctgctgaccatgaagcagagcgaggacttccgggtcatcggccctgcccaccccatcctggccggcgtgggggaggatgccctgctgacctgccagctgctgcccaagaggaccaccatgcacgtggaggtgcgctggtacagaagtgagcccagcacccctgtgtttgtgcacagagatggagtggaggtgacagagatgcagatggaggagtaccggggctgggtggagtggattgaaaatggcatcgccaagggaaatgtggccctgaagatccacaacatccagcccagcgacaatggccagtactggtgccacttccaggacggcaactactgtggggagaccagcctgctgctgaaggtggccggcctgggcagcgcccccagcatccacatggagggccctggagagagcggcgtgcagctggtgtgcacagcccggggctggttccctgagccccaggtgtactgggaggacatccggggggagaagctgctggccgtgtctgagcaccgcatccaggacaaggatggcctcttctacgccgaggccaccctggtggtgagaaatgccagcgctgagagcgtgtcctgcctggtgcacaaccctgtgctgacagaggagaagggcagcgtcatcagcctgcctgagaagctgcagacagagctgggcaagtatgaggtgctggcccacacctgtggcggcagcctgtgcccctag

SEQ ID NO: 304655 - DNA, 780 bp, Artificial Sequence
  derived and/or modified sequence
atggtggacttccccggctacaacctgagcggcgccgtggccagctttctgtttatccttctaaccatgaaacaatctgaagacttccgggtcataggtcctgctcatcccattcttgcaggagtgggggaggacgcccttctgacctgtcagttgcttcccaagagaacgactatgcatgtggaagtcaggtggtaccgcagcgaacccagtaccccagtcttcgtgcaccgtgacggggtggaagtgacagaaatgcaaatggaagagtaccgcgggtgggtggaatggatcgaaaacggcatagcgaagggtaacgtggccctgaaaatacacaatatacagccatccgataacggacagtactggtgccatttccaggacggcaattattgcggagaaacttccctgttgcttaaggttgcaggcctgggaagcgccccctccattcatatggagggcccaggtgaatcaggagtgcagctggtttgcacagcccggggttggtttcccgaaccccaggtctactgggaggacatccgtggcgagaaactgctcgctgtatcagagcatcgtattcaggacaaggatggcctgttctacgccgaggccactcttgtagtaagaaatgcttccgccgaatcagttagctgtctcgttcataaccccgtcctcacagaagagaaagggtcagtaattagcctccctgagaagcttcaaaccgagctgggcaagtacgaggtgttggcccacacgtgcggcgggagcctgtgcccctag

SEQ ID NO: 304656 - DNA, 780 bp, Artificial Sequence
  derived and/or modified sequence
atggtggacttccccggctacaacctgagcggcgccgtggccagctttctgttcattttactcactatgaagcagtccgaagacttcagagtcataggccccgctcatccaatcctggcgggggtgggggaagacgcgttactcacttgccagctactgcccaagcgaaccacaatgcacgtggaagtgcggtggtacagatctgagccctcgacccctgtgttcgtgcaccgcgacggcgtagaggtaacagaaatgcagatggaagaatacagaggatgggtcgagtggattgagaacggcatcgcaaaaggcaacgtggctctcaagatacacaacatacagccatcagataatgggcagtactggtgtcactttcaggacggtaattattgcggcgagacaagccttttgctcaaggtggccggcctaggctctgcaccaagtatacacatggaaggccccggtgaatccggcgtgcagctggtgtgcactgccagggggtggtttcccgagccacaggtttattgggaagacatccggggcgagaaattgcttgccgtgtccgaacacaggatccaggacaaggatggactgttctatgcggaggcaactctcgtggtgagaaatgcttccgccgaatcggtatcctgcctcgttcataaccctgttttgactgaagagaagggctccgtgataagcttgcccgagaagctgcagactgagcttggcaaatatgaagtcctcgctcatacgtgtggtggttccctttgcccatag

SEQ ID NO: 304657 - DNA, 780 bp, Artificial Sequence
  derived and/or modified sequence
atggtggacttccccggctacaacctgagcggcgccgtggccagcttcctgttcattctgctgacaatgaagcagagtgaggatttcagggtaatcggccctgcacatcccatcctggctggcgtcggcgaagacgcattgcttacatgccaactccttcctaagagaaccaccatgcatgtggaggtcaggtggtatcggtcagagccatcaacgcccgtttttgtccacagggacggggtcgaggttaccgagatgcaaatggaggagtataggggctgggtcgaatggattgagaatgggatcgcaaagggtaatgttgctctcaaaattcacaacatccaaccctccgataatggacaatactggtgccatttccaggatgggaattattgcggcgaaacaagtctcctgctcaaggtcgcgggactagggtctgctcccagtatacacatggaaggccccggagagagcggcgtccagctggtgtgcaccgcccgcgggtggttcccagagccccaggtctactgggaggacatccgcggagaaaaattactggcggtgtctgaacaccgaatacaggacaaagatggcttgttctacgctgaagcaaccctggtggttaggaacgcatccgctgagagcgtcagttgccttgtgcataatcctgtgctgaccgaagaaaaggggtcggtgatcagtttacctgagaaactccagactgagttaggcaagtacgaggttctggctcacacctgtgggggctcactgtgcccgtag

SEQ ID NO: 304658 - DNA, 780 bp, Artificial Sequence
  derived and/or modified sequence
atggtggacttccccggctacaacctgagcggcgccgtggccagcttcctttttatcctcctgactatgaaacaatccgaagatttccgcgttattggcccagcccatcccattctagccggggttggggaggatgccctgctaacttgtcagctgctcccaaaacgcactaccatgcacgtcgaggtgaggtggtatagatccgagccaagcacacctgtcttcgttcatcgggacggagtggaagtgacagagatgcaaatggaagagtatcgcgggtgggtcgaatggatcgagaatggcattgcaaaaggcaacgtggctctgaagatccacaatatccaacccagtgacaacggacagtactggtgccacttccaggacggcaactattgtggcgagacaagccttctgttgaaggtagctgggttaggctcggcgccctcaatccacatggaaggaccaggcgagagcggagtgcagttagtctgtactgcccggggctggttccctgagccccaagtgtattgggaggatattcgaggtgaaaagctgttggccgtgtctgaacataggattcaagataaggacggcctgttctacgctgaagctactttggttgttagaaatgcttcggccgagtcggtctcttgccttgtccacaacccagtactgaccgaagagaagggcagcgttatctcccttcctgaaaagctgcaaactgagttgggaaaatatgaggtgttagcacatacctgtggaggctccctgtgcccttag

SEQ ID NO: 304659 - DNA, 780 bp, Artificial Sequence
  derived and/or modified sequence
atggtagattttcctggctacaacctttccggagccgtggcttcatttctgtttattctcctcacaatgaagcagagtgaggatttccgcgtgataggccctgcccaccctattctggcgggtgtgggagaggatgcgttactcacctgccagctcctgcctaagcgcacaacaatgcacgtcgaggttagatggtaccggtctgaaccatccactcctgttttcgttcacagggacggcgtggaggttacagaaatgcagatggaagagtatagaggctgggtagagtggatagagaatggaatcgccaagggaaatgtagccttgaaaatccacaatattcagccctctgataatggtcagtactggtgccatttccaggacggcaactactgtggtgagacgagcctgctactaaaggtggctgggctgggttccgcccctagtatccacatggagggccctggagagtctggcgtgcagcttgtgtgtacagctaggggctggttcccagagccccaagtttactgggaggacatcagaggggaaaagctcctggctgtgtccgagcatcgaatacaggataaggacggtcttttctatgcagaggctaccctggtggtgaggaatgcctcggcagagtccgtctcatgcctggtccataaccccgtcctcactgaagaaaagggatctgttatttcactgccagaaaagctccaaaccgaacttgggaagtacgaagtgctggctcacacttgtggcggatctctgtgcccatag

SEQ ID NO: 304660 - DNA, 780 bp, Artificial Sequence
  derived and/or modified sequence
atggtggattttcctggctataacctgtccggggctgtggcttctttcctctttatcctgttgactatgaagcagtctgaagacttccgggtcattggccctgcacatcccatactggccggagtgggcgaagacgccctgttgacttgccagctgctgccaaagaggacaacgatgcatgtggaagtcaggtggtatcggagtgaaccttccaccccagtgttcgttcaccgagatggagtcgaagttactgaaatgcaaatggaggagtacaggggatgggtagaatggatagagaacgggattgccaagggaaacgtcgcactcaagatccataacatccagccaagcgacaacggccagtattggtgtcactttcaggacggaaactactgtggagaaacctccttgctcctcaaagtggcaggtcttggttcagccccaagtattcacatggagggcccaggggagagcggagtacagctcgtgtgtacggcgagagggtggttccccgaaccgcaggtatactgggaggacattaggggcgagaaattgttagctgtctccgaacatcggattcaggataaagatggcctcttttacgcagaggccacattagtggtgcgcaatgctagtgctgagagtgtttcatgtctcgtgcacaacccagttttgaccgaagagaaggggtctgtaatatcactccctgaaaaactgcagactgagctgggcaaatacgaggttctggctcacacatgcggaggatcattatgcccttag

SEQ ID NO: 304661 - DNA, 780 bp, Artificial Sequence
  derived and/or modified sequence
atggtggattttcccggatataatttgagtggcgctgtcgcgagcttcctatttatactgcttactatgaagcagtcagaggacttcagagtgattgggcctgcccaccctatcctggccggagttggggaagatgctttactcacatgtcagctcctccccaaacgcaccaccatgcatgtggaagtgcgatggtatcgcagcgaaccatcaacccctgtctttgtgcacagggatggcgtggaagttacagagatgcagatggaggagtaccgcggatgggtggaatggatcgaaaatggtatcgctaaaggtaatgttgcccttaagatccataacattcagccatccgataacggacagtattggtgtcatttccaggacgggaattactgtggggaaacctctctgctgcttaaggtggccggattgggtagtgcaccttccattcacatggaaggaccaggggaaagcggagttcagctcgtatgcacagcacgtggctggttcccagaaccccaggtgtactgggaagatattaggggggaaaagctgctggccgtctctgagcacaggattcaagataaagatggccttttttatgctgaggccacacttgtggtccgcaatgcctcagccgagtccgtatcgtgcttagttcataatccagtcctgactgaggaaaagggcagcgtgatttccctgcccgagaaacttcagacagagctcggaaaatatgaggttcttgctcatacgtgcggcggaagcctatgtccctag

SEQ ID NO: 304662 - DNA, 780 bp, Artificial Sequence
  derived and/or modified sequence
atggtcgactttcctgggtacaatctttctggtgccgtggccagtttcctcttcatcttgttgacgatgaagcagagcgaggactttcgtgtaatcggacctgcccacccgatcctagcgggagttggcgaggatgctctcctaacatgtcaattgctgccgaagcgcactaccatgcatgtagaggtcaggtggtaccgctcagaaccgagcaccccagtgtttgtacacagagacggagtcgaggttacagagatgcagatggaagagtacaggggttgggtggagtggatcgagaatgggatcgcaaagggcaatgtggctctcaagattcacaatattcagccctcggacaacggtcagtactggtgtcattttcaggacggcaactattgcggtgagaccagtctgttgctaaaggtggccggtctcggttctgccccttcaattcacatggaaggacctggggagagcggggtgcagctggtgtgtaccgccagaggctggttccccgaaccacaggtttactgggaggatattcgcggagaaaaattgctggcagtttccgagcaccgcatacaggacaaggacggtcttttttacgcagaggccacccttgtggtgcgcaatgcctccgccgagagcgtgagctgtctcgtacataaccctgtgctgacagaggagaaggggtcggtgatctcgctgcctgagaaacttcaaacagagctgggtaagtacgaggtcctcgcccacacctgtgggggatcactgtgtccctag

SEQ ID NO: 304663 - DNA, 784 bp, Artificial Sequence
  derived and/or modified sequence
agggaggatggtggattttccaggctacaatctgtctggtgcagtcgcctccttcctattcatcctgctgacaatgaagcagtcagaagactttagagtcattggccctgctcatcctatcctggccggggttggggaagatgccctgttaacctgccagctactccccaagaggaccacaatgcacgtggaggtgaggtggtaccgctcagagcccagcacacctgtgtttgtgcacagggatggagtggaggtgactgagatgcagatggaggagtacagaggctgggtagagtggatagagaatggcattgcaaagggaaatgtggcactgaagatacacaacatccagccctccgacaatggacaatactggtgccatttccaggatgggaactactgtggagaaacaagcttgctgctcaaagtagcaggtctggggtctgcccctagcatccacatggagggacctggggagagtggagtccagcttgtgtgcactgcaaggggctggttcccagagccccaggtgtattgggaagacatccggggagagaagctgctggccgtgtctgagcatcgcatccaagataaagatggcctgttctatgcggaagccaccctggtggtcaggaacgcctctgcagagtctgtgtcctgcttggtccacaaccccgtcctcactgaggagaaggggtcggtcatcagcctcccagagaaactccagactgagctgggtaagtacgaggtgctggcacacacctgtggagggagcctctgccct

SEQ ID NO: 304664 - DNA, 780 bp, Artificial Sequence
  derived and/or modified sequence
atggtggacttccccggctacaacctgagcggcgccgtggccagcttcctgttcatcctgctgaccatgaagcagagcgaggacttcagagtgatcggccccgcccaccccatcctggccggcgtgggcgaggacgccctgctgacctgccagctgctgcccaagagaaccaccatgcacgtggaggtgagatggtacagaagcgagcccagcacccccgtgttcgtgcacagagacggcgtggaggtgaccgagatgcagatggaggagtacagaggctgggtggagtggatcgagaacggcatcgccaagggcaacgtggccctgaagatccacaacatccagcccagcgacaacggccagtactggtgccacttccaggacggcaactactgcggcgagaccagcctgctgctgaaggtggccggcctgggcagcgcccccagcatccacatggagggccccggcgagagcggcgtgcagctggtgtgcaccgccagaggctggttccccgagccccaggtgtactgggaggacatcagaggcgagaagctgctggccgtgagcgagcacagaatccaggacaaggacggcctgttctacgccgaggccaccctggtggtgagaaacgccagcgccgagagcgtgagctgcctggtgcacaaccccgtgctgaccgaggagaagggcagcgtgatcagcctgcccgagaagctgcagaccgagctgggcaagtacgaggtgctggcccacacctgcggcggcagcctgtgcccctag

SEQ ID NO: 304665 - protein, 388 aa, Artificial Sequence
  derived and/or modified sequence
MVDFPGYNLSGAVASFLFILLTMKQSEDFRVIGPAHPILAGVGEDALLTCQLLPKRTTMHVEVRWYRSEPSTPVFVHRDGVEVTEMQMEEYRGWVEWIENGIAKGNVALKIHNIQPSDNGQYWCHFQDGNYCGETSLLLKVAEKLLAVLSSLKVNGPSQPILVRVGEDIQLTCYLSPKANAQSMEVRWDRSHRYPAVHVYMDGDHVAGEQMAEYRGRTVLVSDAIDEGRLTLQILSARPSDDGQYRCLFEKDDVYQEASLDLKVVSLGSSPLITVEGQEDGEMQPMCSSDGWFPQPHVPWRDMEGKTIPSSSQALTQGSHGLFHVQTLLRVTNISAVDVTCSISIPFLGEEKIATFSLSESRMTFLWKTLLVWGLLLAVAVGLPRKRS

SEQ ID NO: 304666 - protein, 108 aa, Artificial Sequence
  derived and/or modified sequence
MVDFPGYNLSGAVASFLFILLTMKQSDFRVIGPAHPILAGVGEDALLTCQLLPKRTTMHVEVRWYRSEPSTPVFVHRDGVEVTEMQMEEYRGWVEWIENGIAKGNVAL

SEQ ID NO: 304667 - protein, 271 aa, Artificial Sequence
  derived and/or modified sequence
MVDFPGYNLSGAVASFLFILLTMKQSEDFRVIGPAHPILAGVGEDALLTCQLLPKRTTMHVEVRWYRSEPSTPVFVHRDGVEVTEMQMEEYRGWVEWIENGIAKGNVALKIHNIQPSDNGQYWCHFQDGNYCGETSLLLKVAAVLRDDIIASLKVNGPSQPILVRVGEDIQLTCYLSPKANAQSMEVRWDRSHRYPAVHVYMDGDHVAGEQMAEYRGRTVLVSDAIDEGRLTLQILSARPSDDGQYRCLFEKDDVYQEASLDLKVVWVLPH

SEQ ID NO: 304668 - DNA, 1167 bp, Artificial Sequence
  derived and/or modified sequence
atggtggactttcctggttataaccttagcggggccgtagcgagcttcttgtttatcctgctgacgatgaagcaaagcgaggacttcagagtcatcggcccagcacacccaatcctggcgggtgtaggcgaggacgccctcctgacctgtcagctcttgcccaagaggaccaccatgcatgttgaagtacgctggtatcggtcagaaccaagtactcctgtcttcgttcaccgcgatggcgtggaggtaacagaaatgcaaatggaggagtacagaggctgggttgaatggattgagaacggcatagccaagggtaatgttgcccttaaaattcataatattcagccaagtgacaacgggcaatactggtgccatttccaagacgggaactactgtggcgagacctcgctgctgttgaaagtggcggaaaagttgcttgcagtactaagctccttgaaggtgaacggaccttcgcagccaatcctggtgcgggtaggggaggacatccaactgacatgttatctgtctcctaaggccaatgcacagagcatggaggtgcgttgggaccgatcgcaccgttaccccgctgtccatgtctatatggacggcgaccacgtggctggagagcaaatggcagagtacagaggaagaacagttttagtgtctgatgctattgacgagggacggcttacgcttcagatcttgtcagcacgcccttctgatgacggtcagtaccgatgcctttttgagaaggacgatgtctatcaagaagccagcctggacctgaaagtggtttctttgggctcgagtcctctcattacagttgaaggccaagaggacggcgagatgcagccaatgtgtagttctgacggctggttccctcagcctcacgtcccctggagggatatggaagggaagaccataccgagcagcagccaggccctgacccaggggagtcatggattgtttcacgtacagactctgttgcgtgtgacaaatatttctgccgtcgacgttacatgttctatcagtatccctttcctgggggaggagaagatcgctactttttctcttagcgagagcagaatgacttttctgtggaagacccttcttgtctggggtctgcttcttgcagtagcagttggccttcctcggaagcgatcctag

SEQ ID NO: 304669 - DNA, 327 bp, Artificial Sequence
  derived and/or modified sequence
atggtagatttccctggctacaatctcagtggtgctgtcgcgtccttcctgtttatactcctaacaatgaaacagtccgactttagggtcatcggccccgcacaccccatactcgcaggcgtgggagaggatgctctgctgacttgccagctgcttcccaagaggaccacgatgcacgtggaagtgcgctggtatagaagcgaaccgagcacacctgtgttcgtgcatcgggatggagtggaggtcaccgaaatgcaaatggaagagtatagaggatgggtggagtggattgagaacggaattgcgaaaggcaacgtggccctgtag

SEQ ID NO: 304670 - DNA, 327 bp, Artificial Sequence
  derived and/or modified sequence
atggtggactttcccggttacaatctgagtggcgctgtggcatcttttttatttatcctactgaccatgaaacagagcgatttccgagtgattggacctgcccaccctatcttagctggcgtgggggaggacgcacttttaacatgccagttactgcctaaaagaactactatgcacgtggaagttaggtggtataggtcagagccctctacccccgtctttgtccatcgcgacggagtggaagtgaccgaaatgcaaatggaagaatatcgaggttgggtggaatggattgagaacggcattgcaaaaggcaacgtcgccctatag

SEQ ID NO: 304671 - DNA, 327 bp, Artificial Sequence
  derived and/or modified sequence
atggtcgattttcccggatataatctgtcaggggctgtggcatcattccttttcatactgctaaccatgaaacagtccgactttagagttatcggccccgcacacccaatcctcgccggtgtcggtgaagacgccctgcttacctgccagctcctgcctaaacgcactacgatgcacgttgaggtgcgctggtatagatcagagccctccacgcccgtgttcgtgcacagggacggggtggaagtgaccgagatgcagatggaggaatatcgcggatgggtcgagtggattgaaaacggaatcgccaagggaaatgtggccctctag

SEQ ID NO: 304672 - DNA, 816 bp, Artificial Sequence
  derived and/or modified sequence
atggtggactttccaggctataacctctcgggggcggtggcgtcttttctttttatcctgctcacaatgaagcagtccgaggattttagagtcatcggccctgctcatcctatcttggctggtgttggtgaagacgcactgctgacttgtcagctgctgcccaagagaacaacgatgcatgtggaagtgcgatggtataggtctgaaccctcaacaccagtgtttgtgcatcgggacggagtggaggtgacagagatgcagatggaggaataccgaggatgggtggagtggatcgagaacgggatcgcgaagggcaatgttgcactcaaaattcataatattcagcctagtgacaatggccaatactggtgccactttcaggacggcaactactgtggtgagacctccctccttctgaaagtagccgccgtgctccgggatgacatcatcgcttcattaaaagttaatggcccctcccagcctatcttggtgagggtgggcgaggacattcagctcacttgctacttaagccctaaagccaacgctcagtctatggaagttcgctgggacagatcacatcgctatcccgcagtgcatgtgtatatggacggcgaccatgtagcaggcgaacagatggctgaatatcgggggcggaccgtgcttgtgagcgatgctatcgatgaaggccgcttaacattgcagattctgtcagctcgaccttcggatgacggccagtatcgctgtctgtttgagaaagacgacgtctaccaagaggcctccctggatctgaaggtcgtgtgggtgctgcctcattag

SEQ ID NO: 304673 - DNA, 327 bp, Artificial Sequence
  derived and/or modified sequence
atggtggattttcccggatataacctaagcggcgcggtggccagcttccttttcatcttgttaaccatgaaacagagtgattttcgggtgatcgggcctgcccatccaattttggcgggcgttggggaagatgcgctgctgacatgtcagctattgcctaaaagaacaaccatgcatgttgaagtcagatggtataggtcagagccatcaacaccagtttttgtccaccgggacggcgtagaagtgactgaaatgcaaatggaggaataccgcgggtgggtggaatggatagagaacggcatcgctaagggaaacgtcgctttgtag

SEQ ID NO: 304674 - DNA, 327 bp, Artificial Sequence
  derived and/or modified sequence
atggtggactttcccggatacaacctgagtggcgcagttgcttccttcctcttcatactgttgacaatgaagcagagtgacttccgagtgatcggtccagcccaccccattctcgctggtgtaggggaagacgcactgttaacatgtcagttgctgccaaagcggactacaatgcacgtcgaagtgcgttggtaccgaagtgaaccgtctacccccgtctttgtccacagggacggggtagaagtgaccgaaatgcagatggaggaatacagaggttgggtggaatggatcgagaacggcattgcaaaagggaatgtcgccttgtag

SEQ ID NO: 304675 - DNA, 327 bp, Artificial Sequence
  derived and/or modified sequence
atggtggactttcccggctacaacctgtctggagcggtagcttccttcttgtttattttgttgaccatgaaacagtctgactttcgagtaataggacccgcacatcctattcttgctggggtgggggaggacgccctgttaacctgccaactcttgccaaagcgcacaaccatgcacgtcgaggtgcgttggtaccggtctgagcccagtaccccggtcttcgtgcaccgggacggcgtggaagtgaccgagatgcagatggaggagtacaggggatgggtggaatggatcgagaatggaatcgccaaaggaaacgtggcgctatag

SEQ ID NO: 304676 - DNA, 327 bp, Artificial Sequence
  derived and/or modified sequence
atggttgactttccggggtataacctgagtggcgccgtagccagcttcctgttcattctgctcacaatgaagcagagcgattttcgagtgatcggcccagctcaccccatcctcgccggcgtgggcgaagacgccctcctgacatgtcagctactgcccaaaaggaccacaatgcatgtggaggtacggtggtataggtctgaaccctctacgcccgtgttcgtccatagggacggagtggaggtgacagagatgcaaatggaggagtacagaggatgggttgagtggatcgagaatggcatcgccaaggggaacgtggctctgtag

SEQ ID NO: 304677 - DNA, 1167 bp, Artificial Sequence
  derived and/or modified sequence
atggtcgacttcccaggctacaacctctctggcgccgtggcatcctttctattcatcttgctgaccatgaaacagagcgaagacttcagagtgatcggccctgctcacccaatcctcgccggtgttggcgaggatgccctattgacgtgccagcttttaccaaaaagaaccacgatgcatgttgaggtcaggtggtatcggtccgaacccagtactcctgtgtttgtgcacagagatggagtggaggtcactgaaatgcagatggaagaataccgaggatgggtggagtggattgagaacggaatcgccaaaggtaacgttgctctcaagattcacaacattcagccttcagacaacggacagtactggtgtcacttccaggatggcaattattgcggggagacttcgttactactaaaggttgcagaaaaattactggccgtgctgagttccctcaaagtaaatggccccagtcagccaatccttgtgagggtcggggaagatattcagctgacatgttacttgtctccaaaggccaatgcccaaagtatggaagtccgctgggatagatcacaccgctacccggccgtgcacgtctatatggatggcgatcatgtagcgggtgaacaaatggctgagtatcgcgggcgcacagtcctggtttcagatgcgatcgacgagggccgattaaccttgcagattttatctgcgcggcccagcgacgatggtcagtatcggtgcctgttcgaaaaggacgacgtctatcaggaagcttcgttagatctcaaagtcgtatctttgggcagctccccgttaattacagtcgagggccaggaagatggagaaatgcagccaatgtgctcaagtgacggttggttccctcaaccccacgtgccatggagggacatggagggaaagacaatcccaagttcctcccaggcattgactcagggaagtcatggccttttccatgtgcagactctgctgcgggtcacaaacatcagcgcggtggatgtgacttgtagtatatccattccatttctgggcgaagagaaaattgcaacattttccctctccgaatctcgcatgactttcctctggaaaacactcctggtttggggactgttattagcagtagctgtgggactgcccaggaaaagatcttag

SEQ ID NO: 304678 - DNA, 1167 bp, Artificial Sequence
  derived and/or modified sequence
atggtcgactttcccggctataatctcagcggggcagtcgcctcctttttgttcattttgctgaccatgaagcagtctgaagacttccgggtaatcggtccagcccatccaatccttgccggtgtgggagaggacgccctcttaacttgccagcttctgcctaagaggactaccatgcacgtggaggtgaggtggtatagatcggaaccttctactcccgtgttcgtgcacagagacggagtggaagtaacggaaatgcagatggaggaatacaggggttgggtcgaatggatcgagaacggaatagctaaaggcaatgtcgccctcaaaattcacaatatacaaccctcagataatggacagtactggtgtcatttccaagacggcaattactgtggggagaccagtctgttgctcaaagtggccgaaaagctgcttgcagtgctcagctccctgaaggtgaacgggccaagccagcctatcttggtccgggtgggcgaggatatacagctgacctgttacctttctcctaaagctaacgcccagagcatggaggtccgttgggaccggtctcacagatacccagccgtgcacgtctatatggacggggaccatgtggccggcgaacaaatggcagaatataggggtagaactgtgttggtgtcagacgcaatcgacgagggccggctcaccctccagatcttaagcgccaggccctcagatgacggccaatatcgttgcctcttcgagaaagacgacgtctaccaggaagcatccttagatctgaaggtggtgagtctggggtcctcacccctgattacggtcgagggacaggaggacggggagatgcagccaatgtgttctagcgatggctggtttccccagccacatgttccatggagagatatggaggggaaaaccattccgagtagttctcaggccttgacacaggggtctcacggactgtttcacgtacagacactgctccgggtgaccaatatctctgctgtcgatgtgacttgttccatctcaattccttttcttggagaggagaaaattgctaccttttcattatcagagagcaggatgacatttctgtggaaaactttgttagtgtggggccttctactggccgtggcagtcggcctcccccgcaagcgaagctag

SEQ ID NO: 304679 - DNA, 1167 bp, Artificial Sequence
  derived and/or modified sequence
atggttgatttcccagggtacaacctctccggggccgtagcctccttcttgttcatccttctcaccatgaagcagagcgaggattttcgtgtcatcggcccggcccatccgatcctcgccggggtgggcgaagacgccctcctcacatgccaactcctgcccaagagaaccaccatgcatgttgaggtccgctggtatagaagtgagcctagcactcccgtgttcgtgcatcgcgacggcgtggaggtgacagaaatgcagatggaagagtacagaggctgggtcgagtggattgagaacggaatagcaaaaggcaacgttgcactgaaaatccacaatattcagccatctgacaatggccaatactggtgccacttccaggacggaaactactgtggcgagacgtccttactcctcaaggtcgcggagaagctcctggcagtcctttccagcctgaaagttaatggtccttctcagcctattctggtgcgggtgggcgaagacatacaattgacctgttatctgagcccgaaagccaacgcccaaagtatggaggtaaggtgggacagatcccataggtatcccgccgtacacgtctatatggacggggatcatgtcgcaggtgaacagatggcagagtataggggccggaccgtcctggtttccgatgcaatcgatgaaggccggttgacactgcagatcctgtcagcccgccctagcgatgatggacagtatcgttgtcttttcgagaaggacgacgtctaccaggaagcttcgctggacctgaaagtagttagtctgggtagctctcccctgattacagttgaaggacaggaagatggcgagatgcaacccatgtgctcttctgacggctggtttcctcagccgcacgtgccttggcgcgacatggagggcaagactattccaagctcatcccaggcccttacccagggatcccacgggctttttcacgtacagacattacttcgcgtgacaaatataagcgcggtggacgttacatgcagcatttccatccccttcctgggggaggagaagattgccacattttcactctcagaaagtaggatgacatttctctggaaaactttgttggtgtggggcctgcttcttgctgttgccgttggtctaccacggaaacgcagttag

SEQ ID NO: 304680 - DNA, 816 bp, Artificial Sequence
  derived and/or modified sequence
atggtggatttccccggttacaacttgagcggcgcggtggcgagctttttattcatactgcttacaatgaaacagtccgaggatttcagggtaatcggacctgcccacccaatcctcgcaggggtgggggaagacgctctactgacatgtcaactccttcctaaacgcaccaccatgcacgttgaggtccgctggtataggagtgaaccgagcacacctgtgtttgtgcacagggatggagtcgaggtgactgagatgcaaatggaggagtaccgggggtgggtagagtggatcgagaacggcattgccaagggaaacgtggccctgaagattcacaacattcaaccttccgataacggccagtattggtgtcactttcaggatggcaactattgcggcgaaacctcactgctgctcaaggtggctgcagtgttgcgggacgacataattgcctcgttaaaggtgaatggacctagccagcctattctggtgagagttggtgaggatatccagctcacatgctacctgagccccaaagcgaatgcccaatctatggaggttcggtgggataggtctcataggtatccagccgtgcatgtgtacatggacggcgaccacgtggccggagagcagatggccgaataccggggcaggacagttctggtgagtgatgccatcgacgaggggcgcctgacactgcagattctgagtgcccggccctccgacgacgggcagtacagatgtctgttcgagaaagatgatgtgtaccaagaggcttctctcgatttaaaagtcgtgtgggtgctgcctcactag

SEQ ID NO: 304681 - DNA, 816 bp, Artificial Sequence
  derived and/or modified sequence
atggtagattttcctggctacaacctgtctggggctgtggcaagcttccttttcatcctcctgactatgaagcagagcgaggacttcagagttatcggacccgcacatcctatcctggccggagtcggggaggatgccttgctcacatgtcagcttctgcctaagcgaacaaccatgcacgtggaggttcgttggtaccgctcggagccttccactccggtgttcgtccatcgcgacggagtcgaggtgaccgaaatgcaaatggaagagtaccggggctgggttgaatggatcgaaaacggaatcgctaaggggaatgtagccctaaagatccacaacatacagccgtccgacaacggccagtattggtgtcattttcaagacggaaactattgcggcgagacaagcctattacttaaagtagccgcagtcttgagagatgacataatagcctccctaaaagtcaatggcccatcacagccaatcttagtgagagtaggtgaggacatacagctgacctgttacctgagtccaaaggccaacgcgcaaagcatggaagtgcgctgggaccgcagtcaccgataccctgcagtgcatgtgtatatggacggcgatcatgtagccggcgaacagatggccgagtataggggccgtacggtcctggtctctgatgcgatcgacgaaggacggctcaccctgcagatcttgtcagcacggccaagcgatgacggccagtacagatgtctgttcgaaaaggacgatgtgtaccaagaggcctcactagacctcaaggttgtctgggtattgccacattag

SEQ ID NO: 304682 - DNA, 816 bp, Artificial Sequence
  derived and/or modified sequence
atggtggactttcccgggtataacctgagcggtgcagtggcttcatttctcttcattctgctcactatgaagcagtcggaggactttagagtgataggcccagctcaccctatcctggcgggcgttggcgaggacgctctgctgacatgccaactgctgcctaagcgcactactatgcacgtggaagttcggtggtacagatctgagccttctactcctgtgttcgttcacagagatggagtggaagtgactgaaatgcagatggaagagtatcggggctgggtcgaatggatcgaaaacgggatcgccaaagggaatgtcgctttgaaaattcacaacattcagccctcggacaacggacagtactggtgccacttccaggatggtaattattgtggggaaacttccttgttgctcaaagtcgccgcggtactcagggacgatatcatagcgagcctgaaagttaacggtcccagtcagcccatacttgtcagggttggggaggacatccagctgacttgctatttaagccccaaagccaacgcccaaagcatggaagtacggtgggacagaagccacagataccctgctgtccacgtctacatggatggcgaccatgtcgcaggcgagcagatggccgagtatcgcggacgaactgtgctggtgtctgacgctattgacgagggccggctgactctgcagattttgtcggcacgcccctcagacgacggacagtaccggtgcctgttcgaaaaggatgacgtgtatcaggaggcctcgctggacttgaaggttgtctgggtgctcccccactag

SEQ ID NO: 304683 - DNA, 816 bp, Artificial Sequence
  derived and/or modified sequence
atggtcgattttcctggatacaatctgtcaggcgcagttgctagtttcctcttcatattgctgacaatgaagcagtcggaagactttcgggtaattgggcctgcccacccaatcttagcgggggtcggcgaagatgctttactgacatgccagctcctgccaaagcggacaacaatgcatgtcgaggtgcgctggtatcgtagtgagccctctacccctgtgtttgtgcatcgggacggcgtggaggtcactgagatgcagatggaagagtaccgtgggtgggtcgagtggattgagaatggaattgccaaaggtaacgtcgccctgaagatccacaacattcagccatctgacaacgggcaatattggtgtcatttccaggatggcaattactgtggagagacttcattgttgctaaaagtcgctgctgtactgcgagatgacatcatcgccagccttaaagtgaacggacccagccaacccatcctcgttcgtgtgggggaagatatccaactgacatgttacctgtcccctaaagctaacgctcaatcgatggaagtgcgctgggacagatctcaccgttacccagcggtccatgtgtacatggacggagatcacgttgccggggaacagatggctgagtatagaggaagaacagtcctggtgagcgatgccattgacgaaggacgccttacgctgcagattctgtccgccagaccatctgacgacggccagtatcggtgcctgttcgagaaagatgacgtgtaccaggaagcgtctcttgacctgaaggtggtgtgggtgttaccacactag

SEQ ID NO: 304684 - DNA, 816 bp, Artificial Sequence
  derived and/or modified sequence
atggtagattttcctggatataacttatcaggggctgtggcctcttttctgttcatcctgctcactatgaagcagtccgaagacttccgtgtgattggcccagcccaccccatcctcgccggggtcggagaggatgctctgctgacatgccaactgctgccgaaaaggaccacgatgcatgtcgaggttaggtggtaccgaagtgagcctagcactccagtgttcgtgcatcgcgatggagtggaggtgaccgaaatgcagatggaggagtaccggggctgggttgagtggattgaaaacggcatcgctaagggaaatgttgcgttgaaaattcataatatacagccctctgataacgggcaatattggtgccattttcaggatggcaactattgcggtgagaccagtttactgttaaaagtcgctgcagtgttaagggacgatatcatagccagcttaaaggtcaacggtccctctcagcccatcctagtgcgcgtgggtgaggatattcaattaacatgctatttatctcctaaggctaatgcccagtccatggaagtgcggtgggaccgctcacaccgctatcctgccgtgcatgtttatatggatggcgaccacgtcgcaggcgaacaaatggcagaataccgcggccggacagttctggtaagtgatgccatcgatgaaggcagactgaccctgcagatattatccgctcggccctccgatgatggacaataccgctgcctgtttgaaaaggacgatgtataccaggaggcaagtcttgatcttaaagtggtatgggttttgcctcattag

SEQ ID NO: 304685 - DNA, 816 bp, Artificial Sequence
  derived and/or modified sequence
atggtagactttcccgggtacaacttaagcggcgctgtggcaagtttcctgttcatcctattgacaatgaagcaaagtgaagacttcagggtcatcgggcctgcccatccaatcttggctggcgtgggtgaagatgcactgctgacctgccagttgttgcctaagcggaccactatgcacgtcgaagtcaggtggtatcggagtgagccctccactccggtcttcgtgcatagagacggcgtggaagtgacggaaatgcagatggaagagtaccgaggctgggtggagtggatcgagaatggtatcgctaaggggaacgtagcattgaagatccataacattcaaccatccgataacgggcagtactggtgccatttccaggacggtaactactgcggtgagacatccctgctgctgaaagttgctgccgtcctcagggacgatattatcgccagtttaaaagttaacgggccaagtcagcccatcctggtgagggttggcgaagacattcagcttacctgttacctctcgccaaaagccaatgctcagtcaatggaggtgagatgggacagatctcatcgctatcccgccgtccatgtatacatggatggagaccatgttgcaggggaacaaatggccgagtatagaggtcgaaccgtgttagtgtcggacgctatagacgagggcaggttgactctgcagattctaagtgcccgaccctctgacgacggacagtaccgctgcctgtttgagaaggacgatgtgtatcaggaggccagcctggacctgaaagtcgtgtgggtcctgcctcactag

SEQ ID NO: 304686 - DNA, 1167 bp, Artificial Sequence
  derived and/or modified sequence
atggtggacttccccggctacaacctgtctggggctgtcgcaagcttcctcttcattctgctgacgatgaagcagtcagaagatttccgcgtgatcggccccgctcaccccatcctggcaggtgtgggggaggatgctcttctaacctgtcagctgctgccgaaaagaacaacaatgcacgtcgaagtccgttggtatcggagtgagccttcaactcccgttttcgtgcaccgggatggcgtggaggtcacagagatgcagatggaagagtatcggggctgggtagaatggatcgagaacggcattgcgaaagggaatgttgctcttaaaatccacaatatccagcccagtgacaatggtcaatactggtgtcatttccaggacgggaattattgtggggagacaagcctgctgcttaaggtggcagaaaaacttctggccgtgcttagttccctcaaagtgaatgggccatcacagcccattctggtacgagttggcgaagacatacagctcacatgttacctgtcgcccaaagctaatgcacagagtatggaagtgaggtgggacagatcccaccgctatccagccgtccacgtttacatggatggagaccatgtcgctggggaacagatggctgagtatcgggggaggaccgtactggtgtctgacgcgatagacgagggccgattgactcttcagattctgtcagccagacccagcgatgatgggcaatacagatgcctcttcgagaaggatgacgtctatcaggaggccagcctcgatttaaaggtggtatcactcggtagcagcccactcataacagtcgagggacaagaggatggtgagatgcaaccaatgtgctcttctgacggttggtttcctcagcctcatgtgccttggcgcgacatggaaggcaaaaccattcccagcagttcccaggctttgactcagggcagccatggtctgttccatgtacaaacactgctcagagttaccaatatcagcgcagtggatgtcacgtgttccatttctatcccctttctcggagaagagaaaattgcaactttcagcctgtccgaatctaggatgacttttctgtggaaaactctgctggtgtggggcttactgctggccgttgccgtgggtctaccacgtaagagatcatag

SEQ ID NO: 304687 - DNA, 816 bp, Artificial Sequence
  derived and/or modified sequence
atggttgattttcctgggtataatcttagtggcgcagtagctagctttctgtttatcctgctaaccatgaagcaaagcgaggacttccgggttataggacccgcacatccaatacttgccggcgtcggagaggatgccctgcttacatgccagctcctccctaaacggaccaccatgcacgtggaagtgagatggtatcgcagtgaaccgtcgactcccgtgttcgtgcaccgcgacggagtcgaggtgactgagatgcaaatggaagagtatcggggatgggtcgaatggatcgagaatggcattgccaaaggtaacgtcgcgctgaagatccacaacatccaaccctcagataatggtcagtactggtgccactttcaggacggaaactactgtggagagacctccctgctgctaaaagtcgcagcagtactgcgcgatgacatcattgctagcctcaaagtgaacggaccatcccagcctatcttggtccgcgtgggagaagatattcagctgacttgctatctgtccccaaaagcaaatgctcagtcaatggaggttagatgggaccgctctcataggtatcctgcagtgcacgtatacatggacggcgatcacgtagccggcgagcagatggccgaatatagaggccggacggttctggttagcgacgctatagacgaaggacggctcaccttgcagatcctctcagctcgcccctctgacgacggccagtatcgctgtctgttcgaaaaggatgacgtctaccaggaagcctccttggatctgaaagtcgtgtgggtacttcctcattag

SEQ ID NO: 304688 - DNA, 1167 bp, Artificial Sequence
  derived and/or modified sequence
atggtggacttccctggctacaacctgagcggggctgtggccagcttcctgttcatcctgctgaccatgaagcagagcgaggacttccgggtcatcggccctgcccaccccatcctggccggcgtgggggaggatgccctgctgacctgccagctgctgcccaagaggaccaccatgcacgtggaggtgcgctggtacagaagtgagcccagcacccctgtgtttgtgcacagagatggagtggaggtgacagagatgcagatggaggagtaccggggctgggtggagtggattgaaaatggcatcgccaagggaaatgtggccctgaagatccacaacatccagcccagcgacaatggccagtactggtgccacttccaggacggcaactactgtggggagaccagcctgctgctgaaggtggccgagaagctgctggccgtgctgagcagcctgaaggtgaatggccccagccagcccatcctggtgcgggtgggggaggacatccagctgacctgctacctgagccccaaggccaatgcccagagcatggaggtgcgctgggacaggagccaccgctacccagctgtgcacgtgtacatggatggagaccacgtggccggggagcagatggccgagtaccggggccgcacagtgctggtgtctgatgccattgatgagggccgcctgaccctgcagatcctgagcgcccggcccagtgatgatggccagtaccgctgcctgtttgagaaggatgatgtgtaccaggaggccagcctggacctgaaggtggtgtccctgggcagcagccccctcatcaccgtggagggccaggaggatggagagatgcagcccatgtgcagcagtgatggctggttcccccagccccacgtgccctggagggacatggagggcaagaccatccccagcagcagccaggccctgacccagggcagccacggcctcttccacgtgcagaccctgctgcgggtgaccaacatctctgctgtggatgtgacctgcagcatcagcatccccttcctgggggaggagaagatcgccaccttcagcctgtctgagagcaggatgaccttcctgtggaagaccctgctggtgtggggcctgctgctggccgtggccgtgggcctgcccaggaagaggagctag

SEQ ID NO: 304689 - DNA, 327 bp, Artificial Sequence
  derived and/or modified sequence
atggtggacttccctggctacaacctgagcggggctgtggccagcttcctgttcatcctgctgaccatgaagcagagcgacttccgggtgattggccctgcccaccccatcctggccggcgtgggagaagatgccctgctgacctgccagctgctgcccaagaggaccaccatgcacgtggaggtgcgctggtacagaagtgagcccagcacccctgtgtttgtgcacagagatggagtggaggtgacagagatgcagatggaggagtaccggggctgggtggagtggattgaaaatggaattgccaagggaaatgtggccctgtag

SEQ ID NO: 304690 - DNA, 816 bp, Artificial Sequence
  derived and/or modified sequence
atggtggacttccctggctacaacctgagcggggctgtggccagcttcctgttcatcctgctgaccatgaagcagagcgaggacttccgggtcatcggccctgcccaccccatcctggccggcgtgggggaggatgccctgctgacctgccagctgctgcccaagaggaccaccatgcacgtggaggtgcgctggtacagaagtgagcccagcacccctgtgtttgtgcacagagatggagtggaggtgacagagatgcagatggaggagtaccggggctgggtggagtggattgaaaatggcatcgccaagggaaatgtggccctgaagatccacaacatccagcccagcgacaatggccagtactggtgccacttccaggacggcaactactgtggggagaccagcctgctgctgaaggtggccgctgtgctgagagatgacatcatcgccagcctgaaggtgaatggccccagccagcccatcctggtgcgggtgggggaggacatccagctgacctgctacctgagccccaaggccaatgcccagagcatggaggtgcgctgggacaggagccaccgctacccagctgtgcacgtgtacatggatggagaccacgtggccggggagcagatggccgagtaccggggccgcacagtgctggtgtctgatgccattgatgagggccgcctgaccctgcagatcctgagcgcccggcccagtgatgatggccagtaccgctgcctgtttgagaaggatgatgtgtaccaggaggccagcctggacctgaaggtggtgtgggtgctgccccactag

SEQ ID NO: 304691 - DNA, 1167 bp, Artificial Sequence
  derived and/or modified sequence
atggtggacttccccggctacaacctgagcggcgccgtggccagctttttatttatacttctgacgatgaagcaatccgaggatttccgagtgatcgggcccgcccaccctattcttgcaggggtgggagaggacgcgctgttgacttgccagctactgcctaagaggactaccatgcacgtcgaggtcagatggtaccgctccgaacccagcacaccggttttcgtgcacagggatggcgtcgaagtgaccgagatgcagatggaagagtatagaggctgggttgagtggatcgaaaatggcatagccaagggtaatgttgcactcaaaattcacaacattcaaccctcagacaacggacagtactggtgtcattttcaggatgggaattattgtggcgaaactagcttactgctaaaagtcgccgagaagctactggcggtcctgagcagcttgaaggtgaacggcccttcccaaccaatcttagtacgagtgggagaagatattcagctgacctgttacttatcgcctaaggctaacgcgcagagtatggaggttcggtgggatcggagccacagataccccgcagtgcacgtctacatggatggcgaccatgtagccggagagcagatggcggaatacagaggcaggaccgtgctggtcagtgacgccatcgacgagggaagactgaccttgcagatcctgagcgctcgtcccagcgacgacggtcaatacagatgtctgttcgagaaggatgacgtgtatcaggaagctagtctagacctcaaggtcgtgtctctggggtcttctccacttatcaccgtggagggtcaagaggatggagaaatgcagccaatgtgcagcagtgatggttggtttcctcagccacatgtcccgtggagagacatggaaggaaagaccattccctcaagtagccaggctttaacacaagggagccacggcctttttcacgtacaaacactgctgcgcgtcacaaacatctcagcagtcgatgtgacatgcagcatctccatcccatttctgggagaggagaagatcgcaacgttcagtctctccgagtcccgcatgacattcctatggaagactctgctggtatggggattactgctggccgttgctgtggggctgcccaggaagcgatcttag

SEQ ID NO: 304692 - DNA, 327 bp, Artificial Sequence
  derived and/or modified sequence
atggtggacttccccggctacaacctgagcggcgccgtggccagctttctgttcatactgctgaccatgaagcagtcagactttagagtgatcgggccggcacacccaattctggctggtgttggcgaagacgctctgcttacgtgtcagttattgcccaagcgcaccacaatgcacgtggaggtaaggtggtatagatccgaaccgtccacgcctgtcttcgtgcaccgggacggagtggaggtaaccgaaatgcagatggaggagtatcgcggctgggtagaatggattgagaacgggatcgctaaggggaacgtggctctttag

SEQ ID NO: 304693 - DNA, 327 bp, Artificial Sequence
  derived and/or modified sequence
atggtggacttccccggctacaacctgagcggcgccgtggccagcttcttgttcatcctgcttactatgaagcaaagcgacttccgcgttattggtccagcccatccaatccttgctggtgtcggtgaggacgctctgctgacttgccagttattgccgaaacgtacaacaatgcacgttgaagtccggtggtacaggtctgagccctcgacgcccgtgttcgtgcacagagacggcgtggaggtgaccgaaatgcaaatggaagaataccgcgggtgggtcgagtggatcgaaaatgggattgctaaaggtaacgtggccctgtag

SEQ ID NO: 304694 - DNA, 327 bp, Artificial Sequence
  derived and/or modified sequence
atggtggacttccccggctacaacctgagcggcgccgtggccagcttcctcttcattttgctgacaatgaagcagtccgattttcgcgtaataggaccagctcatccaatactagctggtgtcggtgaggatgccctgctcacctgccaactgctccctaagcgcaccactatgcacgtggaggtgaggtggtacaggtctgagcctagcactcccgtattcgtccaccgcgacggcgtggaagtgactgaaatgcagatggaagagtataggggctgggttgagtggatcgaaaacggtatcgcaaaagggaacgtcgcattatag

SEQ ID NO: 304695 - DNA, 816 bp, Artificial Sequence
  derived and/or modified sequence
atggtggacttccccggctacaacctgagcggcgccgtggccagctttctctttattttgctgacaatgaaacagtctgaagatttccgcgttatcggtcctgcccatcctatcctggccggcgtgggggaagacgccctgctcacatgccaactgctgcccaaacggactactatgcacgtggaggtgcggtggtataggtccgagccctcaacccctgtttttgttcaccgcgacggagtggaagtgaccgaaatgcaaatggaagagtatcgcggttgggtggagtggattgaaaatggaatcgcaaaggggaacgtggctctgaagatacacaatatccagcccagcgataacggtcagtactggtgccactttcaggacggtaactattgtggagagacaagccttctgctgaaagtggcagcagttttgcgagacgacattatcgcaagtctcaaggtcaatggaccaagccagccaatactggtgcgagtcggagaggacattcaattgacatgctacctgagccccaaagccaatgctcagtctatggaggtgaggtgggaccgaagtcacaggtatcccgctgtgcacgtgtacatggatggagaccatgtcgcaggtgagcagatggccgagtataggggtaggacagtgcttgtctctgacgctattgatgagggccgacttacacttcagatcctttcagccagaccaagtgacgacggtcagtatagatgcttattcgaaaaggacgacgtgtatcaggaagctagtttagacctgaaggtcgtgtgggtgctgccacattag

SEQ ID NO: 304696 - DNA, 327 bp, Artificial Sequence
  derived and/or modified sequence
atggtggacttccccggctacaacctgagcggcgccgtggccagcttcctatttatactcctaactatgaaacagtcagacttccgagtcattggtcccgctcatccaatcttagctggagtcggcgaagatgctctgctgacatgccagttgctcccaaaacgcacaaccatgcacgttgaagtgagatggtaccgtagcgaacccagtacccccgtttttgtgcatagagatggggtggaagttacagagatgcagatggaggagtaccgcgggtgggtagagtggatcgagaacggcatcgctaagggcaacgttgctctgtag

SEQ ID NO: 304697 - DNA, 327 bp, Artificial Sequence
  derived and/or modified sequence
atggtggacttccccggctacaacctgagcggcgccgtggccagctttctcttcattttgttgactatgaagcaaagtgactttcgggtgatcggtcctgctcatcccatactggcaggggttggcgaagacgccttgttaacatgccaattgcttcctaagcgcaccaccatgcacgtggaggttaggtggtaccgctccgaaccatccacccccgtgtttgtgcaccgggatggagtagaagtaaccgagatgcagatggaggaatataggggttgggtcgagtggattgagaacggaatcgcgaagggcaacgtcgccctatag

SEQ ID NO: 304698 - DNA, 327 bp, Artificial Sequence
  derived and/or modified sequence
atggtggacttccccggctacaacctgagcggcgccgtggccagcttcctatttattctgttaactatgaagcagagcgactttcgggtcatcggaccagcccatccgattctggccggtgtgggcgaggacgcactcctcacatgccagctgttacctaagcggacgaccatgcatgtagaggtgagatggtatcgctctgagccaagtacacccgtatttgtacatcgtgacggagtggaggtaacagaaatgcagatggaggaataccgggggtgggtggaatggattgagaacggcatagcgaagggtaatgtagctctatag

SEQ ID NO: 304699 - DNA, 327 bp, Artificial Sequence
  derived and/or modified sequence
atggtggacttccccggctacaacctgagcggcgccgtggccagctttctgtttatcctgttgaccatgaaacagagtgattttagagttatcggcccagcacaccctatcctggccggcgttggtgaggacgccctcctcacatgtcagctgctaccaaagagaaccaccatgcacgtggaagtgcgatggtatcggtccgagccttcaaccccagtgtttgtgcatcgagacggcgtcgaagtgaccgagatgcagatggaggagtataggggttgggtcgagtggatcgaaaacggcatcgctaaaggcaacgtggccctgtag

SEQ ID NO: 304700 - DNA, 1167 bp, Artificial Sequence
  derived and/or modified sequence
atggtggacttccccggctacaacctgagcggcgccgtggccagctttcttttcattctgctcacaatgaagcagtccgaggactttcgcgttatcggcccagcccacccgattttagcaggagtcggagaggatgccttgctgacgtgtcagctgctgcctaagcggaccacgatgcatgtagaagtacgatggtaccgttctgaaccaagcacgcccgtttttgtccaccgagacggggtggaggtgaccgaaatgcaaatggaagaatacaggggatgggtcgaatggattgaaaatggaattgccaaaggtaatgtggccttgaagatccacaatattcaaccaagcgataacggtcagtattggtgccattttcaggacgggaattactgtggggaaacatctctacttctgaaggtggctgagaagctgcttgccgtcctgtcttctttgaaagtgaatgggccttcccagcctatcctcgtaagggttggcgaagacattcagttaacttgttatctcagtcccaaggccaatgcacaatcaatggaagtgcggtgggatcgctcacaccgctatccagctgttcatgtttacatggatggtgatcacgtggccggcgagcaaatggcagagtacagaggcagaaccgttctggtcagcgatgccattgacgaaggtaggctgaccttacagattctgtctgcgaggccttcagacgatggccagtacagatgtctttttgagaaggatgacgtgtaccaggaagcatctttggacttgaaggtagtgagcctagggagctctccactgattaccgttgagggccaggaggacggcgaaatgcagccgatgtgcagctccgatggctggttcccacagccacacgtcccatggcgcgatatggaagggaaaacaatcccaagcagttctcaggcccttactcagggctcacatgggttattccacgtccaaactctcttgagggttactaatatctctgccgtggatgtgacttgttccatcagtatacccttcctcggcgaggagaagatagctaccttttctctatccgaaagtcgcatgacatttctctggaagaccttgctggtttgggggctgctgctcgctgtcgccgtaggactcccccggaaacggagctag

SEQ ID NO: 304701 - DNA, 1167 bp, Artificial Sequence
  derived and/or modified sequence
atggtggacttccccggctacaacctgagcggcgccgtggccagcttcctctttattcttctgactatgaagcaatccgaagatttccgggtcataggacccgctcaccctatcctggcaggagttggcgaagacgcactgctcacttgccaattgttacccaagcgcacgactatgcacgtggaggtccggtggtatcggtcggagcccagcacccctgtgttcgtgcacagggatggcgtggaggtaacggaaatgcagatggaagaataccgcggttgggtggaatggattgagaacggcatcgctaagggcaatgtggccctgaagatccataacatccagccctctgacaacggccagtattggtgccatttccaggatggcaattattgcggcgagaccagtctgttacttaaggttgcagaaaaattgctcgcagtgctgtccagtttgaaagtgaacgggccctctcaacccatcttagtcagagtcggggaagatattcagctgacttgctacctgagtcccaaagcaaacgcacagtcgatggaggtgcggtgggacaggagccaccggtaccctgctgtccacgtttacatggacggcgatcatgtggctggcgaacagatggccgagtaccggggcaggactgtgctggtctcggacgccattgatgaaggtcggctcacacttcagatcctttctgcgcgaccttccgacgacggccagtatcgctgcctctttgagaaagacgacgtgtaccaggaggccagcctggacctcaaagtggtgtccctgggcagtagtcctctgatcacagtagagggccaggaagatggcgaaatgcagccaatgtgcagcagcgatggatggttcccgcagcctcatgtcccctggagggacatggaagggaagacaattccgtcatcttcgcaggcccttacacaaggctcccatggcctgtttcatgttcagacactcctgagggtgaccaatattagcgctgtcgacgttacatgcagcattagcatcccgtttctgggcgaggaaaagatcgcaacattctcgttgagtgagagccggatgacctttttatggaaaaccctgctcgtgtggggattgctattggcagtagccgtcggcctccccaggaaaagatcatag

SEQ ID NO: 304702 - DNA, 1167 bp, Artificial Sequence
  derived and/or modified sequence
atggtggacttccccggctacaacctgagcggcgccgtggccagcttcctgttcattctcctgacaatgaaacaatccgaagattttagggtgatcgggcccgctcacccaatactagctggcgttggcgaggacgcacttttgacctgccaattgctcccaaaacgaacgaccatgcacgtggaggttcgttggtatagaagtgaacccagtacgcccgtcttcgtccacagagacggcgtggaggtgactgagatgcaaatggaagaatatcggggctgggtggagtggatcgaaaatggaatagcgaaagggaacgttgccctcaaaatccacaacattcagccgtctgacaatggccagtattggtgtcatttccaggatggcaattattgtggcgagacaagtctcttgctcaaagtggctgagaagctgctggctgtattgtctagcctcaaagtaaatggcccttcccaacccattctcgtgagggtcggcgaggacatccagttgacttgttacctatcacccaaggcaaacgcccagtccatggaagtgcgctgggacagatcacatcgataccccgccgtgcacgtctatatggacggcgatcacgtcgctggggagcagatggctgagtatcgtggcaggactgttctggtgtctgacgcgattgacgagggccgcttaacattgcagatcctttcggctaggcctagcgacgatgggcagtacagatgtctgtttgagaaagacgatgtgtaccaggaagcgtcactcgatctgaaggtggtttctttggggtcctctcctcttatcacggtggaggggcaggaggatggcgagatgcagcctatgtgtagctcagacggctggttcccacagccccacgttccttggcgtgatatggaagggaagaccatcccctccagctctcaggctctgacccagggctcacatggactgttccatgtgcagaccctcctgagagttaccaatatatccgccgtggacgtaacatgctcaatttcaattccctttctgggcgaggagaaaatcgctaccttcagcctttctgagagcaggatgaccttcttatggaaaacactgctcgtttggggactcctcctggcagtggccgttggcttacccagaaagaggtcttag

SEQ ID NO: 304703 - DNA, 816 bp, Artificial Sequence
  derived and/or modified sequence
atggtggacttccccggctacaacctgagcggcgccgtggccagctttctgttcattctgctgaccatgaagcagtcggaagacttcagggtgattggcccagcccatcctatcctggccggcgtgggcgaagacgcactactgacatgccagctccttcccaaacgtacaactatgcatgtggaggtgagatggtatcgcagtgagccctctacacctgttttcgtgcatcgggatggggtggaggttactgaaatgcagatggaggagtatcggggctgggtggagtggatcgagaacggcattgctaaaggaaacgttgcgctaaagattcataacattcagccctccgataacggccagtactggtgccatttccaagatggcaattactgcggcgaaaccagtctgcttctgaaagtggcagctgtgctaagagatgatatcattgctagcctcaaagtgaacggaccttcccagcccatcctcgtgcgggtgggggaggatatccaactgacctgttatctttccccgaaggcaaatgcacagtcgatggaagttaggtgggataggtctcatagatatcctgccgtccacgtttacatggacggtgaccatgttgccggggaacaaatggcagaatatcgaggccgaacagtgctggtatcagacgccatagacgaagggaggctcacactccagattctgagcgcgagacccagcgatgacggtcaatataggtgcctgtttgaaaaggacgatgtataccaagaagcttcgctagatctcaaggttgtgtgggtgcttcctcactag

SEQ ID NO: 304704 - DNA, 816 bp, Artificial Sequence
  derived and/or modified sequence
atggtggacttccccggctacaacctgagcggcgccgtggccagctttctgtttattctgctaacgatgaagcagtccgaagatttccgggttattggtcctgcgcacccaattcttgcaggcgtgggagaagacgccttactgacgtgtcagctgttgcctaaacgaaccaccatgcacgtagaggttcgctggtatcgaagtgagcccagtactcctgtgttcgttcatcgagacggcgtggaagtgaccgaaatgcagatggaggaatacaggggctgggtggaatggattgagaatggcatcgctaaagggaatgttgctcttaaaattcacaacattcagcctagcgacaatggtcagtattggtgtcactttcaggatggcaactactgcggcgaaacatctctgttgctcaaggtcgccgctgtcctgagagacgatatcatcgcctccctgaaggttaatgggcccagtcagcccatactggtcagggtcggagaagatatacagcttacatgctatttgagccccaaggccaacgctcagagtatggaagtcagatgggacaggtcccatcgctatccagctgtgcacgtgtacatggatggggatcatgtagcgggggaacagatggcagagtacagagggcgtaccgtcctcgtatccgacgctatcgatgaaggtcgcctgacactgcagatcctgtcagctagaccaagcgacgatgggcagtaccggtgcctattcgaaaaagacgacgtgtaccaagaggcttcattagatttaaaagtggtctgggtgctgcctcattag

SEQ ID NO: 304705 - DNA, 816 bp, Artificial Sequence
  derived and/or modified sequence
atggtggacttccccggctacaacctgagcggcgccgtggccagctttttgttcatccttctgaccatgaaacagtcggaagattttcgcgtgatcggccctgctcacccgattcttgctggtgtcggagaggatgctctgcttacttgccagctcctgcccaaacggacaactatgcatgttgaagtgcggtggtatcggtctgaacctagcacacctgtcttcgtgcacagggacggtgtggaggttactgagatgcaaatggaggagtaccggggatgggtggaatggatcgagaacggaatcgccaaagggaatgtggctttgaaaatccataacatccaaccctctgataacggccaatactggtgtcatttccaagacggcaattattgcggcgagacctcccttcttctcaaagtcgctgctgttctgcgggacgacatcatcgctagcctgaaggtgaacggcccgtcacagcccattctcgttcgagtcggggaggatatccagctgacatgctatctttcccctaaggcaaatgcccagtccatggaggtgagatgggaccggtcccatagatatccagccgtacatgtctacatggacggcgaccacgtggccggtgagcaaatggcggaataccgggggagaactgtcctagtgagcgacgctatcgacgagggaagacttacgctgcaaatcttatcggcaagacccagtgatgacggacagtatagatgtttgtttgagaaagatgacgtgtatcaagaggcatcgctggatttgaaagtcgtgtgggtactgccccattag

SEQ ID NO: 304706 - DNA, 816 bp, Artificial Sequence
  derived and/or modified sequence
atggtggacttccccggctacaacctgagcggcgccgtggccagctttttgttcattctcctgactatgaagcagagcgaagactttagggtgattgggcccgcacacccaatactcgctggcgtaggcgaggacgcgctgctgacatgtcaactcttgcccaagcgcaccacaatgcacgtggaagtgagatggtacaggtccgagccttctacaccagttttcgtgcaccgggacggggttgaagtaaccgaaatgcaaatggaagagtatagaggttgggtagagtggatagaaaacggcattgccaagggcaatgtcgcactgaaaattcacaacatccagccatcggataacgggcagtactggtgccatttccaagacggaaattattgcggtgagaccagtctcctgctgaaggtggcagccgtcctgcgcgacgatattatcgccagtctcaaagtgaacgggccctctcagcccatactggtacgggtcggtgaggacatccagctgacctgctacttgtctccaaaggctaatgcccagtctatggaggtccgatgggaccgctcccatcggtatcccgcggtccatgtatatatggacggggaccacgtagccggcgagcaaatggcggagtacagaggccggacagtgctggtttctgacgcaatagatgaggggcgcctcaccctgcagatcctctcggcaaggccctccgacgatggtcagtataggtgcctgttcgaaaaagatgatgtttaccaggaggcctcgctggaccttaaggttgtgtgggtcttaccgcattag

SEQ ID NO: 304707 - DNA, 816 bp, Artificial Sequence
  derived and/or modified sequence
atggtggacttccccggctacaacctgagcggcgccgtggccagctttctctttatattacttaccatgaagcagagcgaggacttccgcgtgattgggcctgctcacccgattcttgcaggagtaggggaagacgcgttgctcacttgccagctactgccgaagcgcaccactatgcacgttgaagtacgttggtataggagcgagccttccactccagtgttcgtacatcgcgatggcgtggaagtcacagagatgcagatggaggaatatcgtggatgggtggaatggatcgagaatggcattgcaaaaggtaacgtggctctgaaaattcacaacatacaacctagcgataatggccagtattggtgtcactttcaggacgggaactactgtggcgaaacctcattgcttctcaaggtggcggcggtgctgcgggacgacatcatcgccagcctgaaggtaaacgggccaagtcagcctatactggtccgggttggagaggacattcagctcacatgctacctttcccctaaggctaacgcacagtcaatggaggtcaggtgggataggagccacagataccccgcagtgcacgtctacatggatggcgatcacgtggccggagaacaaatggccgagtatagaggcagaaccgtcttagtctcagacgcaattgatgaaggcaggctcacattgcaaattctatccgccagaccatcagatgacggtcaatatagatgcttgttcgagaaggacgacgtgtatcaggaggcgtctttagacctcaaagtggtatgggtgctgccccactag

SEQ ID NO: 304708 - DNA, 816 bp, Artificial Sequence
  derived and/or modified sequence
atggtggacttccccggctacaacctgagcggcgccgtggccagctttctgtttattctgcttaccatgaagcaaagcgaagactttagagtgattggccccgcacaccctattctggcaggggttggggaggacgctctgctgacctgtcagcttttacccaaacgcacgactatgcatgtggaggtccgatggtacagaagtgaaccttcaaccccagtgtttgtccatcgagacggggtggaagtcaccgaaatgcaaatggaggagtacagaggctgggtggagtggatagaaaatggaatagcaaagggcaacgtggcactgaaaatccacaatattcagccctcagataatggacagtactggtgtcattttcaagatggaaactactgtggggagacaagccttctgctcaaggtggccgccgttcttagagatgatatcatcgcttccctcaaggtgaacgggccctcccagccgatcctggtacgtgtcggcgaggatatccaattgacctgttacctgtcccccaaggccaacgctcagtcgatggaggtgcgatgggaccggagtcatagatatcccgccgtgcacgtgtatatggacggtgatcacgttgcaggtgagcaaatggccgagtacagaggccgcaccgtgctggtgtctgacgccattgacgagggaaggttaacactgcagattctcagcgctagacctagcgatgacgggcagtataggtgtctcttcgaaaaagacgacgtttatcaggaggcttctcttgatttgaaggttgtgtgggtcctgccccactag

SEQ ID NO: 304709 - DNA, 1167 bp, Artificial Sequence
  derived and/or modified sequence
atggtggacttccccggctacaacctgagcggcgccgtggccagcttcctgtttattctccttacgatgaagcagtctgaagactttcgagtgatcggccctgcacaccctatcctggccggcgtcggggaggatgcactccttacttgccagctcctgcccaagcgcacgaccatgcatgtagaggtgaggtggtatcgctcagagcctagcactcctgtgtttgtccacagggacggagtagaagtaactgaaatgcagatggaggagtatagaggatgggtcgagtggatcgagaacgggattgctaagggaaacgtagctttaaaaatccataatattcaacctagtgataacggacaatactggtgtcactttcaagacgggaactattgtggcgagacatcgctcctccttaaagtcgcagagaagcttctcgccgtgctcagctcactgaaagtgaatggaccgtcccagcctatcttggttcgggttggagaggatattcagctcacttgctacctgagtccaaaggcaaatgctcagagcatggaagtgcgatgggacaggagtcaccgatatcctgccgtgcatgtttatatggacggtgatcacgtggccggggagcagatggcggaataccgaggccgcacagttctggtttccgacgctatcgatgaggggaggcttacccttcagattttgtcggcacgaccctctgatgatgggcagtaccggtgtctctttgaaaaagacgatgtgtaccaggaggcatccctggatctgaaggtggtgtcactggggagtagtccactgataacagtagaggggcaggaggacggtgagatgcagccaatgtgtagctccgacggttggtttcctcaacctcacgtcccgtggagagatatggagggcaagacaatccccagcagtagtcaggcccttacacaagggtcccatggccttttccatgttcagacactcctccgcgtgaccaacatttcggccgtggacgtgacgtgttcaattagcattccattcctcggagaagagaaaatcgcaactttctcactgtccgagagccgaatgacgttcctgtggaagaccctactcgtatggggtttacttcttgccgtggccgtaggattgcctaggaagaggtcttag

SEQ ID NO: 304710 - DNA, 816 bp, Artificial Sequence
  derived and/or modified sequence
atggtggacttccccggctacaacctgagcggcgccgtggccagcttcctgtttatccttttaacaatgaagcagtcagaagatttccgggtgatagggcccgcccacccgattttggccggagttggagaggatgcactactcacttgtcagctcctcccaaagcgcacgacaatgcacgtagaggtcaggtggtataggtcagaaccttcaacacctgtgttcgtacatcgggacggggtcgaggtcactgagatgcaaatggaggaatatcgcggatgggtggagtggattgaaaacggtattgccaagggaaatgtggctctcaagattcacaatatccaaccaagcgacaatggtcagtactggtgccacttccaggatggaaattactgtggggagacttcactcctgctcaaggtcgctgccgttttacgggacgatatcatcgcctcactgaaggttaacgggccctctcagccaattcttgtgcgcgtgggcgaagatatccagttgacatgctatctgagccccaaggccaatgcccagtccatggaagtgaggtgggacaggagccatcgctaccccgcggtgcatgtgtatatggacggtgatcacgtagccggagagcagatggcagagtaccgcggccgcacagtcctcgtgagcgacgctattgacgagggccgcctgactttgcagatcctcagtgcaaggccatccgatgacggacagtacagatgcttatttgaaaaagatgacgtataccaagaagctagcttggatttgaaggtagtgtgggttctgccacattag

SEQ ID NO: 304711 - DNA, 1167 bp, Artificial Sequence
  derived and/or modified sequence
atggtcgacttcccaggctacaatctgagtggagctgtggcgtccttcttgtttattctattgactatgaagcaaagcgaagatttcagggtcatcggccctgcccatcccattctggccggtgtgggggaggacgccttactgacctgccagctcctgcccaaacggaccactatgcacgttgaggtgagatggtaccggtctgaacccagcactcctgtctttgtccatcgcgacggggtagaagttaccgagatgcagatggaagaataccggggttgggtcgagtggattgagaatgggattgctaaaggaaatgtagcgctgaaaattcataacatacagccatccgataacggacagtactggtgtcactttcaggatgggaattattgtggagaaactagccttctgctcaaagtggctgaaaagttgctggcggtgctgtcatctctgaaagtaaatggcccttcacagcctattctggtgagggtgggagaagacatccagctgacatgttacctcagcccaaaagcaaacgcccagtctatggaagtgaggtgggatcggtcccaccggtaccccgcagtacacgtttatatggacggcgatcacgtggctggcgagcaaatggcagagtatcgaggcagaaccgtccttgtgagcgacgctatcgatgaggggcgacttacattacagatattaagcgccaggccctcggatgacggccagtaccgttgcctgtttgaaaaagatgatgtgtaccaggaggctagtctggacctgaaagtagtgtctttgggctccagccccctgatcaccgtggagggccaggaggatggcgaaatgcagccaatgtgtagttctgatggttggtttccccagccccatgttccctggcgggacatggagggaaagaccatcccctcaagcagccaggctctcacacaagggtcacacgggctctttcacgtgcagaccctgttacgggtgaccaatatctctgccgtcgacgtcacctgtagcatttctattccctttttgggagaggagaagattgccactttctcactgtcagaaagccgcatgacgttcctgtggaaaactttactggtgtggggactgctgctcgctgtcgccgtgggcttgccaaggaagcgttcttag

SEQ ID NO: 304712 - DNA, 327 bp, Artificial Sequence
  derived and/or modified sequence
atggtggattttccagggtacaatctgtccggtgccgtggcttcgtttctttttatcttgctgacaatgaaacagtctgatttcagggtcattggacctgcacaccccattctagccggtgtcggcgaggacgctctcctcacctgtcaacttctgcccaaacggacaaccatgcacgtggaagtccggtggtaccgctccgagccatctacccctgtttttgtgcaccgcgatggcgtcgaagtcactgaaatgcaaatggaggaatataggggctgggtggagtggatcgagaatggtatagccaaaggtaacgtggccctgtag

SEQ ID NO: 304713 - DNA, 327 bp, Artificial Sequence
  derived and/or modified sequence
atggttgatttccccggatacaatctcagcggcgctgttgcaagtttcctcttcatcctactgacaatgaaacagagcgacttccgggtgattggacccgcacaccctatcttagcgggagtgggggaagatgccttattgacttgccagcttcttcccaagcggaccactatgcacgtggaggtgcgctggtatcggtctgaaccctctactcctgtcttcgtgcaccgggacggcgtggaagtgaccgaaatgcagatggaggaatacaggggatgggttgaatggatcgaaaatggcattgcgaaaggtaacgtcgcgttatag

SEQ ID NO: 304714 - DNA, 327 bp, Artificial Sequence
  derived and/or modified sequence
atggtggatttcccgggatataacctatccggagccgtggccagttttctctttatcctcctgacaatgaaacaatcagatttcagggtcataggacctgcccaccctatccttgccggagtcggcgaggacgcgcttttgacctgccagttgctgcccaaacgaacgacgatgcatgttgaagtgcggtggtaccgatccgaacctagtactccagtgttcgtgcacagagacggtgtggaggtgactgaaatgcagatggaggaataccgcggatgggtggaatggattgagaatggcatcgctaaaggcaatgtggcactatag

SEQ ID NO: 304715 - DNA, 816 bp, Artificial Sequence
  derived and/or modified sequence
atggtcgattttccgggatacaacctcagtggcgcagtggcctctttccttttcatcctgttaactatgaaacagagtgaagacttccgagtgattgggccagcccatcccattctggccggtgtgggcgaggacgctcttctgacctgccagctgctccccaagcgcactactatgcacgttgaggtgcgctggtacaggagcgagcccagtacaccagtctttgttcaccgggacggtgtggaggttacagagatgcagatggaggagtatcggggatgggtggaatggatcgagaacgggattgctaagggcaatgtagctctgaagatccacaatattcagccctctgacaacgggcagtactggtgtcacttccaagacggcaattattgtggggagacatccctcctgttgaaggtagcagctgtgctgcgagacgacatcattgcctctctcaaagtgaatggtccaagtcagcccatcctcgtgagggtgggggaggacatccaactcacatgctacttgtctcctaaggctaatgcccagtccatggaggtacggtgggacagaagccaccgatatcctgcggtgcacgtatacatggatggtgatcatgttgcaggggagcagatggctgagtaccgcggaaggactgtactggtcagtgatgccatcgatgaaggcagactaacacttcagatactctctgccaggccatccgatgacgggcagtacaggtgcttatttgaaaaagacgatgtttatcaggaagcaagcctggatctgaaagtggtgtgggtgctcccccattag

SEQ ID NO: 304716 - DNA, 327 bp, Artificial Sequence
  derived and/or modified sequence
atggtagactttcccggatacaatctctcaggtgccgttgccagttttctcttcatcttgctaactatgaaacagtcagacttcagggtcataggtccggcacatccaatcctggctggggtcggtgaagacgccctcctgacctgccaactgctgcctaaaaggaccactatgcacgtcgaagtgcgctggtataggtcggaaccctccacacccgtcttcgttcacagagatggcgtggaagttaccgagatgcagatggaagaatacagaggttgggttgaatggattgagaatggaatcgccaagggtaacgtggccctttag

SEQ ID NO: 304717 - DNA, 327 bp, Artificial Sequence
  derived and/or modified sequence
atggttgactttcctggctacaatctgtcaggggcagtggcaagcttcctctttattttgcttaccatgaaacagagtgattttcgggtcatagggcctgctcaccctattctcgccggagtcggagaggatgctctgctgacatgtcagcttctgccaaagcgaactaccatgcacgttgaagtgaggtggtataggtcagagccgtctacccccgtgtttgttcacagagatggtgtagaggtgaccgagatgcagatggaggagtatcgcggttgggtggaatggatcgagaacggtatcgcgaaggggaacgtggcgctgtag

SEQ ID NO: 304718 - DNA, 327 bp, Artificial Sequence
  derived and/or modified sequence
atggtggactttcctgggtacaacctatcaggggcagtggcctcttttttgttcatccttttgacaatgaagcagtctgatttcagagttattggacccgcacaccccatcttagcaggagtcggagaggatgcacttttgacatgccagctcctgcccaagcgcacaacaatgcacgtggaagtgcgttggtatagaagtgagccctctacacctgtgttcgtgcatcgcgatggtgtggaggttacagaaatgcagatggaagagtacaggggttgggtggaatggatagaaaacggaatcgcaaagggaaatgtagctctgtag

SEQ ID NO: 304719 - DNA, 327 bp, Artificial Sequence
  derived and/or modified sequence
atggtagacttcccaggatacaacctgagtggcgcagtagcttctttcctgtttatactgctgacaatgaagcaatctgacttccgtgtgatcggacccgcacaccccatcctcgcaggggtcggggaagatgctctgcttacatgccagttgctgccaaaacgcactacaatgcatgtggaggtgagatggtataggtcagagccatcgacgcctgttttcgtccatagggacggcgtggaggttactgagatgcaaatggaagaataccggggttgggtcgagtggattgaaaatgggatcgccaaaggtaatgtggccctatag

SEQ ID NO: 304720 - DNA, 1167 bp, Artificial Sequence
  derived and/or modified sequence
atggtggatttccccggatacaacctcagtggcgctgtggcatccttcctattcattctgctgacaatgaaacagagcgaggatttccgtgtaataggccctgcacatcctatcttagcaggtgtgggggaggacgccctgttaacctgccagcttcttcctaagcgcaccacaatgcacgtggaggttcggtggtaccggagcgaaccatcgactccagtgttcgtccaccgggacggcgtcgaagtgaccgagatgcaaatggaagagtatcgaggttgggtagagtggattgagaatggtatcgcaaaaggaaatgtggccctgaagattcacaatatccagccttccgataatggacagtactggtgtcatttccaggacggcaattattgtggggagacatccctgctgcttaaagtggcagaaaaattacttgccgtgctgtccagtctgaaagtgaacggcccttcgcagccaatccttgtgagggtcggtgaagacattcaattgacgtgttatctcagtcctaaagcgaacgcccagtcaatggaggtacgatgggaccggtcccataggtatcccgcagtgcacgtgtacatggatggggaccatgttgccggagaacagatggcagaataccggggtcgtactgtcttggtgtccgacgccattgatgaaggccgacttactttgcaaatcctgtcggctagaccatccgatgacggtcagtatcggtgcctgttcgagaaagacgacgtatatcaagaggccagcctggacctcaaagtagtgagtctcggatcaagtcccctgattactgtggaaggccaggaagatggggagatgcagcccatgtgctcaagcgatggatggttcccgcagcctcacgtcccttggcgagacatggagggtaagacaattcctagttcctcccaggctcttacccagggatctcacggattgtttcatgtgcagacgctgctgagagtgactaatattagcgccgtagatgtcacctgcagcatcagcatcccgttcctaggcgaagagaagatcgccaccttcagtctatcggagagccgcatgacgttcctttggaagaccctcctggtgtggggcctcttgttagccgtagccgtgggccttcctcggaagaggagttag

SEQ ID NO: 304721 - DNA, 1167 bp, Artificial Sequence
  derived and/or modified sequence
atggtagactttcctggatataatctctccggagccgtcgcgtcctttctgtttatcctcctgacaatgaagcagagcgaagactttcgcgtcattggcccagcacatcctattttggcaggcgtaggcgaagacgccctgctgacatgtcagcttctgccaaaaaggaccactatgcacgttgaggtcaggtggtatagaagcgagccctccacccctgtgtttgtgcacagggatggggtagaggtcaccgaaatgcagatggaggaataccggggatgggtagagtggattgaaaacgggattgccaagggaaatgttgcgctgaagattcacaacattcagccatcagacaacggccagtactggtgccattttcaggacgggaattattgcggcgaaacctctctgctgcttaaagtagcagagaaattactcgccgtcctgtcttcactaaaggtgaacggcccttcccaaccaatcctcgtacgagttggagaagacatccagctgacatgctacctgtctccaaaggctaacgcccaaagcatggaagtgcgatgggaccgctcacatcgttatcccgcagtgcatgtgtatatggacggtgaccacgtggccggagagcagatggctgagtataggggcaggaccgtgctggtaagcgacgccatcgatgaagggagacttaccctgcaaattcttagcgcgaggccaagcgatgatggtcagtatcggtgtctgtttgaaaaggacgatgtgtaccaggaggcttcactagatctgaaggtggtatccctgggttcttcacctctgattacagtggaaggccaggaagatggcgaaatgcagcctatgtgctcgagcgatggttggttccctcaaccacatgttccttggagggatatggaggggaaaaccatacctagctcatctcaggcattgacccaaggcagccacggactgttccacgtccagacactcctgcgcgtgacaaacatctcagccgtggacgtgacatgtagtatctctattccatttttaggggaagaaaaaatcgcaacattctccctgtctgagtccaggatgacttttttgtggaagacactgttggtgtggggactgctcctcgcagtggctgtcggtctgcctaggaaaagaagctag

SEQ ID NO: 304722 - DNA, 1167 bp, Artificial Sequence
  derived and/or modified sequence
atggtggacttccccggatataacctgtcaggcgcagtcgcatccttcttattcatattactgactatgaaacagtctgaagactttagagtgatcggccctgcccatcctattcttgctggggtaggagaagacgcactgctgacatgtcagttgctacctaagcgtactaccatgcacgtggaggtgaggtggtaccggtccgaaccatccacacccgttttcgtgcacagggatggtgtggaagttacagagatgcagatggaagagtaccggggatgggtagagtggatcgagaatgggattgctaagggtaatgtcgcactaaaaattcacaatatccagcccagcgacaatggccagtactggtgccacttccaagatggcaactattgtggtgagactagtctcttactgaaagtggctgagaagctgctcgcggtgctctccagcctaaaagttaatggcccttcccagccaattctggtccgcgtcggagaggacatccagctcacctgctacctaagccccaaagctaatgcacagagcatggaggtgcgttgggatcggtcccatcgatatccggctgtgcacgtctacatggacggggaccacgtggccggagagcagatggcagaatacagggggaggacagttctcgtgtcagacgcaattgacgagggcagactgacgttgcaaattctgtcggctcggcctagcgatgacggccagtatcgatgcctgtttgagaaagatgatgtttaccaggaggcgtctctagacttgaaagttgtttcattgggaagctcccctttgatcactgttgaggggcaagaagatggtgaaatgcagcccatgtgttcctctgacggctggtttccccagccacacgtgccctggagagacatggaagggaaaacaattccgagttcctcgcaggctcttacgcagggcagccacggattgttccatgtacagacactcctgcgtgttactaatatttccgccgtggacgtgacctgcagcatatctatcccatttttgggtgaagaaaagatagcgacgtttagtctgagtgagtctagaatgacatttctttggaaaactctgctagtgtgggggctactgctcgctgtggcagtcggacttccgcgaaagcggagctag

SEQ ID NO: 304723 - DNA, 816 bp, Artificial Sequence
  derived and/or modified sequence
atggttgactttcccggttataacctgagtggcgctgtagcaagctttctctttattctgttgactatgaagcaatcagaagactttagagtgatcggacccgctcatccgatcctggctggggtgggcgaggatgccctgctaacctgccaactcctgcctaagaggacgaccatgcatgtcgaggtccgttggtacagaagtgaacctagcactcctgtgttcgttcatagggacggcgtggaagtgacggaaatgcagatggaggagtacagggggtgggttgagtggatcgagaacgggattgctaaggggaacgttgcattgaagatccataacattcagccttccgataacggacagtactggtgccacttccaggatggcaattattgtggggaaaccagcctgctcttaaaggtcgcagctgtgctccgggacgatatcatagcatctctcaaggtgaatggcccttcacagcctatccttgttagagttggtgaggatatccagctgacttgttacttgagtcccaaggcaaatgcccagtctatggaggtccggtgggaccgaagtcacagatatccagctgtgcacgtttatatggatggggatcatgtggcgggagagcagatggccgagtacaggggccgaacggtgctagttagcgatgctattgatgaaggtcgcctcacattgcagattctgagcgcgcgaccttctgatgatggtcagtaccggtgtctctttgagaaagacgatgtgtaccaggaggccagcctggatctgaaagtagtgtgggttttgccacactag

SEQ ID NO: 304724 - DNA, 816 bp, Artificial Sequence
  derived and/or modified sequence
atggtcgacttccccggatacaacctttcaggggcagtggcttcctttctgtttatcctgctcaccatgaagcaatccgaagacttcagggtaattggccctgcccaccccatcttagctggcgttggagaagacgccctgctgacctgtcagctgttacctaagaggacaacaatgcatgtggaagtgaggtggtaccggtctgagccctctacccctgtgttcgttcaccgcgacggtgtcgaggtcacagaaatgcagatggaggaatacaggggctgggtggaatggattgagaacggaattgccaaaggaaatgttgcgcttaaaatccacaacattcagccaagcgacaacggacagtactggtgccacttccaggacggtaattattgtggggagaccagcttattactgaaggtagccgctgtgcttcgggacgatattatcgcttctctaaaggtcaatggtccttctcaacctattctggtccgcgttggtgaggatatccaactcacctgttacctgagccccaaggcaaatgctcagtcaatggaggtgcggtgggacaggagtcaccggtaccctgctgtacatgtctatatggacggggaccatgtggccggtgaacagatggccgagtatcggggtaggaccgtactggtctccgacgccattgacgaggggagactaactctccaaatcctgagcgctcgaccaagcgacgatgggcagtaccgatgcttattcgagaaggatgacgtatatcaagaagcctcactggacctcaaagtcgtctgggttctgccgcactag

SEQ ID NO: 304725 - DNA, 816 bp, Artificial Sequence
  derived and/or modified sequence
atggtggattttcctggatataacctgtcaggggcagtggccagtttcctgtttattctactcacaatgaagcagtccgaggacttccgtgttataggccctgcccatccaattcttgctggtgtgggggaggacgcactcctgacctgtcagcttttacctaaacgcaccacaatgcacgtagaagtgcgctggtaccgttccgaacctagcacaccggttttcgtccacagggacggagtagaagttacagaaatgcaaatggaagagtatcgcggttgggtggaatggatcgaaaacggcatcgctaaaggtaatgtcgcccttaagattcacaacatccagcctagtgacaatggccagtactggtgccactttcaggacggcaattattgtggcgaaacatccctcttgttaaaggtggcagctgttttgcgggatgatattatcgcatcattgaaggttaatggtccgtcccaacccatcttggtgagggtgggtgaggacatacagctgacctgctacctaagccctaaagccaacgctcagagtatggaagtgcgctgggatcgctcacatcgataccccgcagtccatgtctatatggatggagaccacgtagccggagagcagatggccgagtataggggacgcaccgtgctggtcagtgatgccatcgatgagggaaggttaaccttgcagattctgagtgccagaccctcagatgacggccagtaccgatgcctcttcgaaaaggacgacgtgtaccaggaggcaagcctggatcttaaggtcgtgtgggtcctacctcattag

SEQ ID NO: 304726 - DNA, 816 bp, Artificial Sequence
  derived and/or modified sequence
atggttgactttccaggctataacttgtcaggggcagttgctagctttctgttcatactgttaacgatgaaacagtcggaagacttccgagttatcggccctgcccatcctattttggcaggggtcggcgaggatgcattgcttacgtgccagttactacccaagcgcacaactatgcatgtggaagtgcgttggtatagaagcgaaccatctacaccagtcttcgtccacagggatggcgtggaggttaccgaaatgcagatggaggagtacagggggtgggtggagtggatcgaaaacggtatcgccaaaggcaacgtggcactcaaaatccataacatccaaccctctgacaacgggcaatattggtgtcatttccaggatggcaattattgcggagagacatcattgttgttgaaagtggcagccgtcctgcgggacgatataattgctagtcttaaagtcaacggcccttctcagccgattctcgtaagagtaggagaggacattcagctgacatgttacctttcccctaaagccaatgcacagagtatggaggtgcgctgggataggagccatcgttatcctgccgtgcatgtgtacatggacggggatcacgtggccggtgaacagatggctgagtataggggcaggaccgtgttggtgagcgacgcaattgatgaagggcgattgacattacagattctgtccgctagaccttccgatgacgggcaatatcggtgcctcttcgagaaggatgacgtttaccaggaagcgagcttagatcttaaagtcgtgtgggtcttaccccactag

SEQ ID NO: 304727 - DNA, 816 bp, Artificial Sequence
  derived and/or modified sequence
atggtcgactttcccggttacaacctgtccggcgctgttgcctcatttttgttcatactgctcaccatgaagcagtctgaagactttcgcgtaatcggccctgcccaccctatactagcaggcgtaggagaagatgccctgttaacgtgtcaattactccccaaaaggaccacaatgcatgtagaagtgagatggtatcgcagtgagccatccaccccagtcttcgtacacagggatggagtggaagtcacggaaatgcagatggaagagtacaggggctgggtagagtggattgagaacggaatcgccaagggcaatgtggcactaaagatccacaatatacagccttcggacaacggccagtattggtgtcactttcaggacggcaattattgcggcgaaacttctcttctgctgaaggtggccgctgtcctgcgtgacgatattattgcttccctgaaggtgaacggcccatcccagcctattcttgtgcgggtaggcgaagacattcagctaacctgctatcttagcccaaaggccaatgcccagtctatggaagtcagatgggatcgctcgcacaggtacccggctgtgcatgtgtatatggatggcgaccacgttgcgggagagcaaatggccgagtatcgaggaagaacagtgctagtgagcgacgccatcgacgaggggcgactgaccctgcagatcctgtcagcgagacccagcgatgatggacagtataggtgcttgtttgagaaggatgatgtgtaccaggaagcttcactggacttaaaagtggtctgggtcctcccccactag

SEQ ID NO: 304728 - DNA, 816 bp, Artificial Sequence
  derived and/or modified sequence
atggtggattttcctggctataatctgtctggcgcagtggcatcttttctctttatcttgctaactatgaaacagtccgaggacttcagggtgatcggcccagctcatcctattttagcaggtgtaggggaggacgctcttctgacctgtcagctgctgcctaaaagaaccactatgcatgtcgaagttaggtggtatcgatctgaaccatccactccagtgttcgtccaccgagatggggtagaggttactgaaatgcagatggaagaatacagaggatgggttgaatggattgagaatggtatagccaagggaaacgtcgccctcaagatccacaatatccagcccagcgacaatgggcagtactggtgtcatttccaggacggcaactattgcggggagaccagcttactcctgaaggtggcagccgtcctacgcgacgatatcatcgctagcctcaaagtgaacggaccttctcagccaatcctggtcagggttggtgaggatattcagctgacctgctatctcagtcccaaagctaacgcccagagcatggaagtgcgttgggataggtcccaccgataccctgcagtacacgtatatatggatggcgatcacgtagccggtgaacagatggcagaatacagaggccgtacagtgctcgtgtctgatgcaattgatgaaggtagattgaccctgcagattctctctgcccgacctagcgacgacggccaatacagatgtctgtttgagaaagacgacgtatatcaagaggcaagcctggatctgaaagtggtctgggtgctgccacactag

SEQ ID NO: 304729 - DNA, 1167 bp, Artificial Sequence
  derived and/or modified sequence
atggtggacttcccgggttataacttatctggggctgtggcatcattcttattcattttacttaccatgaagcagagcgaagactttagagtcatcggacccgcacaccctattctggctggcgtgggcgaggacgccttgctcacgtgccagcttttgcccaagcgaacgaccatgcatgtcgaggttaggtggtaccgctctgaaccgagtacaccggtgttcgtgcatagagatggagtcgaggtaaccgaaatgcaaatggaagagtaccgtgggtgggtagagtggatcgaaaacggcattgccaagggaaacgtggcccttaaaatacacaacatccagcccagtgataacggtcaatattggtgtcacttccaggacggcaactactgtggtgaaacctctcttctcctgaaagtcgctgaaaaattgttggcagtactgagttcactcaaagtgaacgggccaagtcagcctattctggtgcgagtgggtgaggacatccagctaacatgctatctgtcgccaaaggccaatgcccaatcgatggaggtgcgatgggaccggtcacaccgataccctgccgtgcatgtgtacatggacggcgaccatgtggctggcgagcagatggctgagtacagggggcgtactgtgttggtcagtgatgcaatcgatgagggccgactcacattgcaaatactgtctgcccgaccttccgacgacggccagtataggtgtctgttcgaaaaagatgatgtttaccaggaggcgtccctggatttgaaggttgtgagtttaggcagtagcccgctcatcacagtggaaggacaagaggacggcgaaatgcagcctatgtgctcaagcgacgggtggttcccacagcctcacgtaccatggcgcgacatggagggaaagactatccccagctcctcacaagcactgacacaaggcagccatggactgtttcatgtccagaccctcttacgtgtgactaacatctctgccgtcgatgtaacttgttcgatatctataccctttcttggagaggagaagatcgccaccttttcccttagcgaaagtaggatgactttcctgtggaaaactctacttgtgtggggacttcttctggccgtagctgtaggccttcccaggaaacgaagttag

SEQ ID NO: 304730 - DNA, 816 bp, Artificial Sequence
  derived and/or modified sequence
atggtggatttccctggctacaatcttagtggtgctgtcgctagctttctgtttatccttttaacgatgaagcagtctgaggacttccgcgtaattggtccagcacatcctatcctcgcaggtgttggcgaagatgccctcttgacctgtcagttactgccaaaacgaactacaatgcacgtggaggtccggtggtaccgtagtgagccctcgactcctgtgttcgtgcatcgagacggcgttgaagttactgaaatgcagatggaggagtatcgcggatgggtggaatggatcgagaatggaatagcaaagggcaacgtcgcactgaagatccacaacattcagcccagtgataacggtcaatattggtgccacttccaggacggaaattattgcggagagacatccctcctgttgaaagtggccgcagtcctgagagacgacattattgcctcccttaaggtgaatgggccaagtcagcctatcttggtgagagtcggcgaggacattcaattaacttgctatctcagcccaaaggcaaatgcgcagagcatggaggtgcgctgggatcggagccacaggtaccctgcagtgcacgtctacatggatggggatcatgtggctggcgaacagatggccgaataccgcggacgcaccgtcctggtaagcgacgcgatagacgaggggaggcttaccctgcagattttgtcagctcggccaagcgatgacgggcagtacaggtgcttatttgagaaagatgacgtttatcaggaagcctctctggatctcaaagttgtgtgggtccttcctcattag

SEQ ID NO: 304731 - DNA, 1167 bp, Artificial Sequence
  derived and/or modified sequence
atggtggattttccaggctacaatctgtctggtgcagtcgcctccttcctattcatcctgctgacaatgaagcagtcagaagactttagagtcattggccctgctcatcctatcctggccggggttggggaagatgccctgttaacctgccagctactccccaagaggaccacaatgcacgtggaggtgaggtggtaccgctcagagcccagcacacctgtgtttgtgcacagggatggagtggaggtgactgagatgcagatggaggagtacagaggctgggtagagtggatagagaatggcattgcaaagggaaatgtggcactgaagatacacaacatccagccctccgacaatggacaatactggtgccatttccaggatgggaactactgtggagaaacaagcttgctgctcaaagtagcagagaagctgctggccgttctgtcttctttaaaagtgaatggaccttcccagcccatcctcgtcagagtgggagaagatatacagctaacctgttacctgtcccccaaggcgaatgcacagagcatggaggtgaggtgggaccgatcccaccgttaccctgctgtgcatgtgtatatggatggggaccatgtggctggagagcagatggcagagtacagagggaggactgtactggtgagtgacgccattgacgagggcagactgaccctgcagatactcagtgccagaccttcggacgacgggcagtaccgctgcctttttgaaaaagatgatgtctaccaggaggccagtttggatctgaaggtggtaagtctgggttcttccccactgatcactgtggaggggcaagaagatggagaaatgcagccgatgtgctcttcagatgggtggttcccacagccccacgtgccatggagggacatggaaggaaagacgataccatcatcttcccaggccctgactcaaggcagccacgggctgttccacgtgcagacattgctaagggtcacaaacatctccgctgtggacgtcacttgttccatcagcatcccctttttgggcgaggagaaaatcgcaactttttctctctcagagtccaggatgacgtttttgtggaaaacactgcttgtttggggattgcttcttgctgtggctgtaggcctgcccaggaagaggagctga

SEQ ID NO: 304732 - DNA, 333 bp, Artificial Sequence
  derived and/or modified sequence
agggaggatggtggattttccaggctacaatctgtctggtgcagtcgcctccttcctattcatcctgctgacaatgaagcagtcagactttagagtcattggccctgctcatcctatcctggccggggttggggaagatgccctgttaacctgccagctactccccaagaggaccacaatgcacgtggaggtgaggtggtaccgctcagagcccagcacacctgtgtttgtgcacagggatggagtggaggtgactgagatgcagatggaggagtacagaggctgggtagagtggatagagaatggcattgcaaagggaaatgtggcactgaa

SEQ ID NO: 304733 - DNA, 1085 bp, Artificial Sequence
  derived and/or modified sequence
atggtggattttccaggctacaatctgtctggtgcagtcgcctccttcctattcatcctgctgacaatgaagcagtcagaagactttagagtcattggccctgctcatcctatcctggccggggttggggaagatgccctgttaacctgccagctactccccaagaggaccacaatgcacgtggaggtgaggtggtaccgctcagagcccagcacacctgtgtttgtgcacagggatggagtggaggtgactgagatgcagatggaggagtacagaggctgggtagagtggatagagaatggcattgcaaagggaaatgtggcactgaagatacacaacatccagccctccgacaatggacaatactggtgccatttccaggatgggaactactgtggagaaacaagcttgctgctcaaagtagcagctgttcttagagatgacattattgcttctttaaaagtgaatggaccttcccagcccatcctcgtcagagtgggagaagatatacagctaacctgttacctgtcccccaaggcgaatgcacagagcatggaggtgaggtgggaccgatcccaccgttaccctgctgtgcatgtgtatatggatggggaccatgtggctggagagcagatggcagagtacagagggaggactgtactggtgagtgacgccattgacgagggcagactgaccctgcagatactcagtgccagaccttcggacgacgggcagtaccgctgcctttttgaaaaagatgatgtctaccaggaggccagtttggatctgaaggtggtctgggttcttccccactgatcactgtggaggggcaagaagatggagaaatgcagccgatgtgctcttcagatgggtggttcccacagccccacgtgccatggagggacatggaaggaaagacgataccatcatcttcccaggccctgactcaaggcagccacgggctgttccacgtgcagacattgctaagggtcacaaacatctccgctgtggacgtcacttgttccatcagcatcccctttttgggcgaggagaaaatcgcaactttttctctctcaggttggtga

SEQ ID NO: 304734 - DNA, 1167 bp, Artificial Sequence
  derived and/or modified sequence
atggtggattttccaggctacaatctgtctggtgcagtcgcctccttcctattcatcctgctgacaatgaagcagtcagaagactttagagtcattggccctgctcatcctatcctggccggggttggggaagatgccctgttaacctgccagctactccccaagaggaccacaatgcacgtggaggtgaggtggtaccgctcagagcccagcacacctgtgtttgtgcacagggatggagtggaggtgactgagatgcagatggaggagtacagaggctgggtagagtggatagagaatggcattgcaaagggaaatgtggcactgaagatacacaacatccagccctccgacaatggacaatactggtgccatttccaggatgggaactactgtggagaaacaagcttgctgctcaaagtagcagagaagctgctggccgttctgtcttctttaaaagtgaatggaccttcccagcccatcctcgtcagagtgggagaagatatacagctaacctgttacctgtcccccaaggcgaatgcacagagcatggaggtgaggtgggaccgatcccaccgttaccctgctgtgcatgtgtatatggatggggaccatgtggctggagagcagatggcagagtacagagggaggactgtactggtgagtgacgccattgacgagggcagactgaccctgcagatactcagtgccagaccttcggacgacgggcagtaccgctgcctttttgaaaaagatgatgtctaccaggaggccagtttggatctgaaggtggtaagtctgggttcttccccactgatcactgtggaggggcaagaagatggagaaatgcagccgatgtgctcttcagatgggtggttcccacagccccacgtgccatggagggacatggaaggaaagacgataccatcatcttcccaggccctgactcaaggcagccacgggctgttccacgtgcagacattgctaagggtcacaaacatctccgctgtggacgtcacttgttccatcagcatcccctttttgggcgaggagaaaatcgcaactttttctctctcagagtccaggatgacatttttgtggaaaacactgcttgtttggggattgcttcttgctgtggctgtaggcctgcccaggaagaggagctga

SEQ ID NO: 304735 - DNA, 1085 bp, Artificial Sequence
  derived and/or modified sequence
atggtggattttccaggctacaatctgtctggtgcagtcgcctccttcctattcatcctgctgacaatgaagcagtcagaagactttagagtcattggccctgctcatcctatcctggccggggttggggaagatgccctgttaacctgccagctactccccaagaggaccacaatgcacgtggaggtgaggtggtaccgctcagagcccagcacacctgtgtttgtgcacagggatggagtggaggtgactgagatgcagatggaggagtacagaggctgggtagagtggatagagaatggcattgcaaagggaaatgtggcactgaagatacacaacatccagccctccgacaatggacaatactggtgccatttccaggatgggaactactgtggagaaacaagcttgctgctcaaagtagcagctgttcttagagatgacattattgcttctttaaaagtgaatggaccttcccagcccatcctcgtcagagtgggagaagatatacagctaacctgttacctgtcccccaaggcgaatgcacagagcatggaggtgaggtgggaccgatcccaccgttaccctgctgtgcatgtgtatatggatggggaccatgtggctggagagcagatggcagagtacagagggaggactgtgctggtgagtgacgccattgacgagggcagactgaccctgcagatactcagtgccagaccttcggacgacgggcagtaccgctgcctttttgaaaaagatgatgtctaccaagaggccagtttggatctgaaggtggtctgggttcttccccactgatcactgtggaggggcaagaagatggagaaatgcagccgatgtgctcttcagatgggtggttcccacagccccacgtgccatggagggacatggaaggaaagacgataccatcatcttcccaggccctgactcaaggcagccacgggctgttccacgtgcagacattgctaagggtcacaaacatctccgctgtggacgtcacttgttccatcagcatcccctttttgggcgaggagaaaatcgcaactttttctctctcaggttggtga

SEQ ID NO: 304736 - DNA, 1167 bp, Artificial Sequence
  derived and/or modified sequence
atggtggacttccccggctacaacctgagcggcgccgtggccagcttcctgttcatcctgctgaccatgaagcagagcgaggacttcagagtgatcggccccgcccaccccatcctggccggcgtgggcgaggacgccctgctgacctgccagctgctgcccaagagaaccaccatgcacgtggaggtgagatggtacagaagcgagcccagcacccccgtgttcgtgcacagagacggcgtggaggtgaccgagatgcagatggaggagtacagaggctgggtggagtggatcgagaacggcatcgccaagggcaacgtggccctgaagatccacaacatccagcccagcgacaacggccagtactggtgccacttccaggacggcaactactgcggcgagaccagcctgctgctgaaggtggccgagaagctgctggccgtgctgagcagcctgaaggtgaacggccccagccagcccatcctggtgagagtgggcgaggacatccagctgacctgctacctgagccccaaggccaacgcccagagcatggaggtgagatgggacagaagccacagataccccgccgtgcacgtgtacatggacggcgaccacgtggccggcgagcagatggccgagtacagaggcagaaccgtgctggtgagcgacgccatcgacgagggcagactgaccctgcagatcctgagcgccagacccagcgacgacggccagtacagatgcctgttcgagaaggacgacgtgtaccaggaggccagcctggacctgaaggtggtgagcctgggcagcagccccctgatcaccgtggagggccaggaggacggcgagatgcagcccatgtgcagcagcgacggctggttcccccagccccacgtgccctggagagacatggagggcaagaccatccccagcagcagccaggccctgacccagggcagccacggcctgttccacgtgcagaccctgctgagagtgaccaacatcagcgccgtggacgtgacctgcagcatcagcatccccttcctgggcgaggagaagatcgccaccttcagcctgagcgagagcagaatgaccttcctgtggaagaccctgctggtgtggggcctgctgctggccgtggccgtgggcctgcccagaaagagaagctag

SEQ ID NO: 304737 - DNA, 327 bp, Artificial Sequence
  derived and/or modified sequence
atggtggacttccccggctacaacctgagcggcgccgtggccagcttcctgttcatcctgctgaccatgaagcagagcgacttcagagtgatcggccccgcccaccccatcctggccggcgtgggcgaggacgccctgctgacctgccagctgctgcccaagagaaccaccatgcacgtggaggtgagatggtacagaagcgagcccagcacccccgtgttcgtgcacagagacggcgtggaggtgaccgagatgcagatggaggagtacagaggctgggtggagtggatcgagaacggcatcgccaagggcaacgtggccctgtag

SEQ ID NO: 304738 - DNA, 816 bp, Artificial Sequence
  derived and/or modified sequence
atggtggacttccccggctacaacctgagcggcgccgtggccagcttcctgttcatcctgctgaccatgaagcagagcgaggacttcagagtgatcggccccgcccaccccatcctggccggcgtgggcgaggacgccctgctgacctgccagctgctgcccaagagaaccaccatgcacgtggaggtgagatggtacagaagcgagcccagcacccccgtgttcgtgcacagagacggcgtggaggtgaccgagatgcagatggaggagtacagaggctgggtggagtggatcgagaacggcatcgccaagggcaacgtggccctgaagatccacaacatccagcccagcgacaacggccagtactggtgccacttccaggacggcaactactgcggcgagaccagcctgctgctgaaggtggccgccgtgctgagagacgacatcatcgccagcctgaaggtgaacggccccagccagcccatcctggtgagagtgggcgaggacatccagctgacctgctacctgagccccaaggccaacgcccagagcatggaggtgagatgggacagaagccacagataccccgccgtgcacgtgtacatggacggcgaccacgtggccggcgagcagatggccgagtacagaggcagaaccgtgctggtgagcgacgccatcgacgagggcagactgaccctgcagatcctgagcgccagacccagcgacgacggccagtacagatgcctgttcgagaaggacgacgtgtaccaggaggccagcctggacctgaaggtggtgtgggtgctgccccactag

SEQ ID NO: 304739 - DNA, 432 bp, Artificial Sequence
  derived and/or modified sequence
tgaaccagacacttcaaggagagcatcaagttcatccacgagtgcagactgagaggcgagagctgcctggtgcactgcctggccggcgtgagcagaagcgtgaccctggtgatcgcctacatcatgaccgtgaccgacttcggctgggaggacgccctgcacaccgtgagagccggcagaagctgcgccaaccccaacgtgggcttccagagacagctgcaggagttcgagaagcacgaggtgcaccagtacagacagtggctgaaggaggagtacggcgagagccccctgcaggacgccgaggaggccaagaacatcctgggcaagtacaaggagcagggcagaaccgagccccagcccggcgccagaagatggagcagcttccccgccctggcccccctgacctacgacaactacaccaccgagacctag

SEQ ID NO: 304740 - DNA, 432 bp, Artificial Sequence
  derived and/or modified sequence
tgaacaagacatttcaaagagtccattaagtttattcacgaatgtcgcttgcggggtgaatcgtgcctcgtccattgtctggcaggagtttctaggtctgtgacattagttattgcgtatattatgaccgtgaccgattttggatgggaagacgctttacacacggtgagagcaggtcggtcctgcgcaaacccgaacgttggattccagcggcagctgcaggagtttgaaaaacacgaggtgcatcaatatcggcagtggctcaaagaagagtatggcgaaagcccgcttcaggatgctgaagaagctaaaaacattttaggtaaatacaaagagcagggtcgcaccgaaccacagcctggagcacgtaggtggtcatccttccctgcactggcccctctgacatacgacaattacactaccgagacgtag

SEQ ID NO: 304741 - DNA, 432 bp, Artificial Sequence
  derived and/or modified sequence
tgaacaagacacttcaaggagagcatcaagttcatccacgagtgccgcctgcggggggagagctgcctggtgcactgcctggccggcgtgagccgctctgtgaccctggtgattgcctacatcatgacagtgacagactttggctgggaggatgccctgcacacagtgcgggccggccgcagctgtgccaaccccaacgtgggcttccagaggcagctgcaggagtttgagaagcatgaggtgcaccagtaccggcagtggctgaaggaggagtatggagagagccccctgcaggatgctgaggaggccaagaacatcctgggcaagtacaaggagcagggccgcacagagccccagcccggggcccggcgctggagcagcttccctgccctggcccccctgacctatgacaactacaccacagagacctag

SEQ ID NO: 304742 - DNA, 432 bp, Artificial Sequence
  derived and/or modified sequence
tgaacccggcacttcaaggagagcatcaagttcatccacgagtgcaggctgcgaggcgaaagctgccttgtccactgcctggctggagttagtcgatctgtgacattggtgatcgcctatatcatgacagtaactgatttcggatgggaggatgccctccacactgttagagccggacgttcttgcgcaaaccctaacgtggggtttcagcgccaactgcaggagttcgaaaagcatgaggttcatcagtaccgtcagtggctgaaagaagagtacggcgagtcgccgcttcaggatgcagaggaagccaagaatatcctgggaaaatataaggaacagggccggaccgagccccagcccggcgccagacgttggtcctcattcccagccctggcaccgctgacctacgataattatacaacggagacctag

SEQ ID NO: 304743 - DNA, 2198 bp, Artificial Sequence
  derived and/or modified sequence
gacaagacatttcaaagaaagtattaaattcattcacgagtgccggctccgcggtgagagctgccttgtacactgcctggccggggtctccaggagcgtgacactggtgatcgcatacatcatgaccgtcactgactttggctgggaggatgccctgcacaccgtgcgtgctgggagatcctgtgccaaccccaacgtgggcttccagagacagctccaggagtttgagaagcatgaggtccatcagtatcggcagtggctgaaggaagaatatggagagagccctttgcaggatgcagaagaagccaaaaacattctgggtaaatataaggagcaagggcgcacagagccccagcccggcgccaggcggtggagcagttttccggcactggctccgctgacctacgataattatacgacggagacctaacgcaagcgacctgctgccttccttcccactgcttgtcttcagtgtgcccggctgggcaggggtgcggtggtggtggccgatgaggacaggaaagggagatagccagggcgaggtggggcgagggctccttcccccaagcaacaccgcccagccctgctccaggcccctgcactccgcccacccctaccctggctgcacctgagcttgctgcccctggggatgttgcccagtggctgtgcactgctctgtgcacgtgcgtgtgtgtgagtgcacttgtgtgtgggtgactaagtggatgcatgtgtgtgcctgtgtgagtgagggtatgtgcacctaagtgtgtacatgtgtgtatgttgtgaaagtgtctgtgcacatgaatgtttgtgtgtgtgtgaactctttcttactgctggaagtcacagaattcatattgctgcccgggttggtgtggccacctttccctttgtccaagactccacatggaaggcatttgagctcgacctccgaaaagctacccagcaaagagcagtctgtgcctctgagcagaccgtgagaactcaggggacgagtggctaagagcatggcctctcccagaacccacccagggtggtgtggtgggggcaacaggggccagactcctctagagggagggtggctctggggccctggaaaacgtgagagactgccctgagctggtccagtgggccagcactttataccaactcagcatttaagggaagtatcttagattgcctccatctcaatgtgaatgcaccaggctgagggttccctagcgccttgagtcaaggccacttttcagcccatcgagccctgagttctacttggtgtttgttctctggagctgattgcacttgagctctgtggtgggcaggcgcactttagcctaagttgggtgccccagggcaccccctcctctctgctccttgccagcttcattcactcccagcctctcgctgtcctcactttgcaggggctcctcctcaacatttgcatgcacctgcaagaattgggaagaaagagcatttattaggcactgtagcaatttgcattttaaaatgcctgagcatttattaagcttcttggtattcacttgggtttgataattgatctgagctacctcattgaatgtttttggaaaggtgttttttggtatgcaagtcagctttgcctcacagttgaaaatgttcggtcatgattgcttttgaaaccaaaggggaaggtaccgatatcattgagctatttaaagttgccagtttgggctccagtaatgctttctggtgggtaaaattccacattcaggccacgagagcatctacagtttgtactctggggctgcaggcatcctgggacgctgtacgcaattcagtggtctagtcctttataccgactcagattccttaagcatgcagagtcactcgaatgaaaaaacatactcgacctctccctaaaaagatgttgcaacccagtttctctgaattccaccacaaaaagagaccctgaataagaagagcagttttcctgtgcatatagagggtgtgtcaaaggtgagctttttggggaccgggaaaaacaaagttgcctgattccgcgcaggtgcacaggccccggatgtacacccggaaaggggagtgtggctgtagaatcatccatccgtctacagctaaaacaatttgccaataaagtacatgtttttcctaagccaaaaataaatacgttaacagaaaaatgatttaggatatagctt

SEQ ID NO: 304744 - DNA, 432 bp, Artificial Sequence
  derived and/or modified sequence
tgaactcggcactttaaggaatctataaagttcatccacgagtgccgtttgcgcggtgaaagctgtctcgtacactgcttggctggtgtttcaagaagtgtcacgctggtcatcgcctatattatgaccgtgacagatttcggatgggaggatgccctgcatacagttcgtgctggacgctcctgcgcaaatccaaacgtggggttccagcggcaattacaagaattcgagaagcacgaggtgcaccagtaccgccagtggctgaaggaagaatatggggagtcgccactgcaagatgcagaggaagcgaaaaatatcctcggaaagtataaggaacaggggcgaaccgagcctcaaccaggagctagacggtggtctagctttcctgcgttggccccactgacatacgataattacacaactgaaacctag

SEQ ID NO: 304745 - DNA, 3270 bp, Artificial Sequence
  derived and/or modified sequence
tatgcgcgcgcgcgtggggggcagtgtgcatgcggggagtacgggggagtgtgtttgtgtgtgcgtgtgggtgtgagtgcctggctccctctcgctgagacacacatacactcacacatacacaacccggcaggctcgtctgaacttgaagacaccccacattccaagatgcccgaggttcctgggaatgcctggggttcttcgatccggaaaatcctaccggcatcctcctagggagggattattattattatttttctttaatctggaagagaagagaacaagttgtgcttttccccccttcttcttgctaaatgccatggatataactgaataagcggctcagggctttccccgcgtggacgtccgaggccaccatctgcctgcattcgccggagccgccggagggtttagctcgagtctgtctcgggcggggaaggatgcgtggccgagccggggagcccgggcgccccgcggagccggcctcggtgccacccagccgggggtagatgctgcctcgcccaggcgctgagtgaccagaccatggagaccctgcttggtggcctgctagcgtttggcatggcgtttgccgtggtcgacgcctgccccaagtactgtgtctgccagaatctgtctgagtcactggggaccctgtgcccctccaaggggctgctctttgtaccccctgatattgaccggcggacagtggagctgcgcctgggcggcaacttcatcatccacatcagccgccaggactttgccaacatgacggggctggtggacctgaccctgtccaggaacaccatcagccacatccagcccttttcctttctggacctcgagagcctccgctccctgcatcttgacagcaatcggctgccaagccttggggaggacaccctccggggcctggtcaacctgcagcaccttatcgtgaacaacaaccagctgggcggcatcgcagatgaggcttttgaggacttcctgctgacattggaggatctggacctctcctacaacaacctccatggcctgccgtgggactccgtgcgacgcatggtcaacctccaccagctgagcctggaccacaacctgctggatcacatcgccgagggcacctttgcagacctgcagaaactggcccgcctggatctcacctccaatcggctgcagaagctgccccctgatcccatctttgcccgctcccaggcttcggctttgacagccacaccctttgccccacccttgtcctttagttttgggggtaacccacttcactgcaattgtgagcttctctggctgcggaggctcgagcgggacgatgacctggaaacctgtggctccccagggggcctcaagggtcgctacttctggcatgtgcgtgaggaggagtttgtgtgcgagccgcctctcatcacccagcacacacacaagttgctggttctggagggccaggcggccacactcaagtgcaaagccattggggaccccagcccccttatccactgggtagcccccgatgaccgcctggtagggaactcctcaaggaccgctgtctatgacaatggcaccctggacatcttcatcaccacatctcaggacagtggtgccttcacctgcattgctgccaatgctgccggagaggccacggccatggtggaggtctccatcgtccagctgccacacctcagcaacagcaccagccgcactgcaccccccaagtcccgcctctcagacatcactggctccagcaagaccagccggggaggtggaggcagtgggggcggagagcctcccaaaagccccccggaacgggctgtgcttgtgtctgaagtgaccaccacctcggccctggtcaagtggtctgtcagcaagtcagcaccccgggtgaagatgtaccagctgcagtacaactgctctgacgatgaggtactgatttacaggatgatcccagcctccaacaaggccttcgtggtcaacaacctggtgtcagggactggctacgacttgtgtgtgctggccatgtgggatgacacagccacgacactcacggccaccaacatcgtgggctgcgcccagttcttcaccaaggctgactacccgcagtgccagtccatgcacagccagattctgggcggcaccatgatcctggtcatcgggggcatcatcgtggccacgctgctggtcttcatcgtcatcctcatggtgcgctacaaggtctgcaaccacgaggcccccagcaagatggcagcggccgtgagcaatgtgtactcgcagaccaacggcgcccagccaccgcctccaagcagcgcaccagccggggccccgccgcagggcccgccgaaggtggtggtgcgcaacgagctcctggacttcaccgccagcctggcccgcgccagtgactcctcttcctccagctccctgggcagtggggaggctgcggggctgggacgggccccctggaggatcccaccctccgccccgcgccccaagcccagccttgaccgcctgatgggggccttcgcctccctggacctcaagagtcagagaaaggaggagctgctggactccaggactccagccgggagaggggctgggacgtcggcccggggccaccactcggaccgagagccactgctggggccccctgcggcccgggccaggagcctgctccccttgccgttggagggcaaggccaaacgcagccactccttcgacatgggggactttgctgctgcggcggcgggaggggtcgtgccgggcggctacagtcctcctcggaaggtctcgaacatctggacgaagcgcagcctctctgtcaacggcatgctcttgccctttgaggagagtgacctggtgggggcccgggggacttttggcagctccgaatgggtgatggagagcacggtctaggtgggggtgggcatgctccctttcctgtgcgcagggtgggagaaggggaaagaatctcactggcaagtgtttgtggagtttccatggtgatgtttacatccagggacagtttcgtctccctgtcaatggcctcgtgtccccccctaccccgcaacacccacatcacctccccaccacccggccggggtgtgctcagggaatgtggactcgctcaaatgccggactgagccctgagtgtttggaaaggcgagactccgcctttctaatcacaaatgtagcctacaagcaagcggctttggattgcttatgggtctagtgttgtttttatttcttaatttattttttttccatttccca

SEQ ID NO: 304746 - DNA, 3093 bp, Artificial Sequence
  derived and/or modified sequence
atgggtgctgcgaggggatccccagctcggccacgacgtctccctcttctgtccgtacttctgttacctctgttgggcgggacccaaacagcaattgttttcattaaacagccgagtagtcaggatgcgttgcaaggacgacgagcactgctccgctgtgaggtagaagctccggggccagtgcacgtgtactggctgctggacggtgcccctgtccaggacacggagcgaagatttgcccaggggagctcgctgtcttttgccgccgtggatcgcctgcaggattcaggcacttttcagtgcgtagcacgcgatgacgtcactggagaggaagccaggagcgccaacgcctcctttaatatcaagtggatcgaagctggccccgtggtgctgaagcaccctgccagcgaagccgaaattcaacctcaaactcaggtcaccttgcgctgccacattgacggacacccgagaccgacatatcaatggttccgggacggaacaccattgtcagatggacagagtaatcacaccgtgtcttctaaagaacgcaatctcactttgcgtcccgccggtcctgagcactccgggctgtactcctgctgtgctcatagcgccttcggccaggcctgttccagtcagaattttacactgtcaatcgcagacgaatccttcgcgagagtggtactggccccccaggatgtcgtcgtggcccgctatgaggaggccatgttccactgccagtttagtgcccagccccctccctcactccaatggctattcgaggacgagacacccatcaccaatcggtcaaggccacctcatctcaggagggctacagtcttcgctaatggatcccttcttctgacacaagtgcgaccgcgcaatgcaggaatatataggtgcatagggcagggacagcgtggtccccctattatcctggaggcaaccctccacctcgcggaaattgaagacatgcctctctttgaaccacgcgtattcacggcgggttctgaggagagagtgacatgcttgccacctaaaggattgccggaaccttccgtttggtgggaacatgccggagtacgtttgcccacgcacgggcgggtttatcaaaaaggccatgagttagtactagcaaatattgcagagtctgacgccggcgtgtatacatgccacgcagctaatctggcagggcagaggcggcaagacgttaatatcacagtcgccactgtaccgtcctggttgaagaaacctcaagactcccagttagaggagggaaagccaggatacctggattgtctgacccaagcaacccccaagcctactgtggtgtggtacaggaatcagatgttaataagcgaagattccagattcgaggtttttaagaatggaacgttaaggataaacagcgtggaggtttatgacgggacctggtacaggtgtatgtctagcacccccgcgggctctatcgaggcacaggcccgcgtgcaggtgctcgacggttctagcttacccgagtgggtgacggataacgcaggaacgttgcacttcgctcgggtgactcgggacgacgccggtaactacacatgtatcgccagcaacggcccccagggccagatccgtgctcacgtccagctgacagtggcagtcttcattacattcaaggtggagccagaacgcacaacagtatatcagggccacacggccctcttgcagtgcgaagcccaaggggaccccaaacccctcattcagtggaaaggcaaagacagaatcctggatcccacaaaactgggaccacggatgcacatcttccaaaatggcagtcttgtcatccacgatgttgctcctgaagatagcgggcgctatacttgcatcgctggtaactcttgtaatataaagcatactgaagctcccctgtatgtagtcgataaacctgtgcctgaagaatcagaaggccccggatcgccccccccttataaaatgatccaaacaatcggacttagcgtcggtgctgccgtcgcttacattatagccgtactgggactcatgttctattgcaagaagcgatgcaaggccaagcgcttgcaaaaacagcctgagggggaggagccggagatggaatgcctcaatgggggtcctttgcagaacggccagccatctgctgagatccaggaagaggtggccctcaccagtctgggcagtggacctgcggccaccaacaaacgccactctacttcagacaaaatgcacttcccgaggtcatctttgcaaccgattactactctgggcaaatctgagttcggcgaagtcttccttgctaaggcccaaggactggaagaaggagtggccgaaacactggtgctcgtcaaaagcctgcagagtaaagatgaacagcaacagctagatttccggagagaactcgagatgtttgggaaactgaatcatgctaatgtagtgcgactcctcggactctgccgcgaggccgagcctcactatatggtgctggaatacgtggacctcggtgacctgaagcaattcctcaggatttcaaaaagcaaggatgaaaaactcaagtcccagcctctgtcaaccaaacaaaaagtggcgctatgtacccaagtggccttaggaatggagcacctgagcaacaaccggttcgtgcataaagatctggctgcccgtaactgtctcgtaagcgcccaacggcaggtcaaagttagtgcactggggttaagtaaggatgtttacaacagcgagtattaccattttcgacaagcctgggtgccactgagatggatgtccccggaggccattctggaaggggacttctccactaagagtgacgtctgggctttcggcgtactcatgtgggaggtatttacacatggtgaaatgcctcatggtggccaggccgacgacgaggtcttggccgaccttcaggctggtaaggctaggttaccccagcctgaggggtgtccctcaaaactgtatcgcctgatgcaacgatgttgggccctttctcctaaagatagacctagcttctctgagatcgctagcgccctgggagactcaactgtggattcaaaaccttag

SEQ ID NO: 304747 - DNA, 3093 bp, Artificial Sequence
  derived and/or modified sequence
atgggcgccgcccggggcagccctgcccggccccggcggctgcccctgctgtctgtgctgctgctgcccctgctgggcggcacccagacagccatcgtgttcatcaagcagcccagcagccaggatgccctgcagggcagaagagccctgctgcgctgtgaggtggaggcccctggccctgtgcacgtgtactggctgctggatggagcccctgtgcaggacacagaaagaagatttgcccagggcagcagcctgagctttgctgctgtggaccggctgcaggacagcggcaccttccagtgtgtggccagagatgatgtgactggagaggaggcccggagcgccaatgccagcttcaacatcaagtggattgaggccggccctgtggtgctgaagcacccagccagcgaggccgagatccagccccagacccaggtgaccctgcgctgccacattgatggccacccccggcccacctaccagtggttcagagatggcacccccctgagtgatggccagagcaaccacacagtgagcagcaaggagaggaacctgaccctgcggcctgctggccctgagcacagcggcctgtacagctgctgtgcccacagcgccttcggccaggcctgcagcagccagaacttcaccctgagcattgctgatgagagctttgcccgggtggtgctggccccccaggatgtggtggtggcccgctatgaggaggccatgttccactgccagttcagcgcccagcccccacccagcctgcagtggctgtttgaagatgagacccccatcaccaacagaagccggcccccccacctgcggcgggccaccgtgtttgccaacggcagcctgctgctgacccaggtgcggcccagaaatgccggcatctaccgctgcatcggccagggccagaggggcccccccatcatcctggaggccaccctgcacctggccgagattgaggacatgcccctgtttgagcccagggtcttcaccgctggcagcgaggagcgggtgacctgcctgccccccaagggcctgcctgagcccagcgtgtggtgggagcacgccggcgtgcggctgcccacccacggccgggtgtaccagaagggccacgagctggtgctggccaacattgctgagagtgatgctggggtgtacacctgccacgccgccaacctggccggccagaggcggcaggatgtgaacatcaccgtggccaccgtgcccagctggctgaagaagccccaggacagccagctggaggagggcaagccaggctacctggactgcctgacccaggccacccccaagcccaccgtggtgtggtacagaaaccagatgctgatcagcgaggacagcagatttgaggtgttcaagaatggcaccctgcgcatcaacagcgtggaggtgtatgatggcacctggtaccgctgcatgagcagcaccccagctggcagcattgaggcccaggcccgggtgcaggtgctggatggcagcagcctgcctgagtgggtgacagacaatgccggcaccctgcactttgcccgggtgaccagagatgatgctggcaactacacctgcatcgccagcaatggcccccagggccagatccgggcccacgtgcagctgactgtggccgtgttcatcaccttcaaggtggagcctgagaggaccaccgtgtaccagggccacacagccctgctgcagtgtgaggcccagggcgaccccaagcccctcatccagtggaagggcaaggaccgcatcctggaccccaccaagctgggccccaggatgcacatcttccagaatggcagcctggtgattcatgatgtggccccagaagattctggccgctacacctgcatcgccggcaacagctgcaacatcaagcacacagaggcccccctgtatgtggtggacaagcctgtgcctgaggagagcgagggccctggcagccccccaccctacaagatgatccagaccatcggcctgtctgtgggcgctgctgtggcctacatcatcgctgtgctgggcctgatgttctactgcaagaagcgctgcaaggccaagaggctgcagaagcagcctgagggggaggagcctgagatggagtgcctgaatggaggccccctgcagaatggccagcccagcgctgagatccaggaggaggtggccctgaccagcctgggcagcggccctgctgccaccaacaagaggcacagcaccagtgacaagatgcacttccccaggagcagcctgcagcccatcaccaccctgggcaagtcagaatttggagaggtgttcctggccaaggcccagggcctggaggagggcgtggccgagaccctggtgctggtgaagagcctgcagagcaaggatgagcagcagcagctggacttccggcgggagctggagatgtttgggaagctgaaccacgccaacgtggtgcggctgctgggcctgtgccgggaggccgagccccactacatggtgctggagtatgtggacctgggggacctgaagcagttcctgcgcatcagcaagagcaaggatgagaagctgaagagccagcccctgagcaccaagcagaaggtggccctgtgcacccaggtggccctgggcatggagcacctgagcaacaacagatttgtgcacaaggacctggccgccaggaactgcctggtgtctgcccagaggcaggtgaaggtgtctgccctgggcctgagcaaggatgtgtacaacagcgagtactaccacttccggcaggcctgggtgcccctgcgctggatgagccctgaggccatcctggagggggacttcagcaccaagagtgatgtgtgggccttcggcgtgctgatgtgggaggtgttcacccacggggagatgcctcatggaggccaggctgatgatgaggtgctggccgacctgcaggccggcaaggcccggctgccccagcctgagggctgccccagcaagctgtaccgcctgatgcagcgctgctgggccctgagccccaaggaccggcccagcttcagcgagatcgccagcgccctgggggacagcacagtggacagcaagccctag

SEQ ID NO: 304748 - DNA, 3093 bp, Artificial Sequence
  derived and/or modified sequence
atgggcgccgcccggggcagccccgcccggccccggcggctgcccctcctgagtgttctgctgctacccctgctggggggtactcagaccgcgatcgtgttcattaagcaaccatcgagccaggatgcgctgcagggtcggagagcccttctgaggtgcgaggtggaagcccctgggcctgtccatgtctactggttactggatggcgcacctgttcaggataccgagagacggtttgcccaagggtcatctctcagctttgccgcagtggataggctccaggatagcggcaccttccagtgtgtagcaagagacgatgtcaccggcgaggaggcacggagtgccaatgccagtttcaacattaaatggattgaggctggccccgtggtgcttaagcatcctgcttcggaggctgagatccagcctcagacccaggtcaccttgagatgccacattgatggccacccaaggcccacgtatcagtggtttcgagacggcactccactgtctgacggacagagtaaccacactgtgagcagcaaggaaagaaacttgactcttaggcctgctggacctgagcatagtggcctttactcctgctgcgcacatagcgcctttggccaagcctgctcatcccaaaattttacgctctctattgccgatgagtcttttgcccgggtggtcctggcaccgcaggacgtggtcgttgcacgatacgaagaggcaatgtttcattgccagtttagcgcgcagccaccaccctctttgcagtggctattcgaagacgagacaccgatcacaaaccgctcccgcccccctcacctccgccgtgccaccgtctttgctaatggcagcctgctattgactcaggtgcgcccccgaaatgccggtatatatagatgtattggacagggacagagaggaccccccattatcctagaagctacgctgcacttggctgagattgaggatatgcccttgttcgaaccaagggtttttacagccggctcggaagaaagggttacctgtcttccgccaaagggactcccagaaccatcagtgtggtgggaacacgccggcgtgagactgccaacgcatggtagggtataccagaaggggcacgagctggtgttggctaatatcgcggagagcgatgctggggtgtacacgtgtcacgctgcaaatctagctggccaacgcaggcaagacgtgaatataactgtcgctacagtgcccagctggctcaagaagccgcaggacagccagttggaagaaggcaagcctggctaccttgattgtctcacgcaggccactcccaagcccactgtcgtctggtatagaaatcagatgttaatttctgaggattctcgctttgaagtgttcaaaaacggcactctgcggatcaattccgtcgaagtctacgatggcacttggtacagatgcatgtcaagcacccctgcaggcagcatcgaggcccaggcaagggtgcaggtgcttgacggcagtagcctgcccgagtgggtgaccgacaatgctgggacattgcacttcgcgcgcgtaaccagagacgacgcaggaaactacacttgcatcgcaagcaatggacctcaggggcagatccgcgcgcacgtacaactcacagtcgccgtcttcattactttcaaggtggagccggagaggaccactgtgtatcagggtcataccgccctgctgcagtgcgaagcgcagggcgacccaaaacctctgatccagtggaaaggaaaagaccggatactggatcccacgaagttaggccctcgcatgcatattttccagaatgggtcgctggtcatccatgacgtggcaccggaggactctggacgctatacttgtattgctggaaattcatgcaacatcaaacatacagaagcacccctctacgtcgtagacaagccggtccctgaagaaagtgagggcccgggctctccccccccttacaaaatgatacagaccatcggcttgagcgtgggagctgcagtcgcttacattatcgcagtgctcggcctgatgttttactgcaagaagcgttgcaaagccaagaggctgcaaaagcaacctgagggagaggagcccgaaatggagtgcctgaacggaggcccccttcagaacggtcaaccttcggctgaaatccaggaagaggtagctctgacatctctcggatcaggaccggctgctacaaacaagagacattccaccagcgataagatgcactttcccaggtcctctcttcagcccattaccaccctcggaaagtcagaatttggagaggtcttcctcgctaaagcccagggcctggaggagggtgtggccgagacacttgtcctagtgaagtcgttgcagtccaaggatgaacaacagcaacttgacttccgcagggaactagagatgtttggcaagcttaatcacgccaacgtggtcagacttttaggactctgcagagaggccgagcctcactatatggtgcttgagtacgtggacttgggagatctgaagcagttcctgaggatcagtaaatctaaggacgagaagttgaagagtcaacctctcagcactaaacagaaagtagcgctgtgtactcaggttgctcttggaatggaacatctttcaaacaacaggttcgtgcacaaggatctggcggccaggaattgtttagtgtccgcgcaacgccaggttaaagtctctgcgttaggattgagtaaggacgtctacaacagcgaatattaccattttcggcaggcttgggttcctctgcgttggatgtccccggaggccatcctggagggcgactttagcacaaagtcagacgtctgggcttttggagtcctaatgtgggaggtgttcactcacggggagatgccccacgggggtcaagctgacgatgaggttctcgctgacctgcaggccgggaaagctagactgccccaaccagaaggatgcccgtcgaagctctatagactgatgcagcgctgctgggcgctttctccaaaagaccggccttctttcagcgagattgcctcagctctgggtgatagtactgtggactcaaaaccatag

SEQ ID NO: 304749 - DNA, 3093 bp, Artificial Sequence
  derived and/or modified sequence
atgggagccgctcgcggatcacccgctagaccacgcaggctacctttgttgtcagttttgctgctccctctgttagggggtacccagacagccatagttttcataaagcagccttctagccaggacgctttacaggggaggcgagccctcctccgctgcgaggtggaggcacccggacccgtgcatgtgtactggctgttagacggggctccagttcaggacacagagcgacgcttcgctcaagggtccagtctttcttttgccgctgtagataggttgcaagattccggcacatttcagtgtgtcgctcgagacgacgtgaccggggaggaagctcggtcagcgaacgctagttttaatataaaatggatagaggctgggcctgtcgttctaaaacatcctgcctcagaggcagagatccagcctcagactcaggtcaccctgaggtgccatatcgatgggcatccgagaccaacgtatcagtggtttagggatgggacacctcttagcgatggtcagtcgaatcataccgtcagctctaaggaacgcaatttgaccttacgcccagctggtcctgagcattcaggactctacagttgttgtgcacacagcgcctttggacaggcttgttcttctcagaacttcaccctgtctatagctgatgagtcttttgccagagtcgtgcttgcaccccaggatgtcgtcgtcgcacggtatgaggaagccatgtttcactgccagttcagcgcccaacctcctccgagtctccagtggcttttcgaggatgagacacccattacaaatcgtagtcggccaccccatctgaggcgggctacggtgttcgctaatggttccctgctgctgacacaagttagacccaggaacgctggtatctatcgatgtatcggccaggggcagcgcggaccaccgattatactggaggctaccttgcacctggctgaaatagaggatatgcccctgttcgagcccagggttttcacagcaggctcagaggaaagagttacctgcctgccacccaagggccttccagaaccttctgtttggtgggagcatgccggagtgaggcttcccactcacggaagggtctaccaaaaggggcacgaactggtgctggccaatatagcggagtctgatgctggggtgtatacatgtcacgcagctaaccttgccggacagagaaggcaggacgtcaatataacagtggcaacggtcccatcatggctgaaaaagccccaagatagtcagttagaggagggcaagccaggttatctggattgtttaacccaagccacccccaagcccaccgtggtgtggtacagaaaccagatgctcatttccgaggactctcggtttgaagtattcaagaacggaactctgagaattaactctgtcgaggtgtacgacggtacatggtaccgttgcatgtcctctactcctgctggcagcattgaagctcaggctcgagttcaggtgctagacggttcctccctgcccgaatgggtcactgataacgctgggacactccattttgcacgggttactagagatgatgcaggcaactacacttgcatagcgagcaacggtccacaaggacagattagagcacacgtccagctcaccgtcgccgtatttataacattcaaggtagaaccagaacgtacaaccgtgtaccagggtcatacagctcttctgcaatgtgaagcgcagggggaccccaaaccacttatacagtggaagggtaaagaccgcattcttgacccaaccaaattgggccctagaatgcacatttttcagaacggctccttggtcatccacgacgttgctccagaggatagcggtcggtatacatgcattgctggcaatagctgtaacataaaacacaccgaagctcccttatatgttgtggataaacctgtccccgaagagtcagaggggcctggaagcccacccccatacaaaatgatccagactatcggactttcagtgggggctgccgtggcttacatcatcgctgtcctaggactcatgttctactgtaaaaaacggtgcaaggccaagcgactccagaagcaaccagaaggcgaggagccagagatggaatgccttaacggcggtcccctgcagaatggccaaccctccgctgagatacaggaagaagtagccctcactagcttgggcagtgggccagcagccacaaataagcgccactctactagcgataaaatgcattttccacgcagctctcttcagcctattacgaccctcggcaagtctgaatttggagaagttttcctcgcaaaggcccaaggtttagaagagggagttgctgagactctagtgctagtcaagtctttgcagtccaaggacgaacagcaacagctggattttcgtcgcgagttggagatgtttggaaaattaaaccacgccaacgtagttaggctgctggggctgtgtcgtgaggcagaaccacattacatggtgcttgagtacgttgacctgggagatctgaagcagtttctccgaatctccaagagtaaggacgagaagctcaaatcccagccactatctactaagcagaaggtagctctctgcacacaggtggcgctcggtatggaacacttgtccaataaccggttcgtgcacaaagacttagccgctcgcaactgtctggtttctgcccagcggcaggtgaaggtgtctgctctaggactgtctaaggatgtgtacaacagtgagtactaccactttcgccaggcttgggtgccattacggtggatgagtccggaagctatactggagggcgatttttccaccaaatcggacgtctgggctttcggggtcctcatgtgggaggtcttcactcatggggagatgccccatgggggtcaggccgacgatgaggttcttgccgatctgcaggccggtaaggcacgactgccccagccagagggctgcccctccaaactttatcggttgatgcagcgttgttgggccttgagtccaaaggataggccaagtttctccgagatcgccagtgccctcggcgatagcactgtagacagcaagccttag

SEQ ID NO: 304750 - DNA, 4071 bp, Artificial Sequence
  derived and/or modified sequence
cgcctcgggacgcctcggggtcgggctccggctgcggctgctgctgcggcgcccgcgctccggtgcgctccgcctcctgtgcccgccgcggagcgcagtctgcgcgcccgccgtgcgccctcagctccttttcctgagcccgccgcgatgggagctgcgcggggatccccggccagaccccgccggttgcctctgctcagcgtcctgctgctgccgctgctgggcggtacccagacagccattgtcttcatcaagcagccgtcctcccaggatgcactgcaggggcgccgggcgctgcttcgctgtgaggttgaggctccgggcccggtacatgtgtactggctgctcgatggggcccctgtccaggacacggagcggcgtttcgcccagggcagcagcctgagctttgcagctgtggaccggctgcaggactctggcaccttccagtgtgtggctcgggatgatgtcactggagaagaagcccgcagtgccaacgcctccttcaacatcaaatggattgaggcaggtcctgtggtcctgaagcatccagcctcggaagctgagatccagccacagacccaggtcacacttcgttgccacattgatgggcaccctcggcccacctaccaatggttccgagatgggacccccctttctgatggtcagagcaaccacacagtcagcagcaaggagcggaacctgacgctccggccagctggtcctgagcatagtgggctgtattcctgctgcgcccacagtgcttttggccaggcttgcagcagccagaacttcaccttgagcattgctgatgaaagctttgccagggtggtgctggcaccccaggacgtggtagtagcgaggtatgaggaggccatgttccattgccagttctcagcccagccacccccgagcctgcagtggctctttgaggatgagactcccatcactaaccgcagtcgccccccacacctccgcagagccacagtgtttgccaacgggtctctgctgctgacccaggtccggccacgcaatgcagggatctaccgctgcattggccaggggcagaggggcccacccatcatcctggaagccacacttcacctagcagagattgaagacatgccgctatttgagccacgggtgtttacagctggcagcgaggagcgtgtgacctgccttccccccaagggtctgccagagcccagcgtgtggtgggagcacgcgggagtccggctgcccacccatggcagggtctaccagaagggccacgagctggtgttggccaatattgctgaaagtgatgctggtgtctacacctgccacgcggccaacctggctggtcagcggagacaggatgtcaacatcactgtggccactgtgccctcctggctgaagaagccccaagacagccagctggaggagggcaaacccggctacttggattgcctgacccaggccacaccaaaacctacagttgtctggtacagaaaccagatgctcatctcagaggactcacggttcgaggtcttcaagaatgggaccttgcgcatcaacagcgtggaggtgtatgatgggacatggtaccgttgtatgagcagcaccccagccggcagcatcgaggcgcaagcccgtgtccaagtgctggatgggagcagcctcccagagtgggtgacagacaacgctgggaccctgcattttgcccgggtgactcgagatgacgctggcaactacacttgcattgcctccaacgggccgcagggccagattcgtgcccatgtccagctcactgtggcagtttttatcaccttcaaagtggaaccagagcgtacgactgtgtaccagggccacacagccctactgcagtgcgaggcccagggggaccccaagccgctgattcagtggaaaggcaaggaccgcatcctggaccccaccaagctgggacccaggatgcacatcttccagaatggctccctggtgatccatgacgtggcccctgaggactcaggccgctacacctgcattgcaggcaacagctgcaacatcaagcacacggaggcccccctctatgtcgtggacaagcctgtgccggaggagtcggagggccctggcagccctcccccctacaagatgatccagaccattgggttgtcggtgggtgccgctgtggcctacatcattgccgtgctgggcctcatgttctactgcaagaagcgctgcaaagccaagcggctgcagaagcagcccgagggcgaggagccagagatggaatgcctcaacggtgggcctttgcagaacgggcagccctcagcagagatccaagaagaagtggccttgaccagcttgggctccggccccgcggccaccaacaaacgccacagcacaagtgataagatgcacttcccacggtctagcctgcagcccatcaccacgctggggaagagtgagtttggggaggtgttcctggcaaaggctcagggcttggaggagggagtggcagagaccctggtacttgtgaagagcctgcagagcaaggatgagcagcagcagctggacttccggagggagttggagatgtttgggaagctgaaccacgccaacgtggtgcggctcctggggctgtgccgggaggctgagccccactacatggtgctggaatatgtggatctgggagacctcaagcagttcctgaggatttccaagagcaaggatgaaaaattgaagtcacagcccctcagcaccaagcagaaggtggccctatgcacccaggtagccctgggcatggagcacctgtccaacaaccgctttgtgcataaggacttggctgcgcgtaactgcctggtcagtgcccagagacaagtgaaggtgtctgccctgggcctcagcaaggatgtgtacaacagtgagtactaccacttccgccaggcctgggtgccgctgcgctggatgtcccccgaggccatcctggagggtgacttctctaccaagtctgatgtctgggccttcggtgtgctgatgtgggaagtgtttacacatggagagatgccccatggtgggcaggcagatgatgaagtactggcagatttgcaggctgggaaggctagacttcctcagcccgagggctgcccttccaaactctatcggctgatgcagcgctgctgggccctcagccccaaggaccggccctccttcagtgagattgccagcgccctgggagacagcaccgtggacagcaagccgtgaggagggagcccgctcaggatggcctgggcaggggaggacatctctagagggaagctcacagcatgatgggcaagatccctgtcctcctgggccctgaggcccctgccctagtgcaacaggcattgctgaggtctgagcagggcctggcctttcctcctcttcctcaccctcatcctttgggaggctgacttggacccaaactgggcgactagggctttgagctgggcagttttccctgccacctcttcctctatcagggacagtgtgggtgccacaggtaaccccaatttctggccttcaacttctccccttgaccgggtccaactctgccactcatctgccaactttgcctggggagggctaggcttgggatgagctgggtttgtggggagttccttaatattctcaagttctgggcacacagggttaatgagtctcttggcccactggtcccacttgggggtctagaccaggattatagaggacacagcaagtgagtcctccccactctgggcttgtgcacactgacccagacccacgtcttccccacccttctctcctttcctcatcctaagtgcctggcagatgaaggagttttcaggagcttttgacactatataaaccgccctttttgtatgcaccacgggcggcttttatatgtaattgcagcgtggggtgggtgggcatgggaggtaggggtgggccctggagatgaggagggtgggccatccttaccccacacttttattgttgtcgttttttgtttgttttgtttttttgtttttgtttttgtttttacactcgctgctctcaataaataagcctttttta

SEQ ID NO: 304751 - DNA, 3093 bp, Artificial Sequence
  derived and/or modified sequence
atgggcgccgccagaggcagccccgccagacccagaagactgcccctgctgagcgtgctgctgctgcccctgctgggcggcacccagaccgccatcgtgttcatcaagcagcccagcagccaggacgccctgcagggcagaagagccctgctgagatgcgaggtggaggcccccggccccgtgcacgtgtactggctgctggacggcgcccccgtgcaggacaccgagagaagattcgcccagggcagcagcctgagcttcgccgccgtggacagactgcaggacagcggcaccttccagtgcgtggccagagacgacgtgaccggcgaggaggccagaagcgccaacgccagcttcaacatcaagtggatcgaggccggccccgtggtgctgaagcaccccgccagcgaggccgagatccagccccagacccaggtgaccctgagatgccacatcgacggccaccccagacccacctaccagtggttcagagacggcacccccctgagcgacggccagagcaaccacaccgtgagcagcaaggagagaaacctgaccctgagacccgccggccccgagcacagcggcctgtacagctgctgcgcccacagcgccttcggccaggcctgcagcagccagaacttcaccctgagcatcgccgacgagagcttcgccagagtggtgctggccccccaggacgtggtggtggccagatacgaggaggccatgttccactgccagttcagcgcccagcccccccccagcctgcagtggctgttcgaggacgagacccccatcaccaacagaagcagacccccccacctgagaagagccaccgtgttcgccaacggcagcctgctgctgacccaggtgagacccagaaacgccggcatctacagatgcatcggccagggccagagaggcccccccatcatcctggaggccaccctgcacctggccgagatcgaggacatgcccctgttcgagcccagagtgttcaccgccggcagcgaggagagagtgacctgcctgccccccaagggcctgcccgagcccagcgtgtggtgggagcacgccggcgtgagactgcccacccacggcagagtgtaccagaagggccacgagctggtgctggccaacatcgccgagagcgacgccggcgtgtacacctgccacgccgccaacctggccggccagagaagacaggacgtgaacatcaccgtggccaccgtgcccagctggctgaagaagccccaggacagccagctggaggagggcaagcccggctacctggactgcctgacccaggccacccccaagcccaccgtggtgtggtacagaaaccagatgctgatcagcgaggacagcagattcgaggtgttcaagaacggcaccctgagaatcaacagcgtggaggtgtacgacggcacctggtacagatgcatgagcagcacccccgccggcagcatcgaggcccaggccagagtgcaggtgctggacggcagcagcctgcccgagtgggtgaccgacaacgccggcaccctgcacttcgccagagtgaccagagacgacgccggcaactacacctgcatcgccagcaacggcccccagggccagatcagagcccacgtgcagctgaccgtggccgtgttcatcaccttcaaggtggagcccgagagaaccaccgtgtaccagggccacaccgccctgctgcagtgcgaggcccagggcgaccccaagcccctgatccagtggaagggcaaggacagaatcctggaccccaccaagctgggccccagaatgcacatcttccagaacggcagcctggtgatccacgacgtggcccccgaggacagcggcagatacacctgcatcgccggcaacagctgcaacatcaagcacaccgaggcccccctgtacgtggtggacaagcccgtgcccgaggagagcgagggccccggcagcccccccccctacaagatgatccagaccatcggcctgagcgtgggcgccgccgtggcctacatcatcgccgtgctgggcctgatgttctactgcaagaagagatgcaaggccaagagactgcagaagcagcccgagggcgaggagcccgagatggagtgcctgaacggcggccccctgcagaacggccagcccagcgccgagatccaggaggaggtggccctgaccagcctgggcagcggccccgccgccaccaacaagagacacagcaccagcgacaagatgcacttccccagaagcagcctgcagcccatcaccaccctgggcaagagcgagttcggcgaggtgttcctggccaaggcccagggcctggaggagggcgtggccgagaccctggtgctggtgaagagcctgcagagcaaggacgagcagcagcagctggacttcagaagagagctggagatgttcggcaagctgaaccacgccaacgtggtgagactgctgggcctgtgcagagaggccgagccccactacatggtgctggagtacgtggacctgggcgacctgaagcagttcctgagaatcagcaagagcaaggacgagaagctgaagagccagcccctgagcaccaagcagaaggtggccctgtgcacccaggtggccctgggcatggagcacctgagcaacaacagattcgtgcacaaggacctggccgccagaaactgcctggtgagcgcccagagacaggtgaaggtgagcgccctgggcctgagcaaggacgtgtacaacagcgagtactaccacttcagacaggcctgggtgcccctgagatggatgagccccgaggccatcctggagggcgacttcagcaccaagagcgacgtgtgggccttcggcgtgctgatgtgggaggtgttcacccacggcgagatgccccacggcggccaggccgacgacgaggtgctggccgacctgcaggccggcaaggccagactgccccagcccgagggctgccccagcaagctgtacagactgatgcagagatgctgggccctgagccccaaggacagacccagcttcagcgagatcgccagcgccctgggcgacagcaccgtggacagcaagccctag

SEQ ID NO: 304752 - protein, 396 aa, Artificial Sequence
  derived and/or modified sequence
MPLFEPRVFTAGSEERVTCLPPKGLPEPSVWWEHAGVRLPTHGRVYQKGHELVLANIAESDAGVYTCHAANLAGQRRQDVNITVATVPSWLKKPQDSQLEEGKPGYLDCLTQATPKPTVVWYRNQMLISEDSRFEVFLAKAQGLEEGVAETLVLVKSLQSKDEQQQLDFRRELEMFGKLNHANVVRLLGLCREAEPHYMVLEYVDLGDLKQFLRISKSKDEKLKSQPLSTKQKVALCTQVALGMEHLSNNRFVHKDLAARNCLVSAQRQVKVSALGLSKDVYNSEYYHFRQAWVPLRWMSPEAILEGDFSTKSDVWAFGVLMWEVFTHGEMPHGGQADDEVLADLQAGKARLPQPEGCPSKLYRLMQRCWALSPKDRPSFSEIASALGDSTVDSKP

SEQ ID NO: 304753 - protein, 403 aa, Artificial Sequence
  derived and/or modified sequence
MGSFLSGEKRPSAPTVGSAMEKKEFPTPPGRVGPGTQTAIVFIKQPSSQDALQGRRALLRCEVEAPGPVHVYWLLDGAPVQDTERRFAQGSSLSFAAVDRLQDSGTFQCVARDDVTGEEARSANASFNIKWIEAGPVVLKHPASEAEIQPQTQVTLRCHIDGHPRPTYQWFRDGTPLSDGQSNHTVSSKERNLTLRPAGPEHSGLYSCCAHSAFGQACSSQNFTLSIADESFARVVLAPQDVVVARYEEAMFHCQFSAQPPPSLQWLFEDETPITNRSRPPHLRRATVFANGSLLLTQVRPRNAGIYRCIGQGQRGPPIILEATLHLAEIEDMPLFEPRVFTAGSEERVTCLPPMAGSTRRATSWCWPILLKVMLVSTPATRPTWLVSGDRMSTSLWPLCPPG

SEQ ID NO: 304754 - DNA, 2823 bp, Artificial Sequence
  derived and/or modified sequence
atgggggctgccagaggcagtcccgcaaggcctagaagactgccgttgttaagtgtgctgctccttcccctcctgggcggaactcagaccgccattgtgttcatcaaacaacccagcagccaggacgccttgcaaggtcgccgggccctgctgcgctgtgaagtagaagccccaggccccgttcatgtgtattggctgttggatggagccccagtacaggatactgagcgccggtttgcccaggggagctccctcagtttcgcagccgtggatagactgcaggattcaggaacatttcaatgtgtcgcgcgggatgacgtgaccggagaggaagctcggagcgcgaacgctagcttcaacattaaatggatcgaggcggggcccgtcgtgttaaagcaccccgcttccgaagccgagatccaacctcagacgcaggtgaccctaaggtgccacatagacggacacccccggcccacttatcaatggttcagggacggcacacctctaagcgatggccaatcaaaccacaccgtttcatcaaaagagcgcaatctgacgctccggccagccggacccgaacacagcggactgtactcatgttgcgcccactctgctttcgggcaagcctgttcttctcagaatttcacgctgagcatcgccgatgagtcattcgctcgggtggttctggcccctcaagacgttgtagtcgcgcgctacgaagaagccatgtttcactgccaattttctgctcagcccccaccatcactccaatggctttttgaggacgagaccccaataaccaatcgatcaaggcctcctcatctcagaagagctactgtttttgctaatggcagtttactcctcacacaggtgcggcctagaaatgctggtatttatagatgcatcggtcaggggcaacggggtcctcctataatactagaggcaaccctccacctcgcggagatcgaggacatgcctctattcgagcctcgagtgtttacggctggtagcgaggaaagggttacttgtctgcctccgaagggcctgcctgagccaagcgtttggtgggaacacgcgggcgtgaggttgcccacccatggaagagtgtaccagaaaggccacgagctggtcctggccaatatcgcagagagtgatgccggagtgtacacgtgccacgctgctaacttggccggacagagaaggcaggacgtgaacatcactgtggcgaatggttcaagcctgcctgagtgggtgacggacaacgccggcacactgcatttcgcaagagtgaccagagatgacgccggaaactatacctgcattgcttccaacgggccccagggacagatacgcgcgcatgtgcagttgacggttgccgtgtttatcacattcaaggtcgagcccgagagaacaactgtataccagggacacacggcactgctgcagtgcgaagcacagggcgatcccaaacctctcatccagtggaaaggcaaggatagaatccttgaccctacgaaactggggcctcgtatgcacatattccagaatggctcgctggtgattcacgacgttgcccctgaggattccggcaggtatacctgcatagcaggtaactcctgcaatataaagcacactgaagcccctttgtacgttgtagacaagcccgtgccagaggagtccgagggccctggcagcccgcctccttacaaaatgattcagaccatcggcctgagcgttggggcggccgtcgcctacattatcgcagtgttaggtctcatgttttattgcaagaagaggtgtaaagctaagaggctgcaaaagcagccagagggagaggaacctgaaatggagtgccttaatggaggccccttacaaaatggccaaccctccgccgagattcaggaggaggtggctttgaccagtctgggttccggccccgccgcgacaaataagcgtcattccacttccgacaaaatgcatttccctcggagcagtttacagcctattaccacactcggaaagagcgaattcggcgaggtgtttctggcaaaagcccaggggctcgaagaaggggtagcagaaactcttgtgctggtgaagagtctgcagagtaaagacgaacaacagcagctggactttcgccgggagctggaaatgttcggcaaattaaatcacgctaatgtggtgaggttgctcggactctgcagagaggccgaaccacactatatggtccttgaatacgttgaccttggggatttgaaacagtttctgaggatttcgaaatcaaaagacgaaaagctgaaatcccagccactgtcaaccaagcagaaggtcgccctgtgtacgcaggtagctctgggtatggagcacctgagtaataaccgcttcgtgcacaaagacctcgctgcacgtaactgcttggtgtcagcacagcgccaggtcaaggtttctgctcttggtctgtctaaagatgtgtataactccgaatactaccattttcgccaggcttgggtgccacttaggtggatgtcgcccgaggctatattggaaggggacttttcgaccaaatctgacgtgtgggctttcggtgtgctgatgtgggaagtattcactcacggcgagatgccacacggaggacaggccgatgatgaagtactcgccgacttgcaggcaggcaaagctcgcttgccgcagccagagggctgcccaagcaaactgtacagactgatgcagcgatgctgggccctgagtcccaaagaccggccaagcttcagcgaaatcgccagcgcactgggtgacagcaccgtggactcaaaaccttag

SEQ ID NO: 304755 - DNA, 1212 bp, Artificial Sequence
  derived and/or modified sequence
atgggtagcttccttagcggggaaaaacgaccaagcgcccctacagtcggatccgcaatggaaaaaaaagaatttcccacgcctcctggtcgagttggaccagggacccagacagcgatcgtgttcatcaagcagccctcttctcaggatgctcttcaggggcgccgcgcacttcttagatgtgaagtggaggcacccggacctgtccacgtgtattggctcctcgatggcgcccctgtacaggacactgaacgacgctttgctcagggttcgtccttatccttcgctgctgtggatcggcttcaggatagtggcacattccagtgcgtcgcccgcgatgatgttactggcgaagaggccaggagcgctaatgcgtcttttaacattaagtggattgaagccggtccggttgtcttgaaacatcccgcaagcgaggccgaaatccagccccagactcaggtgacgctcagatgtcatattgacggccatccaagaccaacgtatcagtggttccgtgacgggaccccactctctgacggacaatctaatcataccgtgagctcaaaagagcgaaatctcaccttgagaccggccggccctgagcactccggtttgtattcctgctgcgcgcatagtgccttcggccaggcttgcagttcacaaaattttaccctgagtatcgcggacgaaagttttgcgcgtgtggttctggccccgcaggatgttgtcgtggccagatacgaagaagccatgttccattgccagttttccgcccagcctccgccatccctgcagtggttgtttgaagatgaaactcccattacaaatcgatctcggcccccccatctccgccgtgcaacagtctttgctaacggaagtctgctgctcacacaggtacgaccccgaaatgccggaatttaccggtgtattggtcagggacagcggggacctcctataatcctggaggcaactctgcatctcgctgaaatcgaggatatgcctctgtttgaacctcgagtctttaccgctggatctgaggagagggtgacttgtcttcctccaatggcagggagtactcgtcgcgcaacgagttggtgttggccgatcttgttgaaagtaatgttggtcagcactcccgctacaagacccacttggctggtatcaggggatcgaatgtcaacctcgctgtggccactgtgtccccccggctag

SEQ ID NO: 304756 - DNA, 2823 bp, Artificial Sequence
  derived and/or modified sequence
atgggcgccgcccggggcagccctgcccggccccggcggctgcccctgctgtctgtgctgctgctgcccctgctgggcggcacccagacagccatcgtgttcatcaagcagcccagcagccaggatgccctgcagggcagaagagccctgctgcgctgtgaggtggaggcccctggccctgtgcacgtgtactggctgctggatggagcccctgtgcaggacacagaaagaagatttgcccagggcagcagcctgagctttgctgctgtggaccggctgcaggacagcggcaccttccagtgtgtggccagagatgatgtgactggagaggaggcccggagcgccaatgccagcttcaacatcaagtggattgaggccggccctgtggtgctgaagcacccagccagcgaggccgagatccagccccagacccaggtgaccctgcgctgccacattgatggccacccccggcccacctaccagtggttcagagatggcacccccctgagtgatggccagagcaaccacacagtgagcagcaaggagaggaacctgaccctgcggcctgctggccctgagcacagcggcctgtacagctgctgtgcccacagcgccttcggccaggcctgcagcagccagaacttcaccctgagcattgctgatgagagctttgcccgggtggtgctggccccccaggatgtggtggtggcccgctatgaggaggccatgttccactgccagttcagcgcccagcccccacccagcctgcagtggctgtttgaagatgagacccccatcaccaacagaagccggcccccccacctgcggcgggccaccgtgtttgccaacggcagcctgctgctgacccaggtgcggcccagaaatgccggcatctaccgctgcatcggccagggccagaggggcccccccatcatcctggaggccaccctgcacctggccgagattgaggacatgcccctgtttgagcccagggtcttcaccgctggcagcgaggagcgggtgacctgcctgccccccaagggcctgcctgagcccagcgtgtggtgggagcacgccggcgtgcggctgcccacccacggccgggtgtaccagaagggccacgagctggtgctggccaacattgctgagagtgatgctggggtgtacacctgccacgccgccaacctggccggccagaggcggcaggatgtgaacatcaccgtggccaacggcagcagcctgcctgagtgggtgacagacaatgccggcaccctgcactttgcccgggtgaccagagatgatgctggcaactacacctgcatcgccagcaatggcccccagggccagatccgggcccacgtgcagctgactgtggccgtgttcatcaccttcaaggtggagcctgagaggaccaccgtgtaccagggccacacagccctgctgcagtgtgaggcccagggcgaccccaagcccctcatccagtggaagggcaaggaccgcatcctggaccccaccaagctgggccccaggatgcacatcttccagaatggcagcctggtgattcatgatgtggccccagaagattctggccgctacacctgcatcgccggcaacagctgcaacatcaagcacacagaggcccccctgtatgtggtggacaagcctgtgcctgaggagagcgagggccctggcagccccccaccctacaagatgatccagaccatcggcctgtctgtgggcgctgctgtggcctacatcatcgctgtgctgggcctgatgttctactgcaagaagcgctgcaaggccaagaggctgcagaagcagcctgagggggaggagcctgagatggagtgcctgaatggaggccccctgcagaatggccagcccagcgctgagatccaggaggaggtggccctgaccagcctgggcagcggccctgctgccaccaacaagaggcacagcaccagtgacaagatgcacttccccaggagcagcctgcagcccatcaccaccctgggcaagtcagaatttggagaggtgttcctggccaaggcccagggcctggaggagggcgtggccgagaccctggtgctggtgaagagcctgcagagcaaggatgagcagcagcagctggacttccggcgggagctggagatgtttgggaagctgaaccacgccaacgtggtgcggctgctgggcctgtgccgggaggccgagccccactacatggtgctggagtatgtggacctgggggacctgaagcagttcctgcgcatcagcaagagcaaggatgagaagctgaagagccagcccctgagcaccaagcagaaggtggccctgtgcacccaggtggccctgggcatggagcacctgagcaacaacagatttgtgcacaaggacctggccgccaggaactgcctggtgtctgcccagaggcaggtgaaggtgtctgccctgggcctgagcaaggatgtgtacaacagcgagtactaccacttccggcaggcctgggtgcccctgcgctggatgagccctgaggccatcctggagggggacttcagcaccaagagtgatgtgtgggccttcggcgtgctgatgtgggaggtgttcacccacggggagatgcctcatggaggccaggctgatgatgaggtgctggccgacctgcaggccggcaaggcccggctgccccagcctgagggctgccccagcaagctgtaccgcctgatgcagcgctgctgggccctgagccccaaggaccggcccagcttcagcgagatcgccagcgccctgggggacagcacagtggacagcaagccctag

SEQ ID NO: 304757 - DNA, 1212 bp, Artificial Sequence
  derived and/or modified sequence
atgggcagcttcctgagcggggagaagaggcccagcgcccccaccgtgggcagcgccatggagaagaaggagttccccaccccacctggccgggtgggccctggcacccagacagccatcgtgttcatcaagcagcccagcagccaggatgccctgcagggcagaagagccctgctgcgctgtgaggtggaggcccctggccctgtgcacgtgtactggctgctggatggagcccctgtgcaggacacagaaagaagatttgcccagggcagcagcctgagctttgctgctgtggaccggctgcaggacagcggcaccttccagtgtgtggccagagatgatgtgactggagaggaggcccggagcgccaatgccagcttcaacatcaagtggattgaggccggccctgtggtgctgaagcacccagccagcgaggccgagatccagccccagacccaggtgaccctgcgctgccacattgatggccacccccggcccacctaccagtggttcagagatggcacccccctgagtgatggccagagcaaccacacagtgagcagcaaggagaggaacctgaccctgcggcctgctggccctgagcacagcggcctgtacagctgctgtgcccacagcgccttcggccaggcctgcagcagccagaacttcaccctgagcattgctgatgagagctttgcccgggtggtgctggccccccaggatgtggtggtggcccgctatgaggaggccatgttccactgccagttcagcgcccagcccccacccagcctgcagtggctgtttgaagatgagacccccatcaccaacagaagccggcccccccacctgcggcgggccaccgtgtttgccaacggcagcctgctgctgacccaggtgcggcccagaaatgccggcatctaccgctgcatcggccagggccagaggggcccccccatcatcctggaggccaccctgcacctggccgagattgaggacatgcccctgtttgagcccagggtcttcaccgctggcagcgaggagcgggtgacctgcctgccccccatggccggcagcacccggcgggccacctcctggtgctggcccatcctgctgaaggtgatgctggtgtccaccccagccacccggcccacctggctggtgtctggggacaggatgagcaccagcctgtggcccctgtgccccccaggatag

SEQ ID NO: 304758 - DNA, 2823 bp, Artificial Sequence
  derived and/or modified sequence
atgggcgccgcccggggcagccccgcccggccccggcggctgcccctgctgagcgttttactcttaccattactgggcggaactcaaaccgccatcgtctttatcaagcagccaagttcccaagatgcactacagggacgacgggcattgctccgctgcgaagtggaggcccccgggcctgttcatgtctattggttactggatggggcacctgtgcaagataccgagcggcgatttgcccagggctcaagcctcagctttgctgccgtcgatcggcttcaggattcagggacctttcagtgcgtcgcaagagacgacgtgacaggcgaagaagccagatccgctaacgccagttttaatattaaatggatagaagccggtcccgtcgttctcaagcaccccgcttctgaagccgagattcaacctcagacccaggtaacgcttcgatgccacatcgatggacaccctaggcctacataccagtggttccgagacggtacacctcttagcgatgggcagagcaatcacacagtgtccagcaaagaaagaaacctgacactgcgcccagcaggtccagaacactcagggctttacagttgctgcgcgcactccgctttcggacaggcttgttcaagccagaatttcaccctttctattgcagacgagtctttcgcccgtgtcgtgctggctccacaagacgtggtggtggcacgctacgaagaggcaatgttccattgtcagttctcggctcagcccccacctagcctgcagtggctctttgaggatgagacccctattaccaataggtcacgtccccctcatttaaggagggccactgtgttcgctaatggatcgctcttattaacacaggtgcggccccggaatgctggcatttaccggtgcattgggcaggggcaacgagggccccctatcattcttgaagccaccctgcacctggccgagatagaggatatgccgctctttgagccacgtgtatttacagccggcagcgaagaacgggttacgtgtcttcctcctaaaggccttcccgagccctccgtttggtgggagcacgctggcgtgcgactgcctacacacggcagagtctaccagaaagggcacgagcttgtccttgccaacattgcggaatctgacgccggggtatatacatgccatgcggcaaaccttgcaggtcagcgcagacaggacgtcaatatcacggtcgccaatgggagcagtctacccgagtgggtgaccgacaatgcgggcacacttcattttgctagagtcacgcgggacgatgccggaaactatacgtgcatcgcttctaacggcccccaagggcagatccgcgcacatgtgcaactgacagtagccgtatttataacgttcaaggtcgaaccagagaggactacagtataccaaggacatacagctttacttcaatgcgaggcgcagggtgatcctaagccgttaattcagtggaagggaaaagaccggatccttgatccaacgaaactggggccacgcatgcacatctttcaaaacggctcccttgtgatccatgatgtggcccccgaggacagcggacgctacacatgtattgcagggaatagttgcaacatcaaacatactgaggcacccctctatgtggtcgacaagccagtgcccgaagagagcgagggccctggctctccgcccccctacaaaatgatacaaaccatcggcttatcagtcggagcggctgttgcatacatcattgcagtgttaggcttgatgttctattgtaaaaagcgctgtaaggctaaaaggctccaaaagcaacccgagggcgaggagcccgagatggagtgtctcaacggggggcccttgcagaatggccagccgtcagcagagattcaggaggaggtggccctgacaagcctggggtcggggccagccgctactaacaaaagacattcaacttcagataagatgcacttccccagatcttcgcttcagcctattaccacactgggtaaaagtgagtttggggaagtatttcttgctaaggcgcagggactggaagagggcgtagccgagaccctcgtgctagtgaaatcgctgcagtctaaggacgaacaacagcagctcgacttccgacgcgaacttgaaatgttcgggaaactcaatcacgccaatgtcgtccggctgttgggcctgtgccgagaggcagagccacactatatggtgctggaatatgtcgatctgggcgacctgaagcagtttctgcgcattagtaagtccaaagacgagaagctgaagtctcagccactttccaccaaacagaaggtagctctttgtacccaggtggccttaggcatggagcacctgagcaataatcgattcgttcataaagacctggctgcaagaaactgcctcgtcagcgcgcagcgccaggtgaaggttagcgcacttggcctcagcaaggacgtgtacaatagcgagtattaccacttccggcaggcctgggtgcccctcagatggatgagtcccgaagcgatattggagggggatttttctaccaagagcgatgtgtgggcattcggtgtgttgatgtgggaggtgttcacccacggtgaaatgccgcacggcgggcaggccgacgacgaggtcctcgctgatctgcaagccggtaaggcaaggctgccacaacctgagggatgcccgtctaagctgtacagacttatgcaacgctgttgggctctgtcacctaaggatcggccctccttttctgaaatcgcatctgccctgggagacagtaccgttgatagtaaaccctag

SEQ ID NO: 304759 - DNA, 1212 bp, Artificial Sequence
  derived and/or modified sequence
atgggcagcttcctgagcggcgagaagcggcccagcgcccccaccgtgggctctgccatggagaaaaaagaattccccacccctccagggcgggttggccccggaacgcaaactgcaatcgtatttattaagcagcccagttcacaggatgcactgcagggcagacgcgccctgcttagatgcgaagtggaggcccctggcccagtccacgtgtactggctccttgacggggcccctgttcaggataccgaacgtagatttgcccagggctctagcctttcctttgccgcagtggaccgcctgcaggactccggcaccttccaatgcgtcgcccgggacgatgtgaccggcgaggaggctcggtccgcgaacgccagcttcaacattaagtggattgaggcaggccccgtggtgcttaagcacccagccagcgaagcggaaatccagcctcagacgcaggtgaccttgaggtgccacatagacggccatccccggccaacctatcagtggtttcgggacggcaccccgctgtccgacggccagtccaatcacaccgttagcagtaaagaaaggaacttgacgctccgaccagccggacctgaacattccggactttattcgtgttgcgcacactcggcctttggccaggcttgctcttctcagaactttaccttgtctatcgctgatgagtccttcgcgcgtgtggtactggcccctcaggacgtggttgttgcacggtatgaggaagccatgtttcattgccaattctcagcccagcctcctccatctctgcaatggttgtttgaggacgagacccccattaccaaccgctctcgcccacctcacctccggagagccactgtgttcgcgaacgggagcctgcttctgacccaggtccggcctcgcaatgctggaatttacagatgtataggccaggggcagcgcggccctcctatcatcctggaggctactctccacctggctgaaattgaagacatgcccctcttcgagccccgggtgttcacagctggatcggaggaaagggttacctgtctcccccccatggccggcagcacacgaagagccaccagctggtgctggcccatcctgctgaaagttatgcttgtatctacccctgcaactaggccaacatggcttgtttcaggagaccggatgtccactagcctatggccactgtgcccacccggatag

SEQ ID NO: 304760 - DNA, 2823 bp, Artificial Sequence
  derived and/or modified sequence
atgggtgcagcaagaggcagtcctgcccgtccaagaaggctccctttgctcagtgtcctgctgttgcccctcctggggggtacacaaaccgcaattgtgtttatcaaacaaccttcatcacaggacgcactacagggccgtagagccctattgcgctgcgaggtggaggcccctggccctgtgcacgtgtactggctgttggatggcgctcctgtgcaggacactgaaagaaggtttgcgcaaggatcctccttgtcttttgctgccgtggacagactgcaggactccggcacattccagtgtgtggcccgtgatgacgtcacgggggaagaagctcgatcggcgaatgcttccttcaatattaagtggatcgaagctggccctgtggtgctcaaacaccctgcttccgaggccgaaatccaaccacaaacacaggtgactctgcgctgccacatagatgggcatcctagacccacgtaccagtggttcagggacggcacccccttgagcgatgggcagtctaaccatacagttagctcaaaggagcggaacctgacactgcggccagccggaccggagcactccgggctctacagctgttgtgcgcattctgctttcggtcaggcttgctcttcacagaattttacactgagtatcgccgatgaatccttcgccagggttgtactggccccacaggacgttgtcgtcgcaagatacgaggaggctatgttccattgtcaattcagcgcccagccacctccctccctgcagtggctgttcgaagacgagactccaataacaaaccgatcccggccaccacacctgcgcagggcaacagtgttcgcaaacggcagtctccttctcactcaggtgaggccgcgtaacgctggcatatacaggtgcatcggacaggggcaacgcggtccccctatcattctcgaggccacgctccacctcgctgagatcgaggatatgccactttttgaacccagggtattcaccgccggatctgaggagagggtgacgtgcctgcccccaaaaggtctccccgaaccctcagtctggtgggaacatgccggtgtgcgcttaccgacacacggaagggtttaccagaaagggcacgagcttgtcctcgccaatatcgcagaatctgatgccggtgtgtacacatgtcatgcagccaacctagctggccaacgtaggcaagatgttaatatcaccgttgcgaacgggagttccctgcctgaatgggttacagacaatgctgggaccctgcactttgcaagggtcacgcgagatgatgcaggaaattatacgtgtatcgcctcgaatggaccacaggggcagatccgcgctcacgtacagctcaccgtggccgtcttcattacattcaaagtggaacctgagcgaaccacagtttaccaggggcatacggcgttgctgcaatgcgaggctcagggtgatcctaaacctctaatccaatggaagggcaaagaccgaatccttgatcccactaagctgggaccccgaatgcacattttccagaacgggagcctggtcattcatgatgtggcaccagaggatagcggaaggtacacttgcattgcaggcaactcttgcaatattaaacacactgaggcacctttatacgtggtggacaaacctgtgcctgaggagagcgaagggccagggtccccccctccatataagatgatacaaaccattggcctctctgtcggcgctgccgtggcgtatataatagccgtgttgggcctgatgttctactgtaagaagcgatgcaaggccaaacgattacaaaaacagccagagggagaagagcccgagatggagtgcctgaatggaggaccccttcagaatggccagccatctgccgaaattcaggaagaggtcgctttgaccagtctgggcagcgggcctgccgctactaataagcgtcacagtactagcgacaagatgcactttccacgctcttcacttcagcccatcactactctcggcaaatctgaattcggagaagtcttcctggccaaggcacagggcctggaagagggggtggcagagacgctggtgctggtgaagtcgcttcagagcaaagacgagcaacagcagttagacttccgacgagagcttgaaatgttcgggaaactgaatcacgccaacgttgtgcgccttctaggcttgtgcagggaggcggagcctcactacatggtcctggagtatgtcgacctgggtgatcttaaacagttcctgcggataagcaagtctaaggacgaaaagctgaagagtcaacccctgagcactaagcagaaagtggccctgtgtacccaggtggccctcggcatggagcatttatccaataacagattcgtccataaagacctggctgcaaggaattgtctcgtgtccgcacagagacaggttaaggttagcgccctgggtctctccaaagacgtgtacaactccgaatattaccatttcaggcaggcctgggtccctctgcgctggatgtctcctgaagctatcctagagggggacttctccacaaagagcgatgtatgggcctttggtgtcttaatgtgggaagtttttactcatggagaaatgccacacggcggtcaggccgatgatgaggtcctggcagatctgcaagccggtaaggccaggctgcctcaaccagagggctgtccttccaaactctataggttgatgcagagatgctgggctctgtctccgaaagatcggccaagcttttcagaaattgcctctgccctgggcgattctacggtggattcgaagccttag

SEQ ID NO: 304761 - DNA, 1212 bp, Artificial Sequence
  derived and/or modified sequence
atgggctcattcctcagcggcgaaaaaagaccatccgcccctaccgtcggttccgccatggaaaaaaaggagttccctaccccaccagggagagtgggtccaggtacacagaccgccattgtcttcattaagcagcctagctcacaggacgccctccaggggaggcgtgctctcctgaggtgcgaggtggaagcacccggacccgtccatgtgtactggctgctggacggcgctccagtgcaagacacagaaaggaggtttgcccagggcagctccctgtcattcgccgctgttgaccggcttcaggattccggcaccttccagtgcgtggcccgagacgacgttactggagaggaggccaggtctgccaacgcgtcatttaacattaaatggatcgaagccggaccagtcgtgctcaagcaccctgctagcgaggctgaaatccagccacaaacgcaggtgacactgcgctgtcatatcgacggacatcccagacctacctatcagtggttccgggacggaaccccactatccgacgggcagtcgaaccacacggtatcatccaaagagcggaacctcactttacggcctgcaggtcccgaacactcaggactgtactcatgctgtgcgcactccgcctttggacaggcctgcagttcacaaaactttaccctatccatcgcagatgagtcatttgcaagagtggtgttggcaccacaggacgtcgtagtggctagatacgaggaggctatgtttcactgtcagttctccgctcagccacccccatctctgcaatggctatttgaggacgagacccccatcactaaccgctccaggcctccacatcttagacgggcaaccgttttcgccaatggatctctactgctgacacaagtgaggcctaggaacgccggaatctatcgatgcatcgggcaagggcagcgtggccctccaatcattctagaagctactctgcatttggctgagatagaagacatgcccctgttcgagccccgtgtatttacagccggatccgaggagagagtgacctgtttgccgcctatggccggaagtacaagaagagccacaagttggtgctggccgatcctgctgaaggtgatgctggtttcgaccccagcaaccagaccaacctggctggtgagtggcgaccgaatgagtacaagcctgtggcctctgtgtccccctggatag

SEQ ID NO: 304762 - DNA, 3801 bp, Artificial Sequence
  derived and/or modified sequence
cgcctcgggacgcctcggggtcgggctccggctgcggctgctgctgcggcgcccgcgctccggtgcgctccgcctcctgtgcccgccgcggagcgcagtctgcgcgcccgccgtgcgccctcagctccttttcctgagcccgccgcgatgggagctgcgcggggatccccggccagaccccgccggttgcctctgctcagcgtcctgctgctgccgctgctgggcggtacccagacagccattgtcttcatcaagcagccgtcctcccaggatgcactgcaggggcgccgggcgctgcttcgctgtgaggttgaggctccgggcccggtacatgtgtactggctgctcgatggggcccctgtccaggacacggagcggcgtttcgcccagggcagcagcctgagctttgcagctgtggaccggctgcaggactctggcaccttccagtgtgtggctcgggatgatgtcactggagaagaagcccgcagtgccaacgcctccttcaacatcaaatggattgaggcaggtcctgtggtcctgaagcatccagcctcggaagctgagatccagccacagacccaggtcacacttcgttgccacattgatgggcaccctcggcccacctaccaatggttccgagatgggacccccctttctgatggtcagagcaaccacacagtcagcagcaaggagcggaacctgacgctccggccagctggtcctgagcatagtgggctgtattcctgctgcgcccacagtgcttttggccaggcttgcagcagccagaacttcaccttgagcattgctgatgaaagctttgccagggtggtgctggcaccccaggacgtggtagtagcgaggtatgaggaggccatgttccattgccagttctcagcccagccacccccgagcctgcagtggctctttgaggatgagactcccatcactaaccgcagtcgccccccacacctccgcagagccacagtgtttgccaacgggtctctgctgctgacccaggtccggccacgcaatgcagggatctaccgctgcattggccaggggcagaggggcccacccatcatcctggaagccacacttcacctagcagagattgaagacatgccgctatttgagccacgggtgtttacagctggcagcgaggagcgtgtgacctgccttccccccaagggtctgccagagcccagcgtgtggtgggagcacgcgggagtccggctgcccacccatggcagggtctaccagaagggccacgagctggtgttggccaatattgctgaaagtgatgctggtgtctacacctgccacgcggccaacctggctggtcagcggagacaggatgtcaacatcactgtggccaatgggagcagcctcccagagtgggtgacagacaacgctgggaccctgcattttgcccgggtgactcgagatgacgctggcaactacacttgcattgcctccaacgggccgcagggccagattcgtgcccatgtccagctcactgtggcagtttttatcaccttcaaagtggaaccagagcgtacgactgtgtaccagggccacacagccctactgcagtgcgaggcccagggggaccccaagccgctgattcagtggaaaggcaaggaccgcatcctggaccccaccaagctgggacccaggatgcacatcttccagaatggctccctggtgatccatgacgtggcccctgaggactcaggccgctacacctgcattgcaggcaacagctgcaacatcaagcacacggaggcccccctctatgtcgtggacaagcctgtgccggaggagtcggagggccctggcagccctcccccctacaagatgatccagaccattgggttgtcggtgggtgccgctgtggcctacatcattgccgtgctgggcctcatgttctactgcaagaagcgctgcaaagccaagcggctgcagaagcagcccgagggcgaggagccagagatggaatgcctcaacggtgggcctttgcagaacgggcagccctcagcagagatccaagaagaagtggccttgaccagcttgggctccggccccgcggccaccaacaaacgccacagcacaagtgataagatgcacttcccacggtctagcctgcagcccatcaccacgctggggaagagtgagtttggggaggtgttcctggcaaaggctcagggcttggaggagggagtggcagagaccctggtacttgtgaagagcctgcagagcaaggatgagcagcagcagctggacttccggagggagttggagatgtttgggaagctgaaccacgccaacgtggtgcggctcctggggctgtgccgggaggctgagccccactacatggtgctggaatatgtggatctgggagacctcaagcagttcctgaggatttccaagagcaaggatgaaaaattgaagtcacagcccctcagcaccaagcagaaggtggccctatgcacccaggtagccctgggcatggagcacctgtccaacaaccgctttgtgcataaggacttggctgcgcgtaactgcctggtcagtgcccagagacaagtgaaggtgtctgccctgggcctcagcaaggatgtgtacaacagtgagtactaccacttccgccaggcctgggtgccgctgcgctggatgtcccccgaggccatcctggagggtgacttctctaccaagtctgatgtctgggccttcggtgtgctgatgtgggaagtgtttacacatggagagatgccccatggtgggcaggcagatgatgaagtactggcagatttgcaggctgggaaggctagacttcctcagcccgagggctgcccttccaaactctatcggctgatgcagcgctgctgggccctcagccccaaggaccggccctccttcagtgagattgccagcgccctgggagacagcaccgtggacagcaagccgtgaggagggagcccgctcaggatggcctgggcaggggaggacatctctagagggaagctcacagcatgatgggcaagatccctgtcctcctgggccctgaggcccctgccctagtgcaacaggcattgctgaggtctgagcagggcctggcctttcctcctcttcctcaccctcatcctttgggaggctgacttggacccaaactgggcgactagggctttgagctgggcagttttccctgccacctcttcctctatcagggacagtgtgggtgccacaggtaaccccaatttctggccttcaacttctccccttgaccgggtccaactctgccactcatctgccaactttgcctggggagggctaggcttgggatgagctgggtttgtggggagttccttaatattctcaagttctgggcacacagggttaatgagtctcttggcccactggtcccacttgggggtctagaccaggattatagaggacacagcaagtgagtcctccccactctgggcttgtgcacactgacccagacccacgtcttccccacccttctctcctttcctcatcctaagtgcctggcagatgaaggagttttcaggagcttttgacactatataaaccgccctttttgtatgcaccacgggcggcttttatatgtaattgcagcgtggggtgggtgggcatgggaggtaggggtgggccctggagatgaggagggtgggccatccttaccccacacttttattgttgtcgttttttgtttgttttgtttttttgtttttgtttttgtttttacactcgctgctctcaataaataagcctttttta

SEQ ID NO: 304763 - DNA, 1736 bp, Artificial Sequence
  derived and/or modified sequence
gctcgagaactgccgagagttgctggctctcgggcccagatggggagtttcttgtcgggggagaaaagaccatccgcacccaccgtggggagcgcgatggagaaaaaggaattccccaccccacccggcagggtcggcccaggtacccagacagccattgtcttcatcaagcagccgtcctcccaggatgcactgcaggggcgccgggcgctgcttcgctgtgaggttgaggctccgggcccggtacatgtgtactggctgctcgatggggcccctgtccaggacacggagcggcgtttcgcccagggcagcagcctgagctttgcagctgtggaccggctgcaggactctggcaccttccagtgtgtggctcgggatgatgtcactggagaagaagcccgcagtgccaacgcctccttcaacatcaaatggattgaggcaggtcctgtggtcctgaagcatccagcctcggaagctgagatccagccacagacccaggtcacacttcgttgccacattgatgggcaccctcggcccacctaccaatggttccgagatgggacccccctttctgatggtcagagcaaccacacagtcagcagcaaggagcggaacctgacgctccggccagctggtcctgagcatagtgggctgtattcctgctgcgcccacagtgcttttggccaggcttgcagcagccagaacttcaccttgagcattgctgatgaaagctttgccagggtggtgctggcaccccaggacgtggtagtagcgaggtatgaggaggccatgttccattgccagttctcagcccagccacccccgagcctgcagtggctctttgaggatgagactcccatcactaaccgcagtcgccccccacacctccgcagagccacagtgtttgccaacgggtctctgctgctgacccaggtccggccacgcaatgcagggatctaccgctgcattggccaggggcagaggggcccacccatcatcctggaagccacacttcacctagcagagattgaagacatgccgctatttgagccacgggtgtttacagctggcagcgaggagcgtgtgacctgccttccccccatggcagggtctaccagaagggccacgagctggtgttggccaatattgctgaaagtgatgctggtgtctacacctgccacgcggccaacctggctggtcagcggagacaggatgtcaacatcactgtggccactgtgccctcctggctgaagaagccccaagacagccagctggaggagggcaaacccggctacttggattgcctgacccaggccacaccaaaacctacagttgtctggtacagaaaccagatgctcatctcagaggactcacggttcgaggtcttcaagaatgggaccttgcgcatcaacagcgtggaggtgtatgatgggacatggtaccgttgtatgagcagcaccccagccggcagcatcgaggcgcaagcccgtgtccaagtgctggaaaagctcaagttcacaccaccaccccagccacagcagtgcatggagtttgacaaggaggccacggtgccctgttcagccacaggccgagagaagcccactattaagtgggaacgggcagatgggagcagcctcccagagtgggtgacagacaacgctgggaccctgcattttgcccgggtgactcgagatgacgctggcaactacacttgcattgcctccaacgggccgcag

SEQ ID NO: 304764 - DNA, 2823 bp, Artificial Sequence
  derived and/or modified sequence
atgggcgccgccagaggcagccccgccagacccagaagactgcccctgctgagcgtgctgctgctgcccctgctgggcggcacccagaccgccatcgtgttcatcaagcagcccagcagccaggacgccctgcagggcagaagagccctgctgagatgcgaggtggaggcccccggccccgtgcacgtgtactggctgctggacggcgcccccgtgcaggacaccgagagaagattcgcccagggcagcagcctgagcttcgccgccgtggacagactgcaggacagcggcaccttccagtgcgtggccagagacgacgtgaccggcgaggaggccagaagcgccaacgccagcttcaacatcaagtggatcgaggccggccccgtggtgctgaagcaccccgccagcgaggccgagatccagccccagacccaggtgaccctgagatgccacatcgacggccaccccagacccacctaccagtggttcagagacggcacccccctgagcgacggccagagcaaccacaccgtgagcagcaaggagagaaacctgaccctgagacccgccggccccgagcacagcggcctgtacagctgctgcgcccacagcgccttcggccaggcctgcagcagccagaacttcaccctgagcatcgccgacgagagcttcgccagagtggtgctggccccccaggacgtggtggtggccagatacgaggaggccatgttccactgccagttcagcgcccagcccccccccagcctgcagtggctgttcgaggacgagacccccatcaccaacagaagcagacccccccacctgagaagagccaccgtgttcgccaacggcagcctgctgctgacccaggtgagacccagaaacgccggcatctacagatgcatcggccagggccagagaggcccccccatcatcctggaggccaccctgcacctggccgagatcgaggacatgcccctgttcgagcccagagtgttcaccgccggcagcgaggagagagtgacctgcctgccccccaagggcctgcccgagcccagcgtgtggtgggagcacgccggcgtgagactgcccacccacggcagagtgtaccagaagggccacgagctggtgctggccaacatcgccgagagcgacgccggcgtgtacacctgccacgccgccaacctggccggccagagaagacaggacgtgaacatcaccgtggccaacggcagcagcctgcccgagtgggtgaccgacaacgccggcaccctgcacttcgccagagtgaccagagacgacgccggcaactacacctgcatcgccagcaacggcccccagggccagatcagagcccacgtgcagctgaccgtggccgtgttcatcaccttcaaggtggagcccgagagaaccaccgtgtaccagggccacaccgccctgctgcagtgcgaggcccagggcgaccccaagcccctgatccagtggaagggcaaggacagaatcctggaccccaccaagctgggccccagaatgcacatcttccagaacggcagcctggtgatccacgacgtggcccccgaggacagcggcagatacacctgcatcgccggcaacagctgcaacatcaagcacaccgaggcccccctgtacgtggtggacaagcccgtgcccgaggagagcgagggccccggcagcccccccccctacaagatgatccagaccatcggcctgagcgtgggcgccgccgtggcctacatcatcgccgtgctgggcctgatgttctactgcaagaagagatgcaaggccaagagactgcagaagcagcccgagggcgaggagcccgagatggagtgcctgaacggcggccccctgcagaacggccagcccagcgccgagatccaggaggaggtggccctgaccagcctgggcagcggccccgccgccaccaacaagagacacagcaccagcgacaagatgcacttccccagaagcagcctgcagcccatcaccaccctgggcaagagcgagttcggcgaggtgttcctggccaaggcccagggcctggaggagggcgtggccgagaccctggtgctggtgaagagcctgcagagcaaggacgagcagcagcagctggacttcagaagagagctggagatgttcggcaagctgaaccacgccaacgtggtgagactgctgggcctgtgcagagaggccgagccccactacatggtgctggagtacgtggacctgggcgacctgaagcagttcctgagaatcagcaagagcaaggacgagaagctgaagagccagcccctgagcaccaagcagaaggtggccctgtgcacccaggtggccctgggcatggagcacctgagcaacaacagattcgtgcacaaggacctggccgccagaaactgcctggtgagcgcccagagacaggtgaaggtgagcgccctgggcctgagcaaggacgtgtacaacagcgagtactaccacttcagacaggcctgggtgcccctgagatggatgagccccgaggccatcctggagggcgacttcagcaccaagagcgacgtgtgggccttcggcgtgctgatgtgggaggtgttcacccacggcgagatgccccacggcggccaggccgacgacgaggtgctggccgacctgcaggccggcaaggccagactgccccagcccgagggctgccccagcaagctgtacagactgatgcagagatgctgggccctgagccccaaggacagacccagcttcagcgagatcgccagcgccctgggcgacagcaccgtggacagcaagccctag

SEQ ID NO: 304765 - DNA, 1212 bp, Artificial Sequence
  derived and/or modified sequence
atgggcagcttcctgagcggcgagaagagacccagcgcccccaccgtgggcagcgccatggagaagaaggagttccccaccccccccggcagagtgggccccggcacccagaccgccatcgtgttcatcaagcagcccagcagccaggacgccctgcagggcagaagagccctgctgagatgcgaggtggaggcccccggccccgtgcacgtgtactggctgctggacggcgcccccgtgcaggacaccgagagaagattcgcccagggcagcagcctgagcttcgccgccgtggacagactgcaggacagcggcaccttccagtgcgtggccagagacgacgtgaccggcgaggaggccagaagcgccaacgccagcttcaacatcaagtggatcgaggccggccccgtggtgctgaagcaccccgccagcgaggccgagatccagccccagacccaggtgaccctgagatgccacatcgacggccaccccagacccacctaccagtggttcagagacggcacccccctgagcgacggccagagcaaccacaccgtgagcagcaaggagagaaacctgaccctgagacccgccggccccgagcacagcggcctgtacagctgctgcgcccacagcgccttcggccaggcctgcagcagccagaacttcaccctgagcatcgccgacgagagcttcgccagagtggtgctggccccccaggacgtggtggtggccagatacgaggaggccatgttccactgccagttcagcgcccagcccccccccagcctgcagtggctgttcgaggacgagacccccatcaccaacagaagcagacccccccacctgagaagagccaccgtgttcgccaacggcagcctgctgctgacccaggtgagacccagaaacgccggcatctacagatgcatcggccagggccagagaggcccccccatcatcctggaggccaccctgcacctggccgagatcgaggacatgcccctgttcgagcccagagtgttcaccgccggcagcgaggagagagtgacctgcctgccccccatggccggcagcaccagaagagccaccagctggtgctggcccatcctgctgaaggtgatgctggtgagcacccccgccaccagacccacctggctggtgagcggcgacagaatgagcaccagcctgtggcccctgtgcccccccggctag

SEQ ID NO: 304766 - protein, 658 aa, Artificial Sequence
  derived and/or modified sequence
MADRLEALESHPTDELERTTEVAISVLSTWLASHPEDFGSEAKGQLDRLESFLLQTGYAAGKGVGGGSADLIRNLRSRVDPQAPDLPKPLALPGDPPADPTDVLVFLADHLAEQLTLLDAELFLNLIPSQCLGGLWGHRDRPGHSHLCPSVRATVTQFNKVAGAVVSSVLGATSTGEGPGEVTIRPLRPPQRARLLEKWIRVAEECRLLRNFSSVYAVVSALQSSPIHRLRAAWGEATRDSLRVFSSLCQIFSEEDNYSQSRELLVQEVKLQSPLEPHSKKAPRSGSRGGGVVPYLGTFLKDLVMLDAASKDELENGYINFDKRRKEFAVLSELRRLQNECRGYNLQPDHDIQRWLQGLRPLTEAQSHRVSCEVEPPGSSDPPAPRVLRPTLVISQWTEVLGSVGVPTPLVSCDRPSTGGDEAPTTPAPLLTRLAQHMKWPSVSSLDSALESSPSLHSPADPSHLSPPASSPRPSRGHRRSASCGSPLSGGAEEASGGTGYGGEGSGPGASDCRIIRVQMELGEDGSVYKSILVTSQDKAPSVISRVLKKNNRDSAVASEYELVQLLPGERELTIPASANVFYAMDGASHDFLLRGEGPLLLHLASPVARLPQELLRVREEGAPFPGSRPQGGRLHGHCSEEEAPLAYRSHGVHTRCG

SEQ ID NO: 304767 - protein, 460 aa, Artificial Sequence [sequence omitted]

SEQ ID NO: 304768 - DNA, 1977 bp, Artificial Sequence
  derived and/or modified sequence
atggccgacagactggaggccctggagagccaccccaccgacgagctggagagaaccaccgaggtggccatcagcgtgctgagcacctggctggccagccaccccgaggacttcggcagcgaggccaagggccagctggacagactggagagcttcctgctgcagaccggctacgccgccggcaagggcgtgggcggcggcagcgccgacctgatcagaaacctgagaagcagagtggacccccaggcccccgacctgcccaagcccctggccctgcccggcgacccccccgccgaccccaccgacgtgctggtgttcctggccgaccacctggccgagcagctgaccctgctggacgccgagctgttcctgaacctgatccccagccagtgcctgggcggcctgtggggccacagagacagacccggccacagccacctgtgccccagcgtgagagccaccgtgacccagttcaacaaggtggccggcgccgtggtgagcagcgtgctgggcgccaccagcaccggcgagggccccggcgaggtgaccatcagacccctgagacccccccagagagccagactgctggagaagtggatcagagtggccgaggagtgcagactgctgagaaacttcagcagcgtgtacgccgtggtgagcgccctgcagagcagccccatccacagactgagagccgcctggggcgaggccaccagagacagcctgagagtgttcagcagcctgtgccagatcttcagcgaggaggacaactacagccagagcagagagctgctggtgcaggaggtgaagctgcagagccccctggagccccacagcaagaaggcccccagaagcggcagcagaggcggcggcgtggtgccctacctgggcaccttcctgaaggacctggtgatgctggacgccgccagcaaggacgagctggagaacggctacatcaacttcgacaagagaagaaaggagttcgccgtgctgagcgagctgagaagactgcagaacgagtgcagaggctacaacctgcagcccgaccacgacatccagagatggctgcagggcctgagacccctgaccgaggcccagagccacagagtgagctgcgaggtggagccccccggcagcagcgacccccccgcccccagagtgctgagacccaccctggtgatcagccagtggaccgaggtgctgggcagcgtgggcgtgcccacccccctggtgagctgcgacagacccagcaccggcggcgacgaggcccccaccacccccgcccccctgctgaccagactggcccagcacatgaagtggcccagcgtgagcagcctggacagcgccctggagagcagccccagcctgcacagccccgccgaccccagccacctgagcccccccgccagcagccccagacccagcagaggccacagaagaagcgccagctgcggcagccccctgagcggcggcgccgaggaggccagcggcggcaccggctacggcggcgagggcagcggccccggcgccagcgactgcagaatcatcagagtgcagatggagctgggcgaggacggcagcgtgtacaagagcatcctggtgaccagccaggacaaggcccccagcgtgatcagcagagtgctgaagaagaacaacagagacagcgccgtggccagcgagtacgagctggtgcagctgctgcccggcgagagagagctgaccatccccgccagcgccaacgtgttctacgccatggacggcgccagccacgacttcctgctgagaggcgagggccccctgctgctgcacctggccagccccgtggccagactgccccaggagctgctgagagtgagagaggagggcgcccccttccccggcagcagaccccagggcggcagactgcacggccactgcagcgaggaggaggcccccctggcctacagaagccacggcgtgcacaccagatgcggctag

SEQ ID NO: 304769 - DNA, 1977 bp, Artificial Sequence
  derived and/or modified sequence
atggccgatcgccttgaggcactcgaatctcatccaactgatgaacttgagcgtactaccgaggtcgcaatttcagtgttgagcacctggctggcctctcacccagaagattttgggtctgaggcgaaaggtcagctggacaggttggaaagttttttgttacagactggatatgcggcaggaaaaggcgtggggggaggctcagcagatcttatacgtaatttgcgctccagagtggacccacaggctcctgacctgcctaaaccgctagcactgccaggagacccaccagctgatcctactgacgtgctggtctttctcgccgaccacctggccgaacagctgaccctcctggacgcagagcttttcctcaatctaatcccttcgcagtgtctggggggtctgtggggccaccgcgacaggcctggtcattctcatttgtgtcctagcgtgagagctacagtgacccagttcaacaaggtcgccggcgccgtggtaagctccgttctgggtgcaacaagcactggggaagggcccggcgaggtgaccatcaggcctttgcggcctccccaacgtgcccgtttactggagaagtggattcgcgtggctgaagagtgcaggttactgcggaatttcagtagcgtctatgctgttgtctcagccctgcagagcagtcccatacacaggttgcgcgccgcctggggagaggccacccgggactctctccgggttttttcatctctgtgccaaatctttagcgaagaggacaactatagccaatctagggaactcctagtgcaggaggtgaagctgcagagtccactcgagcctcactctaaaaaggcacctcgatcaggctccagagggggaggagtcgtaccttacctgggcacctttcttaaggacttagtaatgctggatgccgcatccaaagacgagctggaaaatgggtatatcaacttcgacaagcgccggaaagaatttgccgtcttgtccgagctacggaggcttcagaacgagtgccgcggatacaatttgcagccagaccatgatatccagagatggctgcagggactccggcctcttacagaggcacagtcgcaccgggtgtcttgcgaagtggagcctccaggctctagtgacccaccagccccccgggttcttcggccgaccttagtgatatcacagtggacagaagtattaggatccgtcggcgttccaacaccactggtgtcttgcgataggcccagtactggaggtgacgaagcccccactacacctgctcctttgcttaccaggctcgcgcagcatatgaagtggccctctgtgagctctctggactctgccctcgagtcgagcccatcactgcactcacccgccgatccctcccatttatccccccccgcttccagtcccagacccagtcggggccaccgacgcagcgcatcctgcggttcaccactgagtgggggagccgaagaagcctcaggcggaactggatatggaggcgaaggatccggacctggtgcctccgattgtcgtatcatccgcgtccagatggagctgggcgaggatggcagtgtctataagtcaatcctggttacatcacaagataaagccccaagcgtgatctcaagggtccttaagaagaataatagagactccgccgtcgcctccgagtatgagttagtgcagctcctgcctggtgaacgggagctgaccatccctgccagcgccaacgtgttctatgccatggatggagctagtcacgacttccttctcaggggtgaggggcctttgctgctgcacctggcctcgcctgtggcacgactgccgcaggagctgctgcgggtgcgggaggagggagccccttttcccggctctcggccccagggcggacgattgcacggccactgcagcgaggaggaggccccgctcgcttaccgctctcatggggttcatacaagatgcggttag

SEQ ID NO: 304770 - DNA, 1977 bp, Artificial Sequence
  derived and/or modified sequence
atggccgaccggcttgaggcactggagtcacacccgacagacgagctggaacggacaaccgaggtagcaatcagcgtgctgagcacttggctcgcttcccacccagaagactttggatctgaggctaaaggacagttggaccgtttggagagctttctgcttcaaaccggttatgctgctggcaaaggtgtgggcggaggatcagctgacctgatccgcaacttgcggagcagagtcgacccacaagcccctgacttacccaagccgctggccctcccaggagatcccccggccgatcctactgacgttctggtgtttctggccgaccatctcgccgagcaactgacactgcttgacgctgaactctttttaaatctgatcccatcccagtgcctgggggggctgtggggtcatcgcgatcggcccggccattcacacctgtgcccgagcgtaagagccactgtcactcagttcaataaagtagcaggcgcggtggtgtcatccgtcttaggcgctaccagcaccggcgagggaccaggcgaagtgacaataaggccactgcgccctcctcagcgtgcacggctactggagaagtggatccgggtggcggaggagtgcaggctcttgagaaatttttcctcagtatacgcagtggtcagcgcgctccagagtagtccaatacacaggttgcgcgcagcctggggcgaggccactagagattcgctccgggtattcagctccctctgccagatttttagcgaggaggacaattacagccagagccgggaactgctggtccaagaagtaaagcttcagagcccactggaaccacattccaagaaggctcctagatctggaagtcgtgggggcggagtcgtgccgtatctagggaccttcctgaaagacctggtaatgcttgacgccgcaagcaaggacgaattggaaaacggttatattaacttcgacaaaagaaggaaagaattcgcagtgcttagcgaactgcgccgcctccagaacgagtgtcgtgggtacaacttgcagcccgaccacgacattcagcgctggttgcagggccttcgccctctcacagaagcgcagtcacacagggtctcctgtgaagtcgagcctcctggatcaagcgacccgcctgccccgcgagtgctccgtccaacactggtaatctctcagtggaccgaggtccttggctctgttggtgtgccaaccccccttgtgagctgcgaccggccatccactggcggcgatgaggccccaactaccccggccccgctgttgacaaggctggctcagcatatgaaatggccttctgtctcctcgttggatagtgcactcgaatctagcccgagcttgcactcccccgccgacccctctcacctgtctccccccgcgagctcaccacgaccctcgcgcgggcataggcgtagcgcaagttgcggcagccccctctccggtggcgccgaagaggcctctgggggcaccggctacggtggcgaggggagcggcccaggcgcctccgattgccggataataagagtgcagatggagctgggggaagatgggagtgtctataagtctatcctggtgactagtcaggacaaagctccctccgttatatcaagggttctaaagaaaaataatcgagactccgcagttgcttccgagtacgaactggttcagttgctgcctggggaaagggagctcacaattcccgcctcggccaatgtgttttacgccatggacggcgcgtcccacgatttccttctccgcggagaagggcctctcctcctccacctggcctcgccagtcgctaggcttcctcaggaactgctcagggtccgggaagagggggctccttttcccggatctcgccctcagggcggccgcttgcacggacattgctcggaggaagaagcccctcttgcttacagaagccacggtgttcatacccgctgcggctag

SEQ ID NO: 304771 - DNA, 1977 bp, Artificial Sequence
  derived and/or modified sequence
atggccgaccggttggaggccctcgaaagccaccctactgacgagcttgagcgcactaccgaggtggccatttccgtgctctctacatggctggccagccacccagaggacttcggctctgaggctaaggggcagctcgataggctagagagcttcctgctgcagaccggatatgccgccggcaaaggcgttggtggcggatccgcagatctcatccgcaacctcagatcacgggtggaccctcaagctcctgatctcccgaaacctttggcgttgcctggcgatccccccgcagacccaacggacgtcctggtgttccttgctgaccacttagccgaacagctgacactgcttgacgctgaactttttcttaatcttattccttcacaatgcttgggcggcttgtggggtcatagggaccggccagggcactcgcacttatgtcccagtgtgcgggccactgtaacccagtttaataaggtggcaggcgcagtggtttcaagcgtgctcggagcaacttccacaggtgaagggccaggggaggtaacaattcgccccctccgcccgccacagagggccagactgctagagaagtggatccgcgtggcagaggaatgtcgactgctgcgaaacttttcctccgtgtacgctgtggtttctgctctgcagtccagccccatccataggctccgcgctgcctggggagaagccacaagggattcactaagagtcttttcctctctctgccagattttttcggaggaagataactattcacaatctagagaactgctcgttcaggaggtcaaactgcagtcccccttagaacctcactctaaaaaggccccacggtctggctcccgaggcggcggcgttgttccatatctgggcacattcctcaaagatctggtcatgcttgatgctgcaagcaaggacgagctggagaatggctatatcaacttcgacaaacgcaggaaggagttcgcggtgctgagtgagttgaggcggctccagaacgagtgccggggctataatctacagcctgaccatgatatccagagatggctacagggcctccgccctctaaccgaggcccaaagccatcgagtgtcttgtgaggtcgaaccacccggctcttctgatcctcctgctccgcgtgttcttaggccaacactcgtcatttcccaatggactgaggtactgggcagtgtgggggtgcccactccgctcgtctcctgcgataggccatctactggtggggacgaggcccccaccaccccagcacccttactaacaaggttagcacaacatatgaagtggccctcagtttcctcgctggatagtgccctcgagagcagtccctccctacactcccccgccgatccatctcatctttcccccccggcctcgtcccctcgcccatccaggggccaccgacgttccgctagttgtggaagtcctctgtcaggcggtgcagaggaggcaagcggcgggacaggttacggtggtgagggaagcgggccaggcgcatccgactgtcgcataatacgagtgcaaatggaactgggggaggacgggagtgtctataagagtattctggtaacatcacaggacaaagcacccagtgttatttctagggtgctaaaaaagaacaacagggactccgccgttgcttctgagtacgagcttgtgcagctgcttcctggtgaaagagagctgacaattcctgctagcgccaatgtcttttatgcgatggacggcgcctctcacgatttcctcttacgcggagaagggccgctcctgttacatctggcctctcccgttgcccgtctgccccaggaacttctgcgcgtgcgggaagagggcgcacccttccccgggtctaggccacaagggggcagactccatggacactgtagcgaggaggaggcccctcttgcttaccgttcccacggggttcatactcgttgcgggtag

SEQ ID NO: 304772 - DNA, 1977 bp, Artificial Sequence
  derived and/or modified sequence
atggccgaccgcttagaggcattagagtcccatcctactgacgaactggagagaactacagaggtggccatatctgtgctgtctacgtggttggcctcacacccagaagacttcggctccgaagccaaggggcaactagataggctggagtcgttccttctccagacaggctatgcggccggaaaaggcgtcggggggggcagcgcagacctaattcgtaatctgaggtctcgggtggaccctcaagctcctgacctgcccaaacccttagccctacctggtgacccccctgccgatccaaccgacgtgctggtgtttcttgctgatcatctggccgaacagctcactcttcttgacgcagaattgtttctgaaccttatcccgagccagtgtctggggggtttgtgggggcacagggatagacctggccattctcacctttgccccagtgtgagggcaacggtgacgcagtttaacaaggtggccggtgcagtggtctcctcagtgctgggggccacttccacaggggaggggccgggcgaggtaacaataaggccgctccgccctccccagcgcgcgagacttttagaaaagtggatacgagtggctgaggagtgccgactgctgaggaactttagcagcgtctacgcggttgtaagtgccttgcagtcatctcctattcacaggttgcgagcagcatggggggaggcaactcgtgactcactgcgcgtctttagtagtctgtgccagatctttagcgaagaagacaattactcccagagccgcgaacttctggtgcaagaagttaaactccagagcccactggaaccacatagcaagaaggcccctaggagcggaagcaggggcggcggagtcgtcccttacctggggacatttctgaaggatctcgtgatgctggacgccgcctccaaagatgagctagagaatggctacatcaactttgacaagagaagaaaggaattcgctgtcctatcagagcttcgccgcttgcagaacgagtgtagaggatacaacttgcaaccagatcacgacattcagaggtggttacagggtttgagacctctgaccgaggcccagtctcatcgggtgagttgcgaggttgagccccctgggtcttcagaccctcctgccccgcgtgtgcttaggcccactctcgtcatttcccagtggaccgaagtgctcggtagtgtcggtgtgcctacacctcttgttagctgcgatcgcccttctacggggggggacgaggcaccgaccacgccagccccattgctgacaaggttggcccaacatatgaaatggcctagcgtttcctcattggactcagccttggagagtagcccctccttgcacagcccggccgacccaagccacctttccccccctgcgagtagccccaggccgagcagagggcatagaaggtctgccagttgcggttcccccctgtctggaggcgccgaggaggcctcggggggcaccggttacggcggggagggaagtgggccaggcgcctcggactgccgtattattcgggtccagatggagctcggagaagacgggagcgtctacaaatcaattttggttacctcccaggataaggctccctctgtgatcagtcgtgtgttgaaaaaaaacaacagagatagcgccgtcgctagtgagtatgagctggtccagctactgcctggggagagagagttaaccattcccgcgtctgccaacgtgttctacgctatggacggcgcttcccatgactttctgttgcgtggcgaagggccactgctgctccacctggccagtcccgtggcgagacttccacaggagctactgcgtgtccgagaggaaggggccccattccccggctcccgtcctcagggtggacggctccatggtcactgttctgaggaggaggctccactagcgtataggtcacacggagtgcacactagatgcgggtag

SEQ ID NO: 304773 - DNA, 1977 bp, Artificial Sequence
  derived and/or modified sequence
atggcagacagacttgaggcgctggaatctcatccaacggatgagctggagcggactaccgaagtggctatcagcgtcctttcaacttggctggccagtcatcctgaggactttggatccgaagctaaggggcagttggatagactggagagcttcctcctccaaactggatatgcggcggggaagggggtaggcggcggctccgcagacctgatccggaacctccgctctagagttgaccctcaggccccggacctgcccaaacctctggctctgccaggcgacccgcctgccgacccaaccgacgtgctggtgtttttggccgatcatctcgccgagcagttgacgctgcttgacgcagaactctttctgaacttgatcccaagtcagtgcctgggaggattgtggggccatcgagaccggcccggccattcccatctgtgtccttcggtgagggctacagtgacacaatttaataaagttgccggtgccgtcgtgtcatccgtgcttggggcaacatccacaggggagggcccaggggaagtgaccattcggcctttgcgtccaccccagagggccaggttactcgagaaatggataagggtggccgaggagtgccggttactgcgcaacttcagtagtgtctacgcggttgtatcagccttgcagtcttcccctatccaccgccttcgagccgcctggggggaagccacccgggacagcttgagggtgttttccagcctgtgtcagatttttagcgaagaggacaactactctcaaagccgggagttattggtgcaggaggtcaagctccagagtcctcttgagccccactccaagaaagccccgagaagcggctcaagggggggcggagtcgtaccatacctggggactttcttgaaggacctcgttatgttggacgctgcttcaaaggatgagcttgaaaacggatatattaactttgataagaggagaaaagagttcgccgtgctcagcgagctgcggcgattgcagaatgaatgtcgcggatacaatctccagcccgaccatgacattcagcggtggcttcaaggcctaagacccctcacagaggcccagtcccaccgggtttcttgcgaagtggaaccccctgggagttcagacccgcccgctcctagagtgttgcgtcccaccttggtcattagccaatggactgaggtgctggggtctgtcggagtgcccacccctctagtttcatgtgaccggcccagtactgggggtgacgaagctcctacaacacctgcccctctgctcacgcgcctggcacaacatatgaaatggccttctgtatcttccctggatagcgctctggaatcctctccatctctgcacagcccggcggatccgtcacacctgtctccacctgcctcatctccacggccctccagaggccatagaaggtcagcctcctgtggcagcccactgagcgggggagccgaggaggctagtggtggcacaggttatggtggtgaagggagtggccccggagcttctgattgccggatcatacgtgtccagatggaattaggagaagatggctctgtctacaaaagtattctggtcacaagtcaagacaaggccccttcggttattagtagggtactgaaaaagaataatcgtgacagtgcggttgccagcgaatatgagctggtccagcttttaccaggggaaagagagctgaccattccagcttcagcgaacgtcttttacgcaatggacggagcaagtcacgactttttactgcggggagaggggcctttactgctccaccttgcctctcctgtggctcgcctcccccaggaactgctaagagtgcgtgaagagggagcaccattccctggcagccggcctcagggaggacgcctgcacggtcattgcagcgaggaggaagcgccactggcataccggtcccatggcgtgcacacccggtgtggttag

SEQ ID NO: 304774 - DNA, 1977 bp, Artificial Sequence
  derived and/or modified sequence
atggctgaccggctggaggccctggagagccaccccacagatgagctggagaggaccacagaggtggccatctctgtgctgagcacctggctggccagccaccctgaggactttggcagcgaggccaagggccagctggaccggctggagagcttcctgctgcagacaggctatgctgctgggaagggcgtgggcggcggcagcgctgacctgatccggaacctgcggagccgggtggacccccaggccccagacctgcccaagcccctggccctgcccggggaccccccagctgaccccacagatgtgctggtgttcctggccgaccacctggccgagcagctgaccctgctggatgctgagctgttcctgaacctgatccccagccagtgcctgggcggcctgtggggccaccgggaccggcccggccacagccacctgtgccccagcgtgcgggccaccgtgacccagttcaacaaggtggccggggctgtggtgtcctctgtgctgggcgccaccagcactggagagggccctggagaggtgaccatccggcccctgcggcccccccagagggcccggctgctggagaagtggatccgggtggccgaggagtgccgcctgctgaggaacttcagctctgtgtatgctgtggtgtctgccctgcagagcagccccatccaccggctgcgggccgcctggggcgaggccacccgggacagcctgcgggtcttcagcagcctgtgccagatcttcagcgaggaggacaactacagccagagccgggagctgctggtgcaggaggtgaagctgcagagccccctggagccccacagcaagaaggcccccaggagcggcagcagaggaggaggagtggtgccctacctgggcaccttcctgaaggacctggtgatgctggatgctgccagcaaggatgagctggagaatggctacatcaactttgacaagaggaggaaggagtttgctgtgctgtctgagctgcggcggctgcagaatgaatgtcggggctacaacctgcagcctgaccatgacatccagcgctggctgcagggcctgcggcccctgacagaggcccagagccaccgggtgtcctgtgaggtggagcccccaggcagcagtgaccccccagccccccgggtgctgcggcccaccctggtgatcagccagtggacagaggtgctgggctctgtgggcgtgcccacccccctggtgtcctgtgaccggcccagcactggaggagatgaggcccccaccaccccagcccccctgctgacccggctggcccagcacatgaagtggcccagcgtgagcagcctggacagcgccctggagagcagccccagcctgcacagccctgctgaccccagccacctgagccccccagccagcagcccccggcccagccggggccacagaagaagtgccagctgtggcagccccctgtctggaggagctgaggaggccagcggcggcaccggctatggaggagagggcagcggccctggggccagtgactgccgcatcatccgggtgcagatggagctgggggaggatggctctgtgtacaagagcatcctggtgaccagccaggacaaggcccccagcgtcatcagccgggtgctgaagaagaacaacagagattctgctgtggcctctgaatatgagctggtgcagctgctgcccggggagcgggagctgaccatcccagccagcgccaacgtgttctacgccatggatggagccagccatgacttcctgctgcggggggagggccccctgctgctgcacctggccagccctgtggcccggctgccccaggagctgctgcgggtgcgggaggagggcgcccccttccctggcagccggccccagggcggccgcctgcacggccactgcagcgaggaggaggcccccctggcctaccgcagccatggagtgcacacccgctgtggctag

SEQ ID NO: 304775 - DNA, 1977 bp, Artificial Sequence
  derived and/or modified sequence
atggccgaccggctggaggccctggagagccaccccaccgacgagctggagagaaccactgaggttgccattagcgtgctttccacttggctagcgtctcaccccgaagactttggatcagaagccaagggccagctggacaggttggaatcctttctgctgcagactggatatgcagccggtaaaggagtagggggaggatccgccgatctgatcagaaacctaaggagtcgggtcgatccccaggcgcctgatttgccgaaaccactcgcattgccaggagatcccccagcggacccaactgacgttctggtctttttggccgatcacctcgctgaacaactgacgctgttggacgccgagctgttccttaatctgatcccttcccagtgcctcggtggactgtggggacacagagatcggccaggacattcccatttatgcccgtccgtcagagcgacagtcacccagttcaataaggttgccggggctgtggtgtcttcggtcctcggtgccacgtctacaggtgagggccctggtgaagtcacaatacggcccctgcgacctccgcagagggcaaggttactagagaaatggatccgggtggcagaagagtgtaggctgctgaggaatttctcctcagtgtacgccgttgtgagcgcactgcagagtagcccaatccatcggcttcgggccgcttggggtgaggctaccagggattctctccgggtgttctctagcttatgtcagatcttttccgaggaggataactattcccaatccagggagcttctggtgcaggaggttaagctacagtcccccctcgagccacactcaaagaaagccccccgctctggctctaggggcggtggagtcgttccctacttaggcacattcctgaaagacctggtgatgctcgacgcagcctcaaaggatgaacttgaaaatgggtacattaacttcgataagagacgcaaggaatttgcagtcttatccgagctccgtaggttgcagaacgagtgccgcgggtataatctgcagcctgaccatgatattcaaagatggctccagggccttaggccattaacagaagcgcagagtcaccgtgttagctgtgaggtggagcctcccggatctagcgatcctcccgctcccagagtccttcgcccgaccctggtgatttctcagtggacagaagtgctaggatcagttggcgtgccgacaccgctggtctcctgtgacagaccttccactgggggcgacgaggccccgaccactcccgctccactcctcacacggctggcgcagcacatgaaatggcccagcgtgagtagcctcgacagtgccctggagtcctccccctccctgcactcacccgccgatccaagtcacctgtcacctccagccagtagccctagacctagtcgcggacacaggcgatctgctagttgtggtagtccattatctggcggtgcggaagaggcgagcgggggaaccgggtatggcggcgagggcagcgggccgggcgccagtgactgccgcattatcagggtgcagatggaactaggggaggacggaagcgtgtataagagtatcttggtgacatcacaggataaagctccatcagtcatatcacgcgttctaaaaaagaacaaccgggatagcgcggtggctagcgaatatgagctcgtgcagcttctgcccggtgaacgcgaactgacgattcctgcatcagcaaacgtgttctacgccatggacggagcctctcacgactttttactgcgcggagaggggcctctgctgttgcacctggccagtcccgtcgctagacttccccaggagttgttaagagttcgcgaagagggagcccccttccccggatctcgacctcagggcggacggctccacggccactgctcggaggaggaggctcccctagcttataggtcccacggagtgcacaccagatgcggctag

SEQ ID NO: 304776 - DNA, 1977 bp, Artificial Sequence
  derived and/or modified sequence
atggccgaccggctggaggccctggagagccaccccaccgacgagctggaacgcaccactgaggttgcaatctccgtgctgtcaacatggctggcaagccatcccgaagacttcggttctgaagcgaaggggcaactggaccgtttggaatcctttttgctgcagacgggttacgcagccggcaagggcgtaggaggaggtagcgccgacctgatcaggaacttgagaagtcgcgttgacccacaggctccagatctgcccaaaccattagctctgccgggcgatccaccagccgatcccactgatgtgctagtgttcttagctgatcacctcgctgaacagctgacactccttgatgctgaattgtttctgaatctgatcccaagccagtgtctgggtggtctgtggggacatcgggatagacctggccacagtcatttatgcccatccgtacgagccactgttacacaattcaataaagtagccggcgcagtggtatcaagtgtcctgggtgctacctcaacaggagaaggccccggcgaggtcaccatccgacctctacggcctcctcaaagagccagactgctggagaaatggattagggtggcagaggaatgtagactactgcggaacttcagttccgtctacgccgtggtctctgccctccaaagcagcccaatccataggttgagagcagcttggggggaggcaaccagagactcactaagggtgttcagttctctctgtcaaattttttccgaggaggataactactcccaatcaagagaactgcttgtgcaagaggtgaaattacagtctccactggagccacattcaaaaaaggcccctcggtcggggtcacgggggggcggagtagtaccctacctcggaacttttctcaaagatttggtcatgctggacgccgcatctaaggatgagttagagaatggatacattaacttcgacaagcgtaggaaggaatttgcagtcctgtccgagctgcgtcggctgcagaatgaatgtcgggggtataatctccagccagaccacgatattcaaagatggctgcaaggactgaggccactgaccgaggcccagtcccatcgggttagctgcgaggtcgagccccctggttcaagtgatcctccagccccacgagtgctgcgccctacgctcgtaatatcccagtggactgaagtactgggatccgtcggggtccctactccattggtatcatgcgaccgccctagcaccggaggggatgaggctcctactactcctgccccactcctgactcgcctggctcagcacatgaagtggccatctgtgagctcactggactccgcacttgaatcatccccctcactgcacagtcctgctgatccttcacaccttagcccaccggcatcaagccccagaccatcccgggggcacagacgctccgcaagctgcggctcacctctgtcgggcggagctgaggaggcctcaggtgggactggctatggcggggaaggttctggtcccggcgcctcagactgccgtatcatccgagttcaaatggaactgggagaggatggatccgtctataagtccatcctggtgacctcccaggacaaagcaccctctgtgatatcacgtgtgcttaagaaaaacaatcgcgatagtgccgtagcttccgagtatgagctcgtccagctgttacctggagaacgtgagctgactatcccggccagtgcaaacgtgttctatgcgatggatggagctagccatgattttttgcttcgaggtgagggccccctgttgcttcatctggcaagtcccgtcgccagactgccacaggagcttctgcgggtgcgtgaagagggagctcctttccctggatcacgacctcaaggcgggcgcctgcacgggcactgttctgaggaggaggccccattagcttaccggagtcatggagtgcataccaggtgcggatag

SEQ ID NO: 304777 - DNA, 1977 bp, Artificial Sequence
  derived and/or modified sequence
atggccgaccggctggaggccctggagagccaccccaccgacgagctggagagaactactgaggtggccatcagtgtgctgagcacctggctagccagccacccagaggattttggatcagaggctaagggacagctcgatcgcctggaaagttttcttctgcagaccggttacgccgcaggaaagggagttggcggcggctctgccgacctgattcggaatcttaggtcccgggtcgacccccaggctcccgatcttccgaaacccctcgccctccccggcgaccctccggccgatcccacggacgtgctggtcttcctggccgaccacctggccgagcagctgacactactggacgctgagttgttcctaaatctcatcccatctcaatgcctaggtggcctgtgggggcatagggataggcccggccacagtcatctgtgcccaagcgttagagcaactgtgacccagttcaataaggtcgctggcgcggttgtatcctccgtgctcggcgctacctccaccggtgagggtcctggagaggttactatccgccccctgcgtcccccgcagagggctcgcttgctggagaagtggatcagagtggccgaggaatgccgactgttgaggaatttcagcagcgtctatgcggtcgtgagtgcccttcagagctcaccaattcaccggctacgagcagcatggggcgaagctacacgcgacagtctacgcgtgttcagctctctctgccagatattcagcgaggaggataattattcccaaagtcgtgagctgctggtccaagaagtgaagctacaatccccactcgagccacatagcaagaaagcccctcgttcgggttctcgagggggcggcgtagtgccctacctcggcacctttttgaaggatctggttatgcttgatgcggcctcgaaggatgaactcgagaatggctacattaattttgataaaaggcggaaggagtttgctgtgctctcagagcttcgtcgccttcagaacgagtgtcgtggctacaacttacagcccgaccatgacatccaaagatggttacaaggacttaggccactcacagaagcccaatcccacagagtttcttgcgaggttgaaccgcccgggagctcagaccctccagcccccagagtgctgcgccccactctcgtgatttctcagtggacggaagtgttggggtccgtgggggtaccaacaccattagtcagctgcgaccgaccaagcaccggcggcgatgaagctcccaccaccccagccccactcttaactcgccttgcccagcacatgaaatggccaagtgtttcctctttggacagcgccctggagtcaagtccaagcctccactctccggccgacccttcccacctctccccacccgctagttcccctcgtccaagccggggccacagacgtagcgcgtcctgtggatcccctctgtcggggggggccgaagaagcctccggcgggacagggtacgggggcgaaggatctgggcctggggcgagcgactgtcggataatccgcgttcagatggaacttggtgaggacgggagcgtgtataagtcaatactggtgacaagtcaagacaaggccccatccgtcataagccgggtcctgaaaaaaaataaccgggattccgcagttgcaagtgaatacgaactggtgcagctgctccctggagagcgcgagctgactattcctgcgtccgctaatgtgttctacgcaatggacggagcttctcatgactttctcctgcgcggagaaggacctctcctactccaccttgccagccccgtggctagactgccacaggaattactccgcgtcagagaggaaggggcccccttccccgggtccagaccacaaggaggcaggctgcacgggcactgttccgaagaggaggctccgttagcctaccggtcacatggagtacacacaagatgtgggtag

SEQ ID NO: 304778 - DNA, 1977 bp, Artificial Sequence
  derived and/or modified sequence
atggccgaccggctggaggccctggagagccaccccaccgacgagctcgagaggactaccgaggtggctatcagcgttttaagcacctggcttgctagccatcccgaggatttcggctccgaagccaagggtcagctggatcgcctcgagagcttcttgctccagacagggtacgccgctggtaagggggtcgggggcggatcggcagacttaatacgaaatctcaggagcagggtcgaccctcaggcgccagacctgcctaaaccactggctctcccaggcgatccaccggcagatcccaccgacgtgctggtgttcttggcagaccaccttgcagaacaactgaccttgctggacgccgagctgtttctgaatctcatcccttctcagtgtctaggtggcctatggggacaccgcgaccgacctggtcactctcacctgtgtccgtctgtgcgagcaactgttacgcagtttaataaagtcgctggggctgtggtgtcatccgtgctgggcgccacttccactggcgagggccccggcgaagtaactatacgcccactgaggcctccccaaagggccagactgcttgaaaagtggatcagagtagctgaagaatgccggttgttgcgcaattttagctccgtttacgctgtcgtatcagcactacagtcctccccgattcatcgtctgcgcgcagcgtggggcgaagctacaagagacagtctccgtgtctttagcagcctgtgccagatcttctctgaagaggacaactacagccagagtcgtgagctgctggtgcaggaggtgaaattacagagcccgctggagccccactctaaaaaagccccacgttccggaagtcgcggaggtggagtcgtaccttatttgggaacctttcttaaagatctggtaatgctcgacgctgcaagcaaggacgagctcgaaaatggatacatcaattttgacaaacggaggaaagaatttgctgtgttatcggagctccggcgtctgcaaaatgagtgtagaggttacaatctgcagcctgaccatgatatccagaggtggttgcaagggttgaggcctcttaccgaggcacagtcccaccgggtcagctgtgaagtggaaccgccaggttccagcgacccccccgcacccagggtcctgaggcctacccttgtgatttcacagtggaccgaagttctggggagcgtgggggtgcctacccccctcgtgtcgtgcgatcggcccagcaccggcggcgatgaagccccaaccacacctgccccactgttaactaggctggcgcaacatatgaaatggcccagcgtatccagtctggatagcgctttggagtcctcccctagcctgcacagccccgctgatcctagccatctgagcccacctgcctccagccctcgaccttcccgcgggcaccgtagaagcgcaagctgtggatctccactgtccggaggcgccgaagaagccagcggcggaactgggtacgggggagagggctctggccctggcgcctctgactgccgcattattcgcgtccagatggaacttggcgaggacggaagcgtgtacaaatccatcttggtcactagccaagataaggcaccatcagtgatttcccgcgtgctaaaaaagaataatagggatagcgccgtggcgtctgagtatgaactggtgcagctcctgcctggcgagagggagctgacaatccccgctagcgccaacgtgttttacgctatggatggggccagccatgacttcttattgcgcggcgagggtcctctgctattacatctcgcctcccctgttgcacggctaccacaggagcttctgcgcgtgcgggaagaaggggctcctttccctggcagtagaccccagggcggccgcctccatggacactgtagcgaggaagaggcaccactggcttatcggagccacggagtccataccagatgcggatag

SEQ ID NO: 304779 - DNA, 1977 bp, Artificial Sequence
  derived and/or modified sequence
atggccgaccggctggaggccctggagagccaccccaccgacgagttggagaggaccaccgaggtcgccatctcagttctcagtacttggcttgcatcccaccctgaagactttgggagcgaggccaaaggtcagctcgacaggttagagtcttttctgttgcaaactgggtatgccgccggaaaaggtgttggtgggggctctgccgaccttattaggaacctgcgaagcagagttgatccacaggctcccgatctgccaaaacctctggcgttaccaggagatccacccgctgaccccacagatgttctagtgttcctggcggaccatctcgcagagcaactcaccctgttagacgctgagctgtttctaaacttaattccatctcagtgtctcggcggcttatgggggcaccgggatcgacctggtcactcccacctctgtccctccgtgcgcgctaccgtgacacagttcaacaaagtcgcaggagctgtcgttagttcagtactgggcgcgaccagtaccggagaaggcccaggagaggtaacaataagacctctgagacccccacagagggctaggctgctggagaagtggatcagagttgccgaggaatgtaggttgctcaggaacttctcatctgtttatgccgtggtatctgccctccagagcagtcctatccataggctgcgcgcagcttggggggaggctacccgcgattcactccgggtgttttcctccctgtgccagatcttttctgaagaggataactactcccagagccgggaactgttggtccaagaagtaaaattacagagtcccctggagccacattccaagaaagcacccagatccggctctcgggggggcggggtcgttccttaccttgggaccttcctcaaggatctagtcatgctggacgccgcaagcaaggacgagctcgaaaatgggtacatcaacttcgataagcgtcgcaaagaattcgccgtgctctccgagctgagacgcctacagaatgaatgtagagggtataaccttcagcccgaccatgatatccaaaggtggctgcagggactgcggccccttactgaagcccagtcacatagagtgagttgtgaagtggagccacctggttcttcagacccgcctgcaccccgtgtcctgaggcccaccctcgtgatatcacagtggacagaagtgctcggcagcgtcggagtgcccaccccattagtctcatgcgaccgaccctcgacaggcggagacgaggcaccgactacaccagcacccctgctgacgcgcctcgcccaacatatgaagtggccttccgtcagctccctcgattctgcgctagaaagttccccatcccttcactccccggccgacccgtcccacctttcaccccccgcttcctcccccaggccctcccgaggtcaccggcgctccgcctcctgcgggtcgccacttagcgggggtgccgaggaagcctcgggaggcaccggatacggcggcgaaggctctggtccaggagccagcgattgccgtatcattcgcgtccagatggagctgggagaagatggatccgtctataaatctattttagtgaccagtcaggacaaggccccaagtgtgatttctcgcgtgctaaaaaaaaacaatcgcgacagcgcggttgcttccgagtacgagcttgtccagctcctgcctggagagcgggaattgacgatacccgcttctgctaacgtcttctacgctatggacggtgcctcacatgatttcctgctgcgaggagagggacctctgttgttgcacttggcctccccggtggctcgacttccacaagagttactccgagtgagggaggagggggcacctttcccaggcagtagaccacagggcgggcggctccatggtcactgttcagaagaggaggccccattggcttatcgatcacatggcgtacatacccggtgcggatag

SEQ ID NO: 304780 - DNA, 1977 bp, Artificial Sequence
  derived and/or modified sequence
atggcagatcgattggaagccctcgagagtcatcccactgacgaattggagcgcacaaccgaagtcgctatcagcgttctctccacgtggctggcatctcacccagaagattttggctccgaagctaagggccagctcgataggttagaatctttcctgctacaaaccggctacgctgcgggaaaaggagtgggaggtggttcggccgatctgattcgaaaccttcgctcccgggtggatccacaggctcctgatctgccgaaacccctcgcattgcccggagatccgccagccgatccaacagacgtgttggtgttcctagctgatcacttagccgagcagttgactctcttggatgctgaattatttctgaatctcattccatcccagtgtctcggcggactgtggggtcacagagaccgacccggtcattcccatctgtgcccttcagttcgcgctacggtcactcagttcaataaagtggccggagccgttgtatcttcagtccttggagccacatctactggagagggcccaggagaggtgacgatacggccactgcgccctccccaaagagccaggctactggagaaatggatccgggttgccgaggaatgccggctactgaggaactttagctctgtctacgccgtggtgtcggcattgcagagtagcccgattcacaggctgcgggcagcatggggggaggctacccgggatagtctgcgggtattttctagcctgtgtcagattttcagcgaggaagacaactactctcagtctagagagctccttgtccaggaggtgaagctgcaatctcccttagagccccattccaaaaaggccccaaggagcggatcccgaggaggaggtgtggtcccctacctcgggacattcctgaaggacctggtgatgttggatgcagcaagcaaggatgagctcgagaacgggtatatcaattttgataaacgacgaaaagagttcgccgtcttgtccgagcttagacgcctgcagaacgagtgccgcggttacaatctgcagcctgaccacgacatacaacgttggttgcagggactcagacccctgaccgaagctcagtcccaccgagtgtcatgtgaggtggaaccccctgggtcctcggatcctccagcccctcgggtcttgcggccaaccctcgtcatttcgcagtggacagaggtgctgggttccgtcggggtgcctacacctttagtttcatgcgacaggccatctacaggcggtgatgaagcccctacaacccccgctcctctccttactcgcttagcccaacacatgaagtggccatccgtgagcagtttggattcggcgttagagagttcaccctccctgcactcccccgctgacccttcacatctaagtcctcctgctagctcacctcggccttcgcgcggacaccgcagatccgcaagctgtggaagcccactgtccgggggagcagaagaggccagcggtgggaccgggtatgggggagagggctccggtcccggtgcgtctgactgtagaatcatacgggtgcagatggaattgggagaagacgggagcgtgtacaaatccatcttggtcacttcccaagataaggccccatctgtgattagccgggtgctgaaaaaaaacaatagggacagtgcagtggcatctgaatacgagctggtccaactgttgccaggagagcgggaactcacgatcccagctagtgccaatgtgttctacgccatggatggggcaagtcatgatttcctgctcaggggggagggtcccttattgctgcacttggcgtcaccagtcgccagactcccacaggagttgctccgggtccgggaagaaggagcgcctttccctggatcacgaccccaaggcggacgattgcatggtcattgcagtgaagaggaggcacccctggcctataggagtcacggagtgcacacccggtgcggctag

SEQ ID NO: 304781 - DNA, 1977 bp, Artificial Sequence
  derived and/or modified sequence
atggccgaccgtctggaagcattagagagccaccccactgatgaattggagcggaccaccgaagtagccatcagtgtgctttcaacttggcttgcctcccaccccgaagatttcggatccgaagctaagggacagctagaccgcttggaatcctttctcctccagactggatacgccgctgggaagggagtgggcggaggatccgcggacctaattagaaatctaagaagtcgggtggacccgcaggccccagatctcccaaagcctttggcgctgcctggtgaccctccggctgaccccaccgacgtgcttgtgttccttgccgatcaccttgcagaacaactcactctgctcgacgcagagctgttcttgaaccttatcccgagtcagtgcctcgggggtttgtggggccatagggacagacccggtcactcccacttatgccccagcgtccgggctacagtaacacagttcaacaaggtggctggcgcagttgtatcgtccgtattaggagcaaccagcacaggcgaggggcctggggaagtgaccatcagacccctgcgtcctccccagagagctcgcttactggaaaagtggatcagggttgccgaggagtgcagactgctgagaaatttttctagcgtgtacgctgtggtatctgcccttcaaagcagccccatacatcgattgagagctgcatggggggaagcaaccagggacagcctcagagtgttctcttctctctgccaaatattctcggaagaagataactactcccagtccagggagctcctggtccaggaagtgaagctccagagcccactggagccacactcgaaaaaagcaccaaggtcgggctccaggggagggggtgtcgtaccctacctaggcacatttttgaaagacttggtcatgctggacgccgcatccaaggatgagctggaaaacggctacataaactttgataaaaggcggaaggaattcgcagtgctgtcagaattgcgcagacttcagaacgagtgccgcggatacaatctacaacccgaccatgatatacagcgctggttgcagggtcttcgccctttaactgaagctcaatcccatcgagtgtcttgcgaagtcgaaccgccaggctcaagtgatcctccagcacctagggtgcttaggcccaccctcgtcatcagtcaatggacagaggtactcggttcagtcggcgttcccaccccccttgtaagctgcgatcggccatccacaggcggagacgaggcgcctaccactcctgctcctctgctcacccggttggcacagcacatgaaatggccttccgtgtcttcactggactctgccctggagtcatcaccctctctccactctcccgctgacccctcgcatctaagcccacctgcctccagccctcgtcccagtcggggacaccgacggtctgcgagctgcggttcgcctctgtcaggtggagccgaagaagctagcgggggaactggctatggtggggagggctcaggaccgggtgcttccgactgtcgaatcatcagggttcagatggagctcggcgaagacggctccgtctataaatccatcctggtcactagccaggataaagcgccaagcgtaatctcccgcgtgctcaagaagaataaccgagacagcgctgtcgcatcagaatatgagctcgttcaattgctccccggtgagcgtgagctcactattcctgcctcagcaaacgtgttctacgctatggacggggcatcccacgacttcttgcttagaggcgagggcccactgttgctccaccttgctagccctgttgctaggttgccacaggaactactgagagtgagagaagagggtgctccgttccccggtagtcgaccccaaggcggtcggctgcacggtcactgttctgaagaggaggctccgctagcttatagatcccatggcgtgcatacaagatgcggttag

SEQ ID NO: 304782 - DNA, 1977 bp, Artificial Sequence
  derived and/or modified sequence
atggccgataggctggaagctcttgaaagccatcctacggacgaattagaacggaccaccgaggttgccatctcagtgcttagcacttggcttgccagtcacccagaggactttgggagcgaagccaagggacagctcgacagactggaatccttcctgctgcagaccggctacgctgcaggaaagggagtcggaggtgggtccgctgacctgatacggaacctgagaagcagggttgatccccaagcccctgacttacccaagcctctcgcactgccaggtgaccccccagcagatccaacagatgttctcgtctttctggctgatcacctggccgagcaactgactcttttggacgcagaactctttctgaacctgattccctcccagtgcctgggaggactttggggccaccgggacagaccgggacattcccacttgtgcccgagtgttcgagcaacagtgacccaattcaataaggtggccggagccgtggtctccagtgtgctgggggctacctcgaccggggaggggcctggcgaggtgacaatcagacctttgcggccaccacaacgggctcgcctgctggagaagtggattagggtagcagaggagtgcaggctcctgaggaattttagctccgtttatgccgtggtctctgcactccagtcttcccctatacaccgcctacgagcagcttggggggaggccacacgcgactcgctgcgtgtgttttctagtctttgtcagattttctctgaggaggacaattattcccagagtagagaattgcttgtccaagaagtaaaactccaaagcccactggaaccccactccaaaaaagctcctcggtcaggctctaggggagggggagtcgtgccctatctgggaaccttcctgaaagacttggtcatgctagacgctgcaagtaaggacgagctggaaaacggctacatcaatttcgacaagcggagaaaggagtttgccgtgttgtctgaactgcggcgtctgcagaacgagtgcagaggatataacctgcagcccgatcacgatattcagcgttggctccaaggtcttcgcccattgactgaggctcaatcccaccgtgtgtcatgcgaagtggaacccccaggctcttctgaccccccagccccacgggttcttagacccaccctcgtgatatcacaatggactgaggtgctaggaagtgtgggggtgcccaccccattggtttcctgtgacaggcctagtaccggcggtgatgaggctcctacgacgcccgcacctttgttgaccagactggcacagcacatgaagtggccttcagtgtcatctttagactccgccctggaatccagcccatcattgcatagcccagctgatcccagtcacctctctccgcctgcctcctctccaagacctagcaggggacaccgaaggtcagcctcttgtggatctcctctgtctgggggtgcagaggaggcaagcggtggaaccggctacgggggtgaggggtccggtccaggagcatcggattgccgcataatccgagttcagatggaactgggagaggacggtagtgtatacaagtccatcttggtaacctcccaggacaaggctccttctgttatctcccgggttctcaagaagaataaccgcgattcagcagtggcgtccgaatatgaactggtgcaactgctgcccggagaaagggaactgaccataccagccagcgccaatgttttttacgctatggacggcgctagccacgattttctgctgcgcggagagggtccgctgctgttgcacctggcctcgccagtagcacgtttgccacaggagctcctgcgcgtcagagaagaaggcgctcccttccctgggtcaaggccacaaggaggacgcctgcacggccattgtagtgaagaggaagcacccctggcctatagatcccatggtgtgcacactagatgtggctag

SEQ ID NO: 304783 - DNA, 1977 bp, Artificial Sequence
  derived and/or modified sequence
atggcggatcgtttagaggctctggagagtcacccaacagatgagctcgagagaaccaccgaggtggccatctcagtattgagtacatggctggccagccatccagaagactttggctcggaggcaaagggccagctggacagactggaaagttttctgttgcagaccgggtatgcggctggcaagggcgtgggcggaggaagcgccgacctgattaggaacttgaggtctagagtcgatccccaggcacccgacctgccaaaacctctggcccttccaggggatccccctgcagatcccacagatgtactagtgttcctggccgatcacttagccgagcaactcactctgctggacgctgagctgttcctgaacctgatcccctcacagtgtctgggcggattgtggggccatcgggaccggccaggccactcccacctgtgccccagtgtgagggctacagtgacacaatttaacaaggttgccggagcagtcgtctctagtgtccttggtgctacttcgaccggcgagggccctggcgaagtcaccattaggcccctccggccaccgcagagagccagactcctagagaaatggattagagttgctgaagagtgccgcttgctgcggaatttcagctcagtgtacgccgttgtatccgcccttcagagtagtcccatacaccgccttcgcgctgcctggggtgaggcaacacgagacagcttgagggttttctccagcctgtgccagattttttctgaggaagataattactctcagagccgcgagctcttggtgcaggaggttaaacttcagtcaccactggagccccactcaaagaaagctcctcgttccggatctaggggagggggagtagtcccctatctggggacctttctaaaggacctggtgatgctcgacgcggcatcaaaggacgagttggagaatggctacataaacttcgataagaggaggaaagaattcgcagtgctgtctgaactaagacggctccagaatgagtgcagggggtataacctgcaacccgatcatgatatacagagatggctccagggccttcgacccctgacggaggcacaaagtcacagggtgtcctgcgaggtggagcctcctggatcgtctgacccgcctgctcctcgagttctgcgacctactctagttatctcacaatggacggaggttctcggatctgtgggcgtacctactcctctagtcagctgtgatcgaccctccacaggtggcgacgaagctcctacaactcctgcccctttacttaccagactggcccagcacatgaaatggcccagtgtttcctccctggactcagccctcgagtcctcgccttctctgcacagtccagccgatcctagccatctatcacctcctgcctcgagtcctcggccaagtaggggccaccggagaagcgcatcttgcggcagccctctgagcgggggtgccgaggaggcttcaggcggaaccggttacggaggcgagggatctggcccaggagcctccgattgtaggataatcagggtccagatggaactgggtgaagacgggtcagtatacaagagcatcctggtgacttcccaggataaagccccatccgttatctctcgcgttctgaaaaagaacaatcgagacagcgccgtggcttccgagtatgagctcgtacagttgctacctggggagcgcgagctgacaattcccgcatccgctaacgtgttctatgccatggatggggcttcccacgacttcctactgaggggagaaggcccacttttgttgcacctggctagccccgtggccagactaccccaggagctgctgagggtaagggaagagggtgctccctttcctggtagccggcctcaagggggacgcttgcacggccactgctcagaggaggaggctccactggcataccgttcacacggcgtccacaccaggtgcggatag

SEQ ID NO: 304784 - DNA, 1977 bp, Artificial Sequence
  derived and/or modified sequence
atggctgaccgcctcgaagctctggaatcccaccctactgacgagttggaaagaaccaccgaggtggccataagcgtactgtcaacatggctcgcctcgcaccctgaggacttcggtagcgaagctaaaggacaacttgatcggctcgaatctttcctcttacagacgggttacgcagcgggaaagggtgtggggggaggcagcgcagacttgattagaaacttgaggtccagagtcgacccgcaagcacccgaccttccaaagcccctggcacttcctggggatccccctgctgacccgactgacgtgctggtattcctggcagaccatctcgccgagcagctgaccctcctggacgccgagctgttcctcaacttaatacctagtcagtgtctgggtgggttatggggtcaccgggaccggccaggacactctcacctgtgtccgtcagttagagctacagttacgcagttcaacaaggtggccggagcagtggtctcatcagtattaggggctacctcaacaggtgagggcccaggtgaggtgaccatcaggccgctgcggcctccccaaagggctcgcctgctggaaaaatggattagagtagccgaggagtgcaggcttctgcggaacttcagcagcgtgtatgcagtggtctccgcacttcaatccagccctatccatcggctgagagcagcctggggagaagcgacacgcgattccttacgggtgttctcttccctctgtcagattttttcagaggaagacaattacagtcagtctagagaattacttgtccaggaagtaaaactccaatctccactggagcctcacagtaaaaaggctcccagatcaggttctagaggcggtggagtagtcccttacctcggtacctttctgaaagatctcgttatgctggatgccgcatctaaggacgagttggagaacggatacattaactttgacaagcggcgtaaggagtttgcagtgctttcagaattgcgccgactccaaaacgaatgtcgaggctataacctgcagcccgaccacgacatccagcgttggttgcagggactgcgcccacttaccgaggcacaaagtcacagagtgtcatgcgaggtagaaccacccggtagctccgaccccccagcccctcgagtgctgagaccaactctggtgatctctcagtggactgaagttttagggtctgtgggcgtcccaacgcctcttgtcagctgcgacagaccgagcacgggaggggacgaggccccaacaaccccagctccccttctgacacgcctggctcaacacatgaagtggcctagtgtgagctctttagattcggccctcgagagcagtccatcattacactctccggcagatcccagccacctgtctccacccgcatcatccccgaggcccagcagaggccacaggcgcagtgcatcctgtggatcccctctcagcggcggtgcggaagaggccagtgggggaacgggctacggaggtgagggatcaggtccaggagccagcgattgccgtataattagagtgcagatggagcttggtgaagacgggagcgtgtacaaatctattctggtgacaagccaagacaaggccccaagcgtaatctccagggtgcttaagaagaataatcgggattctgctgtggcatctgagtacgagctggtacagctgctgccgggagaacgtgaactgactattcctgcctcagccaatgttttctatgcgatggacggcgcatctcacgactttctgctcaggggggagggccctctgttacttcatctggcttcgcccgtggcaagactccctcaagaactgctgcgagtgagggaggagggcgcaccattccctgggtcacgccctcagggcggaaggctacacggccattgttctgaggaagaggcacccctggcgtaccggtcccatggtgtccatacccgctgcgggtag

SEQ ID NO: 304785 - DNA, 1383 bp, Artificial Sequence
  derived and/or modified sequence
atgcccccccccagaagcagcagaagactgagagccggcaccctggaggccctggtgagacacctgctggacaccagaaccagcggcaccgacgtgagcttcatgagcgccttcctggccacccacagagccttcaccagcacccccgccctgctgggcctgatggccgacagactggaggccctggagagccaccccaccgacgagctggagagaaccaccgaggtggccatcagcgtgctgagcacctggctggccagccaccccgaggacttcggcagcgaggccaagggccagctggacagactggagagcttcctgctgcagaccggctacgccgccggcaagggcgtgggcggcggcagcgccgacctgatcagaaacctgagaagcagagtggacccccaggcccccgacctgcccaagcccctggccctgcccggcgacccccccgccgaccccaccgacgtgctggtgttcctggccgaccacctggccgagcagctgaccctgctggacgccgagctgttcctgaacctgatccccagccagtgcctgggcggcctgtggggccacagagacagacccggccacagccacctgtgccccagcgtgagagccaccgtgacccagttcaacaaggtggccggcgccgtggtgagcagcgtgctgggcgccaccagcaccggcgagggccccggcgaggtgaccatcagacccctgagacccccccagagagccagactgctggagaagtggatcagagtggccgaggagtgcagactgctgagaaacttcagcagcgtgtacgccgtggtgagcgccctgcagagcagccccatccacagactgagagccgcctggggcgaggccaccagagacagcctgagagtgttcagcagcctgtgccagatcttcagcgaggaggacaactacagccagagcagagagctgctggtgcaggaggtgaagctgcagagccccctggagccccacagcaagaaggcccccagaagcggcagcagaggcggcggcgtggtgccctacctgggcaccttcctgaaggacctggtgatgctggacgccgccagcaaggacgagctggagaacggctacatcaacttcgacaagagaagaaaggtgagcggcgtgagcggcctggacgccggcctgccctacccctgcagcagaaagggcagaggcaagagccagggcagcctgagcttcggcagctgcagcctgagagcccccagccaggagttcgccgtgctgagcgagctgagaagactgcagaacgagtgcagaggctacaacctgcagcccgaccacgacatccagagatggctgcagggcctgagacccctgaccgaggcccagagatag

SEQ ID NO: 304786 - DNA, 1383 bp, Artificial Sequence
  derived and/or modified sequence
atgccacctcctaggagttctagacggttaagggctggaaccctcgaggctttggtgcggcacctacttgatacacggaccagcggcactgacgtgagtttcatgtctgccttcttggccacacaccgggccttcacgtccacaccggccctattggggttgatggccgaccgtttggaggccctcgagagccatcccaccgacgaactggagagaaccacagaggtcgctatttcagtgctcagcacttggctggccagtcacccagaagatttcgggtctgaggctaagggacagctcgatcgcctggagagcttcttattgcagactgggtacgcagctggcaaaggcgtcgggggcggatcagccgatttaattcgcaacctgagatcacgcgtggaccctcaggctccggacctccctaagcctctcgcactccccggggacccacccgcagacccaaccgacgtgctggtcttccttgctgaccacctggccgaacagctgactttactggatgcggagctctttctcaacctcatcccatctcagtgccttggcggcctgtggggccatcgggaccggccgggacactctcatctctgcccgtcagtgagagctacagttactcagtttaacaaggtagccggcgccgtggtgtcttcagtgctgggggcgacgagcactggggaagggcctggagaggtcaccatccggccactgcgtcctccacaacgagctcgcctcctcgaaaagtggatcagggttgctgaggagtgtagactactgcgcaacttctcttcggtgtacgcagtggtgagtgctctccagagcagtcctatccatcgccttcgtgccgcctggggggaagccactagggatagtctacgcgttttcagctcactgtgtcagattttcagtgaagaagacaactattctcagagtcgcgagctgctcgtgcaggaggtgaagttacagtctcccctagaaccacacagtaagaaggctcccaggagcggtagtcgggggggcggagtggtcccctatcttgggactttcctgaaggacctggtgatgttggatgccgctagcaaagacgagcttgagaacgggtatatcaactttgacaaaagacgcaaggtgtccggtgttagtggcctcgatgctggtctcccatatccttgttctaggaaggggcgcggaaaatcccaaggatccctgagttttggctcttgctccctgagggctccttcccaagagtttgccgtgctctcggaactgcgacggttgcagaatgagtgccgaggatacaatctccagcctgatcatgacatccaacgctggttgcagggcctaagacctttaacagaggcccagcgatag

SEQ ID NO: 304787 - DNA, 1383 bp, Artificial Sequence
  derived and/or modified sequence
atgccgccgcctaggtcatccaggcggctccgagctgggacgctggaagccctggtaaggcacctgctcgacacacgcacaagcgggaccgatgtgtcttttatgagcgcattcctcgccacacacagagcattcacatctacacccgcgcttctgggcctgatggcggaccgcttagaggccctggagagccacccgacagacgaactggagcgcacgacagaagttgctatcagcgttctgtctacctggctagcttcacaccccgaagattttggctccgaagccaaggggcagctcgatcggctcgaaagttttctcctgcagacaggctacgcagcaggcaagggggtaggagggggttcggctgatttgattcgaaaccttcgctctcgggttgacccgcaagcccctgatctgccaaagcccctcgctttgcccggggatccacctgctgaccccaccgacgtgctggttttcttggccgaccatttggcggagcagctgacattattggacgcagagttatttctgaacttaatcccatcacagtgcctaggcggactgtggggccatcgggatcggcccggacatagccatttatgtccaagtgtacgtgcaactgtgactcagtttaataaggttgccggcgccgtggtgtctagtgtgctcggagccacatctactggagaaggtcctggggaagtgacaattcggcctcttaggcccccacagcgcgcccggctgttggagaagtggattagagtggcggaggagtgccggctattgagaaattttagcagcgtatatgctgtggtatctgcacttcagtcctctcccatccacaggctcagggctgcatggggcgaagccaccagggattcactaagagtgttttcaagtctatgccagattttttcagaggaagataactatagccagtcgcgagaactgctggtgcaggaggttaaattgcagagcccactcgagccacatagcaagaaagcaccaaggagtgggtctaggggagggggggtggtcccctacttggggaccttccttaaggatctagtaatgctggatgctgcatcaaaggatgaactggaaaacggttacattaatttcgacaagcgaaggaaagtgagcggagtgtccggactcgatgccggcctgccctatccttgctcccggaaggggcggggaaaatcccaggggagcttgagtttcggcagctgctcattaagagccccctcccaggaatttgcagtcctgtctgagctacgccgtttacagaatgagtgtcgcggatataacctgcagcccgatcatgacatccagcgatggctgcaagggctgcgccctcttaccgaggctcagcggtag

SEQ ID NO: 304788 - DNA, 1383 bp, Artificial Sequence
  derived and/or modified sequence
atgccaccgcctaggagctctcgccgtctgcgggcaggtacgctggaagccctcgtaaggcatctattggatacaaggacttccggcaccgatgtatctttcatgtccgcctttcttgccactcaccgggcctttaccagcacccccgcactacttgggctcatggcggacaggctggaggccctggagtcccaccctacggatgaactggagagaactaccgaagtggcaattagtgtgctgtcaacctggttagcgtcccaccccgaggatttcgggagcgaagcgaaagggcagcttgatcgattagagagtttcctgctgcaaacaggctacgccgctggaaagggagtggggggaggcagcgcggaccttatccggaatctgaggagccgtgtagacccacaagccccagacctcccaaaaccgttagcactacctggtgatcccccggccgatcctaccgacgtgcttgtttttctcgctgaccacctggccgagcagctgaccctcctggacgcagaactctttctgaatctgatcccctcccagtgcctcggcggcctgtggggacaccgggaccggcctggtcattcccatttgtgccccagtgtgagggccacagtaacccagttcaataaagttgcaggtgcagtagtgtcatccgtactgggggccacctctactggtgagggccctggagaagtgactatccggccactgcggcccccccaaagggctaggctactcgagaaatggatacgggtagccgaagagtgtcgcctgttacgcaattttagctcagtctacgccgtagtgagcgccttacagagctcccccatacacagacttcgtgctgcctggggtgaagcaacacgggactccctgcgcgtgtttagttctctgtgtcagatttttagcgaggaagacaattactcccagagtcgggagctactggttcaggaggttaaactgcagtccccacttgagccgcacagtaagaaagccccacgttctggctcgcgtgggggtggagttgttccctaccttggcacgtttctcaaagatttggttatgttggatgcagcgagcaaagatgagcttgagaacggctacattaacttcgataagagacgcaaggtgtcaggagtgagcggtttggacgcggggttgccttacccgtgttcaagaaaggggcgggggaaatcccagggaagtctgtcattcggttcgtgttcactgagggccccatcacaagagttcgccgtgctctctgaactgcgcaggctgcagaatgagtgcagaggatataaccttcagcccgaccacgatatacagaggtggctgcagggtctgcggcctctcactgaggcccaacggtag

SEQ ID NO: 304789 - DNA, 1383 bp, Artificial Sequence
  derived and/or modified sequence
atgcctccgccccgcagcagcaggagactcagggccggcactctggaagctcttgttcggcatctgctggatacccgcacctccgggactgatgtgagcttcatgtccgcttttctagctactcaccgggcgtttaccagcactcccgctctgttaggactgatggccgacaggctggaggccttggagtcccatcctaccgatgagcttgaaaggacaactgaggtggcaataagcgtgctatcaacctggctggccagccacccagaagactttggctccgaggcaaagggccagttggaccgattggaatcctttctactccagacagggtacgctgcaggcaaaggggtgggaggtggttccgcagaccttattcggaaccttaggtcacgtgtcgacccccaggcccccgacctaccaaaaccactggctctaccgggcgatcctcctgccgatcccaccgatgtgttggtgtttctagccgatcatctggccgagcagctcacgctgcttgacgcagagttgttcttgaatctgattcctagccagtgtctcggcgggctttgggggcaccgcgatagacctggacacagccacctgtgccccagcgtacgcgctacagtgacacagtttaataaggttgcgggtgcggtggtatcgagtgtgctcggggccacttctaccggggaaggcccgggggaagttactattcgccccctgagaccgccccaacgggcacggctgctggagaagtggattagggtggccgaagagtgtcgccttttaaggaacttttcaagcgtctatgctgtggtatctgccttgcagtcttctcccatccatcgcctgcgggcagcatggggggaggccaccagagactctttgcgtgtgtttagttcgctgtgccagattttctccgaggaagacaattatagccagagcagagaattgctggtgcaggaagtcaagctgcagagcccactggaaccacactctaagaaggcgccccgctctgggagcaggggcggaggtgtcgtcccttacctcgggacctttcttaaggatctggtgatgttggacgccgcaagcaaagacgagctcgagaacggctacatcaattttgataaacggaggaaggtcagcggggtatcaggtctcgatgctgggttgccatatccttgctccaggaagggccgcggcaagtcccaagggtcattatcgttcggaagttgctcactcagggccccctcccaggaattcgctgtcctgagtgagctgagacggctccagaatgagtgtagaggatataatctgcaacctgaccacgacattcaaagatggctgcaaggcttacgccctctgactgaagcacagcgttag

SEQ ID NO: 304790 - DNA, 1383 bp, Artificial Sequence
  derived and/or modified sequence
atgcccccacctaggagcagtcgccgactgcgcgccggcacactggaggcattggtccgacatctcttagacacccggaccagcggaacagacgttagttttatgtccgcctttctggcgactcatcgcgccttcaccagcacccctgcactcctcgggctgatggccgacaggcttgaagcacttgagagtcatccaacagacgagctggaacgaacaacagaggtcgccatctccgtcctgagcacttggctggccagtcatcctgaggactttgggagcgaggctaagggccaactcgacagactggagtcgtttctgctacaaactgggtatgctgccggaaagggggttggtggtggttcagccgatctgattcgaaatctgaggtcaagagttgatccacaagcccctgatctgcccaagcccctcgcgttgcccggggatccccccgctgatcctaccgatgtgctggttttccttgccgaccaccttgctgagcagctgactctcctcgatgcggaactgtttctcaatcttatccctagccagtgcctgggtggactgtggggccatagggaccgacccggacactcgcacctctgtcccagtgtgagagccacagtgactcagttcaataaagtggccggtgcggttgtgagtagcgtactgggggccacatcgaccggggaggggccaggtgaagtcacgatcaggccactcaggccaccccagcgcgcgcgtttgctggaaaaatggattcgggtggcggaagaatgtaggctcctgcggaatttttcctccgtgtacgccgttgtgagtgcactacagtccagcccaatccacagactccgggccgcctggggtgaggccacaagggattctttgagagtgttctcgagcctgtgtcagattttcagtgaggaagataactactcccagtcacgggaactgttagtgcaggaggtgaaactgcagtccccactggaaccccactctaagaaagctcctcgttcaggctcgcgcgggggaggagtagtgccctatctgggcacgtttttgaaagacttggtcatgctcgatgccgctagcaaagacgagttggagaatggctatattaattttgataaacgacggaaagtctcgggagtgtcgggattagacgctgggttaccctacccatgctcacgaaaggggcgcggtaaaagccaggggtccctgagcttcggctcctgttcgctcagagccccaagccaggaatttgcagttctctccgaactgcgccggctgcaaaatgaatgtcgcggttacaatctgcagccagaccacgacattcagcgctggcttcaaggccttaggccccttaccgaagcacagcgctag

SEQ ID NO: 304791 - DNA, 1383 bp, Artificial Sequence
  derived and/or modified sequence
atgcccccacccaggagcagccggcggctgcgggccggcaccctggaggccctggtgcgccacctgctggacaccaggaccagcggcacagatgtgtccttcatgtctgccttcctggccacccaccgggccttcaccagcaccccagccctgctgggcctgatggctgaccggctggaggccctggagagccaccccacagatgagctggagaggaccacagaggtggccatctctgtgctgagcacctggctggccagccaccctgaggactttggcagcgaggccaagggccagctggaccggctggagagcttcctgctgcagacaggctatgctgctgggaagggcgtgggcggcggcagcgctgacctgatccggaacctgcggagccgggtggacccccaggccccagacctgcccaagcccctggccctgcccggggaccccccagctgaccccacagatgtgctggtgttcctggccgaccacctggccgagcagctgaccctgctggatgctgagctgttcctgaacctgatccccagccagtgcctgggcggcctgtggggccaccgggaccggcccggccacagccacctgtgccccagcgtgcgggccaccgtgacccagttcaacaaggtggccggggctgtggtgtcctctgtgctgggcgccaccagcactggagagggccctggagaggtgaccatccggcccctgcggcccccccagagggcccggctgctggagaagtggatccgggtggccgaggagtgccgcctgctgaggaacttcagctctgtgtatgctgtggtgtctgccctgcagagcagccccatccaccggctgcgggccgcctggggcgaggccacccgggacagcctgcgggtcttcagcagcctgtgccagatcttcagcgaggaggacaactacagccagagccgggagctgctggtgcaggaggtgaagctgcagagccccctggagccccacagcaagaaggcccccaggagcggcagcagaggaggaggagtggtgccctacctgggcaccttcctgaaggacctggtgatgctggatgctgccagcaaggatgagctggagaatggctacatcaactttgacaagaggaggaaggtgtctggagtgtctggcctggatgctggcctgccctacccctgcagcaggaagggccggggcaagagccagggcagcctgagctttggcagctgcagcctgcgggcccccagccaggagtttgctgtgctgtctgagctgcggcggctgcagaatgaatgtcggggctacaacctgcagcctgaccatgacatccagcgctggctgcagggcctgcggcccctgacagaggcccagaggtag

SEQ ID NO: 304792 - DNA, 1383 bp, Artificial Sequence
  derived and/or modified sequence
atgccccccccccggagcagccggcggctgcgggccggcaccctggaagcactcgttcgtcatctcttggacacgcgcacaagtggcaccgacgtcagtttcatgtccgccttcttggctacccaccgggccttcaccagcaccccagcgctgctgggcctcatggcagatagactggaagcccttgaatcccacccaaccgacgagttagagagaaccactgaggtcgcaattagcgtgttaagtacttggcttgctagccatccagaggattttggatccgaggccaaggggcagctggacagactagaatcgtttcttcttcagactggatacgctgctggcaagggtgttggcggaggatcagcagatcttatcaggaacctgcggagtcgggttgacccgcaggcacctgacctgcccaaacccttagctcttcctggcgacccaccagctgaccctactgacgttctagttttcttggccgatcatctggccgaacagcttactctgctcgacgccgagctttttctcaacctcattccctcacaatgcctcggggggctctgggggcaccgggaccgtccagggcacagtcatctgtgcccatccgtgcgggcaacggtgacgcaattcaacaaagtcgcgggcgcagtggttagctcagtattaggagccacttctacgggcgagggtcccggggaggtgaccatccgtccactgagacccccccaacgggcccgcttactggaaaaatggatcagagtggctgaagaatgtagacttctgcgcaacttttcttcagtgtacgccgtagtgtccgccctccaatcttctccaatccacagactgcgagcagcatggggcgaagcgactcgcgattctttgcgagtgttcagcagtttgtgtcagatcttctccgaagaggataactactctcagagtagagaacttttagtacaggaggtgaaactgcagtccccccttgagccacattctaaaaaagctccaaggagtggctctagaggcggcggagttgtaccttatctgggcacattcttgaaagacttagtgatgctagatgccgccagcaaagatgagctcgagaatggttacatcaactttgataagcgtcgaaaggtcagtggggtgtccggactggatgccggcctgccgtacccatgcagccgtaagggaaggggcaaatctcagggaagcctcagtttcgggagctgttcgctgcgggcccccagccaggaattcgctgtgctctccgaactcagacgactccaaaatgagtgtcgaggctataacttgcagccagatcacgacatacagcgatggctgcaggggttgcgacctctcactgaggcgcagcgttag

SEQ ID NO: 304793 - DNA, 1383 bp, Artificial Sequence
  derived and/or modified sequence
atgccccccccccggagcagccggcggctgcgggccggcaccctggaggcgcttgtacggcacctgctggatactagaacctctggcacagatgtgagtttcatgtcagcgtttctcgcaactcaccgcgccttcacatctacccctgcccttctgggcctgatggccgaccgcctggaggccttagagagtcatcccacagatgagctggagcgcacaaccgaagtcgctataagcgtgctttccacgtggcttgcaagccacccagaggatttcggttctgaggccaaaggacagctggataggctcgaatcctttctactccaaaccggttatgcagccggcaagggggttgggggaggatccgcagaccttattagaaatctgcggtcaagggtggatccacaggcaccagatctcccaaagccactggccctgccaggagatccccccgctgatccaactgacgtcctagttttcctagccgatcatctggcagaacagctgaccctgttggatgccgagttgtttttaaacctcatcccgtcacagtgtctcggaggtctctggggacatagggatcgtcccggccatagtcacctctgcccttcagtgcgagcgacagtcacacaattcaacaaagttgctggcgccgtggtctcaagcgtactcggagccactagcactggagagggaccgggggaagtgaccattcggcctctacggccgccgcaaagggcgcgacttttggagaagtggatccgagtggccgaagaatgtaggctcctccgcaatttctcaagtgtgtatgccgtagtaagcgccctccagtcttcaccgatccaccgacttagagctgcgtggggagaggcgacacgcgactccctgcgcgtgttttcatccctgtgtcagatcttttctgaagaggataactattcacaatctcgagagctgttggttcaagaggttaagctgcagagcccattagagccccacagcaaaaaagccccaaggtcaggatcacggggggggggggttgtgccttacctcggcacttttttaaaagacctggtgatgctcgacgcagccagtaaagatgagctggagaacggatacatcaatttcgataagcggcgaaaggtttccggcgtgagcggcctggatgctggacttccatatccttgttcacgaaagggcagaggcaagagccagggctcactttcattcggctcctgtagcctccgggcccccagccaggaattcgccgtgctgagcgaactccgacggctgcagaacgaatgtcgagggtacaacctgcagcctgaccacgacattcaaaggtggttacagggactgaggcctctgactgaagcgcaacggtag

SEQ ID NO: 304794 - DNA, 1383 bp, Artificial Sequence
  derived and/or modified sequence
atgccccccccccggagcagccggcggctgcgggccggcaccctggaggccctggtgcgacaccttctggatacacggacctcaggtaccgacgtttcctttatgtcagcttttctggctacccaccgggcctttacgtccacccccgcactactagggctgatggccgaccgattggaggccctggagtcacaccccacagacgagcttgagagaacaactgaagtagcaattagtgttttaagcacgtggctcgcctcacacccagaagattttgggtcggaagctaagggacagctggatagactggagtccttcctgcttcagacgggttacgccgctgggaagggagtgggcggggggtcagcggaccttattaggaacctccgatccagggttgacccccaggccccagaccttcccaaacccctggctctcccgggagacccacccgctgatccaacggatgtcctggtattcctggcagatcatcttgccgaacagctgacgctactcgacgctgagttgtttctgaacttgatcccctcccagtgtctgggaggactctgggggcaccgggataggccggggcatagtcacttgtgccctagcgtgagggctacagttacacagtttaataaagtcgctggggctgtcgttagctccgtgctgggggcaacatccacaggggagggaccgggagaagttacaatacgtcccttgcgtcccccccagagggctcggctgctggaaaagtggatcagggtggcagaggaatgtagactcctccgtaatttttcgagtgtgtacgcggtggttagtgctttgcagtctagtccaattcatagattaagagcggcctggggtgaggctactagggattcactgcgggtatttagctctctctgtcaaatcttctcagaagaggacaattatagtcagtctcgggagctcctggtccaggaggtgaagcttcaatctcccctcgagccccacagtaagaaagcccccagaagcggatcccgaggcggcggcgtcgttccatacttaggcacattccttaaggatctggtgatgttggatgccgctagcaaggacgagcttgagaatggttatattaattttgataagcgacggaaggtatccggggtgagtgggcttgacgccgggcttccttacccctgttcccggaagggtcgcgggaaatcccaggggtcgcttagctttgggagttgttcactgcgcgcaccttctcaggaattcgctgtgctatcagaactgaggagactgcagaatgagtgtcgtgggtacaatcttcaacccgaccacgatatacagagatggcttcagggattgcgccctttgaccgaagctcagcgctag

SEQ ID NO: 304795 - DNA, 1383 bp, Artificial Sequence
  derived and/or modified sequence
atgccccccccccggagcagccggcggctgcgggccggcaccctggaagcattggtgcgacacctgctggatactcgaacctcaggcactgatgtgtcatttatgtccgcctttcttgcaacccatcgtgcattcacaagcactcctgccttgcttggactcatggctgacaggctcgaggcgttggagtcacaccccacggatgaactcgagagaactaccgaggtggcaatttccgtgctgtctacatggttggcctctcaccccgaggattttgggagtgaggccaagggtcaactggatagactggaatccttcctactgcaaaccggatacgccgccggtaaaggcgtgggtggaggatccgccgatctgatccgcaacttgagaagccgggtggaccctcaggcacccgatcttcctaaacctctcgcgctcccaggagacccaccagccgaccccacagatgttctcgttttcctcgctgaccacctagccgaacagttaacactgctggacgctgaactgtttctgaatctgatcccgtctcaatgcctaggaggattgtggggtcaccgcgatcggccgggacactctcatctctgccctagcgttcgcgccaccgtgacacagtttaacaaggtggctggcgcagtggtgtcctcggtactgggggccacctccactggtgagggcccaggggaagtgacgatacgcccccttaggcccccgcagcgcgccagactcctcgaaaagtggatcagggtcgccgaagagtgtaggctcctgcgtaatttctcttctgtatatgctgtggtgtctgcgttacagtctagtcccatccacaggctgagagccgcatggggggaagcaacaagagacagcctcagagtgttttcatccttgtgccagattttcagcgaggaagacaactacagtcagagcagggagctattggtgcaggaagttaagctgcagagcccactcgagccacactcaaagaaggctcccagaagcggatctcggggtgggggagtcgtcccctacctgggaactttcctcaaggacctggtaatgctggacgcagcatcaaaagatgagctcgaaaatgggtatattaatttcgacaagcgaaggaaggtgtccggcgtctcaggcttggatgccggattaccctatccttgttctagaaaggggcggggcaaatcccagggcagcctgtccttcgggtcatgctccctgagagccccctcacaagaatttgccgtgctcagcgaattaagaagattacaaaatgagtgccgtggatataacctgcagccagatcacgacatccagaggtggttacaaggtctgagaccactgacggaggctcagcgctag

SEQ ID NO: 304796 - DNA, 1383 bp, Artificial Sequence
  derived and/or modified sequence
atgccccccccccggagcagccggcggctgcgggccggcaccctggaagcgttggtccggcatctattggatacaaggacatcgggcacagatgtgtcttttatgtctgccttcctggctacccatcgggcattcacttccacacctgccctcctgggattgatggccgaccggctagaggcgctcgagagtcatccgacggacgagctggagaggacaactgaggtcgcgatctctgtgttaagcacctggctggctagtcatccggaggactttgggtctgaggcgaaaggtcagctcgacaggttggagtcctttttgttacagaccggatatgccgcgggcaaaggagtcggcggcggatccgcagatctaattaggaacttgcggagtagagtagacccccaagcccccgacctgccaaagcccctcgcattaccaggggatcccccggcagatccaactgatgtgctggtatttctcgcagaccatctcgccgagcagctcaccctgctggacgctgagctgttcttgaatttgattccatcgcaatgtctcggcggactgtggggtcacagggatagacctggacactcacacttgtgcccatccgtgagggctaccgtcactcaattcaataaagtagcgggcgccgttgtgtctagcgtgttgggggcaaccagcaccggagagggccctggggaggtgacaattcggcctctcagaccaccccaaagagcccgcctcctagagaaatggattagggtagcagaggaatgcaggctgctcaggaacttttccagcgtatatgccgtggtgagcgccctgcaatcatcccccatccatagacttcgcgccgcgtggggagaggctactcgagacagcctccgcgtgttcagttcgctgtgtcaaatttttagtgaagaggacaattactcacagagccgagagctgctggtacaggaggtcaagctccaaagcccattagaacctcactcaaaaaaagctcccaggtctgggagtagaggtggcggagttgttccttatctgggcactttcctcaaggatcttgtcatgctagacgccgctagcaaggatgagttggaaaatggatacatcaactttgacaagagaaggaaggtttcaggagtgtccggactggacgccgggctgccgtatccgtgtagcaggaagggtcgcggcaagtcccaggggtctctgagttttgggtcttgcagtttgcgggctccttcgcaggagtttgcagtgctcagcgagttgcgccgtcttcaaaatgagtgtagaggatacaatctccagcctgaccacgacatccagagatggttacaaggactacgtccgctgaccgaagcccagcggtag

SEQ ID NO: 304797 - DNA, 1383 bp, Artificial Sequence
  derived and/or modified sequence
atgcctcccccacggtcctctaggcgcttgcgggctggcacactcgaagccctcgtgagacacctgttagacacacgcaccagcggcaccgacgtgtcattcatgagcgcctttctagcaacccatagagcatttacctcaacacccgcacttctcgggctgatggcagacaggctcgaggcgctagagtcacacccaactgatgaattggaaagaaccacggaggtggctatctcagttctttcgacatggctcgcaagtcaccccgaagacttcggctcagaggccaaggggcagctcgaccgtctggaatcgtttctgctccagacggggtatgcggctgggaagggcgtgggaggcggaagtgccgacctgataagaaacctgcgctcacgcgtcgacccccaggcacctgacctgcccaaacctctcgcgttacccggagacccccctgctgatcccacggatgttcttgtatttttagcagatcacctggccgagcagctgacattgcttgacgcagagctttttttaaatctgatcccaagccagtgcctgggtggtctttgggggcatcgggatcgcccaggccactcgcacctgtgtccaagtgtaagagcaacagttacccaatttaacaaagttgcgggtgcggtggtatctagcgttctgggagccactagcaccggtgaaggtcctggagaagttaccatccgtcctctgcgcccacctcagagagctcgcctcctggagaagtggatcagggtggcagaggaatgtaggctgctgcggaatttcagctccgtgtacgccgtagttagcgcgttgcaatcaagccccatccatcgcttgagggccgcttggggggaagccacacgcgattccctgcgcgtgttttccagtctgtgccagatcttctccgaggaggataattactcccagagccgcgagttgctcgttcaggaggtgaagttacagtcccctctggagccacactctaagaaagcaccacgctccgggagcagaggtggcggtgtagtcccctaccttggaactttccttaaagacttggtgatgctggacgcagcctcgaaggacgaactggaaaatggctatattaacttcgataaaagaagaaaggtgtctggagtctccggtctggatgcgggtttaccttacccatgcagtagaaaaggtcggggtaagtcacaaggttctctctcttttggatcatgctctctgcgcgctccttctcaggagttcgcagttctgtcagaactgagacgactgcagaatgaatgtagaggctataacctgcagcccgaccatgacatacaaaggtggctccagggcctaagacccctgaccgaagcccagcgctag

SEQ ID NO: 304798 - DNA, 1383 bp, Artificial Sequence
  derived and/or modified sequence
atgccgccaccacgctcttcccgaagattacgagccggaaccctggaggctcttgttcggcacctcttggacacacggaccagtgggacagacgtgagttttatgtctgctttcctggccacgcatcgggcttttaccagcacacctgccctgctcgggttgatggccgaccgactggaggcccttgaatcgcaccccacagatgagctcgaacgaaccactgaagtcgctattagcgttctgtctacatggctggcctcacaccccgaggacttcggcagtgaagccaaagggcagctggatagactagagtcattcctgctgcagacaggttatgccgctggaaagggtgtgggaggagggtcggccgatcttattagaaatctgagatcacgggtcgatccacaagctcccgatctgcccaagcctctggctctgcccggagaccctcctgctgatcctactgacgtgcttgtattcctcgctgaccacctggcagaacaactcacactgctggatgccgagctattccttaatctaattccttctcagtgcctgggcggactgtggggccatagggatcgacctggccacagccatctgtgcccctccgtaagagctaccgtgacccagttcaacaaagtggctggcgctgtagtcagctctgtactgggagctacaagtacaggagagggacctggcgaggtaaccatccggcctctgcgacctccccaacgggctcgccttttggagaaatggatcagagttgccgaggagtgccggctgcttcgcaacttcagtagcgtctatgctgtcgttagcgcactgcagtcctctcctattcaccgcttgagggcggcttggggggaggccaccagagatagtctccgggtcttctccagcctttgtcaaatcttctctgaggaggataattattctcagtcccgcgagctgctggtccaggaggtgaagcttcagtcaccgctggagccccactctaagaaggcacccaggtcaggctcaagagggggtggcgtcgtaccatacctagggacatttctcaaagacttagtgatgcttgatgccgctagcaaagatgaactggaaaacggctacataaatttcgacaagcgacggaaagtgtccggcgtaagcgggcttgacgccggtctcccctatccgtgttcccgaaagggacgagggaagtcacaaggttccctgtccttcgggtcatgctctctcagagccccatctcaagaatttgccgtattaagtgaacttcgaagactgcaaaacgagtgtcggggttacaatttgcagcccgatcacgacatacaaagatggctccaaggcctgcggcctctgaccgaggctcaacgatag

SEQ ID NO: 304799 - DNA, 1383 bp, Artificial Sequence
  derived and/or modified sequence
atgccacccccaagaagcagccggaggttaagagctggcaccctcgaggcactggtgaggcatctcttggacacgcgaaccagcggaaccgatgtgagctttatgagcgcattcttggctacacaccgcgcttttacgtctacgcctgcgctgctgggactcatggccgacaggctcgaggcacttgagtcccatccaaccgacgaattggagcgcacaactgaggttgcaattagcgtcttgtcaacttggttggcatcgcatcccgaagatttcgggtccgaggcaaagggacaactggataggctcgagagctttttgttgcagacaggttacgccgcaggaaaaggtgtggggggaggcagtgccgacctcatccggaatctgcggtcacgggtcgaccctcaggcaccagatctgccgaagccgctggcactgccaggagatcctcctgcagatcccacagatgtgctggtgtttctggcagatcatttggctgagcagctgacacttctggacgctgagcttttcctcaatcttattcccagccaatgtttgggtggactctggggtcacagagatcggccaggtcactcccatctctgcccctcagtgagggctaccgtgacgcaatttaacaaagtcgctggagcagtggtgagctccgtgctgggagcgacctccacaggcgaaggcccaggtgaggtaactattagacctcttcgaccaccacagcgggctcggctgctggagaagtggatccgagttgcagaagagtgtaggctgctgaggaacttctcttctgtgtatgctgtagtctcggccctacagtcatcgcccatccacagattgcgagccgcttggggagaggccactcgagactccctcagggtgtttagtagtttgtgccagattttcagtgaggaggataattactcccaatcaagagaactcctcgtgcaggaagtgaaactccagtcacccctggagccccactcaaaaaaggctccaagaagtggaagccgaggaggaggcgtggtgccctacctcggaacctttttgaaggatttagtcatgctcgatgccgcaagcaaggacgagctcgagaacgggtatatcaacttcgacaaaaggcggaaagtgagcggagtctccggactggacgcgggtctgccctacccatgctcccggaagggtcgcggtaaatcccagggaagcctgagcttcggctcatgctcccttagagctccctctcaggagttcgccgtgctctcggaacttagacgcctccaaaacgaatgcagaggatacaatttgcagccagaccacgatattcagcggtggcttcaaggcttgaggccactgacagaggcccagagatag

SEQ ID NO: 304800 - DNA, 1383 bp, Artificial Sequence
  derived and/or modified sequence
atgcccccaccacgcagttctagacgcctgcgagctggaaccctggaggccctggtgcgacatctgttggacacacggacaagcggtacagatgtgtcctttatgagcgccttcctggcaacgcaccgagcattcacctccactcctgcactgctggggcttatggcagatcgactagaggctttggagtctcaccctaccgatgagttggagcgcacaactgaggtggcaatctcagtgttatcaacatggttagctagccatccagaggactttggctcagaggccaaggggcagctcgatcggctcgagagctttctgctccagactgggtacgctgctggcaaaggggtcggcggaggatcggccgatctgatccggaacttgcgatccagagtggaccctcaggcacccgatctgccaaaaccattagctttacctggcgaccctcccgcagaccctactgacgtcctggtctttcttgcagatcacttagccgaacaactgacattgttggatgctgagctctttctgaatctaattcccagccaatgcttggggggtttatggggacatcgagaccgccctggccactctcacctgtgtccatcagtgcgagccaccgtcactcagtttaacaaggtggcgggagccgtggtgtcttccgtgctcggcgcaacgtccaccggagaggggcctggcgaggtgaccattaggccactgagacccccacagagggcccgtctgctcgagaagtggatcagggtggccgaagagtgtcgattgcttcggaatttttccagcgtctacgccgtggtgtcagccctccagagcagccctatccatcggcttcgggctgcatggggtgaggccacccgtgactctcttcgcgtgttctcctcactctgccagatctttagtgaggaggataactactcgcagtccagagaactgctggtgcaggaggtaaaattacaatcacctttggaacctcactcaaagaaagccccaaggagtggatcacgagggggaggggttgttccatacctcggcacctttctgaaggacctcgtgatgttagatgcagcgtctaaagatgagctggaaaatggttatataaactttgataagcggaggaaggtctctggcgtctcaggattagatgcgggactcccctatccctgcagccggaagggaaggggaaaatcccagggttccctcagcttcggctcatgcagtttgagagccccatctcaggaattcgcagttctgtctgagctgaggaggctccagaacgaatgcagagggtacaacctgcagcctgaccatgacatccagcgttggctccagggtttgagacccctgaccgaggcacagcgctag

SEQ ID NO: 304801 - DNA, 1383 bp, Artificial Sequence
  derived and/or modified sequence
atgcccccaccaaggtcaagccgacggctgcgcgctgggaccttggaggcactagttcgtcatctacttgacacaaggacctctggtaccgatgtctctttcatgagcgctttcctggcgacccatcgggcattcacaagtactccggctttgctcggtctgatggcggaccgactcgaggctctcgagtcacaccccaccgatgagttggaacggaccacagaagtcgccataagtgttctgagtacatggcttgcttcccacccagaggattttggatctgaggccaaggggcaactggacaggctggagagcttccttctgcagactggatacgctgccggtaaaggcgtcggagggggaagtgcagatctcattcggaatttgcgaagccgagttgatccccaagctcccgacctgcctaagccactcgcacttcccggtgatcctcctgcagatcccaccgatgtattagttttcttagcagaccacctggccgaacagctgacattactcgatgctgagctcttcctgaacctgattccctcccagtgtttaggcggactgtgggggcatcgtgataggccaggccactctcacctgtgtcccagcgtaagggccacggtcacacaatttaacaaggtggccggtgccgtggtcagctccgttctcggcgctaccagcacaggggaggggccaggagaagtgaccatcaggccactccgaccacctcaaagggccaggctgctggagaaatggatacgtgtggccgaggagtgcagactcctcaggaacttctcatctgtgtacgctgtggtcagcgccctgcaatccagcccgattcataggctgcgggctgcatggggagaagccactcgggactccctgcgagtcttctcatccttatgtcagatcttctctgaggaggataactatagccagtctagggagttgctggtacaggaggtcaagctccagtcacccctggagcctcacagcaagaaggcacctcgctcggggtcgcgaggtggcggagtcgtgccttatctaggaacattcttgaaggacctagtgatgctggacgctgcgtctaaggacgaactcgagaacggatacatcaatttcgataagcggagaaaggtaagcggagttagtgggctggacgcaggacttccatatccttgcagcagaaagggcaggggcaaatctcaaggaagtctgagcttcggcagttgttctctcagggctccttcccaggagtttgccgtgctgagcgagctgcggagattacaaaatgaatgtcggggttacaaccttcagcctgaccacgatatccaacggtggctgcagggtcttcgtccccttaccgaggcccagagatag

SEQ ID NO: 304802 - DNA, 129 bp, Artificial Sequence
  derived and/or modified sequence
atgggggttaggcacccaccctgctctcaccggctcctggcggtgtgcgcacttgtgagtctggctactgcagccctgctggcgaatactccttgcgggccatacacgcacgactgccccgttaaacgt

SEQ ID NO: 304803 - DNA, 495 bp, Artificial Sequence
  derived and/or modified sequence
atgacatcgtcttctcctgccggcctcgagggatctgacctatcctcaatcaacaccatgatgtccgctgtgatgagtgtggggaaagttaccgaaaacggcgggtctccccagggcattaaaagcccatccaaaccacctggtccaaacaggatcggtcgacgcaatcaggaaacgaaggaggaaaagagttcctataattgtccgctgtgtgagaagatctgcacaacccagcaccagctgacgatgcatattagacagcataataccgacaccggtggggccgatcattcatgttctatctgcggcaagtcactgtcttctgctagtagtctggacaggcacatgctagttcatagcggtgagcgcccttacaaatgtactgtttgcgggcagtccttcacgacaaacgggaacatgcaccgccacatgaaaatccatgaaaaagatcctaattccgcgaccgctaccgctcctcccagccctctgaagtag

SEQ ID NO: 304804 - DNA, 2337 bp, Artificial Sequence
  derived and/or modified sequence
atgacatcaagctctccagcggggctagagggcagtgatctgagcagtatcaacactatgatgagcgcggtgatgtccgtaggtaaggtgaccgagaacggaggatctccacagggcattaaatccccctccaaacctccagggccgaatagaattggaagacgaaaccaggaaacaaaggaagagaagtcctcatataattgcccgttatgtgaaaagatttgtaccacccaacatcaactgacaatgcatattcgacaacacaacacagacacaggcggtgcggatcatagttgcagtatatgcggcaagtctctgagctctgcaagcagcttggatcggcacatgctggtccactcaggagaaaggccctacaaatgtactgtgtgcgggcagagctttacgacaaatggcaacatgcatcgacacatgaagatccacgagaaggatccaaattccgcgaccgccaccgcgccaccatctcccctgaagagacgcagactgagttccaagcgcaagcttagtcatgacgctgaatctgagagagaggaccccgcgccagccaagaaaatggtggaggatggccagagcggggacctggagaagaaggcggatgaggtgttccattgccccgtgtgctttaaggagttcgtctgtaagtacggactagaaacacatatggaaactcacagtgacaatcctctccggtgcgacatttgctgcgttacgttcaggacccatagaggccttctgcgacacaatgcactcgtgcacaaacagctccctcgggatgctatgggccggccattcatccagaacaatccctcaattcccgctggcttccacgatctggggttcaccgacttctcctgccgaaagtttccaagaatatcacaggcctggtgtgaaactaatctgaggagatgcatcagtgaacaacatagatttgtgtgtgacacatgcgataaagcctttccgatgctatgctccctggccctccataagcagacccacgtggcggcagaccaggggcaagagaagccacaggctacacctttgcctggggacgcccttgatcagaaaggctttcttgcgctactgggcttgcagcatacaaaggatgtccggccagccccagccgaagagcccctcccggacgataatcaagctatacagctccagacactgaagtgccagcttcctcaagacccaggttgcaccaatctacttagtctctcccctttcgaggctgcctctctgggagggagcctgacggtgcttccagcaacaaaggacagcatcaaacacctctccctccagccttttcagaagggatttatcattcagccagattccagcattgttgtcaaacccatcagcggcgagtctgctatcgaactggcggacatccagcagattctcaaaatggcagcttctgccccaccccagattagcttacctccattcagcaaagcccctgccgcacccctgcaggccattttcaagcacatgcctcccctgaaaccaaagccacttgtgaccccgagaacggtggtagctacctctacccctccgccacttatcaacgcccagcaggcgagcccgggctgtatttccccttccctaccccccccaccactaaagctgctcaagggttccgtagaggctgcgtctaatgcccatctgcttcagtctaagagcggaacgcaaccacatgctgccacgcgtctaagtctgcagcagccccgggcagaactgcctggtcagccagaaatgaagacccagctggaacaggacagtatcattgaggcgttattaccgcttagcatggaggctaagatcaagcaggaaatcaccgaaggagaactgaaggctttcatgactgcccccggaggaaagaaaacacccgccatgaggaaggtgttgtatccatgccggttctgcaatcaagtatttgcttttagtggtgtcctacgtgcacatgttcggtcccacttggggattagcccttatcagtgcaacatctgcgattacatcgcagccgacaaggccgccctcatcaggcacctcagaactcattcaggtgagagaccatatatttgtaaaatatgccactaccccttcaccgtgaaggccaattgtgagaggcacctgcgaaagaaacatctgaaagccacacggaaggacattgaaaaaaacatcgagtatgttagcagctcggccgcagagttagtggacgccttctgtgctccagacaccgtctgccgcctctgtggtgaggatctgaaacactaccgcgctctccggattcatatgaggacccattgtggcagatag

SEQ ID NO: 304805 - DNA, 411 bp, Artificial Sequence
  derived and/or modified sequence
atgacaagctcttctccggcaggtctggaaggaagcgacctgagctctatcaacaccatgatgagcgcagtgatgagtgtaggaaaggtaactgaaaacgggggtagccctcagggaattaaatccccttcaaagccgcccggacccaacaggattggcaggaggaatcaggagactaaagaagaaaagtcctcctacaattgtccactctgtgaaaagatttgtaccactcaacatcagctaacgatgcacattaggcagcataacacagatacaggcggggccgatcactcatgctccatctgcggcaagtcactgtcatccgcctcatcactcgacagacacatgctcgtccattctggagaaagaccttacaaatgcaccgtctgtggtcagagcttcactacctag

SEQ ID NO: 304806 - DNA, 189 bp, Artificial Sequence
  derived and/or modified sequence
atgacatcctcgtccccagctggattggaaggcagtgatttgtcatccattaataccatgatgtccgccgtgatgtctgtaggaaaggtgactgaaaatggcggcagcccccaggggatcaaatccccctcaaagcctccgggccctaataggatcggacgccgcaaccaggtcagcgtacatacctag

SEQ ID NO: 304807 - DNA, 495 bp, Artificial Sequence
  derived and/or modified sequence
atgaccagcagcagccctgctggcctggagggcagtgacctgagcagcatcaacaccatgatgtctgctgtgatgtctgtgggcaaggtgacagaaaatggaggcagcccccagggcatcaagagccccagcaagcccccaggccccaaccgcatcggcagaagaaaccaggagaccaaggaggagaagagcagctacaactgccccctgtgtgagaagatctgcaccacccagcaccagctgaccatgcacatccggcagcacaacacagacaccggcggcgctgaccacagctgcagcatctgtgggaagagcctgagcagcgccagcagcctggacagacacatgctggtgcacagcggggagcggccctacaagtgcaccgtgtgtggccagagcttcaccaccaatggaaacatgcaccgccacatgaagatccacgagaaggaccccaacagcgccacagccacagccccacccagccccctgaagtag

SEQ ID NO: 304808 - DNA, 2337 bp, Artificial Sequence
  derived and/or modified sequence
atgaccagcagcagccctgctggcctggagggcagtgacctgagcagcatcaacaccatgatgtctgctgtgatgtctgtgggcaaggtgacagaaaatggaggcagcccccagggcatcaagagccccagcaagcccccaggccccaaccgcatcggcagaagaaaccaggagaccaaggaggagaagagcagctacaactgccccctgtgtgagaagatctgcaccacccagcaccagctgaccatgcacatccggcagcacaacacagacaccggcggcgctgaccacagctgcagcatctgtgggaagagcctgagcagcgccagcagcctggacagacacatgctggtgcacagcggggagcggccctacaagtgcaccgtgtgtggccagagcttcaccaccaatggaaacatgcaccgccacatgaagatccacgagaaggaccccaacagcgccacagccacagccccacccagccccctgaagagaagaaggctgagcagcaagaggaagctgagccatgatgctgagagcgagagagaagatcctgccccagccaagaagatggtggaggatggccagagcggggacctggagaagaaggcagatgaggtgttccactgccctgtgtgcttcaaggagtttgtgtgcaagtatggcctggagacccacatggagacccacagcgacaaccccctgcgctgtgacatctgctgcgtgaccttccgcacccaccggggcctgctgcggcacaatgccctggtgcacaagcagctgcccagagatgccatgggccggcccttcatccagaacaaccccagcatcccagctggcttccatgacctgggcttcacagacttcagctgcaggaagttcccccgcatcagccaggcctggtgtgagaccaacctgcggcgctgcatcagcgagcagcacagatttgtgtgtgacacctgtgacaaggccttccccatgctgtgcagcctggccctgcacaagcagacccacgtggccgctgaccagggccaggagaagccccaggccacccccctgcctggagatgccctggaccagaagggcttcctggccctgctgggcctgcagcacaccaaggatgtgcggcctgccccagctgaggagcccctgcctgatgacaaccaggccatccagctgcagaccctgaagtgccagctgccccaggaccccggctgcaccaacctgctgagcctgagcccctttgaagctgccagcctgggcggcagcctgactgtgctgcctgccaccaaggacagcatcaagcacctgagcctgcagcccttccagaagggcttcatcatccagcctgacagcagcatcgtggtgaagcccatcagcggggagagcgccatcgagctggccgacatccagcagatcctgaagatggccgccagcgccccaccccagatcagcctgccccccttcagcaaggccccagctgcccccctgcaggccatcttcaagcacatgccacccctgaagcccaagcccctggtgacccccaggacagtggtggccaccagcaccccacctcctctcatcaatgcccagcaggccagccctggctgcatcagccccagcctgcccccaccacccctgaagctgctgaagggctctgtggaggccgccagcaatgcccacctgctgcagagcaagagcggcacccagccccatgctgccacccggctgagcctgcagcagcccagggctgagctgcccggccagcctgagatgaagacccagctggagcaggacagcatcatcgaggccctgctgcccctgtccatggaggccaagatcaagcaggagatcacagaaggagagctgaaggccttcatgacagcccctgggggcaagaagaccccagccatgaggaaggtgctgtacccctgccgcttctgcaaccaggtgtttgccttctctggagtgctgcgggcccacgtgcgcagccacctgggcatcagcccctaccagtgcaacatctgtgactacatcgctgctgacaaggccgccctgatccgccacctgcggacccacagcggggagcggccctacatctgcaagatctgccactaccccttcaccgtgaaggccaactgtgagcggcacctgaggaagaagcacctgaaggccaccaggaaggacatcgagaagaacatcgagtatgtgagcagcagcgctgctgagctggtggatgccttctgtgccccagacacagtgtgccgcctgtgtggggaggacctgaagcactaccgggccctgcgcatccacatgaggacccactgcggccgctag

SEQ ID NO: 304809 - DNA, 411 bp, Artificial Sequence
  derived and/or modified sequence
atgaccagcagcagccctgctggcctggagggcagtgacctgagcagcatcaacaccatgatgtctgctgtgatgtctgtgggcaaggtgacagaaaatggaggcagcccccagggcatcaagagccccagcaagcccccaggccccaaccgcatcggcagaagaaaccaggagaccaaggaggagaagagcagctacaactgccccctgtgtgagaagatctgcaccacccagcaccagctgaccatgcacatccggcagcacaacacagacaccggcggcgctgaccacagctgcagcatctgtgggaagagcctgagcagcgccagcagcctggacagacacatgctggtgcacagcggggagcggccctacaagtgcaccgtgtgtggccagagcttcaccacctag

SEQ ID NO: 304810 - DNA, 189 bp, Artificial Sequence
  derived and/or modified sequence
atgaccagcagcagccctgctggcctggagggcagtgacctgagcagcatcaacaccatgatgtctgctgtgatgtctgtgggcaaggtgacagaaaatggaggcagcccccagggcatcaagagccccagcaagcccccaggccccaaccgcatcggcagaagaaaccaggtgtctgtgcacacctag

SEQ ID NO: 304811 - DNA, 495 bp, Artificial Sequence
  derived and/or modified sequence
atgaccagcagcagccccgccggcctggagggcagcgacctgagcagtatcaacaccatgatgtctgccgttatgagcgtgggcaaagttactgaaaatggcggcagtcctcagggcataaagtcccccagcaagccccccggcccgaacaggataggaaggcgcaaccaggagactaaggaggaaaaaagcagctacaactgtcctttatgcgagaagatttgcaccacccagcatcaattgacaatgcatatcaggcagcataacactgataccggaggagcagatcacagttgttccatctgtgggaagagtttgtcctctgcgagcagtttggaccgtcacatgttggtacattcaggtgaacgaccatataaatgtactgtctgcggccagagttttacaaccaatgggaatatgcacaggcacatgaaaattcatgaaaaggaccctaactctgcaaccgcaactgccccgccatcccctctgaagtag

SEQ ID NO: 304812 - DNA, 2337 bp, Artificial Sequence
  derived and/or modified sequence
atgaccagcagcagccccgccggcctggagggcagcgacctgagctctattaacaccatgatgtccgctgtaatgagcgttgggaaggtgaccgagaacgggggctcccctcagggtatcaagtcccctagcaagccccccggtccaaatcgaataggtcggcgtaaccaggaaactaaagaagagaagagtagctataattgcccgttgtgcgaaaagatatgcacaacccagcaccagctgactatgcacattaggcagcacaacaccgacaccggcggcgccgatcacagttgctctatttgtggaaaatctctgagcagcgcctcctccctcgaccgccacatgcttgttcatagcggagagcgtccctataagtgtacagtttgtggacagagcttcactaccaacggcaacatgcatcgccatatgaaaattcacgaaaaggaccctaattctgcaactgctacagcacccccaagtcctcttaagcggaggcgcctcagcagtaagcgaaaactgtcgcatgatgcagagagtgagagagaagatcccgccccagctaaaaagatggtggaggacggacagtctggagacctcgagaaaaaggccgacgaagtgttccattgccccgtgtgctttaaggagttcgtttgcaaatacgggcttgagacccacatggagactcattctgataatcctctcagatgcgatatttgttgcgtaacatttcgaacacacaggggactgttgaggcacaacgcattagtgcacaagcagctgccacgtgatgccatgggcagacccttcattcagaacaatccgagcataccggcaggcttccacgacctgggatttaccgatttttcctgtaggaaattccctcgcataagccaggcatggtgtgaaacaaacctgcgtcgatgcatatcagagcagcacagatttgtgtgcgacacctgcgataaagcttttccaatgctgtgcagtttagccctgcacaagcaaacgcatgtagccgctgatcaagggcaggagaaacctcaggccactcctctccccggcgacgctctggaccagaagggctttctcgctctgttgggcctgcagcacaccaaggatgtaagacctgccccagcagaagaacctctgcccgatgacaaccaggccattcaactgcagacgttaaaatgccagctccctcaggaccctggttgcacaaatctgttatctctgagcccgttcgaggcagcatctctgggaggatctcttacagtgcttcctgctaccaaagactccattaagcatctgtccctccagccttttcagaaaggatttatcatccagccagactcttccatcgttgtgaagcctatctcaggcgaaagcgccattgagctcgcagatatccagcagatattgaagatggctgcaagtgcaccgccgcaaataagtctgccccctttttccaaggcaccagccgctcctctccaagcgatctttaaacacatgccccccctgaaaccaaaaccactggtgactccccgtactgtcgtggcgacaagcacgccacctcctctaatcaacgcccagcaggcaagcccagggtgcatctctccttctttgccgccacctcctctcaaactgctgaaaggcagtgtggaggccgctagtaacgctcacctcctgcagagcaaaagcggcactcaaccacatgccgcaactcggctgagcctgcagcaacccagggctgagctgcctggtcagcccgaaatgaagacacagttggagcaggattccatcattgaggccctgctgcccctgtccatggaggcgaagatcaagcaagagatcacagaaggcgaactaaaggcctttatgaccgcaccagggggaaaaaaaacacctgcaatgcgaaaagtcctgtacccctgcaggttctgtaatcaggtgtttgctttctcaggcgttctgcgcgctcatgttcggtcgcacttggggatttcaccttaccagtgtaatatttgcgattatattgctgctgataaggccgctttgataagacatttgagaacacattccggggaaagaccctatatctgtaaaatttgtcattacccattcacagtgaaggctaattgcgaacgtcacctccgcaaaaagcacctgaaggctacccgtaaagatatagagaagaacatcgagtatgtatcctctagcgcagcggagctcgttgacgcgttttgtgctccagacacagtctgtaggctctgcggagaggacctgaagcattatcgagccctaagaatccacatgcggacgcactgcggacgatag

SEQ ID NO: 304813 - DNA, 411 bp, Artificial Sequence
  derived and/or modified sequence
atgaccagcagcagccccgccggcctggagggcagcgacctgagctccataaatacgatgatgagcgctgtcatgtccgtcgggaaggtgaccgaaaatggcggatctccccaggggataaagtctccttcgaaaccgcccgggcctaatagaattgggaggcgaaatcaagagacaaaggaagagaaatccagctacaattgccccctgtgcgagaaaatctgcactacacagcatcagttgactatgcacattaggcaacataataccgacacaggcggagcagaccattcgtgttcgatctgcggcaagtctctctcctctgcatctagtcttgatcgccacatgctggttcacagcggggaaaggccttataagtgtacagtttgcggacagtccttcacgacttag

SEQ ID NO: 304814 - DNA, 189 bp, Artificial Sequence
  derived and/or modified sequence
atgaccagcagcagccccgccggcctggagggcagcgacctgagctccatcaacactatgatgagtgcagtgatgagcgttgggaaggtgaccgaaaacggtggatcacctcaaggcataaaatctcccagcaaacctcctggccccaatcgaatcggccgcaggaaccaagtcagtgtacacacatag

SEQ ID NO: 304815 - DNA, 495 bp, Artificial Sequence
  derived and/or modified sequence
atgacatccagcagtccggctggtcttgagggctcggatctgtcatctatcaacactatgatgagcgccgttatgtctgtcggcaaggtcaccgaaaacggtggcagcccacagggaatcaaatctcctagcaagcccccagggccaaaccgtatcggcagaaggaaccaggagactaaggaggaaaagtccagctataattgcccactgtgtgaaaaaatatgcacaacacagcaccaactaacaatgcacattcggcagcacaacaccgataccggcggagcagatcactcgtgctcgatctgcggtaagagcctgtcatcagccagttccctggaccggcacatgctggtgcactcgggagagcgcccatataagtgtacggtttgtgggcagagcttcactactaatggcaacatgcatagacatatgaaaatccacgagaaagaccccaacagtgcaacggctactgctcctcctagcccactgaaatag

SEQ ID NO: 304816 - DNA, 2337 bp, Artificial Sequence
  derived and/or modified sequence
atgacgtcttctagtcctgccggtctggagggcagcgatttatcgtccattaacaccatgatgtctgcggttatgagcgtgggtaaggtcactgagaacggtggctccccccaggggattaaatcaccctccaagcctcccggtccaaatagaatcggcagacgaaaccaggagacaaaagaagagaaatcctcttacaattgcccactatgcgaaaaaatatgtaccactcagcaccaactgaccatgcacattaggcagcacaacaccgacactggtggcgctgatcactcctgcagcatatgtgggaagtctctttcgagcgcttcctccctggaccggcacatgttggtacattcaggggaacgtccgtataagtgtactgtatgcgggcaaagcttcaccactaacggcaacatgcaccgccacatgaaaattcacgagaaagatccgaatagcgcgacagctactgctccacccagccccctgaagcggagacggctttctagtaaacgaaagttgtctcacgatgctgagtctgaaagagaagatcccgctcctgccaagaaaatggtcgaggatgggcaaagcggcgacttggagaagaaagcagatgaggtctttcattgtcccgtttgctttaaagaatttgtgtgtaagtacggtctggagacgcatatggagactcacagtgacaatcccctgcgatgtgacatttgttgcgtgacgtttaggacccatcgcggtcttctcagacacaatgccttggtgcacaaacagctaccccgagatgccatggggaggccctttatacagaacaacccatcgatcccagccggatttcacgatctgggctttacagattttagctgcagaaagttccccagaatatcgcaggcctggtgcgaaaccaatctacgcagatgtatttctgaacagcaccgattcgtgtgtgatacatgcgacaaagcttttcctatgctatgcagcctggcactgcacaagcaaactcacgttgctgcagaccaggggcaggagaagccgcaggctacacccttgccaggagatgccctagaccagaaaggatttctggctctgttgggtctgcagcataccaaagacgtccgccctgctccggcagaggaacccttaccagatgataatcaagccattcagttgcaaaccctgaagtgccagcttcctcaggatcccggatgcacgaatttgctctctctgtctcccttcgaagctgcatctttagggggatccttaactgtccttccagctactaaagactccatcaagcacctctccctgcagcccttccagaagggtttcatcatccagccagatagctcaattgtggttaaaccaattagcggcgagtcagccattgagctcgcagatatccagcagatattaaaaatggctgcctccgcacctcctcagatcagccttcctccgttctccaaagcccctgccgctccactccaggccatattcaagcatatgccacctctgaagccaaagcctctggtaacgcctagaaccgtagttgccacctctacccctcctccgctaataaatgctcagcaggcttctcccggatgtatttcaccctcattaccccctcctcccctgaagcttttgaagggttcggttgaagcagcctccaatgcccacctgttacagtctaagagtggcacacagcctcacgcggcaacccgtttaagcttgcagcagcctagggcagagttgccgggacaaccagagatgaagacacagttagagcaggattccatcatcgaggctctacttccactgtctatggaggccaagatcaagcaggaaatcactgaaggcgaactgaaggcctttatgaccgcccctggcggaaagaaaacaccagcaatgcggaaggtcctctacccatgccggttctgcaaccaggtgtttgctttctcaggcgtattaagagcacatgtcaggtcacatctggggatcagcccttaccagtgcaatatttgtgattacatagcggctgacaaggcggctcttattaggcacttgcgcacccatagcggtgagcgcccttacatttgcaagatctgtcactacccatttacagtaaaagccaactgcgaacgacacttacggaaaaagcacctgaaggcaaccagaaaagacattgagaagaacattgagtatgtgagctcttcagctgctgaacttgttgatgcgttttgcgctccggataccgtttgccgactgtgcggagaggatttgaaacactaccgagctcttcgaatccacatgcgaacccactgtggaagatag

SEQ ID NO: 304817 - DNA, 411 bp, Artificial Sequence
  derived and/or modified sequence
atgacaagttccagccccgctggactggagggctctgacctctcatccatcaacactatgatgtccgccgtcatgagcgtgggaaaggtaacggaaaacggtggcagcccgcagggcattaaatctcctagcaaacccccagggcctaaccgcatcggtaggaggaatcaagagacgaaagaggaaaagagcagctataattgtcccctatgcgagaagatctgcacgactcagcatcagctgactatgcacatccgtcaacacaacacagacacaggaggtgctgatcacagctgcagtatctgtggtaagtctttaagttccgcctcgtccctggaccggcatatgctagtgcacagcggcgaacgaccctacaagtgtaccgtttgtggccagagctttacaacctag

SEQ ID NO: 304818 - DNA, 189 bp, Artificial Sequence
  derived and/or modified sequence
atgacgtccagcagtccagctggtctggaaggctccgacctctccagtattaacaccatgatgtctgccgtcatgtcagtgggcaaggtgactgaaaatggagggagcccccaaggcatcaagtcacctagtaagcctcctggacctaaccggatcgggaggagaaatcaggttagcgtccacacttag

SEQ ID NO: 304819 - DNA, 1021 bp, Artificial Sequence
  derived and/or modified sequence
gggccgagacgggggccgggacgacggctggggcgccggggtcgccagctcctcgcccacctccctccctgtgggagaagaggaggaggggaagtgactgcggagttgatgaactttgcacatccagaaacgccattttgattccttttccggaacaagtttgcatctctcctcggtctctccctgaagcccaccggtccccaacgcatcatgccagggagccaagcgtcctgcccggccgtaagttgctccgactgtgtgttccaggagtggtggctctgaggtgtgaccctgcccacgtttgggcccagccaggttcagccccccaataaggagggcagcttgataacacaaagaaaacagtgtcaacgagtactaccaagagaagaagacaagaggtcaacacagactcattttctactccgtgtgaatgatagctacagcaggggaaagtttcatagtctatcagtgggtcagaaaatggagttttatagcagaggcttcttagaagcttaaacccctgtcccaatgacgtcaagttcgcccgctggcttggaaggttcagacctatcttccatcaacaccatgatgtcggcggtcatgagtgtagggaaggtcacagagaatggcgggagcccccaggggatcaagtccccctcgaagcctccaggaccaaatcggattggcagaaggaaccaggaaacgaaagaggagaagtcttcctataactgccccctgtgtgagaagatttgcactacccagcaccagctgaccatgcacattcgccagcacaacacagacactggaggagccgaccactcatgcagcatctgcggaaagtcactgagctcggccagctccctcgatcgccacatgctggtgcactctggcgagaggccttacaagtgcactgtgtgtggccagtcatttaccaccaatgggaacatgcacagacatatgaagatccatgagaaggaccctaacagtgccacagccacagcccctccatctcctctgaaac

SEQ ID NO: 304820 - DNA, 2833 bp, Artificial Sequence
  derived and/or modified sequence
ttcagacacctgagagcatcctgttctgggtacagtgtgtgtatgtatatgtttgtttgaagccgctggtcctcgccttttactccttagctggacagcgggttcgggatctgccccatgactaaggctgaagtggaaagttgcgaagatagaacaagagttgttccttagggtggtgtccctaaacttgaaagtggacttggtcctgctcgcaggttgctccgactgtgtgttccaggagtggtggctctgaggtgtgaccctgcccacgtttgggcccagccaggttcagccccccaataaggagggcagcttgataacacaaagaaaacagtgtcaacgagtactaccaagagaagaagacaagaggtcaacacagactcattttctactccgtgtgaatgatagctacagcaggggaaagtttcatagtctatcagtgggtcagaaaatggagttttatagcagaggcttcttagaagcttaaacccctgtcccaatgacgtcaagttcgcccgctggcttggaaggttcagacctatcttccatcaacaccatgatgtcggcggtcatgagtgtagggaaggtcacagagaatggcgggagcccccaggggatcaagtccccctcgaagcctccaggaccaaatcggattggcagaaggaaccaggaaacgaaagaggagaagtcttcctataactgccccctgtgtgagaagatttgcactacccagcaccagctgaccatgcacattcgccagcacaacacagacactggaggagccgaccactcatgcagcatctgcggaaagtcactgagctcggccagctccctcgatcgccacatgctggtgcactctggcgagaggccttacaagtgcactgtgtgtggccagtcatttaccaccaatgggaacatgcacagacatatgaagatccatgagaaggaccctaacagtgccacagccacagcccctccatctcctctgaaacgtaggcgattgtcctccaagaggaaactgagtcacgatgccgagtcagagagagaagacccagcaccagctaaaaagatggtagaagacgggcagtcaggtgacttggagaagaaagctgatgaagtctttcactgcccagtatgtttcaaggagtttgtttgcaagtatggactggagacccacatggagacccattcagataacccactaagatgtgacatttgttgtgtcacctttcgaacacatcgaggactgctgcgtcacaacgcgcttgtccacaaacaacttcccagggatgcaatgggcagacctttcatacagaacaacccttcaattcctgctggcttccacgacttaggattcacggacttctcctgtaggaagtttcctcgcatttctcaggcctggtgcgaaacaaacctgcggaggtgcatcagcgagcaacaccgttttgtctgcgacacctgtgacaaggcgttccccatgctctgctcactggctctgcacaagcagacccatgtggcggcagaccagggtcaagaaaagccgcaggccacgcccctgcctggtgacgccctggaccagaagggcttcctggccttgcttggcctgcagcacaccaaagacgtcaggcctgcccccgccgaggagcccctgccggatgacaaccaggcaattcagctccagacactcaagtgtcagctacctcaggaccccggctgcaccaacctgctgagcctgtcacctttcgaagctgcttccctaggcggttctctcacagttctccccgcgaccaaggacagcataaagcacctgtccctgcagcccttccagaagggcttcatcatccagcctgacagcagcattgtggtcaagcccatctctggcgagtcggccatcgagctggcagacatccagcaaattctgaagatggcagcctcggctccccctcagatcagtcttccgcccttctccaaggcccctgccgccccactgcaggcgatcttcaagcacatgccccctctgaagccaaagcccctggtcacaccacggacggtggtggccacctccacgcccccgcctctcatcaacgcccagcaggcttccccgggctgtatcagccccagcctgccgccaccgcccctgaagctcctcaaaggctcagtggaggcggcctccaacgcccacctgctgcagtccaagtccgggacccagccccacgcggccacgcggctctccctgcagcagccgcgggcggagctgccgggccagcctgagatgaagacgcagctggagcaggacagcatcatcgaggccctgctgccgctgagcatggaggccaagatcaagcaggagatcacagagggggaactcaaggccttcatgacagcgcccggcggcaagaagacgcccgccatgcgcaaggtgctctacccctgccgcttctgcaaccaggtgtttgccttctcgggggtcttgcgtgcccacgtgcgctcccacctgggcatctcgccataccagtgcaacatctgcgactacatcgccgccgacaaggccgcgctcatccgccacctgcgcacgcacagtggggagcggccctacatttgcaagatctgccactaccccttcactgtcaaagccaactgcgagcggcacctgcgcaagaagcacctcaaggccacccgcaaggatatcgagaagaacatcgagtatgtgagtagcagcgcggccgagctggtggacgccttctgcgccccggacaccgtgtgccggctgtgcggcgaggacctcaagcactatcgtgccctgcgcatccacatgcgcacgcactgcggccgc

SEQ ID NO: 304821 - DNA, 998 bp, Artificial Sequence
  derived and/or modified sequence
gcgggcgaggaagctgggcggggggccgagacgggggccgggacgacggctggggcgccggggtcgccagctcctcgcccacctccctccctgtgggagaagaggaggaggggaagtgactgcggagttgatgaactttgcacatccagaaacgccattttgattccttttccggaacaagtttgcatctctcctcggtctctccctgaagcccaccggtccccaacgcatcatgccagggagccaagcgtcctgcccggccgttgctccgactgtgtgttccaggagtggtggctctgaggtgtgaccctgcccacgtttgggcccagccaggttcagccccccaataaggagggcagcttgataacacaaagaaaacagtgtcaacgagtactaccaagagaagaagacaagaggtcaacacagactcattttctactccgtgtgaatgatagctacagcaggggaaagtttcatagtctatcagtgggtcagaaaatggaggtaatcagcagtgtggcgggagggttcttctttccctcctaggttttatagcagaggcttcttagaagcttaaacccctgtcccaatgacgtcaagttcgcccgctggcttggaaggttcagacctatcttccatcaacaccatgatgtcggcggtcatgagtgtagggaaggtcacagagaatggcgggagcccccaggggatcaagtccccctcgaagcctccaggaccaaatcggattggcagaaggaaccaggaaacgaaagaggagaagtcttcctataactgccccctgtgtgagaagatttgcactacccagcaccagctgaccatgcacattcgccagcacaacacagacactggaggagccgaccactcatgcagcatctgcggaaagtcactgagctcggccagctccctcgatcgccacatgctggtgcactctggcgagaggccttacaagtgcactgtgtgtggccagtcatttaccacca

SEQ ID NO: 304822 - DNA, 495 bp, Artificial Sequence
  derived and/or modified sequence
atgaccagcagcagccccgccggcctggagggcagcgacctgagcagcatcaacaccatgatgagcgccgtgatgagcgtgggcaaggtgaccgagaacggcggcagcccccagggcatcaagagccccagcaagccccccggccccaacagaatcggcagaagaaaccaggagaccaaggaggagaagagcagctacaactgccccctgtgcgagaagatctgcaccacccagcaccagctgaccatgcacatcagacagcacaacaccgacaccggcggcgccgaccacagctgcagcatctgcggcaagagcctgagcagcgccagcagcctggacagacacatgctggtgcacagcggcgagagaccctacaagtgcaccgtgtgcggccagagcttcaccaccaacggcaacatgcacagacacatgaagatccacgagaaggaccccaacagcgccaccgccaccgccccccccagccccctgaagtag

SEQ ID NO: 304823 - DNA, 2337 bp, Artificial Sequence
  derived and/or modified sequence
atgaccagcagcagccccgccggcctggagggcagcgacctgagcagcatcaacaccatgatgagcgccgtgatgagcgtgggcaaggtgaccgagaacggcggcagcccccagggcatcaagagccccagcaagccccccggccccaacagaatcggcagaagaaaccaggagaccaaggaggagaagagcagctacaactgccccctgtgcgagaagatctgcaccacccagcaccagctgaccatgcacatcagacagcacaacaccgacaccggcggcgccgaccacagctgcagcatctgcggcaagagcctgagcagcgccagcagcctggacagacacatgctggtgcacagcggcgagagaccctacaagtgcaccgtgtgcggccagagcttcaccaccaacggcaacatgcacagacacatgaagatccacgagaaggaccccaacagcgccaccgccaccgccccccccagccccctgaagagaagaagactgagcagcaagagaaagctgagccacgacgccgagagcgagagagaggaccccgcccccgccaagaagatggtggaggacggccagagcggcgacctggagaagaaggccgacgaggtgttccactgccccgtgtgcttcaaggagttcgtgtgcaagtacggcctggagacccacatggagacccacagcgacaaccccctgagatgcgacatctgctgcgtgaccttcagaacccacagaggcctgctgagacacaacgccctggtgcacaagcagctgcccagagacgccatgggcagacccttcatccagaacaaccccagcatccccgccggcttccacgacctgggcttcaccgacttcagctgcagaaagttccccagaatcagccaggcctggtgcgagaccaacctgagaagatgcatcagcgagcagcacagattcgtgtgcgacacctgcgacaaggccttccccatgctgtgcagcctggccctgcacaagcagacccacgtggccgccgaccagggccaggagaagccccaggccacccccctgcccggcgacgccctggaccagaagggcttcctggccctgctgggcctgcagcacaccaaggacgtgagacccgcccccgccgaggagcccctgcccgacgacaaccaggccatccagctgcagaccctgaagtgccagctgccccaggaccccggctgcaccaacctgctgagcctgagccccttcgaggccgccagcctgggcggcagcctgaccgtgctgcccgccaccaaggacagcatcaagcacctgagcctgcagcccttccagaagggcttcatcatccagcccgacagcagcatcgtggtgaagcccatcagcggcgagagcgccatcgagctggccgacatccagcagatcctgaagatggccgccagcgcccccccccagatcagcctgccccccttcagcaaggcccccgccgcccccctgcaggccatcttcaagcacatgccccccctgaagcccaagcccctggtgacccccagaaccgtggtggccaccagcacccccccccccctgatcaacgcccagcaggccagccccggctgcatcagccccagcctgccccccccccccctgaagctgctgaagggcagcgtggaggccgccagcaacgcccacctgctgcagagcaagagcggcacccagccccacgccgccaccagactgagcctgcagcagcccagagccgagctgcccggccagcccgagatgaagacccagctggagcaggacagcatcatcgaggccctgctgcccctgagcatggaggccaagatcaagcaggagatcaccgagggcgagctgaaggccttcatgaccgcccccggcggcaagaagacccccgccatgagaaaggtgctgtacccctgcagattctgcaaccaggtgttcgccttcagcggcgtgctgagagcccacgtgagaagccacctgggcatcagcccctaccagtgcaacatctgcgactacatcgccgccgacaaggccgccctgatcagacacctgagaacccacagcggcgagagaccctacatctgcaagatctgccactaccccttcaccgtgaaggccaactgcgagagacacctgagaaagaagcacctgaaggccaccagaaaggacatcgagaagaacatcgagtacgtgagcagcagcgccgccgagctggtggacgccttctgcgcccccgacaccgtgtgcagactgtgcggcgaggacctgaagcactacagagccctgagaatccacatgagaacccactgcggcagatag

SEQ ID NO: 304824 - DNA, 411 bp, Artificial Sequence
  derived and/or modified sequence
atgaccagcagcagccccgccggcctggagggcagcgacctgagcagcatcaacaccatgatgagcgccgtgatgagcgtgggcaaggtgaccgagaacggcggcagcccccagggcatcaagagccccagcaagccccccggccccaacagaatcggcagaagaaaccaggagaccaaggaggagaagagcagctacaactgccccctgtgcgagaagatctgcaccacccagcaccagctgaccatgcacatcagacagcacaacaccgacaccggcggcgccgaccacagctgcagcatctgcggcaagagcctgagcagcgccagcagcctggacagacacatgctggtgcacagcggcgagagaccctacaagtgcaccgtgtgcggccagagcttcaccacctag

SEQ ID NO: 304825 - DNA, 189 bp, Artificial Sequence
  derived and/or modified sequence
atgaccagcagcagccccgccggcctggagggcagcgacctgagcagcatcaacaccatgatgagcgccgtgatgagcgtgggcaaggtgaccgagaacggcggcagcccccagggcatcaagagccccagcaagccccccggccccaacagaatcggcagaagaaaccaggtgagcgtgcacacctag

SEQ ID NO: 304826 - protein, 257 aa, Artificial Sequence
  derived and/or modified sequence
MDCGSVGGQRTQRLPGRQRLLFLPVGLSGRPGGSETSARRCLSALSDGLGALRPRAPAARGGVSRASPLLLLLLVPSPRLAAAAPRRQLGDWERSRLGYAAPPAGRSSAWRCSPGVAAAAGALPQYHGPAPALVSCRRELSLSAGSLQLERKRRDFTSSGSRKLYFDTHALVCLLEDNESHSFIQAGVQWHSLGLLQPPPPGFKRSSHLILLSSWDYRHAPPHLDNFSVFLLETGFHHVGQAGLKLLTSSDPPTLAS

SEQ ID NO: 304827 - DNA, 902 bp, Artificial Sequence
  derived and/or modified sequence
aggaaagggcggtcctgcgctgtggcccacgctcgctcccgctgtcggactctgggcctggaccgcgcgtggccggcgccaaaagcgagaggcatgagcgcgcgcccgggccagtgaactgctcggggatggactgcggctcggtcggcggccagaggacccagcgcctgcccggccgccagcggcttctcttcttgcccgtgggcctcagcggaagaccgggcggcagcgaaacctcagcacgccgctgcctctctgcgctctccgacggtctgggggcgctgcgccctcgcgccccggcggcccgcggcggcgtgtcacgtgcctcaccgctgctcctcctcctgctagtgccctccccgcgcttggccgccgcagccccgcgccggcagctcggggactgggagcgctcgcgcctcgggtatgccgcacccccggccgggcgcagcagcgcgtggaggtgctcaccgggcgtcgccgctgccgccggcgcccttccccagtaccacggcccggcgcctgcactcgtttcctgcaggagagagctaagcttgtctgctggatccctgcagctggagcgcaaaaggagagatttcacctcttctgggagcaggaaactctacttcgacactcatgccttagtgtgcttactggaagacaatgaatctcactctttcatccaggctggagtgcagtggcacagtcttggcctactgcaacccccacctcccggtttcaagcgatcctcccacctcatcctcctgagtagctgggattacaggcatgcaccaccacacctggataatttttctgtatttttactagagacggggtttcaccatgttggccaggctggtctcaaactgctgacctcaagtgatccacccaccttggcctcctaa

SEQ ID NO: 304828 - DNA, 774 bp, Artificial Sequence
  derived and/or modified sequence
atggactgcggcagcgtgggcggccagagaacccagagactgcccggcagacagagactgctgttcctgcccgtgggcctgagcggcagacccggcggcagcgagaccagcgccagaagatgcctgagcgccctgagcgacggcctgggcgccctgagacccagagcccccgccgccagaggcggcgtgagcagagccagccccctgctgctgctgctgctggtgcccagccccagactggccgccgccgcccccagaagacagctgggcgactgggagagaagcagactgggctacgccgccccccccgccggcagaagcagcgcctggagatgcagccccggcgtggccgccgccgccggcgccctgccccagtaccacggccccgcccccgccctggtgagctgcagaagagagctgagcctgagcgccggcagcctgcagctggagagaaagagaagagacttcaccagcagcggcagcagaaagctgtacttcgacacccacgccctggtgtgcctgctggaggacaacgagagccacagcttcatccaggccggcgtgcagtggcacagcctgggcctgctgcagccccccccccccggcttcaagagaagcagccacctgatcctgctgagcagctgggactacagacacgcccccccccacctggacaacttcagcgtgttcctgctggagaccggcttccaccacgtgggccaggccggcctgaagctgctgaccagcagcgacccccccaccctggccagctag

SEQ ID NO: 304829 - DNA, 774 bp, Artificial Sequence
  derived and/or modified sequence
atggactgcggctctgtcggtggacagaggacgcagaggctgcccggcagacaaaggcttctatttcttccagtggggctatccggacgccccgggggaagcgagacctcagcgcggcgctgcttgagtgccctgtcggacggactgggtgccttgcggcctagggccccggccgccagaggcggcgtgtctagggcgtcacccttactgctcttactcttagttcccagccctcgtttggcagcggccgcgcctagaagacagctcggtgattgggaaagaagtagattaggctatgccgcacctcccgcagggcgcagctcagcctggcggtgctctcccggcgtggctgcggccgcaggcgcactcccacagtaccatggccccgccccggctcttgtaagctgccggagagagctttcactgtcagctgggtctctgcagctggagaggaagagacgggatttcacgtcttctggttcccggaagctgtattttgatacccatgcgctggtatgtctcttagaggataacgaaagtcattccttcatccaagccggggtgcagtggcattccctggggctgttgcaacctccgcctccgggtttcaaaagatcatctcaccttatcctgttatccagctgggactatcgccacgccccccctcacctggacaatttctctgtctttctgctggaaaccggctttcaccatgtgggtcaggctggcctgaaacttctgacgtccagcgatcccccaacactagcatcatag

SEQ ID NO: 304830 - DNA, 774 bp, Artificial Sequence
  derived and/or modified sequence
atggactgtggctctgtgggcggccagaggacccagaggctgcccggccggcagaggctgctcttcctgcctgtgggcctgagcggccggcctgggggcagcgagaccagcgcccggcgctgcctgagcgccctgagtgatggcctgggcgccctgcggccccgggccccagctgcccggggcggcgtgtcccgggccagccccctgctgctgctgctgctggtgcccagcccccggctggccgctgctgccccccggcggcagctgggggactgggagaggagccggctgggctacgccgcccccccagctggccgcagcagcgcctggcgctgcagccctggggtggccgctgctgctggggccctgccccagtaccacggccctgccccagccctggtgtcctgcagaagagagctgagcctgtctgctggcagcctgcagctggagaggaagagaagagacttcaccagcagcggcagcaggaagctgtactttgacacccacgccctggtgtgcctgctggaggacaatgaaagccacagcttcatccaggccggcgtgcagtggcacagcctgggcctgctgcagcccccacctcctggcttcaagaggagcagccacctgatcctgctgagctcctgggactacagacatgccccaccccacctggacaacttcagcgtcttcctgctggagaccggcttccaccacgtgggccaggccggcctgaagctgctgaccagcagtgacccccccaccctggccagctag

SEQ ID NO: 304831 - DNA, 774 bp, Artificial Sequence
  derived and/or modified sequence
atggactgcggcagcgtgggcggccagcggacccagcggctgcccggcagacagcgtctcctgtttctgccggttgggctgagcgggcgtcctggcggaagtgaaacctccgctcgccgatgcctatctgccctgtcagacgggcttggggctctaaggcctagagcgcctgccgctagaggaggcgtttcacgcgcatcacccctgctgctgttacttttggtgcccagtccccgcctggctgccgccgcaccgagacggcagctgggtgattgggaacgttcacgactgggttacgcagcaccgcctgctggcaggtcctccgcctggagatgctcccctggggtggcggccgccgcgggggctctgccacaataccacggcccagcaccggctctagttagctgcaggcgggagttgtccctgtctgctggttctctgcagctagagcggaagcgccgagattttacctcttccggctcaagaaagctctactttgatacccatgcactcgtgtgtcttctggaggataatgagagtcattccttcatccaagccggcgtacagtggcattccctggggcttctacagccaccaccacctgggtttaagagaagttctcacctcatcctgctcagcagctgggattatcggcacgcaccacctcacttggacaatttctctgtctttcttctcgaaaccggcttccatcacgtcggtcaggctggactgaagttattgacaagttctgacccgccaacgctcgcatcatag

SEQ ID NO: 304832 - DNA, 774 bp, Artificial Sequence
  derived and/or modified sequence
atggattgcggcagtgtgggtggacaaaggacacagcgcctgcccggtaggcaaaggctgctcttcctccctgtgggactctctggtcgccctggcggttccgagacctctgcaaggcggtgcctatccgcactcagcgatggactgggtgctctgagaccaagggctcccgctgcaaggggtggcgtgagtagggcttcacctctcctactactgctccttgtccccagccctcggctggcagctgctgctccccgacggcagctgggggattgggaaaggtccaggctgggctacgctgcaccaccggcaggcagaagtagcgcatggcgttgctctcctggcgtcgccgctgccgctggagccttacctcagtatcatggcccagcccctgccttggtaagctgccggagggagctctcattgagtgcaggcagcttgcagctcgaaagaaaacggcgtgatttcaccagctccggttcaaggaagctgtactttgatacacacgcactagtatgtctgttggaagataatgagtctcactctttcatacaagccggagtgcaatggcactcactcgggctgctccagcctccaccacctggattcaaacgtagttcccatttgatccttctttctagctgggactaccgacacgccccacctcacctggacaatttctctgtgttcttgctggagacaggctttcaccacgtgggccaggctggactgaagctcctgaccagttccgatcccccaaccctggcgtcctag

SEQ ID NO: 304833 - protein, 247 aa, Artificial Sequence
  derived and/or modified sequence
MVTQLRYESFCLHQFQEQDGESIPENQELASKQEILKEMEHLGDSKLQRDVSLDSKYRETCKRDSKAEKQQAHSTGERRHRCNECGKSFTKSSVLIEHQRIHTGEKPYECEECGKAFSRRSSLNEHRRSHTGEKPYQCKECGKAFSASNGLTRHRRIHTGEKPYECKVCGKAFLLSSCLVQHQRIHTGEKRYQCRECGKAFIQNAGLFQHLRVHTGEKPYQCSQCSKLFSKRTLLKKHQKIHTGERP

SEQ ID NO: 304834 - protein, 406 aa, Artificial Sequence
  derived and/or modified sequence
MASTEEQYDLKIVKVEEDPIWDQETHLRGNNFSGQEASRQLFRQFCYQETPGPREALSRLRELCHQWLRPEIHTKEQILELLVLEQFLTILPEELQAWVREHHPESGEEAVAVVEDLEQELSEPGNQAPDHEHGHSEVLLEDVEHLKVKQEPTDIQLQPMVTQLRYESFCLHQFQEQDGESIPENQELASKQEILKEMEHLGDSKLQRDVSLDSKYRETCKRDSKAEKQQAHSTGERRHRCNECGKSFTKSSVLIEHQRIHTGEKPYECEECGKAFSRRSSLNEHRRSHTGEKPYQCKECGKAFSASNGLTRHRRIHTGEKPYECKVCGKAFLLSSCLVQHQRIHTGEKRYQCRECGKAFIQNAGLFQHLRVHTGEKPYQCSQCSKLFSKRTLLKKHQKIHTGERP

SEQ ID NO: 304835 - protein, 107 aa, Artificial Sequence
  derived and/or modified sequence
MASTEEQYDLKIVKVEEDPIWDQETHLRGNNFSGQEASRQLFRQFCYQETPGPREALSRLRELCHQWLRPEIHTKEQILELLVLEQFLTILPEELQAWVREHHPESG

SEQ ID NO: 304836 - protein, 78 aa, Artificial Sequence
  derived and/or modified sequence
MASTEEQYDLKIVKVEEDPIWDQETHLRGNNFSGQEASRQLFRQFCYQETPGPREALSRLRELCHQWLRPEIHTKEQI

SEQ ID NO: 304837 - protein, 17 aa, Artificial Sequence
  derived and/or modified sequence
MASTEEQYDLKIVKVEE

SEQ ID NO: 304838 - protein, 155 aa, Artificial Sequence
  derived and/or modified sequence
MASTEEQYDLKIVKVEEDPIWDQETHLRGNNFSGQEASRQLFRQFCYQETPGPREALSRLRELCHQWLRPEIHTKEQILELLVLEQFLTILPEELQAWVREHHPESGEEAVAVVEDLEQELSEPGNQAPDHEHGHSEVLLEDVEHLKVKQEPTDI

SEQ ID NO: 304839 - protein, 24 aa, Artificial Sequence
  derived and/or modified sequence
MASTEEQYDLKIVKVEEDPIWDQE

SEQ ID NO: 304840 - protein, 103 aa, Artificial Sequence
  derived and/or modified sequence
MASTEEQYDLKIVKVEEDPIWDQETHLRGNNFSGQEASRQLFRQFCYQETPGPREALSRLRELCHQWLRPEIHTKEQILELLVLEQFLTILPEELQAWVREHH

SEQ ID NO: 304841 - protein, 148 aa, Artificial Sequence
  derived and/or modified sequence
MASTEEQYDLKIVKVEEDPIWDQETHLRGNNFSGQEASRQLFRQFCYQETPGPREALSRLRELCHQWLRPEIHTKEQILELLVLEQFLTILPEELQAWVREHHPESGEEAVAVVEDLEQELSEPGNQAPDHEHGHSEVLLEDVEHLKV

SEQ ID NO: 304842 - protein, 217 aa, Artificial Sequence
  derived and/or modified sequence
MASTEEQYDLKIVKVEEDPIWDQETHLRGNNFSGQEASRQLFRQFCYQETPGPREALSRLRELCHQWLRPEIHTKEQILELLVLEQFLTILPEELQAWVREHHPESGEEAVAVVEDLEQELSEPGNQAPDHEHGHSEVLLEDVEHLKVKQEPTDIQLQPMVTQLRYESFCLHQFQEQDGESIPENQELASKQEILKEMEHLGDSKLQRDVSLDSKYR

SEQ ID NO: 304843 - DNA, 3039 bp, Artificial Sequence
  derived and/or modified sequence
gttttgggtctcgatgaccatctaactcctaaatgctgggggccgctccccatagaaatgcctcgccggatttctccgcctcgcacccagtgggactgggatttttggccccggggtttgcaataagggagtcaccaagcagcagccacctctggaattcctagaaaggaaagagttgcctggcttcagccagtgggctcagaacggctgacgcatttccggcctttgcggttgatcggtcattggggtgctgcagccccgccacctgttccgtagcttgccggtgccccgaaggtgtcttctcctaaggaagattaaatcagaaaattttaaatcacagttatccctttacttaaagccagagtaagccttccaaattaaccccaggaatggcttcaacagaggaacagtacgatcttaagattgtgaaagtggaggaagaccctatctgggaccaagaaacccaccttcgagggaacaacttttctggccaagaagcctcccgacaactttttaggcagttttgttaccaagagactcctggtccccgagaagctctgagccggctccgagaactctgtcatcagtggctaaggccagaaatccacaccaaagagcaaatcttggagctgctggtgctggagcaattcctgactatcctgcctgaggagctccaggcctgggtgcgggagcaccatccggagagtggggaggaggctgtggctgtagttgaagatctggaacaagagcttagtgagccagggaaccaggctccagaccatgaacatggacattctgaagtgctcttggaggatgtggaacatctgaaggtcaagcaggaaccaacagacatacagcttcagcctatggtgacacagctcagatatgaatctttttgcctccaccaatttcaagaacaagatggtgaaagtatacctgagaaccaggagttggcatcaaagcaagaaatcttaaaagaaatggaacatttgggggatagcaaactccaaagagatgtatctttggattctaagtacagagaaacttgtaaacgagacagcaaggcagaaaagcagcaggcacattccactggagagagacgccacaggtgcaatgaatgtgggaaaagcttcactaagagttcagtactcattgagcaccagagaatccacactggggagaagccatatgaatgtgaagaatgtgggaaggccttcagccggaggtcaagcctgaatgaacatcggcggagccacactggagagaaaccctatcaatgtaaggagtgtgggaaagccttcagtgccagcaatggcctcactcgacacagaagaatccacacaggggaaaaaccatatgaatgcaaagtgtgtgggaaggctttcctcctcagctcatgccttgttcagcatcagaggatacacactggagagaagcgctatcagtgtcgtgagtgtggcaaagccttcattcagaatgcagggcttttccagcatctccgagtccacactggtgagaaaccctatcagtgcagtcagtgcagtaaactctttagtaagcggacacttcttaagaaacatcagaaaatccacactggagagagaccataagggtgatgagtttgggaaagccttcagtcatcattgcaaccttattaggcattttagaatccatactgttccagcagaactggactaattctgtggaccctcagacccctaaatggggccgtcttggaaagtaagattttcaagtggcttattctgttcttataaaatttattttgtattgcattgaaccacttgtctacaaaccaggtgttggtgtctcctgtgtggatgactgtgattgtagggggttgctgggtggccttcttattccctagcctttggtccatttcttatgatttcctttaaaggcaccaaatcttatctggaaataaattgttatggaggggctgtttttgagcaatactgcatattgaacaattctaaaagaccagtatctatgtatacttttaaaaaaaagatttgctaagatcaaaggatattcagaggtgcatctttttctgtaagagtgacattttaaacaaatgtaaggttttggggaataagaatcgtccacattcccacaggaaatcattgctatggtctcccctaggaatgtgatagatagcttctataattatgcagcattatccatagtatgaaacctgtagttttaatggtttagaaatctatgtctcatttcatatctaactcatgtttttgatacgaatcaatatatatgttgatatcatgagttaatatgagtttgacatgaatcatcaacatagtatatacatatcaacataactatgttgatgattcatatcaaattctcaatgcaggtcattactgtaagttttccatttttgttacaaataataagtaagatgatactttaaaatctctgttcttcacaaggtacctctttaattcatagccttttatgtcagcattattcttcttttgggggttggtcagcaactttgagtgccattgcaagcagcatcatttaagtagttttataaagaaaagaagtctgatatcttgggcagcttgctgcttactggggagaccagcatgcttagacacttattgccagggttaaacatatgctctggcaccaagttcaaatctttcctccccatttgtgagctgtgggactttaggcaagttatctaaatgctgctatgctatagtctccccacctgtaaaacagaggatgataccaataccttcctcatagggtacataagattaaataaatacaaacttgtacttaaaatgtagctctcaataaatatgcattatgatttacatacgaaataatagcatttaacaaatgtaggtagaattttaagtatcatgttaaaattaggatacgaaatgcctctgctgacattcttgttactcttttctccacagtcaaaacctgaatcagaatatttcaaaagagaggaaataaaagttcagcttaaaactgttctgccctaaa

SEQ ID NO: 304844 - DNA, 2562 bp, Artificial Sequence
  derived and/or modified sequence
attggggtgctgcagccccgccacctgttccgtagcttgccggtgccccgaaggtgagtcttggccccttgtcgcgacccgccaggttcccagaagatttcaggtctgtgccttggagtaggcggggagggaacgtctgcgcaggcgtgacccccgcccctacacattcactggcctgaagcccccgtggagtaggtggaggtcccgccccttatcctgaagattaaacagcctttctttgtctgagataacgcccggagttctttgtcctgcctccaagacgataaaggagcgcagacacaaaggctccagaccatgaacatggacattctgaagtgctcttggaggatgtggaacatctgaaggtcaagcaggaaccaacagacatacagcttcagcctatggtgacacagctcagatatgaatctttttgcctccaccaatttcaagaacaagatggtgaaagtatacctgagaaccaggagttggcatcaaagcaagaaatcttaaaagaaatggaacatttgggggatagcaaactccaaagagatgtatctttggattctaagtacagagaaacttgtaaacgagacagcaaggcagaaaagcagcaggcacattccactggagagagacgccacaggtgcaatgaatgtgggaaaagcttcactaagagttcagtactcattgagcaccagagaatccacactggggagaagccatatgaatgtgaagaatgtgggaaggccttcagccggaggtcaagcctgaatgaacatcggcggagccacactggagagaaaccctatcaatgtaaggagtgtgggaaagccttcagtgccagcaatggcctcactcgacacagaagaatccacacaggggaaaaaccatatgaatgcaaagtgtgtgggaaggctttcctcctcagctcatgccttgttcagcatcagaggatacacactggagagaagcgctatcagtgtcgtgagtgtggcaaagccttcattcagaatgcagggcttttccagcatctccgagtccacactggtgagaaaccctatcagtgcagtcagtgcagtaaactctttagtaagcggacacttcttaagaaacatcagaaaatccacactggagagagaccataagggtgatgagtttgggaaagccttcagtcatcattgcaaccttattaggcattttagaatccatactgttccagcagaactggactaattctgtggaccctcagacccctaaatggggccgtcttggaaagtaagattttcaagtggcttattctgttcttataaaatttattttgtattgcattgaaccacttgtctacaaaccaggtgttggtgtctcctgtgtggatgactgtgattgtagggggttgctgggtggccttcttattccctagcctttggtccatttcttatgatttcctttaaaggcaccaaatcttatctggaaataaattgttatggaggggctgtttttgagcaatactgcatattgaacaattctaaaagaccagtatctatgtatacttttaaaaaaaagatttgctaagatcaaaggatattcagaggtgcatctttttctgtaagagtgacattttaaacaaatgtaaggttttggggaataagaatcgtccacattcccacaggaaatcattgctatggtctcccctaggaatgtgatagatagcttctataattatgcagcattatccatagtatgaaacctgtagttttaatggtttagaaatctatgtctcatttcatatctaactcatgtttttgatacgaatcaatatatatgttgatatcatgagttaatatgagtttgacatgaatcatcaacatagtatatacatatcaacataactatgttgatgattcatatcaaattctcaatgcaggtcattactgtaagttttccatttttgttacaaataataagtaagatgatactttaaaatctctgttcttcacaaggtacctctttaattcatagccttttatgtcagcattattcttcttttgggggttggtcagcaactttgagtgccattgcaagcagcatcatttaagtagttttataaagaaaagaagtctgatatcttgggcagcttgctgcttactggggagaccagcatgcttagacacttattgccagggttaaacatatgctctggcaccaagttcaaatctttcctccccatttgtgagctgtgggactttaggcaagttatctaaatgctgctatgctatagtctccccacctgtaaaacagaggatgataccaataccttcctcatagggtacataagattaaataaatacaaacttgtacttaaaatgtagctctcaataaatatgcattatgatttacatacgaaataatagcatttaacaaatgtaggtagaattttaagtatcatgttaaaattaggatacgaaatgcctctgctgacattcttgttactcttttctccacagtcaaaacctgaatcagaatatttcaaaagagaggaaataaaagttcagcttaaaactg

SEQ ID NO: 304845 - DNA, 1221 bp, Artificial Sequence
  derived and/or modified sequence
atggccagcaccgaggagcagtacgacctgaagatcgtgaaggtggaggaggaccccatctgggaccaggagacccacctgagaggcaacaacttcagcggccaggaggccagcagacagctgttcagacagttctgctaccaggagacccccggccccagagaggccctgagcagactgagagagctgtgccaccagtggctgagacccgagatccacaccaaggagcagatcctggagctgctggtgctggagcagttcctgaccatcctgcccgaggagctgcaggcctgggtgagagagcaccaccccgagagcggcgaggaggccgtggccgtggtggaggacctggagcaggagctgagcgagcccggcaaccaggcccccgaccacgagcacggccacagcgaggtgctgctggaggacgtggagcacctgaaggtgaagcaggagcccaccgacatccagctgcagcccatggtgacccagctgagatacgagagcttctgcctgcaccagttccaggagcaggacggcgagagcatccccgagaaccaggagctggccagcaagcaggagatcctgaaggagatggagcacctgggcgacagcaagctgcagagagacgtgagcctggacagcaagtacagagagacctgcaagagagacagcaaggccgagaagcagcaggcccacagcaccggcgagagaagacacagatgcaacgagtgcggcaagagcttcaccaagagcagcgtgctgatcgagcaccagagaatccacaccggcgagaagccctacgagtgcgaggagtgcggcaaggccttcagcagaagaagcagcctgaacgagcacagaagaagccacaccggcgagaagccctaccagtgcaaggagtgcggcaaggccttcagcgccagcaacggcctgaccagacacagaagaatccacaccggcgagaagccctacgagtgcaaggtgtgcggcaaggccttcctgctgagcagctgcctggtgcagcaccagagaatccacaccggcgagaagagataccagtgcagagagtgcggcaaggccttcatccagaacgccggcctgttccagcacctgagagtgcacaccggcgagaagccctaccagtgcagccagtgcagcaagctgttcagcaagagaaccctgctgaagaagcaccagaagatccacaccggcgagagaccctag

SEQ ID NO: 304846 - DNA, 324 bp, Artificial Sequence
  derived and/or modified sequence
atggccagcaccgaggagcagtacgacctgaagatcgtgaaggtggaggaggaccccatctgggaccaggagacccacctgagaggcaacaacttcagcggccaggaggccagcagacagctgttcagacagttctgctaccaggagacccccggccccagagaggccctgagcagactgagagagctgtgccaccagtggctgagacccgagatccacaccaaggagcagatcctggagctgctggtgctggagcagttcctgaccatcctgcccgaggagctgcaggcctgggtgagagagcaccaccccgagagcggctag

SEQ ID NO: 304847 - DNA, 237 bp, Artificial Sequence
  derived and/or modified sequence
atggccagcaccgaggagcagtacgacctgaagatcgtgaaggtggaggaggaccccatctgggaccaggagacccacctgagaggcaacaacttcagcggccaggaggccagcagacagctgttcagacagttctgctaccaggagacccccggccccagagaggccctgagcagactgagagagctgtgccaccagtggctgagacccgagatccacaccaaggagcagatctag

SEQ ID NO: 304848 - DNA, 54 bp, Artificial Sequence
  derived and/or modified sequence
atggccagcaccgaggagcagtacgacctgaagatcgtgaaggtggaggagtag

SEQ ID NO: 304849 - DNA, 468 bp, Artificial Sequence
  derived and/or modified sequence
atggccagcaccgaggagcagtacgacctgaagatcgtgaaggtggaggaggaccccatctgggaccaggagacccacctgagaggcaacaacttcagcggccaggaggccagcagacagctgttcagacagttctgctaccaggagacccccggccccagagaggccctgagcagactgagagagctgtgccaccagtggctgagacccgagatccacaccaaggagcagatcctggagctgctggtgctggagcagttcctgaccatcctgcccgaggagctgcaggcctgggtgagagagcaccaccccgagagcggcgaggaggccgtggccgtggtggaggacctggagcaggagctgagcgagcccggcaaccaggcccccgaccacgagcacggccacagcgaggtgctgctggaggacgtggagcacctgaaggtgaagcaggagcccaccgacatctag

SEQ ID NO: 304850 - DNA, 75 bp, Artificial Sequence
  derived and/or modified sequence
atggccagcaccgaggagcagtacgacctgaagatcgtgaaggtggaggaggaccccatctgggaccaggagtag

SEQ ID NO: 304851 - DNA, 312 bp, Artificial Sequence
  derived and/or modified sequence
atggccagcaccgaggagcagtacgacctgaagatcgtgaaggtggaggaggaccccatctgggaccaggagacccacctgagaggcaacaacttcagcggccaggaggccagcagacagctgttcagacagttctgctaccaggagacccccggccccagagaggccctgagcagactgagagagctgtgccaccagtggctgagacccgagatccacaccaaggagcagatcctggagctgctggtgctggagcagttcctgaccatcctgcccgaggagctgcaggcctgggtgagagagcaccactag

SEQ ID NO: 304852 - DNA, 447 bp, Artificial Sequence
  derived and/or modified sequence
atggccagcaccgaggagcagtacgacctgaagatcgtgaaggtggaggaggaccccatctgggaccaggagacccacctgagaggcaacaacttcagcggccaggaggccagcagacagctgttcagacagttctgctaccaggagacccccggccccagagaggccctgagcagactgagagagctgtgccaccagtggctgagacccgagatccacaccaaggagcagatcctggagctgctggtgctggagcagttcctgaccatcctgcccgaggagctgcaggcctgggtgagagagcaccaccccgagagcggcgaggaggccgtggccgtggtggaggacctggagcaggagctgagcgagcccggcaaccaggcccccgaccacgagcacggccacagcgaggtgctgctggaggacgtggagcacctgaaggtgtag

SEQ ID NO: 304853 - DNA, 654 bp, Artificial Sequence
  derived and/or modified sequence
atggccagcaccgaggagcagtacgacctgaagatcgtgaaggtggaggaggaccccatctgggaccaggagacccacctgagaggcaacaacttcagcggccaggaggccagcagacagctgttcagacagttctgctaccaggagacccccggccccagagaggccctgagcagactgagagagctgtgccaccagtggctgagacccgagatccacaccaaggagcagatcctggagctgctggtgctggagcagttcctgaccatcctgcccgaggagctgcaggcctgggtgagagagcaccaccccgagagcggcgaggaggccgtggccgtggtggaggacctggagcaggagctgagcgagcccggcaaccaggcccccgaccacgagcacggccacagcgaggtgctgctggaggacgtggagcacctgaaggtgaagcaggagcccaccgacatccagctgcagcccatggtgacccagctgagatacgagagcttctgcctgcaccagttccaggagcaggacggcgagagcatccccgagaaccaggagctggccagcaagcaggagatcctgaaggagatggagcacctgggcgacagcaagctgcagagagacgtgagcctggacagcaagtacagatag

SEQ ID NO: 304854 - DNA, 1221 bp, Artificial Sequence
  derived and/or modified sequence
atggcgtctactgaagaacagtacgacctcaaaattgtcaaggttgaggaagacccaatctgggaccaagaaacccacctgaggggaaataacttctccggccaggaagcttctaggcagctattccggcaattttgttaccaagagacacccggaccgagggaagcactgtcacgactgagggagctttgccatcagtggctgcggccagagattcacactaaagagcagattctggagcttctcgttctggaacagttcctcacaattctccccgaagaactccaggcttgggtgcgggaacaccaccccgaaagcggggaggaggctgtggctgtcgtggaggatctggaacaagaattgtctgaacctggcaaccaggcgcctgaccacgagcacggccactctgaagtgctcctggaagatgtcgagcacttgaaggtgaaacaagaacctactgacattcaactgcagcccatggttactcaactgcgctacgagtccttttgcctgcaccaatttcaggaacaggatggagagagtatacccgagaaccaggagctggcgtcaaagcaagagatcctgaaggaaatggaacatctgggggattcaaagttgcagcgggacgtgagcctcgacagtaagtacagggagacctgcaagcgcgatagtaaagctgaaaaacaacaggcccacagcacaggagaaaggcgccacaggtgtaacgagtgcggtaaatctttcaccaagtcctccgtgctcatcgagcatcagagaatccataccggagaaaaaccttacgagtgcgaagagtgtgggaaggccttctcgcggcggtcctcgctgaatgagcatcgccgatcccataccggggaaaaaccatatcagtgcaaagagtgtggcaaggccttctctgcaagcaacgggttaacgcggcacagacggatccataccggcgagaaaccatacgaatgcaaggtttgcggcaaagcctttctcctcagcagttgccttgtgcagcaccagcgaatccacactggcgaaaagcgctatcagtgccgggagtgtggcaaggctttcattcagaatgcgggactgttccagcaccttagagtgcacaccggtgaaaagccctaccagtgttcgcagtgttcaaaactgttcagcaaacgcaccctacttaaaaagcaccagaagatacataccggagaaagaccttag

SEQ ID NO: 304855 - DNA, 1221 bp, Artificial Sequence
  derived and/or modified sequence
atggcttctaccgaagagcagtatgatctaaaaatcgtaaaagtggaggaagatcctatttgggaccaagaaacacacctgcggggaaataacttctccggccaggaggcatctagacaattgtttcggcagttctgctaccaggaaacccctggtcctcgcgaggcgctgtctcggttgcgtgagttgtgtcatcaatggctcaggcctgagattcataccaaggagcagattttggaattgctcgttcttgagcagtttctaaccatactgccagaggaactgcaagcttgggttagagagcatcatccggaatcgggggaagaggcagtggccgtggtcgaagacctagagcaggagctgtctgagccagggaatcaggctcctgaccacgaacatggacactctgaagttcttctggaagatgttgaacatctaaaagtgaagcaggagccaactgacattcagcttcaaccaatggtcacccagctccgatatgagagtttctgtttgcaccagtttcaggaacaagacggagagagtattcccgaaaaccaggaactggcctctaagcaagaaatcctgaaggaaatggaacatctgggcgattctaagctccaacgcgacgtatccctggacagtaaataccgggagacatgcaagcgggatagcaaagccgagaagcagcaggctcactcgacgggtgagaggcggcaccgctgtaacgagtgtggaaagtcttttacaaaatcgtccgtgctaatcgagcatcaacgaatccacactggagaaaagccctacgaatgtgaggagtgcgggaaagcgtttagccggcgatctagcttgaacgaacacaggagatcccacaccggagagaaaccttatcagtgcaaggagtgcggaaaagcattctctgcctctaatggtctgactcgccatcgccgaatacatacaggggagaaaccgtacgagtgtaaggtgtgcggtaaggccttcctcctctcaagctgtttggtgcaacaccagaggatccataccggagagaagaggtaccagtgtagggaatgtgggaaggcatttatacagaacgctgggcttttccaacatctcagggtgcacactggggaaaagccataccagtgcagtcaatgctccaaattgttctctaagagaacactgctcaagaagcaccaaaagatacacacgggggagaggccatag

SEQ ID NO: 304856 - DNA, 1221 bp, Artificial Sequence
  derived and/or modified sequence
atggcatctacagaggaacagtacgacctgaagatcgtgaaggtggaagaagacccaatctgggatcaggagactcacctacggggtaacaacttttctggtcaagaagccagccgccagctcttcaggcaattttgttaccaggagacccccggccctcgtgaggctctttctcggctgcgagagctgtgccaccaatggctgcgccccgaaatacatactaaagaacagatcctggagctacttgtcctggaacaatttctcaccatactccctgaagaactacaggcttgggtgcgggagcaccatcctgagtcaggcgaagaagccgtcgcggttgtggaggatctggaacaggaactcagcgagcctggaaaccaggcccccgaccatgagcatggccatagtgaggttctgttggaggatgtggaacatctgaaggtcaaacaggaaccgacggacattcagctgcagccgatggtgactcagctgaggtacgaaagcttctgccttcatcagtttcaggaacaggatggagaaagcatccctgagaatcaagagctcgcaagtaagcaagaaatccttaaggaaatggaacacctgggggatagtaaactgcagagagacgtgtctttagattcaaagtacagggagacgtgtaaaagggactctaaggctgagaaacaacaggcccactctacaggagaacggcggcatagatgcaacgagtgtgggaagagtttcactaaatcaagcgtcctgatcgaacatcaacggattcacacaggcgaaaagccatatgaatgtgaggaatgtggcaaagctttcagcaggcgctctagtcttaatgaacatcgaagaagtcataccggcgaaaagccttatcagtgtaaggagtgtggcaaagcttttagtgccagcaacggcctgaccagacatcggaggatccacaccggagagaagccctatgagtgtaaagtgtgtgggaaagccttcctgctgagctcatgtctggtacaacaccagaggatccacacaggcgaaaagcggtatcaatgtcgcgagtgcggtaaggcctttattcagaatgctggactattccagcatctgagggtacatactggcgagaagccataccagtgcagtcagtgctccaagcttttctctaagaggacgctgctgaaaaaacaccaaaagattcataccggagagcggccttag

SEQ ID NO: 304857 - DNA, 324 bp, Artificial Sequence
  derived and/or modified sequence
atggcctctaccgaggaacagtatgacctgaaaatagttaaggtcgaagaagatcctatctgggaccaggagacccacctgcggggaaataactttagcgggcaagaggcaagccggcagctgttccggcaattttgctaccaggagacccccggtccgagggaagctctgagccggttgcgcgagctttgccaccaatggttaaggcccgaaatccatacaaaggagcagattcttgaattactcgttctggagcagtttctgacgattcttccagaagagctgcaagcctgggtccgcgagcaccacccagaatccggctag

SEQ ID NO: 304858 - DNA, 237 bp, Artificial Sequence
  derived and/or modified sequence
atggcatcaacagaagagcagtatgacctgaagatagtcaaggtggaggaagatcccatttgggatcaagaaacgcacctccggggcaacaacttctcaggtcaggaggcctccagacaattgtttaggcagttctgctatcaggaaaccccaggacccagggaagcgctcagcagactcagggaattgtgtcaccagtggcttcgtccagagattcatactaaagagcaaatctag

SEQ ID NO: 304859 - DNA, 1221 bp, Artificial Sequence
  derived and/or modified sequence
atggcctccactgaagaacaatacgatctgaagatcgtgaaggtggaggaagaccccatctgggaccaagagacacacctgcgtggtaacaacttctctggacaggaggcaagcagacagttgttcagacaattttgctaccaggaaacgcctggacctcgggaagccttgtcccggctgagagaactctgccaccagtggctgcgccctgagatccatacgaaggagcagattctggagctgctcgttctcgagcagttcctgaccattctgccagaggagctgcaggcatgggtgcgcgagcatcatcccgaatcaggagaggaggcagtcgcagtcgtggaagacctggagcaggaattatccgagcctggcaatcaggccccggaccacgagcatggacactccgaagtcctcctggaagacgtagagcacctaaaggtgaagcaggaacccactgatatccagctccagccaatggtcacccagctccgatacgaatctttctgcctgcaccagtttcaggagcaggacggcgagtctattcccgagaatcaggagctggcaagtaagcaagaaattttgaaagagatggaacaccttggcgacagcaaactgcagcgggacgtgagtcttgatagtaagtaccgtgaaacctgtaaacgcgatagtaaagcggagaaacagcaggcccattctactggagaaagacgtcatagatgcaatgagtgcggcaagtcgtttacaaagtcgtcagtcctaatcgaacaccagaggatccatactggggagaagccctatgaatgtgaagagtgtggcaaggccttcagtcggcgtagctcactgaacgaacatagacgttcccatacaggcgagaagccataccagtgtaaagagtgtggcaaggccttttccgcttcaaatggcctaactcggcacagacgcatccatacaggtgagaaaccatatgagtgtaaagtatgtggcaaggcatttctgctgtccagctgcctcgtgcagcatcaaagaatacacacaggtgagaagcgctaccaatgcagggagtgtgggaaagcttttattcagaacgctggattgtttcagcacttgcgagtccatacaggagaaaaaccttatcagtgttctcaatgcagcaagctcttctcaaaacggacactcctgaaaaagcaccagaaaatccacacaggagagcgcccttag

SEQ ID NO: 304860 - DNA, 54 bp, Artificial Sequence
  derived and/or modified sequence
atggcatccacagaggaacagtatgacctgaaaattgtcaaggtagaggaatag

SEQ ID NO: 304861 - DNA, 468 bp, Artificial Sequence
  derived and/or modified sequence
atggcatcaacagaggagcagtatgacctgaagatcgtcaaggtcgaagaggatccaatctgggatcaagaaacgcatctccggggaaataacttctcaggacaagaggcgtctcgacagctcttccgtcagttttgttatcaggagacccccggccctagagaagccctgagtcgcttgcgcgagctgtgccaccagtggctcagacctgagatacacacgaaggagcagatcctggagctcctggtgttagagcaatttctgaccatattacccgaagaactgcaggcctgggtccgagagcaccaccctgaaagcggggaggaagctgtagcagttgtggaagatctcgagcaagaactgtcggagccgggaaaccaggcgccggaccacgaacacggccactctgaggtgttactggaagacgtagaacatctcaaagtgaagcaggagcctactgatatctag

SEQ ID NO: 304862 - DNA, 75 bp, Artificial Sequence
  derived and/or modified sequence
atggcaagcactgaggagcagtatgacctgaaaatagtaaaagtggaggaagatccgatatgggatcaagaatag

SEQ ID NO: 304863 - DNA, 312 bp, Artificial Sequence
  derived and/or modified sequence
atggcaagcactgaagagcagtacgatttaaagatcgtcaaggtcgaggaagatccgatttgggaccaggaaacccaccttcggggtaataacttcagtgggcaggaagccagccgccaactgtttagacaattttgttaccaggaaactcctggtcctcgggaagcgttaagccgcctgcgcgaactgtgtcaccagtggttaagacctgagatccacactaaggagcagatactcgagttactggtcctagagcagtttctcactatcctccctgaggaactacaggcttgggtgcgggagcatcactag

SEQ ID NO: 304864 - DNA, 447 bp, Artificial Sequence
  derived and/or modified sequence
atggcctctaccgaagagcaatatgatctcaaaatcgtgaaagtggaggaagaccccatttgggaccaggaaacacacctcagggggaacaacttctctggccaggaggcctcccggcagctattcaggcagttctgctaccaagaaacgcccggcccgcgggaagctctgtcgcgacttcgagagctctgccaccagtggctgagacctgaaatccacactaaagaacagattctggaactgctcgtattagaacaatttcttacaatcctgcctgaagagcttcaggcctgggtgcgcgagcatcaccccgaaagtggagaggaggctgtggccgtcgtggaagacttggagcaggagcttagcgaacccgggaaccaggctcctgaccatgagcacgggcacagcgaagtgctgctggaggatgtggaacatctaaaagtgtag

SEQ ID NO: 304865 - DNA, 654 bp, Artificial Sequence
  derived and/or modified sequence
atggcttcaacggaagagcagtacgatttgaagatagttaaagtggaggaggatcctatctgggatcaggaaacacatttaaggggcaacaacttcagtggccaggaggcgagtaggcagttattccggcagttctgttatcaggaaactcccggaccccgggaggccttgagtaggctgagagagttatgtcatcagtggctgcgacctgaaattcataccaaggagcagatactggagctgctggtactggagcaatttctgacaatactgccagaggagctccaagcatgggttcgcgaacaccaccccgagagtggcgaagaagctgttgctgtcgtcgaagacctggaacaggaactgagcgaacccgggaatcaagcacccgatcacgaacatggacattccgaggtactccttgaggatgtggaacacttaaaggtcaagcaagaaccgactgatattcaactgcagccaatggtgacacagcttagatacgaaagcttttgcctccatcaattccaagagcaggacggcgagagcattcctgagaatcaggaactggcatcaaagcaggagatcctgaaagagatggaacacctaggcgatagcaaactgcagagagacgtcagcctggatagcaaataccgatag

SEQ ID NO: 304866 - DNA, 1221 bp, Artificial Sequence
  derived and/or modified sequence
atggccagcacagaggagcagtatgacctgaagatcgtgaaggtggaggaggaccccatctgggaccaggagacccacctgcggggcaacaacttcagcggccaggaggccagccggcagctgttccggcagttctgctaccaggagaccccaggcccccgggaggccctgagccggctgcgggagctgtgccaccagtggctgcggcctgagatccacaccaaggagcagatcctggagctgctggtgctggagcagttcctgaccatcctgcctgaggagctgcaggcctgggtgcgggagcaccaccctgagagcggggaggaggccgtggccgtggtggaggacctggagcaggagctgtctgagcccggcaaccaggccccagaccatgaacatggccacagcgaggtgctgctggaggatgtggagcacctgaaggtgaagcaggagcccacagacatccagctgcagcccatggtgacccagctgcgctatgagagcttctgcctgcaccagttccaggagcaggatggagagagcatccctgagaaccaggagctggccagcaagcaggagatcctgaaggagatggagcacctgggggacagcaagctgcagagagatgtgtccctggacagcaagtaccgggagacctgcaagagggacagcaaggccgagaagcagcaggcccacagcactggagagaggaggcaccgctgcaatgaatgtgggaagagcttcaccaagagctctgtgctgattgagcaccagaggatccacactggagagaagccctatgaatgtgaagaatgtgggaaggccttcagccgccgcagcagcctgaatgagcaccggcgcagccacactggagagaagccctaccagtgcaaggaatgtgggaaggccttcagcgccagcaatggcctgaccaggcaccggcgcatccacactggagagaagccctatgagtgcaaggtgtgtgggaaggccttcctgctgagcagctgcctggtgcagcaccagaggatccacactggagagaagcgctaccagtgcagagaatgtgggaaggccttcatccagaatgccggcctcttccagcacctgcgggtgcacactggagagaagccctaccagtgcagccagtgcagcaagctgttcagcaagaggaccctgctgaagaagcaccagaagatccacactggagagcggccctag

SEQ ID NO: 304867 - DNA, 324 bp, Artificial Sequence
  derived and/or modified sequence
atggccagcacagaggagcagtatgacctgaagatcgtgaaggtggaggaggaccccatctgggaccaggagacccacctgcggggcaacaacttcagcggccaggaggccagccggcagctgttccggcagttctgctaccaggagaccccaggcccccgggaggccctgagccggctgcgggagctgtgccaccagtggctgcggcctgagatccacaccaaggagcagatcctggagctgctggtgctggagcagttcctgaccatcctgcctgaggagctgcaggcctgggtgcgggagcaccaccctgagagcggctag

SEQ ID NO: 304868 - DNA, 237 bp, Artificial Sequence
  derived and/or modified sequence
atggccagcacagaggagcagtatgacctgaagatcgtgaaggtggaggaggaccccatctgggaccaggagacccacctgcggggcaacaacttcagcggccaggaggccagccggcagctgttccggcagttctgctaccaggagaccccaggcccccgggaggccctgagccggctgcgggagctgtgccaccagtggctgcggcctgagatccacaccaaggagcagatctag

SEQ ID NO: 304869 - DNA, 54 bp, Artificial Sequence
  derived and/or modified sequence
atggccagcacagaggagcagtatgacctgaagatcgtgaaggtggaggagtag

SEQ ID NO: 304870 - DNA, 468 bp, Artificial Sequence
  derived and/or modified sequence
atggccagcacagaggagcagtatgacctgaagatcgtgaaggtggaggaggaccccatctgggaccaggagacccacctgcggggcaacaacttcagcggccaggaggccagccggcagctgttccggcagttctgctaccaggagaccccaggcccccgggaggccctgagccggctgcgggagctgtgccaccagtggctgcggcctgagatccacaccaaggagcagatcctggagctgctggtgctggagcagttcctgaccatcctgcctgaggagctgcaggcctgggtgcgggagcaccaccctgagagcggggaggaggccgtggccgtggtggaggacctggagcaggagctgtctgagcccggcaaccaggccccagaccatgaacatggccacagcgaggtgctgctggaggatgtggagcacctgaaggtgaagcaggagcccacagacatctag

SEQ ID NO: 304871 - DNA, 75 bp, Artificial Sequence
  derived and/or modified sequence
atggccagcacagaggagcagtatgacctgaagatcgtgaaggtggaggaggaccccatctgggaccaggagtag

SEQ ID NO: 304872 - DNA, 312 bp, Artificial Sequence
  derived and/or modified sequence
atggccagcacagaggagcagtatgacctgaagatcgtgaaggtggaggaggaccccatctgggaccaggagacccacctgcggggcaacaacttcagcggccaggaggccagccggcagctgttccggcagttctgctaccaggagaccccaggcccccgggaggccctgagccggctgcgggagctgtgccaccagtggctgcggcctgagatccacaccaaggagcagatcctggagctgctggtgctggagcagttcctgaccatcctgcctgaggagctgcaggcctgggtgcgggagcaccactag

SEQ ID NO: 304873 - DNA, 447 bp, Artificial Sequence
  derived and/or modified sequence
atggccagcacagaggagcagtatgacctgaagatcgtgaaggtggaggaggaccccatctgggaccaggagacccacctgcggggcaacaacttcagcggccaggaggccagccggcagctgttccggcagttctgctaccaggagaccccaggcccccgggaggccctgagccggctgcgggagctgtgccaccagtggctgcggcctgagatccacaccaaggagcagatcctggagctgctggtgctggagcagttcctgaccatcctgcctgaggagctgcaggcctgggtgcgggagcaccaccctgagagcggggaggaggccgtggccgtggtggaggacctggagcaggagctgtctgagcccggcaaccaggccccagaccatgaacatggccacagcgaggtgctgctggaggatgtggagcacctgaaggtgtag

SEQ ID NO: 304874 - DNA, 654 bp, Artificial Sequence
  derived and/or modified sequence
atggccagcacagaggagcagtatgacctgaagatcgtgaaggtggaggaggaccccatctgggaccaggagacccacctgcggggcaacaacttcagcggccaggaggccagccggcagctgttccggcagttctgctaccaggagaccccaggcccccgggaggccctgagccggctgcgggagctgtgccaccagtggctgcggcctgagatccacaccaaggagcagatcctggagctgctggtgctggagcagttcctgaccatcctgcctgaggagctgcaggcctgggtgcgggagcaccaccctgagagcggggaggaggccgtggccgtggtggaggacctggagcaggagctgtctgagcccggcaaccaggccccagaccatgaacatggccacagcgaggtgctgctggaggatgtggagcacctgaaggtgaagcaggagcccacagacatccagctgcagcccatggtgacccagctgcgctatgagagcttctgcctgcaccagttccaggagcaggatggagagagcatccctgagaaccaggagctggccagcaagcaggagatcctgaaggagatggagcacctgggggacagcaagctgcagagagatgtgtccctggacagcaagtacagatag

SEQ ID NO: 304875 - DNA, 1221 bp, Artificial Sequence
  derived and/or modified sequence
atggccagcaccgaggagcagtacgacctgaagatcgtgaaggtggaggaggacccaatctgggatcaagaaactcatctccgcggcaacaacttcagcggccaagaagcgagtcgccagctgttccggcaattttgttatcaggaaacccctggccctagggaggccctgagtcgcctaagagaactgtgccatcagtggctgcgtccggaaattcatactaaggaacaaatcctggaactcctcgtgctggaacagttcctcaccatactgcccgaagagctacaggcctgggttagagagcatcatcctgaatcgggagaggaggccgtggcagtggtggaagaccttgagcaggagttgagcgagcctggcaaccaagctcctgatcatgagcacgggcattctgaagtgctgctggaagacgtggaacacctcaaagttaagcaagagcctacagacatccagctgcagccgatggtcacacagctgcgttacgaatctttctgtttacaccaattccaggagcaggatggcgagtctattcccgagaatcaggaactggcctcgaagcaggaaatactgaaagagatggaacaccttggggactctaagttgcaacgcgatgtgagcctggacagcaagtatcgtgagacttgtaaaagggacagcaaggcagaaaagcagcaggcccacagcacaggcgagcgccgccacagatgcaacgaatgcgggaaaagctttacaaagtctagtgttctgatcgagcaccagaggattcacacaggcgaaaagccttatgaatgcgaagaatgcggcaaggctttttctcgacggtcctcgctcaatgagcatcgcagaagccacaccggggagaagccatatcaatgtaaagagtgcggcaaggcgtttagtgcctctaatggcctgactcgccaccggcgaattcacacaggcgaaaagccctacgaatgcaaggtgtgcggcaaagcatttctattatctagctgccttgtgcagcaccagagaatccacacaggcgaaaagcgataccagtgccgggagtgtggcaaagctttcatccagaatgccggcctgttccagcacctgagagtacacactggcgagaagccctatcagtgcagccagtgtagcaaactgttcagcaagagaactttgctgaaaaagcaccagaagatccatacaggggagcggccctag

SEQ ID NO: 304876 - DNA, 1221 bp, Artificial Sequence
  derived and/or modified sequence
atggccagcaccgaggagcagtacgacctgaagatcgtgaaggtggaagaagaccctatttgggaccaggaaacacacctgcgcggcaacaacttctcgggccaggaggcatcaagacagctgtttcgacaattttgttaccaggagacgcctggaccaagagaggccctgtccagattacgcgagctctgtcaccagtggctgcgccctgagattcatactaaagaacagatccttgagcttctcgtgctcgaacagtttctgactatcttgccggaagagctgcaagcctgggtcagggagcaccaccccgaatctggcgaagaggcggtggccgtcgtggaggacctggaacaggaactgagtgagccaggcaaccaggcaccggatcatgagcatggtcatagcgaagttttactggaggacgtcgaacatctgaaagtgaaacaagaaccgactgatatccagctgcagccaatggtgacccagttgcggtacgagtctttctgtctgcatcagtttcaagagcaggatggtgagtcaattccagagaatcaggagctggcatccaagcaggaaatcctgaaagagatggagcatctcggagatagtaaactgcagcgcgacgtgtctctagattcaaagtacagggaaacatgcaaaagagattcgaaagccgagaagcagcaggcccattcaaccggggaacgcagacacaggtgtaacgaatgtggcaaatctttcactaagtcctctgtgctgattgaacatcagagaatacacacaggcgagaaaccatatgaatgcgaagaatgtggtaaggcttttagtcggcggagttccctgaacgaacatagaaggtcacacaccggggaaaagccatatcagtgcaaagagtgcggaaaggcattctccgcatcaaatggattgactcgacacagacggattcacacgggggagaaaccgtacgagtgtaaggtatgtggaaaggcttttcttctgagctcttgtctagttcaacaccagcgcattcacacaggagagaagcgatatcagtgtcgggagtgcggaaaggccttcattcagaacgccgggctcttccagcacctcagggttcacacaggcgagaaaccttatcaatgtagtcaatgctccaaactgttcagcaagaggaccctgttaaaaaaacaccagaagatccataccggtgagcgaccgtag

SEQ ID NO: 304877 - DNA, 1221 bp, Artificial Sequence
  derived and/or modified sequence
atggccagcaccgaggagcagtacgacctgaagatcgtgaaggtggaggaggatcctatatgggatcaagaaacacacttaaggggaaacaattttagcggccaggaggccagtcgccagctgttccggcaattttgctatcaggagacgcccggccccagagaggctctgtctaggctccgcgagctatgccatcagtggcttagacccgagatccacaccaaggagcagatcctggaactgctggttttggaacagtttctaacgatcctgcccgaggaactgcaggcttgggtgagggaacaccacccagaaagtggcgaggaggctgtagcggtcgtggaggacctggagcaagagctctcagaacctggcaatcaggccccagaccatgagcatggacatagtgaggtcctgctggaagatgtagaacacctgaaggtgaagcaggagcccaccgatatccaactgcagcctatggtcacacaactgaggtatgaaagcttctgcctacaccagttccaggagcaagatggtgagtccatcccagaaaatcaggaactagccagcaagcaggagatcctcaaagaaatggagcacctgggtgactctaagctgcagcgcgatgttagccttgacagcaagtacagggagacatgcaaacgagattctaaggccgagaagcagcaagcacactccaccggcgagcggcggcacagatgtaacgagtgtggcaaatcattcactaagagttctgttctgattgagcaccagcgcatccatacaggggaaaaaccctatgagtgcgaggagtgtggaaaagcattttccagacggagtagccttaatgaacatcggcgtagccacacaggggagaaaccttaccaatgtaaggagtgtgggaaagcgttctcggctagcaatggcctcactaggcatcggaggatccataccggagaaaaaccgtatgagtgcaaggtctgcggaaaggccttcttgttgtcgagctgtcttgtccagcatcagaggatccacactggggaaaagaggtaccagtgcagggagtgtggtaaggcattcattcaaaacgccggcctttttcagcatttgagggtgcacactggggaaaaaccgtatcagtgcagtcagtgtagtaagctgttctctaaaagaaccctgctcaagaagcaccagaagatccatactggtgagcgaccttag

SEQ ID NO: 304878 - DNA, 324 bp, Artificial Sequence
  derived and/or modified sequence
atggccagcaccgaggagcagtacgacctgaagatcgtgaaggtggaggaggatcctatatgggaccaggagacccacttgagaggcaacaatttttctggacaggaggcgagcagacagctgttcaggcagttctgttaccaggaaacccctggaccccgggaggccctgtcacggctccgcgaattgtgccatcagtggctgaggccagagatccatactaaggagcaaattctggagctattagttttagaacaatttctcaccatccttcccgaggagcttcaggcctgggtgagagaacaccatcccgagtcagggtag

SEQ ID NO: 304879 - DNA, 237 bp, Artificial Sequence
  derived and/or modified sequence
atggccagcaccgaggagcagtacgacctgaagatcgtgaaggtggaggaggacccaatctgggaccaggagactcatcttcgaggcaataacttttcgggtcaggaggcaagtaggcaactgtttcgccagttctgttatcaggaaacaccgggtccccgagaagcactctctcgcctgagagaactctgccatcagtggctgcgcccagagatccacacgaaggagcagatctag

SEQ ID NO: 304880 - DNA, 1221 bp, Artificial Sequence
  derived and/or modified sequence
atggccagcaccgaggagcagtacgacctgaagatcgtgaaggtggaggaggatccaatctgggatcaagagacccatctccgcggtaacaatttctccggccaggaggccagcaggcagctgttcaggcagttttgttaccaggaaacccctggccccagggaggccctgagcaggctcagagagctgtgccaccaatggctgaggccagaaatccatacgaaggagcagatcctggaattactcgtactcgagcagtttctgaccatcctgcctgaagagctacaggcgtgggtgcgagaacaccacccggagagtggagaggaggccgttgcagtggtagaagatttggagcaggaattgtccgaacccggcaaccaggcccccgaccacgagcatgggcactctgaggtattgctggaggacgtggagcatctgaaagtcaagcaggagccaaccgatattcaattgcagccaatggtcactcagctgcgatacgaatccttctgcctgcaccagtttcaggagcaggacggcgaaagcattccggagaatcaggaattagctagcaagcaagaaatactgaaggaaatggaacacctaggtgacagcaagcttcagcgagacgtgagtctcgattccaaatacagggagacttgcaaacgcgatagtaaagcagagaaacagcaagcccactctactggggagagaagacacaggtgtaacgagtgcggaaagtcctttactaaaagttctgttctgatcgagcaccagaggattcacacgggagagaaaccctatgagtgtgaggagtgtggcaaagccttctcacgacggtcttccttgaatgagcacaggcggtctcacacaggcgaaaagccttaccagtgtaaggaatgtgggaaggccttttccgcttcaaatggcctgactaggcacaggcgaatccatacaggtgagaaaccatatgagtgcaaggtctgcggcaaggcattcctgttgtcctcctgtctggtgcagcatcagagaatacacacaggggagaagagataccagtgcagagaatgcggaaaagcctttatacaaaatgctggcctcttccagcacctgcgggtacacaccggtgaaaagccttatcagtgcagtcagtgcagcaagctgttcagcaaacgcactctgttgaaaaaacatcagaagatacatactggggagagaccgtag

SEQ ID NO: 304881 - DNA, 54 bp, Artificial Sequence
  derived and/or modified sequence
atggccagcaccgaggagcagtacgacctgaagatcgtgaaggtggaagagtag

SEQ ID NO: 304882 - DNA, 468 bp, Artificial Sequence
  derived and/or modified sequence
atggccagcaccgaggagcagtacgacctgaagatcgtgaaggtggaggaagaccctatctgggaccaagagacacatctgagagggaacaacttctcaggtcaggaagcctccagacaattattccgccagttttgttatcaagagacaccgggccccagagaagccttgtcaagactgcgagagctctgtcaccagtggctgagacccgaaatccacacaaaagagcagattctggagctactggtgttggaacagtttctgaccatcctacctgaagagttgcaggcatgggtaagggaacatcatcccgaaagcggagaagaggctgtggctgtcgttgaagacctggaacaagagctatccgagccgggaaaccaggctcccgaccacgaacatggtcactccgaagtgctgcttgaagacgttgagcatcttaaggtcaaacaggagccaacagatatctag

SEQ ID NO: 304883 - DNA, 312 bp, Artificial Sequence
  derived and/or modified sequence
atggccagcaccgaggagcagtacgacctgaagatcgtgaaggtggaagaggacccaatctgggaccaggagacccacctgcgcggaaacaacttctccggacaggaagcgagccggcaactcttccgacaattctgctaccaggaaacacccggccctcgagaagctctttctaggttgcgcgaactgtgccatcaatggttacggcccgaaattcataccaaggagcaaattctggagcttcttgtgttggagcagttcctcaccattctgcctgaagagctccaggcttgggtgcgggaacatcactag

SEQ ID NO: 304884 - DNA, 447 bp, Artificial Sequence
  derived and/or modified sequence
atggccagcaccgaggagcagtacgacctgaagatcgtgaaggtggaagaagatccgatttgggaccaggaaacacaccttcgcggtaataacttcagcggacaggaggcatctcggcagctgttccgtcaattctgttaccaagagacccctggtcctagggaagcactgtctagactgagagagctgtgtcatcaatggttgagacctgagattcacactaaggagcagatccttgagctcctggtgctcgaacagttcctaaccatcctgcccgaggagttacaggcatgggtgagagaacaccatcccgagtcgggtgaggaagccgttgcagttgtggaggatctggagcaagagctgtctgagccaggaaatcaggcgcccgaccacgaacacggtcactctgaagtcttactcgaggatgttgaacatctcaaagtttag

SEQ ID NO: 304885 - DNA, 654 bp, Artificial Sequence
  derived and/or modified sequence
atggccagcaccgaggagcagtacgacctgaagatcgtgaaggtggaagaagatccgatatgggatcaggagactcaccttcggggaaataacttctccggccaggaggcctctcggcaattgttcaggcagttttgttaccaggagacaccaggcccccgagaggccctgtcccgccttagagagctgtgccaccagtggctgagacccgagatccacacaaaggagcaaatcctggaattgctggtcctggaacagttcctgaccattttaccagaagagctgcaagcctgggtcagggaacatcaccccgagtcaggtgaagaagctgtggccgtcgttgaggatttagagcaggagctgagcgagcccggtaatcaggcaccagatcacgaacacggccactcagaggtactactggaggacgtggaacatctgaaagtgaagcaggagcctactgacatacaactgcagcccatggtcacacagctacgctacgagagtttttgtctccatcagttccaggaacaggacggcgaaagtatccctgaaaatcaggagctagcctcaaagcaggagattctaaaggagatggagcatctgggtgatagcaagctgcagcgcgacgtgtccctagactcaaaatacagatag

SEQ ID NO: 304886 - DNA, 1221 bp, Artificial Sequence
  derived and/or modified sequence
atggcttcaaccgaggagcaatatgatttaaaaattgtgaaagttgaggaggatcccatctgggaccaggaaacacatctgagaggaaataacttttcaggacaggaagccagtagacagctttttcggcaattctgttatcaagagacccccggtcccagggaagctctttccaggttaagggagttatgccaccagtggctccggccagagattcacacaaaagagcagattttggagttgctcgtgctcgagcaatttctgaccatcctccccgaggaactgcaggcatgggtgagggagcaccatcctgagagcggggaggaggcagtggctgtggtggaggatttagaacaggagcttagcgaaccaggaaaccaggccccagatcacgagcacggccactccgaagtgctcctggaggatgttgaacatctgaaggtcaaacaggagccgacagatatccagctccagcctatggtcacccagcttaggtatgagagtttctgtttacaccagttccaggaacaggatggtgagtcgatccccgagaaccaggaactggccagcaagcaggaaatcctgaaggagatggaacatctgggtgatagcaagctgcagcgggatgtgtcgttggacagtaaatatcgagagacatgcaaacgggacagcaaggctgagaagcagcaagcccattcaactggcgagcgccgtcatcggtgcaatgagtgtggcaagagctttaccaagtcctccgtactgatcgaacatcagcggatccacacaggcgagaagccctatgagtgcgaagagtgcgggaaagcattttcccggagatcgtctctcaacgagcatcgaaggtcacacaccggagagaagccttatcagtgtaaggagtgcggaaaagcctttagcgccagtaatggtctgacccggcaccgcaggatacacaccggtgaaaaaccgtatgaatgcaaagtttgtgggaaagccttcctcctatcatcttgcctcgttcagcaccagcgcatccacactggcgagaaacgctatcagtgccgggaatgcgggaaggccttcattcaaaacgcagggctgttccagcacttgcgcgtccacactggggagaaaccctatcagtgttcacagtgctccaagctgttcagcaagcggaccttgctcaagaagcatcagaagatccacaccggtgaacggccatag

SEQ ID NO: 304887 - DNA, 1221 bp, Artificial Sequence
  derived and/or modified sequence
atggcttccactgaagagcagtacgacctcaaaatagtcaaagtagaagaagaccccatctgggaccaggaaacacatctgagaggcaataactttagtggacaggaagcctctcggcaactgtttaggcagttctgttaccaggaaacacccggacccagggaggccctgtctcggcttagagagctctgccaccagtggctgaggcccgagatacacactaaggaacagatattagaactgttggtgctggaacaatttttaaccatcctccctgaggaacttcaggcgtgggtgcgggagcatcaccctgaatcaggtgaggaagctgtggctgtggtggaagatttggaacaggagctgagcgaacctgggaaccaagcacccgaccacgagcacggccactctgaagtgctcctcgaagatgtcgaacatctcaaggtgaagcaggaaccgactgatattcagctgcagccaatggtgactcagctcagatacgaatctttctgtctgcaccaattccaagaacaggatggagaaagtatcccagaaaatcaggagcttgcgtcaaagcaggaaattctgaaagaaatggagcatttgggtgacagtaagctgcagcgggacgtgtcgttagacagcaagtaccgcgagacctgcaagcgggatagtaaagctgagaagcagcaagctcactccacaggtgagcgcagacatcgttgcaatgaatgcggcaaatcctttaccaagagcagtgtactcatcgagcatcaaagaatccacaccggcgagaagccctacgagtgtgaagaatgcggcaaagcattctcccggagatcaagcctgaatgaacatcggagaagtcatactggcgaaaagccctatcagtgtaaggagtgtggaaaagccttctccgccagcaacggactgaccaggcatagacggatccatacaggcgagaagccatacgaatgtaaggtgtgtggtaaagcattccttctctcttcctgcctggtccagcaccagcgcatccatacgggcgaaaaacgctaccagtgtagagagtgcggcaaggcatttatccagaacgccggactgtttcagcatctgagggtgcatactggtgagaaaccttaccagtgttctcagtgttcaaagctattctctaaaagaactcttctcaaaaaacaccagaagattcacactggcgaacggccatag

SEQ ID NO: 304888 - DNA, 1221 bp, Artificial Sequence
  derived and/or modified sequence
atggccagcactgaggagcagtacgatcttaagattgtcaaggttgaggaagaccccatttgggaccaggaaacacatctgagagggaacaacttttccggccaagaagcatcaagacagctttttagacagttctgctatcaggaaactccgggaccaagggaggccctgtccagattgcgggaactatgtcaccaatggctccggccagagatccacacaaaggagcagatccttgagctgctcgttctggagcaatttcttactatcctgccagaggagctccaggcatgggttagagagcaccatcccgagtctggcgaggaggctgtggcagtggtcgaggacctggaacaggagctgtccgagccaggaaaccaggctcctgatcacgagcacggacactccgaggtcctcctcgaagacgtcgagcaccttaaagtgaagcaggagcccaccgacatccaattgcagccaatggtgacccagcttcgctatgagtctttctgcctgcatcaatttcaggagcaggacggggagtccatcccggagaaccaggagctggcctcaaaacaagaaatcctgaaagagatggagcatctgggggacagtaaactgcagagggatgtttctcttgatagtaagtatagggaaacttgtaagcgagactccaaggccgaaaagcagcaggcccactccacaggtgagagacgtcacaggtgcaacgagtgtgggaagtccttcacaaagtcaagcgttctgatcgagcaccagaggattcacacgggcgaaaagccttacgagtgcgaggagtgtggtaaggcctttagtcggaggagttctctcaacgagcacaggcgaagtcataccggagagaagccctatcagtgcaaagagtgtggtaaggcttttagcgcctcaaatggacttacgaggcaccggagaatccatactggagagaagccctacgagtgcaaggtatgcgggaaagcattcctgctgtcctcttgtctggtccagcatcagcggatacacaccggagagaagcgctatcagtgtagggagtgtggcaaggcattcatccagaacgctggcttgttccagcacctaagggtgcacactggcgagaaaccgtaccagtgcagtcagtgctctaagctgttttcaaaacgcacgttattaaaaaagcaccaaaaaattcataccggtgaacgcccatag

SEQ ID NO: 304889 - DNA, 324 bp, Artificial Sequence
  derived and/or modified sequence
atggcttcaacagaggagcaatatgacttgaaaatagttaaggtggaggaagatcctatttgggatcaagaaactcatttaagaggaaataacttcagtggccaggaggcctctaggcagttattccgccaattctgttaccaagaaactcccggacccagagaagcccttagccggctgcgtgagctctgccaccagtggttaaggccggaaatacataccaaagagcagatccttgagcttttggtattagaacagtttcttacaatcctgccagaggagctacaggcctgggtgcgggaacaccaccccgaatcaggatag

SEQ ID NO: 304890 - DNA, 237 bp, Artificial Sequence
  derived and/or modified sequence
atggcttccacggaagaacagtatgacctgaaaattgtgaaagtggaagaggaccccatctgggaccaggaaacacacttgcggggtaacaactttagcggccaggaggcaagtaggcagctgtttagacagttctgttatcaagagacccctggtccacgtgaagccctgtctcggctccgcgaattatgtcatcagtggctgaggcccgagattcacactaaggagcagatctag

SEQ ID NO: 304891 - DNA, 1221 bp, Artificial Sequence
  derived and/or modified sequence
atggcctccactgaggaacagtatgatctgaagattgtgaaagttgaagaagaccccatttgggaccaggagacccacctcaggggtaacaatttctctggccaggaggcttcacgccagttgttccgacagttttgctaccaagaaactccagggccacgcgaggcactgagccggttaagagagttgtgccaccagtggctccggccagaaattcacacaaaagaacagatcctggaacttttggtgttagaacagttcttgaccatattgccagaggagctgcaggcatgggtgcgtgaacatcatcccgaatccggagaagaggctgtggcggtggtggaggatttagagcaggagctaagcgagccgggaaaccaagctcctgatcatgaacacggacacagcgaagttctgctggaggatgtggaacaccttaaagttaagcaggaacctactgacattcagctccagcctatggttacccaactgagatacgagagtttttgcttgcaccagtttcaggagcaggacggcgagtcaatccctgagaaccaggaactggcatcaaagcaggagattctcaaggagatggagcatctgggcgattcaaaactgcagagagatgtcagccttgattctaagtatcgcgagacatgtaagcgtgacagcaaggctgaaaaacagcaagctcacagtacaggggagagaagacatcgatgcaatgagtgtggcaagtctttcaccaagtctagcgtgctcatagaacaccagagaatacatacgggcgaaaagccttatgagtgcgaagaatgcgggaaagctttcagtcggcgatcctcactcaacgaacacaggcggagccacaccggtgagaagccctatcaatgtaaggagtgcggcaaggcattttctgccagcaacgggctgacacggcaccgtcgcatccatactggcgagaagccctacgaatgcaaagtgtgtgggaaagcctttctgctcagtagttgtctagttcagcaccagagaatacatacaggcgaaaagcggtaccagtgtagagagtgcggcaaagccttcatccagaatgcaggattattccaacatctgagggtgcatacgggggaaaagccgtatcagtgtagtcagtgctccaagctgttctccaaaagaaccctgcttaagaagcatcagaaaatccacacaggagagcgaccctag

SEQ ID NO: 304892 - DNA, 54 bp, Artificial Sequence
  derived and/or modified sequence
atggcctctactgaggagcaatatgacctgaaaatagtaaaggtggaagaatag

SEQ ID NO: 304893 - DNA, 468 bp, Artificial Sequence
  derived and/or modified sequence
atggcatcaaccgaagaacagtatgacctcaaaatagttaaggtggaagaagatccgatctgggatcaagagactcatctcagaggcaacaacttctctggtcaggaggcctcacggcagctgtttcggcaattttgctaccaggaaacacctggcccacgcgaggccctcagcaggctgcgggaactttgtcaccaatggctcagacctgagattcacacaaaggaacagattctcgagctcctggtcctagaacagttccttacaattcttcctgaagaactgcaggcatgggtaagggaacatcaccctgagtcaggtgaagaggctgtggctgtcgttgaagatttagagcaagagctgtcagaacccggaaatcaagccccagaccatgaacatgggcattctgaagtcctcctcgaggacgttgaacatctcaaagtaaagcaagagcctaccgacatatag

SEQ ID NO: 304894 - DNA, 75 bp, Artificial Sequence
  derived and/or modified sequence
atggcctccactgaagaacaatatgatcttaaaatcgtgaaagtcgaagaggaccctatctgggaccaggagtag

SEQ ID NO: 304895 - DNA, 312 bp, Artificial Sequence
  derived and/or modified sequence
atggccagtaccgaagaacagtatgacttaaagatcgtcaaagtcgaagaggatcccatttgggaccaagagactcatctgagaggcaataacttcagcggccaggaagcctcacgtcagttgttccggcagttttgttatcaagagacgccgggtccccgtgaagcgcttagcaggttaagagagctgtgtcatcagtggctcaggcccgagatccacaccaaagaacagatcctggagctattagtcttggagcagttcttgactatcctccccgaggagctgcaggcatgggtccgtgagcatcactag

SEQ ID NO: 304896 - DNA, 447 bp, Artificial Sequence
  derived and/or modified sequence
atggctagtaccgaggaacagtatgatctgaaaatcgtgaaagtggaagaagacccaatctgggaccaggagactcaccttcggggaaataatttcagcggtcaggaggcttctcggcagctgtttagacagttttgttatcaggagacccccggaccacgcgaagccctgtcccgtttacgagaattatgccatcagtggctgaggccagagattcacaccaaagaacagatcctggagctgttagtgcttgaacaatttttaacaatcctgcctgaggaactgcaggcatgggttcgtgaacatcaccccgagtctggggaagaagcagttgctgtagtggaggacctggagcaggagttgtccgaacctggcaaccaggcccctgatcatgagcatggtcactctgaggtgttgctagaggacgtggaacatctgaaagtgtag

SEQ ID NO: 304897 - DNA, 654 bp, Artificial Sequence
  derived and/or modified sequence
atggcctccaccgaggagcagtatgacctgaagattgtgaaggtggaagaggatcccatctgggatcaagaaacacatcttcggggtaacaacttctccggacaggaggcgtctcggcaactttttagacaattttgttaccaggagacacctggtcctcgagaggcactctcgcgtctcagagaactgtgccatcagtggttaaggcctgagatccataccaaagaacagattctggagctgctggtactggagcagttcctgaccatacttcccgaggagctccaggcctgggtaagggagcatcaccccgagagcggagaggaggctgtcgccgtagtagaggaccttgagcaagagctttctgagcccggaaaccaggccccagaccacgagcacggccactcagaagtactgctggaagacgtggaacacctgaaggttaaacaggagcctacagatatccagcttcagcccatggtcacccagctcaggtatgagagcttctgcctgcaccagtttcaggaacaggatggagagtccattccggaaaaccaggaactggcttccaagcaggagatcttaaaagagatggagcacctcggggactcgaaactgcagagggatgtttcactggattccaagtaccggtag

SEQ ID NO: 304898 - DNA, 2619 bp, Artificial Sequence
  derived and/or modified sequence
acgcatttccggcctttgcggttgatcggtcattggggtgctgcagccccgccacctgttccgtagcttgccggtgccccgaaggtgtcttctcctaaggaagattaaatcagaaaattttaaatcacagttatccctttacttaaagccagagtaagccttccaaattaaccccaggaatggcttcaacagaggaacagtacgatcttaagattgtgaaagtggaggaagaccctatctgggaccaagaaacccaccttcgagggaacaacttttctggccaagaagcctcccgacaactttttaggcagttttgttaccaagagactcctggtccccgagaagctctgagccggctccgagaactctgtcatcagtggctaaggccagaaatccacaccaaagagcaaatcttggagctgctggtgctggagcaattcctgactatcctgcctgaggagctccaggcctgggtgcgggagcaccatccggagagtggggaggaggctgtggctgtagttgaagatctggaacaagagcttagtgagccagggaaccaggctccagaccatgaacatggacattctgaagtgctcttggaggatgtggaacatctgaaggtcaagcaggaaccaacagacatacagcttcagcctatggtgacacagctcagatatgaatctttttgcctccaccaatttcaagaacaagatggtgaaagtatacctgagaaccaggagttggcatcaaagcaagaaatcttaaaagaaatggaacatttgggggatagcaaactccaaagagatgtatctttggattctaagtacagagaaacttgtaaacgagacagcaaggcagaaaagcagcaggcacattccactggagagagacgccacaggtgcaatgaatgtgggaaaagcttcactaagagttcagtactcattgagcaccagagaatccacactggggagaagccatatgaatgtgaagaatgtgggaaggccttcagccggaggtcaagcctgaatgaacatcggcggagccacactggagagaaaccctatcaatgtaaggagtgtgggaaagccttcagtgccagcaatggcctcactcgacacagaagaatccacacaggggaaaaaccatatgaatgcaaagtgtgtgggaaggctttcctcctcagctcatgccttgttcagcatcagaggatacacactggagagaagcgctatcagtgtcgtgagtgtggcaaagccttcattcagaatgcagggcttttccagcatctccgagtccacactggtgagaaaccctatcagtgcagtcagtgcagtaaactctttagtaagcggacacttcttaagaaacatcagaaaatccacactggagagagaccataagggtgatgagtttgggaaagccttcagtcatcattgcaaccttattaggcattttagaatccatactgttccagcagaactggactaattctgtggaccctcagacccctaaatggggccgtcttggaaagtaagattttcaagtggcttattctgttcttataaaatttattttgtattgcattgaaccacttgtctacaaaccaggtgttggtgtctcctgtgtggatgactgtgattgtagggggttgctgggtggccttcttattccctagcctttggtccatttcttatgatttcctttaaaggcaccaaatcttatctggaaataaattgttatggaggggctgtttttgagcaatactgcatattgaacaattctaaaagaccagtatctatgtatacttttaaaaaaaagatttgctaagatcaaaggatattcagaggtgcatctttttctgtaagagtgacattttaaacaaatgtaaggttttggggaataagaatcgtccacattcccacaggaaatcattgctatggtctcccctaggaatgtgatagatagcttctataattatgcagcattatccatagtatgaaacctgtagttttaatggtttagaaatctatgtctcatttcatatctaactcatgtttttgatacgaatcaatatatatgttgatatcatgagttaatatgagtttgacatgaatcatcaacatagtatatacatatcaacataactatgttgatgattcatatcaaattctcaatgcaggtcattactgtaagttttccatttttgttacaaataataagtaagatgatactttaaaatctctgttcttcacaaggtacctctttaattcatagccttttatgtcagcattattcttcttttgggggttggtcagcaactttgagtgccattgcaagcagcatcatttaagtagttttataaagaaaagaagtctgatatcttgggcagcttgctgcttactggggagaccagcatgcttagacacttattgccagggttaaacatatgctctggcaccaagttcaaatctttcctccccatttgtgagctgtgggactttaggcaagttatctaaatgctgctatgctatagtctccccacctgtaaaacagaggatgataccaataccttcctcatagggtacataagattaaataaatacaaacttgtacttaaaa

SEQ ID NO: 304899 - DNA, 3176 bp, Artificial Sequence
  derived and/or modified sequence
cagagagagagagaaaaactgctgaccctgtaagagagaactggccatcttgcagacagacagagccccgagtgttctttcaactacctgccacccatccaacaactcccctcggacctcagtatgggctggaacctgacacttggcatgacagtgaccccaggcatccaaaccatgacagttccatcagctctccaaatgagagacagagtctcactatgtcgcccaggcttgtcttgaactcctggactcaagagatcctcccatctcggcctctcaaagtgttgggattacaggcgtgagctattacacctgacttaagtctccattttcatatctatactttgggattccagaagacagaggtttgagtgtaaaacacaaaataacaaaaccacaacaaaaacaactctgtattctcgtccccaccattaccatctctcctttgtgatgtcaaagagaccagaggaagtggacagactcggggaagaatagccagagtaagccttccaaattaaccccaggaatggcttcaacagaggaacagtacgatcttaagattgtgaaagtggaggaagaccctatctgggaccaagaaacccaccttcgagggaacaacttttctggccaagaagcctcccgacaactttttaggcagttttgttaccaagagactcctggtccccgagaagctctgagccggctccgagaactctgtcatcagtggctaaggccagaaatccacaccaaagagcaaatcttggagctgctggtgctggagcaattcctgactatcctgcctgaggagctccaggcctgggtgcgggagcaccatccggagagtggggaggaggctgtggctgtagttgaagatctggaacaagagcttagtgagccagggaaccaggctccagaccatgaacatggacattctgaagtgctcttggaggatgtggaacatctgaaggtcaagcaggaaccaacagacatacagcttcagcctatggtgacacagctcagatatgaatctttttgcctccaccaatttcaagaacaagatggtgaaagtatacctgagaaccaggagttggcatcaaagcaagaaatcttaaaagaaatggaacatttgggggatagcaaactccaaagagatgtatctttggattctaagtacagagaaacttgtaaacgagacagcaaggcagaaaagcagcaggcacattccactggagagagacgccacaggtgcaatgaatgtgggaaaagcttcactaagagttcagtactcattgagcaccagagaatccacactggggagaagccatatgaatgtgaagaatgtgggaaggccttcagccggaggtcaagcctgaatgaacatcggcggagccacactggagagaaaccctatcaatgtaaggagtgtgggaaagccttcagtgccagcaatggcctcactcgacacagaagaatccacacaggggaaaaaccatatgaatgcaaagtgtgtgggaaggctttcctcctcagctcatgccttgttcagcatcagaggatacacactggagagaagcgctatcagtgtcgtgagtgtggcaaagccttcattcagaatgcagggcttttccagcatctccgagtccacactggtgagaaaccctatcagtgcagtcagtgcagtaaactctttagtaagcggacacttcttaagaaacatcagaaaatccacactggagagagaccataagggtgatgagtttgggaaagccttcagtcatcattgcaaccttattaggcattttagaatccatactgttccagcagaactggactaattctgtggaccctcagacccctaaatggggccgtcttggaaagtaagattttcaagtggcttattctgttcttataaaatttattttgtattgcattgaaccacttgtctacaaaccaggtgttggtgtctcctgtgtggatgactgtgattgtagggggttgctgggtggccttcttattccctagcctttggtccatttcttatgatttcctttaaaggcaccaaatcttatctggaaataaattgttatggaggggctgtttttgagcaatactgcatattgaacaattctaaaagaccagtatctatgtatacttttaaaaaaaagatttgctaagatcaaaggatattcagaggtgcatctttttctgtaagagtgacattttaaacaaatgtaaggttttggggaataagaatcgtccacattcccacaggaaatcattgctatggtctcccctaggaatgtgatagatagcttctataattatgcagcattatccatagtatgaaacctgtagttttaatggtttagaaatctatgtctcatttcatatctaactcatgtttttgatacgaatcaatatatatgttgatatcatgagttaatatgagtttgacatgaatcatcaacatagtatatacatatcaacataactatgttgatgattcatatcaaattctcaatgcaggtcattactgtaagttttccatttttgttacaaataataagtaagatgatactttaaaatctctgttcttcacaaggtacctctttaattcatagccttttatgtcagcattattcttcttttgggggttggtcagcaactttgagtgccattgcaagcagcatcatttaagtagttttataaagaaaagaagtctgatatcttgggcagcttgctgcttactggggagaccagcatgcttagacacttattgccagggttaaacatatgctctggcaccaagttcaaatctttcctccccatttgtgagctgtgggactttaggcaagttatctaaatgctgctatgctatagtctccccacctgtaaaacagaggatgataccaataccttcctcatagggtacataagattaaataaatacaaacttgtacttaaaatgtagctctcaataaatatgcattatgatttacatacgaaataatagcatttaacaaatgtaggtagaattttaagtatcatgttaaaattaggatacgaaatgcctctgctgacattcttgttactcttttctccacagtcaaaacctgaatcagaatatttcaaaagagaggaaataaaagttcagcttaaaactgttctgccctaaa

SEQ ID NO: 304900 - DNA, 3551 bp, Artificial Sequence
  derived and/or modified sequence
attgctgggcaactaggtcccgccggagcgttccagctcaaagattacctgctgcagtcaggcagaaatgtaaagtctttcctgtttgattgggaactgacccaggtgccaggcttggggggacaccggacaaccaaaggcaatatgtggactcggcaagccactggtccctaaacctgaataagtttccgggcagagctgcatttattgacggttatgaaagctgatttagaagcagcaacgcagcctcttgcctggaattgggatgatgcggctgaaaccaccttcctggcagccaaacaggctattcagcaggcacaagccctatgggtagctgatcggggcacccatttaaacttgatgtgcatgtgaccagatagttttgactggggcttatggcatcacacagagctctttagaatgccagtagacttttggtcccaactttggaagggagctgagctccagtattcctcgacagagaagcagttactaactgcatatgctgccctttagactcgtgacagcctggcaggatgggctacagtcgtcgcgcgcatgacttacccaatagcaggccccgagtgttctttcaactacctgccacccatccaacaactcccctcggacctcagtatgggctggaacctgacacttggcatgacagtgcagaccccaggcatccaaaccatgacagttccatcagctctccaaatgagactttgggattccagaagacagaggtttgagtgtaaaacacaaaataacaaaaccacaacaaaaacaactctgtattctcgtccccaccattaccatctctcctttgtgatgtcaaagagaccagaggaagtggacagactcggggaagaatagccagagtaagccttccaaattaaccccaggaatggcttcaacagaggaacagtacgatcttaagattgtgaaagtggaggaagaccctatctgggaccaagaaacccaccttcgagggaacaacttttctggccaagaagcctcccgacaactttttaggcagttttgttaccaagagactcctggtccccgagaagctctgagccggctccgagaactctgtcatcagtggctaaggccagaaatccacaccaaagagcaaatcttggagctgctggtgctggagcaattcctgactatcctgcctgaggagctccaggcctgggtgcgggagcaccatccggagagtggggaggaggctgtggctgtagttgaagatctggaacaagagcttagtgagccagggaaccaggctccagaccatgaacatggacattctgaagtgctcttggaggatgtggaacatctgaaggtcaagcaggaaccaacagacatacagcttcagcctatggtgacacagctcagatatgaatctttttgcctccaccaatttcaagaacaagatggtgaaagtatacctgagaaccaggagttggcatcaaagcaagaaatcttaaaagaaatggaacatttgggggatagcaaactccaaagagatgtatctttggattctaagtacagagaaacttgtaaacgagacagcaaggcagaaaagcagcaggcacattccactggagagagacgccacaggtgcaatgaatgtgggaaaagcttcactaagagttcagtactcattgagcaccagagaatccacactggggagaagccatatgaatgtgaagaatgtgggaaggccttcagccggaggtcaagcctgaatgaacatcggcggagccacactggagagaaaccctatcaatgtaaggagtgtgggaaagccttcagtgccagcaatggcctcactcgacacagaagaatccacacaggggaaaaaccatatgaatgcaaagtgtgtgggaaggctttcctcctcagctcatgccttgttcagcatcagaggatacacactggagagaagcgctatcagtgtcgtgagtgtggcaaagccttcattcagaatgcagggcttttccagcatctccgagtccacactggtgagaaaccctatcagtgcagtcagtgcagtaaactctttagtaagcggacacttcttaagaaacatcagaaaatccacactggagagagaccataagggtgatgagtttgggaaagccttcagtcatcattgcaaccttattaggcattttagaatccatactgttccagcagaactggactaattctgtggaccctcagacccctaaatggggccgtcttggaaagtaagattttcaagtggcttattctgttcttataaaatttattttgtattgcattgaaccacttgtctacaaaccaggtgttggtgtctcctgtgtggatgactgtgattgtagggggttgctgggtggccttcttattccctagcctttggtccatttcttatgatttcctttaaaggcaccaaatcttatctggaaataaattgttatggaggggctgtttttgagcaatactgcatattgaacaattctaaaagaccagtatctatgtatacttttaaaaaaaagatttgctaagatcaaaggatattcagaggtgcatctttttctgtaagagtgacattttaaacaaatgtaaggttttggggaataagaatcgtccacattcccacaggaaatcattgctatggtctcccctaggaatgtgatagatagcttctataattatgcagcattatccatagtatgaaacctgtagttttaatggtttagaaatctatgtctcatttcatatctaactcatgtttttgatacgaatcaatatatatgttgatatcatgagttaatatgagtttgacatgaatcatcaacatagtatatacatatcaacataactatgttgatgattcatatcaaattctcaatgcaggtcattactgtaagttttccatttttgttacaaataataagtaagatgatactttaaaatctctgttcttcacaaggtacctctttaattcatagccttttatgtcagcattattcttcttttgggggttggtcagcaactttgagtgccattgcaagcagcatcatttaagtagttttataaagaaaagaagtctgatatcttgggcagcttgctgcttactggggagaccagcatgcttagacacttattgccagggttaaacatatgctctggcaccaagttcaaatctttcctccccatttgtgagctgtgggactttaggcaagttatctaaatgctgctatgctatagtctccccacctgtaaaacagaggatgataccaataccttcctcatagggtacataagattaaataaatacaaacttgtacttaaaatgtagctctcaataaatatgcattatgatttacatacgaaataatagcatttaacaaatgtaggtagaattttaagtatcatgttaaaattaggatacgaaatgcctctgctgacattcttgttactcttttctccacagtcaaaacctgaatcagaatatttcaaaagagaggaaataaaagttcagcttaaaactgttctgccct

SEQ ID NO: 304901 - DNA, 575 bp, Artificial Sequence
  derived and/or modified sequence
aatgagactttgggattccagaagacagaggtttgagtgtaaaacacaaaataacaaaaccacaacaaaaacaactctgtattctcgtccccaccattaccatctctcctttgtgatgtcaaagagaccagaggaagtggacagactcggggaagaataggtgtcttctcctaaggaagattaaatcagaaaattttaaatcacagttatccctttacttaaagccagagtaagccttccaaattaaccccaggaatggcttcaacagaggaacagtacgatcttaagattgtgaaagtggaggaagaccctatctgggaccaagaaacccaccttcgagggaacaacttttctggccaagaagcctcccgacaactttttaggcagttttgttaccaagagactcctggtccccgagaagctctgagccggctccgagaactctgtcatcagtggctaaggccagaaatccacaccaaagagcaaatcttggagctgctggtgctggagcaattcctgactatcctgcctgaggagctccaggcctgggtgcgggagcaccatccggagagtgg

SEQ ID NO: 304902 - DNA, 584 bp, Artificial Sequence
  derived and/or modified sequence
acttgtgcccagagagagagagaaaaactgctgaccctgtaagagagaactggccatcttgcagacagacagagccccgagtgttctttcaactacctgccacccatccaacaactcccctcggacctcagtatgggctggaacctgacacttggcatgacagtgactttgggattccagaagacagaggtttgagtgtaaaacacaaaataacaaaaccacaacaaaaacaactctgtattctcgtccccaccattaccatctctcctttgtgatgtcaaagagaccagaggaagtggacagactcggggaagaatagccagagtaagccttccaaattaaccccaggaatggcttcaacagaggaacagtacgatcttaagattgtgaaagtggaggaagaccctatctgggaccaagaaacccaccttcgagggaacaacttttctggccaagaagcctcccgacaactttttaggcagttttgttaccaagagactcctggtccccgagaagctctgagccggctccgagaactctgtcatcagtggctaaggccagaaatccacaccaaagagcaaatc

SEQ ID NO: 304903 - DNA, 3050 bp, Artificial Sequence
  derived and/or modified sequence
attggggtgctgcagccccgccacctgttccgtagcttgccggtgccccgaaggtgagtcttggccccttgtcgcgacccgccaggttcccagaagatttcaggtctgtgccttggagtaggcggggagggaacgtctgcgcaggcgtgacccccgcccctacacattcactggcctgaagcccccgtggagtaggtggaggtcccgccccttatcctgaagattaaacagcctttctttgtctgagataacgcccggagttctttgtcctgcctccaagacgataaaggagcgcagacacaaaggtgtcttctcctaaggaagattaaatcagaaaattttaaatcacagttatccctttacttaaagccagagtaagccttccaaattaaccccaggaatggcttcaacagaggaacagtacgatcttaagattgtgaaagtggaggaagaccctatctgggaccaagaaacccaccttcgagggaacaacttttctggccaagaagcctcccgacaactttttaggcagttttgttaccaagagactcctggtccccgagaagctctgagccggctccgagaactctgtcatcagtggctaaggccagaaatccacaccaaagagcaaatcttggagctgctggtgctggagcaattcctgactatcctgcctgaggagctccaggcctgggtgcgggagcaccatccggagagtggggaggaggctgtggctgtagttgaagatctggaacaagagcttagtgagccagggaaccaggctccagaccatgaacatggacattctgaagtgctcttggaggatgtggaacatctgaaggtcaagcaggaaccaacagacatacagcttcagcctatggtgacacagctcagatatgaatctttttgcctccaccaatttcaagaacaagatggtgaaagtatacctgagaaccaggagttggcatcaaagcaagaaatcttaaaagaaatggaacatttgggggatagcaaactccaaagagatgtatctttggattctaagtacagagaaacttgtaaacgagacagcaaggcagaaaagcagcaggcacattccactggagagagacgccacaggtgcaatgaatgtgggaaaagcttcactaagagttcagtactcattgagcaccagagaatccacactggggagaagccatatgaatgtgaagaatgtgggaaggccttcagccggaggtcaagcctgaatgaacatcggcggagccacactggagagaaaccctatcaatgtaaggagtgtgggaaagccttcagtgccagcaatggcctcactcgacacagaagaatccacacaggggaaaaaccatatgaatgcaaagtgtgtgggaaggctttcctcctcagctcatgccttgttcagcatcagaggatacacactggagagaagcgctatcagtgtcgtgagtgtggcaaagccttcattcagaatgcagggcttttccagcatctccgagtccacactggtgagaaaccctatcagtgcagtcagtgcagtaaactctttagtaagcggacacttcttaagaaacatcagaaaatccacactggagagagaccataagggtgatgagtttgggaaagccttcagtcatcattgcaaccttattaggcattttagaatccatactgttccagcagaactggactaattctgtggaccctcagacccctaaatggggccgtcttggaaagtaagattttcaagtggcttattctgttcttataaaatttattttgtattgcattgaaccacttgtctacaaaccaggtgttggtgtctcctgtgtggatgactgtgattgtagggggttgctgggtggccttcttattccctagcctttggtccatttcttatgatttcctttaaaggcaccaaatcttatctggaaataaattgttatggaggggctgtttttgagcaatactgcatattgaacaattctaaaagaccagtatctatgtatacttttaaaaaaaagatttgctaagatcaaaggatattcagaggtgcatctttttctgtaagagtgacattttaaacaaatgtaaggttttggggaataagaatcgtccacattcccacaggaaatcattgctatggtctcccctaggaatgtgatagatagcttctataattatgcagcattatccatagtatgaaacctgtagttttaatggtttagaaatctatgtctcatttcatatctaactcatgtttttgatacgaatcaatatatatgttgatatcatgagttaatatgagtttgacatgaatcatcaacatagtatatacatatcaacataactatgttgatgattcatatcaaattctcaatgcaggtcattactgtaagttttccatttttgttacaaataataagtaagatgatactttaaaatctctgttcttcacaaggtacctctttaattcatagccttttatgtcagcattattcttcttttgggggttggtcagcaactttgagtgccattgcaagcagcatcatttaagtagttttataaagaaaagaagtctgatatcttgggcagcttgctgcttactggggagaccagcatgcttagacacttattgccagggttaaacatatgctctggcaccaagttcaaatctttcctccccatttgtgagctgtgggactttaggcaagttatctaaatgctgctatgctatagtctccccacctgtaaaacagaggatgataccaataccttcctcatagggtacataagattaaataaatacaaacttgtacttaaaatgtagctctcaataaatatgcattatgatttacatacgaaataatagcatttaacaaatgtaggtagaattttaagtatcatgttaaaattaggatacgaaatgcctctgctgacattcttgttactcttttctccacagtcaaaacctgaatcagaatatttcaaaagagaggaaataaaagttcagcttaaaactgttctgccctaaa

SEQ ID NO: 304904 - DNA, 580 bp, Artificial Sequence
  derived and/or modified sequence
acttgtgcccagagagagagagaaaaactgctgaccctgtaagagagaactggccatcttgcagacagacagaggtgagccaggaattaacaagcatgccaaggagtacagctgtaagtgtgggagcggcaggagccacagagccgtttgctgagaagggctgcggtcggaggaggcagccgagacagaggcagacagtgtgagagctgcagcagctgctgctgaataaaatcatattttacctgcctacagccccgagtgttctttcaactacctgccacccatccaacaactcccctcggacctcagtatgggctggaacctgacacttggcatgacagtgactttgggattccagaagacagaggtttgagtgtaaaacacaaaataacaaaaccacaacaaaaacaactctgtattctcgtccccaccattaccatctctcctttgtgatgtcaaagagaccagaggaagtggacagactcggggaagaatagccagagtaagccttccaaattaaccccaggaatggcttcaacagaggaacagtacgatcttaagattgtgaaagtggaggaag

SEQ ID NO: 304905 - DNA, 583 bp, Artificial Sequence
  derived and/or modified sequence
aaaaggagaagaaacttttcctgggaacctgctgactatacaaaggacaaaggcattatgtgtcaggccttgttcccttatctgaccagagtaagccttccaaattaaccccaggaatggcttcaacagaggaacagtacgatcttaagattgtgaaagtggaggaagaccctatctgggaccaagaaacccaccttcgagggaacaacttttctggccaagaagcctcccgacaactttttaggcagttttgttaccaagagactcctggtccccgagaagctctgagccggctccgagaactctgtcatcagtggctaaggccagaaatccacaccaaagagcaaatcttggagctgctggtgctggagcaattcctgactatcctgcctgaggagctccaggcctgggtgcgggagcaccatccggagagtggggaggaggctgtggctgtagttgaagatctggaacaagagcttagtgagccagggaaccaggctccagaccatgaacatggacattctgaagtgctcttggaggatgtggaacatctgaaggtcaagcaggaaccaacagacataca

SEQ ID NO: 304906 - DNA, 706 bp, Artificial Sequence
  derived and/or modified sequence
agagaaaaactgctgaccctgtaagagagaactggccatcttgcagacagacagagccccgagtgttctttcaactacctgccacccatccaacaactcccctcggacctcagtatgggctggaacctgacacttggcatgacagtgactttgggattccagaagacagaggtttgagtgtaaaacacaaaataacaaaaccacaacaaaaacaactctgtattctcgtccccaccattaccatctctcctttgtgatgtcaaagagaccagaggaagtggacagactcggggaagaataggtgtcttctcctaaggaagattaaatcagaaaattttaaatcacagttatccctttacttaaagccagagtaagccttccaaattaaccccaggaatggcttcaacagaggaacagtacgatcttaagattgtgaaagtggaggaagaccctatctgggaccaagaaacccaccttcgagggaacaacttttctggccaagaagcctcccgacaactttttaggcagttttgttaccaagagactcctggtccccgagaagctctgagccggctccgagaactctgtcatcagtggctaaggccagaaatccacaccaaagagcaaatcttggagctgctggtgctggagcaattcctgactatcctgcctgaggagctccaggcctgggtgcgggagcaccatc

SEQ ID NO: 304907 - DNA, 581 bp, Artificial Sequence
  derived and/or modified sequence
gaggtcccgccccttatcctgaagattaaacagcctttctttgtctgagataacgcccggagttctttgtcctgcctccaagacgataaaggagcgcagacacaaagccagagtaagccttccaaattaaccccaggaatggcttcaacagaggaacagtacgatcttaagattgtgaaagtggaggaagaccctatctgggaccaagaaacccaccttcgagggaacaacttttctggccaagaagcctcccgacaactttttaggcagttttgttaccaagagactcctggtccccgagaagctctgagccggctccgagaactctgtcatcagtggctaaggccagaaatccacaccaaagagcaaatcttggagctgctggtgctggagcaattcctgactatcctgcctgaggagctccaggcctgggtgcgggagcaccatccggagagtggggaggaggctgtggctgtagttgaagatctggaacaagagcttagtgagccagggaaccaggctccagaccatgaacatggacattctgaagtgctcttggaggatgtggaacatctgaaggt

SEQ ID NO: 304908 - DNA, 799 bp, Artificial Sequence
  derived and/or modified sequence
gcctggcttcagccagtgggctcagaacggctgacgcatttccggcctttgcggttgatcggtcattggggtgctgcagccccgccacctgttccgtagcttgccggtgccccgaagccagagtaagccttccaaattaaccccaggaatggcttcaacagaggaacagtacgatcttaagattgtgaaagtggaggaagaccctatctgggaccaagaaacccaccttcgagggaacaacttttctggccaagaagcctcccgacaactttttaggcagttttgttaccaagagactcctggtccccgagaagctctgagccggctccgagaactctgtcatcagtggctaaggccagaaatccacaccaaagagcaaatcttggagctgctggtgctggagcaattcctgactatcctgcctgaggagctccaggcctgggtgcgggagcaccatccggagagtggggaggaggctgtggctgtagttgaagatctggaacaagagcttagtgagccagggaaccaggctccagaccatgaacatggacattctgaagtgctcttggaggatgtggaacatctgaaggtcaagcaggaaccaacagacatacagcttcagcctatggtgacacagctcagatatgaatctttttgcctccaccaatttcaagaacaagatggtgaaagtatacctgagaaccaggagttggcatcaaagcaagaaatcttaaaagaaatggaacatttgggggatagcaaactccaaagagatgtatctttggattctaagtacaga

SEQ ID NO: 304909 - protein, 417 aa, Artificial Sequence
  derived and/or modified sequence
MHLTVFLLKGIVGFLWSCWVLVGYAKGGLGDNHVHSSFIYRRLRNHERREIQREILSILGLPHRPRPFSPGKQASSAPLFMLDLYNAMTNEENPEESEYSVRASLAEETRGARKGYPASPNGYPRRIQLSRTTPLTTQSPPLASLHDTNFLNDADMVMSFVNLVERDKDFSHQRRHYKEFRFDLTQIPHGEAVTAAEFRIYKDRSNNRFENETIKISIYQIIKEYTNRDADLFLLDTRKAQALDVGWLVFDITVTSNHWVINPQNNLGLQLCAETGDGRSINVKSAGLVGRQGPQSKQPFMVAFFKASEVLLRSVRAANKRKNQNRNKSSSHQDSSRMSSVGDYNTSEQKQACKKHELYVSFRDLGWQVHLMFPDHVPKPCCAPTKLNAISVLYFDDSSNVILKKYRNMVVRSCGCH

SEQ ID NO: 304910 - DNA, 1254 bp, Artificial Sequence
  derived and/or modified sequence
atgcacctgacggtgtttctccttaagggtattgtgggcttcctctggtcctgctgggtccttgtcggctacgccaaaggcggcctgggagacaaccacgtgcatagttcctttatttaccgacgattgcggaaccacgagcggcgagagatccagcgagaaatcttgtctatcctgggattgccacatcgcccaaggcccttctctcctggtaaacaggcgtcaagcgccccactgttcatgctggacctatataacgccatgacaaacgaagaaaacccggaggagtcagagtactctgtgcgcgccagcttagccgaagaaactcgcggagcgaggaaaggatacccagcatccccaaatggctacccaaggcgaattcagttgtcccggacaacgccacttactacccagtcccccccattggctagcttgcatgacaccaacttcctcaacgatgccgatatggtgatgtccttcgtcaacctggtcgaacgggacaaagacttttcccatcagagacggcattacaaggagttcaggtttgatctgactcagattccacacggggaagcagtgacagccgctgaattcagaatctacaaagacaggtccaacaacagatttgaaaatgaaaccataaagatttccatataccagatcatcaaggagtacactaatagggatgccgatctgtttctgctagacaccagaaaagcgcaagcccttgatgtggggtggctggtttttgatattactgtcacctctaaccactgggtaatcaacccccagaacaacctggggctgcagttgtgcgcagaaactggagatggccggtccattaatgttaagtcagctggactggttggacggcagggacctcaatcaaaacagccattcatggtcgcattctttaaagcttccgaggtactcctaaggagcgtgagagccgctaacaagcgcaaaaaccagaataggaacaagtcctcctcccaccaggactcctctcgtatgagttcagtgggcgactacaacacgtctgagcaaaagcaagcatgcaaaaaacacgagttatatgtcagttttcgtgacctgggctggcaggtgcacctgatgtttccagaccacgtacctaaaccctgttgcgctccaaccaagttgaatgccatcagcgttctctattttgatgactcatctaatgttatattgaaaaagtatcgtaatatggtcgttagatcctgtggttgccactag

SEQ ID NO: 304911 - DNA, 1254 bp, Artificial Sequence
  derived and/or modified sequence
atgcacctgaccgtcttcctgctgaagggcatcgtgggcttcctgtggagctgctgggtgctggtgggctacgccaagggcggcctgggggacaaccacgtgcacagcagcttcatctacagaaggctgaggaaccacgagcggcgggagatccagcgggagatcctgagcatcctgggcctgccccaccggccccggcccttcagccctgggaagcaggccagcagcgcccccctcttcatgctggacctgtacaatgccatgaccaatgaggagaaccctgaggagagcgagtacagcgtgcgggccagcctggccgaggagaccaggggggccaggaagggctacccagccagccccaacggctacccccggcgcatccagctgagcaggaccacccccctgaccacccagagcccccccctggccagcctgcatgacaccaacttcctgaatgatgctgacatggtgatgagctttgtgaacctggtggagcgggacaaggacttcagccaccagaggaggcactacaaggagttccgctttgacctgacccagatcccccatggagaggccgtgacagctgctgagttccgcatctacaaggacaggagcaacaacagatttgaaaatgagaccatcaagatcagcatctaccagatcatcaaggagtacaccaacagagatgctgacctcttcctgctggacaccaggaaggcccaggccctggatgtgggctggctggtgtttgacatcaccgtgaccagcaaccactgggtgatcaacccccagaacaacctgggcctgcagctgtgtgccgagactggagatggccgcagcatcaacgtgaagtctgctggcctggtgggccggcagggcccccagagcaagcagcccttcatggtggccttcttcaaggccagcgaggtgctgctgcggtctgtgcgggccgccaacaagaggaagaaccagaacagaaacaagagcagcagccaccaggacagcagcaggatgagctctgtgggggactacaacaccagcgagcagaagcaggcctgcaagaagcatgagctgtatgtgtccttccgggacctgggctggcaggtgcacctgatgtttcctgaccacgtgcccaagccctgctgtgcccccaccaagctgaatgccatctctgtgctgtactttgatgacagcagcaatgtcatcctgaagaagtacagaaacatggtggtgcgcagctgtggctgccactag

SEQ ID NO: 304912 - DNA, 1254 bp, Artificial Sequence
  derived and/or modified sequence
atgcacctgaccgtgttcctgctgaagggcatcgtgggcttcctgtggagctgctgggttctggttggctacgctaagggaggtctgggagataatcatgtgcacagctctttcatttatcgacgtttgcggaaccacgagcgccgggaaattcaaagagagatcctgagtatcctgggccttcctcatcgccccagacccttttctcctggaaagcaggcatcttccgcccccctatttatgctggatctgtacaatgctatgaccaacgaagagaatcctgaggagtctgaatattccgtcagagcatcgctcgcagaggagacccgtggggcgcggaagggatacccagcaagccccaacgggtatcctaggcgcatccagttgagtcgaacaactccacttactacccagagtcctccgctggccagtcttcacgataccaacttcttgaacgatgcggatatggtaatgagctttgtgaatctggtagaacgcgacaaggattttagccaccaaaggcgacactacaaagagtttcggtttgatctgacccagattccgcatggggaggctgtgaccgcagcagaatttcggatctacaaggaccgcagtaataatcggttcgaaaatgaaactatcaaaatttctatttaccaaatcattaaagagtacactaatcgggacgctgacctattcctcttggacacacgaaaggcccaggcgctcgatgtgggctggttggtgttcgacattactgtgacgagtaatcattgggtgatcaatccacagaacaacctggggcttcagctgtgtgccgagaccggggatgggcgatctatcaatgtgaaatccgccggtctcgtaggcaggcaaggaccccagtccaagcagccttttatggttgcctttttcaaagcttcagaggtgctgttgagaagtgtgcgggcagctaataaacggaaaaaccagaatcgcaacaagtctagcagccatcaagacagttctcggatgtcatcagtgggagactataacacgtcagaacagaagcaggcctgtaaaaagcacgaactgtatgtcagcttccgggacctgggatggcaggtgcatttgatgttcccagaccatgtgcccaaaccgtgctgtgcacccacaaaattgaacgccattagtgtcctatattttgatgactcctccaacgttatccttaagaagtatagaaatatggtagtcagatcctgtggatgtcattag

SEQ ID NO: 304913 - DNA, 1254 bp, Artificial Sequence
  derived and/or modified sequence
atgcatttgacagtgttcctacttaaaggcattgttggattcctgtggtcctgctgggtgcttgttgggtacgccaagggcggacttggcgacaatcatgtgcacagttctttcatatacagacgcttgagaaatcacgaaaggcgggaaattcagcgggagattttgagtatcctgggactacctcatcgcccacgcccatttagtcccggaaagcaagcatcttctgctcccctgttcatgctggacctgtataacgcgatgaccaacgaggagaacccggaggagagcgaatacagcgtgcgagcatcactcgccgaggagactcggggagcccgaaagggctatcccgctagtcctaatgggtaccctaggcggatacagctctccagaaccacccctcttacaacccaatcgccccctctagcttcactacatgacactaattttctgaatgatgctgatatggtgatgagcttcgttaacctggtcgaacgggataaagatttcagccatcagcggcgacattataaggagttccggtttgacctcacacagattccacacggggaggccgtcaccgccgctgagtttaggatttacaaggaccgatcgaataatagattcgagaatgaaaccataaagatctccatctaccagatcattaaagagtatactaatagagacgccgaccttttcctgctggacactcgcaaggcacaagccctggacgtgggctggctggtctttgatattaccgtgacttccaatcattgggtgatcaatccccaaaacaatcttgggctgcagttgtgtgcagagacaggagatggccgaagcatcaatgtgaagagtgccggactcgtgggtcgccaagggccacaaagcaaacagccttttatggttgcattctttaaggcctctgaggttctgctccggtctgttcgggcagctaataaacgtaagaaccagaaccgtaacaagagttcatcccatcaggactcctctcggatgagctctgtgggagattacaacacgtccgagcagaagcaggcgtgcaagaagcacgaattatatgtctcctttcgggatttgggatggcaggttcatctgatgttccctgaccacgtgccaaagccatgctgcgcccctaccaaactgaacgccatctccgtgctttactttgatgattcgagtaacgtgatactgaagaagtaccgcaacatggttgttagaagctgtgggtgtcactag

SEQ ID NO: 304914 - DNA, 1874 bp, Artificial Sequence
  derived and/or modified sequence
gcttttggacaaaaatgcatctgactgtatttttacttaagggtattgtgggtttcctctggagctgctgggttctagtgggttatgcaaaaggaggtttgggagacaatcatgttcactccagttttatttatagaagactacggaaccacgaaagacgggaaatacaaagggaaattctctctatcttgggtttgcctcacagacccagaccattttcacctggaaaacaagcgtcctctgcacctctctttatgctggatctctacaatgccatgaccaatgaagaaaatcctgaagagtcggagtactcagtaagggcatccttggcagaagagaccagaggggcaagaaagggatacccagcctctcccaatgggtatcctcgtcgcatacagttatctcggacgactcctctgaccacccagagtcctcctctagccagcctccatgataccaactttctgaatgatgctgacatggtcatgagctttgtcaacttagttgaaagagacaaggatttttctcaccagcgaaggcattacaaagaatttcgatttgatcttacccaaattcctcatggagaggcagtgacagcagctgaattccggatatacaaggaccggagcaacaaccgatttgaaaatgaaacaattaagattagcatatatcaaatcatcaaggaatacacaaatagggatgcagatctgttcttgttagacacaagaaaggcccaagctttagatgtgggttggcttgtctttgatatcactgtgaccagcaatcattgggtgattaatccccagaataatttgggcttacagctctgtgcagaaacaggggatggacgcagtatcaacgtaaaatctgctggtcttgtgggaagacagggacctcagtcaaaacaaccattcatggtggccttcttcaaggcgagtgaggtacttcttcgatccgtgagagcagccaacaaacgaaaaaatcaaaaccgcaataaatccagctctcatcaggactcctccagaatgtccagtgttggagattataacacaagtgagcaaaaacaagcctgtaagaagcacgaactctatgtgagcttccgggatctgggatggcaggttcatctgatgtttcctgaccacgtaccaaagccttgttgtgctccaaccaaattaaatgccatctctgttctgtactttgatgacagctccaatgtcattttgaaaaaatatagaaatatggtagtacgctcatgtggctgccactaatattaaataatattgataataacaaaaagatctgtattaaggtttatggctgcaataaaaagcatactttcagacaaacggggaatttcctaaaattagtctggctcattttgactcttttcctatgtacaatatcatgtatatagtcatttttatttatttaaacgtatatattctcttctgtggaggctttatcaataaaatctatttcataggccactacattatacaatagatcatctagtataattttcaatgggttatgctgagtccattcaattccatttcaacatttttttctaatacaattttacataattttctgagattagacagaactcctttgactgtttaatattgtggaaggaaattgaataatttagttatattgtgccaatgaaaaccatgatagaatatttatttagaaataagacttaaaaaaataacaacccaaacaaaaattcttggataaacacaatttctcttttagagttcctgcttcattagataaagtgaaatgttgaactggatttgaataaataaacggtaggcagaacatagaagctgaaagattgcacagaattgttttaactgtttgctttaaca

SEQ ID NO: 304915 - DNA, 1254 bp, Artificial Sequence
  derived and/or modified sequence
atgcacctgaccgtgttcctgctgaagggcatcgtgggcttcctgtggagctgctgggtgctggtgggctacgccaagggcggcctgggcgacaaccacgtgcacagcagcttcatctacagaagactgagaaaccacgagagaagagagatccagagagagatcctgagcatcctgggcctgccccacagacccagacccttcagccccggcaagcaggccagcagcgcccccctgttcatgctggacctgtacaacgccatgaccaacgaggagaaccccgaggagagcgagtacagcgtgagagccagcctggccgaggagaccagaggcgccagaaagggctaccccgccagccccaacggctaccccagaagaatccagctgagcagaaccacccccctgaccacccagagcccccccctggccagcctgcacgacaccaacttcctgaacgacgccgacatggtgatgagcttcgtgaacctggtggagagagacaaggacttcagccaccagagaagacactacaaggagttcagattcgacctgacccagatcccccacggcgaggccgtgaccgccgccgagttcagaatctacaaggacagaagcaacaacagattcgagaacgagaccatcaagatcagcatctaccagatcatcaaggagtacaccaacagagacgccgacctgttcctgctggacaccagaaaggcccaggccctggacgtgggctggctggtgttcgacatcaccgtgaccagcaaccactgggtgatcaacccccagaacaacctgggcctgcagctgtgcgccgagaccggcgacggcagaagcatcaacgtgaagagcgccggcctggtgggcagacagggcccccagagcaagcagcccttcatggtggccttcttcaaggccagcgaggtgctgctgagaagcgtgagagccgccaacaagagaaagaaccagaacagaaacaagagcagcagccaccaggacagcagcagaatgagcagcgtgggcgactacaacaccagcgagcagaagcaggcctgcaagaagcacgagctgtacgtgagcttcagagacctgggctggcaggtgcacctgatgttccccgaccacgtgcccaagccctgctgcgcccccaccaagctgaacgccatcagcgtgctgtacttcgacgacagcagcaacgtgatcctgaagaagtacagaaacatggtggtgagaagctgcggctgccactag

SEQ ID NO: 304916 - protein, 413 aa, Artificial Sequence
  derived and/or modified sequence
MQMDNRLPPKKVPGFCSFRYGLSFLVHCCNVIITAQRACLNLTMVVMVNSTDPHGLPNTSTKKLLDNIKNPMYNWSPDIQGIILSSTSYGVIIIQVPVGYFSGIYSTKKMIGFALCLSSVLSLLIPPAAGIGVAWVVVCRAVQGAAQGIVATAQFEIYVKWAPPLERGRLTSMSTSGFLLGPFIVLLVTGVICESLGWPMVFYIFGACGCAVCLLWFVLFYDDPKDHPCISISEKEYITSSLVQQNGFLSSLPYLFAWICGNLAGQLSDFFLTRNILSVIAVRKLFTAAGFLLPAIFGVCLPYLSSTFYSIVIFLILAGATGSFCLGGVFINGLDIAPRYFGFIKACSTLTGMIGGLIASTLTGLILKQDPESAWFKTFILMAAINVTGLIFYLIVATAEIQDWAKEKQHTRL

SEQ ID NO: 304917 - DNA, 630 bp, Artificial Sequence
  derived and/or modified sequence
atgcagatggacaaccggctgcctcctaaaaaagtccctggattctgctcgtttcggtacggactatccttcttagtccactgctgcaacgttattattaccgcccagcgggcttgcctcaatctgacgatggtggtgatggtgaatagtacagacccccatggcctgccaaacaccagtacaaagaaactcctggataacatcaagaaccccatgtacaactggagtccagacattcagggaataattttgtcgagtacttcatatggcgtgatcatcattcaagtgcctgtcggctatttcagtggcatttatagtaccaagaagatgattgggtttgcactctgcctgagctcagtgctgtccctactgatccccccggccgcaggaataggggtggcctgggttgtcgtctgtagagccgtccagggggcagcgcaagggattgtggccaccgcacaattcgaaatctatgtgaagtgggccccacctctcgagcgtggacgtctcacttcaatgagtacgtcgggattcctgctaggtccattcattgttttactggtcactggggtgatatgtgaatcactgggctggcccatggttttttatatcttcggacaattcaaatag

SEQ ID NO: 304918 - DNA, 1242 bp, Artificial Sequence
  derived and/or modified sequence
atgcagatggacaataggctgcctcctaaaaaggtgcccgggttctgttcattccggtacggtctttctttcctggtgcactgttgtaacgtgataatcactgcccagagagcttgcctgaacctgacgatggttgtcatggtcaacagcaccgacccccatggacttccaaatacgtccacaaaaaagttgctcgataatatcaagaatcctatgtacaattggagtccagatattcagggcatcattctcagcagtacctcctatggtgtaattatcatccaggtccctgtagggtatttcagtggcatttactctaccaaaaagatgatcggctttgcactgtgcctcagttcagtgttgtctctgttgattccacctgctgcaggaatcggagtggcctgggtcgtggtgtgcagagctgtgcagggggcggctcagggcatcgtcgccaccgcccagttcgagatctatgtgaagtgggcaccaccattagagcgaggacgcctgacaagcatgagtacctcaggcttccttctcggaccctttattgtcttgcttgtgacgggagtgatttgcgagtctctcggctggccaatggttttttatattttcggcgcatgcggatgtgctgtttgtctcctgtggttcgtgcttttctacgacgatcctaaggatcatccttgtattagcatcagcgagaaggaatatattacttccagtctagtgcagcagaacggattcctgagctcccttccgtatctgttcgcgtggatatgtggcaatttggccggtcagctgtcagacttttttctgacaaggaatattctctcagttatcgccgttaggaaacttttcaccgccgccggattcctgctgcccgctattttcggtgtgtgtttgccttatttgtcaagcaccttctacagcatagtcatcttccttatactagccggggcaacaggaagcttttgtctaggaggcgtgttcattaacggattagacattgcaccgagatacttcgggtttattaaggcctgcagcacgctcacaggcatgatcggaggtttaattgcttcaaccctgacggggctgatacttaagcaggaccccgaatcagcttggttcaaaaccttcattctgatggccgctatcaatgtcactggactgatcttttatctcatcgtagctaccgccgagatacaggactgggccaaggagaagcaacacactcgactgtag

SEQ ID NO: 304919 - DNA, 1242 bp, Artificial Sequence
  derived and/or modified sequence
atgcaaatggacaatagactgcctcccaaaaaagttcctggattctgttccttccggtatggcctaagtttcctagtacactgctgcaacgtaatcattacagctcagcgggcctgtttgaacctaacaatggttgtgatggtcaacagcaccgacccccatggtttaccaaataccagcaccaaaaaactgctggacaacataaagaaccccatgtacaactggtcccccgacatacagggaattatcttaagcagcacgtcctatggcgtgattataattcaggtacctgtgggatatttcagtggcatatacagcaccaagaaaatgatcggcttcgcattgtgcctctctagcgtgctgagtctgctgatccctcccgcagccggaattggagtggcctgggtggtagtgtgcagggccgtacagggtgctgcccagggaattgtcgctaccgcccaattcgagatctacgtgaaatgggcaccccccctggagaggggtagactcacttccatgtcgacaagcggcttcctcctgggcccttttattgtgctgctcgtaacgggagtgatctgtgaaagcctagggtggcccatggtgttctatatctttggtgcttgtggttgcgcagtgtgcctgctctggttcgttctcttttatgatgatcctaaagatcacccatgtatttctatcagcgagaaagaatatatcacttcctctctggttcaacagaatggattccttagcagtctcccctacctgttcgcttggatatgtggcaatttagctgggcagctctccgactttttcctgactcgcaatattttgagcgtgattgcagtcaggaagttgttcacagccgccggctttctactgcctgcaatcttcggggtttgtctgccatatctaagtagcacattttactcaatcgtcattttcctgatcctggccggagccaccgggtctttctgtctgggaggggtgtttattaatgggctggacatcgcccctcggtattttggtttcatcaaggcctgcagtactctgacaggtatgatagggggcctcatagcctccaccctcacaggtctgatcctcaaacaggaccctgagtcagcgtggtttaaaacattcattctcatggctgccattaatgtgacggggctgatcttttacttgatcgttgctaccgccgagatacaggactgggccaaggagaagcagcatacccgcctctag

SEQ ID NO: 304920 - DNA, 630 bp, Artificial Sequence
  derived and/or modified sequence
atgcagatggacaaccggctgccccccaagaaggtgcccggcttctgcagcttccgctatggcctgtccttcctggtgcactgctgcaacgtcatcatcacagcccagagggcctgcctgaacctgaccatggtggtgatggtgaacagcacagacccccacggcctgcccaacaccagcaccaagaagctgctggacaacatcaagaaccccatgtacaactggagcccagacatccagggcatcatcctgagcagcaccagctatggagtcatcatcatccaggtgcctgtgggctacttcagcggcatctacagcaccaagaagatgattggatttgccctgtgcctgagctctgtgctgagcctgctgatccccccagctgctggcattggagtggcctgggtggtggtgtgcagagctgtgcagggcgccgcccagggcatcgtggccacagcccagtttgagatctacgtgaagtgggccccacccctggagcggggccgcctgacctccatgagcaccagcggcttcctgctgggccccttcatcgtgctgctggtgactggagtcatctgtgagagcctgggctggcccatggtgttctacatcttcggccagttcaagtag

SEQ ID NO: 304921 - DNA, 1242 bp, Artificial Sequence
  derived and/or modified sequence
atgcagatggacaaccggctgccccccaagaaggtgcccggcttctgcagcttccgctatggcctgtccttcctggtgcactgctgcaacgtcatcatcacagcccagagggcctgcctgaacctgaccatggtggtgatggtgaacagcacagacccccacggcctgcccaacaccagcaccaagaagctgctggacaacatcaagaaccccatgtacaactggagcccagacatccagggcatcatcctgagcagcaccagctatggagtcatcatcatccaggtgcctgtgggctacttcagcggcatctacagcaccaagaagatgattggatttgccctgtgcctgagctctgtgctgagcctgctgatccccccagctgctggcattggagtggcctgggtggtggtgtgcagagctgtgcagggcgccgcccagggcatcgtggccacagcccagtttgagatctacgtgaagtgggccccacccctggagcggggccgcctgacctccatgagcaccagcggcttcctgctgggccccttcatcgtgctgctggtgactggagtcatctgtgagagcctgggctggcccatggtgttctacatctttggagcctgtggctgtgctgtgtgcctgctgtggtttgtgctcttctatgatgaccccaaggaccacccctgcatcagcatcagcgagaaggagtacatcaccagcagcctggtgcagcagaatggcttcctgagcagcctgccctacctgtttgcctggatctgtggcaacctggccggccagctgagtgacttcttcctgaccaggaacatcctgtctgtgattgctgtgaggaagctgttcaccgctgctggcttcctgctgcctgccatctttggagtgtgcctgccctacctgagcagcaccttctacagcatcgtcatcttcctgatcctggccggggccaccggcagcttctgcctgggcggcgtcttcatcaatggcctggacatcgccccccgctacttcggcttcatcaaggcctgcagcaccctgaccggcatgattggaggcctcatcgccagcaccctgaccggcctcatcctgaagcaggaccctgagagcgcctggttcaagaccttcatcctgatggccgccatcaacgtgacaggcctcatcttctacctgattgtggccacagctgagatccaggactgggccaaggagaagcagcacacccggctgtag

SEQ ID NO: 304922 - DNA, 630 bp, Artificial Sequence
  derived and/or modified sequence
atgcagatggacaaccggctgccccccaagaaggtgcccggcttctgcagtttccgatacgggttgtccttcctggtccattgctgcaatgtgattatcaccgctcagagggcgtgtctgaacttgacgatggtagtgatggtgaactccacagatccacatgggctcccgaacacatctacaaaaaaactactcgataatattaagaaccccatgtataactggagcccagacattcagggaatcattttgtccagtaccagttatggtgtgatcatcatacaggtccctgtcggctacttcagtggcatatattcgactaaaaagatgatcggcttcgctctgtgtctgtcttcagtgttaagcctactgatccccccagctgccggtattggggtagcgtgggttgtggtctgcagagctgttcagggcgccgcccagggaatcgttgccacggcccaattcgagatttatgtcaagtgggcccccccgctggagcggggaagactgacatctatgtcaacctccgggtttctgttaggtccgttcatcgtgctactggtaacaggcgttatttgcgagtctctcggatggccgatggtattttatatcttcggtcagttcaaatag

SEQ ID NO: 304923 - DNA, 1242 bp, Artificial Sequence
  derived and/or modified sequence
atgcagatggacaaccggctgccccccaagaaggtgcccggcttctgttccttcagatatggccttagtttcctggttcattgttgcaatgtgatcattactgcacagcgggcatgcttgaatctgaccatggttgtgatggtgaatagcacagaccctcacgggctcccaaacacctccacgaaaaaactgctggacaacattaaaaaccccatgtataattggagtcctgatatacagggtatcattctcagttccacatcatacggtgtaatcattattcaggtgcccgtcgggtattttagtggaatatattcaacgaagaagatgatcgggttcgccttgtgtctatccagcgttctttccctgttgattcctccagctgcagggatcggagtcgcctgggtagtcgtgtgtagagccgtacagggtgcagcgcaaggcattgtcgccaccgcccagttcgagatctacgtcaaatgggcaccacctttggagcggggtcgactgacatctatgagtacctctgggtttctgcttggaccattcatcgtgctgttggtgactggagttatttgtgagagccttggttggccgatggtattttacattttcggcgcttgtggctgtgctgtgtgtctcctctggttcgtgctcttctacgacgatcccaaggaccatccttgcatcagcatctccgagaaggagtacatcacgagctccctcgtacagcagaatggctttctgtccagcctgccttacttatttgcctggatttgcggcaacctagctgggcagctgagcgactttttcttgaccagaaatattctgagcgtgattgctgtgagaaaattatttaccgcagcgggcttcctgttgccagctatctttggggtttgtctcccatacctatcttcaacattttacagtatcgtcattttcttgatcctggccggcgccacgggaagcttttgcttaggcggcgttttcattaacggcctggatattgctccccgatacttcggctttataaaggcctgctcgaccctgacaggaatgatcggagggctaatcgcatccacattgactggtcttatcctgaagcaggatcctgaatctgcgtggttcaagactttcattttgatggccgccatcaatgtcacgggacttattttctacctgatagtggccaccgctgagatacaggattgggccaaagagaagcagcacacgcgtttgtag

SEQ ID NO: 304924 - DNA, 1242 bp, Artificial Sequence
  derived and/or modified sequence
atgcagatggacaaccggctgccccccaagaaggtgcccggcttctgctccttcaggtacggtttgtcatttctcgtacactgttgtaatgtcattataaccgcacagcgggcctgcctcaacctgacgatggtggtgatggttaactccacggaccctcacgggttacctaacacctctacgaaaaagttactggacaacattaaaaacccaatgtacaattggagccccgacatccagggcattatcctcagctctacttcctacggggtcataatcattcaagtgcccgtaggctattttagcggcatttactccacgaagaagatgatcggcttcgccctgtgcctgtcctccgtgctgagcctcctgatcccgcccgccgctggcattggagtggcatgggtagtggtatgccgcgccgtacaaggtgcagctcagggaattgtcgctacagcacagtttgagatctacgtgaagtgggccccgcctctagagagaggcagactgactagcatgtctacttccggattcctgctcggcccgtttattgtgcttctagtgacgggggtgatttgcgaaagtttagggtggcctatggtgttctatatttttggagcgtgcgggtgtgccgtgtgtctcttatggttcgtcttgttctacgatgatcctaaggatcacccctgtatctcgattagcgagaaagaatatattacatcgagtttagtgcagcagaatggctttcttagctccctgccttacctattcgcctggatttgtgggaatctggcgggccagttgtccgactttttcctcactaggaatatattgtcagtcatcgcagtacgcaagctatttaccgccgctggcttcttgctcccagcaatatttggggtttgtctgccttacctgtccagcacattctattccatcgtaatattcctgattcttgccggagccacaggatcattttgtctcggaggcgtttttattaacggactcgacattgctccccggtacttcggtttcataaaggcttgttcaactctcacgggcatgattgggggccttattgcaagtacgctaactggactgatcctcaaacaggaccctgaatccgcttggtttaagaccttcattcttatggcagccattaacgtgactggcttgattttctacctgattgtggccactgccgagatacaggattgggcaaaggaaaagcagcatacccggctgtag

SEQ ID NO: 304925 - DNA, 630 bp, Artificial Sequence
  derived and/or modified sequence
atgcagatggataatcgcctgccacctaagaaagttccaggattttgtagcttccggtatgggttgagcttcctggtgcattgttgtaacgtaatcataacagcgcagcgcgcttgcctcaacctgaccatggtagtgatggtcaatagcaccgacccccacgggctgccaaatactagcaccaaaaaactgttagataacataaaaaatcccatgtacaactggtcccccgatatacaggggatcatcctgagtagtacatcatatggcgtgattatcatccaggtccctgtgggatatttcagtggtatctacagcacaaaaaagatgatcggatttgccctttgcctgtcttccgtgctctccctgctgatcccgcctgccgctgggataggggtggcatgggtcgtagtgtgtagggccgtacaaggagccgctcagggcatcgtggcaacagctcagtttgaaatttacgtaaaatgggcacctcctcttgagcgtggcagactgacttccatgagtacgtccggttttctgcttggaccttttattgtactcctggtgactggcgtcatctgtgaaagcctgggatggcccatggtgttctatatcttcgggcagtttaaatag

SEQ ID NO: 304926 - DNA, 1242 bp, Artificial Sequence
  derived and/or modified sequence
atgcagatggacaacaggctcccccctaagaaagtgcccggtttttgcagtttcaggtacggactatcatttctggtgcattgctgtaatgtcatcattaccgcccagcgcgcttgtctgaatctgactatggtggtcatggtcaactccacagacccccacggtctgccgaatacaagtactaagaagctgctcgacaacataaagaatcctatgtacaattggtctccagacatccaaggaattatcctttcctcgacttcatacggtgtgatcattatacaggttcctgtaggctatttcagtggcatctattctactaaaaagatgatcggttttgcactatgtctgtcctccgtgcttagtctgttaatcccgccagctgccggaatcggagtagcgtgggttgtagtatgtcgggcagtgcagggagccgcacagggcatcgtcgcgacagcccaatttgagatttatgtgaagtgggcacccccactggaacgaggtcgcctgactagtatgagcacttctggcttcctgctcgggcctttcattgtgttgcttgtcacaggtgtaatttgtgagagtctggggtggcctatggtcttttacattttcggcgcttgcggctgcgctgtctgcctgctttggtttgtgttattttacgacgaccccaaagaccatccctgtatctctatctcggaaaaagagtacataacttctagcctcgtccagcagaacggcttcctgagttctcttccctacctgttcgcctggatatgcggcaacctggccggacagctttccgacttcttcctgacccgcaacattttaagcgtgatagccgtgagaaagctttttaccgcagccggtttcctcctgcctgccatcttcggggtctgtttgccttatctcagcagcactttttattccattgtgatctttctgattttagccggagccacgggtagtttttgtcttggaggggtttttatcaatgggttggacatcgcgcctaggtactttggcttcattaaagcttgttccaccttgaccggcatgattggtggcttaattgcatccaccttgacggggctaattctaaagcaagatcctgagtctgcctggtttaaaacttttattctgatggccgcaatcaatgtgacaggacttatcttctacctcatcgtggccactgcagaaatccaagactgggctaaggaaaagcagcatacccggctctag

SEQ ID NO: 304927 - DNA, 1242 bp, Artificial Sequence
  derived and/or modified sequence
atgcagatggacaaccggctaccaccgaagaaggtgccaggattctgcagttttcgctatggactctcgttcctcgtgcattgctgtaacgtgattattacggcccagagagcctgcctgaacctcacaatggtggtgatggttaacagcactgacccccacgggctgccgaacaccagcaccaagaaacttttagataacataaaaaaccccatgtacaactggagtcccgacatacagggaatcatcctttcttccaccagctatggtgttatcataatccaggtaccagtaggatatttctcaggtatctattccaccaagaaaatgatcgggttcgccctctgtcttagcagcgtgcttagtctactaatcccacctgcggcaggtatcggggtagcgtgggtagtggtttgtcgcgcagtgcagggcgcagcacaggggatagttgccacggctcagttcgagatttacgttaaatgggctccacctctggagagaggcagattaacctccatgtccacttctggctttctgcttggacccttcattgtgcttttggtcaccggtgttatctgcgagagcctggggtggcccatggttttttacatctttggcgcttgtggctgtgctgtgtgtttgctctggtttgttctgttctacgatgatccaaaggaccatccgtgtatctctatatctgagaaggaatatatcacgagcagcttagtgcagcagaatggctttttgagcagcttgccttacttgtttgcctggatatgtggtaacctcgccggacaactgtccgatttcttcttgactcgcaatatcctgtctgttatcgctgtgcgcaaactgttcacagccgctgggttcctgctacccgcaatatttggcgtatgcctgccttacctctcaagtacattctattccattgtcattttcctgatcctggcaggagcgaccggcagcttctgcctaggaggcgtctttataaacgggctggacatcgcaccgagatacttcggctttattaaggcgtgtagcacactgaccgggatgatagggggactgatcgcttccactcttacaggacttatattaaagcaggaccctgagtcagcctggtttaaaacctttatccttatggcagccatcaatgtcacaggattgatcttctacctcatagttgccaccgccgagatccaggattgggccaaagagaagcaacatacgcgcctgtag

SEQ ID NO: 304928 - DNA, 1679 bp, Artificial Sequence
  derived and/or modified sequence
attgtgtaaagttgagagaaaagtcttcacagcggaagaagaaatcacttttttgtcccgaatcagtgggtggaggcaaaacccttcagcaagaagagaagcaacttcagccgtgtatgcaaatggataaccggttgcctcccaaaaaagttccaggtttctgttcctttcgctatggattgtctttccttgtgcactgttgtaatgttataataacagcacagcgtgcgtgcctgaacctcacaatggtagtcatggtgaatagcacagatccacatggtttgcccaacacctccacaaagaagctcctggataatataaagaaccctatgtataattggagcccagatatccagggaatcatcttgagttccacctcctatggtgtcatcatcatccaagttcctgttggatacttctctggaatatattctacaaagaaaatgattggctttgcattatgcctcagctctgtgttaagcctgctcatcccaccagcagctggaattggagtagcttgggtcgttgtatgtcgagcagttcagggagcagcccaggggatagttgcaacagcccagtttgaaatatatgtcaaatgggctcctcccctggaacgaggccgacttacttctatgagtacatcagggtttttgctgggaccctttattgtcctacttgtgactggagttatctgtgaatctctgggctggcccatggtcttctatatttttggtgcttgtggctgtgccgtatgtcttctctggttcgttctgttttatgatgaccccaaagaccacccatgtataagcatcagtgaaaaggaatacatcacatcctccctggtccagcagaatgggttcttgtcttcccttccctatttgtttgcctggatctgtggtaacctagcaggtcagttatcagacttcttcctgaccaggaatattctcagcgtaattgctgtccggaaactcttcacagcagcaggatttctccttcctgcaatctttggtgtctgcctgccttacctgagttccaccttctacagcattgtcattttcctaatacttgctggtgcaacaggcagcttttgcttgggtggagtgtttataaatggcttggatattgctcccagatattttggatttattaaagcatgttcaactttaactggaatgataggaggactaattgcttccactttgactggattgatccttaagcaggatccggaatccgcctggtttaaaaccttcatcctgatggcagccattaatgtgactggcctaattttctaccttatagttgctacagcagaaattcaggactgggctaaagaaaaacaacacacacgtctctgaagtgtgaaacagagcacttgcagagcctgggacaacctccttattgaagggaagagggaccagcacatgaggctgaggctgaggggcagtcaccagcaccaggaagaaggtggtaggaggagtcctaggggccagttttaccctcccacatatcctgtgtgcatcgttttttaacatgtgttgtttgtaacatgtaatatatctgaattttaaatgggggtggtgatttatctcagtcttcctctctgcatcagttgctttataaatgattgtcaaaccaataaatacacacaagataaaattttattctaaggcttcatg

SEQ ID NO: 304929 - DNA, 1242 bp, Artificial Sequence
  derived and/or modified sequence
atgcaaatggataaccggttgcctcccaaaaaagttccaggtttctgttcctttcgctatggattgtctttccttgtgcactgttgtaatgttataataacagcacagcgtgcgtgcctgaacctcacaatggtagtcatggtgaatagcacagatccacatggtttgcccaacacctccacaaagaagctcctggataatataaagaaccctatgtataattggagcccagatatccagggaatcatcttgagttccacctcctatggtgtcatcatcatccaagttcctgttggatacttctctggaatatattctacaaagaaaatgattggctttgcattatgcctcagctctgtgttaagcctgctcatcccaccagcagctggaattggagtagcttgggtcgttgtatgtcgagcagttcagggagcagcccaggggatagttgcaacagcccagtttgaaatatatgtcaaatgggctcctcccctggaacgaggccgacttacttctatgagtacatcagggtttttgctgggaccctttattgtcctacttgtgactggagttatctgtgaatctctgggctggcccatggtcttctatatttttggtgcttgtggctgtgccgtatgtcttctctggttcgttctgttttatgatgaccccaaagaccacccatgtataagcatcagtgaaaaggaatacatcacatcctccctggtccagcagaatgggttcttgtcttcccttccctatttgtttgcctggatctgtggtaacctagcaggtcagttatcagacttcttcctgaccaggaatattctcagcgtaattgctgtccggaaactcttcacagcagcaggatttctccttcctgcaatctttggtgtctgcctgccttacctgagttccaccttctacagcattgtcattttcctaatacttgctggtgcaacaggcagcttttgcttgggtggagtgtttataaatggcttggatattgctcccagatattttggatttattaaagcatgttcaactttaactggaatgataggaggactaattgcttccactttgactggattgatccttaagcaggatccggaatccgcctggtttaaaaccttcatcctgatggcagccattaatgtgactggcctaattttctaccttatagttgctacagcagaaattcaggactgggctaaagaaaaacaacacacacgtctctga

SEQ ID NO: 304930 - DNA, 630 bp, Artificial Sequence
  derived and/or modified sequence
atgcagatggacaacagactgccccccaagaaggtgcccggcttctgcagcttcagatacggcctgagcttcctggtgcactgctgcaacgtgatcatcaccgcccagagagcctgcctgaacctgaccatggtggtgatggtgaacagcaccgacccccacggcctgcccaacaccagcaccaagaagctgctggacaacatcaagaaccccatgtacaactggagccccgacatccagggcatcatcctgagcagcaccagctacggcgtgatcatcatccaggtgcccgtgggctacttcagcggcatctacagcaccaagaagatgatcggcttcgccctgtgcctgagcagcgtgctgagcctgctgatcccccccgccgccggcatcggcgtggcctgggtggtggtgtgcagagccgtgcagggcgccgcccagggcatcgtggccaccgcccagttcgagatctacgtgaagtgggccccccccctggagagaggcagactgaccagcatgagcaccagcggcttcctgctgggccccttcatcgtgctgctggtgaccggcgtgatctgcgagagcctgggctggcccatggtgttctacatcttcggccagttcaagtag

SEQ ID NO: 304931 - DNA, 1242 bp, Artificial Sequence
  derived and/or modified sequence
atgcagatggacaacagactgccccccaagaaggtgcccggcttctgcagcttcagatacggcctgagcttcctggtgcactgctgcaacgtgatcatcaccgcccagagagcctgcctgaacctgaccatggtggtgatggtgaacagcaccgacccccacggcctgcccaacaccagcaccaagaagctgctggacaacatcaagaaccccatgtacaactggagccccgacatccagggcatcatcctgagcagcaccagctacggcgtgatcatcatccaggtgcccgtgggctacttcagcggcatctacagcaccaagaagatgatcggcttcgccctgtgcctgagcagcgtgctgagcctgctgatcccccccgccgccggcatcggcgtggcctgggtggtggtgtgcagagccgtgcagggcgccgcccagggcatcgtggccaccgcccagttcgagatctacgtgaagtgggccccccccctggagagaggcagactgaccagcatgagcaccagcggcttcctgctgggccccttcatcgtgctgctggtgaccggcgtgatctgcgagagcctgggctggcccatggtgttctacatcttcggcgcctgcggctgcgccgtgtgcctgctgtggttcgtgctgttctacgacgaccccaaggaccacccctgcatcagcatcagcgagaaggagtacatcaccagcagcctggtgcagcagaacggcttcctgagcagcctgccctacctgttcgcctggatctgcggcaacctggccggccagctgagcgacttcttcctgaccagaaacatcctgagcgtgatcgccgtgagaaagctgttcaccgccgccggcttcctgctgcccgccatcttcggcgtgtgcctgccctacctgagcagcaccttctacagcatcgtgatcttcctgatcctggccggcgccaccggcagcttctgcctgggcggcgtgttcatcaacggcctggacatcgcccccagatacttcggcttcatcaaggcctgcagcaccctgaccggcatgatcggcggcctgatcgccagcaccctgaccggcctgatcctgaagcaggaccccgagagcgcctggttcaagaccttcatcctgatggccgccatcaacgtgaccggcctgatcttctacctgatcgtggccaccgccgagatccaggactgggccaaggagaagcagcacaccagactgtag

SEQ ID NO: 304932 - DNA, 3150 bp, Artificial Sequence
  derived and/or modified sequence
aaccttggagaagaggacgaaacatacggacctggagaatcccaaatcacagcacaaagtagggaactcttgaaggattcccctcaagatttagatctctctcacacagatctaggggagagtgatgtagattgtggtagcaccagcttagtagaaaatgtgacacttttgacacaatatgattcaggagaatgcaacattgcatctaaagaggaagtggaggctcctctttctgcccaggagagcgaaatgctctataagaagttctccctgaaattcgtatcagcaagaaagaaagcagcacccagaaaaacaggggcccaggcaggaatattggacacagtctgcaatggctttcagttggttcaggtattccagaaagaagagattgaacccttgcaaggtaaacagcaagatgtaaactggttaggtcaaggccttattcagagtgctgccaaaagcactagcactcagggcttggagcatgacctggatgatgtcaatgcacggtggaagactctcaataagaaggtggctcagcgagcagcccagctgcaggaggccttgctgcactgtgggaggttccaggatgccctggagtccctgctcagctggatggtggacactgaggagcttgtggccaatcagaagcccccgtcggctgagttcaaagtggtaaaggcccagatacaagaacaaaagcttctccagagattgttggatgaccgaaaatctacggtggaggtaatcaaacgagaaggagaaaaaattgctacaacagcagagcccgcagataaagtgaagattttgaaacagctcagtctcttggatagcagatgggaggcattgcttaataaagctgaaacaaggaatcgtcagttggaaggtatctcggtggtagcacagcaatttcatgaaaccttagaaccactgaacgagtggcttacaaccatagaaaagaggctggtgaattgtgaacccataggaacccaagcatctaaacttgaggaacaaattgcacagcacaaagccttagaagatgacatcatcaatcacaataaacatttacaccaggctgttagcattggccagtccttaaaggttttgagctccagggaggataaagatatggtgcagagtaaattagacttctctcaagtatggtacattgagattcaagagaaaagtcacagcaggtctgagctcctccagcaggccttatgtaatgctaagatttttggggaagatgaagttgaactgatgaactggctgaatgaagtgcatgacaaactgagcaagctctcagtccaggattacagcactgaggggctatggaagcagcagtctgaacttcgggttctgcaagaggacatcttactcaggaaacaaaatgtagatcaggctttactaaatggtttagaactacttaaacaaaccacaggtgatgaagttttaataattcaagataaattggaagccattaaagcaaggtacaaagacattactaaactgagcactgatgtggccaagactctggaacaggcgctgcagcttgcaaggcggctgcactccacacacgaagagctgtgtacctggctggacaaagtggaggtggaattactttcatatgaaactcaggttctgaaaggagaagaagcaagtcaagcacaaatgagaccaaaggaactgaaaaaggaagctaagaacaacaaagccttactggactcccttaatgaagtgagcagtgctttgctggaactggtaccatggagggcaagagaaggacttgagaaaatggtagctgaggacaatgagcgctaccgattagtgagcgacaccatcactcagaaggtggaggagatcgatgcagccattctgcgatcacagcagtttgaccaagcagctgatgctgagttatcctggattactgaaacagaaaaaaaattgatgtctctgggtgacatcaggcttgagcaagaccagacttctgctcagcttcaagttcaaaagacattcaccatggagattttgagacacaaggatattattgatgaccttgttaaatctgggcataaaatcatgaccgcatgcagtgaagaggaaaagcaatcaatgaagaaaaaactggacaaggtactgaagaactatgataccatctgccagattaattcagaaaggtatctgcagctggaacgggcacagtccctggttaaccaattctgggaaacatatgaagaactttggccatggctgacagaaacacaatcaatcatctctcagcttcccgccccagcccttgaatatgaaactctaaggcagcagcaggaagaacatcggcaactgcgtgagttgatagctgaacacaagcctcatatagataagatgaacaaaactgggccacagttactggaattgagccctggggaaggcttttctatccaagagaagtatgtggcagccgacaccctttacagtcaaattaaagaagatgtcaaaaagcgtgctgtggcactggatgaagccatttctcaatcaactcagttccatgacaagatagatcagatccttgagagcctggaacgcatcgtggaacgtctgaggcagccaccctctatctctgcagaggttgagaagatcaaggaacagatcagtgaaaataagaatgtgtcagtagacatggaaaagctacagccgttgtatgaaactcttaaacagaggggagaggaaatgattgctagatctggggggactgataaagacatatctgccaaagctgttcaggataagcttgaccaaatggttttcatttgggagaacatacacacactggtggaagagagggaagccaaactactggatgtgatggagctagcagaaaagttctggtgtgatcacatgtcattgatagttaccattaaagatactcaagatttcatccgggacctggaagatcctggaattgatccttcagtagtaaaacaacagcaagaagcagcagagaccataagggaagaaatagatggactacaggaggagctggatatagttattaacctaggttctgaactcattgcggcatgtggggagcctgataaacccattgtcaagaagagtatagatgagttaaattcaatgggattctctaaataa

SEQ ID NO: 304933 - protein, 7461 aa, Artificial Sequence
  derived and/or modified sequence
MAGYLSPAAYLYVEEQEYLQAYEDVLERYKDERDKVQKKTFTKWINQHLMKVRKHVNDLYEDLRDGHNLISLLEVLSGDTLPREKGRMRFHRLQNVQIALDYLKRRQVKLVNIRNDDITDGNPKLTLGLIWTIILHFQISDIHVTGESEDMSAKERLLLWTQQATEGYAGIRCENFTTCWRDGKLFNAIIHKYRPDLIDMNTVAVQSNLANLEHAFYVAEKIGVIRLLDPEDVDVSSPDEKSVITYVSSLYDAFPKVPEGGEGIGANDVEVKWIEYQNMVNYLIQWIRHHVTTMSERTFPNNPVELKALYNQYLQFKETEIPPKETEKSKIKRLYKLLEIWIEFGRIKLLQGYHPNDIEKEWGKLIIAMLEREKALRPEVERLEMLQQIANRVQRDSVICEDKLILAGNALQSDSKRLESGVQFQNEAEIAGYILECENLLRQHVIDVQILIDGKYYQADQLVQRVAKLRDEIMALRNECSSVYSKGRILTTEQTKLMISGITQSLNSGFAQTLHPSLTSGLTQSLTPSLTSSSMTSGLSSGMTSRLTPSVTPAYTPGFPSGLVPNFSSGVEPNSLQTLKLMQIRKPLLKSSLLDQNLTEEEINMKFVQDLLNWVDEMQVQLDRTEWGSDLPSVESHLENHKNVHRAIEEFESSLKEAKISEIQMTAPLKLTYAEKLHRLESQYAKLLNTSRNQERHLDTLHNFVSRATNELIWLNEKEEEEVAYDWSERNTNIARKKDYHAELMRELDQKEENIKSVQEIAEQLLLENHPARLTIEAYRAAMQTQWSWILQLCQCVEQHIKENTAYFEFFNDAKEATDYLRNLKDAIQRKYSCDRSSSIHKLEDLVQESMEEKEELLQYKSTIANLMGKAKTIIQLKPRNSDCPLKTSIPIKAICDYRQIEITIYKDDECVLANNSHRAKWKVISPTGNEAMVPSVCFTVPPPNKEAVDLANRIEQQYQNVLTLWHESHINMKSVVSWHYLINEIDRIRASNVASIKTMLPGEHQQVLSNLQSRFEDFLEDSQESQVFSGSDITQLEKEVNVCKQYYQELLKSAEREEQEESVYNLYISEVRNIRLRLENCEDRLIRQIRTPLERDDLHESVFRITEQEKLKKELERLKDDLGTITNKCEEFFSQAAASSSVPTLRSELNVVLQNMNQVYSMSSTYIDKLKTVNLVLKNTQAAEALVKLYETKLCEEEAVIADKNNIENLISTLKQWRSEVDEKRQVFHALEDELQKAKAISDEMFKTYKERDLDFDWHKEKADQLVERWQNVHVQIDNRLRDLEGIGKSLKYYRDTYHPLDDWIQQVETTQRKIQENQPENSKTLATQLNQQKMLVSEIEMKQSKMDECQKYAEQYSATVKDYELQTMTYRAMVDSQQKSPVKRRRMQSSADLIIQEFMDLRTRYTALVTLMTQYIKFAGDSLKRLEEEEKSLEEEKKEHVEKAKELQKWVSNISKTLKDAEKAGKPPFSKQKISSEEISTKKEQLSEALQTIQLFLAKHGDKMTDEERNELEKQVKTLQESYNLLFSESLKQLQESQTSGDVKVEEKLDKVIAGTIDQTTGEVLSVFQAVLRGLIDYDTGIRLLETQLMISGLISPELRKCFDLKDAKSHGLIDEQILCQLKELSKAKEIISAASPTTIPVLDALAQSMITESMAIKVLEILLSTGSLVIPATGEQLTLQKAFQQNLVSSALFSKVLERQNMCKDLIDPCTSEKVSLIDMVQRSTLQENTGMWLLPVRPQEGGRITLKCGRNISILRAAHEGLIDRETMFRLLSAQLLSGGLINSNSGQRMTVEEAVREGVIDRDTASSILTYQVQTGGIIQSNPAKRLTVDEAVQCDLITSSSALLVLEAQRGYVGLIWPHSGEIFPTSSSLQQELITNELAYKILNGRQKIAALYIPESSQVIGLDAAKQLGIIDNNTASILKNITLPDKMPDLGDLEACKNARRWLSFCKFQPSTVHDYRQEEDVFDGEEPVTTQTSEETKKLFLSYLMINSYMDANTGQRLLLYDGDLDEAVGMLLEGCHAEFDGNTAIKECLDVLSSSGVFLNNASGREKDECTATPSSFNKCHCGEPEHEETPENRKCAIDEEFNEMRNTVINSEFSQSGKLASTISIDPKVNSSPSVCVPSLISYLTQTELADISMLRSDSENILTNYENQSRVETNERANECSHSKNIQNFPSDLIENPIMKSKMSKFCGVNETENEDNTNRDSPIFDYSPRLSALLSHDKLMHSQGSFNDTHTPESNGNKCEAPALSFSDKTMLSGQRIGEKFQDQFLGIAAINISLPGEQYGQKSLNMISSNPQVQYHNDKYISNTSGEDEKTHPGFQQMPEDKEDESEIEEYSCAVTPGGDTDNAIVSLTCATPLLDETISASDYETSLLNDQQNNTGTDTDSDDDFYDTPLFEDDDHDSLLLDGDDRDCLHPEDYDTLQEENDETASPADVFYDVSKENENSMVPQGAPVGSLSVKNKAHCLQDFLMDVEKDELDSGEKIHLNPVGSDKVNGQSLETGSERECTNILEGDESDSLTDYDIVGGKESFTASLKFDDSGSWRGRKEEYVTGQEFHSDTDHLDSMQSEESYGDYIYDSNDQDDDDDDGIDEEGGGIRDENGKPRCQNVAEDMDIQLCASILNENSDENENINTMILLDKMHSCSSLEKQQRVNVVQLASPSENNLVTEKSNLPEYTTEIAGKSKENLLNHEMVLKDVLPPIIKDTESEKTFGPASISHDNNNISSTSELGTDLANTKVKLIQGSELPELTDSVKGKDEYFKNMTPKVDSSLDHIICTEPDLIGKPAEESHLSLIASVTDKDPQGNGSDLIKGRDGKSDILIEDETSIQKMYLGEGEVLVEGLVEEENRHLKLLPGKNTRDSFKLINSQFPFPQITNNEELNQKGSLKKATVTLKDEPNNLQIIVSKSPVQFENLEEIFDTSVSKEISDDITSDITSWEGNTHFEESFTDGPEKELDLFTYLKHCAKNIKAKDVAKPNEDVPSHVLITAPPMKEHLQLGVNNTKEKSTSTQKDSPLNDMIQSNDLCSKESISGGGTEISQFTPESIEATLSILSRKHVEDVGKNDFLQSERCANGLGNDNSSNTLNTDYSFLEINNKKERIEQQLPKEQALSPRSQEKEVQIPELSQVFVEDVKDILKSRLKEGHMNPQEVEEPSACADTKILIQNLIKRITTSQLVNEASTVPSDSQMSDSSGVSPMTNSSELKPESRDDPFCIGNLKSELLLNILKQDQHSQKITGVFELMRELTHMEYDLEKRGITSKVLPLQLENIFYKLLADGYSEKIEHVGDFNQKACSTSEMMEEKPHILGDIKSKEGNYYSPNLETVKEIGLESSTVWASTLPRDEKLKDLCNDFPSHLECTSGSKEMASGDSSTEQFSSELQQCLQHTEKMHEYLTLLQDMKPPLDNQESLDNNLEALKNQLRQLETFELGLAPIAVILRKDMKLAEEFLKSLPSDFPRGHVEELSISHQSLKTAFSSLSNVSSERTKQIMLAIDSEMSKLAVSHEEFLHKLKSFSDWVSEKSKSVKDIEIVNVQDSEYVKKRLEFLKNVLKDLGHTKMQLETTAFDVQFFISEYAQDLSPNQSKQLLRLLNTTQKCFLDVQESVTTQVERLETQLHLEQDLDDQKIVAERQQEYKEKLQGICDLLTQTENRLIGHQEAFMIGDGTVELKKYQSKQEELQKDMQGSAQALAEVVKNTENFLKENGEKLSQEDKALIEQKLNEAKIKCEQLNLKAEQSKKELDKVVTTAIKEETEKVAAVKQLEESKTKIENLLDWLSNVDKDSERAGTKHKQVIEQNGTHFQEGDGKSAIGEEDEVNGNLLETDVDGQVGTTQENLNQQYQKVKAQHEKIISQHQAVIIATQSAQVLLEKQGQYLSPEEKEKLQKNMKELKVHYETALAESEKKMKLTHSLQEELEKFDADYTEFEHWLQQSEQELENLEAGADDINGLMTKLKRQKSFSEDVISHKGDLRYITISGNRVLEAAKSCSKRDGGKVDTSATHREVQRKLDHATDRFRSLYSKCNVLGNNLKDLVDKYQHYEDASCGLLAGLQACEATASKHLSEPIAVDPKNLQRQLEETKALQGQISSQQVAVEKLKKTAEVLLDARGSLLPAKNDIQKTLDDIVGRYEDLSKSVNERNEKLQITLTRSLSVQDGLDEMLDWMGNVESSLKEQGQVPLNSTALQDIISKNIMLEQDIAGRQSSINAMNEKVKKFMETTDPSTASSLQAKMKDLSARFSEASHKHKETLAKMEELKTKVELFENLSEKLQTFLETKTQALTEVDVPGKDVTELSQYMQESTSEFLEHKKHLEVLHSLLKEISSHGLPSDKALVLEKTNNLSKKFKEMEDTIKEKKEAVTSCQEQLDAFQVLVKSLKSWIKETTKKVPIVQPSFGAEDLGKSLEDTKKLQEKWSLKTPEIQKVNNSGISLCNLISAVTTPAKAIAAVKSGGAVLNGEGTATNTEEFWANKGLTSIKKDMTDISHGYEDLGLLLKDKIAELNTKLSKLQKAQEESSAMMQWLQKMNKTATKWQQTPAPTDTEAVKTQVEQNKSFEAELKQNVNKVQELKDKLTELLEENPDTPEAPRWKQMLTEIDSKWQELNQLTIDRQQKLEESSNNLTQFQTVEAQLKQWLVEKELMVSVLGPLSIDPNMLNTQRQQVQILLQEFATRKPQYEQLTAAGQGILSRPGEDPSLRGIVKEQLAAVTQKWDSLTGQLSDRCDWIDQAIVKSTQYQSLLRSLSDKLSDLDNKLSSSLAVSTHPDAMNQQLETAQKMKQEIQQEKKQIKVAQALCEDLSALVKEEYLKAELSRQLEGILKSFKDVEQKAENHVQHLQSACASSHQFQQMSRDFQAWLDTKKEEQNKSHPISAKLDVLESLIKDHKDFSKTLTAQSHMYEKTIAEGENLLLKTQGSEKAALQLQLNTIKTNWDTFNKQVKERENKLKESLEKALKYKEQVETLWPWIDKCQNNLEEIKFCLDPAEGENSIAKLKSLQKEMDQHFGMVELLNNTANSLLSVCEIDKEVVTDENKSLIQKVDMVTEQLHSKKFCLENMTQKFKEFQEVSKESKRQLQCAKEQLDIHDSLGSQAYSNKYLTMLQTQQKSLQALKHQVDLAKRLAQDLVVEASDSKGTSDVLLQVETIAQEHSTLSQQVDEKCSFLETKLQGIGHFQNTIREMFSQFAEFDDELDSMAPVGRDAETLQKQKETIKAFLKKLEALMASNDNANKTCKMMLATEETSPDLVGIKRDLEALSKQCNKLLDRAQAREEQVEGTIKRLEEFYSKLKEFSILLQKAEEHEESQGPVGMETETINQQLNMFKVFQKEEIEPLQGKQQDVNWLGQGLIQSAAKSTSTQGLEHDLDDVNARWKTLNKKVAQRAAQLQEALLHCGRFQDALESLLSWMVDTEELVANQKPPSAEFKVVKAQIQEQKLLQRLLDDRKSTVEVIKREGEKIATTAEPADKVKILKQLSLLDSRWEALLNKAETRNRQLEGISVVAQQFHETLEPLNEWLTTIEKRLVNCEPIGTQASKLEEQIAQHKVLQEDILLRKQNVDQALLNGLELLKQTTGDEVLIIQDKLEAIKARYKDITKLSTDVAKTLEQALQLARRLHSTHEELCTWLDKVEVELLSYETQVLKGEEASQAQMRPKELKKEAKNNKALLDSLNEVSSALLELVPWRAREGLEKMVAEDNERYRLVSDTITQKVEEIDAAILRSQQFDQAADAELSWITETEKKLMSLGDIRLEQDQTSAQLQVQKTFTMEILRHKDIIDDLVKSGHKIMTACSEEEKQSMKKKLDKVLKNYDTICQINSERYLQLERAQSLVNQFWETYEELWPWLTETQSIISQLPAPALEYETLRQQQEEHRQLRELIAEHKPHIDKMNKTGPQLLELSPGEGFSIQEKYVAADTLYSQIKEDVKKRAVALDEAISQSTQFHDKIDQILESLERIVERLRQPPSISAEVEKIKEQISENKNVSVDMEKLQPLYETLKQRGEEMIARSGGTDKDISAKAVQDKLDQMVFIWENIHTLVEEREAKLLDVMELAEKFWCDHMSLIVTIKDTQDFIRDLEDPGIDPSVVKQQQEAAETIREEIDGLQEELDIVINLGSELIAACGEPDKPIVKKSIDELNSAWDSLNKAWKDRIDKLEEAMQAAVQYQDGLQAVFDWVDIAGGKLASMSPIGTDLETVKQQIEELKQFKSEAYQQQIEMERLNHQAELLLKKVTEESDKHTVQDPLMELKLIWDSLEERIINRQHKLEGALLALGQFQHALDELLAWLTHTEGLLSEQKPVGGDPKAIEIELAKHHVLQNDVLAHQSTVEAVNKAGNDLIESSAGEEASNLQNKLEVLNQRWQNVLEKTEQRKQQLDGALRQAKGFHGEIEDLQQWLTDTERHLLASKPLGGLPETAKEQLNVHMEVCAAFEAKEETYKSLMQKGQQMLARCPKSAETNIDQDINNLKEKWESVETKLNERKTKLEEALNLAMEFHNSLQDFINWLTQAEQTLNVASRPSLILDTVLFQIDEHKVFANEVNSHREQIIELDKTGTHLKYFSQKQDVVLIKNLLISVQSRWEKVVQRLVERGRSLDDARKRAKQFHEAWSKLMEWLEESEKSLDSELEIANDPDKIKTQLAQHKEFQKSLGAKHSVYDTTNRTGRSLKEKTSLADDNLKLDDMLSELRDKWDTICGKSVERQNKLEEALLFSGQFTDALQALIDWLYRVEPQLAEDQPVHGDIDLVMNLIDNHKAFQKELGKRTSSVQALKRSARELIEGSRDDSSWVKVQMQELSTRWETVCALSISKQTRLEAALRQAEEFHSVVHALLEWLAEAEQTLRFHGVLPDDEDALRTLIDQHKEFMKKLEEKRAELNKATTMGDTVLAICHPDSITTIKHWITIIRARFEEVLAWAKQHQQRLASALAGLIAKQELLEALLAWLQWAETTLTDKDKEVIPQEIEEVKALIAEHQTFMEEMTRKQPDVDKVTKTYKRRAADPSSLQSHIPVLDKGRAGRKRFPASSLYPSGSQTQIETKNPRVNLLVSKWQQVWLLALERRRKLNDALDRLEELREFANFDFDIWRKKYMRWMNHKKSRVMDFFRRIDKDQDGKITRQEFIDGILSSKFPTSRLEMSAVADIFDRDGDGYIDYYEFVAALHPNKDAYKPITDADKIEDEVTRQVAKCKCAKRFQVEQIGDNKYRFFLGNQFGDSQQLRLVRILRSTVMVRVGGGWMALDEFLVKNDPCRVHHHGSKMLRSESNSSITTTQPTIAKGRTNMELREKFILADGASQGMAAFRPRGRRSRPSSRGASPNRSTSVSSQAAQAASPQVPATTTPKGTPIQGSKLRLPGYLSGKGFHSGEDSGLITTAAARVRTQFADSKKTPSRPGSRAGSKAGSRASSRRGSDASDFDISEIQSVCSDVETVPQTHRPTPRAGSRPSTAKPSKIPTPQRKSPASKLDKSSKR

SEQ ID NO: 304934 - DNA, 12603 bp, Artificial Sequence
  derived and/or modified sequence
atggctggctacctcagtccggcagcctatctgtatgtagaggagcaggaatatctgcaagcctatgaggatgtgctcgagcggtacaaggatgaaagggacaaggttcaaaaaaagacgtttactaagtggatcaaccagcatttgatgaaagtgagaaaacatgtgaacgatctatatgaggatctgagggacggccacaatctgatctccctcctggaagtgctctcgggggatacactgcctagggagaaaggtcgaatgagatttcaccggctgcaaaacgtccaaatcgcgctcgactatctcaaacgtagacaggtgaagctggtcaacattcgcaacgacgacatcaccgacggcaacccaaaactgaccctgggtttgatttggacgatcattctacatttccagatctcggacatccacgtgactggagagtctgaagatatgtcagccaaagaaaggcttctcctatggacccaacaggctacagagggctacgccggtatacgctgtgaaaacttcaccacctgttggagagacggcaaattgtttaatgccatcattcacaaatacagacccgacctgatcgatatgaatactgtcgccgtgcagagtaacctcgccaatctagagcacgcattctatgtcgcggaaaagattggagtgattaggctgttggaccccgaagatgtggatgtgtcgtcgcctgatgagaaatcagtcattacctacgttagtagcttgtacgacgcttttcccaaagtgcctgagggaggggaaggaatcggtgccaacgacgttgaagtgaaatggatcgaataccaaaacatggtgaattacctgatccaatggatccgtcaccatgtgaccacgatgtcagagaggaccttccctaacaaccctgtggaactcaaagccctctataaccaatacttgcagttcaaagagactgagataccacccaaagagacagagaagagcaagatcaaacggttgtacaagttgcttgagatctggatcgagttcggccgcatcaagctcctccagggttatcatccgaatgacatcgagaaagagtggggaaagctaataatcgctatgctcgaaagagaaaaggccttaaggcctgaggtagaaagattggaaatgctgcagcagattgccaatcgggttcagcgggattccgtgatctgcgaggataagctcatattggccggcaacgcgctccagtcagatagcaagcggttggaaagtggagtgcagttccaaaacgaggccgagatcgctgggtatatactcgaatgcgagaacctgctgcgccagcatgtgatcgatgttcagattttgattgatggcaagtattatcaagccgaccagctcgtgcagagggtcgccaaactaagggacgagatcatggcactgcgaaatgagtgttctagcgtttatagcaagggccggatcctcactacggagcagaccaagctgatgatttccgggattactcagtctctaaattcaggcttcgcccagacgttgcacccttcactcacctccggcctgactcagtccctgaccccctctctcacctcaagttctatgacttcaggactcagcagcggaatgacatcgagacttacacccagcgtcacccctgcctacacaccggggttcccatctggcctggttccaaacttctcgtctggagttgagcccaacagtttgcagacattaaagctgatgcagatacgaaaacccttgctgaagagctcacttctggatcaaaatttaacggaggaggaaatcaacatgaagttcgtgcaggatctgctgaattgggtagatgagatgcaggttcagctcgaccggacagaatggggaagtgacttgccatccgtagaaagtcacttagaaaaccacaagaacgtgcatagggctattgaggagttcgaaagcagtcttaaagaggccaagatttccgagattcaaatgactgcacctctcaaacttacctatgcagaaaaactgcaccgcctggaaagccagtacgccaagctgctgaacacaagccggaaccaggagagacacttggatacgctgcacaatttcgtgagcagagcgaccaacgagctgatctggctgaatgagaaggaggaggaggaggtggcctatgattggtcagagaggaatacgaacatcgcgcggaagaaggactaccatgccgagctcatgcgggaattggaccagaaggaggaaaacatcaaaagtgtgcaggagattgcagagcaactactgcttgagaatcatccagcccgcctgaccattgaagcctatagggcagcaatgcaaacgcagtggtcctggatcctgcagctctgtcagtgcgtggagcagcatattaaggagaatactgcttattttgagttttttaacgacgcaaaagaagcaaccgactatttgagaaaccttaaagatgcaatccagcgaaaatactcatgtgatcgcagttcaagtatacataagctcgaagacttggtgcaggaaagcatggaagagaaggaagaactgctccaatataagtctacaatcgctaatctgatggggaaagcaaaaaccatcattcagctcaaacctcggaactcggactgcccactcaaaacatcaatccctatcaaggcaatatgtgactacaggcagattgaaatcaccatttataaggatgacgagtgcgttcttgctaataatagccacagagccaaatggaaagtcatctctccgactgggaatgaagccatggtgccctccgtgtgttttactgttccccccccaaacaaagaggctgtggacttggccaatcgcatcgaacagcaatatcagaacgttctgaccctgtggcatgagtcacatattaacatgaagtccgttgtgagctggcattatctaataaatgagattgatcgcatccgggcctccaacgtggcctcaattaaaacgatgttgcccggtgagcaccagcaggttctgtccaatctccagagccgattcgaggactttctggaggactctcaggaaagtcaggtgttcagcgggtcagatataacacagctagagaaggaagtcaacgtctgtaagcagtattatcaggagctgctgaagagcgctgaacgcgaagagcaggaagagagcgtttacaacctgtacatcagcgaggtacgtaacattaggttacgtttggagaattgcgaggatcggctgatccgccaaatcagaactccgctggaaagagacgacctccatgaatctgtgttccgcattaccgagcaggaaaagctgaagaaagagctggagcgtctcaaagacgacttgggtaccatcacaaacaagtgcgaagagttctttagccaagccgcggcctcatcgtctgtgccaacgcttagatcagaactgaacgtggtactgcaaaatatgaaccaggtgtattcgatgtcaagtacgtacatcgacaagttgaagactgttaatctggtgttaaagaatacacaggccgctgaagctttggtgaaactttacgagaccaaattgtgtgaagaagaggcggtcatcgctgataagaacaacatagagaatctcatctccacacttaaacagtggcggagtgaggtcgacgaaaaaagacaggtattccatgcgctcgaagacgagctccaaaaagctaaagcgattagtgacgagatgttcaagacatacaaggaacgggacctcgatttcgactggcacaaggagaaagccgatcagctggttgagcgctggcagaacgtgcatgtgcagattgacaatcggctccgtgacctcgagggaatcgggaaatcacttaagtactatcgcgatacgtatcaccccttggatgactggatccaacaggttgaaacaactcagcgcaaaattcaggaaaaccagccggaaaattcaaaaacgctcgctactcagctcaaccagcaaaagatgctggtttcggaaatcgaaatgaagcagtccaagatggacgagtgccagaaatatgctgagcagtatagcgcaacagtcaaggattacgaactgcagacaatgacctacagagctatggtcgattcccagcagaaatcccctgtgaagcgacgccgaatgcaatccagcgcagacctcatcattcaagaatttatggaccttcggacaagatacacagctctggtaactctgatgacccaatatatcaagttcgccggtgactccctcaagcgacttgaagaggaagagaagagtttagaggaagagaaaaaggaacatgtggaaaaagccaaggaactgcagaaatgggtatcaaatatttccaaaactttaaaagacgccgagaaggccggcaagccgcccttttctaagcagaaaatttcatccgaggaaatttcaacaaaaaaggagcagctctctgaagcactccagacaatccagctgttcctcgcaaagcacggggacaaaatgacggatgaggaaaggaatgaattggagaagcaggtcaagacactccaagagtcctacaacctcttatttagcgagagtctaaagcagttgcaggaatctcagacatctggtgacgtgaaagtcgaagaaaagctcgataaagtcatagcggggactattgaccaaacaacaggggaagtgttgtcagtgtttcaggcagtcctgcgcggattgatagattacgataccggcatcagattgctcgagacacaactgatgatcagtgggctgataagtcctgagctgcggaagtgtttcgacctcaaagacgccaaatcacatggattgattgatgagcaaatcctatgtcagcttaaagagctctctaaagcaaaggagataatttccgccgccagccctactaccatccctgtgttagatgccttggcccagagcatgatcaccgagtctatggccataaaagtgcttgagatcttgctgagcacaggatcactcgttatccctgcaaccggagaacagttgacactgcagaaagcatttcagcagaatctcgttagcagtgcccttttcagcaaggtgctggagcgacagaacatgtgtaaggacctgattgatccatgtacctccgaaaaggtttctttaattgacatggtgcagaggtctaccctgcaagagaatacgggaatgtggctcctaccagtacggccacaagaaggaggacggattacactaaagtgcggcagaaacatatccatactgagagctgcccacgaggggctcatcgatcgcgagactatgtttaggctgctgtctgctcaattgctgtcgggcggtttaatcaatagcaactctggtcagcgcatgacggtagaggaggcagtcagagagggtgtcatcgatagagacaccgcctcttccatcctcacctaccaggtgcaaactggaggaatcatacagtctaatccggccaaacggctgaccgttgatgaggccgtgcaatgtgacctgataacctctagctccgcccttcttgtgctcgaggcacaaagaggatacgtggggcttatatggccacatagtggcgaaatattccccacgtctagcagcctgcagcaggagttgatcactaacgagctagcctacaagatcttgaatggacgccagaagattgccgcgctgtacatccctgaatcttcacaggttataggtcttgacgcagcaaaacaactgggcatcatagataataatactgctagtatcctaaagaacattaccctgcctgacaaaatgcccgatttaggtgacctagaggcttgcaaaaacgccaggcgctggttgagcttttgcaaatttcaaccttcgactgtgcacgactataggcaggaagaggacgtgttcgatggggaggaacccgtaaccactcagacctcagaggagacaaagaaattattcttgtcatacctaatgataaattcctatatggatgccaacacaggccaacgcctgctgctctacgatggtgacctggacgaggctgtcgggatgttactggaaggttgtcacgcagaattcgatgggaatacagccatcaaagagtgtctggacgtcctcagctcatccggagtttttctgaataacgccagtggtagagagaaagatgagtgcacagccactccctcctctttcaataagtgccattgcggggagccagagcacgaagaaactccagaaaacaggaaatgtgctatcgatgaggaattcaacgagatgcggaacacggtgataaactcagagtttagccagtccggaaagttagcgtcaacgatttcaatcgatccaaaggttaacagcagtccaagcgtctgtgttccttcgctgatctcctatctaacgcaaactgaactggccgatatttctatgttgagaagcgattcggaaaacatcttgactaactacgagaaccagtcacgggtggaaacaaatgagcgcgcaaatgagtgtagtcatagtaagaacatccagaactttccgagcgacctgatcgaaaatccaatcatgaaatccaaaatgagcaagttctgcggtgtcaatgagactgaaaatgaggacaacacgaatcgtgattctcctatcttcgattattcacctcgcctgtccgccttgctgtcccatgacaagctgatgcactcacagggctctttcaatgacacccatacacctgagtccaacgggaacaaatgtgaagcaccggccttatctttctcagacaaaactatgctttcagggcagaggattggcgagaagttccaggaccaatttctcggcatcgccgcaatcaatatcagcttgcctggtgaacaatacggtcagaagtctttgaatatgatctcctccaacccgcaagttcaataccataatgacaaatacatttcgaataccagcggagaggacgagaaaacccacccaggcttccagcagatgcccgaggacaaggaggacgaatctgagattgaagagtactcttgtgcggtgacccccgggggcgacacagacaacgccatcgtgagtctcacatgcgctactcccctgctcgatgaaacgatctccgcctcagattacgaaacatcgctgctcaacgaccagcaaaataataccggcactgataccgactcagacgatgacttctatgacacacctcttttcgaggatgatgatcacgactcactgctcctcgacggagatgaccgtgactgcttgcaccctgaagactatgatacccttcaagaagagaatgacgaaaccgcgagccccgccgatgtgttttacgatgtgtccaaggagaatgagaattccatggtgccacaaggcgcccccgtgggtagtctcagcgtcaagaacaaggcccactgtcttcaggattttctcatggacgttgaaaaggacgagctggatagcggggaaaagatccacctgaaccccgttggcagcgacaaagtcaatggacagtccctcgagaccggcagcgaacgcgagtgtactaacattctcgagggcgatgagagtgactccctcacggattacgatattgtaggcggcaaagagtcattcactgcaagccttaaatttgacgacagcggaagctggagaggaagaaaggaggagtatgtgaccggccaagagtttcattccgacactgaccacctggactcaatgcagtcagaggagtcctatggggattatatctacgatagtaatgaccaggatgacgacgatgacgatgggattgatgaagaagggggaggcattagagatgagaacgggaagccacgctgccagaacgtcgccgaggatatggatatccagctctgcgcttctatcctgaacgagaactcggacgagaacgaaaacattaacacaatgatcttgctggataagatgcactcttgttcctcgctcgaaaaacagcagagggtgaatgtggtccagctggcctcccccagcgaaaacaatttggtaacagaaaagagtaatctcccagaatacacaacagagatagccgggaagtcaaaggagaacctccttaaccacgagatggttttgaaggacgtactgcctccaattataaaagacaccgagtctgagaagacctttggaccagcttcaatctcccacgataataataacatatcttccacctcagaactgggtaccgaccttgcaaacactaaggttaagctcattcaggggagcgagttgcccgaactgacggacagcgtgaaggggaaagatgagtatttcaagaatatgacgcccaaggtcgatagctccttggaccacataatttgcacagaacctgacctcatcggcaaacccgctgaagagtcccacctgtcattaatagctagcgtcacggataaagatccccaaggtaatggcagtgatctgatcaagggaagagacggaaagtcggacatcctcattgaggatgagaccagtatccaaaaaatgtacctgggagagggagaggtgttggtagaggggttggtggaggaagagaaccgccacttgaaacttcttcccggcaaaaacactagggattcatttaaactcataaactcacagtttcccttcccacagataaccaataacgaagagcttaaccagaagggtagtctgaaaaaggctactgtaaccttaaaggatgaacctaataacctccaaatcatcgtgagcaagtccccagtccaatttgagaacctggaggaaatcttcgacacatccgttagcaaagagattagtgacgatatcaccagtgatatcacaagttgggaaggcaatactcactttgaagaaagcttcactgatggccctgagaaggaactggacttgttcacgtatctcaaacattgcgccaaaaacatcaaggcgaaagacgttgcaaagccaaatgaggacgttccttcccacgtgcttatcaccgccccccccatgaaggagcatctccagttaggtgtcaacaacactaaggaaaagtcaacaagcacccaaaaggattccccattgaatgatatgatacagagcaatgacttgtgctccaaggaatcgatttcaggaggaggaaccgaaatatctcagtttacccccgaaagcattgaagccaccctcagcattttgtcacgaaaacatgtggaggacgtcgggaagaacgacttcctgcagtcggagaggtgcgccaatggcctgggtaatgataactcctcaaacacccttaatacagattattcttttctagagattaataataagaaggagagaattgaacagcagctgccaaaggagcaggccctgtcgcctagatcacaagagaaggaagtgcagataccagaactgagccaggtgtttgtagaagatgtaaaggatattctcaaatctcgtttgaaggagggccacatgaatccccaggaggtagaggagccatcggcctgtgcggataccaagatcctcatacaaaatctgattaagaggatcactacatcccagttagtcaacgaggcgagcaccgtgcccagcgattcccagatgtcagactcctccggtgtgagcccgatgactaattctagcgagctgaagcccgagtctcgcgatgacccattttgtattgggaacctcaagagcgagttgctactgaacattctgaagcaggatcagcactctcagaaaataactggcgtgtttgagctgatgcgggaactgactcatatggagtatgatttagaaaaacgggggatcacttcaaaagttttgccactgcagctcgagaatatattctacaagctacttgcagacggatatagtgaaaagattgagcacgttggagatttcaaccaaaaggcgtgctccactagcgaaatgatggaagagaaaccacatatcctaggtgatatcaaatccaaagaggggaattattactctccgaacctcgagaccgtcaaagagatcggcctggagtcaagcaccgtatgggcctcgactctgccacgcgatgaaaaactgaaggatctatgcaacgacttcccaagtcatctggagtgtacatcaggcagcaaggaaatggcatctggggactcctccacggagcagttcagtagcgaattgcagcagtgcttgcagcacacggagaaaatgcatgaatacctcacactcctccaagatatgaaacctcccctggacaaccaagaaagcctggataataacttggaagccctaaagaatcagcttcggcagctggagaccttcgaactggggcttgcacccattgctgtgattctgcgaaaagacatgaaactggccgaggagtttctgaagagcctgcctagtgacttccctcggggccacgtcgaagagctttccattagccaccagtctctgaagaccgccttttcttctctttccaacgtttccagtgagcggacaaaacagattatgcttgcaatagattcagaaatgagtaagctggctgtaagtcatgaggagttcctgcacaagttgaagagtttttcagattgggtctccgaaaagagcaagtccgtaaaagacatcgagattgttaatgttcaggactctgagtacgttaagaagcgcctagagttcctcaagaacgtcctgaaggacctgggccacacaaaaatgcagctggaaactactgcctttgacgtgcagttcttcatttcagagtacgcacaggacctgtctcccaaccaaagtaaacagctcctccgattgctcaacactacccagaaatgtttccttgacgtgcaggaaagtgtaacaacccaagtcgagcggttggagacccagctccatctcgagcaggatctggatgaccagaaaattgttgccgagagacagcaagaatacaaggaaaagctgcaaggcatttgtgacttgctgacgcagacagaaaatcggttgatcgggcaccaggaggcttttatgattggagacggcactgtcgagctcaagaaataccagagtaaacaggaggaactgcaaaaggacatgcaggggagcgcacaagcccttgccgaagtggttaaaaacactgaaaacttcctaaaggaaaacggcgaaaagctgagtcaggaggataaagccctgattgagcagaagctcaacgaagccaaaatcaaatgtgagcagttgaacctcaaagcagagcagagtaaaaaagaactggataaggtcgttaccactgccatcaaagaagagaccgaaaaggtcgccgctgtcaagcagctggaggagtcaaagaccaagatcgaaaacctgcttgattggctgagtaacgttgacaaggacagtgaaagggcagggacaaaacacaaacaggtcatcgagcagaacggtactcacttccaggaaggcgacggaaaaagtgcaatcggcgaggaggatgaggtgaacggcaacctacttgagaccgatgtggacggtcaggtggggacaactcaagaaaacctaaatcagcaataccaaaaagtgaaggcccagcatgaaaaaatcatatcccagcatcaggcggtaataatcgccacacagagtgcacaggtactgctggaaaaacagggccagtacctcagccccgaagagaaagagaagctgcagaaaaatatgaaggaattgaaggtgcattatgaaacagccctggcagagagcgaaaaaaaaatgaaactgacccacagcctccaggaagagcttgagaagtttgatgccgattacactgaattcgagcactggctgcagcagtctgagcaggaactcgagaacctcgaggctggggcagacgatattaacgggctgatgactaaactcaaacgccagaaatcattttcagaggatgtcatttcccacaagggcgaccttaggtacattaccatctctggcaatcgggtactggaagctgcgaagtcctgtagtaagagggatggggggaaggttgatactagcgccacacacagagaagtccaacgcaaacttgatcacgctaccgacagatttagatcgctgtatagcaaatgtaatgtactcggaaacaatctcaaagatctggtggacaaataccagcactacgaagacgcctcgtgtggactgctcgcaggattgcaggcctgtgaggctacggcatcaaagcatctatctgagcccatcgccgtagatcccaaaaatttgcagaggcagctcgaagagactaaggctctgcagggccagatctcatcacaacaggttgccgtggaaaagcttaaaaaaacagccgaggtgctgctcgacgcacggggttccttgctgcctgcaaagaacgatatccagaagacactcgatgatatcgtggggaggtatgaggatctgtcaaagtccgtcaatgaaaggaacgagaagcttcaaatcacactcacccggtcactcagcgtccaagacggcctcgatgagatgctcgattggatggggaatgtggagtcctccctgaaggaacaggatgtcggcaccgggtactgtaggagcagtgaacagtataagtgccatgagtag

SEQ ID NO: 304935 - DNA, 22386 bp, Artificial Sequence
  derived and/or modified sequence
atggctggatatctgtctcccgcagcctacctgtatgttgaggagcaggaatatctacaagcatatgaggacgtcttagaacgctataaggatgagagggacaaagtgcaaaagaaaacatttaccaagtggatcaaccagcacctgatgaaagtgcgaaagcatgttaacgatctgtacgaggatctccgggacggccataatcttattagcttgctggaagtcctgtccggagatactcttccgcgagaaaaaggtaggatgcgattccataggctgcagaatgttcagatcgcactggactacctcaagagacggcaggtgaagcttgtgaatataagaaacgacgacatcacagacggcaaccctaagctcaccttaggtctgatctggaccatcatcctacactttcagatctccgacattcacgtcaccggtgaatcagaggacatgagcgcgaaagagcggctactgttgtggacccagcaggctaccgaaggatacgctggcattcgctgcgagaactttaccacctgttggcgcgacggcaagctgttcaacgccatcatccataagtacagaccggatctgatcgacatgaacacggtggcggtgcagtctaaccttgccaacttggaacacgcattctatgtcgctgagaaaattggagtgatcagattactcgatccagaagatgtggacgttagcagccccgacgagaagagcgtgatcacctacgtctcatctctgtatgacgcctttcctaaggtccccgagggcggggaaggaatcggggccaacgacgtggaggttaagtggatagaatatcagaatatggtcaactacttaatacagtggatccggcaccatgtaaccacgatgagcgaaaggacatttccaaataaccctgtggagttgaaggccctgtacaaccaatatctgcagttcaaagagaccgagattccacccaaggaaactgaaaagtctaaaatcaaaagactgtacaagcttttagaaatctggattgagtttggacggataaaactgctacagggctatcatcccaacgacattgagaaagagtggggcaaactcatcattgctatgctggagcgagaaaaggctctgaggcctgaggtggagcgtcttgaaatgttgcaacagatcgctaacagggtacagagagattcagtgatctgtgaggataagctgattttagcagggaatgcactccaatccgactcgaagagacttgaatcaggagtccagttccagaatgaggctgagatcgccggatacatcttggagtgcgagaatctactcaggcagcatgtgatcgacgtgcagatccttatcgacggaaaatattaccaggccgatcagctggtgcaacgagtggccaagttgagggacgagatcatggctctgaggaacgagtgctcatcggtgtatagcaagggaagaattctgaccaccgagcagactaaactaatgattagtggcatcactcagtctctgaatagtggtttcgcgcagacactgcaccccagccttacatctggcctcactcaatccctaactccaagtcttacctctagctccatgacctcaggcctgtcctcagggatgacatcacgtctgacaccatctgtaacgcctgcgtatacacccgggttcccctccggcctcgtgccgaatttcagctccggggtggaaccaaatagtctccagaccctgaagctgatgcagatcaggaagccgttgctaaaaagctcacttctggaccagaatctcactgaggaggagatcaatatgaaatttgttcaagacctgttaaattgggtagatgaaatgcaggtgcagcttgacaggacagagtggggctctgatctgccttcagtagagtctcatctagaaaatcacaaaaatgtacacagagcaatagaggaatttgagagctcactgaaggaggctaaaataagcgagatccagatgacagcaccactgaagctgacatatgccgaaaaacttcaccgccttgagagccagtatgccaagctgctcaacacttctagaaaccaggagaggcaccttgacactctgcataatttcgtcagtcgagccactaatgaactgatttggctcaacgaaaaggaagaagaggaagtggcatatgattggagcgagcgtaacacaaacatcgcacgcaaaaaagattaccacgccgagctcatgcgtgaattagatcagaaagaagaaaatataaagtccgtgcaagaaatagccgagcagctgttactagagaaccaccctgctagactgaccattgaagcctaccgggccgccatgcagacccaatggtcatggattctgcagctgtgccagtgtgttgaacaacatatcaaagagaatactgcttacttcgaatttttcaacgatgctaaagaggctaccgattatctgcgcaatctcaaggacgccattcaaagaaaatacagctgcgaccggagctcgagcatacacaaactggaagatttagtgcaggaatccatggaggagaaggaggagttactccagtacaaatccactatcgctaaccttatggggaaagcgaagacgataatccagctcaagcctagaaattccgattgccctttgaaaacgtcaatccccatcaaggccatctgtgactatcgccaaatagagattacgatttacaaagacgatgagtgcgttcttgcaaataattcccatcgggcaaaatggaaagtcatctctcccaccggcaacgaagcgatggttcctagcgtctgtttcacagtcccacccccaaataaggaggccgtcgacttggctaacaggatcgagcagcagtatcagaacgttcttacgctgtggcacgagtctcatataaacatgaaatctgtggttagctggcactacttaatcaacgagattgatcgaatcagggcatctaacgtggcttccatcaagacgatgttgccaggcgaacaccagcaggtcttgtccaatctccaatcccgctttgaggacttcctggaagacagccaggagagccaggtgttctcaggctcggatataacccagctcgaaaaagaagtgaatgtctgtaagcagtattaccaggaactgctcaaaagcgccgaaagggaagagcaggaggaaagtgtttataatttgtatatttcagaagttcggaatatcagactgcggctggaaaactgtgaggacaggttgataaggcagatccgcacacccttggagcgcgacgatttgcatgaaagcgtctttcgaatcactgaacaagagaagctcaagaaagagcttgagcggctgaaggacgatcttggcaccattacaaacaagtgtgaagagtttttctctcaagctgctgcgtccagctctgtccctacccttcggtcggagctgaacgtggtgctccagaacatgaaccaggtgtactccatgtcaagtacatacatagataaactgaagaccgtcaatctggtcctcaaaaacacccaggcagcggaggccctggtgaaactttatgagaccaagctctgtgaagaggaggcagtgatcgcggacaaaaacaatatcgagaatttaatcagcacgctgaagcagtggagaagcgaggtggacgagaagcgccaagtgtttcacgccctggaggacgagctgcagaaagctaaagccataagtgatgagatgtttaaaacatataaagagcgggacctcgatttcgattggcataaagaaaaggccgaccaattggttgagaggtggcaaaacgttcacgttcagatcgacaataggttgcgcgacttggagggcatcgggaagtccttgaagtactatagagatacctaccaccctctggacgactggatccagcaggtcgagaccactcagcgcaagattcaggaaaaccagcccgagaattctaaaaccttggccacgcaacttaatcagcagaaaatgctggtctccgaaatcgaaatgaagcagtccaaaatggatgagtgtcaaaaatacgccgagcagtactccgcgactgtgaaagattacgagctccagacaatgacttatcgagctatggtggattcacagcagaagagccctgtaaaacgccgcagaatgcagtcctccgcagatttgatcatccaggaatttatggatttgcggactcgctataccgcactggtgacactcatgactcagtatattaagttcgcaggggatagcctgaaacgcttagaggaggaggagaagtctctggaagaggagaagaaggagcatgtggagaaagccaaggagctgcagaaatgggtgtcaaatatctcgaaaaccctcaaggacgccgagaaagctggcaagcccccgttctccaagcaaaaaatctcatcagaggaaatctccaccaaaaaggagcagctgagtgaagcccttcagactatccagctcttcttggccaaacatggagacaaaatgactgatgaagagaggaacgaactcgagaagcaagtcaaaacattgcaggagtcttacaatctacttttctcagagtctctaaaacagctgcaagagtcccagacaagcggggatgtcaaggttgaggagaagctggataaggtgattgcaggcacaatagaccagaccacaggcgaagttttgagtgtgtttcaggcggtgcttagaggattgattgactacgatacaggtattcgtctgctcgaaacccagttgatgatcagtggcctgatatcccccgaattacggaaatgcttcgacttaaaggacgcaaagtcacatggactgatcgacgagcagatcctgtgccagctaaaggaactctctaaggcgaaagagatcattagtgcagcctcgcccaccacgatcccagtgctggacgctctggcacagtctatgatcaccgaatctatggctattaaagttctagaaatcctcctaagcacaggttcactcgtgatacctgcgaccggcgaacagctgacactccagaaggccttccagcagaacctcgtttcctcagcattgtttagcaaagtgctggaacgccagaacatgtgcaaagaccttattgacccctgcacaagcgaaaaagtatcactaatcgatatggtccagaggagtaccctgcaggaaaataccggaatgtggttactgcccgtcagaccacaggagggaggacgtattactctgaagtgcggaagaaacattagcatactgagagcagcacacgagggcttaattgacagagaaacaatgttcagacttcttagcgcccagttgctttctgggggactaattaattctaattcgggccagaggatgacagtggaagaggctgtcagggagggcgtaatagaccgagacacagctagttccatcctcacgtatcaggtgcagacaggcgggataattcagagcaatccagccaagcggttgactgttgatgaagcggtgcagtgtgacctgataactagttctagtgcgttactggttctggaggcccaaaggggctacgtcgggcttatctggcctcactccggcgagatcttcccgacatcttcgagtctccagcaggaactgatcacaaatgagctagcctacaagatactgaatggtaggcagaaaatcgcagccctctatattcctgaaagctcccaagtgatcggactggacgcagcaaagcagctgggcattatagataacaataccgccagcatcctgaagaatattactttgcctgataagatgccagatctgggggatctggaggcctgtaagaatgcccgaagatggctcagcttctgcaagttccaaccgtcaaccgttcacgattaccgacaggaggaggatgtttttgacggtgaggagcctgtaactacccagaccagtgaagagacaaaaaagctttttctgtcttacctgatgataaatagctatatggacgccaacacgggccagcggctgctgttgtacgatggagacctggatgaagctgtaggtatgctccttgaaggatgccacgccgagtttgacggaaataccgcaattaaagagtgccttgatgtgctctctagtagcggagtgttcctgaataatgcctctgggcgtgaaaaagacgaatgcacggccacgcctagcagtttcaataaatgccattgtggtgaaccagaacatgaggagacacctgagaatcggaagtgcgccatcgacgaagagtttaatgagatgaggaataccgttattaattccgagttcagccagtcgggaaaactcgcaagcacgatcagcatcgatcctaaggtaaactcctcaccatccgtgtgcgtgccatccctgataagctacctgacccagaccgaactcgcagatattagcatgctgagatccgactcagagaatattctcaccaattatgaaaaccagtccagagtagagactaatgaacgagccaatgagtgcagccactccaagaacattcagaacttcccatccgatctgatcgagaatcctattatgaaaagcaagatgtctaagttttgtggagttaacgagacggagaacgaggataatactaatagggactcccctatttttgactactctccccgcctgagtgccctcctgtcccatgacaagttgatgcattctcaaggctccttcaacgacacacacacccccgagtcaaatggaaacaagtgcgaggctcccgccctgtctttcagcgacaaaacaatgctatctggtcagcgaatcggcgagaaatttcaagaccaattcctgggcatcgccgctatcaacatctctctgccgggcgaacaatacgggcagaagagtctgaacatgatatcctctaacccgcaggttcagtatcacaacgacaagtacataagtaatacgtcaggcgaagacgagaagacacatccagggttccagcagatgccagaggataaagaggatgagagcgagatcgaggaatacagttgtgcagttacacccggcggagataccgataacgccattgtgtctttgacctgtgctactcccttactggatgaaaccatttctgcaagtgactacgagaccagccttttaaacgatcaacaaaacaatacaggaactgacacggacagtgacgatgatttttatgacacgcctttattcgaggatgacgaccatgattcccttctgttggacggggacgaccgggattgtctgcacccggaagactacgatacgctgcaagaggagaatgacgaaaccgcctcaccggcagacgttttctacgacgtgtctaaggaaaatgaaaacagcatggtgcctcaaggcgcaccagttgggtcattgtcggtgaaaaacaaggcacactgcctacaagactttctaatggatgtcgaaaaagatgaactggatagtggggaaaagattcacttgaatccggttggatcagacaaggtaaatggacagtctctggagaccgggagcgaaagagagtgcactaacatcctagaaggcgatgagtcagattccctgactgactacgatatcgtgggtggtaaggagtctttcactgcttctttaaagtttgacgacagcggttcatggagaggacggaaggaagaatatgttaccggccaggaatttcacagtgatacagaccacctagattcaatgcagagcgaggagtcctacggcgattatatttatgattcaaacgatcaggacgatgatgatgatgacggcatagacgaggaaggaggaggcattcgggacgagaatgggaagccaagatgtcagaacgtcgcagaggatatggacatccaattgtgtgcttccattctaaacgaaaactcagatgagaatgagaatatcaacacgatgatccttctagataaaatgcattcgtgctccagcttggaaaaacaacagcgcgtaaatgttgttcagttggctagcccatcagaaaataacctggtcacagagaaaagtaacctgcccgaatacaccaccgagatagccggaaaatccaaggagaacttgctgaaccatgagatggtgcttaaggatgtcttacctcccatcatcaaggacacggaatccgaaaagactttcggacccgctagtatcagccatgacaacaacaatattagttcaacttccgagctggggactgatctagctaatactaaggtgaagttaatccagggcagtgaattgccggagctgaccgattcagtgaaaggtaaagacgagtactttaagaacatgaccccgaaagtcgacagtagcctggatcacataatctgcacggaacctgatctgattggcaaacctgcagaggaaagccacctaagtctgatcgcctctgtgaccgataaggatcctcaggggaacgggagcgacctgatcaaggggcgagacgggaagtcagatatcctgatagaagacgagacctctattcagaagatgtacttgggcgagggggaagttctggtagaagggctagttgaagaggaaaacagacatcttaaactgctccccgggaagaacactcgggattcattcaagcttatcaacagtcagttcccctttccacagattaccaataacgaggagctgaatcagaagggttctctaaaaaaggccactgtgaccctgaaagacgagccaaacaatcttcaaattatcgtaagcaagtcccccgtccaatttgagaacctagaggagattttcgacactagtgtgagcaaagaaatctcggatgacattacgtcggatatcacctcctgggaaggtaatactcatttcgaggaatccttcaccgacggccctgaaaaggaacttgacctgttcacttacctcaagcattgtgcaaagaacatcaaagctaaggacgtggccaagccgaatgaggatgtgccttctcatgtgttgattaccgcaccgccgatgaaagagcatttgcagctcggtgtcaacaacactaaagagaaaagcacatcaacccaaaaagatagcccactgaacgatatgatccaatccaatgacctatgtagcaaggaaagcatttccgggggcggcacagagatttctcagttcacaccagaatctatcgaagcaaccctgagcattttgagtaggaagcatgtggaagacgtgggaaagaacgacttcctacagtcagagagatgtgccaatgggctgggtaacgataactcaagtaacacacttaacacagactacagctttctcgaaatcaacaacaagaaggagcgcatcgaacagcaacttcccaaggagcaggctctgtctcctagatctcaagagaaagaagttcagatcccagaactcagtcaggtgtttgtagaggacgtgaaggatattcttaaaagtagacttaaagagggccatatgaaccctcaggaggtggaagagccctcagcttgtgccgacaccaagattctgatccagaacttgatcaaaaggattaccacaagtcagctggtgaacgaggcctcaactgtgccaagcgattcacagatgtctgactcatcaggcgtcagtccaatgaccaatagctcagaactgaagcccgaatcaagagatgacccattctgcattggcaatctgaagagcgagctgctattaaatattttaaagcaggatcaacatagtcagaaaataacaggagttttcgagcttatgcgtgagcttacacacatggagtatgacctcgaaaaaaggggcattacttcgaaagtcttaccactgcagctcgaaaacatattttacaagctcctggcagatggctattcagaaaagattgagcatgtaggcgatttcaatcagaaagcctgctccacttccgaaatgatggaggagaaaccccacatcctgggtgacatcaagagtaaagaaggcaattactattctcccaacctggaaacagtgaaggagattggactagagtcatccacggtttgggcctccactctaccccgggatgaaaaattgaaggatctgtgcaatgattttccgtcccacctggaatgtacaagcggtagcaaggagatggcctcgggggactcaagtacagagcagttctctagcgagctgcaacaatgtttgcagcacactgaaaaaatgcacgagtacctcacactgctgcaggacatgaagcctcccctggacaatcaggaatcattggacaacaatctggaggccctcaaaaatcagctccgacagctcgaaaccttcgagcttggcttagctcctattgcagtaattctgcgcaaggacatgaagctcgcagaggaattcttgaaatcactaccaagtgattttccccgcggacatgtggaggaattgtccatctcacatcagagtctgaagactgctttttcatccttgtccaatgttagttctgagaggaccaagcagattatgttggccatcgactcggaaatgtccaagctggcagtttctcacgaggagtttctccacaagctgaaatcgtttagcgactgggtatccgagaagtcaaaatcagtgaaggatatagaaatcgttaatgttcaggacagtgagtatgtgaagaagcgactcgagtttctgaagaacgtgctgaaagacctgggtcacacaaaaatgcaactagaaactactgcttttgacgtgcagttctttatctctgaatacgctcaggacttatcccctaatcagagcaagcagctcttgcgactgctgaatactacccagaagtgctttctggatgtgcaggaatctgtgactactcaggtggagagattggaaactcagcttcaccttgagcaggatctggatgaccagaaaattgtggccgaaaggcagcaggaatataaagaaaagctccagggcatctgcgaccttctgacacaaactgaaaaccgtctgatcgggcatcaggaagccttcatgattggggacgggactgtcgagctgaaaaagtaccaatccaagcaggaggagttacaaaaggatatgcaaggtagcgcacaggccctcgccgaagtggtcaaaaatacagaaaacttcctcaaagaaaacggggagaagctctctcaggaggataaggcactaatcgaacagaagcttaatgaagccaaaattaaatgcgagcagctgaacttgaaagcagaacaatctaagaaggagttggacaaagtcgtcacaaccgccatcaaagaggagacagagaaggtggccgccgtcaagcagctcgaggaaagtaagacgaagattgagaacctactggactggctatctaacgtagataaggatagtgagagagctgggacgaagcataaacaggtgatcgaacagaacgggactcacttccaagagggagacggaaagagcgcaatcggagaagaagacgaggttaacggcaaccttttagagaccgacgtggatgggcaagtgggaaccactcaggagaatctaaaccagcagtaccagaaagttaaggcccagcacgagaaaattatttcacagcaccaggctgtgatcattgcaacgcaaagcgcccaggttctgttggagaagcagggacagtatctgtcacccgaagagaaggagaagctgcagaagaacatgaaagaactaaaggtgcattatgaaacagcactggcagaatcggagaagaagatgaagctgacacacagcctgcaggaggaactggaaaaatttgatgcagattatacagagtttgaacactggctccagcagtccgagcaggagcttgaaaaccttgaggccggcgcggatgacatcaacggcctcatgaccaaactcaagagacagaaatctttctccgaggacgtcatcagccacaagggcgatttacgctatattaccatctcaggaaatcgggtgctggaggccgccaagagttgtagcaaacgtgacgggggtaaggtggacacaagcgccacgcaccgcgaggtccagcgcaagctcgaccacgccaccgacaggtttaggtctctgtactcaaagtgcaatgttctcggcaacaacctcaaggacctggtggacaaatatcagcactatgaagatgccagttgcggtctgctagccggcctccaagcctgtgaggcaacagcgtccaaacatctatcagagccaatcgcagttgatcccaagaacctgcagcggcagcttgaggagaccaaggctttacagggacagatcagttctcagcaggtggcagttgagaaacttaagaaaacagctgaggttctcttggatgccaggggttcgttgttaccagcgaagaatgatattcagaaaacccttgatgacatagtgggccggtacgaggatttaagcaagtccgtgaatgagcgcaacgaaaagctccagatcaccctcactcggtctctctctgtccaggacggccttgatgagatgttggattggatgggcaacgttgagagcagccttaaagagcaagggcaggtccctctcaatagcaccgcgctgcaagatattatctccaaaaatatcatgctcgagcaggatatagcgggccgtcagagttctattaacgcaatgaacgaaaaagtcaaaaaatttatggagactacagatcccagtactgcctcttctctccaggcgaaaatgaaagatctatccgccaggttttcagaggccagtcacaagcacaaagagaccctggctaagatggaggagttaaagaccaaggtcgagctttttgaaaatctcagcgaaaagctacagacatttttggagactaagacccaggccctcacagaagtcgacgtgcctggtaaggatgtgactgaactgtctcaatatatgcaggaaagtacctccgagttcctcgagcataaaaagcatctggaggtgctgcattctctgctaaaagaaatctcaagccacggattacccagcgacaaggcactggtcttagagaagacaaacaacctctctaagaaattcaaggagatggaagacactatcaaagaaaaaaaggaggccgtcacttcttgtcaggaacagctggatgcttttcaagtgttagtgaagagcctgaagagctggatcaaagagaccaccaagaaggtgccaattgtccagccaagtttcggcgccgaggacctaggcaagtctctggaagacacaaagaagctgcaggagaagtggtctctgaaaacacccgaaatccagaaagtcaataatagtggaatttccttgtgtaacctgatctccgcagttactaccccagcaaaggccatcgcagctgtgaaaagcggcggtgctgtgttgaacggagagggaacagcgactaacaccgaagaattctgggccaataaaggactgaccagtatcaagaaggatatgaccgacattagccacgggtacgaggacctgggcctgttgctgaaggataagatagcagaactgaacactaagctctccaagctccagaaggcgcaggaggaatctagcgccatgatgcagtggctccaaaaaatgaataagacagctaccaagtggcagcagactcctgcccctactgacaccgaggcagttaaaacacaagtggagcagaacaagtctttcgaagctgaactgaagcaaaatgttaacaaagtgcaagagctcaaagacaagctgacagagctgctggaagaaaacccggatacaccagaagcccctcgttggaagcaaatgttaactgagattgattctaaatggcaggaactaaatcagctgacaattgatcggcagcagaagctagaggagtcaagcaacaaccttactcagttccagacagtagaggcgcagcttaaacagtggttagtggaaaaagagttgatggtgagtgtactggggccactctcaatcgatcctaatatgctcaatacacagagacagcaggtgcagatcctcttacaagagttcgccaccagaaaacctcagtacgaacaactgacagctgctggtcaggggatactttctagaccaggagaggatccctcgctgcggggaatcgtcaaggagcagttggccgccgttacacaaaaatgggattcactgaccggccagctctctgaccggtgcgattggattgatcaagccattgtgaaatccacccaataccagtccctgttgcgcagcctgagtgacaagctatctgatctcgataataagctgagctcctcactggcggttagcacccacccagacgcgatgaatcagcagctggagaccgctcaaaagatgaaacaagagattcaacaggagaaaaaacagatcaaggtggctcaagccttatgcgaggacctgtccgcccttgtgaaggaggaatatctgaaggctgagttgagccggcagcttgaaggaattctgaagagctttaaggatgtcgaacagaaggccgaaaaccacgtgcaacacctgcaatccgcctgcgcctctagtcaccagttccaacagatgagccgtgatttccaggcatggctggacaccaaaaaagaggagcagaataagagtcaccccataagtgccaaacttgacgtgctggaatcactgataaaggatcataaggacttcagcaagaccctcactgcccaatcccacatgtacgaaaaaactatagctgaaggagaaaatctcctcctcaagacgcaggggagcgaaaaggccgcccttcagttgcagctgaacactatcaagaccaactgggatacttttaacaaacaggtcaaggaacgagaaaacaagctgaaagagtcgctggagaaagctctaaagtataaggaacaggtggagacgctatggccctggatcgataagtgccagaataaccttgaagagattaagttctgcttggacccagccgaaggtgaaaattccattgctaagctgaaaagccttcagaaggagatggaccagcactttggcatggtcgaacttctcaacaacactgccaacagcttactgtctgtgtgcgagatagacaaggaagtcgtcaccgacgagaataagtccctgattcaaaaagtcgatatggtgaccgaacagctgcatagcaagaagttttgtctcgaaaacatgacccagaaatttaaagaattccaggaggttagcaaggagtccaaacgacagttgcagtgtgccaaggaacagctggacatccacgactccctggggtcccaggcttactcaaataaatacctgacgatgctccaaacgcaacagaagtcactgcaagccttaaagcaccaggtggaccttgcaaagagactggctcaggacctggtggtcgaggctagcgatagcaaagggactagcgatgtattgctacaggtcgaaacgatagctcaggagcactccactcttagccagcaggttgatgaaaagtgttcgtttctggagaccaagttacagggtatcggacactttcagaataccatacgcgaaatgttctcccaattcgctgagttcgacgatgagctcgactctatggccccagtaggacgcgatgctgagactcttcagaagcagaaggaaacgatcaaagcatttttgaaaaagcttgaagcattaatggcaagcaacgacaatgccaataagacctgcaaaatgatgctagccacagaggagacttctcccgacctggtgggcatcaaaagagacctggaggcattatcaaaacagtgcaataagttactcgaccgggcgcaggcacgggaggagcaggtggagggcaccatcaaaaggctggaggagttttactccaaactaaaggagttctccatcctgcttcagaaggcggaggaacacgaagagagccaaggacctgtaggcatggaaaccgagacaatcaaccaacaactaaacatgttcaaggtgttccagaaagaggagatcgaacctctacagggcaagcaacaggacgtgaattggctgggtcagggcctgatccaaagcgcagcaaaaagcacttcaacgcaaggcctcgagcatgacctggacgacgtgaatgccagatggaaaacacttaacaaaaaggttgcccagcgagcggcccagttgcaggaggctttactccactgtggccggttccaggacgccctggagagcctcctcagctggatggttgatacagaagaactcgtagccaaccagaagcctccctcagctgaattcaaagtagttaaggcacagatccaggagcagaagctcttacagaggctgttggatgaccggaaaagtacagttgaggtgatcaaaagggagggcgaaaagattgcgacgaccgcagaaccggccgataaggtgaaaattttaaagcagctgtctcttttggattcacgctgggaggcactgttgaacaaggcagagactaggaatagacagcttgaggggattagtgtggtggcacagcagtttcatgagactttagaacccctgaacgagtggttaacaactattgaaaagcggctagttaactgtgaacccatcggaacccaagcctcaaaactggaagaacagatcgcccaacacaaggtgttgcaagaggatatacttctgaggaaacagaatgttgatcaggcactgctgaacggactggagctcttaaagcaaacaacaggtgatgaggtgttgatcatccaggataaacttgaggccattaaggctagatacaaggatattactaaattaagcactgatgttgccaaaacccttgagcaggccctgcagttggcacgccgtctccatagtactcacgaggagctgtgtacctggttggataaagtggaggttgaactcctatcctacgaaactcaggtcctgaaaggcgaagaggcctctcaggcgcagatgcgacctaaagagctgaaaaaagaagcgaaaaataataaggccctcctggattctctcaacgaagtgtccagtgctctgctggagctcgtcccctggcgggcccgagagggactggagaaaatggtcgcggaagataacgagagatatcgccttgtgtcagacactatcactcagaaggttgaagagatcgacgccgcaatcctcagaagtcagcagttcgaccaagcggccgatgctgaactctcttggattactgaaaccgagaaaaagcttatgtcactgggggatatcagactggagcaggaccagacttctgcacagctccaggttcaaaagacatttaccatggagattctgaggcataaagacatcattgatgacctggtcaagtccggtcacaaaattatgaccgcttgtagcgaggaggaaaagcaatccatgaagaaaaagctcgataaagtgcttaaaaactatgacactatctgccagattaactctgagagatacttacaactggaacgcgcacagtcattagtcaaccagttttgggagacgtatgaggaactgtggccatggttgacagagacgcagtcaataatttctcaactgcctgcaccggcattggagtacgaaactctgcggcaacagcaggaggaacatagacagctccgcgaacttattgcagagcacaaaccacacattgacaagatgaataagaccggaccacaactcctcgaactgtcccccggtgaaggtttcagtatacaggaaaagtatgttgcagccgacacgctctattcacaaatcaaggaagatgtcaagaagcgagccgttgccctggacgaagccatctctcagagtacccaattccatgacaaaatcgaccagatcttggagtcgttagaaagaatcgtcgagcgactgagacagcccccgagcatatctgctgaagtcgaaaaaataaaagaacagattagtgaaaataagaacgtctccgtcgacatggagaagctgcagcctctatacgaaacactgaaacagaggggtgaggagatgattgctcgttctggcggaaccgacaaggatatcagcgctaaggccgtgcaggacaagctggaccaaatggtgttcatctgggagaatatacacactttggtcgaggagcgcgaggcaaagctgttagacgttatggagctggccgaaaaattctggtgcgatcacatgtcacttattgtaactatcaaggatacccaagacttcatacgcgacctcgaggaccctggaattgacccctcagttgtcaaacaacagcaagaggcagctgaaaccattagggaagaaatcgatggtctacaggaagagctggacattgtaatcaatctgggctccgaactgattgcagcctgtggcgaacccgataaaccgatcgtgaagaaaagcattgatgagctcaattctgcatgggattcacttaataaagcctggaaggatcgaattgataagcttgaggaggcgatgcaagcggctgtccaataccaagatggactccaagccgtgtttgattgggtggacatcgctggggggaaattagcatcaatgagccccatcggaaccgacttagaaaccgtgaagcagcaaatagaagagctgaaacagtttaaatctgaggcttaccagcagcagattgaaatggaaaggctgaaccaccaagccgagctgcttctcaaaaaagtcacagaggagtcagataagcacacagtgcaggatcctctgatggagttgaagctgatctgggacagtctggaagagcggatcattaaccggcagcacaaactggaaggagcactgctggcattgggacagttccagcacgccctggacgagctgcttgcctggctcacccatacagagggtcttttatcagaacagaagcccgtcggcggagatccaaaggcgattgaaatcgaattggcaaaacatcatgtactgcagaacgacgtacttgcccatcaaagtacagttgaggccgtgaataaggctggcaacgacctcatcgaaagttccgccggcgaggaggcttctaacctgcagaacaagttagaagtgcttaaccaacgatggcaaaatgttctcgaaaaaacagaacaaagaaagcaacagctggatggcgctctgcggcaggctaagggattccacggtgagattgaagacctgcagcaatggttaactgacacagaacgacacctcctggcttcgaaaccactcggcggactgcctgagaccgccaaagagcagttgaacgtgcacatggaagtgtgcgctgctttcgaggccaaagaggagacctataagtctctcatgcagaaaggccagcagatgctcgccaggtgtccaaagtcggcagagaccaacattgatcaggacatcaataatttaaaagagaagtgggaatccgtcgaaactaagctcaatgaaagaaagacaaaacttgaagaggctctcaatcttgccatggaattccataattctctgcaagacttcatcaactggctgacccaggcagagcagaccttgaacgtagcaagtaggcccagtcttattctggacacagtgctttttcagatagacgagcacaaggtctttgctaacgaggtgaattctcaccgcgagcagataattgaactcgacaagacaggcacacacctaaagtattttagtcagaagcaggatgtggttctcataaaaaatctactgatctctgtccagtcccgctgggagaaggtggttcagagattagtcgaacgcggcagatcgctcgacgatgcccgcaagcgtgcaaagcaattccacgaagcatggtcgaagttgatggagtggcttgaggaatctgagaagtcgctggatagcgaactcgagattgcaaacgaccctgacaaaatcaagacccaactggcccagcacaaggagtttcagaagagtctcggagcgaagcattctgtctacgacaccaccaatcgcaccggtagaagtctgaaggagaagacttcattggctgacgataacctgaagctggacgatatgctcagcgagttacgcgataaatgggacactatctgcggcaaatcagtggaacgacagaacaaactggaggaggctctacttttcagtggacagttcaccgatgccctacaagcactcatcgactggctgtaccgggtggaaccccagctggcggaggaccagcctgtgcacggtgacatagacttggttatgaacctgattgataatcataaagcgttccagaaggagctggggaagcgtaccagcagcgtccaggcactgaaacgctcggcaagggagctcatagagggatcacgtgacgatagctcctgggtgaaggtgcaaatgcaagagctgtccacacgatgggagactgtttgcgcactgagtatctctaaacaaaccaggcttgaggcagcactcaggcaggccgaggagttccacagtgtggtccacgcccttcttgaatggcttgccgaggccgagcagaccctccgatttcacggtgttctccctgacgacgaggacgcgctgcggacactcatagaccagcacaaggaattcatgaaaaagctcgaggagaaaagagccgagctcaataaagcaaccactatgggcgataccgtgctggccatttgtcaccccgacagcattacaaccattaagcactggatcactattattcgggcaagattcgaagaggtcctagcttgggctaaacagcaccagcagaggttagccagcgcgttagccggactgattgcgaagcaggagctgttggaggctttgttagcgtggttgcagtgggccgaaacaactttgaccgataaggataaagaagtgatcccacaggagatcgaggaagtgaaggccctgattgccgaacaccagacttttatggaagagatgacacgcaagcaacctgacgttgacaaagtgaccaaaacctacaagcgcagagcggctgacccaagctctctgcagagccacataccagtcctggataaaggcagagcgggaagaaagcgtttccctgcgagtagtttatacccgagcggctctcaaactcaaatcgagacaaagaaccccagggtgaatctcctggtttccaagtggcaacaagtgtggttactggctcttgagaggagaaggaaacttaacgacgctcttgatcggctggaagagctgagagagttcgcaaactttgatttcgacatttggcgaaaaaagtacatgcgctggatgaatcacaaaaagtcacgcgtgatggatttctttcgacgcatcgacaaggaccaagacggaaaaatcaccaggcaggaatttatcgatggaatccttagctccaaatttcctaccagtcgcctggaaatgagtgccgtcgccgacatcttcgacagagacggggacggctatattgattattacgaattcgtggctgctctccaccccaataaggatgcctataaacccatcactgatgccgacaagattgaggatgaagtgacacgccaggtggcaaagtgtaaatgtgcgaagcggtttcaggtggagcagatcggtgataataaataccgcttcttccttggcaatcagttcggcgactcgcaacagttacgattagtgaggattctgagatccaccgtgatggtgagagttgggggcggatggatggcgcttgacgaatttctcgttaagaacgacccatgcagagtgcatcatcatgggtccaagatgctgcggtcagagtcaaatagctctatcacaaccactcagccaactattgcgaagggaagaactaatatggaactacgggagaagttcattctggcggacggtgcttctcagggtatggccgcatttagacccagggggagacgatctcgcccaagttcccgtggagccagtccaaatcgctccacaagcgtgtcatcacaggcggcccaggcagcatcaccccaagttcctgcaactactacgcctaaaggtacgcctatccagggttccaagctgagacttcctgggtacctaagtgggaagggatttcattcgggcgaggatagcgggcttattactacagccgctgcccgggtacgaacccaattcgctgactccaaaaaaaccccttcaagaccagggtctagagcgggatccaaagcaggctcccgtgcttccagcagacgtggctcggatgcgtccgatttcgacattagcgaaattcagtcagtttgcagtgacgttgaaaccgtccctcaaacacataggcccacccccagagctggctcgcggccctcaacagcaaaaccctctaaaatccctactccacagcgcaagtcccctgcgtcaaaacttgacaaaagcagcaagaggtag

SEQ ID NO: 304936 - DNA, 12603 bp, Artificial Sequence
  derived and/or modified sequence
atggccggctacctgagccctgctgcctacctgtatgtggaggagcaggagtacctgcaggcctatgaagatgtgctggagcgctacaaggatgagcgggacaaggtgcagaagaagaccttcaccaagtggatcaaccagcacctgatgaaggtgaggaagcacgtgaatgacctgtatgaggacctgagagatggccacaacctgatcagcctgctggaggtgctgagcggggacaccctgccccgggagaagggccgcatgaggttccaccggctgcagaatgtgcagatcgccctggactacctgaagaggcggcaggtgaagctggtgaacatcagaaatgatgacatcacagatggcaaccccaagctgaccctgggcctcatctggaccatcatcctgcacttccagatcagtgacatccacgtgactggagagagcgaggacatgtctgccaaggagcggctgctgctgtggacccagcaggccacagagggctacgccggcatccgctgtgagaacttcaccacctgctggagagatggcaagctgttcaatgccatcatccacaagtacagaccagacctgattgacatgaacacagtggccgtgcagagcaacctggccaacctggagcacgccttctacgtggccgagaagattggagtcatccggctgctggaccctgaagatgtggatgtgagcagcccagatgagaagagcgtcatcacctacgtgagcagcctgtatgatgccttccccaaggtgcctgagggcggggagggcatcggggccaatgatgtggaggtgaagtggattgagtaccagaacatggtgaactacctgatccagtggatccgccaccacgtgaccaccatgtctgagaggaccttccccaacaaccctgtggagctgaaggccctgtacaaccagtacctgcagttcaaggagacagagatcccccccaaggagacagagaagagcaagatcaagaggctgtacaagctgctggagatctggattgaatttggccgcatcaagctgctgcagggctaccaccccaatgacatcgagaaggagtggggcaagctgatcatcgccatgctggagcgggagaaggccctgcggcctgaggtggagcggctggagatgctgcagcagatcgccaacagagtgcagagggacagcgtcatctgtgaggacaagctgatcctggccggaaatgccctgcagagcgacagcaagaggctggagagcggcgtgcagttccagaatgaggccgagattgctggctacatcctggagtgtgagaacctgctgcggcagcacgtgattgatgtgcagatcctgattgatggcaagtactaccaggccgaccagctggtgcagagggtggccaagctgagagatgagatcatggccctgagaaatgaatgttcttctgtgtacagcaagggccgcatcctgaccacagagcagaccaagctgatgatcagcggcatcacccagagcctgaacagcggctttgcccagaccctgcaccccagcctgaccagcggcctgacccagagcctgacccccagcctgaccagcagctccatgaccagcggcctgagcagcggcatgaccagccggctgacccccagcgtgaccccagcctacaccccaggcttccccagcggcctggtgcccaacttcagcagtggagtggagcccaacagcctgcagaccctgaagctgatgcagatcaggaagcccctgctgaagagcagcctgctggaccagaacctgacagaggaggagatcaacatgaagtttgtgcaggacctgctgaactgggtggatgagatgcaggtgcagctggacagaacagagtggggcagtgacctgcccagcgtggagagccacctggagaaccacaagaatgtgcaccgggccatcgaggagtttgagagcagcctgaaggaggccaagatcagcgagatccagatgacagcccccctgaagctgacctacgccgagaagctgcaccggctggagagccagtatgccaagctgctgaacaccagcaggaaccaggagcggcacctggacaccctgcacaactttgtgtcccgggccaccaatgagctgatctggctgaatgagaaggaggaggaggaggtggcctatgactggagcgagaggaacaccaacatcgccaggaagaaggactaccacgccgagctgatgagggagctggaccagaaggaggagaacatcaagtctgtgcaggagattgctgagcagctgctgctggagaaccacccagcccggctgaccatcgaggcctacagagctgccatgcagacccagtggagctggatcctgcagctgtgccagtgtgtggagcagcacatcaaggaaaatacagcctactttgagttcttcaatgatgccaaggaggccacagactacctgaggaacctgaaggatgccatccagaggaagtacagctgtgacaggagcagcagcatccacaagctggaggacctggtgcaggagagcatggaggagaaggaggagctgctgcagtacaagagcaccatcgccaacctgatgggcaaggccaagaccatcatccagctgaagcccaggaacagcgactgccccctgaagaccagcatccccatcaaggccatctgtgactaccggcagatcgagatcaccatctacaaggatgatgaatgtgtgctggccaacaacagccaccgggccaagtggaaggtgatcagccccactggaaatgaggccatggtgcccagcgtgtgcttcaccgtgcccccacccaacaaggaggccgtggacctggccaacagaattgagcagcagtaccagaatgtgctgaccctgtggcatgagagccacatcaacatgaagtctgtggtgtcctggcactacctgatcaatgaaattgaccgcatccgggccagcaatgtggccagcatcaagaccatgctgcccggggagcaccagcaggtgctgagcaacctgcagagcagatttgaggacttcctggaggacagccaggagagccaggtgttcagcggcagtgacatcacccagctggagaaggaggtgaatgtgtgcaagcagtactaccaggagctgctgaagtctgctgagcgggaggagcaggaggagagcgtgtacaacctgtacatcagcgaggtgaggaacatccggctgcggctggagaactgtgaagatagactcatccggcagatccgcacccccctggagagagatgacctgcacgagagcgtcttccgcatcacagagcaggagaagctgaagaaggagctggagcggctgaaggatgacctgggcaccatcaccaacaagtgtgaggagttcttcagccaggccgccgccagcagctctgtgcccaccctgcggtctgagctgaatgtggtgctgcagaacatgaaccaggtgtacagcatgagcagcacctacatcgacaagctgaagacagtgaacctggtgctgaagaacacccaggccgctgaggccctggtgaagctgtatgagaccaagctgtgtgaggaggaggccgtgattgctgacaagaacaacattgaaaatctcatcagcaccctgaagcagtggaggtctgaggtggatgagaagaggcaggtgttccacgccctggaggatgagctgcagaaggccaaggccatcagtgatgagatgttcaagacctacaaggagcgggacctggactttgactggcacaaggagaaggctgaccagctggtggagcgctggcagaatgtgcacgtgcagattgacaaccggctgcgggacctggagggcatcggcaagagcctgaagtactacagagacacctaccaccccctggatgactggatccagcaggtggagaccacccagaggaagatccaggagaaccagcctgagaacagcaagaccctggccacccagctgaaccagcagaagatgctggtgtctgaaattgagatgaagcagagcaagatggatgagtgccagaagtatgcagagcagtacagcgccaccgtgaaggactatgagctgcagaccatgacctaccgggccatggtggacagccagcagaagagccctgtgaagagaagaaggatgcagagcagcgctgacctgatcatccaggagttcatggacctgcggacccgctacacagccctggtgaccctgatgacccagtacatcaagtttgctggggacagcctgaagaggctggaggaggaggagaagagcctggaggaggagaagaaggagcacgtggagaaggccaaggagctgcagaagtgggtgagcaacatcagcaagaccctgaaggatgctgagaaggccggcaagccacccttcagcaagcagaagatcagcagcgaggagatcagcaccaagaaggagcagctgtctgaggccctgcagaccatccagctgttcctggccaagcacggggacaagatgacagatgaggagagaaatgagctggagaagcaggtgaagaccctgcaggagagctacaacctgctcttcagcgagagcctgaagcagctgcaggagagccagaccagcggagatgtgaaggtggaggagaagctggacaaggtgattgctggcaccatcgaccagaccactggagaggtgctgagcgtcttccaggccgtgctgcggggcctgattgattatgacaccggcatccggctgctggagacccagctgatgatcagcggcctcatcagccctgagctgaggaaatgttttgacctgaaggatgccaagagccacggcctgattgatgagcagatcctgtgccagctgaaggagctgagcaaggccaaggagatcatctctgctgccagccccaccaccatccctgtgctggatgccctggcccagagcatgatcacagagagcatggccatcaaggtgctggagatcctgctgagcacaggcagcctggtgatcccagccaccggggagcagctgaccctgcagaaggccttccagcagaacctggtgtcctctgccctcttcagcaaggtgctggagcggcagaacatgtgcaaggacctgattgacccctgcaccagcgagaaggtgtccctgattgacatggtgcagaggagcaccctgcaggagaacacaggcatgtggctgctgcctgtgcggccccaggagggcggccgcatcaccctgaagtgtggcaggaacatcagcatcctgcgggccgcccacgagggcctgattgaccgggagaccatgttccggctgctgagcgcccagctgctgagcggcggcctcatcaacagcaacagcggccagaggatgacagtggaggaggccgtgcgggagggcgtgattgaccgggacacagccagcagcatcctgacctaccaggtgcagacaggaggcatcatccagagcaacccagccaagaggctgactgtggatgaagctgtgcagtgtgacctgatcaccagcagcagcgccctgctggtgctggaggcccagaggggctacgtgggcctcatctggccccacagcggggagatcttccccaccagcagcagcctgcagcaggagctgatcaccaatgagctggcctacaagatcctgaatggccggcagaagattgctgccctgtacatccctgagagcagccaggtgattggcctggatgctgccaagcagctgggcatcatcgacaacaacacagccagcatcctgaagaacatcaccctgcctgacaagatgccagacctgggggacctggaggcctgcaagaatgcccggcgctggctgtccttctgcaagttccagcccagcacagtgcatgactaccggcaggaggaggatgtgtttgatggagaggagcctgtgaccacccagaccagcgaggagaccaagaagctgttcctgagctacctgatgatcaacagctacatggatgccaacacaggccagaggctgctgctgtatgatggagacctggatgaggccgtgggcatgctgctggagggctgccacgccgagtttgatggcaacacagccatcaaggagtgcctggatgtgctgagcagcagcggggtcttcctgaacaatgccagcggccgggagaaggatgagtgcacagccacccccagcagcttcaacaagtgccactgtggggagcctgagcacgaggagaccccagaaaatagaaaatgtgccattgatgaggagttcaatgagatgaggaacacagtcatcaacagcgagttcagccagagcggcaagctggccagcaccatcagcattgaccccaaggtgaacagcagccccagcgtgtgtgtgcccagcctcatctcctacctgacccagacagagctggccgacatctccatgctgcggagtgacagcgagaacatcctgaccaactatgagaaccagagccgggtggagaccaatgaaagagccaatgaatgtagccacagcaagaacatccagaacttccccagcgacctgattgagaaccccatcatgaagagcaagatgagcaagttctgtggggtgaatgaaacagaaaatgaagacaacaccaacagagacagccccatctttgactacagcccccggctgagcgccctgctgagccatgacaagctgatgcacagccagggcagcttcaatgacacccacaccccagagagcaatggaaacaagtgtgaggccccagccctgtccttcagtgacaagaccatgctgagcggccagagaattggagagaagttccaggaccagttcctgggcattgctgccatcaacatcagcctgcccggggagcagtatggccagaagagcctgaacatgatcagcagcaacccccaggtgcagtaccacaatgacaagtacatcagcaacaccagcggggaggatgagaagacccaccctggcttccagcagatgcctgaggacaaggaggatgaaagtgaaattgaggagtacagctgtgctgtgaccccaggaggagacacagacaatgccatcgtgtccctgacctgtgccacccccctgctggatgagaccatcagcgccagtgactatgagaccagcctgctgaatgaccagcagaacaacacaggaacagacacagacagtgatgatgacttctatgacacccccctgtttgaagatgatgaccatgacagcctgctgctggatggagatgaccgggactgcctgcaccctgaggactatgacaccctgcaggaggagaatgatgaaacagccagccctgcagatgtgttctatgatgtgtccaaagaaaatgaaaattccatggtgccccagggcgcccctgtgggcagcctgtctgtgaagaacaaggcccactgcctgcaggacttcctgatggatgtggagaaggatgagctggacagcggggagaagatccacctgaaccctgtgggcagtgacaaggtgaatggccagagcctggagaccggcagcgagagagaatgtaccaacatcctggagggagatgaaagtgacagcctgacagattatgacatcgtgggcggcaaggagagcttcaccgccagcctgaagtttgatgattctggctcctggaggggcaggaaggaggagtatgtgacaggccaggagttccacagcgacacagaccacctggacagcatgcagagcgaggagagctatggagactacatctatgacagcaatgaccaggatgatgatgatgatgatggcattgatgaggagggcggcggcatcagagatgaaaatggcaagccccgctgccagaatgtggccgaggacatggacatccagctgtgtgccagcatcctgaatgaaaattctgatgaaaatgaaaacatcaacaccatgatcctgctggacaagatgcacagctgcagcagcctggagaagcagcagagggtgaatgtggtgcagctggccagccccagcgagaacaacctggtgacagagaagagcaacctgcctgagtacaccacagaaattgctgggaagagcaaagaaaacctgctgaaccacgagatggtgctgaaggatgtgctgccccccatcatcaaggacacagaaagtgagaagacctttggacctgccagcatcagccatgacaacaacaacatcagcagcaccagcgagctgggcacagacctggccaacaccaaggtgaagctgatccagggcagcgagctgcctgagctgacagacagcgtgaagggcaaggatgagtacttcaagaacatgacccccaaggtggacagcagcctggaccacatcatctgcacagagccagacctgattggcaagccagctgaggagagccacctgagcctcatcgcctctgtgacagacaaggacccccagggcaatggaagtgacctgatcaagggcagagatggcaagagtgacatcctgattgaagatgagaccagcatccagaagatgtacctgggggagggggaggtgctggtggagggcctggtggaggaggagaacagacacctgaagctgctgcccgggaagaacacccgggacagcttcaagctgatcaacagccagttccccttcccccagatcaccaacaatgaggagctgaaccagaagggcagcctgaagaaggccaccgtgaccctgaaggatgagcccaacaacctgcagatcatcgtgtccaagagccctgtgcagtttgagaacctggaggagatctttgacacctctgtgtccaaggagatcagtgatgacatcaccagtgacatcacctcctgggagggcaacacccactttgaggagagcttcacagatggccctgagaaggagctggacctcttcacctacctgaagcactgtgccaagaacatcaaggccaaggatgtggccaagcccaatgaagatgtgcccagccacgtgctgatcacagccccacccatgaaggagcacctgcagctgggcgtgaacaacaccaaggagaagagcaccagcacccagaaggacagccccctgaatgacatgatccagagcaatgacctgtgcagcaaggagagcatcagcggcggcggcacagagatcagccagttcaccccagagagcattgaggccaccctgagcatcctgagcaggaagcacgtggaggatgtgggcaagaatgacttcctgcagagcgagcgctgtgccaacggcctgggcaatgacaacagcagcaacaccctgaacacagactacagcttcctggagatcaacaacaagaaggagcgcatcgagcagcagctgcccaaggagcaggccctgagccccaggagccaggagaaggaggtgcagatccctgagctgagccaggtgtttgtggaggatgtgaaggacatcctgaagagccggctgaaggagggccacatgaacccccaggaggtggaggagcccagcgcctgtgccgacaccaagatcctgatccagaacctgatcaagaggatcaccaccagccagctggtgaatgaggccagcacagtgcccagcgacagccagatgtctgacagcagcggcgtgagccccatgaccaacagcagcgagctgaagccagagagcagagatgaccccttctgcatcggcaacctgaagtctgagctgctgctgaacatcctgaagcaggaccagcacagccagaagatcaccggggtgtttgagctgatgagggagctgacccacatggagtatgacctggagaagaggggcatcaccagcaaggtgctgcccctgcagctggagaacatcttctacaagctgctggctgatggctacagcgagaagattgagcacgtgggggacttcaaccagaaggcctgcagcaccagcgagatgatggaggagaagccccacatcctgggggacatcaagagcaaggagggcaactactacagccccaacctggagaccgtgaaggagatcggcctggagagcagcacagtgtgggccagcaccctgcccagagatgagaagctgaaggacctgtgcaatgacttccccagccacctggagtgcaccagcggcagcaaggagatggccagcggggacagcagcacagagcagttcagcagcgagctgcagcagtgcctgcagcacacagagaagatgcatgagtacctgaccctgctgcaggacatgaagccacccctggacaaccaggagagcctggacaacaacctggaggccctgaagaaccagctgcggcagctggagacctttgagctgggcctggcccccatcgccgtcatcctgaggaaggacatgaagctggccgaggagttcctgaagagcctgcccagcgacttcccccggggccacgtggaggagctgagcatcagccaccagagcctgaagacagccttcagcagcctgagcaatgtgagcagcgagaggaccaagcagatcatgctggccatcgacagcgagatgagcaagctggccgtgtcccatgaggagttcctgcacaagctgaagagcttcagtgactgggtgtctgagaagagcaagtctgtgaaggacattgaaattgtgaatgtgcaggacagtgaatatgtgaagaagaggctggagttcctgaagaatgtgctgaaggacctgggccacaccaagatgcagctggagaccacagcctttgatgtgcagttcttcatcagtgaatatgcccaggacctgagccccaaccagagcaagcagctgctgcggctgctgaacaccacccagaagtgcttcctggatgtgcaggagagcgtgaccacccaggtggagcggctggagacccagctgcacctggagcaggacctggatgaccagaagatcgtggccgagcggcagcaggagtacaaggagaagctgcagggcatctgtgacctgctgacccagacagagaacagactcatcggccaccaggaggccttcatgattggagatggcaccgtggagctgaagaagtaccagagcaagcaggaggagctgcagaaggacatgcagggcagcgcccaggccctggccgaggtggtgaagaacacagagaacttcctgaaggaaaatggagagaagctgagccaggaggacaaggccctgattgagcagaagctgaatgaggccaagatcaagtgtgagcagctgaacctgaaggccgagcagagcaagaaggagctggacaaggtggtgaccacagccatcaaggaggagacagagaaggtggccgctgtgaagcagctggaggagagcaagaccaagattgagaacctgctggactggctgagcaatgtggacaaggacagcgagcgggccggcaccaagcacaagcaggtgattgagcagaatggcacccacttccaggagggagatggcaagagcgccatcggggaggaggatgaggtgaatggaaacctgctggagacagatgtggatggccaggtgggcaccacccaggagaacctgaaccagcagtaccagaaggtgaaggcccagcacgagaagatcatcagccagcaccaggccgtcatcatcgccacccagagcgcccaggtgctgctggagaagcagggccagtacctgagccctgaggagaaggagaagctgcagaagaacatgaaggagctgaaggtgcactatgaaacagccctggccgagagcgagaagaagatgaagctgacccacagcctgcaggaggagctggagaagtttgatgctgactacacagaatttgagcactggctgcagcagagcgagcaggagctggagaacctggaggccggggctgatgacatcaatggcctgatgaccaagctgaagaggcagaagagcttctctgaagatgtgatcagccacaagggggacctgcgctacatcaccatcagcggcaacagagtgctggaggccgccaagagctgcagcaagagagatggcggcaaggtggacaccagcgccacccaccgggaggtgcagaggaagctggaccacgccacagaccgcttccgcagcctgtacagcaaatgtaatgtgctgggcaacaacctgaaggacctggtggacaagtaccagcactatgaagatgccagctgtggcctgctggccggcctgcaggcctgtgaggccacagccagcaagcacctgtctgagcccatcgctgtggaccccaagaacctgcagaggcagctggaggagaccaaggccctgcagggccagatcagcagccagcaggtggccgtggagaagctgaagaagacagctgaggtgctgctggatgcccggggcagcctgctgcctgccaagaatgacatccagaagaccctggatgacatcgtgggccgctatgaggacctgagcaagtctgtgaatgaaagaaatgagaagctgcagatcaccctgaccaggagcctgtctgtgcaggacggcctggatgagatgctggactggatgggaaatgtggagagcagcctgaaggagcaggatgtgggcaccggctactgccgcagcagcgagcagtacaagtgccatgaatag

SEQ ID NO: 304937 - DNA, 22386 bp, Artificial Sequence
  derived and/or modified sequence
atggccggctacctgagccctgctgcctacctgtatgtggaggagcaggagtacctgcaggcctatgaagatgtgctggagcgctacaaggatgagcgggacaaggtgcagaagaagaccttcaccaagtggatcaaccagcacctgatgaaggtgaggaagcacgtgaatgacctgtatgaggacctgagagatggccacaacctgatcagcctgctggaggtgctgagcggggacaccctgccccgggagaagggccgcatgaggttccaccggctgcagaatgtgcagatcgccctggactacctgaagaggcggcaggtgaagctggtgaacatcagaaatgatgacatcacagatggcaaccccaagctgaccctgggcctcatctggaccatcatcctgcacttccagatcagtgacatccacgtgactggagagagcgaggacatgtctgccaaggagcggctgctgctgtggacccagcaggccacagagggctacgccggcatccgctgtgagaacttcaccacctgctggagagatggcaagctgttcaatgccatcatccacaagtacagaccagacctgattgacatgaacacagtggccgtgcagagcaacctggccaacctggagcacgccttctacgtggccgagaagattggagtcatccggctgctggaccctgaagatgtggatgtgagcagcccagatgagaagagcgtcatcacctacgtgagcagcctgtatgatgccttccccaaggtgcctgagggcggggagggcatcggggccaatgatgtggaggtgaagtggattgagtaccagaacatggtgaactacctgatccagtggatccgccaccacgtgaccaccatgtctgagaggaccttccccaacaaccctgtggagctgaaggccctgtacaaccagtacctgcagttcaaggagacagagatcccccccaaggagacagagaagagcaagatcaagaggctgtacaagctgctggagatctggattgaatttggccgcatcaagctgctgcagggctaccaccccaatgacatcgagaaggagtggggcaagctgatcatcgccatgctggagcgggagaaggccctgcggcctgaggtggagcggctggagatgctgcagcagatcgccaacagagtgcagagggacagcgtcatctgtgaggacaagctgatcctggccggaaatgccctgcagagcgacagcaagaggctggagagcggcgtgcagttccagaatgaggccgagattgctggctacatcctggagtgtgagaacctgctgcggcagcacgtgattgatgtgcagatcctgattgatggcaagtactaccaggccgaccagctggtgcagagggtggccaagctgagagatgagatcatggccctgagaaatgaatgttcttctgtgtacagcaagggccgcatcctgaccacagagcagaccaagctgatgatcagcggcatcacccagagcctgaacagcggctttgcccagaccctgcaccccagcctgaccagcggcctgacccagagcctgacccccagcctgaccagcagctccatgaccagcggcctgagcagcggcatgaccagccggctgacccccagcgtgaccccagcctacaccccaggcttccccagcggcctggtgcccaacttcagcagtggagtggagcccaacagcctgcagaccctgaagctgatgcagatcaggaagcccctgctgaagagcagcctgctggaccagaacctgacagaggaggagatcaacatgaagtttgtgcaggacctgctgaactgggtggatgagatgcaggtgcagctggacagaacagagtggggcagtgacctgcccagcgtggagagccacctggagaaccacaagaatgtgcaccgggccatcgaggagtttgagagcagcctgaaggaggccaagatcagcgagatccagatgacagcccccctgaagctgacctacgccgagaagctgcaccggctggagagccagtatgccaagctgctgaacaccagcaggaaccaggagcggcacctggacaccctgcacaactttgtgtcccgggccaccaatgagctgatctggctgaatgagaaggaggaggaggaggtggcctatgactggagcgagaggaacaccaacatcgccaggaagaaggactaccacgccgagctgatgagggagctggaccagaaggaggagaacatcaagtctgtgcaggagattgctgagcagctgctgctggagaaccacccagcccggctgaccatcgaggcctacagagctgccatgcagacccagtggagctggatcctgcagctgtgccagtgtgtggagcagcacatcaaggaaaatacagcctactttgagttcttcaatgatgccaaggaggccacagactacctgaggaacctgaaggatgccatccagaggaagtacagctgtgacaggagcagcagcatccacaagctggaggacctggtgcaggagagcatggaggagaaggaggagctgctgcagtacaagagcaccatcgccaacctgatgggcaaggccaagaccatcatccagctgaagcccaggaacagcgactgccccctgaagaccagcatccccatcaaggccatctgtgactaccggcagatcgagatcaccatctacaaggatgatgaatgtgtgctggccaacaacagccaccgggccaagtggaaggtgatcagccccactggaaatgaggccatggtgcccagcgtgtgcttcaccgtgcccccacccaacaaggaggccgtggacctggccaacagaattgagcagcagtaccagaatgtgctgaccctgtggcatgagagccacatcaacatgaagtctgtggtgtcctggcactacctgatcaatgaaattgaccgcatccgggccagcaatgtggccagcatcaagaccatgctgcccggggagcaccagcaggtgctgagcaacctgcagagcagatttgaggacttcctggaggacagccaggagagccaggtgttcagcggcagtgacatcacccagctggagaaggaggtgaatgtgtgcaagcagtactaccaggagctgctgaagtctgctgagcgggaggagcaggaggagagcgtgtacaacctgtacatcagcgaggtgaggaacatccggctgcggctggagaactgtgaagatagactcatccggcagatccgcacccccctggagagagatgacctgcacgagagcgtcttccgcatcacagagcaggagaagctgaagaaggagctggagcggctgaaggatgacctgggcaccatcaccaacaagtgtgaggagttcttcagccaggccgccgccagcagctctgtgcccaccctgcggtctgagctgaatgtggtgctgcagaacatgaaccaggtgtacagcatgagcagcacctacatcgacaagctgaagacagtgaacctggtgctgaagaacacccaggccgctgaggccctggtgaagctgtatgagaccaagctgtgtgaggaggaggccgtgattgctgacaagaacaacattgaaaatctcatcagcaccctgaagcagtggaggtctgaggtggatgagaagaggcaggtgttccacgccctggaggatgagctgcagaaggccaaggccatcagtgatgagatgttcaagacctacaaggagcgggacctggactttgactggcacaaggagaaggctgaccagctggtggagcgctggcagaatgtgcacgtgcagattgacaaccggctgcgggacctggagggcatcggcaagagcctgaagtactacagagacacctaccaccccctggatgactggatccagcaggtggagaccacccagaggaagatccaggagaaccagcctgagaacagcaagaccctggccacccagctgaaccagcagaagatgctggtgtctgaaattgagatgaagcagagcaagatggatgagtgccagaagtatgcagagcagtacagcgccaccgtgaaggactatgagctgcagaccatgacctaccgggccatggtggacagccagcagaagagccctgtgaagagaagaaggatgcagagcagcgctgacctgatcatccaggagttcatggacctgcggacccgctacacagccctggtgaccctgatgacccagtacatcaagtttgctggggacagcctgaagaggctggaggaggaggagaagagcctggaggaggagaagaaggagcacgtggagaaggccaaggagctgcagaagtgggtgagcaacatcagcaagaccctgaaggatgctgagaaggccggcaagccacccttcagcaagcagaagatcagcagcgaggagatcagcaccaagaaggagcagctgtctgaggccctgcagaccatccagctgttcctggccaagcacggggacaagatgacagatgaggagagaaatgagctggagaagcaggtgaagaccctgcaggagagctacaacctgctcttcagcgagagcctgaagcagctgcaggagagccagaccagcggagatgtgaaggtggaggagaagctggacaaggtgattgctggcaccatcgaccagaccactggagaggtgctgagcgtcttccaggccgtgctgcggggcctgattgattatgacaccggcatccggctgctggagacccagctgatgatcagcggcctcatcagccctgagctgaggaaatgttttgacctgaaggatgccaagagccacggcctgattgatgagcagatcctgtgccagctgaaggagctgagcaaggccaaggagatcatctctgctgccagccccaccaccatccctgtgctggatgccctggcccagagcatgatcacagagagcatggccatcaaggtgctggagatcctgctgagcacaggcagcctggtgatcccagccaccggggagcagctgaccctgcagaaggccttccagcagaacctggtgtcctctgccctcttcagcaaggtgctggagcggcagaacatgtgcaaggacctgattgacccctgcaccagcgagaaggtgtccctgattgacatggtgcagaggagcaccctgcaggagaacacaggcatgtggctgctgcctgtgcggccccaggagggcggccgcatcaccctgaagtgtggcaggaacatcagcatcctgcgggccgcccacgagggcctgattgaccgggagaccatgttccggctgctgagcgcccagctgctgagcggcggcctcatcaacagcaacagcggccagaggatgacagtggaggaggccgtgcgggagggcgtgattgaccgggacacagccagcagcatcctgacctaccaggtgcagacaggaggcatcatccagagcaacccagccaagaggctgactgtggatgaagctgtgcagtgtgacctgatcaccagcagcagcgccctgctggtgctggaggcccagaggggctacgtgggcctcatctggccccacagcggggagatcttccccaccagcagcagcctgcagcaggagctgatcaccaatgagctggcctacaagatcctgaatggccggcagaagattgctgccctgtacatccctgagagcagccaggtgattggcctggatgctgccaagcagctgggcatcatcgacaacaacacagccagcatcctgaagaacatcaccctgcctgacaagatgccagacctgggggacctggaggcctgcaagaatgcccggcgctggctgtccttctgcaagttccagcccagcacagtgcatgactaccggcaggaggaggatgtgtttgatggagaggagcctgtgaccacccagaccagcgaggagaccaagaagctgttcctgagctacctgatgatcaacagctacatggatgccaacacaggccagaggctgctgctgtatgatggagacctggatgaggccgtgggcatgctgctggagggctgccacgccgagtttgatggcaacacagccatcaaggagtgcctggatgtgctgagcagcagcggggtcttcctgaacaatgccagcggccgggagaaggatgagtgcacagccacccccagcagcttcaacaagtgccactgtggggagcctgagcacgaggagaccccagaaaatagaaaatgtgccattgatgaggagttcaatgagatgaggaacacagtcatcaacagcgagttcagccagagcggcaagctggccagcaccatcagcattgaccccaaggtgaacagcagccccagcgtgtgtgtgcccagcctcatctcctacctgacccagacagagctggccgacatctccatgctgcggagtgacagcgagaacatcctgaccaactatgagaaccagagccgggtggagaccaatgaaagagccaatgaatgtagccacagcaagaacatccagaacttccccagcgacctgattgagaaccccatcatgaagagcaagatgagcaagttctgtggggtgaatgaaacagaaaatgaagacaacaccaacagagacagccccatctttgactacagcccccggctgagcgccctgctgagccatgacaagctgatgcacagccagggcagcttcaatgacacccacaccccagagagcaatggaaacaagtgtgaggccccagccctgtccttcagtgacaagaccatgctgagcggccagagaattggagagaagttccaggaccagttcctgggcattgctgccatcaacatcagcctgcccggggagcagtatggccagaagagcctgaacatgatcagcagcaacccccaggtgcagtaccacaatgacaagtacatcagcaacaccagcggggaggatgagaagacccaccctggcttccagcagatgcctgaggacaaggaggatgaaagtgaaattgaggagtacagctgtgctgtgaccccaggaggagacacagacaatgccatcgtgtccctgacctgtgccacccccctgctggatgagaccatcagcgccagtgactatgagaccagcctgctgaatgaccagcagaacaacacaggaacagacacagacagtgatgatgacttctatgacacccccctgtttgaagatgatgaccatgacagcctgctgctggatggagatgaccgggactgcctgcaccctgaggactatgacaccctgcaggaggagaatgatgaaacagccagccctgcagatgtgttctatgatgtgtccaaagaaaatgaaaattccatggtgccccagggcgcccctgtgggcagcctgtctgtgaagaacaaggcccactgcctgcaggacttcctgatggatgtggagaaggatgagctggacagcggggagaagatccacctgaaccctgtgggcagtgacaaggtgaatggccagagcctggagaccggcagcgagagagaatgtaccaacatcctggagggagatgaaagtgacagcctgacagattatgacatcgtgggcggcaaggagagcttcaccgccagcctgaagtttgatgattctggctcctggaggggcaggaaggaggagtatgtgacaggccaggagttccacagcgacacagaccacctggacagcatgcagagcgaggagagctatggagactacatctatgacagcaatgaccaggatgatgatgatgatgatggcattgatgaggagggcggcggcatcagagatgaaaatggcaagccccgctgccagaatgtggccgaggacatggacatccagctgtgtgccagcatcctgaatgaaaattctgatgaaaatgaaaacatcaacaccatgatcctgctggacaagatgcacagctgcagcagcctggagaagcagcagagggtgaatgtggtgcagctggccagccccagcgagaacaacctggtgacagagaagagcaacctgcctgagtacaccacagaaattgctgggaagagcaaagaaaacctgctgaaccacgagatggtgctgaaggatgtgctgccccccatcatcaaggacacagaaagtgagaagacctttggacctgccagcatcagccatgacaacaacaacatcagcagcaccagcgagctgggcacagacctggccaacaccaaggtgaagctgatccagggcagcgagctgcctgagctgacagacagcgtgaagggcaaggatgagtacttcaagaacatgacccccaaggtggacagcagcctggaccacatcatctgcacagagccagacctgattggcaagccagctgaggagagccacctgagcctcatcgcctctgtgacagacaaggacccccagggcaatggaagtgacctgatcaagggcagagatggcaagagtgacatcctgattgaagatgagaccagcatccagaagatgtacctgggggagggggaggtgctggtggagggcctggtggaggaggagaacagacacctgaagctgctgcccgggaagaacacccgggacagcttcaagctgatcaacagccagttccccttcccccagatcaccaacaatgaggagctgaaccagaagggcagcctgaagaaggccaccgtgaccctgaaggatgagcccaacaacctgcagatcatcgtgtccaagagccctgtgcagtttgagaacctggaggagatctttgacacctctgtgtccaaggagatcagtgatgacatcaccagtgacatcacctcctgggagggcaacacccactttgaggagagcttcacagatggccctgagaaggagctggacctcttcacctacctgaagcactgtgccaagaacatcaaggccaaggatgtggccaagcccaatgaagatgtgcccagccacgtgctgatcacagccccacccatgaaggagcacctgcagctgggcgtgaacaacaccaaggagaagagcaccagcacccagaaggacagccccctgaatgacatgatccagagcaatgacctgtgcagcaaggagagcatcagcggcggcggcacagagatcagccagttcaccccagagagcattgaggccaccctgagcatcctgagcaggaagcacgtggaggatgtgggcaagaatgacttcctgcagagcgagcgctgtgccaacggcctgggcaatgacaacagcagcaacaccctgaacacagactacagcttcctggagatcaacaacaagaaggagcgcatcgagcagcagctgcccaaggagcaggccctgagccccaggagccaggagaaggaggtgcagatccctgagctgagccaggtgtttgtggaggatgtgaaggacatcctgaagagccggctgaaggagggccacatgaacccccaggaggtggaggagcccagcgcctgtgccgacaccaagatcctgatccagaacctgatcaagaggatcaccaccagccagctggtgaatgaggccagcacagtgcccagcgacagccagatgtctgacagcagcggcgtgagccccatgaccaacagcagcgagctgaagccagagagcagagatgaccccttctgcatcggcaacctgaagtctgagctgctgctgaacatcctgaagcaggaccagcacagccagaagatcaccggggtgtttgagctgatgagggagctgacccacatggagtatgacctggagaagaggggcatcaccagcaaggtgctgcccctgcagctggagaacatcttctacaagctgctggctgatggctacagcgagaagattgagcacgtgggggacttcaaccagaaggcctgcagcaccagcgagatgatggaggagaagccccacatcctgggggacatcaagagcaaggagggcaactactacagccccaacctggagaccgtgaaggagatcggcctggagagcagcacagtgtgggccagcaccctgcccagagatgagaagctgaaggacctgtgcaatgacttccccagccacctggagtgcaccagcggcagcaaggagatggccagcggggacagcagcacagagcagttcagcagcgagctgcagcagtgcctgcagcacacagagaagatgcatgagtacctgaccctgctgcaggacatgaagccacccctggacaaccaggagagcctggacaacaacctggaggccctgaagaaccagctgcggcagctggagacctttgagctgggcctggcccccatcgccgtcatcctgaggaaggacatgaagctggccgaggagttcctgaagagcctgcccagcgacttcccccggggccacgtggaggagctgagcatcagccaccagagcctgaagacagccttcagcagcctgagcaatgtgagcagcgagaggaccaagcagatcatgctggccatcgacagcgagatgagcaagctggccgtgtcccatgaggagttcctgcacaagctgaagagcttcagtgactgggtgtctgagaagagcaagtctgtgaaggacattgaaattgtgaatgtgcaggacagtgaatatgtgaagaagaggctggagttcctgaagaatgtgctgaaggacctgggccacaccaagatgcagctggagaccacagcctttgatgtgcagttcttcatcagtgaatatgcccaggacctgagccccaaccagagcaagcagctgctgcggctgctgaacaccacccagaagtgcttcctggatgtgcaggagagcgtgaccacccaggtggagcggctggagacccagctgcacctggagcaggacctggatgaccagaagatcgtggccgagcggcagcaggagtacaaggagaagctgcagggcatctgtgacctgctgacccagacagagaacagactcatcggccaccaggaggccttcatgattggagatggcaccgtggagctgaagaagtaccagagcaagcaggaggagctgcagaaggacatgcagggcagcgcccaggccctggccgaggtggtgaagaacacagagaacttcctgaaggaaaatggagagaagctgagccaggaggacaaggccctgattgagcagaagctgaatgaggccaagatcaagtgtgagcagctgaacctgaaggccgagcagagcaagaaggagctggacaaggtggtgaccacagccatcaaggaggagacagagaaggtggccgctgtgaagcagctggaggagagcaagaccaagattgagaacctgctggactggctgagcaatgtggacaaggacagcgagcgggccggcaccaagcacaagcaggtgattgagcagaatggcacccacttccaggagggagatggcaagagcgccatcggggaggaggatgaggtgaatggaaacctgctggagacagatgtggatggccaggtgggcaccacccaggagaacctgaaccagcagtaccagaaggtgaaggcccagcacgagaagatcatcagccagcaccaggccgtcatcatcgccacccagagcgcccaggtgctgctggagaagcagggccagtacctgagccctgaggagaaggagaagctgcagaagaacatgaaggagctgaaggtgcactatgaaacagccctggccgagagcgagaagaagatgaagctgacccacagcctgcaggaggagctggagaagtttgatgctgactacacagaatttgagcactggctgcagcagagcgagcaggagctggagaacctggaggccggggctgatgacatcaatggcctgatgaccaagctgaagaggcagaagagcttctctgaagatgtgatcagccacaagggggacctgcgctacatcaccatcagcggcaacagagtgctggaggccgccaagagctgcagcaagagagatggcggcaaggtggacaccagcgccacccaccgggaggtgcagaggaagctggaccacgccacagaccgcttccgcagcctgtacagcaaatgtaatgtgctgggcaacaacctgaaggacctggtggacaagtaccagcactatgaagatgccagctgtggcctgctggccggcctgcaggcctgtgaggccacagccagcaagcacctgtctgagcccatcgctgtggaccccaagaacctgcagaggcagctggaggagaccaaggccctgcagggccagatcagcagccagcaggtggccgtggagaagctgaagaagacagctgaggtgctgctggatgcccggggcagcctgctgcctgccaagaatgacatccagaagaccctggatgacatcgtgggccgctatgaggacctgagcaagtctgtgaatgaaagaaatgagaagctgcagatcaccctgaccaggagcctgtctgtgcaggacggcctggatgagatgctggactggatgggaaatgtggagagcagcctgaaggagcagggccaggtgcccctgaacagcacagccctgcaggacatcatcagcaagaacatcatgctggagcaggacattgctggccggcagagcagcatcaatgccatgaatgagaaggtgaagaagttcatggagaccacagaccccagcacagccagcagcctgcaggccaagatgaaggacctgagcgcccgcttcagcgaggccagccacaagcacaaggagaccctggccaagatggaggagctgaagaccaaggtggagctgtttgagaacctgtctgagaagctgcagaccttcctggagaccaagacccaggccctgacagaggtggatgtgcctgggaaggatgtgacagagctgagccagtacatgcaggagagcaccagcgagttcctggagcacaagaagcacctggaggtgctgcacagcctgctgaaggagatcagcagccacggcctgcccagcgacaaggccctggtgctggagaagaccaacaacctgagcaagaagttcaaggagatggaggacaccatcaaggagaagaaggaggccgtgaccagctgccaggagcagctggatgccttccaggtgctggtgaagagcctgaagtcctggatcaaggagaccaccaagaaggtgcccatcgtgcagcccagctttggagctgaggacctgggcaagagcctggaggacaccaagaagctgcaggagaagtggagcctgaagaccccagagatccagaaggtgaacaacagcggcatcagcctgtgcaacctgatctctgctgtgaccaccccagccaaggccatcgctgctgtgaagtctggaggagctgtgctgaatggagagggcacagccaccaacacagaggagttctgggccaacaagggcctgaccagcatcaagaaggacatgacagacatcagccacggctatgaggacctgggcctgctgctgaaggacaagattgctgagctgaacaccaagctgagcaagctgcagaaggcccaggaggagagcagcgccatgatgcagtggctgcagaagatgaacaagacagccaccaagtggcagcagaccccagcccccacagacacagaggccgtgaagacccaggtggagcagaacaagagctttgaagctgagctgaagcagaatgtgaacaaggtgcaggagctgaaggacaagctgacagagctgctggaggagaacccagacaccccagaggccccccgctggaagcagatgctgacagaaattgacagcaagtggcaggagctgaaccagctgaccatcgaccggcagcagaagctggaggagagcagcaacaacctgacccagttccagacagtggaggcccagctgaagcagtggctggtggagaaggagctgatggtgtctgtgctgggccccctgagcattgaccccaacatgctgaacacccagaggcagcaggtgcagatcctgctgcaggagtttgccaccaggaagccccagtatgagcagctgacagctgctggccagggcatcctgagcaggcctggagaggaccccagcctgcggggcatcgtgaaggagcagctggccgctgtgacccagaagtgggacagcctgaccggccagctgagtgacagatgtgactggattgaccaggccatcgtgaagagcacccagtaccagagcctgctgcggagcctgagtgacaagctgagtgacctggacaacaagctgagcagcagcctggccgtgtccacccacccagatgccatgaaccagcagctggagacagcccagaagatgaagcaggagatccagcaggagaagaagcagatcaaggtggcccaggccctgtgtgaggacctgagcgccctggtgaaggaggagtacctgaaggccgagctgagccggcagctggagggcatcctgaagagcttcaaggatgtggagcagaaggcagaaaatcatgtgcagcacctgcagagcgcctgtgccagcagccaccagttccagcagatgagccgggacttccaggcctggctggacaccaagaaggaggagcagaacaagagccaccccatcagcgccaagctggatgtgctggagagcctcatcaaggaccacaaggacttcagcaagaccctgacagcccagagccacatgtatgagaagaccatcgccgagggggagaacctgctgctgaagacccagggcagcgagaaggccgccctgcagctgcagctgaacaccatcaagaccaactgggacaccttcaacaagcaggtgaaggagcgggagaacaagctgaaggagagcctggagaaggccctgaagtacaaggagcaggtggagaccctgtggccctggattgacaagtgccagaacaacctggaggagatcaagttctgcctggaccctgcagaaggagaaaattccatcgccaagctgaagagcctgcagaaggagatggaccagcacttcggcatggtggagctgctgaacaacacagccaacagcctgctgtctgtgtgtgaaattgacaaggaggtggtgacagatgagaacaagagcctcatccagaaggtggacatggtgacagagcagctgcacagcaagaagttctgcctggagaacatgacccagaagttcaaggagttccaggaggtgtccaaggagagcaagaggcagctgcagtgtgccaaggagcagctggacatccatgacagcctgggcagccaggcctacagcaacaagtacctgaccatgctgcagacccagcagaagagcctgcaggccctgaagcaccaggtggacctggccaagaggctggcccaggacctggtggtggaggccagtgacagcaagggcaccagtgatgtgctgctgcaggtggagaccatcgcccaggagcacagcaccctgagccagcaggtggatgagaagtgcagcttcctggagaccaagctgcagggcatcggccacttccagaacaccatccgggagatgttcagccagtttgctgagtttgatgatgagctggacagcatggcccctgtgggcagagatgctgagaccctgcagaagcagaaggagaccatcaaggccttcctgaagaagctggaggccctgatggccagcaatgacaatgccaacaagacctgcaagatgatgctggccacagaggagaccagcccagacctggtgggcatcaagagggacctggaggccctgagcaagcagtgcaacaagctgctggaccgggcccaggcccgggaggagcaggtggagggcaccatcaagaggctggaggagttctacagcaagctgaaggagttcagcatcctgctgcagaaggccgaggagcacgaggagagccagggccctgtgggcatggagacagagaccatcaaccagcagctgaacatgttcaaggtgttccagaaggaggagattgagcccctgcagggcaagcagcaggatgtgaactggctgggccagggcctcatccagagcgctgccaagagcaccagcacccagggcctggagcatgacctggatgatgtgaatgcccgctggaagaccctgaacaagaaggtggcccagagagctgcccagctgcaggaggccctgctgcactgcggccgcttccaggatgccctggagagcctgctgtcctggatggtggacacagaggagctggtggccaaccagaagccacccagcgctgagttcaaggtggtgaaggcccagatccaggagcagaagctgctgcagaggctgctggatgacaggaagagcacagtggaggtgatcaagcgggagggggagaagatcgccaccacagctgagcctgctgacaaggtgaagatcctgaagcagctgagcctgctggacagccgctgggaggccctgctgaacaaggccgagaccaggaaccggcagctggagggcatctctgtggtggcccagcagttccacgagaccctggagcccctgaatgagtggctgaccaccatcgagaagaggctggtgaactgtgagcccatcggcacccaggccagcaagctggaggagcagatcgcccagcacaaggtgctgcaggaggacatcctgctgaggaagcagaatgtggaccaggccctgctgaatggcctggagctgctgaagcagaccactggagatgaggtgctgatcatccaggacaagctggaggccatcaaggcccgctacaaggacatcaccaagctgagcacagatgtggccaagaccctggagcaggccctgcagctggcccggcggctgcacagcacccatgaggagctgtgcacctggctggacaaggtggaggtggagctgctgtcctatgagacccaggtgctgaagggggaggaggccagccaggcccagatgaggcccaaggagctgaagaaggaggccaagaacaacaaggccctgctggacagcctgaatgaggtgtcctctgccctgctggagctggtgccctggagggcccgggagggcctggagaagatggtggctgaagataatgaaagataccgcctggtgtctgacaccatcacccagaaggtggaggagattgatgctgccatcctgcggagccagcagtttgaccaggccgcagatgctgagctgtcctggatcacagaaacagagaagaagctgatgagcctgggggacatccggctggagcaggaccagaccagcgcccagctgcaggtgcagaagaccttcaccatggagatcctgcggcacaaggacatcattgatgacctggtgaagagcggccacaagatcatgacagcctgcagcgaggaggagaagcagagcatgaagaagaagctggacaaggtgctgaagaactatgacaccatctgccagatcaacagcgagcgctacctgcagctggagcgggcccagagcctggtgaaccagttctgggagacctatgaggagctgtggccctggctgacagagacccagagcatcatcagccagctgcctgccccagccctggagtatgagaccctgcggcagcagcaggaggagcaccggcagctgcgggagctgattgctgagcacaagccccacatcgacaagatgaacaagacaggcccccagctgctggagctgagccctggagagggcttcagcatccaggagaagtatgtggccgctgacaccctgtacagccagatcaaggaggatgtgaagaagagagctgtggccctggatgaggccatcagccagagcacccagttccatgacaagattgaccagatcctggagagcctggagagaattgtggagcggctgcggcagccccccagcatctctgctgaggtggagaagatcaaggagcagatcagcgagaacaagaatgtgtctgtggacatggagaagctgcagcccctgtatgagaccctgaagcagagaggagaggagatgattgcccggagcggcggcacagacaaggacatcagcgccaaggctgtgcaggacaagctggaccagatggtgttcatctgggagaacatccacaccctggtggaggagcgggaggccaagctgctggatgtgatggagctggccgagaagttctggtgtgaccacatgagcctcatcgtgaccatcaaggacacccaggacttcatccgggacctggaggaccccggcatcgaccccagcgtggtgaagcagcagcaggaggccgctgagaccatccgggaggagattgatggcctgcaggaggagctggacatcgtcatcaacctgggcagcgagctgattgctgcctgtggggagccagacaagcccatcgtgaagaagagcattgatgagctgaacagcgcctgggacagcctgaacaaggcctggaaggacagaattgacaagctggaggaggccatgcaggccgctgtgcagtaccaggacggcctgcaggccgtgtttgactgggtggacattgctgggggcaagctggcctccatgagccccatcggcacagacctggagaccgtgaagcagcagatcgaggagctgaagcagttcaagtctgaggcctaccagcagcagatcgagatggagcggctgaaccaccaggccgagctgctgctgaagaaggtgacagaggagagtgacaagcacacagtgcaggaccccctgatggagctgaagctgatctgggacagcctggaggagcgcatcatcaaccggcagcacaagctggagggcgccctgctggccctgggccagttccagcacgccctggatgagctgctggcctggctgacccacacagagggcctgctgtctgagcagaagcctgtgggcggggaccccaaggccatcgagattgagctggccaagcaccacgtgctgcagaatgatgtgctggcccaccagagcacagtggaggccgtgaacaaggctggaaatgacctgattgagagcagcgctggggaggaggccagcaacctgcagaacaagctggaggtgctgaaccagcgctggcagaatgtgctggagaagacagagcagaggaagcagcagctggatggagccctgcggcaggccaagggcttccatggagaaattgaggacctgcagcagtggctgacagacacagagcggcacctgctggccagcaagcccctgggcggcctgcctgagacagccaaggagcagctgaatgtgcacatggaggtgtgtgccgcctttgaggccaaggaggagacctacaagagcctgatgcagaagggccagcagatgctggcccgctgccccaagtctgctgagaccaacatcgaccaggacatcaacaacctgaaggagaagtgggagagcgtggagaccaagctgaatgaaaggaagaccaagctggaggaggccctgaacctggccatggagttccacaacagcctgcaggacttcatcaactggctgacccaggccgagcagaccctgaatgtggccagccggcccagcctcatcctggacacagtgctcttccagattgatgagcacaaggtgtttgccaatgaggtgaacagccaccgggagcagatcatcgagctggacaagacaggcacccacctgaagtacttcagccagaagcaggatgtggtgctgatcaagaacctgctgatctctgtgcagagccgctgggagaaggtggtgcagaggctggtggagcggggccgcagcctggatgatgccaggaagagggccaagcagttccacgaggcctggagcaagctgatggagtggctggaggagagcgagaagagcctggacagcgagctggagatcgccaatgaccctgacaagatcaagacccagctggcccagcacaaggagttccagaagagcctgggcgccaagcacagcgtgtatgacaccaccaacagaacaggccgcagcctgaaggagaagaccagcctggctgatgacaacctgaagctggatgacatgctgtctgagctgcgggacaagtgggacaccatctgtgggaagtctgtggagcggcagaacaagctggaggaggccctgctcttcagcggccagttcacagatgccctgcaggccctgattgactggctgtacagagtggagccccagctggccgaggaccagcctgtgcatggagacatcgacctggtgatgaacctgattgacaaccacaaggccttccagaaggagctgggcaagaggaccagctctgtgcaggccctgaagaggtctgcccgggagctgattgagggcagcagagatgacagctcctgggtgaaggtgcagatgcaggagctgagcacccgctgggagaccgtgtgtgccctgagcatcagcaagcagacccggctggaggccgccctgcggcaggccgaggagttccacagcgtggtgcacgccctgctggagtggctggccgaggccgagcagaccctgcgcttccatggagtgctgcctgatgatgaagatgccctgcggaccctgattgaccagcacaaggagttcatgaagaagctggaggagaagagagctgagctgaacaaggccaccaccatgggagacacagtgctggccatctgccacccagacagcatcaccaccatcaagcactggatcaccatcatccgggccaggtttgaggaggtgctggcctgggccaagcagcaccagcagaggctggccagcgccctggccggcctgattgccaagcaggagctgctggaggccctgctggcctggctgcagtgggccgagaccaccctgacagacaaggacaaggaggtgatcccccaggagattgaggaggtgaaggccctgattgctgagcaccagaccttcatggaggagatgaccaggaagcagccagatgtggacaaggtgaccaagacctacaagagaagagctgctgaccccagcagcctgcagagccacatccctgtgctggacaagggccgggccggcaggaagcgcttccctgccagcagcctgtaccccagcggcagccagacccagatcgagaccaagaacccccgggtgaacctgctggtgtccaagtggcagcaggtgtggctgctggccctggagaggaggaggaagctgaatgatgccctggaccggctggaggagctgcgggagtttgccaactttgattttgacatctggaggaagaagtacatgcgctggatgaaccacaagaagagccgggtgatggacttcttcagaagaattgacaaggaccaggacggcaagatcacccggcaggagttcattgatggcatcctgagcagcaagttccccaccagccggctggagatgtctgctgtggccgacatctttgacagagatggagatggctacatcgactactatgaatttgtggccgccctgcaccccaacaaggatgcctacaagcccatcacagatgctgacaagattgaagatgaggtgacccggcaggtggccaagtgcaagtgtgccaagcgcttccaggtggagcagattggagacaacaagtaccgcttcttcctgggcaaccagtttggagacagccagcagctgcggctggtgcgcatcctgcggagcacagtgatggtgcgggtgggcggcggctggatggccctggatgagttcctggtgaagaatgacccctgccgggtgcaccaccacggcagcaagatgctgcggtctgagagcaacagcagcatcaccaccacccagcccaccatcgccaagggccgcaccaacatggagctgcgggagaagttcatcctggctgatggagccagccagggcatggccgccttccggccccggggcagaagaagccggcccagcagcagaggagccagccccaacagaagcacctctgtgagcagccaggccgcccaggccgccagcccccaggtgcctgccaccaccacccccaagggcacccccatccagggcagcaagctgcggctgcccggctacctgagcggcaagggcttccacagcggagaagattctggcctcatcaccacagctgctgcccgggtgaggacccagtttgctgacagcaagaagacccccagcaggcctggcagcagagctggcagcaaggccggcagccgggccagcagccggcggggcagtgatgccagtgactttgacatcagcgagatccagagcgtgtgcagtgatgtggagaccgtgccccagacccaccggcccacccccagggctggcagccggcccagcacagccaagcccagcaagatccccaccccccagaggaagagccctgccagcaagctggacaagagcagcaagaggtag

SEQ ID NO: 304938 - DNA, 12603 bp, Artificial Sequence
  derived and/or modified sequence
atggccggctacctgagccccgccgcctacctgtacgtggaggagcaggagtacctccaggcttatgaagatgttttggaaaggtacaaggatgagagggataaagtccagaagaagaccttcactaagtggatcaatcaacatctgatgaaggtgagaaaacacgttaatgacctgtatgaggatctccgggacggtcacaatctaatctcacttttagaggtcctgtcaggagatacgctcccccgggagaaggggcgaatgcgctttcatcgcctgcagaatgtccagatcgcattggactacttgaagagacgacaggtgaagttggttaacattagaaacgatgatatcacagatggtaaccctaaactcacgctcggacttatctggactatcatcctccatttccagatttctgatatccatgtgacaggcgagagcgaagacatgtcagccaaggagagattgcttctgtggacacagcaggcaacagagggttacgcaggcatccgctgcgaaaatttcaccacctgctggcgcgatggtaagttatttaatgccattattcacaagtacaggcctgaccttatcgatatgaatactgttgccgtgcagagtaatctcgcgaaccttgaacatgcattttacgtcgccgagaagattggtgtgattcgtctgctggaccctgaagatgtcgatgtcagcagcccggatgaaaaaagtgtgattacttacgtctcttctctgtacgacgcctttcctaaggtgccagaggggggcgaaggcatcggcgccaacgacgtggaagtgaagtggatcgaataccagaacatggtcaactatctcatccaatggatccgccaccatgtcactaccatgtccgagcgaactttcccaaacaatcccgtagagctgaaggcattatataaccagtacctgcagttcaaagagactgaaattccaccaaaggagacagagaagtccaaaattaaaagactctacaaactgttggaaatctggatcgaattcggccggatcaagttactccagggctaccacccaaacgacatcgaaaaagagtggggtaagctaatcattgccatgttagagcgcgaaaaagccctgcgtcccgaagttgaaagactcgagatgctgcaacagattgctaatcgggtgcagagggatagcgttatctgtgaagacaaacttattctggccggtaacgccctgcagagtgactccaaacgactcgaatcaggtgtccagttccaaaatgaggccgaaatcgcagggtatatccttgagtgcgagaatctcctgcgacaacatgtcatcgatgtacagattctgatagatggcaaatactatcaggcagatcagttagttcaacgggtggctaaactgagggacgagattatggcccttcggaatgaatgttccagtgtgtactcaaagggacggattttaactacagaacagacaaagctcatgatcagtggcatcactcaatccttaaattcaggctttgcccagacattgcatccctccctgacaagtggcttaacccaatcgcttacaccttcactgacaagttcgtccatgacaagtggactgtcttcaggcatgacatcccgactgacaccatctgtgacacctgcctacacacctgggtttcccagcggactggtccccaatttttcaagcggcgtggagccgaactcgcttcagaccctgaaattgatgcagatcagaaagcctttgctcaaaagcagcttattggaccagaatctgaccgaggaagagattaatatgaaattcgtgcaggaccttttgaactgggtggatgaaatgcaggtgcaactcgaccggacagaatggggcagcgacctgccctcagtggagtcacacctcgagaaccacaagaacgttcacagagctattgaggagtttgaatcaagcctaaaggaggccaagatatctgagatacagatgaccgcacctctgaagctcacgtacgctgagaaactgcacagactcgaatcacagtacgctaagcttctgaacacatctcggaatcaagagcggcacctagacactctccacaattttgtcagtcgggctactaacgaacttatttggctgaacgagaaggaagaggaggaggttgcctatgactggtctgaaaggaacacaaacatcgcccggaaaaaagattatcatgccgagctcatgagagagctggaccagaaggaagagaacatcaaatcggtgcaggaaatcgccgagcaactgctgctggaaaatcaccccgctcgcttgaccatcgaggcctatagggccgcaatgcagactcagtggtcttggatccttcagctgtgccaatgtgtggaacagcacatcaaggaaaatacggcctactttgagttttttaacgacgcaaaggaagctactgactacctacggaaccttaaggatgcaatccagcgtaagtacagttgtgatcggtcctcttctattcacaagctggaggacttagtccaggaaagtatggaagagaaggaggagctgttgcagtacaagtctactatcgccaacttgatggggaaggcgaagactatcatacaactcaagcctcgtaactcagattgtcccctgaaaacctcaattcctatcaaggctatatgtgattaccgccaaatagaaatcacgatttataaggacgatgaatgcgttctcgccaataattcgcaccgggccaaatggaaggttatcagccccactgggaatgaagcaatggtcccctctgtgtgttttactgtaccacctcctaataaggaagctgttgatttggcgaaccgcatagagcagcagtaccagaatgtgctaaccctctggcacgagtctcacattaatatgaaatctgtcgtgtcatggcactatcttatcaacgagatagatcggattagagccagcaacgtggcgtccatcaaaactatgcttccgggggagcaccagcaggtgctctcaaatctgcagtccaggttcgaggatttcttggaggattctcaggaatcccaggttttcagcgggtcagacatcactcagttggagaaggaggtcaacgtgtgcaagcagtattaccaagaactgctgaaatccgcggaaagggaggaacaagaggagtccgtgtacaacttatacatatcagaggtgcgaaatatcagactgagactagaaaattgcgaagatcgactcattagacagattcggacaccactggagagggacgacttacacgaatccgttttccgcataaccgagcaggagaaattaaagaaggagttagaacgtttgaaggatgatttgggcactatcactaacaagtgcgaggagttcttctcacaggctgctgcctcatcatccgtccctacgttgcggtcagaactgaacgtagtgctccagaacatgaatcaagtctacagcatgtcaagcacatacatcgataagcttaaaaccgtcaatctcgtccttaaaaacactcaggccgcggaggcgctggtgaagctgtacgaaactaaactgtgtgaggaggaagcagttatcgccgacaagaataacattgagaatctgatcagcaccctgaaacagtggaggagtgaggtcgacgaaaagagacaggtctttcatgctttggaggacgaactccagaaggccaaagcaatctccgatgagatgttcaagacatataaggagcgggatctggatttcgactggcacaaggaaaaggcggaccagctcgtggagcgatggcaaaacgtgcacgtacagattgacaatcgcttaagggaccttgagggtattggaaaaagtctcaagtactatcgcgacacctaccatcctctggatgattggatccagcaggtcgagacaactcaacgcaagatacaggaaaaccagccggagaatagtaaaactctggctactcaattaaatcagcagaaaatgctagtcagcgagatcgaaatgaagcagtcaaaaatggacgaatgtcagaaatacgcagagcagtacagcgccaccgtgaaagactacgagctccagaccatgacctacagagcaatggtagattctcaacagaaaagccctgtgaagcgaagacgcatgcagtcaagcgcagatctgattatccaggagttcatggatctacggacacgctacacggcccttgtgaccctgatgacccagtatataaagttcgctggagacagcctcaagaggctggaggaggaagagaaatctctcgaggaagaaaagaaagaacacgtagagaaagcgaaggaacttcagaagtgggttagcaacatatcaaaaactttgaaggatgccgaaaaagctggcaaaccaccctttagcaaacaaaagattagcagtgaggaaatctccaccaagaaagaacagctgtctgaggcactccaaacaatccagcttttcctggctaagcatggagacaagatgaccgatgaggagcggaacgagctggagaagcaggtaaagactctccaggaaagctataatcttttatttagcgagtccctcaagcagctccaggagtcacagaccagcggcgatgtgaaggtggaagaaaagctggataaagtaatcgcagggaccatcgaccaaacaaccggcgaagtgctcagcgtatttcaggccgtcctccggggtttgattgattacgacacgggcattcgactgctggagacgcagcttatgatttctggactgatctccccagaactgaggaagtgtttcgaccttaaggacgccaagagccacggactgattgacgaacagattctgtgccaactgaaggaactctccaaggcaaaagaaatcatttcggctgcgagccccacgacaatccccgtccttgacgccctggctcaaagcatgataacagagagcatggccatcaaagtactggagatcctgctttctaccgggagcttggtgatccctgcaacaggcgaacagctcacactccagaaggcttttcagcaaaatctagtgtcatcggccttgttttcaaaggtgttggaacggcaaaacatgtgtaaggacctcattgatccctgtaccagcgagaaggtttctctgattgacatggtgcagagaagtacactacaggagaacaccggaatgtggctcttgcccgtacgccctcaggaaggagggaggatcaccctgaaatgcgggaggaacatatccattctgagagcagctcacgaggggctgattgatcgagaaaccatgttccgcctgctctcggctcaactcttgagcgggggactcataaacagtaattccggccagcgcatgaccgtcgaagaggctgtgcgtgagggtgtcattgatagagacactgctagttcaatccttacataccaggtacaaactggtggcataattcagtcaaaccctgcaaagcgcctaaccgtggacgaggccgtgcagtgtgacctgattacttccagctcagccctcctggtgctggaagctcaacggggctatgtaggcttgatttggccccattccggcgaaatcttcccaacttcctcgtctctccagcaggaactgattacaaacgagcttgcttataaaattctgaatgggcgccagaagatagccgccctctatatcccagaatcatctcaggtaatcggcttggacgccgcaaagcagctggggatcatcgacaacaacactgcatctatcctcaagaacatcaccttgcctgataagatgcctgacttgggcgatttagaggcttgtaaaaacgctagacgttggctgtccttctgtaaatttcaaccgagcaccgttcacgactatcgtcaagaggaggacgttttcgatggcgaggaaccggttaccacacaaacctcagaggaaaccaaaaagctgttccttagctatctaatgataaactcttatatggacgctaacacaggccagagacttttactgtacgacggagacttagatgaagctgtgggaatgctgctcgaggggtgccacgccgaattcgatggtaacacagctatcaaggagtgcctcgatgtcctctccagctctggcgtgtttttgaataacgcctctggccgtgaaaaagatgagtgcactgccaccccgtcctcattcaacaaatgtcactgtggcgaacccgagcatgaggagacacctgagaataggaagtgtgctattgacgaagagtttaatgagatgagaaacaccgttatcaactcagaattcagccagtcggggaagctcgcttccacgataagtatcgacccaaaggtgaacagcagtccaagcgtgtgtgttccttccctgattagctacctcacacagactgagctcgccgatatcagtatgctgcggagcgacagcgagaatatcctgaccaactacgagaaccagagcagagtggagactaatgaaagagccaacgagtgtagccattctaagaacatacagaactttccgtcagatctgattgagaatcccattatgaagtcgaaaatgagtaaattctgtggcgtgaacgagacagagaatgaagataatactaacagggacagcccaatattcgactactccccacggttgagtgccctgctgtcccatgataagctgatgcacagccagggaagtttcaacgatacccacacccctgagagcaacggcaataaatgcgaagcgcccgccctgtctttctcggataagacaatgctcagcgggcagcggatcggggaaaaatttcaagatcagtttctgggtattgcagccattaacatctcattacccggggaacagtatgggcaaaaatccctcaatatgatttcaagtaatccacaggttcagtatcacaatgacaagtatatcagtaacacttcaggtgaggacgagaaaactcacccgggttttcaacagatgcctgaagacaaggaggatgagtccgaaatagaggagtactcctgtgcagtgacgcctgggggagatacagacaatgccatcgtgtcacttacctgcgctactcccctgctggatgagactatatccgcatccgattacgagacaagcttacttaacgatcagcagaataataccggaacggacactgatagtgatgacgacttttatgacacaccgttgttcgaggatgacgaccacgacagcctccttttggacggagatgaccgggattgcctccaccctgaggactacgacacactccaggaagagaatgacgaaaccgctagtcccgccgatgtcttctacgatgtgtctaaggagaacgagaatagcatggtaccccagggcgcaccagtcggtagcctcagcgtcaaaaataaagcgcactgcctgcaggattttctaatggacgttgagaaagacgaactggattccggtgaaaagatccacctgaatccagtaggctccgataaggtcaacgggcagtctctggagactggaagcgaacgcgagtgtaccaacatccttgaaggcgacgagagcgactcattaaccgattacgatattgtggggggcaaagagagcttcacagcaagcctaaagtttgatgatagcggatcatggcgcggccgcaaggaggaatacgtgaccggtcaggagtttcactctgacactgaccatcttgactccatgcagtccgaggagtcgtatggagactatatctacgactcgaatgatcaggacgatgatgacgatgatgggatcgacgaggagggagggggaatccgtgatgaaaatggcaaaccccgttgccaaaatgtcgccgaagacatggatatccaactgtgcgcttctatcctcaacgagaattccgacgagaacgagaacattaacacgatgattctgctcgacaagatgcattcatgcagttctttggagaagcagcagagggtgaacgtggtccagttggcctctccttccgagaacaaccttgttaccgagaaatccaacctcccggagtacaccacggaaatagccggcaagtcgaaggagaacttactcaaccacgagatggtgttgaaggatgtgctcccaccaataatcaaggataccgagagtgagaaaacatttggccccgcctccatctcacacgataacaataacattagctctactagtgagttaggtactgacctcgctaacacaaaagtaaaactaattcagggctccgaattaccggaactcactgactctgtcaaaggaaaagatgagtactttaagaatatgacccctaaagtcgattcctctcttgatcatatcatatgcacagagcccgatctaataggtaaacccgccgaggaatctcatcttagtctaatagccagtgtgaccgacaaagaccctcagggtaatggttctgatctgattaaagggcgagacggcaagagcgatatactcatagaagacgagacctcaatccagaaaatgtacctcggtgaaggagaagtcttggtagagggactcgtggaagaggagaaccgacaccttaaattactgcccggaaaaaatacaagagacagcttcaaactgatcaatagtcagtttcctttcccgcaaatcactaataacgaggaactaaaccagaagggctccctcaagaaagctacagtgaccttgaaggacgagccaaacaatttgcagataattgtgagcaagtcacccgtgcagttcgagaacctggaagagatattcgatacatccgtgagcaaagaaattagtgacgacatcacctccgatatcacgtcctgggaaggtaacacccacttcgaggaaagtttcaccgacggccccgagaaagagttagacctctttacatatctcaaacactgtgcaaaaaacatcaaggccaaggacgtggccaagcccaacgaagacgtccccagccatgtcctaataactgccccgcccatgaaggaacacctgcagctgggggtgaataacactaaggagaagtcgacctccacccagaaggactctcccctaaacgacatgatccaaagtaacgatctgtgttcaaaggaaagcattagcggtggcgggaccgagattagccagtttacacccgaatcaattgaggcgacgctatctatattatctaggaagcatgtagaggatgtgggaaaaaatgacttccttcagagcgagagatgcgctaatggcctgggcaacgacaattcgtccaatactctaaatactgattattccttcctcgagattaataataagaaagagcgtatcgagcagcagctccccaaggaacaggcactatctccacgttcacaggaaaaggaggtgcagatccccgagctgagccaggtgtttgtggaggatgttaaagacatcctgaaaagccgactgaaagagggccacatgaatccgcaggaagtagaagagcccagtgcctgcgcagataccaagattctcattcaaaatctgattaagcggattacaacaagccaactggtaaatgaagcttccactgttcccagtgacagtcagatgtcggacagcagtggcgtttcgcccatgaccaactccagcgaacttaagcctgaatcccgagatgaccctttttgtatcggaaacctcaaatccgagctgctacttaacattttgaagcaggatcagcactctcaaaagatcacgggagtctttgagctgatgagagagctgactcatatggaatatgatttggagaaaagaggaattaccagcaaggtgctccctctgcagttggaaaacatcttttacaaactgctggccgacggctattccgaaaaaatagaacacgtcggtgattttaaccagaaggcctgctccacttctgagatgatggaggagaaaccacacattttgggagacataaagtcaaaggagggcaactattactcaccaaacctggaaaccgttaaggaaataggcctggagagctctacagtgtgggcttccacgctccccagggatgagaagctaaaggacctctgtaatgacttcccatcgcatcttgagtgcacaagcggttccaaagaaatggcctccggcgactcaagcaccgaacaattcagcagcgaattgcagcaatgccttcagcatactgaaaaaatgcacgaatacctgacactgctgcaagacatgaagccgcccctagacaatcaggagtctttggacaataatcttgaagccctgaagaatcagctccgccagctggagaccttcgagctcgggctggccccgatcgccgtcattctaagaaaggacatgaaactggccgaggaattccttaagtcgctgccaagcgatttcccaaggggacacgtcgaggaactctctatttctcatcaatcactgaagacagcattctcctcgctgtcaaacgtgtctagtgagcgcacaaagcagattatgctcgcaatcgattctgaaatgagcaagctcgccgtgtctcatgaggaattcctgcacaagttaaagagcttctcagattgggtcagcgagaagagcaagtcggttaaggacatagagatcgttaacgttcaggattcggagtatgtgaagaaacgcctagagttcttgaagaatgtgttgaaggacctcggccacacgaagatgcaacttgaaaccactgccttcgacgttcaatttttcatctcagaatacgctcaggatttatcccctaatcagtctaagcaattattgaggctcctcaataccacccagaagtgtttcttggatgtacaggagagcgtgaccactcaggttgagagactggaaacccagctccacctcgagcaagatctcgacgaccaaaaaatcgtagccgaacgccagcaagaatacaaggagaaactgcaggggatttgcgatctcctcactcagaccgagaacagactgataggacatcaggaggcgtttatgatcggcgatgggaccgtcgagttgaaaaagtaccagagtaaacaggaagagctgcagaaggatatgcaggggtcggcccaggcacttgccgaggtggttaaaaacacagaaaactttctgaaggagaacggcgaaaaactcagccaggaagataaggccctcattgaacaaaaactgaacgaagctaaaatcaagtgtgagcagctgaatcttaaggctgagcagtctaagaaggagctcgataaggtcgttaccacagccattaaggaggagaccgagaaagtcgccgcagtaaaacagttggaagagtccaagaccaagatagagaacctgctggattggctctccaatgtagacaaagacagtgaaagagcaggtaccaaacacaagcaggtgatagaacagaacgggacgcattttcaggagggcgatgggaagtccgctatcggagaggaagacgaagtgaatggtaacctccttgaaaccgacgttgatggccaggtaggaacaacacaggaaaacttgaatcagcaataccagaaggtcaaagcccagcacgagaaaattatcagtcagcaccaggccgtgatcatcgcgacgcagtccgctcaggtgctcctcgagaagcagggacaatacctgtcacctgaagaaaaagaaaaactccaaaaaaatatgaaggagctgaaagtgcattacgagacagccctggccgaatctgaaaagaaaatgaagttgacacattcccttcaggaagaacttgagaaattcgacgcggactatacagagtttgaacactggctccaacagtccgagcaggaactggagaatctggaagccggagctgatgacattaacggcctgatgactaagctgaagcgccagaagagtttttcggaggatgtgatttcacacaagggagacctccgatatattaccattagtgggaaccgggtcttagaggccgccaagtcttgctcgaaaagggatggggggaaggttgacaccagcgccacgcacagagaagtgcaacgtaaactggaccatgccacagaccgctttcggtcgttgtacagcaagtgcaacgttcttggaaacaaccttaaagaccttgtggataagtatcagcactatgaagatgcttcttgtggattgcttgccggcctgcaagcttgcgaggcaactgcatcaaagcatcttagtgaaccaatcgctgtggacccaaagaacctccagagacaattggaggaaactaaggcgctgcaaggacaaatctcatcccagcaggtggctgtggagaaactgaagaagacggccgaggttctgttggacgcacgcggctccttattgccagccaaaaacgatatacagaagactctagatgacatcgtaggtagatatgaagatctgtcaaagtccgttaatgagcgcaatgaaaagttgcagatcaccctgacaaggtctcttagcgttcaggacggcctcgacgaaatgctcgattggatggggaacgtggagtcttctctgaaggagcaggatgtaggaacaggctattgtaggagcagcgagcagtataagtgtcacgaatag

SEQ ID NO: 304939 - DNA, 22386 bp, Artificial Sequence
  derived and/or modified sequence
atggccggctacctgagccccgccgcctacctgtacgtggaggagcaggagtatctgcaagcatatgaagacgtgctggagagatacaaggatgaacgagacaaggttcagaaaaagacgttcacgaagtggattaatcagcatctaatgaaagtgaggaaacatgttaatgatctctacgaagaccttagagacggacacaacttgatttccctgctcgaagttctcagcggagatactttgcccagggaaaaaggaaggatgaggtttcaccgcctgcagaatgttcaaatagcccttgattatctgaagagacgacaagtcaaactagtgaacatcaggaatgatgacatcaccgatgggaatccgaaactcacactgggacttatttggacgatcattctccatttccaaatttccgacatacatgtgactggtgaaagcgaagatatgagcgctaaggagcgcttactcttgtggacgcagcaggccactgaaggttacgcaggtattaggtgtgaaaatttcaccacgtgttggagagacggtaaacttttcaatgcaataattcacaagtacagaccagatctgatcgacatgaacaccgttgccgtacaaagcaacctagcgaacttggaacacgcattctacgtcgccgaaaagatcggcgtgattcggctccttgatcccgaagacgtggatgtctcctcaccagacgaaaagtcggtgattacctacgtgtctagcttgtatgacgcctttcccaaagtacccgaaggaggagaaggaatcggcgccaacgacgtcgaagtgaagtggatcgagtaccagaatatggtgaactatctcatccagtggattcgccaccacgttacaacaatgtctgaacgaacttttccaaacaaccccgtcgagctgaaagcgctctacaaccagtatctgcagtttaaggaaacagaaatcccccccaaagagaccgagaagtctaaaataaaacgactgtataagctgcttgaaatttggattgagtttgggcggatcaaactcctgcagggataccatcccaacgatatcgagaaagagtggggtaaactgataatagccatgttagagcgggagaaagccctgcggccggaggtggaacggttagagatgctacaacagatagcaaatagagtgcagcgcgactctgtcatatgtgaggacaaactcatcctcgccgggaatgccttgcagtcagattccaagcgcctggagtctggcgtgcaatttcagaatgaagctgagattgccggttacatactcgagtgtgagaacctactgagacaacacgtcatagatgtccagattctgattgatggcaaatattatcaggctgatcagctggtgcagagagttgccaaattacgggacgaaataatggcgctcagaaacgaatgcagtagcgtatatagcaagggccgaattcttacgaccgagcaaaccaagctcatgatttccggcatcacacagagcttgaactcaggctttgctcagacccttcacccatctctcacttctggactcacacagagtctgactccttcactcaccagctcatcgatgacctcaggattgtcgtccggcatgaccagtcggctaaccccctccgtgacgcctgcttacaccccagggtttcctagcggactcgtgcctaacttctctagcggcgtggagccaaactctcttcaaaccctcaaattgatgcagattagaaaaccgctcctaaaaagcagtctgctagaccaaaaccttaccgaggaggaaattaatatgaaatttgtccaggacctgctcaactgggttgacgaaatgcaggtacagctcgaccgcacggaatggggaagcgacctgccatccgtggaatctcatctggagaatcataaaaacgtgcacagggctatcgaggagttcgaatcgtctctgaaggaagcaaagatatctgagatacagatgacagcccctctgaagctgacatacgcagagaagcttcatagactcgaaagccagtatgccaagctgttaaacacctctcgcaatcaggagagacatctcgatacccttcataatttcgtgtcacgtgccaccaacgagcttatctggctaaacgagaaagaggaagaggaagtcgcttatgattggagtgagagaaacactaatattgcccgcaagaaggactaccacgctgagctgatgagagagttagatcagaaagaggaaaacattaaaagcgtgcaggaaattgctgaacagctacttcttgaaaatcatcctgcccggctaacaatcgaagcatacagagcagctatgcaaacacagtggagctggatcctccagctgtgccagtgtgtcgagcagcatatcaaagaaaataccgcatatttcgagttttttaacgatgccaaggaagctactgattacctgaggaacttaaaggacgctattcaacggaagtactcatgtgaccggtcgagctccatccacaagctcgaagacctcgtacaagaaagtatggaggaaaaggaagaattgctgcaatataagtctacgatagcgaatctcatgggcaaggccaagaccatcattcagctgaaacctagaaattccgattgtccacttaaaacaagcatacctatcaaagctatatgtgattacaggcagatagagatcaccatttacaaagacgacgagtgcgtccttgcaaataattctcatcgcgcaaagtggaaggtgattagccccaccgggaatgaagctatggtgcctagcgtctgctttacggtaccaccacccaataaagaggctgtggacctggcaaaccgtattgagcaacagtaccagaatgtactaaccctgtggcacgaatctcatattaatatgaagagtgtggtgtcatggcattaccttatcaatgagatagatcgcattcgggcttcgaatgtggcctccattaaaaccatgctccctggcgagcatcaacaggtccttagtaatctccagtcacggtttgaggactttctagaggactcacaggaatcccaggtattttctggatccgatattacacagctggagaaagaggtgaatgtctgtaagcagtactaccaagagctgttaaagagcgccgagagagaggaacaagaggagagcgtttataacctgtacataagcgaagtaagaaacatcagacttcggctggaaaactgcgaggatcggcttatacggcagatcaggactcctctcgaacgagacgacctgcacgagtcagtctttcgaataaccgagcaggaaaagctgaagaaagagctggaacgcttgaaggacgacctggggacaatcaccaacaaatgcgaggaattctttagtcaagctgccgcttcttcctccgttcctaccctaagaagcgaactgaacgttgttttgcagaacatgaaccaggtttacagtatgagtagcacctatatcgataaactcaaaacggtgaatctcgtgctgaagaatacccaagccgccgaggctttggtgaaattgtacgaaacaaagttatgcgaggaagaggcggtaatcgccgataagaataacatcgagaatctgatcagtacactcaaacagtggcgcagcgaggttgatgagaagcgccaggtttttcacgcactcgaggatgaactccagaaagctaaagccatatctgacgagatgttcaagacgtacaaggagcgagatctggattttgattggcacaaggaaaaggcagaccagctcgtcgagagatggcaaaatgttcacgtccaaatcgataaccggttgcgggatctggaaggtattgggaaatccttgaagtattatagggacacataccatcccttggatgactggatacagcaggtcgagactacccagcgaaagattcaggaaaatcaacctgagaattcaaaaacgctggccacccagctgaatcagcaaaagatgttggtgagcgagatcgagatgaagcagagtaagatggatgagtgtcagaagtacgcagaacagtactctgctacagtgaaggattatgaactgcagactatgacttatcgggctatggtagactcacaacaaaaaagcccggtgaagcggcgccgtatgcagagctccgccgacttgattattcaggagtttatggatctccgcactcggtacaccgctctggtgacactgatgacacaatacatcaaatttgcaggcgattcgcttaagagactggaggaggaagagaagtcactggaagaggaaaagaaagaacacgtcgaaaaggcgaaggagctgcagaaatgggtttccaatatttctaaaacactgaaggacgccgaaaaggctggaaaaccacccttttctaagcagaagatctcttcagaagaaatttccacgaagaaagagcagctgagtgaggcactgcagactatacagctgttccttgccaaacatggagacaagatgaccgacgaggagagaaatgagctggaaaaacaggtgaagactctgcaggagagctataatctcctcttctccgagtctttaaagcagctccaggaatcccagacatcaggcgatgttaaagtggaagaaaagctcgataaggtgatcgccgggacaattgaccagacaaccggagaagtactgagcgtgtttcaggccgttttgagggggttaatcgattatgacaccgggatccgccttctggagacgcagctgatgatctccggcctcattagccctgagcttcggaagtgctttgacttgaaggacgccaaaagccacggtttgatcgacgagcagattctgtgtcagctaaaggagctcagcaaagcaaaggagatcattagcgccgcttcccctactaccattccagtgctcgatgccctcgctcagagtatgatcacagaatccatggccatcaaagtgcttgagatactgctaagtacaggctccctcgtgatacctgctaccggtgagcagctgactctgcagaaagcatttcaacagaacttggtaagcagcgcacttttcagcaaagtccttgagcggcagaatatgtgcaaagacctcattgacccctgtacatcagaaaaagttagtctcatagacatggtgcaacggagcaccctccaggaaaataccggtatgtggctgctaccggtgagaccacaggaaggtgggcgcataactctaaagtgcggcagaaacattagcattctgcgggccgctcacgagggtctcattgatagggagacgatgttccgcctgctgtccgcacagcttctttcggggggcctgattaactctaattcaggacagcgcatgactgtggaggaggcagttcgagagggagtgattgatagggatactgcctcatcgattttgacatatcaggtccagaccggaggaatcatccagagtaatcccgcaaaaagactgactgtggatgaagctgtgcagtgtgacctgatcacctcgtccagtgccctgctggtgttagaggcccagcggggctatgttggactgatatggcctcattccggggagatctttcccactagctcatctctgcagcaggaattgatcaccaatgagctagcctacaagatactgaatggaaggcaaaaaatcgccgctctgtacatccctgagtctagccaggttatcggccttgatgccgcaaagcagctgggaattatcgacaacaacacggcaagcatcctgaagaatattacattgccggataagatgcccgacctgggagacctcgaggcgtgtaaaaacgctaggagatggctgtctttttgcaagtttcagccaagcaccgtgcacgactaccggcaggaggaggacgtgttcgatggcgaagagccagtgacaacacagacttccgaggaaacaaagaagctgttcctgtcgtaccttatgattaactcatatatggacgcgaatactggacagcgcctactgctttatgacggcgacctggatgaggctgtgggaatgctcctggaaggctgccacgccgagttcgacggaaacacagccattaaggagtgtctagacgttctgtccagctctggggtcttccttaataatgcgagcgggagagaaaaggacgaatgcacagccactcccagctcttttaacaaatgccactgcggcgaaccagagcacgaagagacacccgaaaacagaaagtgcgcaatcgacgaagaatttaacgagatgagaaacacagtaattaatagcgagttctctcaatcaggcaagctggccagtaccatctccattgaccccaaagtcaactcatccccaagtgtgtgcgtgccttctcttatcagttatctcacacagacagaactagctgacataagcatgctcaggtcagactctgagaacatcttaacaaattacgagaatcaaagtcgggtggagaccaatgagcgggccaatgagtgtagccattcaaaaaacatccagaattttcccagtgatcttatcgagaatccaatcatgaaatcgaagatgtccaagttttgcggggtgaacgagaccgaaaacgaagacaataccaatagagacagcccgatctttgactacagcccgaggctctctgcacttctgtcccacgataaactgatgcattctcaggggagcttcaatgacacacatactcccgagtccaatgggaataagtgcgaagccccagcattgtctttttcagacaagactatgctgagcggacaacggattggagaaaagttccaggatcaatttttgggaatcgccgccatcaacatatctctcccaggcgagcaatacggccagaagtctttgaatatgatctctagtaatccacaggttcagtaccataacgataaatacatatccaatactagtggcgaggacgagaagacacatcccgggtttcaacagatgcccgaggataaggaggatgaaagcgaaatagaggagtactcctgcgccgttacaccaggaggggacactgacaatgctattgtgagtctcacctgcgccacaccactcttggacgaaactatatctgccagtgattacgaaaccagcctgctcaacgatcagcagaataacactggaacggataccgattccgacgacgacttctatgacacacccctgtttgaggatgatgaccatgacagtcttctgctggacggagatgatagggactgtttgcaccccgaggattatgacacccttcaagaggagaacgacgagacagcatcacccgcagacgtcttttatgatgtgagtaaagagaacgaaaatagcatggtccctcagggcgctcccgtgggcagtctctcagtgaaaaacaaagcccattgcctgcaggacttcctgatggacgtcgaaaaagacgagctggactcgggtgagaaaatccatctaaaccccgtgggtagcgataaggtaaacgggcagtcactggagaccggtagtgaacgcgaatgtacgaatatccttgagggtgatgaaagtgatagccttaccgattatgacattgttggaggtaaggaaagcttcacagcgtcccttaagtttgatgacagcgggagttggcggggacgaaaggaagagtatgtgactggccaggaattccattctgacaccgaccaccttgactcaatgcagtctgaggaatcatatggcgactacatttatgattctaatgatcaggacgatgatgatgatgacgggatcgatgaggagggcggcgggatacgtgacgagaacggaaagcctaggtgtcagaacgtggcagaagacatggatatccagctatgtgctagcatcctgaatgaaaattcagatgaaaacgaaaacattaatactatgatcctgctggataaaatgcacagctgcagctccctcgaaaaacagcagcgggtgaacgtggttcaattggcaagtccatccgaaaataaccttgtcaccgaaaagtctaatctgccagaatatactaccgaaattgccggcaaatctaaggaaaacctccttaatcacgagatggtgctcaaggacgtgctgccccctatcattaaagataccgagagtgaaaagacattcggtccggcctccatctctcatgataataataacattagtagcacatccgagctgggaaccgacttagccaacacgaaagtgaaactaattcagggctccgagctccctgaattgacagatagcgtgaagggcaaggatgagtacttcaaaaatatgacacccaaggtggacagtagtctcgatcacatcatctgcactgagcccgacctgatcggcaagcctgcggaagagtctcacctgtctcttatcgcctccgtgacggataaggaccctcagggaaacggctcagatctgatcaaaggacgcgatggaaaaagtgatatccttatcgaggacgagacatccatccagaagatgtacctgggtgaaggagaagtcctggtggagggactggtggaagaagagaaccggcatttgaaactgctgcctggtaagaataccagggatagctttaagctaattaacagtcagttcccgttcccacagatcacaaacaatgaagagctgaatcagaaagggagcctgaagaaagcaaccgtcacattgaaagatgagccaaataatctccagattatagtgtccaagtcccctgtgcagttcgaaaatctggaggagatcttcgacacaagcgtgtccaaggagatttccgacgatatcactagcgacatcacctcctgggaggggaacacccatttcgaggagtccttcaccgatggacctgaaaaagagctagatctgtttacatatctaaagcactgcgcgaagaacatcaaagctaaagatgtggctaaaccgaacgaggacgtaccttcgcacgttctgattacggctcctcccatgaaggagcacctgcagctaggggtcaataatacaaaggaaaaaagtacctctacccagaaggatagccctctgaacgatatgatccagagtaatgacctttgctctaaagagtccatctctggcggagggactgaaatctctcagtttacacccgaaagcatcgaggccaccttatcgatcctaagccgcaagcatgtcgaggatgtgggaaaaaacgacttccttcaatccgaaaggtgcgctaacggcctgggcaacgacaactcctccaatactctgaacacagattattcgttcctggaaatcaacaataaaaaggaaagaattgagcagcagctgcccaaggagcaggccctttcaccaaggtcacaagaaaaggaggtccagatccctgaactctcccaggtgttcgttgaggatgtgaaagatattctgaagagcaggcttaaagaggggcacatgaatccccaggaagtggaagaaccctccgcgtgtgcggatacaaagatcctgatccaaaacttgatcaaaaggatcactacaagccaactggttaatgaggcctctactgtaccctcggattcacagatgtccgactcatccggggtctctcccatgactaatagctctgaattgaaacctgagtctcgagatgatcccttttgtattggcaacctgaagagcgagctacttttgaatatcttaaaacaagaccagcacagccagaagataacaggcgtcttcgaactgatgagggaactgacacatatggaatatgacctcgagaaaagagggataacttccaaggtcctcccactgcaacttgagaatattttctataagctgctggccgacggatacagcgagaaaatcgaacatgttggcgacttcaatcagaaggcctgcagcacaagtgaaatgatggaggaaaaaccacacatacttggagacattaagtctaaagaaggtaactattacagcccaaatctggagacagttaaggagatcggactagagagtagcacagtgtgggcttcaacgctccctagagatgagaaactgaaggacttgtgtaacgattttccatcccatttggaatgtaccagtgggtcaaaagaaatggcttccggcgatagctcgacagaacagttctctagcgaactacagcagtgcctgcagcacactgagaagatgcatgagtatcttaccttactgcaggacatgaagccgcctctggacaaccaagagagcctggataacaacctggaggctctgaaaaatcagcttaggcagctggagaccttcgagctgggactcgcacctattgcagtcatcctgaggaaggacatgaagttggccgaggagttcctcaagtccttgccatctgacttcccaagggggcacgtggaggaattaagtatttctcaccagtcactgaaaaccgcattctctagtctgagtaacgtgtcaagcgaaagaacaaagcaaatcatgctggctatcgatagcgagatgagtaagttggccgtaagccacgaggaattcttgcacaagcttaaatccttcagcgactgggtgagcgagaagagcaaaagcgtcaaagacatagaaatcgtgaacgttcaggacagcgaatacgtgaagaagcggctagaattcttgaaaaacgtactcaaagacctgggtcataccaagatgcagcttgagaccaccgctttcgacgtacagtttttcatctcagagtacgcacaggacctgagtccaaaccagagcaagcaactactgcggctcctaaatactactcagaaatgtttccttgacgtacaagaaagtgtgacaacccaggtagagagactcgagacacagctccaccttgaacaggacctcgacgatcagaaaatcgttgctgaacgccagcaggagtataaagaaaaactgcagggcatatgcgatctgctgacgcagacagagaaccgactcatcggccaccaggaggcatttatgatcggcgatggtaccgtggaactgaagaagtaccagtctaagcaagaggagctgcagaaagacatgcagggatctgcccaggccctggccgaagttgtaaaaaataccgagaacttcctcaaggagaatggggagaagctgtctcaggaggacaaggccttgatcgaacagaagctgaatgaagccaaaataaagtgtgagcaattaaacctcaaggcagaacagtccaaaaaggagctggacaaagttgtgaccacagcaattaaggaggaaacagaaaaggtagcggcagtcaaacaactagaagagtctaagaccaagatcgaaaacctactcgactggctctccaacgtggacaaggactcagaacgggctggcaccaagcacaagcaagtcatcgagcaaaacggaacacatttccaggaaggcgatggcaagtccgccatcggcgaggaggacgaagtaaatggtaatttactcgaaacagatgtggacggccaagttggcacaactcaggagaatctaaatcagcagtaccagaaggtcaaggcccagcatgaaaagataatcagtcagcaccaggccgtgattatagccacgcagtcagcacaggtgttgctcgaaaagcagggacaatacctgtcacctgaagagaaggaaaaactgcagaagaatatgaaagaattaaaggtgcactatgaaaccgccctggctgagagcgaaaagaaaatgaagctgactcactcacttcaggaggagctcgagaaatttgacgcagattatactgagttcgagcattggcttcaacagtcagaacaggagctcgaaaacctggaggctggagctgatgacatcaacgggttaatgactaaattaaagcgccagaaaagtttttccgaggatgttatatcccacaagggagatctgaggtatattaccatttcaggcaaccgagtgctggaagctgccaagagttgttctaaacgtgatggggggaaagtggacacttcagctacacaccgagaagtgcagaggaagctcgatcatgctactgatagatttcggagtctctactccaagtgcaacgtgttggggaataatctgaaggatctggttgacaagtaccagcattacgaggatgcatcttgtggactgctggccggcctgcaagcttgtgaggccacggcaagtaagcatctgtcagagccaatcgcagtcgatccaaagaacctgcagcgtcagcttgaggagacgaaagccctgcagggacagatctccagccaacaggtcgcagtcgagaagctgaagaaaacagccgaagtgcttttggatgccaggggcagccttctcccagccaagaacgacattcagaagactttggatgacatcgttggccggtacgaagacctaagcaagtccgtcaacgagcgtaacgagaaacttcagatcaccttgactagatctctgagcgtccaggatggtctcgacgagatgcttgactggatggggaatgtggagtcttccctgaaggagcaggggcaggtcccgttgaacagcactgcattacaggacataatatctaaaaacatcatgctggaacaggacattgccggcaggcaaagctcgattaacgcaatgaatgagaaggtcaaaaagttcatggaaacgacagatccaagcacagcaagttcacttcaggccaagatgaaggatctcagtgccaggttctctgaagcgtcacataaacataaggaaacactggctaagatggaggagttgaagactaaggttgagctattcgaaaatctgtctgagaaattacagacgtttcttgaaacaaagacccaggcattaactgaggtagatgttccagggaaagatgtcacagagctgtctcaatacatgcaggagtcaacctccgaattccttgagcataaaaaacacctcgaagtcctgcactccctgctcaaagaaattagctcccatggacttcccagcgacaaagcgctggtccttgagaaaacaaacaatctctcgaagaagttcaaggaaatggaggacaccataaaggaaaaaaaggaagcggttacgagctgccaggaacagttggacgccttccaggtgcttgtgaagagcttgaagtcatggattaaggagactacaaaaaaggttcccattgtccagcctagtttcggcgccgaagaccttggtaagagtctggaggacaccaaaaagctgcaggagaagtggtctctcaagaccccggaaatccaaaaagtaaacaactccggcattagtctgtgtaatctgatttctgccgtcacgacgccagcaaaggcaattgcagctgtcaagtccggtggggccgtactgaacggagaaggaaccgcaaccaataccgaggagttctgggccaacaagggactcactagtatcaaaaaggatatgactgacatctcgcacggctatgaagatcttggacttcttctcaaggacaaaatagcggaattaaatacgaagctttctaagcttcagaaagcccaggaggagtcatccgcaatgatgcaatggctccaaaaaatgaataagacggcaaccaaatggcagcagactcccgccccaaccgacactgaggccgtgaagacccaggtggagcagaacaagtcattcgaggctgagttaaagcagaatgtgaacaaagtccaggagctgaaagacaagctcacagaactgttggaggagaaccctgatacacctgaagcccctagatggaagcagatgcttaccgagattgactctaaatggcaagagctgaatcagcttacaattgatcgccagcaaaaactggaagagagtagcaacaaccttacgcagttccaaacagtggaggctcaactgaagcaatggcttgtggagaaggagctgatggtgagcgtgcttgggcctctttctatcgacccgaatatgcttaacacacaacgccagcaggtacagattctgctacaggaattcgcgacccgtaaaccccagtatgaacaactaacggcagctgggcagggcatcttgagccgccccggtgaggaccccagtctgcggggtattgtgaaggaacagttggctgccgttacacaaaaatgggatagtctcacaggtcagctgtcagatcggtgtgactggatagatcaggcgattgtgaaaagtacacagtaccagagcctgttgcgcagtttaagcgacaaactgtccgacctggataacaaactgtcttctagcctggccgtttctactcaccccgacgctatgaaccagcaactcgaaactgctcaaaaaatgaagcaggagatccagcaggagaagaagcagattaaggtggcccaagcattgtgtgaagacttgagcgccttggtgaaagaagaataccttaaggccgaactttcaagacaactcgagggcatcctaaaatctttcaaagacgtggagcaaaaggccgagaaccatgtgcaacatctccaatctgcatgtgcgtcgagtcaccagtttcagcagatgtccagggattttcaggcttggctggatactaaaaaagaagaacagaataaaagtcacccgattagtgcaaagttggatgttctggagagccttatcaaagaccataaggatttctccaagactctcactgcccaaagccatatgtacgaaaagaccattgcagaaggagaaaacctcttgcttaagacccagggctccgaaaaggccgcactgcaattacagctgaacaccattaagacaaattgggacaccttcaacaagcaagtgaaggaacgagagaacaagctgaaagaatccctcgaaaaagccctgaagtacaaagagcaagtagagactctctggccgtggatcgacaagtgccagaacaacctggaggaaatcaagttctgcttggatcccgctgagggcgaaaacagcattgctaagctgaaatcccttcagaaagagatggaccagcacttcggcatggtagagctccttaataatacagcgaacagtcttctgtccgtatgcgaaatcgacaaggaagtggtcacagacgaaaataagtctctgatccaaaaggtggatatggtcactgagcagctgcattccaaaaagttttgcctggagaatatgacgcagaaatttaaggaatttcaggaagtgtccaaggaatcaaaacgccagcttcagtgcgccaaggaacagctggatattcacgacagcctcggctctcaggcatactccaataaatacctgaccatgctacagacccagcaaaaaagcttgcaggccttgaaacaccaggtggacctcgctaaacggctggcacaggaccttgttgtggaggccagtgatagtaaagggacctccgatgtactgctccaggtagaaaccattgctcaggagcattcaacgctgtctcagcaggtcgacgagaaatgctctttcctggagaccaagttacaaggcattggacatttccagaacaccatccgtgagatgttttctcagttcgctgagtttgatgacgagctcgattccatggcccctgttggacgggacgctgaaacccttcagaagcaaaaagagaccatcaaagcttttttaaagaagctggaggcactcatggccagcaatgacaacgctaataaaacctgcaagatgatgttagctactgaggaaacctctcctgacctggtaggcatcaaacgcgacctcgaggctctttctaagcagtgcaataagttgttggatagagcccaggcccgtgaagaacaggtggaagggaccattaagaggttagaagaattctactccaagctcaaggagttctcaatccttctgcagaaagccgaagaacatgaagagagccagggacccgtcgggatggaaacagagaccattaaccagcagctcaacatgtttaaggtgttccagaaggaagaaatcgaacccctgcagggaaaacagcaagacgtgaattggctggggcaggggctcattcagtccgccgccaaaagtacttccacccaaggactcgagcacgacctcgatgacgtgaatgcacggtggaagacattgaataagaaggtggcccaacgagcagcccagttgcaggaagctctactgcactgcggtagatttcaagatgcactagaatcactgttatcttggatggtggacactgaggaactggtggccaaccagaaacccccttcagcagagttcaaagtggtcaaagcgcagatccaggaacaaaagttactgcagaggcttttagacgataggaaaagcacggtggaagtgataaagcgcgaaggtgaaaaaatcgccactacggccgaaccggcagacaaagtcaaaatactaaagcagttgtcattgttggactcccgctgggaggcactcctgaacaaagcagaaacccgcaacagacagctggagggcatctctgttgtcgcccagcagtttcatgagacactcgaacctttgaatgagtggctgacaaccattgaaaaaaggctggtcaattgcgaaccgattggcacacaggctagcaagcttgaggagcagattgctcagcacaaggtcctgcaggaggatattcttcttcggaaacaaaacgtcgatcaggcccttcttaacgggctggagctcctaaagcaaaccacgggagacgaagtactgataattcaggacaaactggaagccattaaggcccgatacaaggacattaccaagctgagcacagacgttgctaagaccttggaacaggcgctacagctcgcaaggcgactgcacagcacgcatgaggagctctgcacttggctggacaaggtcgaagtggaactgctaagctatgaaactcaggttcttaagggcgaagaggcttcacaggcccagatgcgtcctaaagaactcaagaaagaggccaagaataataaggctttattggacagcctgaatgaggtgagctcagccctcctggagttggtcccttggcgcgcaagagaaggtctcgaaaagatggtcgcggaggataatgaaaggtataggcttgtgtccgacaccatcacccagaaagtcgaagaaatcgacgccgcaatcctacggtctcagcagtttgaccaggcagccgacgccgaactcagttggatcactgagacagagaagaaactgatgagtctgggcgatatccgtctggagcaagatcagacatccgctcagctccaggtgcagaagacttttaccatggagatactgaggcataaggatatcatcgatgatctggtgaagagcgggcacaaaattatgacggcatgcagcgaggaggaaaaacagagtatgaaaaagaaactcgataaggttctaaagaattacgacactatttgtcagattaattcagaacggtatctccaattagaacgcgctcagtcactggtcaaccaattttgggaaacttatgaggagctttggccatggttgacggagacacagtcaatcatctctcagctgcccgcacctgcgcttgaatacgagacactgcgccaacagcaggaggagcataggcagctgagagagctgattgctgaacacaagccgcacatagacaaaatgaacaaaacgggaccccagctcctggaactttcccccggtgaaggctttagtatccaagaaaaatatgtggcagctgatactctctactctcaaattaaagaggacgtgaagaagagggccgtggctcttgacgaagctatctcccaatctacacagtttcatgacaaaatcgatcaaatactggagtctcttgagcgaatcgttgagcgactcagacaacccccttccatctctgcagaggtggagaagatcaaagaacagatttcagagaacaagaatgtctccgtagatatggagaaacttcagcctttgtacgagacgctgaaacagcggggagaggagatgatcgctcgtagcggcgggaccgacaaagatatctcggccaaggccgttcaagacaagttagatcagatggtgttcatttgggagaacatacataccctagtagaggaaagagaagctaagctgctggacgtgatggagcttgctgaaaagttttggtgcgaccacatgtctcttatcgttactattaaggatacccaggacttcatccgggacttggaggatcctggaatcgacccttccgtagtaaagcaacagcaggaagccgcagagactatcagagaagagatcgacggtctgcaggaggagctggacatcgtcataaatctggggtcggagctcatcgctgcttgcggcgagcctgataagcctatcgttaagaagtccatcgatgagttgaatagtgcctgggactccctcaataaggcctggaaggataggatagacaaactagaagaggctatgcaggccgccgtccaataccaggacggattgcaggccgtcttcgactgggtagacattgccggagggaagctggcttcgatgagtcctattggtactgacctggaaacggtgaagcagcagattgaggaattaaaacagttcaaatccgaggcctaccagcagcagatcgagatggagcgcctcaatcatcaggctgaattacttctgaagaaagtgactgaggagagcgacaagcacacggtccaggacccacttatggaactgaagctgatctgggacagcctagaggaaaggatcataaatagacagcacaaattagagggggccttgcttgcactgggccagtttcagcacgcgctggatgagctcctcgcttggttgacccatactgagggtttgctctctgagcaaaaaccagtggggggggatcccaaagctatagagatcgagttagctaagcaccacgtcctgcagaacgatgtacttgcacaccaatctaccgtggaagccgttaacaaggctggcaatgatctgattgaatcgtccgcaggggaggaggcttccaaccttcagaataagttagaagtgctgaaccagaggtggcaaaacgtgcttgagaaaactgagcagagaaagcaacagctggacggagctttgcgacaagccaagggcttccatggagagatcgaggacctacagcagtggctgactgacactgaacggcatcttctggcttcaaaacctcttggaggtctgcccgagacagcaaaggaacagctgaatgtccacatggaggtttgtgctgccttcgaagccaaggaggagacctacaagagcctgatgcagaagggtcagcagatgcttgcccggtgccccaagagcgctgaaacgaatattgaccaggatatcaacaacctgaaggaaaaatgggagagtgtggaaactaagttaaatgaaaggaagactaagctggaggaagctttaaatttggcaatggaattccataacagcttgcaggattttatcaactggctcacccaggcagagcagaccctaaatgtcgcaagtaggccgtcattgattttggatacagtgctcttccaaattgatgaacacaaggtgttcgccaacgaggtcaactctcaccgggaacagattatagaacttgacaagaccgggacacatttgaaatacttttcccaaaaacaggatgtggtactgattaagaatctgctgatatctgtgcagagccgctgggaaaaggtggtgcagcggctcgttgagagggggcgatcactggacgatgctagaaaaagggccaaacagtttcatgaagcatggtcaaaattgatggaatggttagaagaaagcgaaaaaagtctagattcagagctggagatagcaaatgaccccgacaaaataaagacacagctggcacagcataaggaattccaaaagagcctgggggccaaacacagcgtgtatgacacaactaaccgcactggacgatcactgaaggaaaaaacatcgcttgcggacgacaatctcaagctcgacgatatgctcagcgaactgagggataaatgggacactatttgcggcaagagtgtagagagacaaaacaagctcgaggaggcccttctttttagtggtcagttcacagacgcattgcaagctcttatcgattggttataccgcgttgagccacagctcgcagaggaccaaccagtacatggtgatatcgatctggtgatgaatctgattgacaatcacaaagcattccagaaggagctgggcaaacggacatcctcagttcaagccctgaaaaggagcgcaagggaactgatcgaaggctctcgcgatgacagtagctgggtaaaggtgcagatgcaggagctcagcacccggtgggaaactgtatgcgctctgtcaatcagcaaacagacacgcctggaggcagctttgcgccaagctgaggagttccactctgttgtgcatgcccttttagaatggctggcagaggccgagcagactttgagattccatggcgtgctaccggacgacgaggacgcgctccggactttgattgaccagcataaggagttcatgaaaaaactcgaagaaaagcgcgccgagctcaataaagccaccaccatgggggacaccgttctcgctatctgccacccagatagtataacaacaataaagcattggattaccattattagggcccggttcgaagaagtactggcttgggcaaagcagcaccagcagcgactggccagtgccctggctgggctaatagctaaacaggaactgctcgaagcgttgctagcatggctgcaatgggccgagactaccctcactgataaagataaagaggtcatccctcaggagattgaagaggttaaagccctcatagcagaacaccaaaccttcatggaggaaatgaccaggaagcaacctgacgtggataaagtgacgaaaacctacaagcgtcgcgctgctgatccatccagtctgcaaagccacattccagtcctggataagggccgcgctggacgcaagcggtttcccgcctcgtctttgtacccctctggctctcagacacagatcgaaactaaaaatccccgggtcaatctgttggtttccaagtggcagcaggtgtggctcctggccctggaacgacgacgcaagttgaatgacgctcttgatagactcgaggaattgcgtgagtttgcaaactttgactttgacatttggaggaagaaatacatgaggtggatgaaccacaagaaatcgagagttatggacttctttcgccggattgacaaggatcaagatggaaaaataactagacaggagtttatagatggtatcttatcctcaaaatttcccacatctagacttgagatgagcgccgtggcagatatcttcgatagggatggagacggctacatcgattactacgagtttgtagcggctctacacccgaataaagatgcttacaaaccgattactgacgctgacaaaattgaggacgaagtgacacggcaggtagcaaaatgtaagtgcgcaaagcgattccaagtagagcagattggtgacaataagtataggttctttctgggaaaccagttcggtgactcgcagcagttacggctggtgagaatactgcggagtactgtgatggtcagagtgggcgggggctggatggccctcgatgaattccttgtgaagaatgacccttgtagggttcatcaccacggctctaagatgctgaggagcgaatcaaattcctcaatcacaacaactcagcccactatagctaaggggaggactaacatggaattgagagagaaattcatcctggccgacggcgcttcgcagggaatggctgccttcaggccgcggggtcgccggtccagaccttccagccgaggcgctagtcccaacagatcaacttcagtcagcagccaagccgcccaagctgccagtccccaagtccctgcaactactacgcctaaagggactccaatccagggctcgaaactgaggttacctgggtatctctccgggaagggattccactccggcgaggactccgggcttattaccacagctgccgctagagtgaggacacagtttgccgacagtaagaagactccatcgaggcccggctctcgtgcagggtctaaggcagggtcccgggcaagttctagacggggttccgacgcctcagacttcgatattagtgagatccagtccgtttgcagcgacgttgaaaccgtcccacagacacatcgtccgaccccccgcgcaggatccagaccttccactgccaagcctagtaaaatccccaccccccaacgcaagtccccggccagtaaactggacaagtcgtccaaacggtag

SEQ ID NO: 304940 - DNA, 12603 bp, Artificial Sequence
  derived and/or modified sequence
atggctggctacttgtcacccgcagcatatctgtatgtggaggagcaggagtatctgcaggcttacgaggacgtcctggagaggtataaggatgaacgcgacaaagtgcaaaaaaagacgttcaccaaatggatcaaccagcatctcatgaaagtgaggaaacatgtgaacgacctgtatgaagaccttcgagacggtcataatctgattagcttgctggaagtcctctctggggacacactccctcgggaaaagggcagaatgcggttccataggcttcagaacgttcaaatcgctctcgactatctgaaacgcagacaggtgaaactggtaaacattagaaatgacgacatcactgacggaaacccgaagttaaccctgggtctcatctggaccatcatccttcactttcagatttcagatatccacgttactggagaatcagaagatatgagtgcgaaggagcgcctgctactctggacccaacaggccacagaaggttacgctgggatccggtgcgaaaatttcactacgtgctggagagatggcaagctttttaatgctataatccacaaatatcgtcctgacctgattgatatgaacactgtggcggtgcagtctaacctggccaatttggagcacgcgttctacgtcgcagaaaagattggtgtgatccgacttctggatcccgaggatgtggatgtgagttccccagacgagaaaagcgtgattacatatgtcagtagcctctacgacgcttttcccaaggtgccagaaggcggagaaggcattggggctaacgatgtagaggttaagtggattgaataccaaaacatggtgaattatctgatccagtggattaggcaccacgtcaccaccatgtccgaaaggacctttccaaacaacccagtcgagctgaaggcgctgtataatcaatacctccagttcaaagagacggagatccccccaaaagagaccgaaaagtcaaagatcaaacggctgtataaattgctggagatctggatcgaattcgggaggatcaagctgctgcagggttaccatccaaatgatatcgagaaggagtggggcaaactgatcatcgctatgctagagcgcgaaaaagcactgaggcccgaggtggaaagacttgaaatgctgcaacagattgctaatcgcgttcaacgcgactccgtaatttgcgaagataagttgatactcgcgggtaacgctctgcagagcgacagtaaacgactggagagcggggtccagttccaaaatgaggctgagatcgcaggctacatcctggagtgcgagaacctcctgaggcagcacgtcatcgacgtgcaaatattgatcgacggcaaatactatcaggccgaccagcttgttcagagagtggcaaaactgagggatgagatcatggcacttcgcaatgagtgttcatctgtgtactctaaggggcgtatcttgacaaccgagcagaccaagttgatgatcagtggcatcacacagtctctgaatagcggattcgcgcagactctccatccttcactgaccagcggcttgacacaaagccttactccttcattaacctcctccagtatgacttccggattatcctccggaatgaccagccgcttgacaccttcggtgacccccgcttacaccccaggttttccctctggcctggtacccaacttctcttccggggttgaacctaatagcctgcagacactcaaactcatgcagatacggaagcccttactgaagagctcccttcttgaccaaaatcttaccgaggaggaaatcaacatgaagtttgtacaggatctgctgaattgggttgacgagatgcaagtacagctggaccggaccgagtgggggagtgatctgccgtcagtagaatcccacctggagaaccataagaatgtgcatcgggcaatcgaagaatttgagagctcattgaaggaggccaagattagtgagattcagatgacagcaccactgaagctgacctacgccgaaaaactccatagattggaaagtcagtatgcgaagcttcttaatacatcacgtaatcaggagcggcacctggacacccttcataattttgtcagccgagctacgaatgagctgatctggctcaacgagaaagaggaggaggaggtggcgtatgattggagtgagcggaatacaaacatagctcgtaagaaagactaccatgccgagctgatgagagaacttgaccaaaaggaggaaaatatcaaatccgtgcaggagatcgctgaacagttgctgttggagaaccaccctgcgagactcaccattgaggcataccgcgcagccatgcagacacaatggagttggatacttcagctctgccagtgcgtggaacagcacattaaggaaaatacagcctactttgagttctttaatgatgccaaagaagctaccgattatttgaggaacctgaaggatgcaatccagagaaagtactcatgtgatagaagctcaagcatacacaaactcgaggatttagtgcaggagtctatggaagaaaaggaagagctgctgcagtataagagtaccatcgctaatctaatgggcaaggcaaagacaattattcagcttaaaccacggaattccgattgtcctttgaaaacaagcatccccattaaggccatttgtgattaccgtcagatagagataaccatctataaggacgatgagtgtgtgctagccaacaacagccacagggctaaatggaaggtgatctctcctactggaaatgaggcgatggtgccttcagtctgttttaccgtgccaccacctaataaggaagccgtcgacctggccaatcggattgagcagcagtaccaaaatgtcctaaccttgtggcacgaatcacacataaacatgaaatccgttgtgtcttggcactacttgataaacgagatagaccggatccgggctagcaatgtcgcctcaattaagaccatgcttccaggagagcatcagcaggtgctgtctaacctacaatcgcgctttgaggatttcctcgaggatagccaggagtcccaggtgttctctggatccgatatcactcaactggaaaaggaagtgaacgtttgcaagcaatattaccaggaactgcttaagtctgctgaacgggaggaacaagaagagagtgtctacaacctgtatatctctgaagtaagaaacattaggctcagactcgaaaactgcgaagaccggctcatacggcaaatcagaaccccgctggagcgcgatgatctccacgagagcgtgttcaggatcactgagcaggaaaagcttaagaaggaactggagcggctgaaggacgatctggggacaattacaaacaaatgcgaagaatttttttcacaggctgctgcttcatcctcagttcctaccttgagatctgaacttaatgtggtgctccagaacatgaaccaggtttactcaatgagctctacttatatcgacaaattgaagactgttaatctggtgttaaagaatacccaggccgcagaggcccttgtgaagctatacgaaaccaagttgtgtgaggaggaggcagttatcgccgacaagaataacatcgagaatctgatttctaccctaaagcagtggcgctccgaggtggatgaaaagcggcaggtcttccacgcactggaagatgagctccagaaggctaaagccatctccgatgagatgtttaagacgtacaaagaacgcgatctggacttcgattggcataaggagaaggcagaccagttagtggaaagatggcaaaatgtccacgtacaaatcgataaccgtctgcgcgacctggaaggcatcggaaagagcctcaagtactaccgcgatacataccatccactggatgattggattcagcaggttgaaacgacccagcggaagatccaggaaaatcagcccgagaatagcaagactctggccactcagttgaatcaacaaaagatgttggttagcgagatcgagatgaaacagtctaaaatggacgagtgccagaaatatgcagaacagtacagtgccactgtgaaggattatgagctgcagaccatgacctatcgcgctatggtggattcgcagcagaaaagcccggttaaaaggagacgaatgcaaagcagtgccgatttgatcatccaagaattcatggacttacgtacccgatacacagcacttgtgaccttgatgacgcagtatatcaaattcgccggagactcattgaagagattggaggaggaagaaaaaagccttgaagaggagaagaaagagcatgtggaaaaggccaaggagttgcagaagtgggtgagcaatataagcaagacactcaaggatgccgagaaggctggcaagcccccattttctaagcagaaaatttctagcgaggagatttccacgaaaaaagaacagttgtcagaggcactccagaccattcagcttttcttggctaagcacggcgacaaaatgaccgacgaagagcgcaatgagctggaaaaacaggtgaaaaccctccaggaaagctacaatttgttattctccgagtccttgaaacagttgcaggagagtcagacatccggagatgtaaaggtggaggagaaattggacaaagtcatagccggaactattgaccagaccacaggggaggtgctatccgtgttccaggctgtcctgcggggtctcatcgactatgataccggcatcagacttctagagacccagctgatgatttcggggctgatttctcccgaactcagaaagtgcttcgacctaaaggatgctaagtcacatgggctcattgacgagcagatcctgtgccagttgaaagagctgagtaaggctaaggaaattatctccgctgcctcgcctacgactattccagtcctggacgctctggctcagtctatgatcacagaatccatggcaattaaggtcctggagatcttactgtcaaccggaagcttggttatacccgctaccggtgaacaactgaccctgcagaaggccttccagcagaacctagtgagtagtgccctgttttcgaaggtcctcgagcggcagaacatgtgcaaagatctgattgacccttgtactagcgagaaagttagcctgattgatatggtgcagagatcgacactgcaagagaataccggcatgtggctcctgcccgtacgacctcaggaggggggtaggatcaccctgaagtgcggccgtaatatttctattctgcgtgctgcccacgagggattaatcgaccgcgagacaatgtttagactccttagcgcccagctcctgagcggagggcttattaacagcaactccggtcagcggatgaccgtggaggaggcagtgcgggagggcgtcattgaccgcgacacagcctcctccatcctcacctaccaggtccagacaggcggaattatccagtcaaacccagcaaaacgccttactgtggatgaagctgtgcagtgtgatttgattacgtcgtcttcggctcttttggtccttgaggcccagagggggtacgtgggtctgatctggcctcacagtggcgagatctttccaacctcttcctccctgcagcaagagctcattacaaacgagctcgcttataagatcctgaacggcagacagaagattgccgctttgtacattccagaaagtagtcaagtgatagggcttgacgccgcaaaacagctcgggattattgataacaatacggcctcgatcctgaagaatattacattgccggacaaaatgcctgacctgggtgatctggaggcttgcaagaacgctcgccgatggctcagcttttgcaaattccaacccagtacagtgcatgattacagacaggaggaagacgtatttgacggggaggaaccagtgaccactcagactagcgaggagactaagaaactgttccttagctatctgatgattaacagctatatggatgctaatactggccagaggcttcttctttacgacggcgacctggatgaagctgtcggcatgctcctggaaggttgtcacgccgaattcgacggaaacactgctattaaggaatgtttggacgtgctgagtagctctggagtgtttctgaacaatgcctctgggcgtgagaaagacgaatgtacagcaaccccaagcagtttcaacaagtgtcactgtggcgagcccgaacatgaggagactccagagaataggaagtgcgcgattgacgaggaattcaatgagatgcgaaataccgttatcaactcagagttctcccaatccggaaaattggctagcactatctcaatcgaccccaaggtgaatagttccccgtccgtctgcgtgcctagcttgatttcctacctgacccagacagaactggctgacattagcatgctcaggtccgatagcgaaaacatcttaactaactatgagaatcagtccagggtcgaaaccaatgagcgcgctaacgagtgcagtcactccaaaaatatccagaatttcccttctgatttaatcgagaatcccataatgaagtcaaagatgtcgaagttctgcggtgttaacgagactgaaaatgaagataataccaatagagactccccaatctttgactatagccctaggctgtccgctctgctgtcccatgataaactgatgcacagccagggctccttcaacgacacccatacccctgagtccaacggaaataaatgtgaggctccagcgctgagtttcagtgataaaactatgctttccggccagcgaatcggagagaagttccaggaccaattcctgggcatagcagccatcaacatctcactgccaggagagcagtacgggcagaagagtttgaatatgatatcctccaaccctcaagtgcagtatcataacgataagtacatatccaacaccagcggagaggatgagaagacccatcccggattccagcaaatgccagaggataaggaggatgagagtgagattgaggaatatagctgcgctgtaaccccaggcggtgatactgacaacgcaatcgttagcttaacgtgtgctacgcctctcctggacgagaccatctctgcaagtgattatgagacatccctactaaacgatcaacagaataacaccggtaccgacactgattccgatgatgacttctatgatacccccctctttgaggatgacgatcatgatagtctcctgctggatggtgatgatagggactgtcttcaccctgaggattacgatacactgcaggaagagaatgacgagactgcgtctcctgcagacgtcttctacgatgtctccaaagaaaatgagaatagtatggtgccgcagggagcacctgtggggagcctatctgtcaagaacaaggcccactgtttacaggacttcctgatggacgtggagaaagatgaacttgactctggggaaaagattcatctgaacccagtcggcagcgacaaagtaaatggacagtcccttgaaactggcagcgaaagggagtgcaccaatatcctcgaaggcgatgagagcgactctctcacggattatgacatcgtggggggaaaggagagtttcaccgctagccttaagtttgacgatagcggctcttggcggggaagaaaagaggagtatgttacaggtcaagagttccattctgatactgaccacctggattcaatgcagagcgaggagtcctacggtgactatatatatgactccaatgatcaggacgacgatgacgacgatggaatcgacgaggagggcggaggcatacgggatgagaacggaaaacccagatgccagaacgttgccgaagacatggatatccagctgtgtgcttcaatccttaatgaaaactccgacgaaaatgagaatatcaacacaatgatactgctcgacaaaatgcactcatgctcatctttggagaaacagcaacgagtgaatgtggttcagctcgctagcccctccgaaaataacctcgtaactgagaaatccaatctgcccgaatacacaactgaaattgcgggaaagtctaaagagaatttgctgaatcacgaaatggtcctcaaggatgtgctgccacctatcataaaggacaccgaatccgaaaagacctttgggccagcaagtatcagccacgacaataataatatttctagcacaagtgaactaggcaccgaccttgcaaacactaaagtaaaactcatccagggctcagagcttcccgagctgaccgatagtgtcaagggaaaggacgaatatttcaagaacatgacgcctaaagtagattctagtctcgaccatattatctgtacagaacctgacttaattggcaagccagctgaggagtctcatctgtcccttatcgcttctgtcactgataaagaccctcagggaaatggcagcgacctgatcaaaggcagagacggaaaaagcgacatactaatcgaggacgaaacctccattcagaagatgtatctgggggagggtgaggtactcgtggaggggcttgtggaagaagagaatagacatctgaaactactcccgggaaaaaatactcgggacagcttcaagctcataaactcgcagtttcccttccctcagattacaaacaacgaggaattaaaccagaaaggcagcctgaaaaaggccacagtcactctgaaggacgagccaaacaacctgcagatcatcgtgagcaaatcgcctgttcagttcgaaaatttggaagagattttcgataccagcgtaagtaaggaaattagtgacgacatcaccagtgatattacatcgtgggagggcaacacccactttgaggaatctttcacggacgggcctgagaaggagctcgacctctttacttatttgaaacactgtgcaaaaaatattaaggccaaagacgttgccaagcccaacgaggacgtaccttctcacgtcctaattactgctcccccaatgaaggagcacctgcaactcggggtgaataacactaaggagaagagcacgtctacacagaaagattcacccctgaacgacatgattcagtctaatgatttgtgttctaaagagtctatctcaggaggaggcaccgagatcagccagttcacccctgagagtatcgaggcgacactgtccatcctgtcgcgcaagcacgtggaggatgtgggcaagaatgattttctacagtcagaacgatgcgctaacggtctgggcaatgacaacagctctaacacactaaatacagactattctttccttgagattaataataagaaagaacgaatagagcagcagctcccaaaggagcaggctctcagccccaggagtcaggagaaggaggttcagatccccgaactgagtcaagtgttcgttgaggacgtgaaagacattctgaagagccgcctgaaggaaggccacatgaatcctcaggaagtggaggaaccttccgcttgtgcagatacaaagattctgatccagaacctcattaaacggatcactacatcccagcttgtcaatgaggcgagcacggtgcccagtgactctcagatgtccgatagtagcggggtctctcccatgacgaactcgtctgaattaaagcccgagtctcgggacgatcccttttgcatcggaaacctcaaaagcgaattgctcctgaatatcctgaagcaggatcagcacagtcagaagattacaggggtgttcgagctgatgagagagttgactcacatggagtacgacctggaaaaacgcggaataacatcgaaagtcctgcccttgcagttggagaatatcttctacaaactgctggctgacggctacagcgagaagattgagcatgtgggggactttaaccagaaagcgtgttccacaagcgaaatgatggaggagaagccacacatcctgggtgacattaagagcaaggaggggaactactatagtcccaatctggagaccgttaaggaaattggcctggaatcatcaacggtgtgggcctctacactgcctcgcgacgagaaactcaaggacctctgcaatgattttccctctcacctggagtgcacaagcggtagcaaggagatggcgtccggtgattcatctacagagcagttctctagcgagctgcagcagtgcctgcagcacactgagaaaatgcacgagtatttaacccttttgcaggatatgaagcccccactggacaatcaggaatccttggataacaatctggaggccctgaagaatcagctgagacagctggagacatttgaactgggactagcacccatcgctgtgatccttagaaaggatatgaaactggctgaagaattcctgaaatctcttccttcagacttcccccgtggccatgtggaagaactgtctatctcccatcagagcctgaaaacagctttcagctcactgtctaatgtgtcatccgagaggacaaagcagatcatgttagcaatcgactctgagatgtccaagttggccgtgtcccacgaagaattcctgcataaactcaaatccttctccgactgggtctctgagaaatccaagagcgtcaaggatatagaaatcgtgaatgtccaagacagcgaatacgtaaaaaagcgtttggaattcctcaagaatgtattgaaagacttgggacacaccaagatgcagctggagaccacagcgttcgacgtgcagttttttatctccgaatacgctcaggacttgtccccaaaccagtccaaacagttgctgcgtcttctgaatactactcagaagtgcttcctggatgtccaggagagcgtgaccactcaggtcgaacgcctggagactcagctgcaccttgaacaagatctggacgaccagaagatcgtcgcagagcggcaacaagaatacaaagaaaaactgcaggggatatgcgatctgctgacccagaccgagaaccgtttgatcgggcatcaggaggcctttatgattggggacggtaccgtggaactgaagaagtaccaatccaaacaggaggagctgcaaaaggacatgcagggcagcgcacaggccctggccgaagtcgtgaagaacacagagaacttcctcaaggaaaacggggaaaaactttcccaggaagataaagccttaattgagcaaaaactaaacgaggccaaaattaagtgcgagcagctgaatctgaaagctgaacagagcaaaaaagagctagacaaggttgtcacgacagctatcaaagaagaaactgagaaggtggcagctgttaaacaactcgaggagagtaagactaaaatcgaaaacctgcttgattggctttcaaacgtagataaagacagcgagcgtgctggcaccaaacataaacaggttattgaacagaacgggacacacttccaagaaggggatggtaagagcgcgattggcgaggaggacgaagtgaatgggaatctgctggagacagatgtggacggtcaagtgggaacgacccaagagaaccttaaccagcagtaccaaaaggtcaaagcccaacatgagaaaatcatttcacagcaccaggccgtgattatcgccactcagagcgctcaggtcctgctggagaaacaggggcagtacttgtctccagaagagaaggaaaaactgcagaagaatatgaaggaacttaaggtgcattacgagacggctcttgctgaaagcgaaaagaaaatgaaattaacgcattccctgcaagaagaactagagaagtttgacgctgattataccgagtttgaacactggttacagcaatccgaacaggagctggagaacctcgaggccggagctgatgacatcaatggtctcatgaccaaactaaagagacagaagagttttagcgaggatgtgatcagccacaaaggcgatctccggtatatcaccatatctgggaatagggtcctcgaagccgctaagagctgtagtaaaagagatgggggaaaggtggacacatcagcaacccatcgagaggtccaaagaaaactggaccacgccaccgaccgcttcaggagcttgtactctaagtgcaatgtgcttggtaataatctgaaagatttggtggacaagtaccagcattatgaggacgccagctgcggactgctagctggcctgcaggcatgtgaagccactgctagcaagcatctgtctgaaccgatcgccgttgatcccaaaaatctgcagagacagctggaagagactaaggcgttgcagggtcagatttccagccagcaggttgctgtcgaaaagctgaagaaaaccgcagaagttctattggatgctcgagggtctctgcttccagccaagaacgacattcagaaaacccttgacgacattgttggcagatacgaagacctgtcaaagagtgtgaacgagaggaatgagaagctgcagataactttaacgaggtccctgagtgtgcaggatggactcgatgagatgctagattggatgggcaacgtggaatctagccttaaggaacaagacgtgggtactggctactgtcgcagcagcgaacagtataaatgccacgaatac

SEQ ID NO: 304941 - DNA, 22386 bp, Artificial Sequence
  derived and/or modified sequence
atggccggttatctatcccctgctgcttacctgtatgtagaggagcaggaatatctgcaggcgtacgaagatgttttagagcgctacaaagatgaacgcgataaggtacagaaaaagacgtttactaaatggatcaatcaacatctgatgaaagtccgaaagcatgtgaatgacctttatgaggatctgcgggatgggcataacctgatcagcctgctggaagtcctaagtggcgatacgctccccagagaaaagggacggatgcggtttcacaggctgcaaaacgtccaaatcgcactggactacttaaagaggcgccaggtaaaactcgtaaacattcggaatgacgacattacagacggaaatcctaagctgacactcggccttatctggaccatcattctgcacttccagatttctgatattcatgtcactggtgaaagcgaagacatgtctgcaaaggagcgactgctgctctggactcagcaggctactgagggatacgcaggcattagatgtgaaaatttcaccacatgttggcgggacggcaagctgtttaacgccataatccataagtatagacccgatctaatcgatatgaacaccgtggctgtgcaatctaacctggcaaatctcgaacacgcgttttatgttgccgagaagatcggcgtgatccgattattggaccctgaggacgtggatgtaagtagtccggacgagaagagcgtcattacttatgtgagcagcctgtatgatgcattccccaaggtccccgagggcggagagggcattggcgctaacgatgttgaggtgaagtggattgaataccaaaatatggtgaactacttaattcagtggattcgccatcacgtgacaaccatgtcagagcggacctttccgaataatccggtggagctgaaagctctgtataatcagtacctccagtttaaagagacagagattccacctaaagagacagagaaatcgaaaataaagagactctacaagctcctcgagatttggatcgagttcgggagaatcaagttgctgcagggctatcaccctaacgacatcgagaaggagtggggcaagctgattattgccatgctggagagagaaaaagccctgagacccgaggtcgaaagactagagatgctgcaacagatcgcgaatcgggttcagagggacagtgtgatctgtgaagacaagctgattcttgctgggaatgctctgcagtctgatagcaagaggctcgaaagcggcgtgcagtttcagaacgaggccgaaatcgctggttacattttggagtgcgagaacctgctacgacagcatgtgatcgatgtgcagatcctcatcgatggcaaatactatcaggccgatcaactggtgcagagagttgctaagttgcgcgacgagatcatggccctgagaaatgagtgctctagcgtatacagcaaggggagaattcttactacggagcagacaaagctcatgatcagtggtatcacacagtctctcaattcgggtttcgcgcagactctgcatcctagtctaacatcaggtcttacccagagtctgaccccatcccttacatcaagctccatgacctcgggtctcagttcgggcatgacgagcaggctcaccccaagtgtcaccccggcttatactccaggattcccctcgggacttgtgcctaacttcagttcaggagttgaacctaattcgcttcagaccttaaaacttatgcaaattaggaaacccctgctcaaaagctcactcctcgatcagaacctcaccgaggaagagattaacatgaagttcgtgcaagacctgttgaattgggtggacgagatgcaggtacaactagaccgcactgaatggggctccgatctgcctagcgtcgaatcccatttagaaaaccacaagaacgtgcatcgggctattgaagaatttgagtcctcactgaaggaggccaaaattagcgagattcagatgacggctccacttaaactgacctacgccgagaaactgcataggctggagagccagtatgctaaactgctcaataccagccggaaccaagagaggcacttggacacacttcacaattttgtctcccgggcaacaaacgagctgatttggctgaacgaaaaagaagaggaggaggtggcctacgattggtctgagcggaatactaatatcgccagaaagaaagattatcatgctgagttgatgagggagttggaccagaaagaggagaacatcaaatcagtccaggaaatcgccgaacaactcctgcttgagaaccatcccgcaaggcttactatcgaagcctaccgcgctgcaatgcaaactcagtggtcctggattctccagctatgccagtgcgtcgaacagcacatcaaagagaataccgcgtactttgaattttttaatgacgctaaggaggctactgattacctgcggaatctcaaagacgcaattcaacgaaaatacagttgtgaccggtccagcagtatccataagttagaagacttggtgcaggaatctatggaagaaaaggaggagctactgcaatataagtctaccattgcaaacctcatggggaaggccaagactatcattcagcttaagcccagaaattcagactgccctctgaagaccagcatccctattaaggccatatgcgattacaggcagatagagattacgatttataaagatgatgaatgcgtccttgctaacaacagtcaccgagcaaagtggaaggtaatttcaccaaccggtaatgaggcaatggtcccctccgtgtgcttcacggttccccctccgaacaaggaggccgttgatctcgcaaatcgaatagagcaacagtaccagaacgtcctgacactgtggcatgagtctcacatcaatatgaagtcagtggtcagttggcattacctgatcaacgagatcgatcgtattcgcgcaagtaacgtggcgtccattaaaacgatgcttcctggcgaacatcagcaggtattatccaacttacagagtcgcttcgaagactttctggaggattcacaagagtcacaagttttctcgggctcagacatcactcaactagagaaggaggtcaacgtctgcaagcagtactatcaggagctgctgaaaagtgccgagcgcgaagagcaggaagaaagtgtatacaatctctatatctccgaggtgagaaatattcggctgcggctggagaattgcgaggacaggctcatacgccagatcagaacccccctggaacgtgatgatttgcatgagtccgtgtttagaatcactgaacaggagaaactaaaaaaagagctggagagattgaaggacgacctcgggaccatcactaataagtgtgaggaattcttttcccaggcagccgcatcttcgtccgtcccaactcttagaagtgaactcaacgtggttctgcaaaacatgaatcaggtgtactctatgtcgtctacctatattgacaagcttaaaaccgtgaacctcgttctgaaaaacacacaggctgctgaagccctggttaagctctatgagacgaaactgtgtgaagaggaggctgtaattgccgataaaaataatatcgaaaatttgatcagcaccctgaagcagtggcgaagtgaggttgacgagaaaaggcaagtcttccacgcattagaggacgagcttcagaaggccaaggcaatttctgacgaaatgttcaaaacctataaggaaagggatctggacttcgattggcacaaggaaaaagcagatcagctggtggagcggtggcagaacgtccacgtgcagatcgataataggctcagagatctagagggcatagggaaatcactaaaatactacagggatacttaccacccactggacgattggatacagcaggtggagacaacacagcgcaagatccaggagaatcaacccgagaattcaaagactctggctactcagttgaatcagcagaaaatgttagtgagtgaaatagagatgaaacagagcaaaatggatgaatgccaaaagtacgcagagcagtactctgccaccgtaaaagactacgagttgcagactatgacctacagggcaatggtcgacagccaacagaaatcaccggtgaaacgacggagaatgcagtcctccgccgacctgatcatccaggagttcatggatctaaggacccggtacacagcattagtaactctgatgactcagtatattaaattcgccggtgactcccttaaacgactcgaagaagaagagaagagtctggaagaagaaaagaaggaacacgtcgagaaggcgaaggagttacaaaagtgggtgtccaatatttccaagacactcaaggacgcggaaaaagccggtaagccaccattcagcaaacaaaaaattagcagtgaggaaatcagcaccaaaaaggagcagctctctgaagcactacagactatacaactgtttctggccaagcatggggataaaatgactgatgaggagaggaacgaacttgagaagcaggtgaagacactgcaggagtcgtataatctcctgttcagtgaaagtctgaagcagctacaggagtcccagaccagtggcgacgtcaaggtggaagagaaactggacaaagtgatcgccggtacgatcgatcaaaccactggcgaagttctgagcgtgtttcaggccgttcttagagggctgatcgactatgacactgggattcgcctgctcgaaacccagttaatgatctccggcttgatctccccagagctgaggaaatgctttgatttgaaagacgcgaagagtcatggtctcatcgatgaacaaatactgtgtcagctgaaagaattgagcaaggcaaaggaaattataagcgctgcaagtccaacgacgattcccgtgcttgacgctctcgcccagagcatgattacggaaagcatggcgattaaggtgctcgaaatactcctttctacgggctcattagtgatacccgcaacgggcgagcaactcactttgcagaaggcattccaacagaatctcgtgtcgtcagcgctcttttctaaggttctggagcgccaaaacatgtgcaaagacctcattgatccctgcacatctgaaaaggtctccctgattgacatggtacaaaggtccacactgcaagagaatacgggcatgtggctgctgcctgttcgacctcaggaggggggaagaattacactgaagtgcggacggaacatatcgatcttgagagcggcacacgaaggtctgatagaccgtgagaccatgtttagactcctgtccgcacagctgttatccggaggactgataaatagcaatagcggccagcgcatgaccgtggaggaagctgtgcgggagggggtcattgatagagacaccgcgtcatctattctgacctaccaagtacagactggtggcattattcagtccaaccccgcaaaacgcttgactgttgacgaggcagtacagtgcgacttgattacatcttctagcgccctgctggtcctggaggctcagcgcggatacgtagggctgatttggccgcattccggtgaaatcttccccacatcttcctccctccagcaggaactgataaccaacgagttggcatacaagatcctgaacggcaggcagaagatagccgcactgtatattccagaatcctctcaggtaatcgggctagacgctgccaagcagttaggaatcattgacaacaatactgccagtatcttaaagaacatcacactgcccgacaagatgcccgacttaggtgatctggaggcctgcaagaacgcaaggcggtggctgtctttctgcaagtttcagccctctacggttcacgattaccgccaagaggaggacgtgtttgacggggaggagcccgtcacaacccaaacatctgaggagaccaaaaagctgttcctatcctacctgatgataaactcttatatggatgccaataccgggcaacgtctgctgctgtacgacggggaccttgatgaggctgttggaatgctcttagaggggtgccatgcggagtttgacggcaataccgccatcaaagagtgcctggatgtgctaagtagttccggggttttcctgaataacgcctctggacgggagaaagacgagtgcacagctaccccaagctctttcaacaaatgtcactgcggggaacccgaacatgaggaaaccccagaaaaccgcaaatgcgccattgatgaagaatttaacgagatgaggaatactgtgatcaactcagagttcagccaatcaggcaaattggcaagcaccatctcaattgatcctaaggtgaactctagtccatctgtatgcgtcccctccctgatctcataccttacacagaccgaactggcagacatctccatgctgcgatctgatagtgaaaatatactcacaaattacgaaaatcagagccgggttgagacaaatgaaagggcaaatgagtgcagccatagtaagaacatccaaaatttcccctcagacctgattgagaaccccatcatgaagtcgaagatgtctaaattttgcggggtgaacgagactgagaatgaggacaatactaatcgtgattccccgatctttgactattccccacggctttccgcattactaagccacgacaagctgatgcacagccagggctccttcaacgacacccacacgcctgaaagtaacggtaacaagtgcgaagcccctgcattgtcatttagcgataagactatgctgtcagggcaacgcattggtgagaagttccaagatcagtttctcggtatcgcggctattaacatcagtctgcctggggagcagtatggacagaagtcgctgaatatgatttcgtccaatccacaggttcagtaccataacgataagtacatcagcaatacctctggggaggacgagaaaacgcacccaggtttccagcaaatgcccgaggacaaagaggacgaatcagagatcgaggagtatagctgtgccgtgactcctggtggcgatacggataacgcgatcgtcagcctcacctgtgcaactcctctcttggacgagacaatctccgcatccgattatgaaacctcactgctaaacgaccaacagaacaatactggcacagatacagatagtgatgatgatttctacgacaccccactgttcgaagatgatgaccatgacagtctgcttctggacggggatgatcgcgactgcttacaccctgaggattatgataccctgcaggaggaaaatgatgaaactgcatcgcccgctgatgtcttttacgatgtgagtaaggagaacgagaacagcatggtcccacagggtgcccctgtcggcagtctgtccgttaaaaataaggcgcattgcctccaggacttcctgatggacgtcgagaaagatgaattggattctggggaaaagattcatctcaatcccgtgggttccgataaagtgaatgggcaatccttggaaaccgggagcgagcgggagtgcaccaacatactcgagggagacgaatccgactccctgaccgactatgacattgtgggtggaaaggaaagctttactgcgagtctcaaatttgacgactcggggagttggagaggacgaaaggaggagtatgttaccgggcaggaatttcacagtgacaccgaccacctcgactcaatgcagtcagaggagtcatatggagattatatctacgactcgaacgaccaagacgacgacgacgatgacggcattgatgaagagggtgggggtattagggacgagaatggaaagcccagatgtcagaatgtcgccgaggatatggatattcagctctgtgcctctatcctgaacgagaattcagatgagaacgagaatatcaacacaatgatcctcctggataaaatgcacagttgttcttctctagagaagcagcagagagtaaacgtggtgcagttggctagcccgtctgagaacaacctagtcaccgaaaagtccaatctccctgaatatacaacagagatcgcgggtaaaagtaaagagaatttgctcaatcacgaaatggtgctcaaggatgtactccctccgattattaaggatactgagtctgagaagacctttgggccagccagtatctcccacgacaacaacaatatatcaagtacttccgaactgggaaccgatctcgcaaataccaaagttaagcttattcagggcagtgaactgcctgaactgacagactccgttaagggcaaagacgagtacttcaaaaatatgacccctaaggtcgactcttccctcgaccacatcatttgcaccgaacctgacctgatcgggaagccagctgaggaatctcacctatctttaattgcgtctgttaccgataaggacccacagggcaacggcagtgatctgatcaagggtcgggacgggaaatcagacattcttatcgaagatgagaccagcatccagaagatgtatctgggagagggcgaagtcctcgttgaaggcttagtggaagaggagaacaggcacctcaaattgctgcccggaaaaaatacccgtgacagtttcaaactcattaacagccagttccctttcccccagataactaacaacgaagaactgaaccaaaagggttcacttaagaaagcaactgttaccctgaaagatgaaccaaacaatctgcagatcattgtgtcgaagagtcccgttcagtttgaaaatctggaagaaatatttgacacttcggtctccaaggagattagtgacgacatcactagcgatatcacgtcctgggaagggaacacgcattttgaggagtctttcaccgatggcccagagaaggaactggacctgttcacctacctgaaacattgtgcaaaaaacattaaagcaaaagatgtggccaagcccaacgaagatgtcccaagccatgttttgatcaccgcgcctcctatgaaggagcatctgcagctgggcgtcaacaacacaaaagaaaagtccacaagcacacagaaggattctcctctgaatgacatgattcagtccaacgatctttgttccaaggaatcgattagcggcggtgggaccgaaataagccaatttacaccagagtccatcgaggcgactctgtcaattctgtcccgcaaacatgtcgaagacgtgggaaaaaacgacttcctccaatccgaaaggtgcgcgaatggccttggcaacgataactcatccaatacgcttaatacagactatagcttcctcgagatcaacaacaagaaggagcgcattgaacagcagctgccgaaagaacaggctttgagcccaaggagccaagaaaaggaagttcaaatcccggaactaagccaagtttttgtcgaggatgtcaaggacattcttaaatccaggctgaaagagggccacatgaacccccaagaagttgaggagcccagtgcctgtgcagacaccaagattcttatccagaatctaatcaagagaataacaacgtctcagctggtgaacgaggcaagcaccgtgccgtcggattctcagatgagtgactcatcaggagttagtccaatgaccaattctagtgaattaaaacctgaatcaagagatgatcccttttgtatcggaaacctgaagagtgagcttctgctgaacattctgaagcaggatcagcactctcagaaaataacaggcgttttcgagctgatgcgcgagttgacccatatggagtacgacctggagaagcgcggaatcacttccaaggtattgccgctccagttggaaaatattttttacaagttactcgcagatgggtactccgagaagattgaacatgttggggatttcaaccaaaaggcttgcagcacttcagaaatgatggaggaaaaacctcacattttgggggatatcaaaagtaaggaagggaactactattctcctaatcttgagactgtaaaagaaattggactcgagtcttccaccgtctgggcgagcactctgcctcgcgacgagaaattgaaggatctttgcaacgattttccatcacacttagagtgtacctctggctccaaggagatggcaagcggggactcatcaaccgaacagttctcctcagaattgcaacagtgtctgcagcacaccgagaaaatgcatgagtacttgactctgttgcaggacatgaagccccctctagacaaccaggaatcacttgacaacaaccttgaggctcttaaaaatcagcttcgacaactcgagacctttgagctaggcctggcccctatcgccgtaatcctgaggaaggacatgaagctggcagaggaattccttaaaagcctgccttccgatttcccaagggggcatgtggaggaactgtccatttctcatcagtctcttaagaccgcctttagtagtctttctaatgtgagtagtgaacgtacaaagcagatcatgctagcaatcgactctgagatgtccaaattagctgtgagccatgaagaatttctgcacaagctcaagtcattcagtgactgggtgtcagagaaatcaaagagcgtgaaggatattgagatcgtcaacgtgcaggattccgagtatgtcaagaaacgattggaattcctgaagaacgtgctgaaagacttgggtcacacaaagatgcagctagagacaacagcattcgatgtgcaatttttcatcagcgagtacgcccaggacctcagtcccaatcaaagcaaacagctgcttcgcctcttgaacacaactcaaaagtgctttctagatgttcaggagtcagtgacaacccaggtagagcggctggaaacacagcttcacttggaacaagacctcgatgatcagaaaattgtggctgagcgccagcaagaatataaggagaaactgcagggcatctgcgaccttttgacccagacggagaaccgtctgattgggcaccaggaggccttcatgatcggcgacgggacagtggaactgaagaagtatcagtcaaagcaagaggagctacaaaaggacatgcagggctccgctcaagcgctggcggaggtggtgaaaaacactgagaactttctgaaagagaatggggaaaagctgagtcaggaggacaaggcactcatcgagcagaagctcaatgaggcgaaaattaaatgcgagcaattgaatctgaaggcagagcagtccaaaaaagagctggacaaagtagtcacaactgccatcaaggaggagaccgagaaggtggcggctgttaagcagctggaggaatccaagactaagatcgaaaacctgttggactggctctccaacgtggataaggactctgagcgcgcaggcacaaagcacaagcaggtgatcgagcagaacggaacccactttcaggagggtgatggcaaatcagccatcggggaagaggatgaggtgaatggaaatttgctggagaccgatgttgacgggcaggtggggacaactcaggaaaacctcaaccagcaataccaaaaggtgaaggcccagcacgagaaaattatctcccagcatcaggccgtgattatcgccacgcaatcagcccaagtccttctggagaagcagggccagtacttaagccctgaagaaaaagagaagttgcaaaaaaacatgaaagaacttaaagtgcactacgaaaccgcgttagctgaatcagaaaagaaaatgaaattgacgcactcccttcaggaggagctggaaaagttcgatgcggactatacagagtttgaacactggctgcagcagagcgagcaagaactggaaaaccttgaggccggagctgacgatatcaacgggctcatgactaaattgaagcgtcaaaagagctttagcgaagacgtgatctcacataagggggacttacgctacatcactatctccggtaaccgggtgttggaagccgcaaaaagctgcagtaaaagggacggtggcaaagtagacacatccgcgactcatagagaagtgcagcgaaaactcgaccacgcgaccgatagattccgctcgctgtactctaaatgtaacgttctgggaaacaacctgaaggatctggttgacaaatatcagcactacgaagacgccagctgtggattgctcgcaggcctacaggcttgtgaagcgacagccagcaaacatctctcggaacccatcgccgttgaccctaaaaacctgcagcgacagctcgaagaaacaaaggccctgcagggccagatatcctctcagcaagttgctgtggagaaactgaaaaaaactgccgaggtgctgcttgacgcaaggggctcactgctgccagctaagaacgatattcagaagacgctagacgacattgtcggtcgttacgaggatctgtcaaagtctgtcaatgagcggaacgagaagctgcagataaccctgacccggtcactgagcgtgcaggatgggcttgatgagatgctcgactggatggggaacgtcgagtcttccttgaaggagcaagggcaagtgccgcttaacagtacagccctgcaagacattatcagcaaaaatattatgcttgagcaagacatcgctggtaggcaatcatcgatcaatgcaatgaatgagaaggtgaagaaattcatggagacaactgaccctagcacagcctcctcgctacaggctaaaatgaaagacttaagtgccaggttttctgaggccagtcacaaacacaaggagaccctggctaagatggaggaactcaagacaaaggtggagctgtttgagaacctgagcgaaaaactccagacctttttagagacaaagactcaggccctcaccgaagtggacgtgcctgggaaagatgtcacagaattatctcagtacatgcaggaaagtacctccgagttcctggagcacaagaagcacctggaggtgctgcattcattgctgaaagagatatcctcacacggcctgcctagcgacaaagcccttgtcctggagaaaacgaataatctcagcaagaagttcaaggaaatggaagacaccataaaagagaagaaggaggctgtcacatcatgccaagaacagctcgacgcattccaggtccttgtcaaatctctgaaatcatggatcaaggaaaccacgaagaaggtgcccatcgtccagcccagttttggggctgaggacttaggaaaaagccttgaggacaccaaaaagctccaggagaagtggagcctgaaaactcccgagatccagaaggtgaacaattcagggatcagtctgtgtaatctcatatccgcggtcaccactcctgctaaagccatcgcagcagtaaagtcggggggagcagtcttgaatggcgaaggaaccgccacaaacaccgaagagttctgggccaataaagggttgacatcgattaaaaaggacatgactgatatctctcatggctacgaggacctgggcttactcctgaaagacaagatcgctgaactgaacaccaagctgagcaagctgcagaaggcccaggaggagagcagcgcaatgatgcagtggttgcagaagatgaataagacagccaccaagtggcagcaaacaccggcaccaactgacactgaggccgtgaaaacacaggttgagcagaacaaatcttttgaggcagagcttaagcagaacgttaataaggtccaggagctgaaggataagttgaccgagcttctggaggaaaatcctgataccccagaggctcccagatggaagcagatgctcaccgagatcgactccaagtggcaagagctgaaccagcttacgatcgatagacagcaaaaacttgaagagtcctccaataatctgacccagtttcaaactgtagaggcacagctcaaacaatggctggtcgagaaggagctcatggtttcagtgttaggcccactctctattgacccaaacatgctgaacactcagcggcagcaggtccagatcctgctgcaggaatttgccacacgcaaaccgcaatacgagcagcttacagctgcaggacagggtattttaagcagacctggtgaagatccttcacttcggggaatcgttaaggagcagctggccgctgtcacgcagaagtgggactccctcaccggtcaactgtcagatagatgtgactggatagatcaggccatcgttaaaagcacccagtatcaaagtttactcagatcactgagcgacaagcttagcgacctagacaacaagctgagttccagtctggcggtttcgacccaccctgatgctatgaaccagcagctcgaaactgctcaaaagatgaagcaggaaatccagcaagaaaaaaagcaaatcaaagtagcacaggccctctgcgaggatctgagcgccctcgtgaaggaggagtatctgaaggcggaattatcccgacagttagagggcatcctcaagtccttcaaagatgttgagcaaaaggctgagaatcacgtgcagcacctgcagtccgcttgcgcatcctcacaccagtttcagcagatgagtcgagacttccaagcatggctggacacgaagaaagaggagcagaacaagtctcaccctatttctgccaaacttgatgtgctggaatcactgattaaggaccataaggatttctctaaaactctgaccgcccagtctcacatgtatgaaaaaaccatcgccgagggcgagaatctcttgctcaagactcagggatcagagaaagccgcactgcagctccaattgaacaccattaaaacgaattgggatactttcaacaaacaggtaaaagaaagggaaaataagctcaaggagtcactggagaaggcactcaagtataaggaacaggtcgagactctttggccctggattgacaagtgccagaataaccttgaagagatcaagttctgtctcgatccggctgaaggagaaaatagcatcgcaaaactgaaaagcctgcagaaagaaatggatcagcactttggcatggtggaacttcttaataacacggcgaactctctgctcagtgtctgtgagatcgacaaggaggtcgtcacagacgaaaataaaagccttatccagaaagtggacatggtgacggagcagctgcatagcaagaaattttgtctggagaatatgacccagaaatttaaggagttccaggaggtcagcaaggaaagcaagaggcaactgcagtgcgccaaggaacagctcgacatacacgattctctggggtctcaagcttattcaaataaatacctgacaatgttgcaaacccagcagaagtctttacaggcgttaaagcaccaagtggaccttgctaagagactggcccaggacttagtggtggaggcaagcgattcaaaaggaacgagcgacgtcctgcttcaagtcgaaaccattgctcaggaacacagcacactcagccagcaggtggacgagaagtgcagcttcttggagaccaaattgcaaggaataggtcacttccagaacaccatccgagagatgttcagccaatttgctgagtttgacgatgaactggatagtatggcacctgttggaagggatgccgagacactacagaaacagaaggagaccattaaggcctttttaaagaaactcgaagcactgatggcatctaacgacaatgctaacaaaacatgcaaaatgatgctcgcaacggaggagacttctcctgatttggtgggcattaaacgcgatctggaggccttgtccaaacagtgtaacaaactcctagatcgggcacaggccagagaagaacaagtagagggcacaattaagaggctggaagagttttactccaagctgaaggagttcagtatccttctccaaaaggctgaagaacacgaagagtcccagggccctgtagggatggagacggagactatcaaccaacagcttaacatgtttaaggtctttcagaaagaggaaatcgagccactgcagggcaaacagcaggacgtgaactggcttggccagggcctcattcagagcgcagccaagtccacaagtacccagggtctagagcacgacttggacgatgtaaacgcccgttggaagacattaaataagaaggtggctcagcgtgccgcacaactgcaggaggccctgctacactgcgggcgttttcaagatgctttggagtcactcttatcttggatggtagacaccgaggagctggtggctaaccagaaacctcctagtgctgaatttaaagtcgtgaaggcccaaatccaggagcagaagctcttacagcgactactcgacgatcgaaaatccacagtggaagtcattaaacgagagggcgagaagatcgccaccaccgctgaacccgcagataaggtgaagatcctgaaacagctctccctgctcgactcaagatgggaggcattgttgaacaaggctgagacacgaaaccgccaactcgaagggattagcgttgtcgcccagcaatttcacgaaactctggagcctttgaacgagtggctaacaacaatcgaaaaacgcctggtgaattgcgaacctattggaacacaggcttccaagctggaagagcagatagcccagcacaaggttctccaggaggatattctgctccgcaaacagaatgtggatcaggctctgcttaacggactcgaattgctgaaacaaaccacgggagacgaggtgctgataatacaggataagttagaagccattaaagctcgctacaaggatattactaagctgagcaccgatgtcgccaagaccctcgagcaggcccttcaactggccagacgactgcactcgacacacgaagaactctgtacatggctcgataaagttgaggtggaattgctgtcctatgaaacacaggtactgaagggcgaagaagcctctcaggcccagatgcgacctaaagagctcaaaaaggaggccaagaacaacaaagccctcctggattccctcaacgaggtgtcatcggcactgttggaactggtcccctggagggccagagagggacttgagaagatggtggctgaagacaatgagaggtaccggcttgtctcagataccatcacccaaaaagtggaagaaatcgatgcagccattctacgcagtcagcagttcgaccaggcagcagatgcagagctgtcatggatcactgagaccgagaaaaaattaatgtctctgggggatatacgcttagaacaggaccagacctcagcacaactccaggtacagaaaaccttcacaatggaaattctcagacataaggatatcattgatgaccttgtcaagtcaggacataaaattatgacagcttgtagcgaagaagagaagcaatctatgaagaaaaagctagacaaggtcttgaagaactatgacactatctgccagataaattctgagagatacctgcaactggagcgcgctcaaagcttggtgaatcagttctgggagacatacgaagaactgtggccctggctgacagaaacccagtcaattatcagccagctgccggcaccggcactggagtatgaaacactgagacagcagcaagaagaacatcgacaactccgcgagttgattgccgaacataaaccccatattgataagatgaataagacaggccctcagctgctcgagctttccccaggcgaaggattttcgatccaggaaaaatacgtggcggctgatactctgtactcccagattaaggaggacgttaagaaaagagccgtggctctggatgaggcaatttcccagtctacccagttccatgacaagatcgatcagattctggagtcactggaacgaattgtggagcggctaaggcagcccccaagcatttctgcagaggtcgaaaaaatcaaagagcagatctccgagaacaaaaatgtgtctgtcgatatggagaaacttcaaccactgtacgagacattaaaacagcgcggagaagagatgatcgcaagatcaggcggtaccgacaaagatatctcggcaaaggcggttcaggataagttggatcaaatggtgttcatctgggagaatatccacacgctggtggaagagagggaggccaagctgctggacgtcatggagctagccgagaaattttggtgcgatcatatgagtctgattgtaaccatcaaagacacacaggactttattagggacttggaggatcccggtatagatccctcagtggttaagcaacagcaagaggcagcggagactatcagggaagaaatagacgggctgcaggaagagctggatattgttattaacctgggctctgaactgattgctgcttgcggcgagcctgataagcccatcgtcaagaaaagtattgatgaactcaattctgcctgggactccctgaacaaagcttggaaggacaggattgataagctcgaagaggcaatgcaggccgctgttcagtatcaggatggcttgcaggccgtcttcgactgggtcgacatcgcgggaggcaaattggccagcatgtctccgatcggcactgatctggagacagtaaagcagcaaattgaggaactcaagcagtttaaatctgaggcttaccagcagcagattgagatggagcgtttgaaccaccaagccgagctcttgctgaaaaaagtgacagaagagagtgataagcataccgtccaggatcccctgatggagttgaagctaatctgggattcattggaagagaggatcatcaatcggcagcacaagctggaaggtgctttgttagcactgggccaattccagcatgccctggacgaactgcttgcctggctgactcacaccgaaggtctactcagcgagcagaagcctgttggaggcgatcccaaagctatagagatcgagctagctaaacatcacgtgctccaaaatgacgtattagctcaccaatcaacagtggaggctgtcaataaggcagggaacgatctcatcgaaagcagcgcaggagaggaagcgagcaatctccagaataagctggaggtccttaaccagagatggcaaaatgtcctggaaaaaacagaacagaggaaacagcagctggacggtgccttgcgccaagccaagggttttcacggagaaatcgaagatcttcagcagtggcttaccgataccgagcgacatctcctcgcttctaagccgctgggcggattaccggaaacagcaaaggagcagctgaatgttcacatggaagtgtgcgccgcattcgaagccaaggaagagacctataagtcactgatgcagaagggtcaacagatgcttgccaggtgtccaaagtctgcagaaaccaatatcgatcaagatataaacaatctgaaagagaagtgggagtccgtggagaccaagctgaacgagcggaaaactaaattggaagaggccctcaatttggctatggaatttcataatagtctacaggacttcataaattggctgacacaggcagaacagaccctcaatgttgcaagtagaccctctctgattctggacactgttctcttccagatcgatgaacacaaagtgtttgcgaacgaagtgaattctcacagggaacagataatcgagctcgacaaaaccgggacgcacctcaagtatttctcccagaaacaggacgtcgtattaatcaaaaatttactgatcagcgtgcagtctcgctgggagaaggtggttcagcgactggtggagcgcggtcgatccctggacgatgccaggaagcgcgcaaaacaattccatgaggcctggagcaaactgatggagtggctggaagaaagcgaaaaatcgctggactcagaactggagatcgccaacgaccccgataaaatcaaaacacagctggcgcaacacaaagagtttcagaagtctcttggggcaaagcatagtgtgtacgatactaccaacagaaccggcagaagcctgaaggagaaaacgagccttgccgacgacaatctcaagctggacgatatgttatccgaactcagagataagtgggacacaatctgtggcaaatccgtagaacggcagaataagctggaggaagcgctgctgttctctggacagttcacagatgctctgcaggccctgatcgattggctatatcgggttgagccccaactcgctgaggaccagcccgtgcacggggacatcgacctggtgatgaatcttatagataatcacaaagcttttcaaaaagagctggggaagcgaacatcttctgtccaagcccttaaaaggtctgctcgcgagcttatcgaaggcagccgggatgactctagttgggtcaaagtgcaaatgcaggagctctccacgcgctgggaaactgtgtgtgcactatccatctccaagcaaacacgcttagaggctgccctgcgtcaggcagaggagtttcactcagtggttcacgcgttgcttgaatggttggcagaggcggagcaaacactgcggttccatggggtgcttccggatgatgaggacgccctgcggaccctgattgaccagcataaagaatttatgaagaaactggaggaaaagagggctgagctgaataaagcaactaccatgggggacaccgtcctagcgatctgtcacccggactccattacgactattaaacattggatcacaataattagggccaggttcgaggaggtcctcgcgtgggccaagcaacatcagcaaaggcttgcctctgcactggccggtctgatcgcaaagcaggaactgctcgaagccctgctggcctggctgcagtgggccgaaaccacgctgacagacaaagataaggaggttatcccacaagaaatagaagaggttaaagccctgatcgccgagcatcaaactttcatggaggagatgacgagaaagcagcccgatgtggataaagtaacaaaaacttataagcgacgtgctgcagacccatcgagtcttcaaagccacattcccgtcttggataaggggagggctggcagaaagcgctttcccgcttcctcactgtatcctagtggatctcagactcaaatagaaactaagaacccccgagttaacctgctggtgtcgaaatggcagcaggtttggcttcttgccctcgaacgtagacgaaagctaaatgacgcacttgaccgtctcgaagagctgcgcgagttcgccaactttgacttcgacatctggcgaaaaaagtatatgaggtggatgaatcacaaaaaaagccgggtcatggactttttcaggcggatagacaaggaccaggacgggaaaattacgagacaggaattcattgacggcatcctgtcatcaaagttccccacatcacgcctcgagatgtcggctgtggctgatatctttgaccgcgacggggatggatatatagactactatgagttcgtggccgcactccatcctaataaggatgcgtataagcctataacagacgccgataaaattgaagatgaggttacgcggcaagtcgcgaagtgcaaatgcgcaaagcgttttcaggtggagcagatcggtgataataagtacagattcttcttaggaaaccagttcggcgattcgcagcagctgagactggttcgcatcctgagaagcacggtgatggtccgcgtcggcggaggatggatggcacttgatgaattcctagtaaagaatgatccttgccgcgtccaccaccatggaagcaagatgttacgttctgagtccaacagtagtattacaacaacccagccaaccatcgctaaaggccgtaccaacatggagctgcgcgagaaatttatattggctgatggtgcttcgcagggcatggccgctttccgcccacggggaaggcgcagccgaccttccagtaggggggcatctccaaataggtccacaagcgtgagcagccaggcagcccaggcggcttccccgcaggtcccagccaccactactcctaaaggaacccccattcagggtagtaagttgcggctgcccggttatttgagcgggaaagggttccactctggagaagattctggactcatcactaccgcagcggctagagtacgcacacagttcgccgattccaaaaaaacgccaagccggccaggctcccgagccggaagcaaagcaggaagccgtgcctcttcacgtagaggttctgacgccagcgactttgatataagcgagattcagtcggtgtgctcagacgtggaaacagtccctcagacccaccgaccaactcccagggcaggctctcgcccttctaccgcaaagccaagcaaaattcctacgcctcagcgtaaaagccctgcatccaaactcgataaaagttctaagaggtat

SEQ ID NO: 304942 - DNA, 12603 bp, Artificial Sequence
  derived and/or modified sequence
atggccggctacctgagccccgccgcctacctgtacgtggaggagcaggagtacctgcaggcctacgaggacgtgctggagagatacaaggacgagagagacaaggtgcagaagaagaccttcaccaagtggatcaaccagcacctgatgaaggtgagaaagcacgtgaacgacctgtacgaggacctgagagacggccacaacctgatcagcctgctggaggtgctgagcggcgacaccctgcccagagagaagggcagaatgagattccacagactgcagaacgtgcagatcgccctggactacctgaagagaagacaggtgaagctggtgaacatcagaaacgacgacatcaccgacggcaaccccaagctgaccctgggcctgatctggaccatcatcctgcacttccagatcagcgacatccacgtgaccggcgagagcgaggacatgagcgccaaggagagactgctgctgtggacccagcaggccaccgagggctacgccggcatcagatgcgagaacttcaccacctgctggagagacggcaagctgttcaacgccatcatccacaagtacagacccgacctgatcgacatgaacaccgtggccgtgcagagcaacctggccaacctggagcacgccttctacgtggccgagaagatcggcgtgatcagactgctggaccccgaggacgtggacgtgagcagccccgacgagaagagcgtgatcacctacgtgagcagcctgtacgacgccttccccaaggtgcccgagggcggcgagggcatcggcgccaacgacgtggaggtgaagtggatcgagtaccagaacatggtgaactacctgatccagtggatcagacaccacgtgaccaccatgagcgagagaaccttccccaacaaccccgtggagctgaaggccctgtacaaccagtacctgcagttcaaggagaccgagatcccccccaaggagaccgagaagagcaagatcaagagactgtacaagctgctggagatctggatcgagttcggcagaatcaagctgctgcagggctaccaccccaacgacatcgagaaggagtggggcaagctgatcatcgccatgctggagagagagaaggccctgagacccgaggtggagagactggagatgctgcagcagatcgccaacagagtgcagagagacagcgtgatctgcgaggacaagctgatcctggccggcaacgccctgcagagcgacagcaagagactggagagcggcgtgcagttccagaacgaggccgagatcgccggctacatcctggagtgcgagaacctgctgagacagcacgtgatcgacgtgcagatcctgatcgacggcaagtactaccaggccgaccagctggtgcagagagtggccaagctgagagacgagatcatggccctgagaaacgagtgcagcagcgtgtacagcaagggcagaatcctgaccaccgagcagaccaagctgatgatcagcggcatcacccagagcctgaacagcggcttcgcccagaccctgcaccccagcctgaccagcggcctgacccagagcctgacccccagcctgaccagcagcagcatgaccagcggcctgagcagcggcatgaccagcagactgacccccagcgtgacccccgcctacacccccggcttccccagcggcctggtgcccaacttcagcagcggcgtggagcccaacagcctgcagaccctgaagctgatgcagatcagaaagcccctgctgaagagcagcctgctggaccagaacctgaccgaggaggagatcaacatgaagttcgtgcaggacctgctgaactgggtggacgagatgcaggtgcagctggacagaaccgagtggggcagcgacctgcccagcgtggagagccacctggagaaccacaagaacgtgcacagagccatcgaggagttcgagagcagcctgaaggaggccaagatcagcgagatccagatgaccgcccccctgaagctgacctacgccgagaagctgcacagactggagagccagtacgccaagctgctgaacaccagcagaaaccaggagagacacctggacaccctgcacaacttcgtgagcagagccaccaacgagctgatctggctgaacgagaaggaggaggaggaggtggcctacgactggagcgagagaaacaccaacatcgccagaaagaaggactaccacgccgagctgatgagagagctggaccagaaggaggagaacatcaagagcgtgcaggagatcgccgagcagctgctgctggagaaccaccccgccagactgaccatcgaggcctacagagccgccatgcagacccagtggagctggatcctgcagctgtgccagtgcgtggagcagcacatcaaggagaacaccgcctacttcgagttcttcaacgacgccaaggaggccaccgactacctgagaaacctgaaggacgccatccagagaaagtacagctgcgacagaagcagcagcatccacaagctggaggacctggtgcaggagagcatggaggagaaggaggagctgctgcagtacaagagcaccatcgccaacctgatgggcaaggccaagaccatcatccagctgaagcccagaaacagcgactgccccctgaagaccagcatccccatcaaggccatctgcgactacagacagatcgagatcaccatctacaaggacgacgagtgcgtgctggccaacaacagccacagagccaagtggaaggtgatcagccccaccggcaacgaggccatggtgcccagcgtgtgcttcaccgtgcccccccccaacaaggaggccgtggacctggccaacagaatcgagcagcagtaccagaacgtgctgaccctgtggcacgagagccacatcaacatgaagagcgtggtgagctggcactacctgatcaacgagatcgacagaatcagagccagcaacgtggccagcatcaagaccatgctgcccggcgagcaccagcaggtgctgagcaacctgcagagcagattcgaggacttcctggaggacagccaggagagccaggtgttcagcggcagcgacatcacccagctggagaaggaggtgaacgtgtgcaagcagtactaccaggagctgctgaagagcgccgagagagaggagcaggaggagagcgtgtacaacctgtacatcagcgaggtgagaaacatcagactgagactggagaactgcgaggacagactgatcagacagatcagaacccccctggagagagacgacctgcacgagagcgtgttcagaatcaccgagcaggagaagctgaagaaggagctggagagactgaaggacgacctgggcaccatcaccaacaagtgcgaggagttcttcagccaggccgccgccagcagcagcgtgcccaccctgagaagcgagctgaacgtggtgctgcagaacatgaaccaggtgtacagcatgagcagcacctacatcgacaagctgaagaccgtgaacctggtgctgaagaacacccaggccgccgaggccctggtgaagctgtacgagaccaagctgtgcgaggaggaggccgtgatcgccgacaagaacaacatcgagaacctgatcagcaccctgaagcagtggagaagcgaggtggacgagaagagacaggtgttccacgccctggaggacgagctgcagaaggccaaggccatcagcgacgagatgttcaagacctacaaggagagagacctggacttcgactggcacaaggagaaggccgaccagctggtggagagatggcagaacgtgcacgtgcagatcgacaacagactgagagacctggagggcatcggcaagagcctgaagtactacagagacacctaccaccccctggacgactggatccagcaggtggagaccacccagagaaagatccaggagaaccagcccgagaacagcaagaccctggccacccagctgaaccagcagaagatgctggtgagcgagatcgagatgaagcagagcaagatggacgagtgccagaagtacgccgagcagtacagcgccaccgtgaaggactacgagctgcagaccatgacctacagagccatggtggacagccagcagaagagccccgtgaagagaagaagaatgcagagcagcgccgacctgatcatccaggagttcatggacctgagaaccagatacaccgccctggtgaccctgatgacccagtacatcaagttcgccggcgacagcctgaagagactggaggaggaggagaagagcctggaggaggagaagaaggagcacgtggagaaggccaaggagctgcagaagtgggtgagcaacatcagcaagaccctgaaggacgccgagaaggccggcaagccccccttcagcaagcagaagatcagcagcgaggagatcagcaccaagaaggagcagctgagcgaggccctgcagaccatccagctgttcctggccaagcacggcgacaagatgaccgacgaggagagaaacgagctggagaagcaggtgaagaccctgcaggagagctacaacctgctgttcagcgagagcctgaagcagctgcaggagagccagaccagcggcgacgtgaaggtggaggagaagctggacaaggtgatcgccggcaccatcgaccagaccaccggcgaggtgctgagcgtgttccaggccgtgctgagaggcctgatcgactacgacaccggcatcagactgctggagacccagctgatgatcagcggcctgatcagccccgagctgagaaagtgcttcgacctgaaggacgccaagagccacggcctgatcgacgagcagatcctgtgccagctgaaggagctgagcaaggccaaggagatcatcagcgccgccagccccaccaccatccccgtgctggacgccctggcccagagcatgatcaccgagagcatggccatcaaggtgctggagatcctgctgagcaccggcagcctggtgatccccgccaccggcgagcagctgaccctgcagaaggccttccagcagaacctggtgagcagcgccctgttcagcaaggtgctggagagacagaacatgtgcaaggacctgatcgacccctgcaccagcgagaaggtgagcctgatcgacatggtgcagagaagcaccctgcaggagaacaccggcatgtggctgctgcccgtgagaccccaggagggcggcagaatcaccctgaagtgcggcagaaacatcagcatcctgagagccgcccacgagggcctgatcgacagagagaccatgttcagactgctgagcgcccagctgctgagcggcggcctgatcaacagcaacagcggccagagaatgaccgtggaggaggccgtgagagagggcgtgatcgacagagacaccgccagcagcatcctgacctaccaggtgcagaccggcggcatcatccagagcaaccccgccaagagactgaccgtggacgaggccgtgcagtgcgacctgatcaccagcagcagcgccctgctggtgctggaggcccagagaggctacgtgggcctgatctggccccacagcggcgagatcttccccaccagcagcagcctgcagcaggagctgatcaccaacgagctggcctacaagatcctgaacggcagacagaagatcgccgccctgtacatccccgagagcagccaggtgatcggcctggacgccgccaagcagctgggcatcatcgacaacaacaccgccagcatcctgaagaacatcaccctgcccgacaagatgcccgacctgggcgacctggaggcctgcaagaacgccagaagatggctgagcttctgcaagttccagcccagcaccgtgcacgactacagacaggaggaggacgtgttcgacggcgaggagcccgtgaccacccagaccagcgaggagaccaagaagctgttcctgagctacctgatgatcaacagctacatggacgccaacaccggccagagactgctgctgtacgacggcgacctggacgaggccgtgggcatgctgctggagggctgccacgccgagttcgacggcaacaccgccatcaaggagtgcctggacgtgctgagcagcagcggcgtgttcctgaacaacgccagcggcagagagaaggacgagtgcaccgccacccccagcagcttcaacaagtgccactgcggcgagcccgagcacgaggagacccccgagaacagaaagtgcgccatcgacgaggagttcaacgagatgagaaacaccgtgatcaacagcgagttcagccagagcggcaagctggccagcaccatcagcatcgaccccaaggtgaacagcagccccagcgtgtgcgtgcccagcctgatcagctacctgacccagaccgagctggccgacatcagcatgctgagaagcgacagcgagaacatcctgaccaactacgagaaccagagcagagtggagaccaacgagagagccaacgagtgcagccacagcaagaacatccagaacttccccagcgacctgatcgagaaccccatcatgaagagcaagatgagcaagttctgcggcgtgaacgagaccgagaacgaggacaacaccaacagagacagccccatcttcgactacagccccagactgagcgccctgctgagccacgacaagctgatgcacagccagggcagcttcaacgacacccacacccccgagagcaacggcaacaagtgcgaggcccccgccctgagcttcagcgacaagaccatgctgagcggccagagaatcggcgagaagttccaggaccagttcctgggcatcgccgccatcaacatcagcctgcccggcgagcagtacggccagaagagcctgaacatgatcagcagcaacccccaggtgcagtaccacaacgacaagtacatcagcaacaccagcggcgaggacgagaagacccaccccggcttccagcagatgcccgaggacaaggaggacgagagcgagatcgaggagtacagctgcgccgtgacccccggcggcgacaccgacaacgccatcgtgagcctgacctgcgccacccccctgctggacgagaccatcagcgccagcgactacgagaccagcctgctgaacgaccagcagaacaacaccggcaccgacaccgacagcgacgacgacttctacgacacccccctgttcgaggacgacgaccacgacagcctgctgctggacggcgacgacagagactgcctgcaccccgaggactacgacaccctgcaggaggagaacgacgagaccgccagccccgccgacgtgttctacgacgtgagcaaggagaacgagaacagcatggtgccccagggcgcccccgtgggcagcctgagcgtgaagaacaaggcccactgcctgcaggacttcctgatggacgtggagaaggacgagctggacagcggcgagaagatccacctgaaccccgtgggcagcgacaaggtgaacggccagagcctggagaccggcagcgagagagagtgcaccaacatcctggagggcgacgagagcgacagcctgaccgactacgacatcgtgggcggcaaggagagcttcaccgccagcctgaagttcgacgacagcggcagctggagaggcagaaaggaggagtacgtgaccggccaggagttccacagcgacaccgaccacctggacagcatgcagagcgaggagagctacggcgactacatctacgacagcaacgaccaggacgacgacgacgacgacggcatcgacgaggagggcggcggcatcagagacgagaacggcaagcccagatgccagaacgtggccgaggacatggacatccagctgtgcgccagcatcctgaacgagaacagcgacgagaacgagaacatcaacaccatgatcctgctggacaagatgcacagctgcagcagcctggagaagcagcagagagtgaacgtggtgcagctggccagccccagcgagaacaacctggtgaccgagaagagcaacctgcccgagtacaccaccgagatcgccggcaagagcaaggagaacctgctgaaccacgagatggtgctgaaggacgtgctgccccccatcatcaaggacaccgagagcgagaagaccttcggccccgccagcatcagccacgacaacaacaacatcagcagcaccagcgagctgggcaccgacctggccaacaccaaggtgaagctgatccagggcagcgagctgcccgagctgaccgacagcgtgaagggcaaggacgagtacttcaagaacatgacccccaaggtggacagcagcctggaccacatcatctgcaccgagcccgacctgatcggcaagcccgccgaggagagccacctgagcctgatcgccagcgtgaccgacaaggacccccagggcaacggcagcgacctgatcaagggcagagacggcaagagcgacatcctgatcgaggacgagaccagcatccagaagatgtacctgggcgagggcgaggtgctggtggagggcctggtggaggaggagaacagacacctgaagctgctgcccggcaagaacaccagagacagcttcaagctgatcaacagccagttccccttcccccagatcaccaacaacgaggagctgaaccagaagggcagcctgaagaaggccaccgtgaccctgaaggacgagcccaacaacctgcagatcatcgtgagcaagagccccgtgcagttcgagaacctggaggagatcttcgacaccagcgtgagcaaggagatcagcgacgacatcaccagcgacatcaccagctgggagggcaacacccacttcgaggagagcttcaccgacggccccgagaaggagctggacctgttcacctacctgaagcactgcgccaagaacatcaaggccaaggacgtggccaagcccaacgaggacgtgcccagccacgtgctgatcaccgccccccccatgaaggagcacctgcagctgggcgtgaacaacaccaaggagaagagcaccagcacccagaaggacagccccctgaacgacatgatccagagcaacgacctgtgcagcaaggagagcatcagcggcggcggcaccgagatcagccagttcacccccgagagcatcgaggccaccctgagcatcctgagcagaaagcacgtggaggacgtgggcaagaacgacttcctgcagagcgagagatgcgccaacggcctgggcaacgacaacagcagcaacaccctgaacaccgactacagcttcctggagatcaacaacaagaaggagagaatcgagcagcagctgcccaaggagcaggccctgagccccagaagccaggagaaggaggtgcagatccccgagctgagccaggtgttcgtggaggacgtgaaggacatcctgaagagcagactgaaggagggccacatgaacccccaggaggtggaggagcccagcgcctgcgccgacaccaagatcctgatccagaacctgatcaagagaatcaccaccagccagctggtgaacgaggccagcaccgtgcccagcgacagccagatgagcgacagcagcggcgtgagccccatgaccaacagcagcgagctgaagcccgagagcagagacgaccccttctgcatcggcaacctgaagagcgagctgctgctgaacatcctgaagcaggaccagcacagccagaagatcaccggcgtgttcgagctgatgagagagctgacccacatggagtacgacctggagaagagaggcatcaccagcaaggtgctgcccctgcagctggagaacatcttctacaagctgctggccgacggctacagcgagaagatcgagcacgtgggcgacttcaaccagaaggcctgcagcaccagcgagatgatggaggagaagccccacatcctgggcgacatcaagagcaaggagggcaactactacagccccaacctggagaccgtgaaggagatcggcctggagagcagcaccgtgtgggccagcaccctgcccagagacgagaagctgaaggacctgtgcaacgacttccccagccacctggagtgcaccagcggcagcaaggagatggccagcggcgacagcagcaccgagcagttcagcagcgagctgcagcagtgcctgcagcacaccgagaagatgcacgagtacctgaccctgctgcaggacatgaagccccccctggacaaccaggagagcctggacaacaacctggaggccctgaagaaccagctgagacagctggagaccttcgagctgggcctggcccccatcgccgtgatcctgagaaaggacatgaagctggccgaggagttcctgaagagcctgcccagcgacttccccagaggccacgtggaggagctgagcatcagccaccagagcctgaagaccgccttcagcagcctgagcaacgtgagcagcgagagaaccaagcagatcatgctggccatcgacagcgagatgagcaagctggccgtgagccacgaggagttcctgcacaagctgaagagcttcagcgactgggtgagcgagaagagcaagagcgtgaaggacatcgagatcgtgaacgtgcaggacagcgagtacgtgaagaagagactggagttcctgaagaacgtgctgaaggacctgggccacaccaagatgcagctggagaccaccgccttcgacgtgcagttcttcatcagcgagtacgcccaggacctgagccccaaccagagcaagcagctgctgagactgctgaacaccacccagaagtgcttcctggacgtgcaggagagcgtgaccacccaggtggagagactggagacccagctgcacctggagcaggacctggacgaccagaagatcgtggccgagagacagcaggagtacaaggagaagctgcagggcatctgcgacctgctgacccagaccgagaacagactgatcggccaccaggaggccttcatgatcggcgacggcaccgtggagctgaagaagtaccagagcaagcaggaggagctgcagaaggacatgcagggcagcgcccaggccctggccgaggtggtgaagaacaccgagaacttcctgaaggagaacggcgagaagctgagccaggaggacaaggccctgatcgagcagaagctgaacgaggccaagatcaagtgcgagcagctgaacctgaaggccgagcagagcaagaaggagctggacaaggtggtgaccaccgccatcaaggaggagaccgagaaggtggccgccgtgaagcagctggaggagagcaagaccaagatcgagaacctgctggactggctgagcaacgtggacaaggacagcgagagagccggcaccaagcacaagcaggtgatcgagcagaacggcacccacttccaggagggcgacggcaagagcgccatcggcgaggaggacgaggtgaacggcaacctgctggagaccgacgtggacggccaggtgggcaccacccaggagaacctgaaccagcagtaccagaaggtgaaggcccagcacgagaagatcatcagccagcaccaggccgtgatcatcgccacccagagcgcccaggtgctgctggagaagcagggccagtacctgagccccgaggagaaggagaagctgcagaagaacatgaaggagctgaaggtgcactacgagaccgccctggccgagagcgagaagaagatgaagctgacccacagcctgcaggaggagctggagaagttcgacgccgactacaccgagttcgagcactggctgcagcagagcgagcaggagctggagaacctggaggccggcgccgacgacatcaacggcctgatgaccaagctgaagagacagaagagcttcagcgaggacgtgatcagccacaagggcgacctgagatacatcaccatcagcggcaacagagtgctggaggccgccaagagctgcagcaagagagacggcggcaaggtggacaccagcgccacccacagagaggtgcagagaaagctggaccacgccaccgacagattcagaagcctgtacagcaagtgcaacgtgctgggcaacaacctgaaggacctggtggacaagtaccagcactacgaggacgccagctgcggcctgctggccggcctgcaggcctgcgaggccaccgccagcaagcacctgagcgagcccatcgccgtggaccccaagaacctgcagagacagctggaggagaccaaggccctgcagggccagatcagcagccagcaggtggccgtggagaagctgaagaagaccgccgaggtgctgctggacgccagaggcagcctgctgcccgccaagaacgacatccagaagaccctggacgacatcgtgggcagatacgaggacctgagcaagagcgtgaacgagagaaacgagaagctgcagatcaccctgaccagaagcctgagcgtgcaggacggcctggacgagatgctggactggatgggcaacgtggagagcagcctgaaggagcaggacgtgggcaccggctactgcagaagcagcgagcagtacaagtgccacgagtag

SEQ ID NO: 304943 - DNA, 22386 bp, Artificial Sequence
  derived and/or modified sequence
atggccggctacctgagccccgccgcctacctgtacgtggaggagcaggagtacctgcaggcctacgaggacgtgctggagagatacaaggacgagagagacaaggtgcagaagaagaccttcaccaagtggatcaaccagcacctgatgaaggtgagaaagcacgtgaacgacctgtacgaggacctgagagacggccacaacctgatcagcctgctggaggtgctgagcggcgacaccctgcccagagagaagggcagaatgagattccacagactgcagaacgtgcagatcgccctggactacctgaagagaagacaggtgaagctggtgaacatcagaaacgacgacatcaccgacggcaaccccaagctgaccctgggcctgatctggaccatcatcctgcacttccagatcagcgacatccacgtgaccggcgagagcgaggacatgagcgccaaggagagactgctgctgtggacccagcaggccaccgagggctacgccggcatcagatgcgagaacttcaccacctgctggagagacggcaagctgttcaacgccatcatccacaagtacagacccgacctgatcgacatgaacaccgtggccgtgcagagcaacctggccaacctggagcacgccttctacgtggccgagaagatcggcgtgatcagactgctggaccccgaggacgtggacgtgagcagccccgacgagaagagcgtgatcacctacgtgagcagcctgtacgacgccttccccaaggtgcccgagggcggcgagggcatcggcgccaacgacgtggaggtgaagtggatcgagtaccagaacatggtgaactacctgatccagtggatcagacaccacgtgaccaccatgagcgagagaaccttccccaacaaccccgtggagctgaaggccctgtacaaccagtacctgcagttcaaggagaccgagatcccccccaaggagaccgagaagagcaagatcaagagactgtacaagctgctggagatctggatcgagttcggcagaatcaagctgctgcagggctaccaccccaacgacatcgagaaggagtggggcaagctgatcatcgccatgctggagagagagaaggccctgagacccgaggtggagagactggagatgctgcagcagatcgccaacagagtgcagagagacagcgtgatctgcgaggacaagctgatcctggccggcaacgccctgcagagcgacagcaagagactggagagcggcgtgcagttccagaacgaggccgagatcgccggctacatcctggagtgcgagaacctgctgagacagcacgtgatcgacgtgcagatcctgatcgacggcaagtactaccaggccgaccagctggtgcagagagtggccaagctgagagacgagatcatggccctgagaaacgagtgcagcagcgtgtacagcaagggcagaatcctgaccaccgagcagaccaagctgatgatcagcggcatcacccagagcctgaacagcggcttcgcccagaccctgcaccccagcctgaccagcggcctgacccagagcctgacccccagcctgaccagcagcagcatgaccagcggcctgagcagcggcatgaccagcagactgacccccagcgtgacccccgcctacacccccggcttccccagcggcctggtgcccaacttcagcagcggcgtggagcccaacagcctgcagaccctgaagctgatgcagatcagaaagcccctgctgaagagcagcctgctggaccagaacctgaccgaggaggagatcaacatgaagttcgtgcaggacctgctgaactgggtggacgagatgcaggtgcagctggacagaaccgagtggggcagcgacctgcccagcgtggagagccacctggagaaccacaagaacgtgcacagagccatcgaggagttcgagagcagcctgaaggaggccaagatcagcgagatccagatgaccgcccccctgaagctgacctacgccgagaagctgcacagactggagagccagtacgccaagctgctgaacaccagcagaaaccaggagagacacctggacaccctgcacaacttcgtgagcagagccaccaacgagctgatctggctgaacgagaaggaggaggaggaggtggcctacgactggagcgagagaaacaccaacatcgccagaaagaaggactaccacgccgagctgatgagagagctggaccagaaggaggagaacatcaagagcgtgcaggagatcgccgagcagctgctgctggagaaccaccccgccagactgaccatcgaggcctacagagccgccatgcagacccagtggagctggatcctgcagctgtgccagtgcgtggagcagcacatcaaggagaacaccgcctacttcgagttcttcaacgacgccaaggaggccaccgactacctgagaaacctgaaggacgccatccagagaaagtacagctgcgacagaagcagcagcatccacaagctggaggacctggtgcaggagagcatggaggagaaggaggagctgctgcagtacaagagcaccatcgccaacctgatgggcaaggccaagaccatcatccagctgaagcccagaaacagcgactgccccctgaagaccagcatccccatcaaggccatctgcgactacagacagatcgagatcaccatctacaaggacgacgagtgcgtgctggccaacaacagccacagagccaagtggaaggtgatcagccccaccggcaacgaggccatggtgcccagcgtgtgcttcaccgtgcccccccccaacaaggaggccgtggacctggccaacagaatcgagcagcagtaccagaacgtgctgaccctgtggcacgagagccacatcaacatgaagagcgtggtgagctggcactacctgatcaacgagatcgacagaatcagagccagcaacgtggccagcatcaagaccatgctgcccggcgagcaccagcaggtgctgagcaacctgcagagcagattcgaggacttcctggaggacagccaggagagccaggtgttcagcggcagcgacatcacccagctggagaaggaggtgaacgtgtgcaagcagtactaccaggagctgctgaagagcgccgagagagaggagcaggaggagagcgtgtacaacctgtacatcagcgaggtgagaaacatcagactgagactggagaactgcgaggacagactgatcagacagatcagaacccccctggagagagacgacctgcacgagagcgtgttcagaatcaccgagcaggagaagctgaagaaggagctggagagactgaaggacgacctgggcaccatcaccaacaagtgcgaggagttcttcagccaggccgccgccagcagcagcgtgcccaccctgagaagcgagctgaacgtggtgctgcagaacatgaaccaggtgtacagcatgagcagcacctacatcgacaagctgaagaccgtgaacctggtgctgaagaacacccaggccgccgaggccctggtgaagctgtacgagaccaagctgtgcgaggaggaggccgtgatcgccgacaagaacaacatcgagaacctgatcagcaccctgaagcagtggagaagcgaggtggacgagaagagacaggtgttccacgccctggaggacgagctgcagaaggccaaggccatcagcgacgagatgttcaagacctacaaggagagagacctggacttcgactggcacaaggagaaggccgaccagctggtggagagatggcagaacgtgcacgtgcagatcgacaacagactgagagacctggagggcatcggcaagagcctgaagtactacagagacacctaccaccccctggacgactggatccagcaggtggagaccacccagagaaagatccaggagaaccagcccgagaacagcaagaccctggccacccagctgaaccagcagaagatgctggtgagcgagatcgagatgaagcagagcaagatggacgagtgccagaagtacgccgagcagtacagcgccaccgtgaaggactacgagctgcagaccatgacctacagagccatggtggacagccagcagaagagccccgtgaagagaagaagaatgcagagcagcgccgacctgatcatccaggagttcatggacctgagaaccagatacaccgccctggtgaccctgatgacccagtacatcaagttcgccggcgacagcctgaagagactggaggaggaggagaagagcctggaggaggagaagaaggagcacgtggagaaggccaaggagctgcagaagtgggtgagcaacatcagcaagaccctgaaggacgccgagaaggccggcaagccccccttcagcaagcagaagatcagcagcgaggagatcagcaccaagaaggagcagctgagcgaggccctgcagaccatccagctgttcctggccaagcacggcgacaagatgaccgacgaggagagaaacgagctggagaagcaggtgaagaccctgcaggagagctacaacctgctgttcagcgagagcctgaagcagctgcaggagagccagaccagcggcgacgtgaaggtggaggagaagctggacaaggtgatcgccggcaccatcgaccagaccaccggcgaggtgctgagcgtgttccaggccgtgctgagaggcctgatcgactacgacaccggcatcagactgctggagacccagctgatgatcagcggcctgatcagccccgagctgagaaagtgcttcgacctgaaggacgccaagagccacggcctgatcgacgagcagatcctgtgccagctgaaggagctgagcaaggccaaggagatcatcagcgccgccagccccaccaccatccccgtgctggacgccctggcccagagcatgatcaccgagagcatggccatcaaggtgctggagatcctgctgagcaccggcagcctggtgatccccgccaccggcgagcagctgaccctgcagaaggccttccagcagaacctggtgagcagcgccctgttcagcaaggtgctggagagacagaacatgtgcaaggacctgatcgacccctgcaccagcgagaaggtgagcctgatcgacatggtgcagagaagcaccctgcaggagaacaccggcatgtggctgctgcccgtgagaccccaggagggcggcagaatcaccctgaagtgcggcagaaacatcagcatcctgagagccgcccacgagggcctgatcgacagagagaccatgttcagactgctgagcgcccagctgctgagcggcggcctgatcaacagcaacagcggccagagaatgaccgtggaggaggccgtgagagagggcgtgatcgacagagacaccgccagcagcatcctgacctaccaggtgcagaccggcggcatcatccagagcaaccccgccaagagactgaccgtggacgaggccgtgcagtgcgacctgatcaccagcagcagcgccctgctggtgctggaggcccagagaggctacgtgggcctgatctggccccacagcggcgagatcttccccaccagcagcagcctgcagcaggagctgatcaccaacgagctggcctacaagatcctgaacggcagacagaagatcgccgccctgtacatccccgagagcagccaggtgatcggcctggacgccgccaagcagctgggcatcatcgacaacaacaccgccagcatcctgaagaacatcaccctgcccgacaagatgcccgacctgggcgacctggaggcctgcaagaacgccagaagatggctgagcttctgcaagttccagcccagcaccgtgcacgactacagacaggaggaggacgtgttcgacggcgaggagcccgtgaccacccagaccagcgaggagaccaagaagctgttcctgagctacctgatgatcaacagctacatggacgccaacaccggccagagactgctgctgtacgacggcgacctggacgaggccgtgggcatgctgctggagggctgccacgccgagttcgacggcaacaccgccatcaaggagtgcctggacgtgctgagcagcagcggcgtgttcctgaacaacgccagcggcagagagaaggacgagtgcaccgccacccccagcagcttcaacaagtgccactgcggcgagcccgagcacgaggagacccccgagaacagaaagtgcgccatcgacgaggagttcaacgagatgagaaacaccgtgatcaacagcgagttcagccagagcggcaagctggccagcaccatcagcatcgaccccaaggtgaacagcagccccagcgtgtgcgtgcccagcctgatcagctacctgacccagaccgagctggccgacatcagcatgctgagaagcgacagcgagaacatcctgaccaactacgagaaccagagcagagtggagaccaacgagagagccaacgagtgcagccacagcaagaacatccagaacttccccagcgacctgatcgagaaccccatcatgaagagcaagatgagcaagttctgcggcgtgaacgagaccgagaacgaggacaacaccaacagagacagccccatcttcgactacagccccagactgagcgccctgctgagccacgacaagctgatgcacagccagggcagcttcaacgacacccacacccccgagagcaacggcaacaagtgcgaggcccccgccctgagcttcagcgacaagaccatgctgagcggccagagaatcggcgagaagttccaggaccagttcctgggcatcgccgccatcaacatcagcctgcccggcgagcagtacggccagaagagcctgaacatgatcagcagcaacccccaggtgcagtaccacaacgacaagtacatcagcaacaccagcggcgaggacgagaagacccaccccggcttccagcagatgcccgaggacaaggaggacgagagcgagatcgaggagtacagctgcgccgtgacccccggcggcgacaccgacaacgccatcgtgagcctgacctgcgccacccccctgctggacgagaccatcagcgccagcgactacgagaccagcctgctgaacgaccagcagaacaacaccggcaccgacaccgacagcgacgacgacttctacgacacccccctgttcgaggacgacgaccacgacagcctgctgctggacggcgacgacagagactgcctgcaccccgaggactacgacaccctgcaggaggagaacgacgagaccgccagccccgccgacgtgttctacgacgtgagcaaggagaacgagaacagcatggtgccccagggcgcccccgtgggcagcctgagcgtgaagaacaaggcccactgcctgcaggacttcctgatggacgtggagaaggacgagctggacagcggcgagaagatccacctgaaccccgtgggcagcgacaaggtgaacggccagagcctggagaccggcagcgagagagagtgcaccaacatcctggagggcgacgagagcgacagcctgaccgactacgacatcgtgggcggcaaggagagcttcaccgccagcctgaagttcgacgacagcggcagctggagaggcagaaaggaggagtacgtgaccggccaggagttccacagcgacaccgaccacctggacagcatgcagagcgaggagagctacggcgactacatctacgacagcaacgaccaggacgacgacgacgacgacggcatcgacgaggagggcggcggcatcagagacgagaacggcaagcccagatgccagaacgtggccgaggacatggacatccagctgtgcgccagcatcctgaacgagaacagcgacgagaacgagaacatcaacaccatgatcctgctggacaagatgcacagctgcagcagcctggagaagcagcagagagtgaacgtggtgcagctggccagccccagcgagaacaacctggtgaccgagaagagcaacctgcccgagtacaccaccgagatcgccggcaagagcaaggagaacctgctgaaccacgagatggtgctgaaggacgtgctgccccccatcatcaaggacaccgagagcgagaagaccttcggccccgccagcatcagccacgacaacaacaacatcagcagcaccagcgagctgggcaccgacctggccaacaccaaggtgaagctgatccagggcagcgagctgcccgagctgaccgacagcgtgaagggcaaggacgagtacttcaagaacatgacccccaaggtggacagcagcctggaccacatcatctgcaccgagcccgacctgatcggcaagcccgccgaggagagccacctgagcctgatcgccagcgtgaccgacaaggacccccagggcaacggcagcgacctgatcaagggcagagacggcaagagcgacatcctgatcgaggacgagaccagcatccagaagatgtacctgggcgagggcgaggtgctggtggagggcctggtggaggaggagaacagacacctgaagctgctgcccggcaagaacaccagagacagcttcaagctgatcaacagccagttccccttcccccagatcaccaacaacgaggagctgaaccagaagggcagcctgaagaaggccaccgtgaccctgaaggacgagcccaacaacctgcagatcatcgtgagcaagagccccgtgcagttcgagaacctggaggagatcttcgacaccagcgtgagcaaggagatcagcgacgacatcaccagcgacatcaccagctgggagggcaacacccacttcgaggagagcttcaccgacggccccgagaaggagctggacctgttcacctacctgaagcactgcgccaagaacatcaaggccaaggacgtggccaagcccaacgaggacgtgcccagccacgtgctgatcaccgccccccccatgaaggagcacctgcagctgggcgtgaacaacaccaaggagaagagcaccagcacccagaaggacagccccctgaacgacatgatccagagcaacgacctgtgcagcaaggagagcatcagcggcggcggcaccgagatcagccagttcacccccgagagcatcgaggccaccctgagcatcctgagcagaaagcacgtggaggacgtgggcaagaacgacttcctgcagagcgagagatgcgccaacggcctgggcaacgacaacagcagcaacaccctgaacaccgactacagcttcctggagatcaacaacaagaaggagagaatcgagcagcagctgcccaaggagcaggccctgagccccagaagccaggagaaggaggtgcagatccccgagctgagccaggtgttcgtggaggacgtgaaggacatcctgaagagcagactgaaggagggccacatgaacccccaggaggtggaggagcccagcgcctgcgccgacaccaagatcctgatccagaacctgatcaagagaatcaccaccagccagctggtgaacgaggccagcaccgtgcccagcgacagccagatgagcgacagcagcggcgtgagccccatgaccaacagcagcgagctgaagcccgagagcagagacgaccccttctgcatcggcaacctgaagagcgagctgctgctgaacatcctgaagcaggaccagcacagccagaagatcaccggcgtgttcgagctgatgagagagctgacccacatggagtacgacctggagaagagaggcatcaccagcaaggtgctgcccctgcagctggagaacatcttctacaagctgctggccgacggctacagcgagaagatcgagcacgtgggcgacttcaaccagaaggcctgcagcaccagcgagatgatggaggagaagccccacatcctgggcgacatcaagagcaaggagggcaactactacagccccaacctggagaccgtgaaggagatcggcctggagagcagcaccgtgtgggccagcaccctgcccagagacgagaagctgaaggacctgtgcaacgacttccccagccacctggagtgcaccagcggcagcaaggagatggccagcggcgacagcagcaccgagcagttcagcagcgagctgcagcagtgcctgcagcacaccgagaagatgcacgagtacctgaccctgctgcaggacatgaagccccccctggacaaccaggagagcctggacaacaacctggaggccctgaagaaccagctgagacagctggagaccttcgagctgggcctggcccccatcgccgtgatcctgagaaaggacatgaagctggccgaggagttcctgaagagcctgcccagcgacttccccagaggccacgtggaggagctgagcatcagccaccagagcctgaagaccgccttcagcagcctgagcaacgtgagcagcgagagaaccaagcagatcatgctggccatcgacagcgagatgagcaagctggccgtgagccacgaggagttcctgcacaagctgaagagcttcagcgactgggtgagcgagaagagcaagagcgtgaaggacatcgagatcgtgaacgtgcaggacagcgagtacgtgaagaagagactggagttcctgaagaacgtgctgaaggacctgggccacaccaagatgcagctggagaccaccgccttcgacgtgcagttcttcatcagcgagtacgcccaggacctgagccccaaccagagcaagcagctgctgagactgctgaacaccacccagaagtgcttcctggacgtgcaggagagcgtgaccacccaggtggagagactggagacccagctgcacctggagcaggacctggacgaccagaagatcgtggccgagagacagcaggagtacaaggagaagctgcagggcatctgcgacctgctgacccagaccgagaacagactgatcggccaccaggaggccttcatgatcggcgacggcaccgtggagctgaagaagtaccagagcaagcaggaggagctgcagaaggacatgcagggcagcgcccaggccctggccgaggtggtgaagaacaccgagaacttcctgaaggagaacggcgagaagctgagccaggaggacaaggccctgatcgagcagaagctgaacgaggccaagatcaagtgcgagcagctgaacctgaaggccgagcagagcaagaaggagctggacaaggtggtgaccaccgccatcaaggaggagaccgagaaggtggccgccgtgaagcagctggaggagagcaagaccaagatcgagaacctgctggactggctgagcaacgtggacaaggacagcgagagagccggcaccaagcacaagcaggtgatcgagcagaacggcacccacttccaggagggcgacggcaagagcgccatcggcgaggaggacgaggtgaacggcaacctgctggagaccgacgtggacggccaggtgggcaccacccaggagaacctgaaccagcagtaccagaaggtgaaggcccagcacgagaagatcatcagccagcaccaggccgtgatcatcgccacccagagcgcccaggtgctgctggagaagcagggccagtacctgagccccgaggagaaggagaagctgcagaagaacatgaaggagctgaaggtgcactacgagaccgccctggccgagagcgagaagaagatgaagctgacccacagcctgcaggaggagctggagaagttcgacgccgactacaccgagttcgagcactggctgcagcagagcgagcaggagctggagaacctggaggccggcgccgacgacatcaacggcctgatgaccaagctgaagagacagaagagcttcagcgaggacgtgatcagccacaagggcgacctgagatacatcaccatcagcggcaacagagtgctggaggccgccaagagctgcagcaagagagacggcggcaaggtggacaccagcgccacccacagagaggtgcagagaaagctggaccacgccaccgacagattcagaagcctgtacagcaagtgcaacgtgctgggcaacaacctgaaggacctggtggacaagtaccagcactacgaggacgccagctgcggcctgctggccggcctgcaggcctgcgaggccaccgccagcaagcacctgagcgagcccatcgccgtggaccccaagaacctgcagagacagctggaggagaccaaggccctgcagggccagatcagcagccagcaggtggccgtggagaagctgaagaagaccgccgaggtgctgctggacgccagaggcagcctgctgcccgccaagaacgacatccagaagaccctggacgacatcgtgggcagatacgaggacctgagcaagagcgtgaacgagagaaacgagaagctgcagatcaccctgaccagaagcctgagcgtgcaggacggcctggacgagatgctggactggatgggcaacgtggagagcagcctgaaggagcagggccaggtgcccctgaacagcaccgccctgcaggacatcatcagcaagaacatcatgctggagcaggacatcgccggcagacagagcagcatcaacgccatgaacgagaaggtgaagaagttcatggagaccaccgaccccagcaccgccagcagcctgcaggccaagatgaaggacctgagcgccagattcagcgaggccagccacaagcacaaggagaccctggccaagatggaggagctgaagaccaaggtggagctgttcgagaacctgagcgagaagctgcagaccttcctggagaccaagacccaggccctgaccgaggtggacgtgcccggcaaggacgtgaccgagctgagccagtacatgcaggagagcaccagcgagttcctggagcacaagaagcacctggaggtgctgcacagcctgctgaaggagatcagcagccacggcctgcccagcgacaaggccctggtgctggagaagaccaacaacctgagcaagaagttcaaggagatggaggacaccatcaaggagaagaaggaggccgtgaccagctgccaggagcagctggacgccttccaggtgctggtgaagagcctgaagagctggatcaaggagaccaccaagaaggtgcccatcgtgcagcccagcttcggcgccgaggacctgggcaagagcctggaggacaccaagaagctgcaggagaagtggagcctgaagacccccgagatccagaaggtgaacaacagcggcatcagcctgtgcaacctgatcagcgccgtgaccacccccgccaaggccatcgccgccgtgaagagcggcggcgccgtgctgaacggcgagggcaccgccaccaacaccgaggagttctgggccaacaagggcctgaccagcatcaagaaggacatgaccgacatcagccacggctacgaggacctgggcctgctgctgaaggacaagatcgccgagctgaacaccaagctgagcaagctgcagaaggcccaggaggagagcagcgccatgatgcagtggctgcagaagatgaacaagaccgccaccaagtggcagcagacccccgcccccaccgacaccgaggccgtgaagacccaggtggagcagaacaagagcttcgaggccgagctgaagcagaacgtgaacaaggtgcaggagctgaaggacaagctgaccgagctgctggaggagaaccccgacacccccgaggcccccagatggaagcagatgctgaccgagatcgacagcaagtggcaggagctgaaccagctgaccatcgacagacagcagaagctggaggagagcagcaacaacctgacccagttccagaccgtggaggcccagctgaagcagtggctggtggagaaggagctgatggtgagcgtgctgggccccctgagcatcgaccccaacatgctgaacacccagagacagcaggtgcagatcctgctgcaggagttcgccaccagaaagccccagtacgagcagctgaccgccgccggccagggcatcctgagcagacccggcgaggaccccagcctgagaggcatcgtgaaggagcagctggccgccgtgacccagaagtgggacagcctgaccggccagctgagcgacagatgcgactggatcgaccaggccatcgtgaagagcacccagtaccagagcctgctgagaagcctgagcgacaagctgagcgacctggacaacaagctgagcagcagcctggccgtgagcacccaccccgacgccatgaaccagcagctggagaccgcccagaagatgaagcaggagatccagcaggagaagaagcagatcaaggtggcccaggccctgtgcgaggacctgagcgccctggtgaaggaggagtacctgaaggccgagctgagcagacagctggagggcatcctgaagagcttcaaggacgtggagcagaaggccgagaaccacgtgcagcacctgcagagcgcctgcgccagcagccaccagttccagcagatgagcagagacttccaggcctggctggacaccaagaaggaggagcagaacaagagccaccccatcagcgccaagctggacgtgctggagagcctgatcaaggaccacaaggacttcagcaagaccctgaccgcccagagccacatgtacgagaagaccatcgccgagggcgagaacctgctgctgaagacccagggcagcgagaaggccgccctgcagctgcagctgaacaccatcaagaccaactgggacaccttcaacaagcaggtgaaggagagagagaacaagctgaaggagagcctggagaaggccctgaagtacaaggagcaggtggagaccctgtggccctggatcgacaagtgccagaacaacctggaggagatcaagttctgcctggaccccgccgagggcgagaacagcatcgccaagctgaagagcctgcagaaggagatggaccagcacttcggcatggtggagctgctgaacaacaccgccaacagcctgctgagcgtgtgcgagatcgacaaggaggtggtgaccgacgagaacaagagcctgatccagaaggtggacatggtgaccgagcagctgcacagcaagaagttctgcctggagaacatgacccagaagttcaaggagttccaggaggtgagcaaggagagcaagagacagctgcagtgcgccaaggagcagctggacatccacgacagcctgggcagccaggcctacagcaacaagtacctgaccatgctgcagacccagcagaagagcctgcaggccctgaagcaccaggtggacctggccaagagactggcccaggacctggtggtggaggccagcgacagcaagggcaccagcgacgtgctgctgcaggtggagaccatcgcccaggagcacagcaccctgagccagcaggtggacgagaagtgcagcttcctggagaccaagctgcagggcatcggccacttccagaacaccatcagagagatgttcagccagttcgccgagttcgacgacgagctggacagcatggcccccgtgggcagagacgccgagaccctgcagaagcagaaggagaccatcaaggccttcctgaagaagctggaggccctgatggccagcaacgacaacgccaacaagacctgcaagatgatgctggccaccgaggagaccagccccgacctggtgggcatcaagagagacctggaggccctgagcaagcagtgcaacaagctgctggacagagcccaggccagagaggagcaggtggagggcaccatcaagagactggaggagttctacagcaagctgaaggagttcagcatcctgctgcagaaggccgaggagcacgaggagagccagggccccgtgggcatggagaccgagaccatcaaccagcagctgaacatgttcaaggtgttccagaaggaggagatcgagcccctgcagggcaagcagcaggacgtgaactggctgggccagggcctgatccagagcgccgccaagagcaccagcacccagggcctggagcacgacctggacgacgtgaacgccagatggaagaccctgaacaagaaggtggcccagagagccgcccagctgcaggaggccctgctgcactgcggcagattccaggacgccctggagagcctgctgagctggatggtggacaccgaggagctggtggccaaccagaagccccccagcgccgagttcaaggtggtgaaggcccagatccaggagcagaagctgctgcagagactgctggacgacagaaagagcaccgtggaggtgatcaagagagagggcgagaagatcgccaccaccgccgagcccgccgacaaggtgaagatcctgaagcagctgagcctgctggacagcagatgggaggccctgctgaacaaggccgagaccagaaacagacagctggagggcatcagcgtggtggcccagcagttccacgagaccctggagcccctgaacgagtggctgaccaccatcgagaagagactggtgaactgcgagcccatcggcacccaggccagcaagctggaggagcagatcgcccagcacaaggtgctgcaggaggacatcctgctgagaaagcagaacgtggaccaggccctgctgaacggcctggagctgctgaagcagaccaccggcgacgaggtgctgatcatccaggacaagctggaggccatcaaggccagatacaaggacatcaccaagctgagcaccgacgtggccaagaccctggagcaggccctgcagctggccagaagactgcacagcacccacgaggagctgtgcacctggctggacaaggtggaggtggagctgctgagctacgagacccaggtgctgaagggcgaggaggccagccaggcccagatgagacccaaggagctgaagaaggaggccaagaacaacaaggccctgctggacagcctgaacgaggtgagcagcgccctgctggagctggtgccctggagagccagagagggcctggagaagatggtggccgaggacaacgagagatacagactggtgagcgacaccatcacccagaaggtggaggagatcgacgccgccatcctgagaagccagcagttcgaccaggccgccgacgccgagctgagctggatcaccgagaccgagaagaagctgatgagcctgggcgacatcagactggagcaggaccagaccagcgcccagctgcaggtgcagaagaccttcaccatggagatcctgagacacaaggacatcatcgacgacctggtgaagagcggccacaagatcatgaccgcctgcagcgaggaggagaagcagagcatgaagaagaagctggacaaggtgctgaagaactacgacaccatctgccagatcaacagcgagagatacctgcagctggagagagcccagagcctggtgaaccagttctgggagacctacgaggagctgtggccctggctgaccgagacccagagcatcatcagccagctgcccgcccccgccctggagtacgagaccctgagacagcagcaggaggagcacagacagctgagagagctgatcgccgagcacaagccccacatcgacaagatgaacaagaccggcccccagctgctggagctgagccccggcgagggcttcagcatccaggagaagtacgtggccgccgacaccctgtacagccagatcaaggaggacgtgaagaagagagccgtggccctggacgaggccatcagccagagcacccagttccacgacaagatcgaccagatcctggagagcctggagagaatcgtggagagactgagacagccccccagcatcagcgccgaggtggagaagatcaaggagcagatcagcgagaacaagaacgtgagcgtggacatggagaagctgcagcccctgtacgagaccctgaagcagagaggcgaggagatgatcgccagaagcggcggcaccgacaaggacatcagcgccaaggccgtgcaggacaagctggaccagatggtgttcatctgggagaacatccacaccctggtggaggagagagaggccaagctgctggacgtgatggagctggccgagaagttctggtgcgaccacatgagcctgatcgtgaccatcaaggacacccaggacttcatcagagacctggaggaccccggcatcgaccccagcgtggtgaagcagcagcaggaggccgccgagaccatcagagaggagatcgacggcctgcaggaggagctggacatcgtgatcaacctgggcagcgagctgatcgccgcctgcggcgagcccgacaagcccatcgtgaagaagagcatcgacgagctgaacagcgcctgggacagcctgaacaaggcctggaaggacagaatcgacaagctggaggaggccatgcaggccgccgtgcagtaccaggacggcctgcaggccgtgttcgactgggtggacatcgccggcggcaagctggccagcatgagccccatcggcaccgacctggagaccgtgaagcagcagatcgaggagctgaagcagttcaagagcgaggcctaccagcagcagatcgagatggagagactgaaccaccaggccgagctgctgctgaagaaggtgaccgaggagagcgacaagcacaccgtgcaggaccccctgatggagctgaagctgatctgggacagcctggaggagagaatcatcaacagacagcacaagctggagggcgccctgctggccctgggccagttccagcacgccctggacgagctgctggcctggctgacccacaccgagggcctgctgagcgagcagaagcccgtgggcggcgaccccaaggccatcgagatcgagctggccaagcaccacgtgctgcagaacgacgtgctggcccaccagagcaccgtggaggccgtgaacaaggccggcaacgacctgatcgagagcagcgccggcgaggaggccagcaacctgcagaacaagctggaggtgctgaaccagagatggcagaacgtgctggagaagaccgagcagagaaagcagcagctggacggcgccctgagacaggccaagggcttccacggcgagatcgaggacctgcagcagtggctgaccgacaccgagagacacctgctggccagcaagcccctgggcggcctgcccgagaccgccaaggagcagctgaacgtgcacatggaggtgtgcgccgccttcgaggccaaggaggagacctacaagagcctgatgcagaagggccagcagatgctggccagatgccccaagagcgccgagaccaacatcgaccaggacatcaacaacctgaaggagaagtgggagagcgtggagaccaagctgaacgagagaaagaccaagctggaggaggccctgaacctggccatggagttccacaacagcctgcaggacttcatcaactggctgacccaggccgagcagaccctgaacgtggccagcagacccagcctgatcctggacaccgtgctgttccagatcgacgagcacaaggtgttcgccaacgaggtgaacagccacagagagcagatcatcgagctggacaagaccggcacccacctgaagtacttcagccagaagcaggacgtggtgctgatcaagaacctgctgatcagcgtgcagagcagatgggagaaggtggtgcagagactggtggagagaggcagaagcctggacgacgccagaaagagagccaagcagttccacgaggcctggagcaagctgatggagtggctggaggagagcgagaagagcctggacagcgagctggagatcgccaacgaccccgacaagatcaagacccagctggcccagcacaaggagttccagaagagcctgggcgccaagcacagcgtgtacgacaccaccaacagaaccggcagaagcctgaaggagaagaccagcctggccgacgacaacctgaagctggacgacatgctgagcgagctgagagacaagtgggacaccatctgcggcaagagcgtggagagacagaacaagctggaggaggccctgctgttcagcggccagttcaccgacgccctgcaggccctgatcgactggctgtacagagtggagccccagctggccgaggaccagcccgtgcacggcgacatcgacctggtgatgaacctgatcgacaaccacaaggccttccagaaggagctgggcaagagaaccagcagcgtgcaggccctgaagagaagcgccagagagctgatcgagggcagcagagacgacagcagctgggtgaaggtgcagatgcaggagctgagcaccagatgggagaccgtgtgcgccctgagcatcagcaagcagaccagactggaggccgccctgagacaggccgaggagttccacagcgtggtgcacgccctgctggagtggctggccgaggccgagcagaccctgagattccacggcgtgctgcccgacgacgaggacgccctgagaaccctgatcgaccagcacaaggagttcatgaagaagctggaggagaagagagccgagctgaacaaggccaccaccatgggcgacaccgtgctggccatctgccaccccgacagcatcaccaccatcaagcactggatcaccatcatcagagccagattcgaggaggtgctggcctgggccaagcagcaccagcagagactggccagcgccctggccggcctgatcgccaagcaggagctgctggaggccctgctggcctggctgcagtgggccgagaccaccctgaccgacaaggacaaggaggtgatcccccaggagatcgaggaggtgaaggccctgatcgccgagcaccagaccttcatggaggagatgaccagaaagcagcccgacgtggacaaggtgaccaagacctacaagagaagagccgccgaccccagcagcctgcagagccacatccccgtgctggacaagggcagagccggcagaaagagattccccgccagcagcctgtaccccagcggcagccagacccagatcgagaccaagaaccccagagtgaacctgctggtgagcaagtggcagcaggtgtggctgctggccctggagagaagaagaaagctgaacgacgccctggacagactggaggagctgagagagttcgccaacttcgacttcgacatctggagaaagaagtacatgagatggatgaaccacaagaagagcagagtgatggacttcttcagaagaatcgacaaggaccaggacggcaagatcaccagacaggagttcatcgacggcatcctgagcagcaagttccccaccagcagactggagatgagcgccgtggccgacatcttcgacagagacggcgacggctacatcgactactacgagttcgtggccgccctgcaccccaacaaggacgcctacaagcccatcaccgacgccgacaagatcgaggacgaggtgaccagacaggtggccaagtgcaagtgcgccaagagattccaggtggagcagatcggcgacaacaagtacagattcttcctgggcaaccagttcggcgacagccagcagctgagactggtgagaatcctgagaagcaccgtgatggtgagagtgggcggcggctggatggccctggacgagttcctggtgaagaacgacccctgcagagtgcaccaccacggcagcaagatgctgagaagcgagagcaacagcagcatcaccaccacccagcccaccatcgccaagggcagaaccaacatggagctgagagagaagttcatcctggccgacggcgccagccagggcatggccgccttcagacccagaggcagaagaagcagacccagcagcagaggcgccagccccaacagaagcaccagcgtgagcagccaggccgcccaggccgccagcccccaggtgcccgccaccaccacccccaagggcacccccatccagggcagcaagctgagactgcccggctacctgagcggcaagggcttccacagcggcgaggacagcggcctgatcaccaccgccgccgccagagtgagaacccagttcgccgacagcaagaagacccccagcagacccggcagcagagccggcagcaaggccggcagcagagccagcagcagaagaggcagcgacgccagcgacttcgacatcagcgagatccagagcgtgtgcagcgacgtggagaccgtgccccagacccacagacccacccccagagccggcagcagacccagcaccgccaagcccagcaagatccccaccccccagagaaagagccccgccagcaagctggacaagagcagcaagagatag

SEQ ID NO: 304944 - DNA, 23715 bp, Artificial Sequence
  derived and/or modified sequence
atggcgggttacctctcccctgctgcttacctgtacgtggaggagcaggagtatctccaggcctacgaggatgtcctggagaggtacaaagatgaacgggacaaagttcagaagaaaacatttacaaaatggataaatcagcatctcatgaaggttcgaaaacatgtgaatgatctctatgaagacttaagggatggacacaatttgatttctcttttagaggttctttcaggagataccttgcccagagaaaaaggtcggatgcgttttcacagactacagaatgtacaaattgcacttgactatttgaaaagacgccaggtgaaattagtgaatattagaaatgatgacataacagatggaaatcccaaattgactttgggattaatctggacaataattttgcactttcagatatctgatatccatgttactggagagtcagaggatatgtctgcaaaagagagattgctactctggacgcagcaggcaacagagggttatgctggaattcggtgtgaaaatttcactacctgctggagagatggaaaattatttaatgccatcattcataaatacaggccggacctgatagatatgaatactgttgctgttcaaagcaaccttgcaaatttagagcatgctttttacgtagcagaaaaaattggtgttataagacttctggaccctgaagatgtcgatgtctcctcacctgatgaaaaatcagtaataacttacgtgtcatctctctatgatgcatttcctaaagtccctgaaggtggggaaggcattggtgcaaatgatgttgaagtcaaatggattgaataccagaatatggtgaactacctcatccaatggattagacaccatgtgaccacaatgtctgagagaacatttcctaataatcctgtagaactgaaggcactttataatcagtatttacagtttaaagaaacagaaattccaccaaaggagacagaaaaatcaaaaattaaacgtctatataaattattagagatttggatagaatttggacgcatcaagctccttcaaggttatcatccaaatgacatagaaaaagagtgggggaaactcattattgccatgctagagagagagaaggcccttcgtccagaagtagaaaggttagaaatgttgcaacagattgccaacagagttcagagggacagtgtcatctgtgaagacaaactgattcttgctggaaatgctcttcagtctgattctaaaagattagaatcaggagtgcagtttcagaatgaagcagaaattgctgggtatatacttgaatgtgagaaccttttacgccagcatgtaattgatgtacagattcttattgatggaaaatactaccaggcagatcaattggtacagagggttgcaaaactgcgtgacgaaattatggccttaaggaacgaatgttcttctgtgtacagcaaaggacgcatactgacaacagaacagacaaagctcatgatatcaggaatcactcaaagtttaaactcaggatttgcacagaccttacaccctagtctgacctcagggctgacccagagtttaacaccttccctaacctcttctagtatgacttctggcctgtcatcagggatgacttcccgcctgactccatctgtcactccagcttatacacctggtttcccatcaggattagttccaaatttcagttcaggagtagagccaaattcattgcaaactttgaagttgatgcagatccgaaaaccccttctaaagtcttctttgctggatcaaaatttaacagaagaagaaatcaatatgaaatttgttcaggatcttttgaattgggttgatgagatgcaggtacaactggaccgcactgagtggggctcagatttgccaagtgttgaaagccatttagaaaatcataaaaatgttcatagagctattgaagaatttgaatctagtctcaaagaagctaaaatcagtgagattcaaatgacagcacctcttaaactgacttatgcagaaaagttgcacagattagagagtcagtatgcaaaactcttgaatacatccaggaatcaagaacggcaccttgatacactccataattttgtaagtcgtgcgactaatgaacttatttggttgaatgaaaaagaagaggaggaagttgcttatgactggagtgagagaaacaccaacatagctaggaaaaaagattatcatgctgaattaatgagagaacttgatcaaaaggaagaaaatattaaatcagttcaggagatagcagagcagctacttctagaaaatcatccagcccggttaactattgaggcctacagagcggcaatgcagacgcagtggagctggatcttacagctctgccagtgtgtggagcagcacataaaggagaacacagcgtatttcgagtttttcaatgatgccaaagaagctactgattacttaaggaatctaaaagatgccattcagcggaagtacagctgtgatagatcaagcagcattcacaagctagaagaccttgttcaggaatcaatggaagagaaagaagaacttctgcagtacaaaagcactatagcaaacctaatgggaaaagcaaaaacaataattcaactgaagccaaggaattctgactgtccactcaaaacttctattccgatcaaagctatctgtgactacagacaaattgagataaccatttacaaagacgatgaatgtgttttggcgaataactctcatcgtgctaaatggaaggtcattagtcctactgggaatgaggctatggtcccatctgtgtgcttcaccgttcctccaccaaacaaagaagcggtggaccttgccaacagaattgagcaacagtatcagaatgtcctgactctttggcatgagtctcacataaacatgaagagtgtagtatcctggcattatctcatcaatgaaattgatagaattcgagctagcaatgtggcttcaataaagacaatgctacctggtgaacatcagcaagttctaagtaatctacaatctcgttttgaagattttctggaagatagccaggaatcccaagtcttttcaggctcagatataacacaactggaaaaggaggttaatgtatgtaagcagtattatcaagaacttcttaaatctgcagaaagagaggagcaagaggaatcagtttataatctctacatctctgaagttcgaaacattagacttcggttagagaactgtgaagatcggctgattagacagattcgaactcccctggaaagagatgatttgcatgaaagtgtgttcagaatcacagaacaggagaaactaaagaaagagctggaacgacttaaagatgatttgggaacaatcacaaataagtgtgaggagtttttcagtcaagcagcagcctcttcatcagtccctaccctacgatcagagcttaatgtggtccttcagaacatgaaccaagtctattctatgtcttccacttacatagataagttgaaaactgttaacttggtgttaaaaaacactcaagctgcagaagccctcgtaaaactctatgaaactaaactgtgtgaagaagaagcagttatagctgacaagaataatattgagaatctaataagtactttaaagcaatggagatctgaagtagatgaaaagagacaggtattccatgccttagaggatgagttgcagaaagctaaagccatcagtgatgaaatgtttaaaacgtataaagaacgggaccttgattttgactggcacaaagaaaaagcagatcaattagttgaaaggtggcaaaatgttcatgtgcagattgacaacaggttacgggacttagagggcattggcaaatcactgaagtactacagagacacttaccatcctttagatgattggatccagcaggttgaaactactcagagaaagattcaggaaaatcagcctgaaaatagtaaaaccctagccacacagttgaatcaacagaagatgctggtgtccgaaatagaaatgaaacagagcaaaatggacgagtgtcaaaaatatgcagaacagtactcagctacagtgaaggactatgaattacaaacaatgacctaccgggccatggtagattcacaacaaaaatctccagtgaaacgccgaagaatgcagagttcagcagatctcattattcaagagttcatggacctaaggactcgatatactgccctggtcactctcatgacacaatatattaaatttgctggtgattcattgaagaggctggaagaggaggagaagtcactggaagaagaaaagaaagaacatgttgaaaaagccaaagaattgcaaaaatgggtatcaaatatcagcaagacattgaaagatgcagagaaggctggaaaacctcccttctctaagcaaaagatttccagtgaggaaatatcaaccaagaaggaacaattatcggaagcacttcaaactatacagctttttttggcaaaacatggagacaaaatgacagatgaagaaagaaatgaattggaaaaacaagtgaaaactcttcaggaaagttataatttattattcagtgaatctctgaaacagctacaagaatcacaaacctcaggagatgtaaaggtagaggagaagctggataaagtgattgcaggcaccattgatcagacaactggagaagtcctttcagtctttcaagcagttttaagaggcctcattgactatgacacaggaattaggttgcttgagacacagctaatgatttctggtctaatttcaccagaattaagaaagtgctttgaccttaaagatgccaaaagtcatggccttattgatgaacaaattctgtgccaactcaaagaactaagtaaagctaaggagattatttctgctgcgtcacctaccacaattccagtactggatgctctagctcaaagcatgataacagaatccatggccatcaaagttcttgagatactgctttctacaggctctctggttattccagccacaggagaacagttgaccctacagaaggctttccaacagaacttggtttcctcagcattattttctaaagttctggaaaggcaaaatatgtgcaaagatcttattgacccctgcacctctgagaaggtttctttaatagatatggtacaaagaagtactttacaggaaaacacagggatgtggcttctacctgtgagaccacaagaaggaggtagaataacattaaaatgtggaagaaacataagcattttaagagcagctcatgaaggtctcatagaccgtgaaaccatgtttaggttgttaagtgcacagcttctttctggaggtctgatcaattccaactctggccaaagaatgactgttgaagaagctgtcagagaaggggtgattgacagggacactgctagcagtatcctcacatatcaggttcaaactggtggaatcatccagtcaaaccctgccaagcgtttaactgtagacgaagcagtacagtgtgatttaataacttccagcagtgctcttctggtcctggaagctcagcgaggctatgttggactcatttggccccattctggtgaaatatttcccacatcatcttccttgcagcaagaattgattacaaatgaattggcctacaaaatcctgaatggcagacaaaaaatagctgctctttatattccagaaagttctcaagtcattggtttggatgctgctaaacagctaggaattatagacaacaacacagcatcaattttaaaaaatataacactgcctgataaaatgccagatttaggagatttagaagcttgtaaaaatgccagaagatggctctctttttgtaaatttcaaccctccacagttcatgattacagacaagaagaggatgtttttgatggagaagaacctgtcactactcagacctcagaagaaactaaaaaattatttctatcttatttaatgataaatagctatatggatgcaaacacagggcaaaggcttttgctgtacgatggagacttggatgaggctgttggcatgctactggaaggctgtcatgcagaatttgatggaaacacagccataaaagaatgtctcgatgtcttaagctcatctggtgtatttcttaataatgcttcaggtagagaaaaggatgaatgtacagctacaccaagtagtttcaataaatgtcactgtggagaacctgaacatgaagagactcctgaaaatagaaagtgtgctatagatgaagaatttaatgaaatgagaaatactgttatcaatagtgaattttctcagtcaggaaaactggcaagtacaatatcaattgatcctaaagttaacagttcacccagtgtgtgtgttcccagtctcatatcatatttaacacagactgaacttgcagacattagcatgcttagaagtgactctgaaaacatacttacaaactatgaaaatcaaagccgagtggaaacaaatgaacgtgcaaatgaatgtagtcattctaaaaacattcaaaactttccaagtgatttaatagaaaatcctattatgaaatcaaaaatgagtaaattctgtggtgtgaatgaaacagagaatgaagataatacaaacagggattcacctatctttgactattcccccaggctaagtgccttgttaagtcatgataaattgatgcacagtcagggaagttttaatgatacacacaccccagagagcaatggaaataagtgtgaagccccagccttatcattcagtgacaaaaccatgttgtcaggtcaaagaataggagaaaaatttcaagaccagtttctgggaattgcagctattaacatcagtttaccaggagagcagtatggacagaaatctttaaatatgatttctagtaatcctcaagtacaatatcacaatgataaatacatttcaaatacttctggtgaggatgaaaaaacacatccaggttttcagcagatgcctgaagacaaggaagatgagtctgaaatagaagagtattcctgtgctgtgactccagggggtgatactgataatgccattgtgtctcttacttgtgctacaccattgcttgatgaaaccatcagtgctagtgactatgaaacgtcactgctgaatgatcagcagaataacacaggaacagacactgatagtgatgatgatttttatgatactcccttgtttgaagatgatgaccatgattctttgcttcttgatggtgatgatcgtgattgcctgcaccctgaggactacgacacactgcaagaggaaaatgatgagacggcttctcctgctgatgttttttatgatgtctcaaaagagaatgaaaattccatggttccccagggggcaccagttggtagcttaagtgtgaagaacaaagcacattgtcttcaggatttccttatggatgttgagaaagatgaattagattctggtgaaaaaatacatttaaatcctgttggctcagataaggtgaatggacagtcactggaaactggatcagaaagggaatgcacaaatatccttgaaggtgatgaatctgactcattgactgattatgatattgtaggaggaaaagagagcttcactgcatcattaaaatttgatgacagtggcagttggagaggaagaaaggaagagtatgtaactggacaggaatttcactccgatactgatcatttagattctatgcaaagtgaagaaagttatggggattatatatatgacagtaatgatcaggatgacgatgatgatgatggcattgatgaagaaggaggaggtataagagatgagaatggaaagcccaggtgccaaaatgtggctgaagatatggatatccagttgtgtgcctctattttaaatgaaaacagtgatgaaaatgaaaatattaatacaatgattcttctggataaaatgcacagttgtagctctttagaaaaacagcaaagggtaaatgttgtacagctagcatcacctagtgaaaataacttagttactgaaaaaagcaaccttccagaatatacaactgagattgctggaaaaagcaaagaaaatctgttgaaccatgagatggtacttaaggatgtattgccgcctatcattaaagacactgaatctgaaaaaacttttggccctgcaagtatttcacatgataataataatatcagttcaacttctgaattaggtactgatctagcaaacacaaaggttaagttgattcaagggtcagaattgccagaattgactgattctgtgaaaggtaaagatgaatattttaagaatatgacaccaaaagttgactcatctcttgatcacatcatttgtactgagcctgatttaataggaaaacctgctgaggaaagccatttgtcattgatagcctctgtaactgacaaagatcctcaaggaaatggaagcgatctcattaaagggagagatggcaaaagtgatattctaatagaagatgaaacatcaattcagaaaatgtacttgggtgaaggagaagtgcttgtagaaggtctagtagaagaagaaaataggcatctcaaacttttgcctggtaaaaatacaagggatagtttcaagttaattaatagtcagtttccatttccacaaatcacaaacaatgaagaacttaatcagaaaggaagccttaaaaaagcaactgtaactcttaaagatgaaccaaataatctacaaataatagttagtaaaagtcctgttcagtttgagaatcttgaagaaatttttgacacatcagtttccaaagagattagtgatgacattacttcagacattacatcgtgggaagggaatacacattttgaggagtcattcactgatggacctgagaaagagcttgatctgtttacttacttaaaacattgtgctaaaaatataaaagcaaaagatgtagccaaaccaaatgaagatgtcccaagccatgttttaataactgcccctcccatgaaagaacatttacaattaggagttaataatacaaaagagaagtccactagtacccaaaaagactcacctcttaatgacatgatccaaagcaatgatctttgtagtaaagaaagcatctcaggaggaggaacagaaatttctcagttcacaccagaaagtattgaagccacactttcaatattatctcgtaaacatgtagaagatgttgggaaaaatgattttctgcagtcggagcggtgtgcaaatggattaggaaatgataactccagtaacactttaaatactgactattcattcttagaaattaataataagaaagaaagaattgagcaacagctaccaaaagaacaagccttgtctccaagatcccaagaaaaggaggttcagattcctgaattgtctcaggtatttgtggaggatgtaaaggatatcttaaaaagcaggttgaaagaaggtcatatgaaccctcaagaggttgaagaaccttcagcctgtgcagacactaaaattttaattcaaaatttaattaaaaggattaccacatcacagttggtaaatgaggcatctactgtgcccagcgactctcaaatgagtgactcttctggagtttcccccatgactaactcatcagaactaaagccagaaagtagagatgatcctttctgtattggaaatcttaagtctgagcttctccttaatatattgaagcaagatcaacatagccaaaaaattacaggagtatttgaattgatgagagaattaactcatatggagtatgacctagagaaaagaggcattacgtctaaagtacttccactgcagcttgaaaatattttctacaaactgcttgctgatggatattcagagaaaatagaacatgttggagactttaatcaaaaagcatgttctacatctgagatgatggaagaaaagccacatattcttggtgatattaaaagcaaagaaggaaactactattctcctaatttagaaactgtaaaagaaattggactagaaagctctactgtgtgggcatcaacattgccaagagatgagaagctcaaggatctgtgtaatgatttcccaagccatttggaatgtacttcagggtctaaagagatggcttctggagatagctcaaccgaacaattttccagtgaattacagcagtgtttacagcacactgaaaaaatgcatgagtatttgacattgcttcaagatatgaaaccccccttagacaaccaggaatctctggataacaacttggaagctttgaagaatcaacttagacagttggagacatttgaattgggattagctccaattgctgttattttaagaaaagatatgaagttggcagaagagtttttaaagtctcttcccagtgactttcccagaggccatgttgaagaattgagtattagccaccagagtttgaagaccgccttctcttccctcagcaacgtgtcttcagaaagaacgaaacagatcatgcttgcgatcgactctgaaatgtctaaactagcagtttcccatgaagaatttctgcataaacttaagtcattctcagattgggtatcagagaagagcaaatctgtgaaggatattgagattgtgaatgttcaagattctgagtatgtaaagaaacgtttggagtttctcaagaatgtattaaaagaccttggacataccaaaatgcagctggagactactgcctttgatgtgcagttcttcatttctgaatatgcacaggatctgtctcccaaccaaagcaaacaactgctgaggctcttaaatacaactcagaagtgttttcttgatgtacaggagtcagtaactacccaggtggaacgtttagagactcagttacatctagaacaagatcttgatgatcagaagattgtagcagagcgtcagcaggagtataaagagaaactccaagggatatgtgatcttcttacccaaactgaaaaccgcctaattggtcaccaagaagccttcatgattggagatggcacagttgagttaaagaaatatcagtccaagcaagaggaattacagaaagatatgcaaggaagtgcacaggcattggctgaagtagtgaaaaacacagagaacttcttaaaagagaatggtgaaaagctgtcacaggaagataaggctttgattgaacagaaacttaatgaagctaagataaagtgtgaacagcttaatttaaaagcagaacagtctaaaaaggagctggataaagttgtgacaacagcaatcaaggaagaaactgaaaaggtagcagcagtgaagcagctggaagagagcaaaaccaaaatagaaaaccttttggactggttgtcaaatgttgacaaagactcagaaagggcagggacaaaacacaaacaggtaatcgaacagaacgggacccattttcaagaaggtgatggcaagtcagcaattggagaagaggatgaagttaatggtaacctgttggagactgatgttgatgggcaagttggaaccactcaggagaatctgaatcagcaatatcagaaagttaaggcccaacacgagaagatcatctctcagcaccaagcagtgatcatagccactcagtctgcacaagtgttgcttgagaaacagggtcagtatctctctcctgaagaaaaagagaaactgcaaaagaacatgaaggaactgaaagtgcattatgaaactgcactggctgagtcagagaagaaaatgaagttaactcactctctgcaggaagaattagaaaagtttgatgctgactataccgagtttgagcactggctacagcagtcagaacaagaacttgaaaacctggaggcaggtgcagatgacatcaatggtttaatgaccaaattgaagaggcagaagagtttctcagaagacgttatttctcacaaaggtgacttgagatacatcacaatttctggaaacagagtgttggaagctgccaaatcttgcagcaagagagacggtggcaaggttgatacttctgcaacccacagagaagtgcagcgcaagttggatcatgctactgatcggttcaggtctctctactctaagtgcaatgttcttggaaataatcttaaagatctggtggataaatatcaacactatgaagatgcttcatgtggacttcttgctggactccaggcctgtgaggccacagcgagcaaacacttatctgaacctattgcggtggaccccaaaaatcttcaaaggcaattagaagagaccaaggctttgcaaggacagatatcaagtcagcaggttgctgtagagaaactgaagaaaacggctgaagtgcttttagatgccaggggatctttacttccagccaagaatgatatccagaaaacacttgatgacattgttgggagatatgaggatctgtccaagtctgttaatgaacgaaatgaaaaactccagataaccttgacccgttcactgagtgtgcaggatggcttggatgaaatgctggactggatgggaaatgtggaaagttctctgaaagaacaagatgttggaacaggatattgcaggtcgtcagagcagtataaatgccatgaatgaaaaagtgaagaaatttatggaaacaacagatccatccactgcatcctcactgcaagccaaaatgaaagacttgtctgctcggttttcagaagcaagtcataaacacaaagaaactcttgccaaaatggaggagctaaaaaccaaagtagaactgtttgagaacctctcagaaaagctccagacatttttagaaacaaaaactcaggctcttactgaagtagatgtgccaggaaaagatgttactgaattgtctcagtatatgcaggaatcaacttctgaatttttagaacacaagaaacatcttgaagttttgcatagtctcttgaaggagatatccagccatggcttaccaagtgataaggctttggtccttgaaaaaacaaataatttgtcaaagaaattcaaggaaatggaggataccatcaaagaaaaaaaagaagctgtaacttcttgtcaagaacagttggatgctttccaagttcttgttaaatcattgaagtcatggataaaagaaacaacaaaaaaagttcccattgtacagccttcttttggtgcagaggatttaggaaaatctttggaagacactaagaaattacaagaaaagtggagtttaaaaacaccagagattcagaaagtaaacaacagtgggatctcactatgtaacttaataagtgctgtgaccacccctgcaaaggcaatagcagcagttaaatcaggtggagcagtattaaatggtgaaggaacagccacaaatactgaggaattttgggcaaataaaggtttaacatccattaaaaaggacatgactgacataagtcatggttatgaagatcttggcctcttactcaaggacaaaatagcggaactgaacactaaactctccaaattgcaaaaggctcaggaagaatcaagtgcaatgatgcagtggttacagaaaatgaacaaaactgcaacaaaatggcagcagacacctgcacctacagatactgaagctgtgaagactcaagttgagcagaataagtcgtttgaggcagaactgaagcagaatgtaaacaaagtacaggagttgaaagacaaattgacagagctgttggaggagaacccagatactcctgaggcccccagatggaaacagatgttgacagaaatagattctaagtggcaagaactcaatcaattaacaattgatagacaacaaaaactggaagaatcctccaataatctaacccagttccagactgtagaggcccaattgaaacagtggcttgtggaaaaagaacttatggtcagtgttcttgggcccttgtcaattgacccaaatatgctaaacacacaaaggcagcaggtgcagattttgctgcaagaattcgccactcggaaacctcaatatgaacagctgacagcagctggtcagggcattctgagcaggcctggagaagacccttctttacgtgggattgtgaaagagcaactggcagctgtgacccaaaaatgggatagcctaacagggcaattgagtgacagatgtgactggattgaccaagccattgttaaaagcacacagtatcaaagcctgctgagaagcctttctgataaactgagtgacttggataataaactcagcagcagtctggctgtgagcacgcaccctgatgctatgaaccaacagttggaaacagcccaaaaaatgaagcaggagatacagcaggaaaagaagcagataaaagtggcccaggcactctgtgaggatttgtcagcactggttaaagaagagtacttgaaagcagaacttagtaggcaactagaaggcatcttaaaatcatttaaggatgttgaacagaaagcagagaatcatgtccagcaccttcagtcggcctgtgcaagctctcatcaatttcagcaaatgtctagagattttcaggcttggctggatacaaagaaagaagagcaaaacaaatctcatccaatatctgccaaactcgatgtcttggagtcattaattaaagatcataaagactttagtaaaactttgaccgctcagtctcatatgtatgaaaaaaccattgcagaaggtgaaaatctgttattaaaaacacaagggtctgagaaggcagccttacagttacagcttaatacaattaaaaccaattgggatacatttaataagcaggtgaaagaaagagaaaacaagttaaaagagtcattggaaaaagcccttaagtataaagagcaagtagagactctctggccatggatagacaaatgccaaaacaacctggaggaaataaaattttgcttggatcctgctgaaggagagaattctattgccaagttaaagtctctgcagaaggaaatggaccaacactttggtatggtagaattactgaacaacacagccaatagcttgctcagtgtctgtgagatagataaagaagttgttacagatgagaataagtcactgatccagaaggtggacatggtcactgaacaacttcacagtaagaaattctgtctggagaacatgactcagaagtttaaagaatttcaagaagtttccaaagaatctaaaaggcagcttcagtgtgcaaaggagcagctagatatccatgattcgctgggatcccaggcttacagtaacaaatacctgaccatgttgcaaactcagcagaaatcacttcaggccttgaagcatcaggtagatttggctaaaagacttgcacaggaccttgtggtagaggcctcagactcaaagggaacctctgatgttttattacaagtggaaaccatagctcaagagcatagtacactaagtcagcaggttgatgaaaagtgttctttcttagaaaccaagcttcagggcattgggcatttccagaataccattcgagaaatgttttctcagttcgcagagtttgatgatgaactggatagcatggctccagtggggagagatgcagaaacattgcaaaagcaaaaggaaactataaaagcctttctaaagaaactagaagccctcatggcaagcaatgacaatgccaataaaacctgcaagatgatgttagccacagaagaaacctctcctgaccttgttggaatcaaaagggacttggaggccttaagcaaacaatgcaacaagttactggaccgagcccaagccagagaagagcaggttgaagggacaattaagcgccttgaagaattttacagcaaattgaaagaattttctattctgctccagaaagccgaagaacatgaagagtcacaaggtcctgttggtatggaaacggagacaattaatcagcagcttaacatgttcaaggtattccagaaagaagagattgaacccttgcaaggtaaacagcaagatgtaaactggttaggtcaaggccttattcagagtgctgccaaaagcactagcactcagggcttggagcatgacctggatgatgtcaatgcacggtggaagactctcaataagaaggtggctcagcgagcagcccagctgcaggaggccttgctgcactgtgggaggttccaggatgccctggagtccctgctcagctggatggtggacactgaggagcttgtggccaatcagaagcccccgtcggctgagttcaaagtggtaaaggcccagatacaagaacaaaagcttctccagagattgttggatgaccgaaaatctacggtggaggtaatcaaacgagaaggagaaaaaattgctacaacagcagagcccgcagataaagtgaagattttgaaacagctcagtctcttggatagcagatgggaggcattgcttaataaagctgaaacaaggaatcgtcagttggaaggtatctcggtggtagcacagcaatttcatgaaaccttagaaccactgaacgagtggcttacaaccatagaaaagaggctggtgaattgtgaacccataggaacccaagcatctaaacttgaggaacaaattgcacagcacaaagccttagaagatgacatcatcaatcacaataaacatttacaccaggctgttagcattggccagtccttaaaggttttgagctccagggaggataaagatatggtgcagagtaaattagacttctctcaagtatggtacattgagattcaagagaaaagtcacagcaggtctgagctcctccagcaggccttatgtaatgctaagatttttggggaagatgaagttgaactgatgaactggctgaatgaagtgcatgacaaactgagcaagctctcagtccaggattacagcactgaggggctatggaagcagcagtctgaacttcgggttctgcaagaggacatcttactcaggaaacaaaatgtagatcaggctttactaaatggtttagaactacttaaacaaaccacaggtgatgaagttttaataattcaagataaattggaagccattaaagcaaggtacaaagacattactaaactgagcactgatgtggccaagactctggaacaggcgctgcagcttgcaaggcggctgcactccacacacgaagagctgtgtacctggctggacaaagtggaggtggaattactttcatatgaaactcaggttctgaaaggagaagaagcaagtcaagcacaaatgagaccaaaggaactgaaaaaggaagctaagaacaacaaagccttactggactcccttaatgaagtgagcagtgctttgctggaactggtaccatggagggcaagagaaggacttgagaaaatggtagctgaggacaatgagcgctaccgattagtgagcgacaccatcactcagaaggtggaggagatcgatgcagccattctgcgatcacagcagtttgaccaagcagctgatgctgagttatcctggattactgaaacagaaaaaaaattgatgtctctgggtgacatcaggcttgagcaagaccagacttctgctcagcttcaagttcaaaagacattcaccatggagattttgagacacaaggatattattgatgaccttgttaaatctgggcataaaatcatgaccgcatgcagtgaagaggaaaagcaatcaatgaagaaaaaactggacaaggtactgaagaactatgataccatctgccagattaattcagaaaggtatctgcagctggaacgggcacagtccctggttaaccaattctgggaaacatatgaagaactttggccatggctgacagaaacacaatcaatcatctctcagcttcccgccccagcccttgaatatgaaactctaaggcagcagcaggaagaacatcggcaactgcgtgagttgatagctgaacacaagcctcatatagataagatgaacaaaactgggccacagttactggaattgagccctggggaaggcttttctatccaagagaagtatgtggcagccgacaccctttacagtcaaattaaagaagatgtcaaaaagcgtgctgtggcactggatgaagccatttctcaatcaactcagttccatgacaagatagatcagatccttgagagcctggaacgcatcgtggaacgtctgaggcagccaccctctatctctgcagaggttgagaagatcaaggaacagatcagtgaaaataagaatgtgtcagtagacatggaaaagctacagccgttgtatgaaactcttaaacagaggggagaggaaatgattgctagatctggggggactgataaagacatatctgccaaagctgttcaggataagcttgaccaaatggttttcatttgggagaacatacacacactggtggaagagagggaagccaaactactggatgtgatggagctagcagaaaagttctggtgtgatcacatgtcattgatagttaccattaaagatactcaagatttcatccgggacctggaagatcctggaattgatccttcagtagtaaaacaacagcaagaagcagcagagaccataagggaagaaatagatggactacaggaggagctggatatagttattaacctaggttctgaactcattgcggcatgtggggagcctgataaacccattgtcaagaagagtatagatgagttaaattcagcatgggattctctaaataaagcttggaaagaccggattgacaaacttgaggaggcaatgcaggctgccgttcagtaccaggatggactgcaggcggtatttgactgggtagatattgcaggtggtaaattagcttcaatgtctccaattggaacagatctcgaaactgtcaagcagcagattgaagagctaaagcaatttaagtctgaggcctatcaacagcagatagaaatggaaagactgaatcatcaagcagagcttttgctaaagaaagtaacagaagagagtgacaaacacactgttcaagacccattaatggaactgaaattgatatgggatagcctggaggagagaatcatcaacagacagcataaactggagggtgctctattagccttgggtcagttccaacatgccctggatgagctcctggcatggctgacacacaccgagggcttgctaagtgagcagaaacctgttggaggagaccctaaagccattgaaattgaacttgccaagcatcatgtgctccaaaatgatgtattagcccatcagtccacagtggaagccgttaataaagcaggaaatgatctaattgaatcaagtgcaggagaagaagcaagcaaccttcagaacaagctagaggttttaaatcaacgctggcaaaatgttttggaaaaaacagaacaaaggaagcagcagctggatggtgccttgcgccaggccaaagggttccatggcgaaattgaggatttgcagcagtggctgactgacacggagcgtcatctgttggcatctaaaccgctgggaggtttaccggaaacagccaaggagcagcttaatgtccatatggaagtctgtgctgcctttgaagctaaagaagaaacatataagagtctgatgcagaaaggccagcagatgcttgcaagatgcccaaaatctgcagagacaaatattgaccaagacataaataacttgaaagaaaaatgggaatcggtggaaaccaaactcaatgaaaggaaaactaaactggaagaggctctcaacttggcaatggagttccacaattctctccaagacttcatcaactggcttactcaggctgaacagaccctaaatgtagcttctcggccaagtctcatcttggacacagtcttatttcaaattgacgaacacaaggtttttgccaatgaagtaaattctcatcgtgagcagataatagagctggacaaaactggaacccacctaaaatattttagtcagaaacaagatgttgttctaatcaagaatctacttatcagtgtacaaagtcgatgggaaaaagtggttcaacggttggtagagagaggaagatctttggatgatgcaaggaagagagccaagcagttccatgaagcttggagtaaacttatggagtggctagaagagtcagaaaagtctttggattctgaactggaaatcgcaaatgatccagacaaaataaaaacacaacttgcacaacataaggagtttcagaaatcactcggagccaagcattctgtctacgacaccaccaacaggactggacgttctctgaaggagaaaacctccctggctgatgacaacctgaaactggatgacatgctgagtgaactcagagacaaatgggataccatatgtggaaaatctgtggaaagacaaaacaaattggaggaagccctgttattttctggacaattcacagatgccctacaggctctcattgattggttatatagagttgaaccccagctggcagaagaccagcctgttcatggagacattgatttggtgatgaatctgatcgataatcacaaggccttccaaaaagagttggggaagaggaccagcagtgtgcaggccctgaagcgctcagcccgagaactcatagaaggcagtcgggatgactcctcctgggtcaaggtccagatgcaggaattaagcacacgctgggagaccgtgtgtgcactttctatatcaaagcaaacacggttagaagcagccctgcgtcaggcagaggaattccactcggtggtacatgccctcttggagtggctggctgaggcggagcaaaccctgcgtttccatggtgtcctcccagatgatgaggatgctctccggactctcattgatcagcataaagaattcatgaagaaactggaagaaaagagagctgaactaaataaagccaccactatgggcgacaccgttttggctatctgccaccccgactccatcactaccattaagcactggataacaatcatccgggcgaggtttgaggaggtgctggcctgggcaaagcaacatcagcagagattagcaagtgctctggctgggcttattgccaaacaggaattgttggaagctttgctggcttggttgcaatgggctgaaactacacttactgataaggataaagaagtcatcccccaggagatcgaagaggtgaaagcactcattgcagaacaccagaccttcatggaggaaatgaccagaaaacagcctgatgttgataaagtaacgaagacctataagaggagagctgctgatccttcctcattacaatcccatattccagtcttggataagggacgagcaggaagaaaacgctttccagcatcaagcttgtatccctctgggtcacagacacaaattgaaaccaaaaatcctagggtaaacttactggtgagcaaatggcagcaagtctggctcctggcgttggaaagaaggaggaaactcaatgatgccttggacagactagaggagctgagggaatttgctaactttgattttgatatctggcgcaaaaaatacatgcgatggatgaatcacaagaaatctcgagtgatggacttcttcaggagaattgataaagaccaggatgggaaaataacgcggcaggaatttattgatggaattctttcctcaaagtttccaaccagtcgcttggagatgagcgcagttgcagacatctttgacagagatggcgatggatatattgactactatgaatttgtagcagcccttcacccaaataaagatgcatataaacctatcacagatgccgacaaaatcgaagatgaggtgacaaggcaggtagctaagtgtaaatgtgcaaagcgatttcaagttgagcagattggtgataataaatacaggttcttcctgggaaatcagtttggagactcccagcaactgcgactggtccggatcctgcggagtactgtgatggttcgtgttggaggtggatggatggcacttgatgagttcttagtgaaaaatgatccttgcagggccaaaggaaggacaaacatggaactgcgtgagaagttcattttagcagatggtgccagccagggtatggctgctttccgaccccgaggccgaagatcccggccatcatcacgaggcgcttcacccaacagatccacttctgtgtccagtcaggctgcgcaggcggcctccccacaggtccctgccaccaccacacccaagattctccatcctttaacacgcaattatggtaaaccatggttgacaaacagcaaaatgtcaactccttgtaaagcagcagagtgctcagactttcccgtgccatctgcagagggaacgccaatacaaggaagcaagcttcgacttccaggatatttatcagggaaaggcttccactctggggaggacagtggcttgataacaactgcagctgccagagtccgaacacagtttgctgattccaagaagactcccagccgaccaggaagtcgagctggaagcaaagctggcagcagggccagcagccgccgaggcagtgatgcatcagactttgacatttcagaaatccagtccgtgtgctcagatgtggaaactgtcccccagacacacagacctacaccccgagcaggttctcggccatccacagcgaagccttcaaaaatccccacgccccagaggaaatcacctgccagcaaattggacaagtcctcaaagagatagtgcaattggttctaccaaggcccttccttgagcatttattatttaagtttgaacgatgtaaaatatggtgtagaaattcttgtgaaatattgcaagaggcgagtttaaaattctgcagatggccttatttgtgtatttgtctttttattttatctgtataattttttttgtcagatattctggggttaaagtcacatcatatgtgaggaggaaaagtttaacatgaactaacatttctgcactgtaacgtgccgggcacacactaaactcagttactgtacctacaggtaagtctacatcctctctgacagccacagcactacatcaatccctgacgttagggatacctcatgacattttcctgtttttatggaaactctgagaagctgaatgatacatgcaggggatattttttgagatgatttaaatgtaaaccaaaagatggaagacaaaaagacaaacacacccacacgcagtctttgcagtatctgacagagaactcacaggaagttacttcaagcacttgccagtactatgatattcaagtaccttgcagcatttctctgccattgctttcaatgaggccagaggcatcctggatattagacctattatactgtaagaatataagtataaagtgcgttcatatacatgtgaggttttcttttgcttgagtggacagtagcacctgtatcattgaactcattttgtatcagagcaattttgcttgcagaaagctatgaaataaaacacgtcccttaactgcattgctatggaattaattttttttccccagggaaaactagtgtatttttttatgagcaatatcaatttggagtgaccaaaagatacttaaaaatgggtttattttgatttctcatctgaaataatcatgttctggtattatatctatctatatttaataaatatatacattttaatttattatgtgtactcacatactatagaaagatattagtatgcatttaataaaacatattcacttgaatatatgg

SEQ ID NO: 304945 - DNA, 22431 bp, Artificial Sequence
  derived and/or modified sequence
acttcggcatggcgggttacctctcccctgctgcttacctgtacgtggaggagcaggagtatctccaggcctacgaggatgtcctggagaggtacaaagatgaacgggacaaagttcagaagaaaacatttacaaaatggataaatcagcatctcatgaaggttcgaaaacatgtgaatgatctctatgaagacttaagggatggacacaatttgatttctcttttagaggttctttcaggagataccttgcccagagaaaaaggtcggatgcgttttcacagactacagaatgtacaaattgcacttgactatttgaaaagacgccaggtgaaattagtgaatattagaaatgatgacataacagatggaaatcccaaattgactttgggattaatctggacaataattttgcactttcagatatctgatatccatgttactggagagtcagaggatatgtctgcaaaagagagattgctactctggacgcagcaggcaacagagggttatgctggaattcggtgtgaaaatttcactacctgctggagagatggaaaattatttaatgccatcattcataaatacaggccggacctgatagatatgaatactgttgctgttcaaagcaaccttgcaaatttagagcatgctttttacgtagcagaaaaaattggtgttataagacttctggaccctgaagatgtcgatgtctcctcacctgatgaaaaatcagtaataacttacgtgtcatctctctatgatgcatttcctaaagtccctgaaggtggggaaggcattggtgcaaatgatgttgaagtcaaatggattgaataccagaatatggtgaactacctcatccaatggattagacaccatgtgaccacaatgtctgagagaacatttcctaataatcctgtagaactgaaggcactttataatcagtatttacagtttaaagaaacagaaattccaccaaaggagacagaaaaatcaaaaattaaacgtctatataaattattagagatttggatagaatttggacgcatcaagctccttcaaggttatcatccaaatgacatagaaaaagagtgggggaaactcattattgccatgctagagagagagaaggcccttcgtccagaagtagaaaggttagaaatgttgcaacagattgccaacagagttcagagggacagtgtcatctgtgaagacaaactgattcttgctggaaatgctcttcagtctgattctaaaagattagaatcaggagtgcagtttcagaatgaagcagaaattgctgggtatatacttgaatgtgagaaccttttacgccagcatgtaattgatgtacagattcttattgatggaaaatactaccaggcagatcaattggtacagagggttgcaaaactgcgtgacgaaattatggccttaaggaacgaatgttcttctgtgtacagcaaaggacgcatactgacaacagaacagacaaagctcatgatatcaggaatcactcaaagtttaaactcaggatttgcacagaccttacaccctagtctgacctcagggctgacccagagtttaacaccttccctaacctcttctagtatgacttctggcctgtcatcagggatgacttcccgcctgactccatctgtcactccagcttatacacctggtttcccatcaggattagttccaaatttcagttcaggagtagagccaaattcattgcaaactttgaagttgatgcagatccgaaaaccccttctaaagtcttctttgctggatcaaaatttaacagaagaagaaatcaatatgaaatttgttcaggatcttttgaattgggttgatgagatgcaggtacaactggaccgcactgagtggggctcagatttgccaagtgttgaaagccatttagaaaatcataaaaatgttcatagagctattgaagaatttgaatctagtctcaaagaagctaaaatcagtgagattcaaatgacagcacctcttaaactgacttatgcagaaaagttgcacagattagagagtcagtatgcaaaactcttgaatacatccaggaatcaagaacggcaccttgatacactccataattttgtaagtcgtgcgactaatgaacttatttggttgaatgaaaaagaagaggaggaagttgcttatgactggagtgagagaaacaccaacatagctaggaaaaaagattatcatgctgaattaatgagagaacttgatcaaaaggaagaaaatattaaatcagttcaggagatagcagagcagctacttctagaaaatcatccagcccggttaactattgaggcctacagagcggcaatgcagacgcagtggagctggatcttacagctctgccagtgtgtggagcagcacataaaggagaacacagcgtatttcgagtttttcaatgatgccaaagaagctactgattacttaaggaatctaaaagatgccattcagcggaagtacagctgtgatagatcaagcagcattcacaagctagaagaccttgttcaggaatcaatggaagagaaagaagaacttctgcagtacaaaagcactatagcaaacctaatgggaaaagcaaaaacaataattcaactgaagccaaggaattctgactgtccactcaaaacttctattccgatcaaagctatctgtgactacagacaaattgagataaccatttacaaagacgatgaatgtgttttggcgaataactctcatcgtgctaaatggaaggtcattagtcctactgggaatgaggctatggtcccatctgtgtgcttcaccgttcctccaccaaacaaagaagcggtggaccttgccaacagaattgagcaacagtatcagaatgtcctgactctttggcatgagtctcacataaacatgaagagtgtagtatcctggcattatctcatcaatgaaattgatagaattcgagctagcaatgtggcttcaataaagacaatgctacctggtgaacatcagcaagttctaagtaatctacaatctcgttttgaagattttctggaagatagccaggaatcccaagtcttttcaggctcagatataacacaactggaaaaggaggttaatgtatgtaagcagtattatcaagaacttcttaaatctgcagaaagagaggagcaagaggaatcagtttataatctctacatctctgaagttcgaaacattagacttcggttagagaactgtgaagatcggctgattagacagattcgaactcccctggaaagagatgatttgcatgaaagtgtgttcagaatcacagaacaggagaaactaaagaaagagctggaacgacttaaagatgatttgggaacaatcacaaataagtgtgaggagtttttcagtcaagcagcagcctcttcatcagtccctaccctacgatcagagcttaatgtggtccttcagaacatgaaccaagtctattctatgtcttccacttacatagataagttgaaaactgttaacttggtgttaaaaaacactcaagctgcagaagccctcgtaaaactctatgaaactaaactgtgtgaagaagaagcagttatagctgacaagaataatattgagaatctaataagtactttaaagcaatggagatctgaagtagatgaaaagagacaggtattccatgccttagaggatgagttgcagaaagctaaagccatcagtgatgaaatgtttaaaacgtataaagaacgggaccttgattttgactggcacaaagaaaaagcagatcaattagttgaaaggtggcaaaatgttcatgtgcagattgacaacaggttacgggacttagagggcattggcaaatcactgaagtactacagagacacttaccatcctttagatgattggatccagcaggttgaaactactcagagaaagattcaggaaaatcagcctgaaaatagtaaaaccctagccacacagttgaatcaacagaagatgctggtgtccgaaatagaaatgaaacagagcaaaatggacgagtgtcaaaaatatgcagaacagtactcagctacagtgaaggactatgaattacaaacaatgacctaccgggccatggtagattcacaacaaaaatctccagtgaaacgccgaagaatgcagagttcagcagatctcattattcaagagttcatggacctaaggactcgatatactgccctggtcactctcatgacacaatatattaaatttgctggtgattcattgaagaggctggaagaggaggagaagtcactggaagaagaaaagaaagaacatgttgaaaaagccaaagaattgcaaaaatgggtatcaaatatcagcaagacattgaaagatgcagagaaggctggaaaacctcccttctctaagcaaaagatttccagtgaggaaatatcaaccaagaaggaacaattatcggaagcacttcaaactatacagctttttttggcaaaacatggagacaaaatgacagatgaagaaagaaatgaattggaaaaacaagtgaaaactcttcaggaaagttataatttattattcagtgaatctctgaaacagctacaagaatcacaaacctcaggagatgtaaaggtagaggagaagctggataaagtgattgcaggcaccattgatcagacaactggagaagtcctttcagtctttcaagcagttttaagaggcctcattgactatgacacaggaattaggttgcttgagacacagctaatgatttctggtctaatttcaccagaattaagaaagtgctttgaccttaaagatgccaaaagtcatggccttattgatgaacaaattctgtgccaactcaaagaactaagtaaagctaaggagattatttctgctgcgtcacctaccacaattccagtactggatgctctagctcaaagcatgataacagaatccatggccatcaaagttcttgagatactgctttctacaggctctctggttattccagccacaggagaacagttgaccctacagaaggctttccaacagaacttggtttcctcagcattattttctaaagttctggaaaggcaaaatatgtgcaaagatcttattgacccctgcacctctgagaaggtttctttaatagatatggtacaaagaagtactttacaggaaaacacagggatgtggcttctacctgtgagaccacaagaaggaggtagaataacattaaaatgtggaagaaacataagcattttaagagcagctcatgaaggtctcatagaccgtgaaaccatgtttaggttgttaagtgcacagcttctttctggaggtctgatcaattccaactctggccaaagaatgactgttgaagaagctgtcagagaaggggtgattgacagggacactgctagcagtatcctcacatatcaggttcaaactggtggaatcatccagtcaaaccctgccaagcgtttaactgtagacgaagcagtacagtgtgatttaataacttccagcagtgctcttctggtcctggaagctcagcgaggctatgttggactcatttggccccattctggtgaaatatttcccacatcatcttccttgcagcaagaattgattacaaatgaattggcctacaaaatcctgaatggcagacaaaaaatagctgctctttatattccagaaagttctcaagtcattggtttggatgctgctaaacagctaggaattatagacaacaacacagcatcaattttaaaaaatataacactgcctgataaaatgccagatttaggagatttagaagcttgtaaaaatgccagaagatggctctctttttgtaaatttcaaccctccacagttcatgattacagacaagaagaggatgtttttgatggagaagaacctgtcactactcagacctcagaagaaactaaaaaattatttctatcttatttaatgataaatagctatatggatgcaaacacagggcaaaggcttttgctgtacgatggagacttggatgaggctgttggcatgctactggaaggctgtcatgcagaatttgatggaaacacagccataaaagaatgtctcgatgtcttaagctcatctggtgtatttcttaataatgcttcaggtagagaaaaggatgaatgtacagctacaccaagtagtttcaataaatgtcactgtggagaacctgaacatgaagagactcctgaaaatagaaagtgtgctatagatgaagaatttaatgaaatgagaaatactgttatcaatagtgaattttctcagtcaggaaaactggcaagtacaatatcaattgatcctaaagttaacagttcacccagtgtgtgtgttcccagtctcatatcatatttaacacagactgaacttgcagacattagcatgcttagaagtgactctgaaaacatacttacaaactatgaaaatcaaagccgagtggaaacaaatgaacgtgcaaatgaatgtagtcattctaaaaacattcaaaactttccaagtgatttaatagaaaatcctattatgaaatcaaaaatgagtaaattctgtggtgtgaatgaaacagagaatgaagataatacaaacagggattcacctatctttgactattcccccaggctaagtgccttgttaagtcatgataaattgatgcacagtcagggaagttttaatgatacacacaccccagagagcaatggaaataagtgtgaagccccagccttatcattcagtgacaaaaccatgttgtcaggtcaaagaataggagaaaaatttcaagaccagtttctgggaattgcagctattaacatcagtttaccaggagagcagtatggacagaaatctttaaatatgatttctagtaatcctcaagtacaatatcacaatgataaatacatttcaaatacttctggtgaggatgaaaaaacacatccaggttttcagcagatgcctgaagacaaggaagatgagtctgaaatagaagagtattcctgtgctgtgactccagggggtgatactgataatgccattgtgtctcttacttgtgctacaccattgcttgatgaaaccatcagtgctagtgactatgaaacgtcactgctgaatgatcagcagaataacacaggaacagacactgatagtgatgatgatttttatgatactcccttgtttgaagatgatgaccatgattctttgcttcttgatggtgatgatcgtgattgcctgcaccctgaggactacgacacactgcaagaggaaaatgatgagacggcttctcctgctgatgttttttatgatgtctcaaaagagaatgaaaattccatggttccccagggggcaccagttggtagcttaagtgtgaagaacaaagcacattgtcttcaggatttccttatggatgttgagaaagatgaattagattctggtgaaaaaatacatttaaatcctgttggctcagataaggtgaatggacagtcactggaaactggatcagaaagggaatgcacaaatatccttgaaggtgatgaatctgactcattgactgattatgatattgtaggaggaaaagagagcttcactgcatcattaaaatttgatgacagtggcagttggagaggaagaaaggaagagtatgtaactggacaggaatttcactccgatactgatcatttagattctatgcaaagtgaagaaagttatggggattatatatatgacagtaatgatcaggatgacgatgatgatgatggcattgatgaagaaggaggaggtataagagatgagaatggaaagcccaggtgccaaaatgtggctgaagatatggatatccagttgtgtgcctctattttaaatgaaaacagtgatgaaaatgaaaatattaatacaatgattcttctggataaaatgcacagttgtagctctttagaaaaacagcaaagggtaaatgttgtacagctagcatcacctagtgaaaataacttagttactgaaaaaagcaaccttccagaatatacaactgagattgctggaaaaagcaaagaaaatctgttgaaccatgagatggtacttaaggatgtattgccgcctatcattaaagacactgaatctgaaaaaacttttggccctgcaagtatttcacatgataataataatatcagttcaacttctgaattaggtactgatctagcaaacacaaaggttaagttgattcaagggtcagaattgccagaattgactgattctgtgaaaggtaaagatgaatattttaagaatatgacaccaaaagttgactcatctcttgatcacatcatttgtactgagcctgatttaataggaaaacctgctgaggaaagccatttgtcattgatagcctctgtaactgacaaagatcctcaaggaaatggaagcgatctcattaaagggagagatggcaaaagtgatattctaatagaagatgaaacatcaattcagaaaatgtacttgggtgaaggagaagtgcttgtagaaggtctagtagaagaagaaaataggcatctcaaacttttgcctggtaaaaatacaagggatagtttcaagttaattaatagtcagtttccatttccacaaatcacaaacaatgaagaacttaatcagaaaggaagccttaaaaaagcaactgtaactcttaaagatgaaccaaataatctacaaataatagttagtaaaagtcctgttcagtttgagaatcttgaagaaatttttgacacatcagtttccaaagagattagtgatgacattacttcagacattacatcgtgggaagggaatacacattttgaggagtcattcactgatggacctgagaaagagcttgatctgtttacttacttaaaacattgtgctaaaaatataaaagcaaaagatgtagccaaaccaaatgaagatgtcccaagccatgttttaataactgcccctcccatgaaagaacatttacaattaggagttaataatacaaaagagaagtccactagtacccaaaaagactcacctcttaatgacatgatccaaagcaatgatctttgtagtaaagaaagcatctcaggaggaggaacagaaatttctcagttcacaccagaaagtattgaagccacactttcaatattatctcgtaaacatgtagaagatgttgggaaaaatgattttctgcagtcggagcggtgtgcaaatggattaggaaatgataactccagtaacactttaaatactgactattcattcttagaaattaataataagaaagaaagaattgagcaacagctaccaaaagaacaagccttgtctccaagatcccaagaaaaggaggttcagattcctgaattgtctcaggtatttgtggaggatgtaaaggatatcttaaaaagcaggttgaaagaaggtcatatgaaccctcaagaggttgaagaaccttcagcctgtgcagacactaaaattttaattcaaaatttaattaaaaggattaccacatcacagttggtaaatgaggcatctactgtgcccagcgactctcaaatgagtgactcttctggagtttcccccatgactaactcatcagaactaaagccagaaagtagagatgatcctttctgtattggaaatcttaagtctgagcttctccttaatatattgaagcaagatcaacatagccaaaaaattacaggagtatttgaattgatgagagaattaactcatatggagtatgacctagagaaaagaggcattacgtctaaagtacttccactgcagcttgaaaatattttctacaaactgcttgctgatggatattcagagaaaatagaacatgttggagactttaatcaaaaagcatgttctacatctgagatgatggaagaaaagccacatattcttggtgatattaaaagcaaagaaggaaactactattctcctaatttagaaactgtaaaagaaattggactagaaagctctactgtgtgggcatcaacattgccaagagatgagaagctcaaggatctgtgtaatgatttcccaagccatttggaatgtacttcagggtctaaagagatggcttctggagatagctcaaccgaacaattttccagtgaattacagcagtgtttacagcacactgaaaaaatgcatgagtatttgacattgcttcaagatatgaaaccccccttagacaaccaggaatctctggataacaacttggaagctttgaagaatcaacttagacagttggagacatttgaattgggattagctccaattgctgttattttaagaaaagatatgaagttggcagaagagtttttaaagtctcttcccagtgactttcccagaggccatgttgaagaattgagtattagccaccagagtttgaagaccgccttctcttccctcagcaacgtgtcttcagaaagaacgaaacagatcatgcttgcgatcgactctgaaatgtctaaactagcagtttcccatgaagaatttctgcataaacttaagtcattctcagattgggtatcagagaagagcaaatctgtgaaggatattgagattgtgaatgttcaagattctgagtatgtaaagaaacgtttggagtttctcaagaatgtattaaaagaccttggacataccaaaatgcagctggagactactgcctttgatgtgcagttcttcatttctgaatatgcacaggatctgtctcccaaccaaagcaaacaactgctgaggctcttaaatacaactcagaagtgttttcttgatgtacaggagtcagtaactacccaggtggaacgtttagagactcagttacatctagaacaagatcttgatgatcagaagattgtagcagagcgtcagcaggagtataaagagaaactccaagggatatgtgatcttcttacccaaactgaaaaccgcctaattggtcaccaagaagccttcatgattggagatggcacagttgagttaaagaaatatcagtccaagcaagaggaattacagaaagatatgcaaggaagtgcacaggcattggctgaagtagtgaaaaacacagagaacttcttaaaagagaatggtgaaaagctgtcacaggaagataaggctttgattgaacagaaacttaatgaagctaagataaagtgtgaacagcttaatttaaaagcagaacagtctaaaaaggagctggataaagttgtgacaacagcaatcaaggaagaaactgaaaaggtagcagcagtgaagcagctggaagagagcaaaaccaaaatagaaaaccttttggactggttgtcaaatgttgacaaagactcagaaagggcagggacaaaacacaaacaggtaatcgaacagaacgggacccattttcaagaaggtgatggcaagtcagcaattggagaagaggatgaagttaatggtaacctgttggagactgatgttgatgggcaagttggaaccactcaggagaatctgaatcagcaatatcagaaagttaaggcccaacacgagaagatcatctctcagcaccaagcagtgatcatagccactcagtctgcacaagtgttgcttgagaaacagggtcagtatctctctcctgaagaaaaagagaaactgcaaaagaacatgaaggaactgaaagtgcattatgaaactgcactggctgagtcagagaagaaaatgaagttaactcactctctgcaggaagaattagaaaagtttgatgctgactataccgagtttgagcactggctacagcagtcagaacaagaacttgaaaacctggaggcaggtgcagatgacatcaatggtttaatgaccaaattgaagaggcagaagagtttctcagaagacgttatttctcacaaaggtgacttgagatacatcacaatttctggaaacagagtgttggaagctgccaaatcttgcagcaagagagacggtggcaaggttgatacttctgcaacccacagagaagtgcagcgcaagttggatcatgctactgatcggttcaggtctctctactctaagtgcaatgttcttggaaataatcttaaagatctggtggataaatatcaacactatgaagatgcttcatgtggacttcttgctggactccaggcctgtgaggccacagcgagcaaacacttatctgaacctattgcggtggaccccaaaaatcttcaaaggcaattagaagagaccaaggctttgcaaggacagatatcaagtcagcaggttgctgtagagaaactgaagaaaacggctgaagtgcttttagatgccaggggatctttacttccagccaagaatgatatccagaaaacacttgatgacattgttgggagatatgaggatctgtccaagtctgttaatgaacgaaatgaaaaactccagataaccttgacccgttcactgagtgtgcaggatggcttggatgaaatgctggactggatgggaaatgtggaaagttctctgaaagaacaaggtcaagtgcctttaaactctactgctcttcaggatattatcagtaaaaacattatgttggaacaggatattgcaggtcgtcagagcagtataaatgccatgaatgaaaaagtgaagaaatttatggaaacaacagatccatccactgcatcctcactgcaagccaaaatgaaagacttgtctgctcggttttcagaagcaagtcataaacacaaagaaactcttgccaaaatggaggagctaaaaaccaaagtagaactgtttgagaacctctcagaaaagctccagacatttttagaaacaaaaactcaggctcttactgaagtagatgtgccaggaaaagatgttactgaattgtctcagtatatgcaggaatcaacttctgaatttttagaacacaagaaacatcttgaagttttgcatagtctcttgaaggagatatccagccatggcttaccaagtgataaggctttggtccttgaaaaaacaaataatttgtcaaagaaattcaaggaaatggaggataccatcaaagaaaaaaaagaagctgtaacttcttgtcaagaacagttggatgctttccaagttcttgttaaatcattgaagtcatggataaaagaaacaacaaaaaaagttcccattgtacagccttcttttggtgcagaggatttaggaaaatctttggaagacactaagaaattacaagaaaagtggagtttaaaaacaccagagattcagaaagtaaacaacagtgggatctcactatgtaacttaataagtgctgtgaccacccctgcaaaggcaatagcagcagttaaatcaggtggagcagtattaaatggtgaaggaacagccacaaatactgaggaattttgggcaaataaaggtttaacatccattaaaaaggacatgactgacataagtcatggttatgaagatcttggcctcttactcaaggacaaaatagcggaactgaacactaaactctccaaattgcaaaaggctcaggaagaatcaagtgcaatgatgcagtggttacagaaaatgaacaaaactgcaacaaaatggcagcagacacctgcacctacagatactgaagctgtgaagactcaagttgagcagaataagtcgtttgaggcagaactgaagcagaatgtaaacaaagtacaggagttgaaagacaaattgacagagctgttggaggagaacccagatactcctgaggcccccagatggaaacagatgttgacagaaatagattctaagtggcaagaactcaatcaattaacaattgatagacaacaaaaactggaagaatcctccaataatctaacccagttccagactgtagaggcccaattgaaacagtggcttgtggaaaaagaacttatggtcagtgttcttgggcccttgtcaattgacccaaatatgctaaacacacaaaggcagcaggtgcagattttgctgcaagaattcgccactcggaaacctcaatatgaacagctgacagcagctggtcagggcattctgagcaggcctggagaagacccttctttacgtgggattgtgaaagagcaactggcagctgtgacccaaaaatgggatagcctaacagggcaattgagtgacagatgtgactggattgaccaagccattgttaaaagcacacagtatcaaagcctgctgagaagcctttctgataaactgagtgacttggataataaactcagcagcagtctggctgtgagcacgcaccctgatgctatgaaccaacagttggaaacagcccaaaaaatgaagcaggagatacagcaggaaaagaagcagataaaagtggcccaggcactctgtgaggatttgtcagcactggttaaagaagagtacttgaaagcagaacttagtaggcaactagaaggcatcttaaaatcatttaaggatgttgaacagaaagcagagaatcatgtccagcaccttcagtcggcctgtgcaagctctcatcaatttcagcaaatgtctagagattttcaggcttggctggatacaaagaaagaagagcaaaacaaatctcatccaatatctgccaaactcgatgtcttggagtcattaattaaagatcataaagactttagtaaaactttgaccgctcagtctcatatgtatgaaaaaaccattgcagaaggtgaaaatctgttattaaaaacacaagggtctgagaaggcagccttacagttacagcttaatacaattaaaaccaattgggatacatttaataagcaggtgaaagaaagagaaaacaagttaaaagagtcattggaaaaagcccttaagtataaagagcaagtagagactctctggccatggatagacaaatgccaaaacaacctggaggaaataaaattttgcttggatcctgctgaaggagagaattctattgccaagttaaagtctctgcagaaggaaatggaccaacactttggtatggtagaattactgaacaacacagccaatagcttgctcagtgtctgtgagatagataaagaagttgttacagatgagaataagtcactgatccagaaggtggacatggtcactgaacaacttcacagtaagaaattctgtctggagaacatgactcagaagtttaaagaatttcaagaagtttccaaagaatctaaaaggcagcttcagtgtgcaaaggagcagctagatatccatgattcgctgggatcccaggcttacagtaacaaatacctgaccatgttgcaaactcagcagaaatcacttcaggccttgaagcatcaggtagatttggctaaaagacttgcacaggaccttgtggtagaggcctcagactcaaagggaacctctgatgttttattacaagtggaaaccatagctcaagagcatagtacactaagtcagcaggttgatgaaaagtgttctttcttagaaaccaagcttcagggcattgggcatttccagaataccattcgagaaatgttttctcagttcgcagagtttgatgatgaactggatagcatggctccagtggggagagatgcagaaacattgcaaaagcaaaaggaaactataaaagcctttctaaagaaactagaagccctcatggcaagcaatgacaatgccaataaaacctgcaagatgatgttagccacagaagaaacctctcctgaccttgttggaatcaaaagggacttggaggccttaagcaaacaatgcaacaagttactggaccgagcccaagccagagaagagcaggttgaagggacaattaagcgccttgaagaattttacagcaaattgaaagaattttctattctgctccagaaagccgaagaacatgaagagtcacaaggtcctgttggtatggaaacggagacaattaatcagcagcttaacatgttcaaggtattccagaaagaagagattgaacccttgcaaggtaaacagcaagatgtaaactggttaggtcaaggccttattcagagtgctgccaaaagcactagcactcagggcttggagcatgacctggatgatgtcaatgcacggtggaagactctcaataagaaggtggctcagcgagcagcccagctgcaggaggccttgctgcactgtgggaggttccaggatgccctggagtccctgctcagctggatggtggacactgaggagcttgtggccaatcagaagcccccgtcggctgagttcaaagtggtaaaggcccagatacaagaacaaaagcttctccagagattgttggatgaccgaaaatctacggtggaggtaatcaaacgagaaggagaaaaaattgctacaacagcagagcccgcagataaagtgaagattttgaaacagctcagtctcttggatagcagatgggaggcattgcttaataaagctgaaacaaggaatcgtcagttggaaggtatctcggtggtagcacagcaatttcatgaaaccttagaaccactgaacgagtggcttacaaccatagaaaagaggctggtgaattgtgaacccataggaacccaagcatctaaacttgaggaacaaattgcacagcacaaagttctgcaagaggacatcttactcaggaaacaaaatgtagatcaggctttactaaatggtttagaactacttaaacaaaccacaggtgatgaagttttaataattcaagataaattggaagccattaaagcaaggtacaaagacattactaaactgagcactgatgtggccaagactctggaacaggcgctgcagcttgcaaggcggctgcactccacacacgaagagctgtgtacctggctggacaaagtggaggtggaattactttcatatgaaactcaggttctgaaaggagaagaagcaagtcaagcacaaatgagaccaaaggaactgaaaaaggaagctaagaacaacaaagccttactggactcccttaatgaagtgagcagtgctttgctggaactggtaccatggagggcaagagaaggacttgagaaaatggtagctgaggacaatgagcgctaccgattagtgagcgacaccatcactcagaaggtggaggagatcgatgcagccattctgcgatcacagcagtttgaccaagcagctgatgctgagttatcctggattactgaaacagaaaaaaaattgatgtctctgggtgacatcaggcttgagcaagaccagacttctgctcagcttcaagttcaaaagacattcaccatggagattttgagacacaaggatattattgatgaccttgttaaatctgggcataaaatcatgaccgcatgcagtgaagaggaaaagcaatcaatgaagaaaaaactggacaaggtactgaagaactatgataccatctgccagattaattcagaaaggtatctgcagctggaacgggcacagtccctggttaaccaattctgggaaacatatgaagaactttggccatggctgacagaaacacaatcaatcatctctcagcttcccgccccagcccttgaatatgaaactctaaggcagcagcaggaagaacatcggcaactgcgtgagttgatagctgaacacaagcctcatatagataagatgaacaaaactgggccacagttactggaattgagccctggggaaggcttttctatccaagagaagtatgtggcagccgacaccctttacagtcaaattaaagaagatgtcaaaaagcgtgctgtggcactggatgaagccatttctcaatcaactcagttccatgacaagatagatcagatccttgagagcctggaacgcatcgtggaacgtctgaggcagccaccctctatctctgcagaggttgagaagatcaaggaacagatcagtgaaaataagaatgtgtcagtagacatggaaaagctacagccgttgtatgaaactcttaaacagaggggagaggaaatgattgctagatctggggggactgataaagacatatctgccaaagctgttcaggataagcttgaccaaatggttttcatttgggagaacatacacacactggtggaagagagggaagccaaactactggatgtgatggagctagcagaaaagttctggtgtgatcacatgtcattgatagttaccattaaagatactcaagatttcatccgggacctggaagatcctggaattgatccttcagtagtaaaacaacagcaagaagcagcagagaccataagggaagaaatagatggactacaggaggagctggatatagttattaacctaggttctgaactcattgcggcatgtggggagcctgataaacccattgtcaagaagagtatagatgagttaaattcagcatgggattctctaaataaagcttggaaagaccggattgacaaacttgaggaggcaatgcaggctgccgttcagtaccaggatggactgcaggcggtatttgactgggtagatattgcaggtggtaaattagcttcaatgtctccaattggaacagatctcgaaactgtcaagcagcagattgaagagctaaagcaatttaagtctgaggcctatcaacagcagatagaaatggaaagactgaatcatcaagcagagcttttgctaaagaaagtaacagaagagagtgacaaacacactgttcaagacccattaatggaactgaaattgatatgggatagcctggaggagagaatcatcaacagacagcataaactggagggtgctctattagccttgggtcagttccaacatgccctggatgagctcctggcatggctgacacacaccgagggcttgctaagtgagcagaaacctgttggaggagaccctaaagccattgaaattgaacttgccaagcatcatgtgctccaaaatgatgtattagcccatcagtccacagtggaagccgttaataaagcaggaaatgatctaattgaatcaagtgcaggagaagaagcaagcaaccttcagaacaagctagaggttttaaatcaacgctggcaaaatgttttggaaaaaacagaacaaaggaagcagcagctggatggtgccttgcgccaggccaaagggttccatggcgaaattgaggatttgcagcagtggctgactgacacggagcgtcatctgttggcatctaaaccgctgggaggtttaccggaaacagccaaggagcagcttaatgtccatatggaagtctgtgctgcctttgaagctaaagaagaaacatataagagtctgatgcagaaaggccagcagatgcttgcaagatgcccaaaatctgcagagacaaatattgaccaagacataaataacttgaaagaaaaatgggaatcggtggaaaccaaactcaatgaaaggaaaactaaactggaagaggctctcaacttggcaatggagttccacaattctctccaagacttcatcaactggcttactcaggctgaacagaccctaaatgtagcttctcggccaagtctcatcttggacacagtcttatttcaaattgacgaacacaaggtttttgccaatgaagtaaattctcatcgtgagcagataatagagctggacaaaactggaacccacctaaaatattttagtcagaaacaagatgttgttctaatcaagaatctacttatcagtgtacaaagtcgatgggaaaaagtggttcaacggttggtagagagaggaagatctttggatgatgcaaggaagagagccaagcagttccatgaagcttggagtaaacttatggagtggctagaagagtcagaaaagtctttggattctgaactggaaatcgcaaatgatccagacaaaataaaaacacaacttgcacaacataaggagtttcagaaatcactcggagccaagcattctgtctacgacaccaccaacaggactggacgttctctgaaggagaaaacctccctggctgatgacaacctgaaactggatgacatgctgagtgaactcagagacaaatgggataccatatgtggaaaatctgtggaaagacaaaacaaattggaggaagccctgttattttctggacaattcacagatgccctacaggctctcattgattggttatatagagttgaaccccagctggcagaagaccagcctgttcatggagacattgatttggtgatgaatctgatcgataatcacaaggccttccaaaaagagttggggaagaggaccagcagtgtgcaggccctgaagcgctcagcccgagaactcatagaaggcagtcgggatgactcctcctgggtcaaggtccagatgcaggaattaagcacacgctgggagaccgtgtgtgcactttctatatcaaagcaaacacggttagaagcagccctgcgtcaggcagaggaattccactcggtggtacatgccctcttggagtggctggctgaggcggagcaaaccctgcgtttccatggtgtcctcccagatgatgaggatgctctccggactctcattgatcagcataaagaattcatgaagaaactggaagaaaagagagctgaactaaataaagccaccactatgggcgacaccgttttggctatctgccaccccgactccatcactaccattaagcactggataacaatcatccgggcgaggtttgaggaggtgctggcctgggcaaagcaacatcagcagagattagcaagtgctctggctgggcttattgccaaacaggaattgttggaagctttgctggcttggttgcaatgggctgaaactacacttactgataaggataaagaagtcatcccccaggagatcgaagaggtgaaagcactcattgcagaacaccagaccttcatggaggaaatgaccagaaaacagcctgatgttgataaagtaacgaagacctataagaggagagctgctgatccttcctcattacaatcccatattccagtcttggataagggacgagcaggaagaaaacgctttccagcatcaagcttgtatccctctgggtcacagacacaaattgaaaccaaaaatcctagggtaaacttactggtgagcaaatggcagcaagtctggctcctggcgttggaaagaaggaggaaactcaatgatgccttggacagactagaggagctgagggaatttgctaactttgattttgatatctggcgcaaaaaatacatgcgatggatgaatcacaagaaatctcgagtgatggacttcttcaggagaattgataaagaccaggatgggaaaataacgcggcaggaatttattgatggaattctttcctcaaagtttccaaccagtcgcttggagatgagcgcagttgcagacatctttgacagagatggcgatggatatattgactactatgaatttgtagcagcccttcacccaaataaagatgcatataaacctatcacagatgccgacaaaatcgaagatgaggtgacaaggcaggtagctaagtgtaaatgtgcaaagcgatttcaagttgagcagattggtgataataaatacaggttcttcctgggaaatcagtttggagactcccagcaactgcgactggtccggatcctgcggagtactgtgatggttcgtgttggaggtggatggatggcacttgatgagttcttagtgaaaaatgatccttgcagggttcatcatcatgggagtaaaatgttacgttcggaatcaaactcttcaattactactactcagcctactatagccaaaggaaggacaaacatggaactgcgtgagaagttcattttagcagatggtgccagccagggtatggctgctttccgaccccgaggccgaagatcccggccatcatcacgaggcgcttcacccaacagatccacttctgtgtccagtcaggctgcgcaggcggcctccccacaggtccctgccaccaccacacccaagggaacgccaatacaaggaagcaagcttcgacttccaggatatttatcagggaaaggcttccactctggggaggacagtggcttgataacaactgcagctgccagagtccgaacacagtttgctgattccaagaagactcccagccgaccaggaagtcgagctggaagcaaagctggcagcagggccagcagccgccgaggcagtgatgcatcagactttgacatttcagaaatccagtccgtgtgctcagatgtggaaactgtcccccagacacacagacctacaccccgagcaggttctcggccatccacagcgaagccttcaaaaatccccacgccccagaggaaatcacctgccagcaaattggacaagtcctcaaagagatagtgcaattggttctaccaaggcccttccttgagcattt

SEQ ID NO: 304946 - protein, 156 aa, Artificial Sequence
  derived and/or modified sequence
MKSLSLLLAVALGLATAVSAGPAVIECWFVEDASGKGLAKRPGALLLRQGPGEPPPRPDLDPELYLSVHDPAGALQAAFRRYPRGAPAPHCEMSRFVPLPASAKWASGLTPAQNCPRALDGAWLMVSISSMGHAMPVEFTIPACLPRGAALRSPWR

SEQ ID NO: 304947 - DNA, 189 bp, Artificial Sequence
  derived and/or modified sequence
atgctgcaggtagtccaggaaggcaaccccgcaccctttatcatcaatactgttaagcggggacgtagggatcgtgagcggcaacgtacaccatgggcccctcatcctcttggcttccagggacgccgttacatctatgaatcaccaaaccaccggggaaaggactccagttttctggcccagaagtag

SEQ ID NO: 304948 - DNA, 471 bp, Artificial Sequence
  derived and/or modified sequence
atgaagagcctgagcctgctgctggccgtggccctgggcctggccaccgccgtgagcgccggccccgccgtgatcgagtgctggttcgtggaggacgccagcggcaagggcctggccaagagacccggcgccctgctgctgagacagggccccggcgagcccccccccagacccgacctggaccccgagctgtacctgagcgtgcacgaccccgccggcgccctgcaggccgccttcagaagataccccagaggcgcccccgccccccactgcgagatgagcagattcgtgcccctgcccgccagcgccaagtgggccagcggcctgacccccgcccagaactgccccagagccctggacggcgcctggctgatggtgagcatcagcagcatgggccacgccatgcccgtggagttcaccatccccgcctgcctgcccagaggcgccgccctgagaagcccctggagatag

SEQ ID NO: 304949 - DNA, 471 bp, Artificial Sequence
  derived and/or modified sequence
atgaaaagcctgtcactgcttctcgcagtggcactcggcctagccaccgcagttagtgcagggcctgccgttattgagtgctggtttgttgaggatgcatccggaaaaggcttggctaaaagacctggagccctcctgttacgacaaggccccggagaacccccaccaagacccgacctggatcctgagctttacctgagcgtgcatgaccccgcgggcgcgctccaggcagcctttcggaggtaccctaggggcgcaccagccccccactgtgaaatgagccggttcgtgccgctgcccgcttccgccaaatgggcaagcgggcttactccggctcagaactgtcctagggccctggacggagcgtggctgatggttagcatttcttctatggggcacgccatgcccgttgagtttaccattcccgcgtgcttaccacgcggggccgccctccgttctccttggagatag

SEQ ID NO: 304950 - DNA, 471 bp, Artificial Sequence
  derived and/or modified sequence
atgaagagtcttagtctgctcctggcagtagctctcggacttgccaccgcagttagtgccggtcccgcagtaattgagtgctggtttgtggaggatgcaagcggtaaaggactggctaaacgacccggagcactcctccttcgccagggtcccggagaaccccccccacggccagacttagaccccgagctatacctttcagtgcacgatcccgccggcgccctccaggccgcatttaggaggtacccccgtggggctccggcgcctcattgtgagatgagtaggttcgtgccactgcccgcgagcgcaaaatgggcgtcaggcctcacaccagcccaaaactgtcctagagccctggatggcgcgtggcttatggtcagcatcagctctatgggtcacgcgatgcctgtcgagttcacaatcccagcctgcctcccccggggagccgccttgcggagtccatggcgttag

SEQ ID NO: 304951 - DNA, 471 bp, Artificial Sequence
  derived and/or modified sequence
atgaagtccctgagcctgctactcgccgttgccctgggcttggccacggcagtatccgcgggtcctgctgtgattgaatgctggtttgtggaggacgcaagcggaaaagggctggctaaacggcccggagccttactgctgagacaggggcctggggagcccccaccgcggcccgatctagaccctgagctctacctcagtgtgcacgatcctgcgggcgctctgcaggcagcattcaggcgttaccctagaggtgctccggcgcctcactgtgagatgagccggttcgtgccactgcccgcttcggcaaaatgggcatcgggattaaccccagcacagaactgcccccgtgctctggatggggcatggttaatggtatccataagctccatggggcacgcaatgcctgtcgagttcacaatccctgcctgtctccctcggggagctgccctgaggtctccttggagatag

SEQ ID NO: 304952 - DNA, 471 bp, Artificial Sequence
  derived and/or modified sequence
atgaagagcctgagcctgctgctggccgtggccctgggcctggccacagctgtgtctgctggccctgctgtgattgagtgctggtttgtggaggatgccagcggcaagggcctggccaagaggcctggggccctgctgctgcggcagggccctggagagcccccacccaggccagacctggaccctgagctgtacctgtctgtgcatgaccctgctggggccctgcaggccgccttccgccgctaccccaggggggccccagccccccactgtgagatgagcagatttgtgcccctgcctgccagcgccaagtgggccagcggcctgaccccagcccagaactgcccccgggccctggatggagcctggctgatggtgtccatcagctccatgggccacgccatgcctgtggagttcaccatcccagcctgcctgcccagaggagctgccctgcggagcccctggaggtag

SEQ ID NO: 304953 - DNA, 471 bp, Artificial Sequence
  derived and/or modified sequence
atgaagagcctgagcctgctgctggccgtggccctgggcctggccaccgctgtgtctgccggacccgctgtgatagaatgctggttcgtggaagacgcaagtggcaaggggctggcaaagcgacccggagccctgctcctgcgccaggggcccggtgagccaccgcccagacccgatttggatcctgaactgtatctgagcgttcatgatccagctggagctctccaggcagccttcaggcgatatcccaggggtgctccagcccctcattgtgagatgagccggttcgttcccctgcctgcctccgccaagtgggccagcggactgacgccagctcagaactgtccaagagcgctggacggggcctggctaatggtctctatctcaagcatgggacatgccatgccagtggagtttaccattcccgcctgcctgcccaggggggcagcgctccgtagtccctggaggtag

SEQ ID NO: 304954 - DNA, 471 bp, Artificial Sequence
  derived and/or modified sequence
atgaagagcctgagcctgctgctggccgtggccctgggcctggccaccgctgtgtcagccggtccagcagttattgagtgttggtttgtcgaagacgcgtctgggaaaggtctggccaagcggccaggcgccttgctgctaaggcagggacccggtgagcctcctcctaggcccgatctggatcctgagctttacctcagtgtgcacgaccccgccggtgccctgcaggccgcttttaggagataccccagaggcgcgccggctccacactgtgaaatgtctcgttttgtgccgctccccgcttccgccaagtgggcgagtggccttaccccggcccagaactgcccgcgggccctggacggcgcatggctgatggtaagtatttcgagcatgggccatgccatgccagtcgaattcacaatacccgcctgcttgccacgcggggccgctcttcgatccccctggagatag

SEQ ID NO: 304955 - DNA, 471 bp, Artificial Sequence
  derived and/or modified sequence
atgaagagcctgagcctgctgctggccgtggccctgggcctggccactgccgtctccgccggacccgcggttatcgaatgttggttcgttgaggacgcctccggaaaaggtttggcaaaaaggcctggagctctgctcctaagacagggtccaggtgagccgcccccccggccagatcttgaccctgaactctacttaagcgtgcatgatcccgccggcgccctgcaggctgcattcagacggtatccccggggggcaccagcccctcactgcgaaatgtctcgtttcgttcccttacccgccagtgctaaatgggcttcagggctgacccccgctcagaactgccccagagctttagatggggcctggctcatggtgtccataagctctatggggcatgctatgcccgtcgagttcacaatcccagcctgtctccctagaggagctgccttgcggagcccctggcgctag

SEQ ID NO: 304956 - DNA, 471 bp, Artificial Sequence
  derived and/or modified sequence
atgaaatctctaagcctgctcctagctgtagcgctaggattggccaccgctgtgtctgctggtcccgcagttatagagtgttggtttgtggaggacgcaagcggcaaagggttggccaagcgccctggcgcactcttactacggcagggtccaggtgaacctccaccgcgacccgatctcgatcccgagctgtacttgtccgtccatgatccagccggtgctctgcaggcagcattcagaaggtatccacggggtgctccagcccctcactgtgagatgagtcgcttcgtgcccctgccggcttccgccaaatgggcatccggactcacgcctgcccaaaattgccctcgtgcattggacggcgcttggctgatggtctctatctccagcatggggcacgcaatgccagtggaattcaccatacccgcttgtctaccacggggtgcggcactccggagcccctggcggtag

SEQ ID NO: 304957 - DNA, 471 bp, Artificial Sequence
  derived and/or modified sequence
atgaagtccctgagtctcctccttgccgtggccctgggactggccactgctgtgagcgctgggcctgccgtgatcgaatgttggttcgttgaagatgcctcagggaaaggcttggccaaaagacctggcgcattattattgaggcagggtccaggtgaacctcctcctagaccagacttggacccggagctgtatctcagtgtccacgatccggctggggctctacaggccgcatttcgacggtacccgaggggagcgccagctcctcattgtgagatgtcacgcttcgttccccttccggcttcagccaagtgggcatccggtctcaccccagctcaaaactgcccgagggcgcttgacggcgcatggctaatggtgtcaattagcagcatggggcacgcaatgcctgtggaattcaccatccctgcctgtctgcctcggggagcagccctgcgtagcccatggcgttag

SEQ ID NO: 304958 - DNA, 471 bp, Artificial Sequence
  derived and/or modified sequence
atgaagtcattaagcctcctcctggccgtggcgctcggcctcgccacagccgtgagcgcaggacccgctgtgatcgagtgttggtttgtggaggatgcgtccggaaaggggctggcaaagagaccaggtgctctgctcttgcgacagggtccaggcgagcctcctcccaggcccgacctggatcctgagctgtacctctcggtccatgatcccgcaggcgctctccaagccgctttcagaaggtacccccgtggcgcaccggcaccgcactgtgaaatgtctagattcgtccctctgccggctagcgctaagtgggcgtccggtcttacacctgcgcagaattgcccacgtgccctggacggggcatggctaatggtcagcatctctagcatgggacatgctatgcctgtagaatttacgatccctgcctgtctgccacgcggagcagctcttcgcagcccatggaggtag

SEQ ID NO: 304959 - DNA, 817 bp, Artificial Sequence
  derived and/or modified sequence
ggggacgcggcacagatagggggaagccggagtaatggttttcgggcaagtggatgttggagagcacacacaggagttggggggcgggggagggcctggggttggggagggctcgaactcggggctgctgggtagtccaggagggcgcggtaaggctggggtgtcctggtgagaactggagaggatctacccgggtccctgcctggccagtggggaaacaccggtcccccaggcaccttcacctaaccagagcggggatttccaccgcccctcatgccgccctttggaggaaagtgaaagtgaaaggaggaagaggaggcttcatggctgaggaggtcgcagcgccatgaagtccctgtctctgctcctcgctgtggctttgggcctggcgaccgccgtctcagcaggacccgcggtgatcgagtgttggttcgtggaggatgcgagcggaaagggcctggccaagagacccggtgcactgctgttgcgccagggaccgggggaaccgccgccccggccggacctcgaccctgagctctatctcagtgtacacgaccccgcgggcgccctccaggctgccttcaggcggtatccccggggcgcccccgcaccacactgcgagatgagccgcttcgtgcctctccccgcctctgcgaaatgggccagcggcctgacccccgcgcagaactgcccgcgggccctggatggggcttggctgatggtcagcatatccagcatggggcacgctatgcctgtcgaattcaccatcccagcctgcctgcctcggggcgcagcgctgaggtcaccctggaggtag

SEQ ID NO: 304960 - DNA, 2884 bp, Artificial Sequence
  derived and/or modified sequence
ggcgcggtaaggctggggtatcctggtgagaactggagaggatctacccgggtccctgcctggccagtggggaaacaccggtcccccaggcaccttcacctaaccagagcggggatttccaccgcccctcatgccgccctttggaggaaagtgaaagtgaaaggaggaagaggaggcttcatggctgaggaggtcgcagcgccatgaagtccctgtctctgctcctcgctgtggctttgggcctggcgaccgccgtctcagcaggacccgcggtgatcgagtgttggttcgtggaggatgcgagcggaaagggcctggccaagagacccggtgcactgctgttgcgccagggaccgggggaaccgccgccccggccggacctcgaccctgagctctatctcagtgtacacgaccccgcgggcgccctccaggctgccttcaggcggtatccccggggcgcccccgcaccacactgcgagatgagccgcttcgtgcctctccccgcctctgcgaaatgggccagcggcctgacccccgcgcagaactgcccgcgggccctggatggggcttggctgatggtcagcatatccagcatggggcacgctatgcctgtcgaattcaccatcccagcctgcctgcctcggggcgcagcgctgaggtcaccctggaggtagcaggtctttcagggccctcccttgaggacagcgtaggccttttcctgtctgcctttcttctgcttgggctcttcaaggcactgggctgggctgctgtctacctgtccacctgcaaggattcaaagaagaaagcagagtgagggcactcactgccatcctgtggaagccaccatcatctctggcccaagcttctgtagtagctccctaaaataataccctatcatctgctcctaatccctccaatctctctccactgagtggctggaatgcttttttttttttctttcacttatataagggataatttttctttttttttttttttgagacggagtctcactcttccgcccaggctgcagtgcagtggcatgatcttggcttactgcaacctccgcctcctgggttcaagcaattctgtggcttcagcctccggagtagctgggattacaggcacatgccaccacacccagtgaatttttgtatttttagtagagacggggtttcaccatgttggccaggctggtcttgaattcctgacctcaggtgatctgcccacctcagcctcccaaagtgctgggattacaggcgtgagccaccacaccaggcccgagaaatgcttttttaaaaaacacacatcttatggcattcaccttcttggagctctaggacagtggttctcaaaatttttttctctcaggacctcttaaaaatcatcaaggaccccaaaaagcttttgggtatgtgggttatagctatcaatatttatggtactagaacttaaaagtgagaaaaatttaaaacacgagaatacataggcacacattctattcatcgtgggaaccatggtgtcaatacatatcatgtagcttctgaaaaactccactgtacacttatagaatgaagaaggcaaaaaacttttttttttttttttttgagacggagtctcgctctgtcgcccaggctggagtgcagtggcgcgatctcggctcactgcaagctccgcctctcgggttcacgccattctcctgcctcagcctcccaagtagctcggactacaggcgtcctccaccatgcctggctaatattttgtattttttagtagagacggggtttcaccgtgttagccaggatggtctcgatctcctaacctggtgatccgcccgcctcggcctcccaaagtattgggattacccgcgtgagccaccgcgcccggctgcaaataatctttctttttttctttttttctgagacagagtctcgctctgttgcccaggctggagtgcagtggcacgatctcggctcacggcacgctccgcctcccgggttcacgccattctcctgcctcagcttcccgagtagctgggactacaggggcccgccaccacgcccggctaactttttgtgtttttagtagagacggggtttcaccgtgttagccaggatggtctcgatctcctgaccttgtgatctgcccgcctcggcctcccaaagtgctgggattacaggcgtgagccaccgcgcccggcggcgaaacacgatattgtactaacatcttaattttgttataaaatctcacaaaccccctgacatagtctcagagatctgtagggccgaggttacatttggagaacccgtactctagggccaaatccattcttcttgccctggctcacttgtcccccccaccgccccgcgctggagccactgcctagttcttcagccctagatggtgctcgccagacctcctctcaatgctcatcacacacagggctattcctttcctccaatgaaccaaacgcctcccgcccacctccaggtcccagtcctctgttccctttgcctggtccacccttgccctccctgggtcgcagacgaggtcggcctcgtcattccccgcagaccgccgcgcgtccctcttgtgcggttcaccacagttgtatttaagtgatcgtgtgagtcgtcgttaaatgcctgtctccccgcggatcatgggctcctcgaggacagggaccggcctgtctgtccactgctgtaaccccgcgccggcatagggacctaaggcccactggagggcgctcatcaagtagctgctggatgttgacgaaggaagcggcggcgcagctcagggatctccgagtcaggacggtcggccagacccacggggtaacgggtctaatcgtgtaggaataaagctgtattccagtgcttcc

SEQ ID NO: 304961 - protein, 469 aa, Artificial Sequence
  derived and/or modified sequence
MHSPPRDQAAIMLWKLVENVKYEDIYEMLVHTYSSMDRHDGVPSHSSRLSQLGSVSQGPYSSAPPLSHTPSSDFQPPYFPPPYQPLPYHQSQDPYSHVNDPYSLNPLHQPQQHPWGQRQRQEVGSEAGSLLPQPRAALPQLSGLDPRRDYHSVRRPDVLLHSAHHGLDAGMGDSLSLHGLGHPGMEDVQSVEDANNSGMNLLDQSVIKKVPVPPKSVTSLMMNKDGFLGGMSVNTGEVFCSVPGRLSLLSSTSKYKVTVGEVQRRLSPPECLNASLLGGVLRRAKSKNGGRSLRERLEKIGLNLPAGRRKAANVTLLTSLVEGEAVHLARDFGYICETEFPAKAVSEYLNRQHTDPSDLHSRKNMLLATKQLCKEFTDLLAQDRTPIGNSRPSPILEPGIQSCLTHFSLITHGFGAPAICAALTALQNYLTEALKGMDKMFLNNTTTNRHTSGEGPGSKTGDKEEKHRK

SEQ ID NO: 304962 - protein, 198 aa, Artificial Sequence
  derived and/or modified sequence
MLWKLVENVKYEDIYEMLVHTYSSMDRHDGVPSHSSRLSQLGSVSQGPYSSAPPLSHTPSSDFQPPYFPPPYQPLPYHQSQDPYSHVNDPYSLNPLHQPQQHPWGQRQRQEVGSEAGSLLPQPRAALPQLSGLDPRRDYHSVRRPDVLLHSAHHGLDAGMGDSLSLHGLGHPGMEDVQSVEDANNSGMNLLDQSVIKK

SEQ ID NO: 304963 - DNA, 1410 bp, Artificial Sequence
  derived and/or modified sequence
atgcacagcccccccagagaccaggccgccatcatgctgtggaagctggtggagaacgtgaagtacgaggacatctacgagatgctggtgcacacctacagcagcatggacagacacgacggcgtgcccagccacagcagcagactgagccagctgggcagcgtgagccagggcccctacagcagcgccccccccctgagccacacccccagcagcgacttccagcccccctacttcccccccccctaccagcccctgccctaccaccagagccaggacccctacagccacgtgaacgacccctacagcctgaaccccctgcaccagccccagcagcacccctggggccagagacagagacaggaggtgggcagcgaggccggcagcctgctgccccagcccagagccgccctgccccagctgagcggcctggaccccagaagagactaccacagcgtgagaagacccgacgtgctgctgcacagcgcccaccacggcctggacgccggcatgggcgacagcctgagcctgcacggcctgggccaccccggcatggaggacgtgcagagcgtggaggacgccaacaacagcggcatgaacctgctggaccagagcgtgatcaagaaggtgcccgtgccccccaagagcgtgaccagcctgatgatgaacaaggacggcttcctgggcggcatgagcgtgaacaccggcgaggtgttctgcagcgtgcccggcagactgagcctgctgagcagcaccagcaagtacaaggtgaccgtgggcgaggtgcagagaagactgagcccccccgagtgcctgaacgccagcctgctgggcggcgtgctgagaagagccaagagcaagaacggcggcagaagcctgagagagagactggagaagatcggcctgaacctgcccgccggcagaagaaaggccgccaacgtgaccctgctgaccagcctggtggagggcgaggccgtgcacctggccagagacttcggctacatctgcgagaccgagttccccgccaaggccgtgagcgagtacctgaacagacagcacaccgaccccagcgacctgcacagcagaaagaacatgctgctggccaccaagcagctgtgcaaggagttcaccgacctgctggcccaggacagaacccccatcggcaacagcagacccagccccatcctggagcccggcatccagagctgcctgacccacttcagcctgatcacccacggcttcggcgcccccgccatctgcgccgccctgaccgccctgcagaactacctgaccgaggccctgaagggcatggacaagatgttcctgaacaacaccaccaccaacagacacaccagcggcgagggccccggcagcaagaccggcgacaaggaggagaagcacagaaagtag

SEQ ID NO: 304964 - DNA, 597 bp, Artificial Sequence
  derived and/or modified sequence
atgctgtggaagctggtggagaacgtgaagtacgaggacatctacgagatgctggtgcacacctacagcagcatggacagacacgacggcgtgcccagccacagcagcagactgagccagctgggcagcgtgagccagggcccctacagcagcgccccccccctgagccacacccccagcagcgacttccagcccccctacttcccccccccctaccagcccctgccctaccaccagagccaggacccctacagccacgtgaacgacccctacagcctgaaccccctgcaccagccccagcagcacccctggggccagagacagagacaggaggtgggcagcgaggccggcagcctgctgccccagcccagagccgccctgccccagctgagcggcctggaccccagaagagactaccacagcgtgagaagacccgacgtgctgctgcacagcgcccaccacggcctggacgccggcatgggcgacagcctgagcctgcacggcctgggccaccccggcatggaggacgtgcagagcgtggaggacgccaacaacagcggcatgaacctgctggaccagagcgtgatcaagaagtag

SEQ ID NO: 304965 - DNA, 1410 bp, Artificial Sequence
  derived and/or modified sequence
atgcacagtccacctagagatcaagccgccatcatgttgtggaaattggttgaaaacgtcaagtacgaagacatctacgagatgctggtgcacacttatagttcgatggatcgccacgatggtgtgcctagccactcctcacgtctctcacagctcggcagcgtgtcccaggggccttatagcagtgcgcccccactgagtcacactcctagcagcgatttccagcccccttactttccaccaccttaccagcccctgccataccatcagtcccaagatccctactcacacgtgaatgatccctatagtcttaaccccctgcaccaaccccagcaacacccgtggggccaacgacaaagacaggaagtaggcagtgaggcaggcagcctgcttccccagccgcgcgcagccctgccgcaactgtcgggccttgacccacgccgggactaccacagcgtgcggagacctgacgtcctgctccacagcgctcaccatgggctagacgccggcatgggggacagcctgtcattgcatggcttggggcaccctggtatggaggacgtacaaagcgtggaagatgcaaacaacagcggcatgaacctgcttgaccagagcgttataaagaaagtgccagtccctcccaaaagtgttacatcgctaatgatgaacaaagatggcttcctgggagggatgagtgttaatacaggggaggtgttttgctctgtcccggggcgtttatcccttttaagctcgacaagcaaatacaaggtcaccgtcggcgaggtccagaggagactttcacctccagagtgcctgaacgccagccttctaggcggggtcctgcgtcgcgctaagtccaaaaatgggggacgctcactgcgggagcgacttgaaaagatcggcctgaatctcccagcagggaggagaaaggctgcaaacgtcaccctgctgaccagcctcgtggagggggaagctgtccatctggcacgagattttggctatatatgtgagaccgagtttcctgctaaagccgtgtctgagtacctcaacaggcaacacaccgatccttcggatctgcatagcagaaagaatatgcttcttgccaccaagcagctctgtaaggagttcacagaccttctagctcaagaccgtaccccgatcggcaattccaggccttctcccattcttgaaccgggtatccagagctgtcttacacacttctctctgattacccacggcttcggagcgcccgccatctgtgcagccttgacggctctgcaaaattatctgacagaagccttgaagggaatggacaaaatgtttcttaataatacaactactaaccgacatacgtccggcgagggcccaggttccaaaacgggcgacaaggaggagaagcatcgaaaatag

SEQ ID NO: 304966 - DNA, 597 bp, Artificial Sequence
  derived and/or modified sequence
atgttgtggaagctcgtggagaatgtgaaatatgaggacatctatgaaatgcttgtccatacctactccagcatggaccggcacgatggagtgcctagtcacagcagtcggctctcccagctggggtccgtgagccagggtccatactcttccgcacctcccctcagccacaccccatcgagtgattttcagcctccgtattttccccccccataccaaccccttccgtaccatcagtcccaagatccctattctcatgtgaatgatccctatagtctcaacccacttcaccagccacagcaacacccctgggggcagcgacagcggcaggaggtcggctctgaggctgggagcctgctaccccaaccaagagccgcattgccccagctgtcgggcctggatcctcgccgcgattatcattcagtacgtcgcccggacgtcctcctgcatagtgctcatcacggcctggacgctggcatgggggacagtctgtcgctgcacggtctggggcaccccggcatggaggacgttcagagcgtggaggatgcaaataactccggaatgaatctcctggaccagagcgtcataaagaaatag

SEQ ID NO: 304967 - DNA, 1410 bp, Artificial Sequence
  derived and/or modified sequence
atgcacagccccccccgggaccaggccgccatcatgctgtggaagctggtggagaatgtgaagtatgaggacatctatgagatgctggtgcacacctacagctccatggacagacatgatggagtgcccagccacagcagccggctgagccagctgggctctgtgtcccagggcccctacagcagcgccccacccctgagccacacccccagcagtgacttccagcccccctacttccccccaccctaccagcccctgccctaccaccagagccaggacccctacagccacgtgaatgacccctacagcctgaaccccctgcaccagccccagcagcacccctggggccagaggcagaggcaggaggtgggcagcgaggccggcagcctgctgccccagccccgggccgccctgccccagctgagcggcctggacccccggcgggactaccacagcgtgcggcggccagatgtgctgctgcacagcgcccaccacggcctggatgctggcatgggagacagcctgagcctgcacggcctgggccaccctggcatggaggatgtgcagagcgtggaggatgccaacaacagcggcatgaacctgctggaccagagcgtcatcaagaaggtgcctgtgccccccaagtctgtgaccagcctgatgatgaacaaggatggcttcctgggcggcatgtctgtgaacacaggagaggtgttctgcagcgtgcccggccgcctgagcctgctgagcagcaccagcaagtacaaggtgacagtgggggaggtgcagaggcggctgagccccccagagtgcctgaatgccagcctgctgggcggcgtgctgcggcgggccaagagcaagaatggaggccgcagcctgcgggagcggctggagaagattggcctgaacctgcctgctggccgcaggaaggccgccaacgtgaccctgctgaccagcctggtggagggggaggccgtgcacctggcccgggactttggctacatctgtgaaacagagttccctgccaaggctgtgtctgagtacctgaaccggcagcacacagaccccagcgacctgcacagcaggaagaacatgctgctggccaccaagcagctgtgcaaggagttcacagacctgctggcccaggacaggacccccatcggcaacagccggcccagccccatcctggagcccggcatccagagctgcctgacccacttcagcctcatcacccacggctttggagccccagccatctgtgccgccctgacagccctgcagaactacctgacagaggccctgaagggcatggacaagatgttcctgaacaacaccaccaccaacagacacaccagcggggagggccctggcagcaagacaggagacaaggaggagaagcacaggaagtag

SEQ ID NO: 304968 - DNA, 597 bp, Artificial Sequence
  derived and/or modified sequence
atgctgtggaagctggtggagaatgtgaagtatgaggacatctatgagatgctggtgcacacctacagctccatggacagacatgatggagtgcccagccacagcagccggctgagccagctgggctctgtgtcccagggcccctacagcagcgccccacccctgagccacacccccagcagtgacttccagcccccctacttccccccaccctaccagcccctgccctaccaccagagccaggacccctacagccacgtgaatgacccctacagcctgaaccccctgcaccagccccagcagcacccctggggccagaggcagaggcaggaggtgggcagcgaggccggcagcctgctgccccagcccagggctgccctgccccagctgagcggcctggacccccggcgggactaccacagcgtgagaagaccagatgtgctgctgcacagcgcccaccacggcctggatgctggcatgggagacagcctgagcctgcacggcctgggccaccctggcatggaggatgtgcagagcgtggaggatgccaacaacagcggcatgaacctgctggaccagagcgtcatcaagaagtag

SEQ ID NO: 304969 - DNA, 1410 bp, Artificial Sequence
  derived and/or modified sequence
atgcacagccccccccgggaccaggccgccatcatgctgtggaagctggtcgaaaacgtaaagtacgaagatatctacgaaatgttggtgcacacgtactcatctatggatcgtcatgacggcgtccccagtcactccagccggttaagtcagctgggtagtgtgagtcaagggccctattcatccgcccctccactgtctcataccccttccagtgatttccagcctccatactttcccccaccataccagcctctgccttatcaccagagtcaggacccctacagtcatgttaacgacccgtactccctgaatccgctgcaccagccacaacagcacccttgggggcaaagacagcgacaagaggtcggaagcgaggctggctccctccttcctcagccgcgtgctgccctgccccagttgtccgggctcgaccccagacgcgattaccactctgtccggcgcccagatgtgctcttgcattctgcacaccacggacttgacgccggaatgggggattcccttagtctgcacggactgggtcatcccggaatggaggatgtccagtcagtcgaagacgcaaataacagcggaatgaatctccttgatcagtctgttatcaaaaaggtacccgtgccgccaaaaagcgttaccagtcttatgatgaataaggacggtttcctggggggtatgtctgtcaataccggggaggttttttgctcagtgcctggacggctctccctgctgtcaagtacatccaagtacaaggtgaccgttggtgaggtgcagcgtcggttaagcccgcccgagtgtttgaatgctagcctcttgggcggagtcctgcgaagagctaaaagcaagaacggcgggcgatccctccgggaacgtctcgaaaagatcggactgaatctacctgcaggccgccggaaggcggcaaatgttacactgcttacgagtctggtcgaaggggaagcagtgcacctggcccgcgacttcgggtacatctgtgagactgaattccccgccaaagcagtgagtgagtatctcaataggcaacacactgacccgagcgacctgcactcccgaaagaacatgttactggccaccaagcagctgtgtaaagagtttaccgatttgttagcccaggacagaaccccaatcgggaactcaagacccagtcccattctcgaaccaggaatccaatcatgtctgacccacttctctcttatcactcacggattcggcgcccccgctatttgtgccgctttaacagctctccagaattacctcaccgaagccctcaaagggatggataagatgttcctcaacaatacaaccacaaataggcacactagtggtgaaggcccgggctccaagaccggtgataaagaggagaagcacagaaagtag

SEQ ID NO: 304970 - DNA, 597 bp, Artificial Sequence
  derived and/or modified sequence
atgctgtggaagctggtggagaacgtgaagtacgaggacatctacgaaatgctcgtgcacacgtattcttccatggaccgccacgatggagtaccatcccactctagtcgtttatctcaacttggtagcgtctcgcagggtccatattcctcagcaccaccacttagccacacccctagctccgattttcagccgccctactttcctcctccataccaaccactcccgtaccaccagtctcaggatccctactcacatgtgaacgacccatacagtttaaaccccctgcatcaaccccaacaacacccttggggacagcggcagcgccaggaggtgggaagtgaggctgggagcctcctgccacagcccagagctgctctcccacaactgtctggcctggacccaagacgggactaccacagcgtcagacgcccggatgtcctcttgcatagcgctcaccacggcctagatgctggtatgggcgacagtttgtccctgcatgggctcggacaccctgggatggaggacgtgcagtcggtcgaggacgccaataatagcggtatgaatttattggaccaatcagtgattaaaaaatag

SEQ ID NO: 304971 - DNA, 1410 bp, Artificial Sequence
  derived and/or modified sequence
atgcattcaccaccaagggatcaggctgccataatgttgtggaaactggtagagaatgtgaaatatgaggatatttacgaaatgcttgtccacacatactcatcaatggataggcacgatggggtgccatcccattcgtctcgcctcagccagctgggctccgtctcgcagggtccatattccagtgcgcctcccttgtcccacactccttctagtgatttccagccaccctatttccctcccccttatcagccgttaccataccaccagtctcaagacccctatagtcatgtgaatgatccctactctttgaaccccctgcaccagccccaacaacacccctgggggcagaggcagcgccaggaggtgggctccgaggcaggcagcctgctgccccagccccgtgccgctctgccacagctttcagggctggatccgcgtcgagactatcactcagtccgaaggccggatgtgttgcttcattccgcacatcacggtcttgacgcgggaatgggcgactcccttagcctacacggactaggacaccctggcatggaggacgtccagagtgtggaggacgccaacaactctggcatgaacctgttggaccagtccgtcatcaagaaggtgcctgtgccacccaagagcgtgacttccctgatgatgaacaaagatggcttcttgggcggaatgtctgtcaacacaggcgaggtcttttgttctgttcccggacgactgtcattactctcaagcacgtccaaatacaaagtgaccgttggagaagttcagcggaggctgtcaccccctgagtgcttgaacgccagcttgcttggcggtgtgcttcgtcgagcaaaatctaagaacggtggtaggtcacttcgcgagagattagagaagattggcctcaatctccccgcaggcaggagaaaagcagcaaatgtgacactgctgacctccctggtcgaaggcgaagctgtgcatcttgcacgggacttcgggtatatctgtgaaactgaattccctgcgaaggctgttagcgagtaccttaatcggcagcataccgatcctagtgacctgcacagtcgaaagaacatgttactcgcgacaaagcagttatgtaaggaatttacagacttattggcccaggacaggacacccatcggcaacagtcgtccaagccctattctcgaacctggcatccagtcatgtctgactcatttctccctaattacgcacgggtttggagctcccgctatctgtgccgctctgactgcgcttcaaaattaccttaccgaagcccttaagggaatggacaaaatgttcttaaacaacacgaccactaacagacataccagcggagaaggcccaggttcaaaaaccggagataaagaagaaaaacataggaaatag

SEQ ID NO: 304972 - DNA, 597 bp, Artificial Sequence
  derived and/or modified sequence
atgctttggaaactggtggagaatgtgaagtatgaggacatctacgagatgctggtgcatacttattcctccatggaccgtcatgacggggtgccctcgcattctagccgcttaagccagctcggctctgtttcgcagggcccatactcgtccgcacctccactgtcccacacccccagcagtgattttcagcctccatacttcccccctccataccaacctctcccgtaccatcaatcacaggatccatacagtcatgttaacgatccctactccctgaaccctctccaccagcctcagcaacacccctggggacaaagacagcgccaggaagtggggtccgaggcagggagtctgttgcctcagcctcgagccgctctaccacagctcagtggacttgatccacgccgagattaccatagtgtgcgcaggccagatgttctgctgcactctgcccaccatggcctggacgccggaatgggagactctctgtccctgcacggcctggggcaccctggcatggaggacgtgcagagtgttgaagatgccaacaacagtgggatgaatctgctggatcagagtgtgataaagaaatag

SEQ ID NO: 304973 - DNA, 5797 bp, Artificial Sequence
  derived and/or modified sequence
ttctctttgctgaggcttacttgtccagcctattgtttgagacaacagatataagttgcgatgggagaggagcgtcggatttggtgtgtatcccccatttccaattatagatggatcattacagacagcggagtcctgagaagccagacatctgctcctcacatgaatgcactcacctcctagagaccaggctgccatcatgctctggaagcttgtggagaatgtcaagtacgaagatatctatgagatgttagtccacacctattcatccatggaccggcacgatggtgtcccgagccacagctcgcggctctcccagctgggctcggtgtcccaaggaccctactcgagcgccccgccgctgtcccacaccccgtcgtcggacttccagccgccctacttcccacccccctaccagccgctcccctaccaccagagccaggacccctactcccacgtcaacgacccctactccctgaacccactgcaccagccccagcaacatccctgggggcaacggcagcggcaagaagtgggttcggaagccggctctctcctgccccagcctcgggccgccttgccccagctctcgggccttgacccccggagggactaccactcggtccgccggccggacgtgctgctgcattcggcgcaccacggcctggacgcgggcatgggtgacagcctctcgctgcacggcctcggccatcccggaatggaagacgtccagtcagttgaagatgccaataacagcggcatgaatctattggaccagtctgtcattaaaaaagttccagttcctcccaaatcggtgacttctctaatgatgaataaagacggcttcctgggaggcatgtctgtcaacaccggcgaggtgttttgctccgtcccaggccgtttgtctctgctcagttcaacttcgaagtacaaagtaactgtgggagaagttcagagacggctgtcgccccctgaatgcctcaatgcatctctcctcggcggagtcctcagaagagccaaatcgaaaaatggggggagatctttgcgagaaaggctagaaaaaatcggtttgaatttacccgcgggcaggcgcaaagcagcaaatgtcacgttactcacctccctggtggaaggagaagctgttcacttagctagggattttgggtacatttgcgaaacggagtttcccgccaaagccgtctctgagtatttgaaccggcagcacacagacccgagtgacctgcactcccgaaagaatatgctgttggccaccaagcaactttgtaaagaatttacggatctactggcgcaggaccggacaccgatagggaacagccgacccagccccatcctggagccggggatccagagctgcctcacgcacttcagcctcatcacgcacggcttcggcgccccggccatttgcgccgcgctcacggccctgcagaactatctcaccgaggcgctcaaaggcatggacaagatgttcttgaacaacaccaccactaacaggcacacgtctggggaaggcccaggtagtaaaactggcgacaaggaggagaaacacaggaaatgaaaaatttttaaaaaaagaaggaaaaatgttttaaatacaaaaggaaaaacagacaaaaatttaattttagctttaaaatattggattggctttggaagaattatattaggtagaatacacatacaatcaaaattttaaaaaaaaaagctaaataacttaaaaaaaaactgaggcgtacaacggagcaacaatatcggttctcagtgtctatttcaagatacatttggagacaaccgtccggattttccacttcggttctttcgagtttagtaatactgataataaaagaaaaccatgatttccccttccctttggaaaataaacataagactaaacatgagaaaaacgctaacttattggaagaaaatcggagaaacgttggtgtcaatgctttgagagctggttgactgagacgcacgaactttttaattttaaatatatttttaggaaactctcgcagtccccgccctccatctcacctcacccgtctcccaaccacccttttccatgttaccctcccttcctcacattgttacgggaatcttctgggatgaaaatgagtgtggttggcccttttgcgttgtttcagtcctctcggtacctccccgcccagccctgcgatcttaactcaccgggcccggctccccggccgcttgcataattagggagggcgagggcggggcgggaggcctgtggagaccaggcggaggctgcaatttttggtgccggccggcagagcaggttctggcggctgaggaaaatccggaccaataagttgattcaaacatcatcagttcctttcagaaatgttactagctcccagccttgccagcatctgcatagagagaatctcacatttattatatttgtgtcatctactaattttatgaactatagtaaaaaaaaaaaaacacacacacacacaatatgaatacgttgattagtatgtaattccttcggaggggtatgtaccatttcattctcttctgttttccaaagctttgcccgcatggtttatgagcttcttcaaagaggacttgggcttcctacacaatctataaggtacagagaaaaaaaaatccgatccctttttaatcaaagcctgtgtgtcagaattctgcaggtgcacttctttaaagaagctcaaagggaataatttagaaagtggccaatatgatggaagcagctttgaatctacatgctaacattcctcaacactccaattccggtggaggtggcaggggagggggtctgcaaaatgaattttaagggaaaagagtaaggattcttagagccctatattctaatagtattgccctgcatttaaaattgatttgatttccctgggttctttggtgattgctgtttaagcaaggaaagaagcagctttacgagtggacgtggggaggagggcggcacaagcacccacatttctgtaacaattgctttcttacaagatgctttatgaatgaggcatttttccctcccagacgtgcacttgttttggcatataatggcaaaataatgcaaagtgaagggagatgtatttcagctttgatttttaccgtctggatacatcgggactattcccagtggataaagtttcatgcatttaatatttctcacttctggcagcccagctcctttcttgggctccatcttagcattatcatgaaataagatctggaatccattgtctgcacctccgcaaaagcagtgagaaattatcccgggataagggtgaatgagagaggtctctaaatatagtgttgatacactcacctatttaacaaagtagacgagatctttgcaataccccttaaagataacgacatagatgttgttctgcaggatttatagttaggacccactcaattctccaggactcccggttttgcccccctcccgctttgccttggtgggggtggggattgggggagtggggattgcgttggggttttaggaatctgctgagagctttgcccatttttattaaaagaggaaagggaagttaggaagctcgtctcaggtcaccaaaagggcccaagcaactgttagggccacactgcagcccatctccaacccctagcttcgtttagcacttctgatcttcatggcccagccctagaactgttgagaggaatgcaatggccaagagctagacgttacggagagtgtagtcactctcttttcccagctcagaggcctgcgccttcgtccgagagctcggccgatcgcattagatgtgttctgattgcacaaggccaggagagaccacactgaaaacgatcgtctcctttccttgcagggcaacgcgccccacgcgtgtgacgtgcgagagacgcgatggacgcgccttgctcttactgtgcaggtcctgagagcgtgtgggccacaggcgcccagtcgtgttgaggacatagaatcagccgctggaggggctgccgactgcgcgggcccttcccgctctcggtctcaccctaagggctaaggcgaccgagaaagccccattctccagtaggtaatggggcggcgcccggtgggctgcaggtggggagggctcccagcgccgccagcggccacccggggcgccggctcctggagggagagtggcctagaaatatccaaggaatccgaagcttcccctcctccacctctgccagtacggaaacaccccaccgtcacaatcctaaagcggggagatgggatgggaattgtcttacttggcaaggcagggtaccttcattgccagacgccctcatttgtgtgttcctccttgctccagcgagatagaaccttttgcgcccccaaccccgtttcgtggagtgagcccactaccccttctccctccctcacttctcctttcatgtaggacccccgcccccttgctttccttagccaggcccgctacatttatctgataattgagttattaaaagatttggtttccttgggcctataaatcaataaacagtaggattaacgcaatagtttgccttttaagtcaagggagacgtttaaggcaagcccctttgagctttgttttcaaaccaaacaggtgagttgcagctctccccccggcccctgcactcttcagacatttggtccctgcccactcctaaacgctcagtcccaaaacaaaatagcgaaagacaggaggagtcaggatgtggcagtgctgccttcacactttccacttcgcaagttcttttaaaggttccaaagatctccagaccattctctgccaaaccctgccgcctcctgcacgtattgcaggtctctggggagcaagaaatgtcctgtttgggtgaggattccgtcacctaaaaagatctttaacttctcccccaaagtgggaaggtaactttctcccccttttccccaccaccttcactcctacacccccaattaccttgcattttctttccttccttctggcctccacacccatagctttcctccatccccacttaaagaaccgaagaggcttttaaagacctggctgctttgttttccttggccaaggaagccactttctctcaagcaattatttcatatcctacgaaaactttggtcgaatggaaaactcgaaacctcgagcttatctacacactgttcctctgctacaatgctttcctagttaagagtgtttatagagaatttgtcatcacatctgatatcctgtacttgtaatacattatgtggaaaggaaataaccttaaaccgtctgatgttgcctcaagagcccaaacggcgtttccccacctttgacgatgtatgtgaaattactggcttaaaaaaaaaagtatcaatttttttttaacggaatgaacactatccttctttaaatgccaaaatcgactccacctttgagttggtctctaattctctaacattgtttttgccacacaatcaagaaatatcaatctattgactcttcacgagaagagctctggagggtattcatgttaagtttgtatatatttatttatgcttaatttaatgggaatgtgtaaatatggcgagcaagtagtttgggattatttatctgtgaatctatacctctgtgaatgggtggttaaaaaacctcttgaccctagatagaatcctatctgaatttttctgttctttataaacaagctgttatggtaatgggtagaaattggtttattgtccagtgttaatctgatttacataaataaaaagattgttgtgttttca

SEQ ID NO: 304974 - DNA, 797 bp, Artificial Sequence
  derived and/or modified sequence
tttttctctttgctgaggcttacttgtccagcctattgtttgagacaacagatataagttgcgatgggagaggagcgtcggatttggtgtgtatcccccatttccaattatagatggatcattacagacagcggagtcctgagaagccagacatctgctcctcacatgaatgcactcacctcctagagaccaggctgccatcatgctctggaagcttgtggagaatgtcaagtacgaagatatctatgagatgttagtccacacctattcatccatggaccggcacgatggtgtcccgagccacagctcgcggctctcccagctgggctcggtgtcccaaggaccctactcgagcgccccgccgctgtcccacaccccgtcgtcggacttccagccgccctacttcccacccccctaccagccgctcccctaccaccagagccaggacccctactcccacgtcaacgacccctactccctgaacccactgcaccagccccagcaacatccctgggggcaacggcagcggcaagaagtgggttcggaagccggctctctcctgccccagcctcgggccgccttgccccagctctcgggccttgacccccggagggactaccactcggtccgccggccggacgtgctgctgcattcggcgcaccacggcctggacgcgggcatgggtgacagcctctcgctgcacggcctcggccatcccggaatggaagacgtccagtcagttgaagatgccaataacagcggcatgaatctattggaccagtctgtcattaaaaaag

SEQ ID NO: 304975 - protein, 288 aa, Artificial Sequence
  derived and/or modified sequence
  misc_feature (1)..(1): Xaa can be any naturally occurring amino acid
XKERGLFRGIEDNPMVVPLCNRSKDVVEPLLRPQWEWCISRQLWWGHRIPAYFVTVSDPAVPPGEDPDGRYWVSGRNEAEAREKAAKEFGVSPDKISLQQDEDVLDTWFSSGLFPLSILGWPNQSEDLSVFYPGTLLETGHDILFFWVARMVMLGLKLTGRLPFREVYLHAIVRDAHGRKMSKSLGNVIDPLDVIYGISLQGLHNQLLNSNLDPSEVEKAKEGQKADFPAGIPECGTDALRFGLCAYMSQGRDINLDVNRILGYRHFCNKLWNATKFALRGLGKGFVP

SEQ ID NO: 304976 - protein, 676 aa, Artificial Sequence
  derived and/or modified sequence
MSTLYVSPHPDAFPSLRALIAARYGEAGEGPGWGGAHPRICRLPRFEARKAVLVALKERGLFRGIEDNPMVVPLCNRSKDVVEPLLRPQWYVRCGEMAQAASAAVTRGDLRILPEAHQRTWHAWMDNIREWCISRQLWWGHRIPAYFVTVSDPAVPPGEDPDGRYWVSGRNEAEAREKAAKEFGVSPDKISLQQDEDVLDTWFSSGLFPLSILGWPNQSEDLSVFYPGTLLETGHDILFFWVARMVMLGLKLTGRLPFREVYLHAIVRDAHGRKMSKSLGNVIDPLDVIYGISLQGLHNQLLNSNLDPSEVEKAKEGQKADFPAGIPECGTDALRFGLCAYMSQGRDINLDVNRILGYRHFCNKLWNATKFALRGLGKGFVPSPTSQPGGHESLVDRWIRSRLTEAVRLSNQGFQAYDFPAVTTAQYSFWLYELCDVYLECLKPVLNGVDQVAAECARQTLYTCLDVGLRLLSPFMPFVTEELFQRLPRRMPQAPPSLCVTPYPEPSECSWKDPEAEAALELALSITRAVRSLRADYNLTRIRPDCFLEVADEATGALASAVSGYVQALASAGVVAVLALGAPAPQGCAVALASDRCSIHLQLQGLVDPARELGKLQAKRVEAQRQAQRLRERRAASGYPVKVPLEVQEADEAKLQQTEAELRKVDEAIALFQKML

SEQ ID NO: 304977 - DNA, 867 bp, Artificial Sequence
  derived and/or modified sequence
tgaaaggagagaggcctgttcagaggcatcgaggacaaccccatggtggtgcccctgtgcaacagaagcaaggacgtggtggagcccctgctgagaccccagtgggagtggtgcatcagcagacagctgtggtggggccacagaatccccgcctacttcgtgaccgtgagcgaccccgccgtgccccccggcgaggaccccgacggcagatactgggtgagcggcagaaacgaggccgaggccagagagaaggccgccaaggagttcggcgtgagccccgacaagatcagcctgcagcaggacgaggacgtgctggacacctggttcagcagcggcctgttccccctgagcatcctgggctggcccaaccagagcgaggacctgagcgtgttctaccccggcaccctgctggagaccggccacgacatcctgttcttctgggtggccagaatggtgatgctgggcctgaagctgaccggcagactgcccttcagagaggtgtacctgcacgccatcgtgagagacgcccacggcagaaagatgagcaagagcctgggcaacgtgatcgaccccctggacgtgatctacggcatcagcctgcagggcctgcacaaccagctgctgaacagcaacctggaccccagcgaggtggagaaggccaaggagggccagaaggccgacttccccgccggcatccccgagtgcggcaccgacgccctgagattcggcctgtgcgcctacatgagccagggcagagacatcaacctggacgtgaacagaatcctgggctacagacacttctgcaacaagctgtggaacgccaccaagttcgccctgagaggcctgggcaagggcttcgtgccctag

SEQ ID NO: 304978 - DNA, 2031 bp, Artificial Sequence
  derived and/or modified sequence
atgagcaccctgtacgtgagcccccaccccgacgccttccccagcctgagagccctgatcgccgccagatacggcgaggccggcgagggccccggctggggcggcgcccaccccagaatctgcagactgcccagattcgaggccagaaaggccgtgctggtggccctgaaggagagaggcctgttcagaggcatcgaggacaaccccatggtggtgcccctgtgcaacagaagcaaggacgtggtggagcccctgctgagaccccagtggtacgtgagatgcggcgagatggcccaggccgccagcgccgccgtgaccagaggcgacctgagaatcctgcccgaggcccaccagagaacctggcacgcctggatggacaacatcagagagtggtgcatcagcagacagctgtggtggggccacagaatccccgcctacttcgtgaccgtgagcgaccccgccgtgccccccggcgaggaccccgacggcagatactgggtgagcggcagaaacgaggccgaggccagagagaaggccgccaaggagttcggcgtgagccccgacaagatcagcctgcagcaggacgaggacgtgctggacacctggttcagcagcggcctgttccccctgagcatcctgggctggcccaaccagagcgaggacctgagcgtgttctaccccggcaccctgctggagaccggccacgacatcctgttcttctgggtggccagaatggtgatgctgggcctgaagctgaccggcagactgcccttcagagaggtgtacctgcacgccatcgtgagagacgcccacggcagaaagatgagcaagagcctgggcaacgtgatcgaccccctggacgtgatctacggcatcagcctgcagggcctgcacaaccagctgctgaacagcaacctggaccccagcgaggtggagaaggccaaggagggccagaaggccgacttccccgccggcatccccgagtgcggcaccgacgccctgagattcggcctgtgcgcctacatgagccagggcagagacatcaacctggacgtgaacagaatcctgggctacagacacttctgcaacaagctgtggaacgccaccaagttcgccctgagaggcctgggcaagggcttcgtgcccagccccaccagccagcccggcggccacgagagcctggtggacagatggatcagaagcagactgaccgaggccgtgagactgagcaaccagggcttccaggcctacgacttccccgccgtgaccaccgcccagtacagcttctggctgtacgagctgtgcgacgtgtacctggagtgcctgaagcccgtgctgaacggcgtggaccaggtggccgccgagtgcgccagacagaccctgtacacctgcctggacgtgggcctgagactgctgagccccttcatgcccttcgtgaccgaggagctgttccagagactgcccagaagaatgccccaggccccccccagcctgtgcgtgaccccctaccccgagcccagcgagtgcagctggaaggaccccgaggccgaggccgccctggagctggccctgagcatcaccagagccgtgagaagcctgagagccgactacaacctgaccagaatcagacccgactgcttcctggaggtggccgacgaggccaccggcgccctggccagcgccgtgagcggctacgtgcaggccctggccagcgccggcgtggtggccgtgctggccctgggcgcccccgccccccagggctgcgccgtggccctggccagcgacagatgcagcatccacctgcagctgcagggcctggtggaccccgccagagagctgggcaagctgcaggccaagagagtggaggcccagagacaggcccagagactgagagagagaagagccgccagcggctaccccgtgaaggtgcccctggaggtgcaggaggccgacgaggccaagctgcagcagaccgaggccgagctgagaaaggtggacgaggccatcgccctgttccagaagatgctgtag

SEQ ID NO: 304979 - DNA, 867 bp, Artificial Sequence
  derived and/or modified sequence
tgaaaggagagaggtctgtttagaggcattgaggacaaccccatggtggttcccctgtgcaacagatccaaagacgtcgtggagccactcctcaggccccaatgggagtggtgcattagtcgccagctatggtggggacatcgcattccagcctacttcgtgacagtcagtgatcccgccgtgccacccggcgaggaccctgatggccgatactgggtgtccgggcggaacgaggccgaagctagagagaaggccgcaaaggagttcggcgtgagcccagataagatcagcttgcaacaagatgaggatgtgctcgacacctggttctctagtggcctcttcccactttcaattttgggatggcctaaccagagtgaagatctctccgtattctatcccggaacactgctagagactgggcacgatattctatttttctgggtagctagaatggtgatgctaggtctcaagttaaccgggcgactacccttccgtgaagtctatctacacgccatcgtgagggatgctcatgggcgaaagatgtctaagagcctgggaaatgtaatcgatcctctggacgttatttacgggattagccttcaagggctgcacaaccaattactgaacagtaacttagacccttccgaggttgaaaaggccaaagaggggcagaaggccgacttccccgctggcattcccgagtgcgggaccgacgcactgagattcggtctctgtgcctacatgagccaaggccgagatattaatttagacgtgaatcgtatactgggttacagacatttttgcaataaactgtggaacgccacaaaattcgccctcagaggtttgggtaaaggctttgtcccgtag

SEQ ID NO: 304980 - DNA, 867 bp, Artificial Sequence
  derived and/or modified sequence
tgaaaagaacgcgggttatttcgcgggattgaggataaccctatggttgtgccactatgtaataggagcaaagatgtggttgaacctttacttcggccgcagtgggagtggtgcatcagtaggcagctctggtggggacatcgaattcctgcttattttgtcaccgtctcggaccccgccgtgccccctggagaggatcctgacggaaggtattgggtgtctggcaggaacgaggctgaagcaagagaaaaggcagccaaggaattcggtgttagtccagacaagatctcattacagcaagatgaagacgtgttagatacatggttctcctccggtctcttccctctctctatccttggctggcctaatcaaagcgaagatcttagcgttttttatccaggcacactgctggaaacagggcacgacatcttgttcttctgggtcgcgcggatggtcatgttggggctgaagctaacgggacgactcccgtttcgggaagtctatttgcatgccattgtcagggacgctcacgggcggaagatgagcaaaagcctggggaatgtgattgaccctctggacgtgatttacggaatctcgttacagggtctacataatcaattgcttaacagcaatctggacccttccgaggtagaaaaagccaaagagggccagaaggctgattttcccgccggaattccagagtgtggaacggacgcgctgcgattcggcctgtgcgcctacatgtcgcaggggcgggatatcaatctggatgtgaaccgaatactgggatatcgccacttctgcaacaagctgtggaatgccactaagttcgcactgcggggactggggaaaggctttgtgccctag

SEQ ID NO: 304981 - DNA, 867 bp, Artificial Sequence
  derived and/or modified sequence
taaaaggagcggggccttttccgtgggatcgaagataacccgatggtagttcctttatgtaaccggtccaaggacgttgttgagcctttgttgcgccctcaatgggagtggtgtatttccagacagctttggtgggggcaccgcattcctgcctatttcgtgaccgtatccgaccctgctgtaccccccggcgaggatccggatggcagatactgggtttccgggcggaacgaagccgaagctagagaaaaggccgctaaggaattcggcgtgagtccagataaaatcagcttgcagcaggacgaggacgtgctcgatacctggttctccagtgggctgttccccctgagcatacttggttggccaaatcagagcgaagatctctccgttttttatccaggcaccctgttggaaacagggcacgacattctgtttttttgggttgcccggatggtaatgttaggcttgaagctgaccggccgattacctttccgggaagtttatctgcatgccattgtgcgagacgctcatggcagaaagatgtctaaatcgcttggcaacgttattgatcctctagacgtgatttatggcatctctctgcaaggcctgcataatcagctgctgaactctaatttggatccatctgaggtggaaaaagctaaggagggacagaaagctgactttcccgccggcattccagaatgtggcacggatgcccttcgattcggcctgtgtgcttacatgagccagggacgggacatcaatcttgatgtgaaccgaattttgggctataggcatttctgtaataagctctggaacgctacaaaatttgctctgcggggcctgggaaaaggcttcgtgccgtag

SEQ ID NO: 304982 - DNA, 867 bp, Artificial Sequence
  derived and/or modified sequence
tagaaggagcgggggctatttagaggcatagaagataatcctatggtggtgcccttgtgtaataggagcaaggacgttgtcgaacctctcctccggccccagtgggagtggtgtattagccgccagctgtggtggggacaccggattcccgcatacttcgtgactgtttcagacccagccgtgcctccaggagaagaccccgatgggagatactgggtgtccggtagaaacgaggccgaggctcgcgagaaggcagccaaagaattcggcgtgtctccggataagattagcctgcagcaagatgaggacgtgctggacacctggtttagctccgggttattcccactctctatactgggttggccaaatcagagtgaggacctgagtgtgttttatccgggaactctgcttgagacaggccacgatattcttttcttttgggtggcacgtatggtaatgctcggcctgaagctgacgggccgcctgccgttcagagaggtctatctgcatgccatcgtgagggacgcgcacggaaggaagatgagtaagagtctgggaaatgtgatcgacccgctggatgttatctatggtatatccttacagggtttacataatcaattgctgaacagtaacctggatccaagtgaagtagaaaaggcaaaagaggggcagaaagcagactttcccgctggcatccccgagtgtggaaccgacgctctgagattcggtctctgtgcctacatgtcacaggggcgagatattaatcttgatgtcaatcgaatattagggtaccgtcatttctgtaataagctatggaacgccaccaagtttgcactacgcggcctcggcaagggattcgtgccttag

SEQ ID NO: 304983 - DNA, 867 bp, Artificial Sequence
  derived and/or modified sequence
tgaaaggaacggggacttttcaggggtattgaggataaccccatggtcgtgccactgtgtaaccgatccaaagacgtcgtcgagccattgctgcggcctcagtgggaatggtgtataagtaggcagctttggtggggccataggattcccgcatactttgtgacagtctctgacccggcggtccctccaggagaagacccagacggtcgatattgggtgagcggcaggaacgaagccgaagccagagagaaggccgcgaaagagttcggagtgtcccctgacaagatctcattacaacaggatgaagatgtgctggacacttggttctccagcggtctgtttcctcttagcatcctgggctggcctaatcagtcagaagatttgtccgtgttttaccccggtaccctgcttgaaacaggtcacgacatactgttcttctgggttgcccggatggtcatgctgggcctgaagctgaccggacgcctcccattccgagaggtgtacttgcacgctatcgtgagggatgcccacggcaggaaaatgagcaagagcttgggtaatgtgatagatcccttggacgtcatatatggcatctccctccagggtctgcacaatcaacttcttaactccaacctggaccctagtgaggtggagaaagccaaagagggacagaaagccgatttcccagcagggattccagaatgcggaacagatgcattgcggtttggcctgtgcgcgtatatgtctcaaggaagggacatcaatctggacgtcaatcgaattctcggctacagacatttttgtaataaattatggaatgcaacaaaatttgccctgagggggttagggaagggctttgtgccgtag

SEQ ID NO: 304984 - DNA, 867 bp, Artificial Sequence
  derived and/or modified sequence
tagaaggaacgtggcctattcagaggcattgaagataaccccatggtcgtgcccctgtgtaaccgctccaaagacgtggtagagccattacttagaccccagtgggagtggtgtattagccgccagttgtggtggggccaccggattcccgcatatttcgttaccgtctctgatcccgccgtgcctcctggagaagacccagacggaaggtattgggtcagcggacgaaacgaggcggaagccagagaaaaagcggccaaagaatttggggtcagcccggataaaatctccctgcagcaggacgaggacgtgctagatacctggttttcttccggcctcttcccgttgtcgatcctcggctggccgaatcagtccgaagacctcagtgttttctaccccggcactctgttagagactggtcacgacatcctctttttctgggtggctagaatggtgatgcttgggcttaagctgacgggacggctgccattccgagaagtctacctgcacgccattgtgcgggatgcacatgggagaaaaatgtccaagtcgcttgggaatgtgattgatcccctggacgttatttacggtatttctctgcagggcctgcataaccagctgctgaactcaaacctcgacccatctgaagtggagaaggccaaagaaggccagaaggcggacttccctgccggcatcccggagtgcggtaccgatgcactccgtttcggactgtgcgcatacatgtcacaggggcgcgacattaatctggacgtgaacaggatccttggctacaggcacttctgtaacaaactctggaatgctaccaagttcgcgctcagaggcttgggcaaaggcttcgtgccctag

SEQ ID NO: 304985 - DNA, 2031 bp, Artificial Sequence
  derived and/or modified sequence
atgagcactttatacgtgagcccacaccccgacgcattccccagcttgcgggccctcatagccgctcgctatggcgaggccggcgaaggccccggctggggaggggcacaccctcgcatttgccgcctaccccggttcgaagcacgtaaggctgtcctggtggctctgaaagagcgcggcttgtttaggggaatcgaggataatcctatggttgtgccactgtgcaatcgcagtaaggacgttgtggagcccctgctgcgtccccagtggtacgtaaggtgcggggagatggcacaggctgccagtgctgccgtcaccagaggggatctgagaattctccccgaggcacatcaaagaacctggcacgcgtggatggacaacatccgcgaatggtgcataagccgtcagttgtggtggggacaccggattccagcttatttcgtgaccgtttctgatcccgctgtgccccccggagaagaccccgacggccgctattgggtgtccggtaggaacgaggccgaagcgcgcgagaaggccgcgaaggagttcggagtctctcctgacaagatcagcctgcaacaggacgaagatgttctcgatacctggttctcttccgggctttttcctctcagcatcttaggatggcctaaccaaagtgaagatctcagcgtcttctacccaggcaccctattggagacaggacatgatattttgtttttttgggtggctcgaatggtcatgctaggcctgaaattaactggtcggcttcctttccgtgaggtttacctacacgcaattgttcgggatgctcatggcagaaagatgtccaagtctctgggcaatgtgatcgatccgttggatgtgatctacgggattagtctgcagggtcttcacaaccagcttttgaattctaatttggacccatcggaagtggagaaggctaaggaggggcagaaggccgattttccagctggcattcccgaatgcggcaccgatgcactccgcttcggcctctgcgcatatatgtcgcagggacgcgatatcaacctagacgtgaacagaatcctaggctacaggcatttctgcaataagctgtggaacgctacaaagtttgctctgcgcggtctcgggaagggcttcgttccatcccccacttcacaacctgggggacacgagagtctggtcgatcgctggattaggtctcgactaactgaagctgtgcgcctgtctaatcaaggtttccaggcatatgattttcctgctgtaaccaccgcacaatacagtttttggttgtacgaactttgtgacgtctacctggagtgtctgaagcccgttctcaacggggtcgatcaggtggctgcggagtgcgcacgccagaccctgtatacttgcctggacgtaggattgcggctcctctccccttttatgccgttcgttacagaggagctgttccaaaggttgccgaggaggatgccacaagcccctccttcactgtgtgtgactccatacccggagccatccgagtgcagctggaaagacccagaggccgaggcggcattggagctggccctgtccattacccgtgcagtgcggtcgctgagagctgactacaacttgaccagaatccgccctgactgttttctggaagtggccgatgaagccacgggggccttagccagcgccgtgagcggctacgtccaggcgttagcaagcgctggcgtggtagcagtactggctctgggcgcgcccgccccccagggctgtgcagtggccctggccagtgacagatgttccatccacctacaattgcagggattggtggatcctgccagagagcttggtaaactgcaggcaaaacgagtggaggcacagagacaagcacagagactgagggagaggagggccgcttctggctacccggttaaggtgcccctcgaggtgcaggaggccgacgaggccaagttgcagcagacagaggccgagctgcggaaagtcgatgaagccatcgccctctttcagaaaatgctatag

SEQ ID NO: 304986 - DNA, 2031 bp, Artificial Sequence
  derived and/or modified sequence
atgagcacactctatgtgagccctcaccctgacgctttcccctctctgagagccctgattgccgccaggtatggggaggccggagaaggcccgggttggggcggggcccatccaagaatttgtcggcttccacgcttcgaggctcggaaggcggttttggtggcattgaaggagagaggactttttcggggaatcgaggataaccctatggtggtccccttatgtaatcgctctaaagacgttgttgagcccctactgcggccgcagtggtacgtacggtgcggggaaatggcccaggcagcaagcgcagccgtgacccgaggggatctcagaatcctccctgaagcccatcagcgcacctggcatgcttggatggataatatcagagagtggtgtatttctcgccagttgtggtgggggcatcggatccccgcgtactttgtgactgtttctgacccagcggtaccaccaggtgaagaccccgacggccggtactgggtgagcggacgaaacgaagctgaggctagggagaaggctgctaaggagttcggtgtgagccccgataaaatctccctgcagcaagacgaggacgtgctggatacttggtttagtagcggtctgttcccactcagcatcctgggctggcccaaccagtctgaggacctcagtgtattctaccctggcaccctactagaaacaggacatgatatactatttttttgggtcgcgcgaatggtgatgctagggctgaagctaaccgggcgtctccctttccgcgaggtctacctgcacgccatcgtgcgtgatgcacatggtcgtaagatgtctaaatcgcttggaaacgttatcgatcctctggatgtgatttatggcatttcactgcaggggctgcacaaccagctcttgaacagcaatctggacccctctgaagtggagaaagcgaaagagggccaaaaagcagactttcctgccggcatacctgagtgcggcacagacgccctcagattcggcctgtgtgcatatatgtcgcagggtcgcgacattaatcttgatgtgaacaggatccttggctatagacacttctgcaataagctctggaacgccaccaaatttgctctccgagggctcggtaagggcttcgtgccaagccctaccagccagccaggcggacacgagtcccttgtcgaccgctggatccgttcccggcttactgaagcagtccgactcagcaatcagggcttccaggcctatgattttcccgctgtcaccactgcccagtactcattctggctttatgagctttgtgatgtctacttggagtgccttaaaccagtattgaacggagtggaccaggtggcggccgagtgtgccagacagaccctgtacacctgcctggatgttggcctaaggttattatctcccttcatgcccttcgtgactgaggaactctttcagcgtttgcctcgccggatgccacaggccccaccatcactgtgcgtgaccccatatcccgaacctagtgagtgttcgtggaaggatccagaggctgaggcggccttagagctggccctgagcattacccgcgccgtccgcagtctgcgcgccgattacaatctgacccgcataaggcccgactgcttcctggaggtagcagacgaagctacaggcgctctggcgtcggcggtctccgggtatgttcaggcgttagcatccgcaggcgtcgtcgccgtgctggccctgggggcccccgcccctcagggctgtgcagtcgcacttgctagcgatcggtgttccattcacctccagttgcaggggttggtcgatcccgccagggaacttggaaagctccaggccaagcgggtggaggcccaacgccaggcacagagactccgggaacggcgagcagcatctggttatcccgtgaaagtgccccttgaggtgcaggaggccgacgaagccaaattacagcagactgaggctgaattgaggaaggttgatgaagctatcgcactgttccagaaaatgctgtag

SEQ ID NO: 304987 - DNA, 2031 bp, Artificial Sequence
  derived and/or modified sequence
atgagtacgttgtacgtgagtccccatccggacgcattccctagcctgagagcgctcatagccgctcggtatggcgaggctggagaggggcccggttggggaggtgctcaccctaggatctgtcgactgcctcgtttcgaggctaggaaagccgtattagttgccctcaaagagaggggactgttccgcggcattgaagacaacccaatggttgtgccactctgcaacagatccaaggatgtcgttgagccgcttctccgccctcagtggtacgtgagatgcggagagatggctcaggcagcatcagcagctgtcacccggggtgacctgagaattcttcccgaggctcatcagagaacctggcacgcctggatggataacattcgcgagtggtgtatctcaagacagttgtggtggggacacagaatcccggcatattttgtcacagtatccgaccccgcagtaccaccgggggaggacccggacgggcgatactgggttagtggcaggaatgaagcagaagcccgcgaaaaggccgctaaagagttcggcgtgagtccagataaaatctcattacaacaggacgaagatgtgctcgacacctggttcagctctggcttgttcccactctcaattctggggtggcctaatcagagcgaagacctgagcgtcttctatccaggtactctgctcgagacaggccacgacattctctttttctgggtggcaaggatggtcatgctgggactgaaactgaccggaagactcccatttagggaagtgtaccttcatgccattgtgcgcgatgcgcacggtaggaagatgtccaagtcccttggcaacgtcatcgatcctttggacgtgatttatggaatttcactgcagggactacacaaccagctgctaaactctaacctggacccatccgaagtcgaaaaggccaaggaagggcagaaggccgacttccctgctgggattcccgaatgcggcactgacgcactgagattcggactgtgcgcttatatgtcgcagggacgcgacatcaatctggatgtgaaccgaatactaggatatcggcacttctgtaataaactttggaacgctacgaaattcgctcttagagggttggggaagggtttcgtgccatcccctaccagccagccaggcggacatgagagtctcgtggacagatggattagatcaaggctcacagaggccgtgaggctaagcaatcaagggtttcaggcatatgactttcccgcagtgaccacagctcagtacagcttctggctgtacgagctttgtgatgtgtatctggagtgcctgaagccagtcctgaacggcgtggaccaggtggccgcagagtgtgctaggcaaacgctttacacctgtctggacgtgggcctgaggcttttatctccatttatgccatttgttactgaagaactctttcagaggctgccccgacggatgccccaggccccaccaagtctgtgcgttacaccgtatcccgagccgagcgagtgctcctggaaggaccctgaggcagaagccgccctcgaacttgcactaagcattaccagagccgtccggagcctgagggcagattacaatcttactaggatcagacctgactgttttctggaagtggccgacgaagctactggggcactcgcgtccgccgtctccgggtatgtgcaggctcttgcttcagccggcgtggtcgcagtgctcgcacttggggcccctgcaccccaggggtgcgcggtcgccctcgcaagtgatcgctgctccatccacctgcagctacaaggattagtggaccccgcaagagagctcggcaaactccaggctaaacgcgtggaagcccaacgccaggcacagagactccgagaacggcgcgccgcctccggttatcctgtcaaggtgcccctggaagttcaggaagcggacgaggccaagctgcagcagaccgaagccgagttgcgcaaagtagatgaagctattgccctttttcaaaagatgctttag

SEQ ID NO: 304988 - DNA, 2031 bp, Artificial Sequence
  derived and/or modified sequence
atgtcaacactatacgtgagccctcatcccgacgctttcccctctctacgtgccttgatcgcagctagatatggagaggcgggagagggtccgggctgggggggcgcacatccccgcatctgccgcctgccacgtttcgaggcccggaaagctgtgttagtggccttgaaagagaggggcctgtttagaggtatcgaggacaaccctatggttgttcctctgtgcaatcggtccaaggacgttgttgagccccttctaagaccccagtggtacgttcggtgcggagaaatggcccaagccgctagtgctgccgtgacgcggggtgaccttcggatcctgcctgaagctcatcagagaacatggcatgcttggatggataatattagagagtggtgtattagcaggcagttgtggtgggggcatcgcatccccgcctactttgtcacggtaagtgaccctgccgtgccaccgggcgaagaccccgacgggcggtactgggtgagtggacggaatgaagcagaggcccgggagaaggctgcgaaagagtttggagtctcaccggacaagattagcctgcagcaagacgaggatgtgcttgacacctggtttagttccggcctctttcctctgtctatcctaggatggccaaaccaaagcgaagacctgtcagttttctatccggggaccttactcgagaccggccatgatatactttttttctgggtggcccggatggtaatgttgggcctgaaactgactggccgtctgccttttagggaggtgtatcttcatgccatagtaagggacgcacatggcaggaaaatgagcaaaagccttggcaatgtaatcgaccccctggacgtcatttatggtatttctttacagggcctgcataaccagctgttgaattcaaacctggatcctagtgaagtcgagaaggctaaggagggacagaaagctgactttccagccggcattcctgagtgtggcacagacgccctgaggttcggactgtgtgcatacatgtcacaagggcgcgatatcaacctcgacgtgaataggatccttggctatcgccacttttgcaataaactgtggaacgcaacaaagtttgcacttcgaggcctggggaaaggatttgtgccaagccccacttcacagccggggggacacgagtctcttgtggatcgatggattagatccagattaaccgaagccgttcggctcagcaatcaaggtttccaagcgtacgattttcccgccgttacaactgcccaatacagcttctggctgtacgagctctgcgatgtgtacctcgaatgcctcaaaccagtgttgaacggtgtggatcaagtggctgcggaatgcgcacgccaaactctgtacacttgcctagatgttgggttgagactgctgtcgccctttatgcctttcgtaacagaggagctctttcaaagactccctagacggatgccccaagctccccccagtctgtgcgtgactccatacccagagccatctgaatgtagctggaaggacccggaggcagaagcggctttggagttggccctgagcataacgcgggccgtgaggtcactccgggccgactataatttaacaaggataagaccagactgtttcctggaagttgccgatgaggcaacgggcgccctggcctcggctgtctctggctatgtgcaggcactcgcgtctgcaggtgtagtcgccgtcctagctcttggagcacccgctcctcagggctgtgccgttgccttggcaagtgatagatgctcaatccacttgcagcttcagggcctggtcgaccctgctcgagaactggggaaattgcaggctaagcgggtcgaagcacagcgccaggcccagcggctgcgggagcgaagggccgcatcaggttaccccgtcaaggtgccactcgaggtccaggaggctgacgaagccaaactgcaacaaacagaggccgaattgaggaaggtagatgaagcaattgccctgttccagaaaatgctctag

SEQ ID NO: 304989 - DNA, 867 bp, Artificial Sequence
  derived and/or modified sequence
tgaaaggagcggggcctcttccggggcatcgaggacaaccccatggtggtgcccctgtgcaacagaagcaaggatgtggtggagcccctgctgcggccccagtgggagtggtgcatcagccggcagctgtggtggggccaccgcatcccagcctactttgtgacagtgtctgaccctgctgtgcccccaggagaagatcctgatggccgctactgggtgtctggaagaaatgaagctgaggcccgggagaaggccgccaaggagtttggagtgtccccagacaagatcagcctgcagcaggatgaagatgtgctggacacctggttcagcagcggcctcttccccctgagcatcctgggctggcccaaccagagcgaggacctgtctgtgttctacccaggcaccctgctggagactggacatgacatcctcttcttctgggtggccaggatggtgatgctgggcctgaagctgaccggccgcctgcccttccgggaggtgtacctgcacgccatcgtgagagatgcccacggcaggaagatgagcaagagcctgggcaatgtgattgaccccctggatgtgatctacggcatcagcctgcagggcctgcacaaccagctgctgaacagcaacctggaccccagcgaggtggagaaggccaaggagggccagaaggctgacttccctgctggcatcccagaatgtggcacagatgccctgcgcttcggcctgtgtgcctacatgagccagggccgggacatcaacctggatgtgaaccgcatcctgggctaccgccacttctgcaacaagctgtggaatgccaccaagtttgccctgcggggcctgggcaagggctttgtgccctag

SEQ ID NO: 304990 - DNA, 2031 bp, Artificial Sequence
  derived and/or modified sequence
atgagcaccctgtatgtgagcccccacccagatgccttccccagcctgcgggccctgattgctgcccgctacggggaggccggggagggccctggctggggcggggcccacccccgcatctgccgcctgcccaggtttgaggccaggaaggctgtgctggtggccctgaaggagcggggcctcttccggggcatcgaggacaaccccatggtggtgcccctgtgcaacagaagcaaggatgtggtggagcccctgctgcggccccagtggtacgtgcgctgtggggagatggcccaggccgccagcgctgctgtgaccaggggggacctgcgcatcctgcctgaggcccaccagaggacctggcacgcctggatggacaacatccgggagtggtgcatcagccggcagctgtggtggggccaccgcatcccagcctactttgtgacagtgtctgaccctgctgtgcccccaggagaagatcctgatggccgctactgggtgtctggaagaaatgaagctgaggcccgggagaaggccgccaaggagtttggagtgtccccagacaagatcagcctgcagcaggatgaagatgtgctggacacctggttcagcagcggcctcttccccctgagcatcctgggctggcccaaccagagcgaggacctgtctgtgttctacccaggcaccctgctggagactggacatgacatcctcttcttctgggtggccaggatggtgatgctgggcctgaagctgaccggccgcctgcccttccgggaggtgtacctgcacgccatcgtgagagatgcccacggcaggaagatgagcaagagcctgggcaatgtgattgaccccctggatgtgatctacggcatcagcctgcagggcctgcacaaccagctgctgaacagcaacctggaccccagcgaggtggagaaggccaaggagggccagaaggctgacttccctgctggcatcccagaatgtggcacagatgccctgcgcttcggcctgtgtgcctacatgagccagggccgggacatcaacctggatgtgaaccgcatcctgggctaccgccacttctgcaacaagctgtggaatgccaccaagtttgccctgcggggcctgggcaagggctttgtgcccagccccaccagccagcccggcggccacgagagcctggtggaccgctggatccgcagccggctgacagaggccgtgcggctgagcaaccagggcttccaggcctatgacttccctgctgtgaccacagcccagtacagcttctggctgtatgagctgtgtgatgtgtacctggagtgcctgaagcctgtgctgaatggagtggaccaggtggccgcagaatgtgcccggcagaccctgtacacctgcctggatgtgggcctgcggctgctgagccccttcatgccctttgtgacagaggagctgttccagaggctgcccaggaggatgccccaggccccacccagcctgtgtgtgaccccctacccagagcccagcgagtgctcctggaaggaccctgaggccgaggccgccctggagctggccctgagcatcaccagggctgtgcgcagcctgcgggctgactacaacctgacccgcatccggccagactgcttcctggaggtggctgatgaggccactggagccctggccagcgctgtgtctggctacgtgcaggccctggccagcgctggggtggtggccgtgctggccctgggcgccccagccccccagggctgtgctgtggccctggccagtgaccgctgcagcatccacctgcagctgcagggcctggtggaccctgcccgggagctgggcaagctgcaggccaagagggtggaggcccagaggcaggcccagaggctgcgggagaggagagctgccagcggctaccctgtgaaggtgcccctggaggtgcaggaggctgatgaggccaagctgcagcagacagaggccgagctgaggaaggtggatgaggccatcgccctcttccagaagatgctgtag

SEQ ID NO: 304991 - DNA, 867 bp, Artificial Sequence
  derived and/or modified sequence
tgaaaggagcggggcctgttccggggcatcgaggacaaccccatggtcgtgcctttgtgcaataggtctaaggacgttgtggaaccgctgctgcgtccccaatgggagtggtgcatatctcggcaactttggtgggggcacaggataccggcctacttcgtcaccgtgtccgaccctgcagtccccccaggtgaagaccctgacggcaggtattgggtatctggccgaaatgaggctgaggctcgtgagaaagcagcaaaggaattcggggtatcacccgacaagatttctctccaacaagacgaggacgtgctggatacttggtttagctccggtctcttcccgttaagtatactgggctggccaaatcaatcggaggatcttagcgtcttctaccccggaacgctgctagagaccgggcacgatatcttgttcttttgggtggccaggatggtcatgctggggctcaagttgacaggaagactgccattcagagaagtttaccttcacgctatcgtacgagatgcgcatggcaggaaaatgagtaagtcactcggcaatgtaatcgacccgttagacgtaatttacgggatatcactccagggcttgcacaaccagctgctaaatagcaacctcgacccttccgaggtggaaaaagcaaaggaagggcagaaggccgatttccccgcagggatcccggaatgtggcaccgatgctctgcggttcgggctttgtgcctacatgagtcaaggcagagatattaatttggacgtgaacagaatcctgggataccgccatttctgtaataagctatggaatgcgacaaaattcgccctacgaggcctggggaagggcttcgtgccctag

SEQ ID NO: 304992 - DNA, 867 bp, Artificial Sequence
  derived and/or modified sequence
tgaaaggagcggggcctgttccggggcatcgaggacaaccccatggtcgtgcctctatgcaataggtcaaaggacgttgtcgaacccctactcagaccccagtgggagtggtgtatttcacggcagctgtggtggggacacaggattccagcctactttgtgacagttagtgacccagccgtcccccctggtgaggacccagacggtaggtactgggtgtcgggccggaacgaagctgaagcgagagagaaagccgcgaaagagttcggcgtctcccctgacaagatttccctgcaacaggatgaggatgtgctggacacttggttcagttccggcctgtttcctctctctatactggggtggcccaatcagtcggaggatctgagtgtgttttacccaggcaccctcctggaaactggacatgatatattatttttttgggtagccagaatggtaatgttgggcttaaagttgactggtcgtttgccattccgagaggtatatctgcatgccatcgtgagggacgcacacgggcggaaaatgtccaagtccctcgggaacgtgatcgatccactagacgtcatctatggtatatccttgcaagggctgcacaatcagctcctcaatagcaacctggatccgtccgaggtcgagaaggcaaaagaagggcagaaggcagacttcccagcagggattccagaatgtggcaccgatgccttgcgcttcgggctgtgcgcgtatatgtcacagggccgagatatcaatctggatgtgaaccgtatacttggctaccgtcacttctgcaataaactctggaatgctaccaaattcgcactcaggggactcggtaaaggctttgttccatag

SEQ ID NO: 304993 - DNA, 867 bp, Artificial Sequence
  derived and/or modified sequence
tgaaaggagcggggcctgttccggggcatcgaggacaaccccatggtggtcccgctctgcaatagatcaaaggatgtcgttgagcccttgctgcgccctcaatgggagtggtgcatcagtcgacagctgtggtggggccataggatccctgcatacttcgttaccgtgagcgatccagcggtgcctcccggcgaagaccctgacgggcgctattgggtgtctggccgcaacgaagctgaggctagagagaaagcggcaaaagagtttggggtgtctcctgacaaaataagcctccagcaggacgaggatgtcctagacacctggttcagcagcggcttgtttccactgagcattctgggttggcccaatcagagcgaagacctgagtgtcttctacccaggaactctgctggaaacagggcatgatatcctcttcttttgggtggccagaatggtaatgctgggcttgaagctgaccggtaggttgcctttcagggaggtttatttgcacgccattgtacgggatgcacatggcaggaagatgtcaaaatcactaggtaacgtcatcgaccctctggacgtgatatatggcatttccctgcaagggctccacaaccagctattgaacagcaacctggatccatccgaagtcgaaaaggctaaagaaggccagaaagcggattttcctgccggaatcccggagtgtgggacggacgcactgcgatttggactgtgcgcttatatgagccaggggagggatataaatcttgatgttaatcggatcctcggctacagacacttctgcaacaaactttggaacgcaacaaagttcgctctgcgggggctgggcaaaggttttgtgccgtag

SEQ ID NO: 304994 - DNA, 867 bp, Artificial Sequence
  derived and/or modified sequence
tgaaaggagcggggcctgttccggggcatcgaggacaaccccatggtggtgcctctgtgtaatcgctcgaaggacgtggttgaacccctgctgcggccccagtgggaatggtgtataagccggcagctatggtggggccaccgcatccctgcttatttcgtgactgtgtccgatcctgccgtgcctcctggcgaggaccctgatgggcgctactgggtgtctggtcgcaacgaggccgaggcacgcgaaaaggcagccaaggaatttggagtttctcctgataaaatctcgctgcagcaggacgaagatgtactcgacacatggttttccagcgggctgtttccactaagtatcttaggatggccaaaccagtctgaggacctgtctgtgttctacccagggacactcctggaaacaggtcacgatatactcttcttctgggtggctcggatggtcatgctcgggctcaagttaacaggtaggctcccatttagagaagtgtatcttcacgcgatcgtaagggacgctcacgggcgcaagatgtcaaagagccttggaaatgtcatcgaccctcttgatgtgatctatggcatctcgctgcagggcttacacaaccagttgctcaactccaacctggacccctcagaggttgagaaggccaaggagggccagaaggccgatttccctgccggaattccagaatgtggcacagatgcgcttcgtttcgggctgtgtgcttacatgagccagggaagagacatcaaccttgatgttaaccgaattctcggctaccgccacttttgcaacaaactgtggaatgcaactaagttcgccctccgaggtctcgggaaggggttcgtgccttag

SEQ ID NO: 304995 - DNA, 867 bp, Artificial Sequence
  derived and/or modified sequence
tgaaaggagcggggcctgttccggggcatcgaggacaaccccatggttgtgcccctctgtaacagaagtaaagacgtagtggaaccgctcctgcgcccacagtgggagtggtgcatctctcggcagctctggtggggccataggattccggcttacttcgttaccgtctcagaccccgccgtgcctccgggcgaggaccctgacggcagatattgggtttccggtcgaaatgaggctgaggctcgcgaaaaggccgccaaagagtttggagtcagtcctgacaagattagtctgcagcaggacgaggacgtgttggatacttggtttagctctggactgttcccgcttagcatacttggatggccgaatcaatccgaggatctgtctgtgttctacccgggaacccttctcgagactggccatgatattctgttcttctgggtggcccgcatggtgatgctgggcctgaaactgaccggccgtttacctttcagggaggtctatctacatgcaattgtcagggacgcccatggccgaaaaatgtccaagagtctcggcaatgtcatcgaccctttagacgtgatatacggaatttctttgcagggattacacaaccaacttctgaacagcaatttagacccctcagaggttgagaaggccaaggaaggacagaaggcagactttccagcaggtatcccagagtgtggaacagacgcccttcgctttggcctttgcgcctacatgagccaggggcgcgatatcaacttggacgtaaacagaatactaggttataggcatttctgcaacaaactctggaatgctacaaaatttgcgctgcgcgggctgggaaaaggatttgtgccatag

SEQ ID NO: 304996 - DNA, 867 bp, Artificial Sequence
  derived and/or modified sequence
tgaaaggagcggggcctgttccggggcatcgaggacaaccccatggtcgtacccctttgtaatcgcagcaaggacgtggtggagcctcttttgcggcctcaatgggagtggtgcatcagtcggcagctttggtggggccaccggattccggcttacttcgtaacggtgtctgatcctgctgtaccacctggggaagatccagacggacggtattgggtctcgggtaggaacgaagccgaggccagggagaaagccgcgaaggagttcggagtgtcccctgacaagatttcactccagcaggatgaggacgtattagatacatggttttcctctgggcttttccctctctcaatcctggggtggccaaatcagtccgaagatctctcggtattttaccccggaactctcttagagaccggtcatgacattctctttttttgggtcgcacggatggttatgctgggccttaaactgactggtcgtctgccatttcgcgaagtgtatctgcacgccatagtccgggatgcccacgggcgcaaaatgtctaagtctctgggcaacgttatcgacccacttgacgtcatatacggtatcagcttacagggcctacataatcaactgttgaacagcaacctcgaccctagtgaggtggagaaggcgaaggagggccagaaggctgatttcccagccggcatccccgagtgcggaacagatgccctcaggtttgggctgtgtgcctacatgtcgcaggggcgggatattaatctggacgtgaaccgcatcctagggtatcgacacttttgcaacaagttgtggaatgctaccaaatttgctctcagagggttaggcaaggggtttgtgccttag

SEQ ID NO: 304997 - DNA, 2031 bp, Artificial Sequence
  derived and/or modified sequence
atgagcaccctgtacgtgagcccccaccccgacgccttccccagcttgcgtgctctgatcgcggccaggtatggggaggccggggagggaccgggctggggcggagctcacccgcgcatttgcagactgcctcgttttgaagctaggaaagcagtgctcgtggctctgaaagaacgcggactgttcaggggaatagaagataaccccatggtggtcccactgtgcaatagatctaaagacgttgtagagcccttgctgagacctcaatggtatgtgaggtgcggggagatggcgcaggcggcaagcgccgccgttacaaggggggaccttaggatactacctgaagcgcatcagagaacttggcacgcttggatggataacatccgcgagtggtgtatttctcgccaactctggtgggggcatcggattcccgcatactttgtgaccgtcagcgacccagcagttcctcccggtgaggaccctgacgggagatactgggtgagcgggagaaatgaagcggaggccagagagaaagctgccaaggaattcggggtctcccccgataagatcagtctgcagcaagatgaggatgtgctcgatacatggttctcttccggccttttccccctgtccattctcggctggccgaaccaatctgaagacctaagtgtgttctatcccggtactttgttggagacagggcatgatatattgttcttttgggttgcccgaatggtcatgctgggactgaagctgaccggccggctccctttccgagaagtatatctgcacgctatcgtccgagacgcacacggcaggaaaatgagtaagtctcttggcaacgttatcgaccccctggatgtaatctacggcatttcccttcagggactccacaatcagctcctcaactccaatctggacccaagcgaagtcgaaaaggccaaggaaggtcagaaagccgatttccctgccgggattcccgaatgcgggactgatgcactgcggtttgggctctgcgcgtacatgagtcagggcagagacatcaacctcgacgtgaacagaatcctaggctacagacacttttgtaataaactgtggaacgctaccaaatttgctctgcggggattggggaagggattcgtcccctccccaacaagccagccaggcgggcatgagagcctagtggacagatggatcagaagtagactgaccgaagccgtcagactgtctaaccaaggatttcaggcctatgactttccagctgtcaccacagcccagtactccttttggttgtatgagctctgcgatgtgtatctggaatgcctgaagccagtgcttaatggagttgaccaggtagctgccgaatgtgcacgccaaactctgtacacctgtctggacgtcggcctccggctcctcagcccattcatgcccttcgtgacagaggagctgttccagcggctgccaaggcggatgccccaagcgcctccctctttgtgtgtgacaccataccccgagccctcagagtgctcatggaaggaccccgaggctgaagccgctctggagttggctttgtccattacgcgggctgtgcgctcactgagagctgactacaacttgacacgaatccgcccagactgttttctggaagttgcagacgaggccacgggagctctggcttccgccgtcagcggctatgtgcaggcactggctagcgccggagtcgtcgctgtgctcgcgttaggggccccagccccccagggatgcgccgttgctttggcaagcgaccggtgctcgatccacctacagctgcagggcctcgtggaccccgctcgggagttaggcaagcttcaggcaaagcgagtggaggctcagagacaggctcagcgtctacgggagcgacgcgcagcaagcgggtaccctgtgaaggtcccactggaagtccaggaggccgacgaggctaaactccagcagaccgaggcggagttaagaaaggtagacgaagccatcgccctatttcagaagatgctctag

SEQ ID NO: 304998 - DNA, 2031 bp, Artificial Sequence
  derived and/or modified sequence
atgagcaccctgtacgtgagcccccaccccgacgccttccccagccttagagccttaattgcagcccggtatggcgaggctggagagggacccgggtgggggggggcccatcctcgcatctgtaggctgccgaggttcgaggcacgaaaagctgtgctggtggctctgaaagagcgcgggctgttccggggaattgaggataaccctatggtggtgccattgtgtaacaggagcaaagacgttgtcgaacccctcttacggccacagtggtatgtccggtgtggagagatggcccaggccgccagcgccgctgtgacacgaggtgacctacgcatcctccccgaggcacaccaacggacatggcatgcatggatggacaatatcagagagtggtgcatttcacgccaactctggtggggtcaccgcatcccagcctacttcgtaaccgtcagcgatcccgcagtgccccccggcgaagaccccgacggacgttactgggtgtccgggagaaatgaagcggaagctagagaaaaggcagctaaggaatttggggtgtcccctgacaagattagcttgcaacaggatgaagacgtgctagacacttggttcagttccggactgtttccattgtcaattcttggctggccaaaccaaagcgaagatctgagcgtgttctacccaggaacgctgctcgagactggtcacgatattctgtttttctgggttgctagaatggtgatgctcgggctgaagttaacaggcaggctgccatttcgcgaggtctacctccacgctatcgtgcgagatgcccatgggcgtaaaatgtccaaatccctggggaacgtgattgatcctcttgatgtgatttacgggatcagcctgcagggtctgcataaccagctcttgaactctaatttggacccttccgaagtagagaaagcaaaagaaggacagaaggccgacttccctgctggtatccccgaatgtgggacagacgcgcttaggtttgggttatgcgcctacatgagtcagggccgtgatatcaatctggatgtgaaccgaatcctcggctatcggcacttctgcaacaaactttggaatgctacgaagttcgctctgcgcggccttggtaaaggattcgtcccttcccctacatcgcagcccggtggacatgaatctctggtggataggtggatacgcagcaggctgaccgaggcagttcgtctgagtaaccagggatttcaggcctacgatttcccggcagtcaccacggcccaatattcgttctggttgtatgaactgtgcgatgtctacttagagtgcctcaagcctgtgcttaatggcgtcgatcaggtcgccgctgaatgtgctcggcagactctgtatacttgcctggacgtgggtcttcgcctactgagtccatttatgcccttcgtgactgaggagctgtttcagagactcccacggcgtatgccccaggccccgccctccttatgtgtgaccccctatcctgaaccttctgaatgcagctggaaggaccccgaagcagaggccgctttggaactggccctttcgatcacacgcgccgtccgcagcctgcgggccgactacaacctgactcgcattagacctgactgctttctcgaagtggcggatgaagcaaccggcgccttagcctcagctgtgagtgggtacgtgcaggccttggcaagcgccggagtggtcgccgttctggccctgggagctcccgcgcctcagggttgtgccgtggccctggcaagcgaccgatgcagcatacacctgcagctccagggtctggttgatccagctagggaactggggaaactccaggcaaagcgtgtcgaagcacagcggcaagcgcaaaggcttagagagcgaagggccgccagtgggtacccagtaaaagtgccacttgaagtgcaggaagcagacgaagcaaagctccagcaaactgaggcagagctcagaaaagtagacgaagcgatcgccctgttccagaagatgttatag

SEQ ID NO: 304999 - DNA, 2031 bp, Artificial Sequence
  derived and/or modified sequence
atgagcaccctgtacgtgagcccccaccccgacgccttccccagcctccgtgctctcatcgctgctcgttacggcgaagcgggggaggggcccggctggggtggcgcccacccgagaatatgtcgcctgcccaggtttgaggccagaaaagccgtgctggtcgccctgaaagagaggggtctctttcggggcatcgaggataatccaatggtcgttcctttgtgcaaccgatctaaagacgttgtcgagccattactgcggcctcagtggtacgtccgttgcggggaaatggcccaggccgcatctgcagccgtcacccgaggtgacttgagaatattgcccgaagctcaccagaggacctggcacgcctggatggataatatccgtgaatggtgtattagtcgacagctgtggtggggccacagaattccagcctatttcgtgaccgtttccgatccggcggtccctcccggggaggatccagatgggcgctattgggttagtggccggaatgaggccgaggctcgtgaaaaggccgcaaaagagtttggcgtgagtccagacaaaattagcttgcagcaggatgaggacgtgctcgacacgtggttctctagtggtctgtttcccctttcaatcctgggctggccaaaccaaagcgaggatctgtctgtgttctaccctggcactcttctggagaccggtcacgacatactgtttttttgggttgcccgaatggtcatgctgggcctgaagctgaccggccgacttccattccgagaggtgtacttgcatgctattgtcagagatgcccatggccggaaaatgtccaaaagcctcggcaatgtcatcgaccctcttgatgtgatttatggcatcagcctccagggcttgcacaaccagctgctcaacagtaacctggatcctagtgaggtcgaaaaagctaaggaaggacagaaggctgacttccccgccggcatccctgagtgcggaacagacgctctgcggtttgggttatgcgcctatatgtcccagggtcgagacattaatctagacgtgaaccggattctgggatacaggcatttttgcaacaagttatggaacgcaacaaagtttgctttacgaggattgggtaaaggctttgtgcccagccctaccagccagcctggcgggcatgaaagcctggtcgatcgttggatccggtcaagactcactgaggccgtgagactgtccaatcagggattccaggcatatgattttccggctgtaacaaccgcgcagtacagcttttggttgtatgaactgtgtgatgtctatctggagtgcctcaagccagtactcaacggggtggaccaggttgccgctgagtgcgcacgacagacactttatacatgtctcgacgtcggtttgcggctgctgtctccgtttatgccctttgttacagaagagctgtttcagcgcctccctcgaagaatgccgcaagcccctccgagtctgtgcgtgaccccttatcccgaacctagcgagtgcagctggaaggatcctgaggctgaagcagcgctggaactggccctgagtattactagggctgtacgctcactgcgcgctgactataatctgacacggatccggccagattgcttcctcgaagtcgctgatgaggccactggggcgctcgctagcgctgtttcaggctacgtgcaggccctcgccagtgcaggtgtggttgctgtgctcgcacttggcgcaccagccccccaagggtgcgccgtcgcactggcaagcgaccggtgctctatccatctgcagttgcagggactcgtagacccagctcgcgaattaggaaaactgcaggcaaaacgcgtggaagcccagcgccaggcccagcgtctcagggaacggcgcgccgcgagcggatatcctgtgaaagtgccgctggaggtccaagaagcggacgaggccaagctacagcagaccgaagctgagcttcgcaaggtggatgaagcaatagcactgttccagaagatgttatag

SEQ ID NO: 305000 - DNA, 2031 bp, Artificial Sequence
  derived and/or modified sequence
atgagcaccctgtacgtgagcccccaccccgacgccttccccagcctgcgggccctgatcgctgctaggtatggagaggctggtgaggggcctggctggggtggagcccacccccggatttgcagactgccccggttcgaagcacgcaaagccgttctcgtcgcattgaaagagaggggtttattccgaggcatcgaggataatccaatggtggtacctctctgcaatcgatctaaggatgtggtcgaaccactgctccggccacagtggtatgtgaggtgcggagaaatggctcaagccgcgagcgccgctgtcacaagaggcgacttaagaatacttccagaagcccatcagaggacatggcacgcctggatggacaacattcgtgagtggtgcatctctcgccagctttggtggggccataggatcccagcctacttcgtaaccgtgtccgaccctgcagtgccacccggggaggatcctgatggacgctattgggtgtccggaaggaacgaggcggaagcaagagagaaggctgccaaggagttcggcgtgtctcctgacaagatcagcttacagcaagatgaggacgtgctcgatacctggttctccagcggcctgttccccctgtcaattctagggtggcctaaccagagcgaggacctgtcagtcttttaccccgggacactgcttgagaccggacacgatattctgtttttttgggttgcccgtatggtcatgctaggcctgaaactgaccggtcggctgccgttccgggaagtgtacttacacgctatagtcagagatgcccacggccgcaagatgtcgaaatctctgggaaatgtcatagaccccttggatgtcatttatgggatctcccttcagggactacacaaccagcttctgaattccaacctcgacccctcagaagttgaaaaagccaaagaggggcaaaaggccgacttccctgccggaatccctgagtgcggaaccgatgccctgcgcttcggcctttgcgcctacatgtctcagggtagggacataaacctggatgtgaatagaatcctcggatacagacatttctgtaacaagttgtggaatgccactaagttcgctctccgcgggctggggaaaggtttcgtgccttcaccaacatcacagccaggaggtcatgagtcactggttgacaggtggatccgttctaggctcacagaggccgttagattaagcaatcagggttttcaagcttacgactttcctgcagttacaaccgcccagtactccttctggctctatgaactgtgcgacgtctacctggaatgtttaaagcctgtcctgaacggtgtggatcaggttgccgccgaatgcgcaaggcagaccctatacacatgtttagatgttggcctgagattactgtcaccctttatgcccttcgtgacagaggagctgttccagcggcttcctcgtcgtatgccacaagcaccgccttcactgtgtgtgacgccatacccagagccttctgagtgctcatggaaggaccctgaggctgaagctgccttggagttggccctgagtatcacccgggctgtgcgttctctgcgtgccgactacaacctaacacgaattcggcctgattgcttcctggaagtcgccgatgaggcgactggtgccctggcttcagcagtttccggttacgttcaggccctggctagtgcaggtgtggtggccgtgttagccctaggcgctcctgccccacagggatgcgctgttgcgcttgcttcagacaggtgctcaattcacctccagctgcaagggctcgtggaccctgcgcgcgaactggggaaactgcaggccaaaagagtcgaagctcagagacaggctcagagactgcgcgagcgaagggctgcctcaggatacccagtgaaggttcctctggaagtgcaggaggctgacgaggctaaactccagcagacagaggcggagctccggaaagtagacgaagccatcgcactcttccagaaaatgctatag

SEQ ID NO: 305001 - DNA, 867 bp, Artificial Sequence
  derived and/or modified sequence
taaaaggagaggggtctgtttcgcggaattgaggataatcctatggttgttcctctctgtaaccgctccaaagacgtcgtcgaacccctgctgcgcccacagtgggagtggtgcatttcacgccagctctggtggggccacagaatacctgcctatttcgtgacagtctccgatcccgcagtacctcctggagaggaccctgatgggcgatactgggtgtcaggccgtaatgaggcagaagctcgggaaaaagctgctaaggaatttggagtgagtcctgacaagattagtctacaacaggacgaggacgtactggacacatggttttccagcggactttttcctctctctattctaggatggccgaaccaaagcgaggacctatcagtcttttatcccggaactctgctggagaccggacatgatattttgttcttttgggtagcccgaatggttatgctgggcctgaaactgaccggacgactccccttccgcgaggtttacttgcatgcaattgtaagggacgctcacgggcgtaagatgagcaagagtctgggcaatgtcatcgatccactcgatgtgatctacggaatcagcttgcaaggacttcataaccaactgctgaacagcaatttagaccccagtgaggtggaaaaggctaaggaagggcagaaagcggatttccctgccggaattcctgagtgcggaaccgacgctctgcgctttggactgtgtgcctatatgagtcagggaagagacataaacctggatgtaaacaggattctcggataccggcacttctgcaacaagttatggaacgcaaccaagttcgcactgagaggcctagggaagggtttcgtgccatag

SEQ ID NO: 305002 - DNA, 867 bp, Artificial Sequence
  derived and/or modified sequence
tgaaaggagaggggactttttaggggaatcgaggacaaccctatggtggtgccactgtgcaatcgatcgaaggacgtggtcgaacccctcctccgtcctcagtgggagtggtgcatcagtaggcagttgtggtgggggcacaggattccagcctacttcgtcacagtgtctgacccggcagttccaccaggggaggatccagacggccgttactgggtctccggacggaacgaagccgaggcaagggagaaagctgccaaagagtttggtgtgagccctgacaaaatttctcttcagcaggacgaggatgttctggacacctggttctcctctgggcttttccccttgagcattctcggctggcctaatcagtccgaggacctcagcgtgttttatccaggtactctgctcgaaactggacacgatatactctttttctgggtggcgcgtatggtgatgctagggttaaagcttaccggaaggcttcctttccgcgaagtataccttcacgcaattgtgagagatgcccatggcaggaaaatgtccaaatccctggggaacgtcatagaccctctggacgtgatttacggcatctccctgcaaggcctgcacaatcagctgctgaattcaaacctcgatcctagcgaagttgaaaaagctaaggagggacagaaggctgattttcctgccggaatccccgaatgcggtaccgatgccctacgctttgggctgtgcgcttacatgagccaggggcgtgacataaacctagatgtgaacaggattttgggctacagacacttctgtaataagttatggaacgccactaaattcgccctgcgcggtctaggaaaagggtttgttccctag

SEQ ID NO: 305003 - DNA, 867 bp, Artificial Sequence
  derived and/or modified sequence
tgaaaggaaagggggctgtttaggggtatagaagataaccccatggtagtgcctctttgcaaccgaagcaaagatgttgtggagcctctgctgcggccacagtgggagtggtgtataagccgccagctctggtgggggcatcgcatcccagcctacttcgtaactgtttccgatcctgccgtgccacctggagaagaccctgatggacggtactgggtgtccggaagaaatgaggctgaggcacgggagaaagccgcaaaagagtttggagtgtcacccgataagattagtctgcaacaggatgaggatgtgttagacacttggttttctagcgggctgtttccgctctctattttgggctggcctaatcagtctgaagacctgtcagtgttctatccgggaaccctcctcgaaacgggccatgacattttgtttttttgggtggctcggatggtgatgctggggctcaaattgaccgggaggctgcctttcagggaggtttaccttcatgccattgttcgcgacgcccatggtcgaaaaatgagtaaatccctgggcaacgtgattgaccccctcgatgtgatctacggcattagcctgcagggattgcacaaccagttgctcaattccaacctcgatcctagcgaggttgaaaaggccaaagaaggacaaaaagctgattttcccgcaggaatacccgaatgcggaaccgatgcactccgctttggactgtgcgcatatatgtcccaggggagggacattaacttagacgtcaacaggattctgggctatcgccatttctgcaacaaattatggaacgccactaaatttgccctgcgtgggctcgggaaaggctttgtgccatag

SEQ ID NO: 305004 - DNA, 867 bp, Artificial Sequence
  derived and/or modified sequence
tgaaaggaacgagggttattccggggaattgaagacaatcccatggtggtccctctctgtaataggtcaaaggatgtggtggagccgttgctgagaccccaatgggaatggtgtattagccgacagctgtggtggggccacaggataccggcttacttcgtgaccgtcagcgaccccgcagtgcccccaggtgaggatccggatgggagatattgggtgtcagggagaaacgaagctgaagctcgggaaaaagctgccaaggaattcggggtgtcccctgataaaatcagcctacagcaggacgaggacgtcctggacacctggttctcttcgggtctcttcccactgtctattttgggttggccaaaccagtcagaggatctaagtgtcttttaccctggtactctcttggaaacaggacatgacattctgtttttctgggtggctagaatggtgatgctaggcttaaagctgacaggcagactacctttcagagaggtctatctccacgcaatcgtgagagatgcccatggtcggaagatgagtaaatctttggggaatgtgatagaccccttggatgtgatatatggcatctctttacaggggctacacaatcagctgttaaactctaatttagaccccagcgaagtcgagaaagcgaaggaaggacagaaagccgattttcccgctgggatcccagagtgtggcaccgacgcactgaggtttggactctgcgcgtacatgtcacaaggcagagacattaacctggatgtgaataggatccttgggtatagacatttctgcaacaagttatggaatgcaacaaagtttgcacttaggggtttaggtaaaggctttgtcccttag

SEQ ID NO: 305005 - DNA, 867 bp, Artificial Sequence
  derived and/or modified sequence
tagaaggaaagagggttgttcaggggcattgaggataacccgatggtcgttcccctgtgtaatcggagcaaggacgtggttgagccactcctgcgccctcagtgggaatggtgcatatctagacagctgtggtggggccaccgcatacccgcttattttgtgactgtgtctgaccctgcagtcccacctggggaagaccccgatggccgatactgggtctccgggcgaaatgaggcagaagcccgagagaaggccgcaaaagagttcggtgtgtcaccagataaaatctcattgcaacaggacgaggacgtgttggacacttggttttccagtgggctgttccctctttccatcttaggatggccaaaccagagcgaagacctgtcggtattctaccccggtacgcttttggagacaggccatgacattttgttcttctgggtggccagaatggtcatgctgggactgaaacttaccgggaggttgcccttccgcgaggtgtatctgcatgccattgtgcgagatgcccacgggcgtaaaatgagcaagagcctcgggaatgtaatagacccactcgacgtaatctatggcatttcattgcagggcctgcacaaccagctgcttaacagcaacttggatccttcagaagtagaaaaagctaaggagggccagaaagctgattttcccgctgggattccagagtgtggtacggacgctctgcggttcggcttgtgtgcttatatgtctcagggcagagatattaacctggatgtcaatcgcatcctcgggtacagacatttctgcaacaagttgtggaacgccacaaaatttgccctgaggggcttaggaaagggcttcgttccctag

SEQ ID NO: 305006 - DNA, 867 bp, Artificial Sequence
  derived and/or modified sequence
tagaaagaaagggggctgtttcgaggaatagaggataaccccatggtggtcccactttgcaatcgcagcaaagatgtggtggaacctctgctcagaccccaatgggagtggtgcatcagtagacagctatggtgggggcacaggattcctgcctatttcgtaactgtatcagacccagctgtgcccccaggcgaggatccagatggtagatactgggtgtccggcagaaacgaggcggaagctcgggagaaggcggcaaaagagtttggcgtgagccccgacaaaatttctttgcagcaggatgaggacgtgcttgatacatggttttcttctggattattccccctcagcatcttaggatggccgaaccaatcagaagatttgagcgtgttttaccccggtacattactggagacaggccacgacattctgttcttctgggtcgccagaatggttatgctgggtctcaagcttacaggcagactcccctttagagaagtttatctgcatgctatcgtgcgcgacgcgcacggcagaaagatgtcaaagagtttaggaaacgtgatcgatccccttgacgtgatctacggcatcagtcttcagggccttcacaatcagctcctcaacagcaatctggacccatcggaagtagagaaggccaaggaaggacagaaagccgactttcccgctggcataccggaatgtggaaccgatgccctgcgattcggcctatgtgcgtacatgtcacaaggacgtgatataaacctggatgtgaacagaatccttgggtatcggcacttctgtaataaactctggaacgcaaccaaatttgccctccgcggacttggtaaagggtttgtgccttag

SEQ ID NO: 305007 - DNA, 2031 bp, Artificial Sequence
  derived and/or modified sequence
atgtcaacactttatgtgtccccacacccagacgctttccctagcctgcgtgctttgattgcggctagatacggggaagcgggagaagggccaggctgggggggagcccatccacgaatctgtaggctgcctagattcgaggccaggaaggccgtgctcgtggcactcaaagaaagggggctgttccggggaatcgaggataatcctatggtcgtgcctctatgtaataggagtaaggacgtggtggaacccttgttacgcccacaatggtatgtgcgttgtggcgagatggcccaggctgcctccgccgcagtgacacggggtgatctgaggattctgccagaggcccaccaaaggacttggcacgcgtggatggataacatacgggagtggtgcatctcgcggcagctgtggtggggccatcggattcctgcgtatttcgtgactgtgagcgatcctgcagtgcctccaggggaggaccccgatggaaggtactgggtatctggaagaaacgaggccgaggcgcgagaaaaggcagctaaagagttcggcgtgtccccagataagatttcactgcaacaggacgaagacgtgctggacacctggttcagctccggcctgtttcctctgagcattctggggtggccaaatcagtccgaggatttgtccgtattctaccctggtaccctcctggagactgggcacgacatcctgttcttctgggttgcccgaatggttatgttggggctgaagttgactggcagactgccattccgggaggtttacctgcatgccatcgtgcgagatgcacatggacgaaagatgagcaaatcgctcgggaatgtcattgatcccctggacgtgatatatgggatctccctccagggcctgcataatcagctcctcaactctaacctggatccatcagaggtggagaaagcgaaggagggccagaaggccgatttcccagcagggattccagagtgcggcacagatgctctcaggtttggcctctgtgcatacatgtcgcaaggacgcgatattaatcttgatgtgaacaggatccttgggtaccgacacttttgcaacaagttgtggaacgccacgaagtttgccctgagaggtctgggtaaaggcttcgtgcccagcccaactagtcaacctgggggtcacgagtcactggtcgatcgatggatccgctcacgactcacggaggccgtgcgcctatctaaccagggcttccaggcatatgatttccctgcagtcaccacagctcaatatagcttttggctttacgagttgtgcgacgtctacctggaatgcctgaagccagtgctgaacggcgtggaccaggtcgcagcagagtgcgctagacagacactgtacacctgcctggatgtggggcttcgcctactgtcaccctttatgcccttcgtcaccgaagaattattccaacgactgcctagacgtatgcctcaggcgcctccctccttatgcgtcacgccctatcctgagcctagcgagtgctcttggaaggatcccgaggccgaggcagcacttgaattggcgctgtctataactagggccgtgcgaagtctacgggctgactataacctgacccgcatcagacctgattgtttcctggaagtggctgacgaggccaccggagcactggcatcagccgtttccgggtacgtgcaagccctggcttcagctggagtcgtcgccgtgcttgcactgggagctcccgcacctcaggggtgtgcagtggccctggcatcagataggtgcagcatacatctgcagctgcagggcctcgtggatccagctcgagaactgggcaagctgcaggccaaaagggtggaggcacagagacaagctcagcgtttgcgggaacgcagggctgcatcgggctacccagtcaaagttcccctggaagtgcaggaagctgatgaagccaagctgcagcagacggaggcagagctgcggaaagtcgacgaagctatcgctctgttccaaaagatgctgtag

SEQ ID NO: 305008 - DNA, 2031 bp, Artificial Sequence
  derived and/or modified sequence
atgagcacattatacgtttccccgcaccccgacgcgttcccaagtctgcgagcactgatcgccgctaggtatggcgaagccggagagggacccggttggggcggagcccacccgaggatatgccgccttccacggtttgaggctaggaaggctgtcctcgtcgcgctgaaggaacgaggcttatttcggggtattgaagataaccccatggtcgtccccctgtgcaatagaagcaaggatgtggtcgagcccttgttgcggccacagtggtacgtcaggtgtggcgagatggctcaggcagctagcgcagcagtcacccgcggtgatcttcgcatcttaccagaggcccaccagaggacatggcatgcctggatggataatatccgggaatggtgcatttctcggcagctgtggtggggccacaggatccccgcatactttgtcacggtatcagacccggctgtgccacctggggaagatccagatggtagatactgggtcagcggccgaaatgaagctgaagcaagagaaaaggcagccaaggagttcggggtatctccagacaaaatcagtctacagcaggacgaagacgtgctggatacatggttctccagcggtttgtttccgctctcgatcttaggctggccaaaccagagcgaagatctgtccgttttctaccccggaacccttctagagaccggacacgacattctcttcttctgggtcgcacgcatggttatgcttggcctgaagctgaccggtcgattaccattccgtgaagtatacctgcacgctattgtccgggacgcacacggacgaaaaatgtccaaatccctgggtaacgtgattgatcctcttgacgtaatttacggtatttcactgcagggactgcacaatcaactccttaattctaacctggaccccagtgaggttgagaaagcaaaggaaggccagaaagcggactttcctgccggtatacccgaatgtggcaccgacgctctcagattcggcttgtgtgcatacatgtctcaaggtagagatattaatctggatgtgaatcgaattcttggttaccggcacttttgtaataaactctggaacgccactaaattcgcacttaggggactgggcaaaggctttgtccccagtcctacttcacaaccagggggacatgagagcctggtagatagatggatccgctccaggctaacggaagctgtgcgacttagcaatcagggattccaggcttacgattttccagccgtcactacagcccaatactctttctggctgtatgagttatgcgacgtgtatctcgagtgcttaaaaccagttctgaatggggtggatcaagtcgcagccgagtgcgccagacagacattatatacctgcttggatgtggggctccgattgctgtccccgttcatgccgttcgtaactgaggagctcttccagagactgcctaggagaatgccgcaagcccctccttccctgtgtgttaccccatacccagaaccatccgagtgctcatggaaagatcccgaggcggaggccgcactggagctagccctcagcatcacaagagcagtgaggtccctccgagcggactacaacttgacccgaattcggcctgactgctttctggaagttgctgacgaagctacgggtgctctggcctcagcagtgagcggttacgtgcaggccttggctagcgccggagttgtcgcagttctggctctgggtgccccagctccccaggggtgcgcagtggcgctggccagcgatcgttgcagtattcacctgcagctgcaaggcttagtggacccagcccgtgagctcgggaaacttcaggccaagcgggtggaggcgcaacgccaagcccaaagacttcgggaacgaagggccgctagtgggtatcccgtgaaggtccccctggaggtccaggaggccgacgaggctaagctccaacaaaccgaagccgagctgcggaaagtggacgaggccattgctctctttcagaaaatgttgtag

SEQ ID NO: 305009 - DNA, 2031 bp, Artificial Sequence
  derived and/or modified sequence
atgtccactttatatgtttcacctcatcccgatgcttttccatcccttcgcgcattgatcgccgcacggtatggcgaggcaggcgaaggtccgggttgggggggagcccacccaaggatttgcaggctacccagattcgaagcacgtaaggcagtgttagtggccctgaaagaacggggtctttttcggggaattgaagacaacccgatggtcgtacccttgtgcaacaggagcaaggatgttgttgaaccattgttaagacctcaatggtacgtgcgatgcggggagatggcacaggcagcaagcgccgctgtaacacgtggcgatctgagaattctgcccgaagcccatcaacgaacttggcacgcttggatggataacatccgggagtggtgtatcagcaggcagctatggtgggggcatagaatccccgcatattttgtgactgtgtccgatcccgctgttcctcccggagaggacccagacggtcggtactgggtgagtggaagaaacgaagcagaagctagagaaaaggccgctaaagaattcggcgtgtctccagacaaaatcagccttcaacaggatgaagatgtccttgatacgtggttctcctctgggcttttcccactgtcaattcttggatggcccaaccagagtgaagacctgtcagtcttttatcccggtacactgttagagaccggccatgacattctgttcttctgggtggcacgcatggtgatgcttggcctcaagctgaccgggcgactgccatttcgagaagtgtatctgcacgcgattgtacgagacgcccacggcagaaaaatgtccaaaagtctagggaacgtgatagatccactcgacgttatctacggtatatcacttcaaggcctgcataaccaactgttaaattccaatctcgaccctagtgaggtagagaaagccaaagaaggacaaaaggcagattttcctgcaggaatccctgaatgtggaacagacgctctccggttcggtctttgcgcctacatgagtcaggggagggatataaatctggatgtcaataggatcctgggctaccgccatttctgtaacaagctgtggaacgcaaccaagtttgctctgagaggtctcggcaaaggtttcgtaccgtcccccaccagccagccaggaggccacgagtcgcttgttgatcgatggatccgctcacgtctgacagaagccgtgaggctaagcaaccagggctttcaggcctatgatttccctgccgttacaaccgcccagtattctttttggctgtatgagctctgtgatgtgtacctcgaatgcctcaaaccggtgttgaatggcgtggaccaagtggccgcagagtgtgcccgtcaaaccctgtacacatgtcttgatgtaggtctccgtctgttaagtccctttatgccctttgtgaccgaggagctgttccagcggctgccaaggagaatgcctcaggcaccccctagcctgtgcgtcaccccgtaccctgaacccagcgaatgctcttggaaggaccccgaggcagaagccgcactggagctggctttgtccatcacccgggcagtgagaagcctacgcgctgactacaacctgacacgcatcagacccgattgtttcttggaagtggccgatgaggccacgggtgccctcgcctcagctgtatccgggtatgtccaggctctcgcctctgccggagtcgtggctgtgctggctctcggcgcaccagctccccagggttgcgctgtggccttggcaagcgaccgctgcagtatacacctacagctacaggggctcgttgaccccgcaagagagttaggtaagttgcaagccaaacgggtggaggcacaacgccaggcacagagattgagagagcggagagccgcttctgggtacccagtgaaggtgccacttgaagttcaagaggcggatgaagccaagctccaacagacagaggcagagttgcgtaaagtagatgaggcaatcgccctgttccagaagatgctgtag

SEQ ID NO: 305010 - DNA, 2031 bp, Artificial Sequence
  derived and/or modified sequence
atgtcaactttgtacgtctccccgcaccccgatgctttcccttccttacgtgctctgatcgctgccagatatggggaggcaggagaagggccaggttggggaggggcacacccacgcatatgtcggcttccaaggtttgaggcacgtaaggccgtgctcgtggcccttaaagagcggggtctatttagaggcatagaagataatcctatggtggtccccctgtgcaaccgaagcaaagacgtcgtcgaaccacttctacggcctcagtggtatgtgagatgcggcgagatggcccaggccgcttctgccgctgtgacgcgcggagacctccgcatactgcctgaggcccaccagcggacttggcacgcttggatggataacatccgtgaatggtgcattagtcgacagctttggtgggggcataggatccctgcttatttcgtgacagtttccgatcccgctgttcccccaggtgaggatcccgacggccgatattgggtgagcggcagaaatgaggcagaggcccgagaaaaagctgccaaagaattcggcgtttctcctgacaaaatttctctgcagcaggacgaggatgtccttgacacttggttctccagcggcttatttcctctgtctatcctcggctggcccaatcaaagcgaggatctgtctgtcttctacccaggcacactgctcgagaccggacacgatattctgttcttctgggtggcccgaatggtgatgttgggactaaaattgaccggacggcttccctttcgggaagtgtacctacatgctatcgtgagagacgcccacggcaggaaaatgtccaaaagcctggggaacgtcatcgacccattggatgtcatatatggaatttctttacagggacttcacaatcagctgctcaattccaatttggatccctcggaagtcgaaaaggctaaggaggggcagaaggccgattttcccgcagggatacctgaatgtggtaccgacgccctgcgattcgggctgtgtgcttacatgtcccaaggccgtgatatcaacctagatgtaaaccgcatattaggctataggcacttctgtaataagctctggaatgccaccaaatttgctttgaggggcctgggcaagggattcgtgccttccccgactagccagcctggcggacacgagtcgctggttgacaggtggattaggagtagactgaccgaagcagtgagactgagtaaccaggggttccaggcgtatgatttccccgctgtaactactgctcagtactcattctggctctacgagctgtgtgatgtttatctggagtgtcttaagccagtcctgaatggtgttgaccaggttgccgcagagtgcgctcggcagacactctacacctgtctggacgtaggcctgcgattgctgtcacctttcatgccgttcgtaaccgaagagctgttccaaaggctgcccaggcgcatgccccaagccccaccttccctatgcgtaactccctatccagagccaagcgaatgctcctggaaggatcccgaagccgaggccgctcttgagctagcgttgtctataacaagagccgtacggagtctccgcgcagattacaaccttacaaggatcagacccgactgcttcctcgaggtagctgacgaggcaacaggcgctctcgcctcagctgtgtccggttatgtgcaggccctggccagtgccggagtggttgctgtgctggcactgggcgctcccgcaccccaaggatgtgcagtcgccctggccagtgataggtgttctattcacctgcaacttcaaggcttggtggatcctgccagagagctgggcaaactccaggccaagagagtggaagctcaacgacaagcacagcgactgcgggagcggagggctgctagcggttatccagtgaaggtgcctcttgaggtccaggaagccgacgaggcgaaactgcagcaaaccgaagccgagctgagaaaggttgacgaagctatagcactgttccagaaaatgttgtag

SEQ ID NO: 305011 - DNA, 863 bp, Artificial Sequence
  derived and/or modified sequence
gaaggagcggggactgttccgtggcattgaggacaaccccatggtggtgccactttgcaaccggtcgaaggacgtggtagagcctctgctgcggccgcagtgggagtggtgcatttccaggcagctgtggtggggccatcgcatcccagcctactttgtcactgtcagtgacccagcggtgccccctggggaggaccctgatgggcggtactgggtgagtggacgcaatgaggcggaggcccgggagaaggcagccaaggagttcggagtgtcccctgacaagatcagtctccagcaagatgaggatgtattggatacctggttctcctctggcctcttccccttatccattttgggctggcccaaccagtcagaagacctgagtgtgttctaccccgggacactgctggagaccggtcatgacatcctcttcttctgggtggcccggatggtcatgctgggcctgaagctcacgggcaggctgccctttagagaggtctacctccatgccatcgtgcgagatgctcacggccggaagatgagcaagtctctaggcaatgtcatcgatcccctggacgtcatctatggaatctccctgcagggcctccacaaccagctgctgaacagcaacctggatcccagcgaggtggagaaggccaaagaagggcagaaagctgacttcccagcggggattcctgaatgtggcaccgatgctctccggtttggattatgtgcctacatgtcccagggtcgtgacatcaacctggatgtgaaccggatactgggttaccgccacttctgcaacaagctctggaatgccaccaagtttgcccttcgtggccttgggaagggttttgtgccct

SEQ ID NO: 305012 - DNA, 2336 bp, Artificial Sequence
  derived and/or modified sequence
gaaacgctccctgtcacaaaggggggaacacgtgggcgccggctgccggggcggcgatcttagggaactagggtcacctggagagccgcccaccgtctctgcccgctcgactcctccgcccgggccgctcggccggtccagccgcggccggcgcctggctgtgaggtggattcccggcccagtctgaccatctccctccagtttttccacttcgttcggaccttctcataactatgtccaccctctacgtctcccctcacccagatgccttccccagcctccgagccctcatagccgctcgctatggggaggctggggagggtcccggatggggaggagcccacccccgcatctgtcgcctgcccaggtttgaggccaggaaagcggtgctggtggcgctgaaggagcggggactgttccgtggcattgaggacaaccccatggtggtgccactttgcaaccggtcgaaggacgtggtagagcctctgctgcggccgcagtggtacgttcgctgcggggagatggcccaggctgccagcgccgctgtgactcggggtgacctccgcatcctgcctgaggcccatcagcgcacatggcatgcctggatggacaacatccgggagtggtgcatttccaggcagctgtggtggggccatcgcatcccagcctactttgtcactgtcagtgacccagcggtgccccctggggaggaccctgatgggcggtactgggtgagtggacgcaatgaggcggaggcccgggagaaggcagccaaggagttcggagtgtcccctgacaagatcagtctccagcaagatgaggatgtattggatacctggttctcctctggcctcttccccttatccattttgggctggcccaaccagtcagaagacctgagtgtgttctaccccgggacactgctggagaccggtcatgacatcctcttcttctgggtggcccggatggtcatgctgggcctgaagctcacgggcaggctgccctttagagaggtctacctccatgccatcgtgcgagatgctcacggccggaagatgagcaagtctctaggcaatgtcatcgatcccctggacgtcatctatggaatctccctgcagggcctccacaaccagctgctgaacagcaacctggatcccagcgaggtggagaaggccaaagaagggcagaaagctgacttcccagcggggattcctgaatgtggcaccgatgctctccggtttggattatgtgcctacatgtcccagggtcgtgacatcaacctggatgtgaaccggatactgggttaccgccacttctgcaacaagctctggaatgccaccaagtttgcccttcgtggccttgggaagggttttgtgccctcacccacctcccagcccggaggccatgagagcctggtggaccgctggatccgcagccgcctgacagaggctgtgaggctcagcaatcaaggcttccaggcctacgacttcccggccgtcaccactgcccagtacagcttctggctctatgagctctgtgatgtctacttggagtgcctgaaacctgtactgaatggggtggaccaggtggcagctgagtgtgcccgccagaccctgtacacttgcctggacgttggcctgcggctgctctcacccttcatgcccttcgtgacggaggagctgttccagaggctgccccggaggatgccgcaagctccccctagcctctgtgttaccccctacccggagccctcagagtgctcctggaaggaccccgaggcagaagccgcccttgagctggcgctaagcatcacgcgagccgtgcgctccctgcgggccgactacaacctcacccggatccggcctgactgtttcctggaagtggcggatgaggccacgggcgccctggcatcggcggtgtcgggctacgtgcaggccctggccagcgcaggtgtggtggctgttctggccctgggggctcccgccccccagggttgcgctgtggctctggcttctgatcgctgctccatccacctgcagcttcaggggctggtggaccctgcacgggagctgggcaagctgcaagccaagcgagttgaggcccagcggcaggcccagcgtctgcgggaacgccgtgctgcctcgggctatcctgtcaaggtgccgctcgaagtccaggaggcagatgaagccaagctccaacagacagaagcagagctcaggaaggtggatgaggccatcgccctattccagaagatgctgtgatccaccacccagcttcacccctcacccccagcggctcaccatggggatggcagcaataaaatattttcccac

SEQ ID NO: 305013 - DNA, 992 bp, Artificial Sequence
  derived and/or modified sequence
agaatcaccatggccagctatccttaccggcagggctgcccaggagctgcaggacaagcaccaggagcccctccgggtagctactaccctggaccccccaatagtggagggcagtatggtagtgggctaccccctggtggtggttatgggggtcctgcccctggagggccttatggaccaccagctggtggagggccctatggacaccccaatcctgggatgttcccctctggaactccaggaggaccatatggcggtgcagctcccgggggcccctatggtcagccacctccaagttcctacggtgcccagcagcctgggctttatggacaggggatacatgctgaaggagcagctcctgtttgggatatgttatctttgtggcagagagaaggagcaggagagctagcaagaatgcacaatgcctcttaaagcttctctgaagtactgtatgtcttgcccacttgcattcttttggccagagcaccccctgatcaagactgacatcagtaggatgggaaaggatgcccctctgcaagccaccaggcagtgggagaggatgtacaatgctcttatagggaaggggagattagcaagtaatctaataatagattattgaactggccttttaaaccattgtaccatattagtacaatgtctgtgggtgtgcagactgtgtctcctggctagagattattagccaggagacgataatgtagcctaccatggggagaaactcagtttaaatatccgtttctctgtgaaaatatctcagaagacacacattccaggctctttgctgaggattttattttgctgttatctcatttaatcatcacaacaattctggggaaatgggttcattttagaaatgtgaaaatcattactcagaaaattgtacattttgcctaaagtcacacaagctagtaaggatcagatccagggtttgaatccaggtctgctttgattccaaagcctgagcccttctatac

SEQ ID NO: 305014 - DNA, 372 bp, Artificial Sequence
  derived and/or modified sequence
atgcagagtgagaaacctcagggtttgttcctgcagctgaaccctaacgcctcctcaaccgaaacccagctcctggtgccagctctggaatcccgcgacactctgccaccaactcactgcttcatggccggaactgagtctccgttaggaaatccctggcccctcagcctgcctccaccctgttggacggggtgcctgttaccagcccctcgcggacagcgaaaaccagggccccttggcctgagcatctttattagtctcggcaataaacgccaccgcagcggaaaccacgtggtgcgggagtctgagcagcctctgagccaggggaaccctcatcaagggtggggtccggacactcggaaagggcggtag

SEQ ID NO: 305015 - DNA, 474 bp, Artificial Sequence
  derived and/or modified sequence
atggccaccagcgcccccctgagaagcctggaggaggaggtgacctgcagcatctgcctggactacctgagagaccccgtgaccatcgactgcggccacgtgttctgcagaagctgcaccaccgacgtgagacccatcagcggcagcagacccgtgtgccccctgtgcaagaagcccttcaagaaggagaacatcagacccgtgtggcagctggccagcctggtggagaacatcgagagactgaaggtggacaagggcagacagcccggcgaggtgaccagagagcagcaggacgccaagctgtgcgagagacacagagagaagctgcactactactgcgaggacgacggcaagctgctgtgcgtgatgtgcagagagagcagagagcacagaccccacaccgccgtgctgatggagaaggccgcccagccccacagagagaagatcctgaaccacctgagcaccctgagatag

SEQ ID NO: 305016 - DNA, 480 bp, Artificial Sequence
  derived and/or modified sequence
atggccaccagcgcccccctgagaagcctggaggaggaggtgacctgcagcatctgcctggactacctgagagaccccgtgaccatcgactgcggccacgtgttctgcagaagctgcaccaccgacgtgagacccatcagcggcagcagacccgtgtgccccctgtgcaagaagcccttcaagaaggagaacatcagacccgtgtggcagctggagaagatcctgaaccacctgagcaccctgagaagagacagagacaagatccagggcttccaggccaagggcgaggccgacatcctggccgccctgaagaagctgcaggaccagagacagtacatcgtggccgagttcgagcagggccaccagttcctgagagagagagaggagcacctgctggagcagctggccaagctggagcaggagctgaccgagggcagagagaagttcaagagcagaggcgtgggcgagctggccagatag

SEQ ID NO: 305017 - DNA, 369 bp, Artificial Sequence
  derived and/or modified sequence
atggccaccagcgcccccctgagaagcctggaggaggaggtgacctgcagcatctgcctggactacctgagagaccccgtgaccatcgactgcggccacgtgttctgcagaagctgcaccaccgacgtgagacccatcagcggcagcagacccgtgtgccccctgtgcaagaagcccttcaagaaggagaacatcagacccgtgtggcagctggccagcctggtggagaacatcgagagactgaaggtggacaagggcagacagcccggcgaggtgaccagagagcagcaggacgccaagctgtgcgagagacacagagagaagctgcactactactgcgaggacgacggcaagctgctgtgcgtgtag

SEQ ID NO: 305018 - DNA, 474 bp, Artificial Sequence
  derived and/or modified sequence
atggccaccagcgccccactccggtcactggaagaggaggtcacctgtagtatttgtttagattacctgagggatcctgtgacaattgattgcggtcatgtgttttgccgatcctgtactacagatgtcaggccgatctctggctccagacctgtctgtccgctgtgcaagaaaccattcaagaaggaaaacattagaccggtctggcagcttgccagcctggtggaaaacattgagcgattaaaagttgataagggccgacagcctggggaggtcacacgagagcagcaggacgctaaactttgtgaacggcacagggagaaactacattactattgtgaagatgacggcaagcttttatgcgtcatgtgccgcgagtctcgcgaacacagacctcacacggccgtgcttatggagaaggctgctcagccccacagagaaaagatcctcaatcatctgtcaaccttacgctag

SEQ ID NO: 305019 - DNA, 480 bp, Artificial Sequence
  derived and/or modified sequence
atggctactagcgccccactgagatcactggaggaggaggttacgtgctcaatctgtctggactaccttagagatcccgtaaccatagactgcgggcacgttttttgcaggtcgtgcacgaccgacgtcaggcccatctctgggtctagacctgtgtgtccactgtgcaaaaagccattcaagaaggagaacatacgccccgtgtggcagcttgagaagattctcaaccatcttagtacgctaaggcgggacagagataagattcaggggtttcaagctaaaggggaggctgacattctggctgccctcaaaaagctgcaggatcagcggcagtacatagtcgccgagtttgaacagggtcaccagtttcttcgcgaacgcgaggaacatttacttgaacaactggccaagcttgaacaggagctgacagagggtcgggagaagtttaagtcaagaggtgtgggcgaattagccagatag

SEQ ID NO: 305020 - DNA, 474 bp, Artificial Sequence
  derived and/or modified sequence
atggcgacgtccgccccgctgagatctttagaagaagaggtgacttgctctatctgcctggactacttgagagacccggtcaccattgattgtggacacgtgttctgtagatcatgcacaaccgatgtcaggcccatctcagggtcacggccagtgtgtccactgtgcaaaaagccctttaaaaaagaaaacatcagacccgtgtggcagcttgcctcactggttgaaaatattgaacgcttgaaggtcgacaaaggcagacagcccggagaagttacacgtgagcaacaagatgccaaactgtgcgagaggcatcgcgagaagttgcactactactgtgaggacgatggcaagctgctttgcgtgatgtgtagagaatcccgcgagcaccggccccacaccgcagttctgatggaaaaggcagctcagccccaccgggaaaagatactcaatcatcttagcacgctccggtag

SEQ ID NO: 305021 - DNA, 474 bp, Artificial Sequence
  derived and/or modified sequence
atggccacctccgcccctttacggagcctggaagaagaagtcacttgcagcatttgcctggactatctgagggacccagttacaatcgactgcggacacgtgttctgtagatcttgtaccacagacgtccgtccgatctctgggtctcggcctgtgtgccctttatgtaaaaagcctttcaaaaaggagaatataaggccagtgtggcaacttgcttccctcgtggagaatatcgagcggctaaaggtggacaaaggccggcagcctggcgaagtgaccagagaacagcaagacgcaaagctgtgtgagcgtcaccgggaaaagctacactattactgtgaagacgacggaaaactcctgtgtgtcatgtgcagggagtctcgcgagcacaggccacatacagcagttttaatggaaaaggccgctcaaccacaccgcgaaaagattttgaaccatctgagcacactacgatag

SEQ ID NO: 305022 - DNA, 474 bp, Artificial Sequence
  derived and/or modified sequence
atggccacgtcggcacctttgcgctcactagaagaagaggtgacatgtagcatttgcctcgattatttgcgcgatccggtcacaattgactgtgggcacgtgttttgcaggtcctgtaccacagacgtgcgacccatcagtgggagcaggccagtgtgccctctgtgcaagaaaccctttaagaaggagaacatacggcctgtctggcaattggcatcacttgtggagaatatcgagcggcttaaagtcgacaaaggacgacagcccggagaagtgaccagagaacagcaagacgctaagctctgcgagagacaccgcgaaaagcttcactattattgcgaggatgatggcaagctcctttgtgtgatgtgccgggagtcaagggagcatagaccccacaccgcagtcctcatggagaaggccgcccagccacatcgggagaagattttgaatcatctgtcaactctcaggtag

SEQ ID NO: 305023 - DNA, 480 bp, Artificial Sequence
  derived and/or modified sequence
atggctacaagtgcaccattgcgtagcctggaggaggaagtgacatgcagtatctgccttgattatctgagggatcctgtaacgatagactgcgggcatgttttctgcaggtcttgtacgactgatgtgaggcccattagcggttcaaggccagtctgcccactgtgtaagaagcccttcaagaaggagaacatcagacccgtgtggcagctggaaaagatccttaatcacctatctacactaaggagagatcgggataaaatccagggctttcaggctaaaggcgaagccgacatattggctgcactcaaaaagctgcaggatcaaagacagtacatcgtggccgagtttgaacagggacatcagttccttagagagcgggaggaacacctgcttgagcagctggcgaagctggaacaggaactgacggagggacgtgagaagtttaaaagcagaggggtaggcgaactagccaggtag

SEQ ID NO: 305024 - DNA, 474 bp, Artificial Sequence
  derived and/or modified sequence
atggccacatccgcccccctgagatctcttgaagaagaggtcacttgttcaatatgcctggactatctacgggacccggtgaccatcgattgcgggcacgtattttgtaggagctgcacaaccgacgtacggccaatcagcggtagtagacccgtgtgcccactctgcaagaagccattcaaaaaagagaatattagacccgtgtggcaattggccagcttggttgagaatatcgaacgccttaaggttgataaaggcagacagcctggcgaagtgacaagggagcagcaagatgcaaaactgtgcgagcgtcacagagagaaactgcactactactgtgaagacgatggtaagcttttatgcgtcatgtgcagagagagtagagaacatcgtccacatactgccgtgcttatggaaaaagccgctcaaccacacagagagaagatcctaaaccacttgagtacactccggtag

SEQ ID NO: 305025 - DNA, 480 bp, Artificial Sequence
  derived and/or modified sequence
atggccactagtgcaccgctgagaagcttggaggaagaggtcacatgttcaatctgcttggactatctcagggaccctgtcaccatagattgcggccatgtattctgcaggtcctgtacaactgacgtgcggcccatttctggttcaagacctgtctgcccgctatgcaaaaagccatttaaaaaagaaaatattcgacctgtttggcaattggaaaagatccttaaccatctgtcaacgctcagacgtgatagggataaaatccaaggctttcaagccaaaggcgaggctgacattctggccgcacttaagaaactgcaggaccagcggcagtatatcgttgctgaatttgagcagggccaccagttcctgcgtgaacgggaagagcatttgctcgagcagctggcaaagttagagcaggaattgacagagggaagggagaaatttaaaagcagaggcgtgggggaactagcgcgttag

SEQ ID NO: 305026 - DNA, 369 bp, Artificial Sequence
  derived and/or modified sequence
atggcgacgtctgcacccttgcggtccctggaggaggaagtaacctgtagcatctgtctggactacctccgggacccagtcacgatcgactgtggccacgtattctgcagatcttgcaccaccgacgtccgccccatcagtgggagtagaccagtctgcccactgtgcaagaagccattcaaaaaagagaatattagacctgtctggcaactagcaagcctcgtggagaatattgaacgcttgaaggttgataaaggtcgacaacccggcgaagttacgagggagcagcaggatgctaagctgtgtgagcggcatcgagagaagctccactactactgcgaggacgacgggaagctcctgtgtgtgtag

SEQ ID NO: 305027 - DNA, 369 bp, Artificial Sequence
  derived and/or modified sequence
atggcaacatccgcccctcttcggtcactcgaagaggaagtcacgtgttcaatttgtctagactacttgcgggatccggttacaatcgattgcggccacgtgttttgcagatcgtgtaccaccgacgtgagacccattagcggtagtaggccagtgtgccctctctgtaagaagccctttaagaaagaaaacattcgacccgtctggcagctggctagcttagttgagaacatcgagaggctgaaggtggataagggcagacagcctggcgaggtgacacgggagcagcaagatgcgaagttatgtgagcgtcatagagaaaagttgcactactattgtgaagatgatggaaagctgttgtgtgtgtag

SEQ ID NO: 305028 - DNA, 369 bp, Artificial Sequence
  derived and/or modified sequence
atggccacaagcgcacctctgcggtcccttgaggaggaggtgacatgctccatttgcctggactatcttcgagacccagtgacaattgactgcgggcatgtcttttgccggtcttgtaccacggacgttcggccgatctccggatcccgccctgtgtgccccctgtgtaaaaagccatttaagaaagagaacattagacccgtgtggcagttggcatccctggttgagaacattgaacgactgaaggtggacaagggcagacaacccggggaagttacgagagaacaacaggacgccaagctgtgcgagcgccatagagagaagctgcattattattgcgaggatgacggaaagttactctgcgtttag

SEQ ID NO: 305029 - DNA, 474 bp, Artificial Sequence
  derived and/or modified sequence
atggccacttccgccccccttcggagcctcgaggaggaagtgacttgctccatatgcctggactatctcagagatcccgtcacgattgattgcggccatgtcttttgtcggtcatgtactactgatgttaggcccatctcagggtcccgccccgtgtgccccctgtgcaagaaaccttttaagaaggagaatattcgccccgtgtggcaactagcatccctcgtagagaatatcgaacgactcaaagtcgacaagggaagacagccaggggaagtgactcgcgagcaacaggatgccaagctctgtgagcgccaccgtgagaagctacactactactgcgaggacgatggaaagctcttatgcgtgatgtgcagggagagtagagagcatcgaccgcacactgcagtattgatggagaaagctgcacagccacacagagagaaaattctcaatcacttatccacattaaggtag

SEQ ID NO: 305030 - DNA, 474 bp, Artificial Sequence
  derived and/or modified sequence
atggctacctccgcccccctgcgttccctcgaggaggaggtgacgtgttctatctgtttagattacctgagggacccagttactattgactgcggccacgtattttgcagaagctgtacgacagatgtccggcctataagtggatcgaggcccgtctgccctctgtgtaagaagcccttcaagaaggaaaatattcggcctgtttggcaactagcaagtcttgttgaaaatattgagaggttgaaagtggacaagggtcgccagcccggagaagtgacccgcgagcagcaagacgcgaagctgtgtgaacgacatcgagaaaagctgcattactattgcgaggatgacgggaagctgctctgtgtcatgtgcagggaatcacgggagcatcggccacatactgcagtgctcatggaaaaagccgcccagccacatagagagaagatcttgaatcatcttagtactctcaggtag

SEQ ID NO: 305031 - DNA, 369 bp, Artificial Sequence
  derived and/or modified sequence
atggctacctctgctccacttagaagcctggaggaagaagtaacatgttccatttgtctagactatctacgagatcccgtgactatcgactgtggccatgtcttttgcaggtcctgcaccaccgacgtgaggcctatcagtgggagtcggccagtgtgccccctctgtaagaaaccatttaagaaagaaaatatccggccagtgtggcagttagcgtcgctcgttgaaaatatagagcggttgaaagtggacaagggaaggcagcctggcgaagtcacacgggagcaacaggatgctaagctgtgtgagcggcatcgagaaaagctccactattattgcgaggacgatgggaagttgctgtgcgtgtag

SEQ ID NO: 305032 - DNA, 369 bp, Artificial Sequence
  derived and/or modified sequence
atggctacatctgcaccactgaggagcctcgaggaagaagtgacttgtagcatttgcctagattatctacgcgatcctgtgacaatagactgtgggcacgttttttgtcgctcctgtaccaccgacgtgaggcctatcagtggttcccgcccagtttgccctttgtgtaagaaaccattcaagaaagagaacatcaggcccgtgtggcagctggcctcgctcgtcgagaatatcgagcgactgaaggtagataagggacggcagccaggtgaagtgacacgagagcagcaggacgctaagttgtgcgagagacacagggaaaagttacattattattgcgaagacgacggtaagcttctttgcgtctag

SEQ ID NO: 305033 - DNA, 480 bp, Artificial Sequence
  derived and/or modified sequence
atggccacctccgctcccctgcggagtctggaggaggaggtaacctgctccatttgcctggattatctaagagacccagtcactatcgattgtggccatgtattttgtcggagctgtacaacggacgtccgtccgatcagcggaagccgtcctgtttgtcccctgtgcaagaaacccttcaaaaaggagaacattaggcccgtatggcagttagaaaagatccttaaccatttgtccacactccgacgcgacagggataaaattcagggatttcaggccaagggtgaggctgacatactggccgcccttaaaaaattgcaggatcaacgacagtacatcgttgcagaatttgagcaaggccatcagtttttaagagaacgggaggagcatctcctcgagcagttggccaagctggagcaggagctgaccgagggaagagaaaaattcaagagcagaggcgtcggcgagttggcccgctag

SEQ ID NO: 305034 - DNA, 369 bp, Artificial Sequence
  derived and/or modified sequence
atggccacctccgcccctctccgttctcttgaggaggaggtcacctgcagcatatgccttgattacctacgtgatcccgtcacaatagactgcggacacgtgttttgtcgaagttgtacaacagacgtccgcccaatcagtggcagtagaccagtgtgtcccctgtgcaagaagccatttaaaaaggaaaacattcgacccgtttggcagctcgcatctttagtcgagaacatcgagcggctgaaggtggacaagggcaggcaacctggagaagtcaccagagagcagcaggacgctaagctctgcgagaggcatcgggaaaaacttcactactactgcgaggatgatggaaaactgttgtgcgtttag

SEQ ID NO: 305035 - DNA, 480 bp, Artificial Sequence
  derived and/or modified sequence
atggctacgagtgcccctctgcggagcttggaagaagaggtcacatgctcaatctgtctcgactatctgcgagaccctgtgaccattgactgtggccacgttttctgcaggagctgtacaactgacgtgaggcctatttcagggtccaggcccgtgtgtcccctgtgtaaaaaaccatttaagaaggaaaatataagacccgtgtggcagctggaaaaaatcctgaaccatctctctacactgagaagggaccgggacaagattcagggctttcaggctaaaggtgaggccgatattctcgcggctcttaaaaagttgcaggatcagaggcagtacatagtggctgaatttgaacaagggcatcagttcctgcgagagagggaagagcacctgctcgagcagctggcaaaattagaacaggagcttactgaggggcgcgaaaaatttaaatctcgcggcgtcggggagttagctcgctag

SEQ ID NO: 305036 - DNA, 369 bp, Artificial Sequence
  derived and/or modified sequence
atggcaacgtccgcacccctacggtcactagaggaagaggttacatgctcgatctgtcttgattatctgagggaccctgtcacgatcgactgtggccacgtgttttgtcggagttgcactaccgatgtccggccaatctccggaagtaggccagtatgtccgctgtgcaagaagccattcaaaaaagagaacattcgccctgtttggcagcttgcttcactggtggaaaatatagagcgattgaaagttgacaagggccgacagccgggcgaagttaccagagaacagcaggacgcgaaattatgtgagaggcatcgggagaaactgcactactactgcgaagatgatggcaagttactgtgtgtgtag

SEQ ID NO: 305037 - DNA, 369 bp, Artificial Sequence
  derived and/or modified sequence
atggccacctctgctccactgcgatccctcgaagaagaagtgacttgctcaatttgcctagattatctgcgggaccccgtcactatcgattgtggccacgtgttctgcagatcctgtaccaccgacgttcgccccatctccggctcccggccggtgtgtcctttatgtaaaaagccttttaagaaagagaatatccgccctgtttggcagctcgcatctttagtggagaatatcgaacgtctcaaggtcgacaaggggcgacagcccggagaggtgacacgtgagcaacaggatgctaagctgtgtgaacgccacagagagaagctacactactattgtgaagacgacggcaagttactgtgcgtgtag

SEQ ID NO: 305038 - DNA, 480 bp, Artificial Sequence
  derived and/or modified sequence
atggcgacgagtgccccgctgcgcagtctcgaagaggaggtgacttgttccatttgcctcgactatttgcgtgaccccgtgaccatcgactgtgggcatgttttctgtcggtcctgcaccactgacgtgaggcctatatctggttccaggcccgtttgcccgctgtgcaagaagccctttaagaaggagaacataagaccagtgtggcaattggaaaagattttgaaccaccttagcacactgagacgcgaccgcgacaaaatccaaggcttccaggcgaaaggggaggccgatattctggcggcccttaaaaagctgcaggaccagcggcagtacatcgtcgccgaatttgaacagggacatcagttcctgcgcgagcgcgaggagcaccttctggaacaactcgccaaacttgagcaggaactcacggaggggcgcgagaagttcaagagcaggggagttggggagctggccagatag

SEQ ID NO: 305039 - DNA, 480 bp, Artificial Sequence
  derived and/or modified sequence
atggctacatccgctccacttcgtagcctcgaagaagaggtcacatgttctatctgcctcgattatttaagggaccccgtgaccatcgattgcggacatgttttttgccgttcctgcactacagacgtccgacccatatcagggtcccgtcccgtgtgccccctgtgcaagaagccgttcaaaaaagaaaacatccgacctgtctggcagcttgagaaaatcctgaatcacctcagtaccttgcgccgggatcgcgacaagattcagggtttccaagccaaaggcgaagctgatatcctcgccgccctgaagaagctgcaggaccagcgccagtacatcgtggccgagttcgagcagggccatcagttcctcagggaacgcgaggaacacctgcttgagcagctggcgaagctcgagcaggagttaactgaaggaagagaaaagttcaagagtcgcggggttggcgaactagccaggtag

SEQ ID NO: 305040 - DNA, 474 bp, Artificial Sequence
  derived and/or modified sequence
atggcaacgagcgctccactgcgcagcctagaagaagaggtgacgtgcagtatttgtctggattatcttcgagatcccgtgacaattgactgcggacacgtcttttgtagatcatgtacaaccgacgtgcgaccaatcagtgggagccgccctgtctgtcccctatgcaagaagccctttaagaaggagaacataaggccagtctggcagttagcatcccttgtggagaacatcgagaggcttaaagtagataaaggccggcagccaggagaggtgaccagagagcagcaggacgcgaaactgtgcgaacgccaccgcgagaagctgcattattattgcgaggacgacggaaaattgctgtgtgttatgtgtagggaaagtagagaacacagaccccacaccgcggtcttgatggagaaagctgcccaaccacacagggagaagattctcaaccacttgagcaccctgagatag

SEQ ID NO: 305041 - DNA, 474 bp, Artificial Sequence
  derived and/or modified sequence
atggccaccagcgcccccctgcggagcctggaggaggaggtgacctgcagcatctgcctggactacctgcgggaccctgtgaccatcgactgtggccacgtgttctgccgcagctgcaccacagatgtgcggcccatcagcggcagcaggcctgtgtgccccctgtgcaagaagcccttcaagaaggagaacatccggcctgtgtggcagctggccagcctggtggagaacatcgagcggctgaaggtggacaagggccggcagcctggagaggtgacccgggagcagcaggatgccaagctgtgtgagcggcaccgggagaagctgcactactactgtgaagatgatggcaagctgctgtgtgtgatgtgccgggagagccgggagcaccggccccacacagctgtgctgatggagaaggccgcccagccccaccgggagaagatcctgaaccacctgagcaccctgaggtag

SEQ ID NO: 305042 - DNA, 480 bp, Artificial Sequence
  derived and/or modified sequence
atggccaccagcgcccccctgcggagcctggaggaggaggtgacctgcagcatctgcctggactacctgcgggaccctgtgaccatcgactgtggccacgtgttctgccgcagctgcaccacagatgtgcggcccatcagcggcagcaggcctgtgtgccccctgtgcaagaagcccttcaagaaggagaacatccggcctgtgtggcagctggagaagatcctgaaccacctgagcaccctgcggcgggaccgggacaagatccagggcttccaggccaagggggaggccgacatcctggccgccctgaagaagctgcaggaccagaggcagtacatcgtggccgagtttgagcagggccaccagttcctgcgggagcgggaggagcacctgctggagcagctggccaagctggagcaggagctgacagagggccgggagaagttcaagagcagaggagtgggggagctggccaggtag

SEQ ID NO: 305043 - DNA, 369 bp, Artificial Sequence
  derived and/or modified sequence
atggccaccagcgcccccctgcggagcctggaggaggaggtgacctgcagcatctgcctggactacctgcgggaccctgtgaccatcgactgtggccacgtgttctgccgcagctgcaccacagatgtgcggcccatcagcggcagcaggcctgtgtgccccctgtgcaagaagcccttcaagaaggagaacatccggcctgtgtggcagctggccagcctggtggagaacatcgagcggctgaaggtggacaagggccggcagcctggagaggtgacccgggagcagcaggatgccaagctgtgtgagcggcaccgggagaagctgcactactactgtgaagatgatggcaagctgctgtgtgtgtag

SEQ ID NO: 305044 - DNA, 474 bp, Artificial Sequence
  derived and/or modified sequence
atggccaccagcgcccccctgcggagcctggaggaggaggtgacctgttcaatatgtctcgattacctgcgggatcctgtaacaattgactgcggacacgtgttctgtagatcctgtacgaccgacgtgaggcctatctcaggatctaggcctgtctgccctttgtgcaaaaagccgttcaaaaaagagaacattagaccagtgtggcagttagcaagtctcgtcgagaatatcgagagactgaaggttgacaagggtaggcagcctggggaggtcactagggaacaacaggatgcgaagctttgtgaacgccatcgagagaagctgcactattactgcgaagacgatggcaagctgctgtgtgtgatgtgtagagagagccgagagcataggccacacactgcagtgctcatggagaaggcagctcagccacaccgggagaagattctgaaccatcttagcactctgcgctag

SEQ ID NO: 305045 - DNA, 480 bp, Artificial Sequence
  derived and/or modified sequence
atggccaccagcgcccccctgcggagcctggaggaggaggtgacctgctccatttgtctcgactatctacgcgaccctgtaacaattgactgcggacacgtgttctgccgctcttgtacgacagatgtccgccccattagcggatccagacccgtatgtcccctttgtaaaaaaccattcaaaaaagaaaatattcgacctgtgtggcagctggaaaagatcctgaatcatctctccaccctgagaagggaccgcgacaaaatccaagggttccaagccaagggagaggcagatatcctagccgctctcaagaagctgcaggatcagcgccaatatatcgtggcggagttcgaacagggacaccagtttctgagagaaagagaggagcacctcctggaacagctagccaagcttgagcaggagctgactgaaggtagggaaaagtttaaatccaggggagtgggcgaactggctagatag

SEQ ID NO: 305046 - DNA, 474 bp, Artificial Sequence
  derived and/or modified sequence
atggccaccagcgcccccctgcggagcctggaggaggaggtgacctgctctatctgtttggactacttgagagaccccgtgacaattgactgcggtcatgtgttctgtaggtcctgcacaactgatgtgcgccctattagcggtagtagacctgtgtgccctctgtgcaaaaagccttttaaaaaagagaatatccggcccgtgtggcagctagcttcattagtcgagaatatcgagagactaaaagtagacaaaggacgccaacctggcgaagtgactagagaacagcaggatgcaaagctctgcgagcgacatagggaaaagcttcattattactgtgaagacgatggtaagctactttgtgtcatgtgtagagagtctcgagagcacaggccacatactgcagttctcatggagaaagccgcccagccccatcgcgagaaaatcctcaatcacctctccaccctgcggtag

SEQ ID NO: 305047 - DNA, 474 bp, Artificial Sequence
  derived and/or modified sequence
atggccaccagcgcccccctgcggagcctggaggaggaggtgacctgttcaatatgcttggactatctgagggatcctgtcacgattgattgcgggcatgtgttctgcagatcatgtactacagacgtgcggcctatttccgggtcgagacctgtttgccctctgtgtaaaaaacccttcaaaaaggaaaatatcaggcccgtttggcagctggctagcctggtcgaaaacattgagcgactgaaggttgacaaggggaggcagcccggcgaggtcacaagagaacagcaggatgctaaactgtgcgaaaggcaccgcgaaaagttacattattactgcgaagatgacggtaagctcttgtgtgtcatgtgcagagagtcaagagaacatagaccgcataccgcagtgttgatggaaaaggcagctcagcctcatagagaaaagatcttgaatcacctgtccaccctgcggtag

SEQ ID NO: 305048 - DNA, 474 bp, Artificial Sequence
  derived and/or modified sequence
atggccaccagcgcccccctgcggagcctggaggaggaggtgacctgctccatctgtttggattaccttagggaccctgttactattgattgcgggcatgttttttgtcggagctgtacaaccgatgtccgccctatttccgggtcacggcctgtttgccctctctgtaagaagccctttaaaaaggagaacattcggcctgtgtggcagctggcttccttagtggagaacattgagagattgaaagtggacaaaggaagacagcccggtgaggttacaagagaacagcaagacgccaagctttgtgaaaggcatcgcgagaagctgcattactactgcgaggatgatggcaagctattgtgcgtgatgtgccgggaatccagagaacaccgtccacacactgccgtcctaatggaaaaggccgcccagccccatagagagaagattctcaatcacctgtctaccttgagatag

SEQ ID NO: 305049 - DNA, 480 bp, Artificial Sequence
  derived and/or modified sequence
atggccaccagcgcccccctgcggagcctggaggaggaggtgacctgttcaatctgcctggattatctgcgcgatcccgtgaccattgattgcggccatgttttttgcagatcctgcactactgacgtccgacctatcagcggatctagacctgtctgtcccttatgcaagaaacctttcaagaaggagaatatcagacccgtctggcaattagagaaaattctcaatcacctttcaaccttgcggcgtgaccgcgataagattcagggcttccaggctaagggcgaggccgatattttggccgcgctgaaaaaactgcaagaccaacgacagtatattgttgctgaatttgaacaagggcatcagttcttgcgagaacgcgaagagcacctgcttgagcagctcgccaagcttgaacaggaactaactgagggcagggagaagtttaagagtaggggcgtcggggagttggctcgctag

SEQ ID NO: 305050 - DNA, 474 bp, Artificial Sequence
  derived and/or modified sequence
atggccaccagcgcccccctgcggagcctggaggaggaggtgacctgcagcatctgcttggactacttgcgggacccagttactattgactgcgggcacgtcttttgtagaagctgcaccaccgacgtgcgtccgattagcgggtctcggcccgtatgtccactttgtaagaaaccctttaaaaaggaaaatattaggcctgtttggcagctagctagcctcgtggagaacatcgaaaggctgaaggtggacaaaggcagacagccaggagaggttacaagggaacagcaggacgccaagctgtgtgagcgacacagagagaagctccactattactgcgaggatgacggcaagctgctgtgtgtgatgtgtcgagaatcgagggagcaccggccacatacagccgtgctgatggagaaggcagctcaaccacaccgtgagaagatcctgaatcacctatcaacacttagatag

SEQ ID NO: 305051 - DNA, 480 bp, Artificial Sequence
  derived and/or modified sequence
atggccaccagcgcccccctgcggagcctggaggaggaggtgacctgcagcatatgtctagattacctgcgcgatcctgtaaccatcgattgtgggcatgttttttgtaggagctgcacgacagatgtgaggccaatatcgggaagtaggcccgtttgccctctctgcaagaagccatttaaaaaagagaatattcgccccgtttggcaacttgagaagattttaaatcacctgtctactctcagacgcgaccgtgacaaaattcaagggttccaggcaaaaggtgaggcggacatactggccgcccttaaaaagctgcaggatcagcggcagtacatcgttgccgaatttgagcagggccaccaattcctgagggagcgagaagagcacctcctagaacagttagcgaagctcgagcaagaactcacagaaggccgggaaaagtttaagagcagaggagtaggtgaactcgcgcggtag

SEQ ID NO: 305052 - DNA, 369 bp, Artificial Sequence
  derived and/or modified sequence
atggccaccagcgcccccctgcggagcctggaggaggaggtgacctgttctatttgtctagattacctgcgcgatccagttacaatagactgtgggcatgtcttttgccggtcttgcaccacagatgtaagaccgatctctggctcgagacctgtctgtcccttgtgtaagaaaccttttaagaaggagaacattagacccgtatggcagctggcgagcttagtggaaaacatcgagaggctgaaggtggataagggtcgccaaccgggcgaagtaacccgggaacagcaggatgccaagctgtgcgaacggcaccgcgaaaagttacattactattgtgaggatgacggtaaacttctgtgtgtttag

SEQ ID NO: 305053 - DNA, 369 bp, Artificial Sequence
  derived and/or modified sequence
atggccaccagcgcccccctgcggagcctggaggaggaggtgacctgctcaatttgcctggactatcttcgggatcccgtgaccatcgactgtgggcacgtgttctgccggtcctgcaccaccgacgttaggcccatctccggcagccgaccggtctgtccgctgtgcaaaaagcccttcaaaaaggaaaacatcagacccgtgtggcagctcgccagtctcgtcgagaacatagaacgcttaaaagtagacaagggacggcagcccggcgaagtcactcgcgagcaacaggatgccaagctgtgcgagcggcatcgcgagaagctgcactattattgcgaagatgatggaaaactgttatgtgtgtag

SEQ ID NO: 305054 - DNA, 369 bp, Artificial Sequence
  derived and/or modified sequence
atggccaccagcgcccccctgcggagcctggaggaggaggtgacctgttctatttgtctcgactatctgcgggaccctgttaccatagactgcgggcacgtcttctgccgctcatgtacaacagatgtgagaccaatttccggctcaaggcccgtgtgtcccctgtgtaaaaagcccttcaaaaaagaaaacatcaggccggtgtggcaattggcttcactcgtcgaaaatattgagcggcttaaggtggataaaggacgacagccaggagaagttacccgcgaacagcaggacgcgaagctctgtgaaaggcaccgcgagaaattgcattactactgcgaagatgacgggaaactgctctgtgtttag

SEQ ID NO: 305055 - DNA, 474 bp, Artificial Sequence
  derived and/or modified sequence
atggccaccagcgcccccctgcggagcctggaggaggaggtgacctgcagtatatgtttggactatctgagggacccggtgactatcgattgcggccatgtattctgcagatcctgcaccacagatgtgcgcccaatctctggctcccgccctgtgtgcccactctgtaagaaacccttcaaaaaagagaatataagacctgtgtggcagttagcttccttagttgagaacatcgaacgcctaaaagtcgacaaagggcggcagcccggcgaggtgactagggagcagcaggatgctaagctgtgtgaacggcacagggagaaactgcactactactgtgaagacgacgggaagttgctctgcgtaatgtgccgcgagtcccgcgagcatcgaccacacaccgccgtacttatggaaaaggcggctcagccccaccgtgaaaagattttgaaccatctttcaaccctccgatag

SEQ ID NO: 305056 - DNA, 474 bp, Artificial Sequence
  derived and/or modified sequence
atggccaccagcgcccccctgcggagcctggaggaggaggtgacctgttccatctgcttagattatctccgtgaccctgtgaccatcgattgcgggcatgtgttctgtcggagttgcacaaccgacgttcgcccgatttctggaagtcgcccagtctgtcccctatgcaagaagccattcaagaaggaaaatattagaccggtctggcagttagcttctctcgttgagaatatcgaaagactgaaagttgacaaggggagacaacccggcgaagtcacaagagaacagcaggacgcgaagctgtgtgagaggcacagagaaaagctgcattactactgtgaggacgacggcaaactgctgtgtgtgatgtgcagggagtcgcgtgaacacaggcctcatactgcagtacttatggaaaaagccgcccagccccaccgggaaaagattcttaaccacttatctactctgcgttag

SEQ ID NO: 305057 - DNA, 369 bp, Artificial Sequence
  derived and/or modified sequence
atggccaccagcgcccccctgcggagcctggaggaggaggtgacctgctccatttgcctagattacctgagagacccggtgactattgactgtggccatgtcttttgccggtcctgcactaccgatgtacgccccatttcagggtccaggccagtctgcccattgtgcaaaaaacctttcaaaaaagagaacataaggccagtgtggcagttggcctccctcgtcgaaaacatcgaaaggctgaaagtagataagggccgtcagcccggggaagtaaccagagagcagcaggacgcgaagctttgtgagagacaccgggagaaacttcactactactgcgaggacgatggcaagctcttgtgcgtatag

SEQ ID NO: 305058 - DNA, 369 bp, Artificial Sequence
  derived and/or modified sequence
atggccaccagcgcccccctgcggagcctggaggaggaggtgacctgtagcatttgtctggactacctgcgagacccagtgaccatcgattgtggacatgtgttttgccggtcttgtacgacagacgtacgacctataagcggtagtcgtcccgtttgtccactttgcaaaaaaccttttaagaaggagaacatcaggcctgtgtggcagctcgcctccctcgtggagaatatagaacgcctcaaagtggacaaaggtaggcagcccggcgaggttaccagagagcagcaggacgccaagctgtgcgaacgccaccgagaaaagttgcactactattgcgaggacgatggcaagcttttgtgcgtgtag

SEQ ID NO: 305059 - DNA, 480 bp, Artificial Sequence
  derived and/or modified sequence
atggccaccagcgcccccctgcggagcctggaggaggaggtgacctgctcgatctgccttgactacctaagagaccctgttaccatcgattgtggccatgtattctgccgatcttgtaccaccgatgtgaggcctatttctggatccagacctgtctgccccctgtgtaagaaacccttcaaaaaggagaacatacggcctgtgtggcagcttgaaaagatcctcaaccacctgtctactctgagaagagatagagacaagatccaaggcttccaggccaaaggtgaagctgatattcttgccgcactgaagaaactgcaagatcagcgccagtacatagtggctgaattcgagcaggggcaccagttcctaagggagagggaggaacatcttcttgagcaactcgccaagctcgaacaggaattaactgagggcagagaaaaatttaaatcccgtggcgtcggcgaactcgctagatag

SEQ ID NO: 305060 - DNA, 369 bp, Artificial Sequence
  derived and/or modified sequence
atggccaccagcgcccccctgcggagcctggaggaggaggtgacctgtagcatttgcctggactatctccgggatccagtaaccattgactgcggccatgtgttttgccgcagctgcaccaccgacgtgcgcccgatttcgggctctcggcccgtttgcccgttgtgcaaaaagcctttcaagaaagaaaatatccgtccagtgtggcagctggccagtctggtggagaacatcgagcgcctcaaagtggacaaagggaggcagcctggagaagtcaccagagaacagcaggatgccaaactctgtgagcggcaccgtgaaaagctgcattactattgtgaggacgacggcaaactcttatgtgtttag

SEQ ID NO: 305061 - DNA, 480 bp, Artificial Sequence
  derived and/or modified sequence
atggccaccagcgcccccctgcggagcctggaggaggaggtgacctgttcgatttgcctggactacctgcgggatcccgtgacaatagactgtgggcacgtattttgtcgatcttgcaccactgacgtgcgtcctataagcggatcacgccctgtgtgtcccctgtgcaagaagccattcaaaaaggagaatatccgcccagtgtggcagcttgagaaaatactcaatcacctgagtacactgagacgggacagagacaaaattcagggctttcaggcaaagggtgaggcggacatcctggccgctctgaagaaactgcaagaccagagacagtacattgtcgctgaattcgaacagggccaccagttcctgagagagcgtgaggaacatctcttagagcagctggcaaagttggaacaggaactcacagagggccgcgagaaatttaaaagccgcggcgtcggggaactcgctcggtag

SEQ ID NO: 305062 - DNA, 369 bp, Artificial Sequence
  derived and/or modified sequence
atggccaccagcgcccccctgcggagcctggaggaggaggtgacctgtagtatttgcttggactacctgagggatcctgtaacgattgattgcgggcatgttttttgcaggtcctgcaccaccgatgttagacctattagcgggtcccgtcctgtgtgccccctatgtaaaaagccttttaagaaagagaacatcaggccagtatggcagttagcctccttagtggagaacattgagagacttaaggtcgataaagggaggcagccaggtgaggtaacaagggaacaacaggatgctaaactgtgcgagcgccatcgagaaaaactccattattattgtgaggatgatgggaagttactgtgcgtctag

SEQ ID NO: 305063 - DNA, 369 bp, Artificial Sequence
  derived and/or modified sequence
atggccaccagcgcccccctgcggagcctggaggaggaggtgacctgtagcatctgccttgattacctgcgcgatccggtaactattgactgcggccatgtgttttgtagatcatgcaccaccgacgttcgaccaatcagcggatctcggcccgtttgtcccttgtgtaagaagccctttaagaaagaaaatattaggccagtgtggcagctggcatctctggtggaaaacatcgaacgtttgaaagtcgacaagggtcggcagcccggggaggtaacacgagagcagcaggacgctaagctttgtgagcggcatagggaaaaattacattactactgcgaggacgacggtaagctcctttgcgtttag

SEQ ID NO: 305064 - DNA, 480 bp, Artificial Sequence
  derived and/or modified sequence
atggccaccagcgcccccctgcggagcctggaggaggaggtgacctgctcaatttgcctcgattatctgcgggaccccgtgacaatcgattgcggacacgtgttctgccggtcttgcactactgacgtgagacctatatcaggctccagacccgtgtgtccattgtgtaagaagccattcaagaaggagaacattcgccccgtctggcaactcgaaaagattctgaatcacctttctacccttcgcagggatagagataagatccaaggttttcaggccaagggcgaggcagacatcctggcggccttaaagaaactgcaggatcagcgtcagtacatcgttgccgaattcgagcaggggcaccaatttcttcgggaaagggaagaacatctacttgagcagctcgctaaactggagcaggagctaaccgagggccgcgagaagttcaagagccgcggagtcggggaactggcccgctag

SEQ ID NO: 305065 - DNA, 480 bp, Artificial Sequence
  derived and/or modified sequence
atggccaccagcgcccccctgcggagcctggaggaggaggtgacctgctccatttgcctggattacctaagggatcccgtgaccatcgattgtggacacgtgttttgcagaagttgcacgacagacgtgagacccatctccggcagccggccagtctgcccactgtgtaagaagcctttcaagaaggaaaatattcgacctgtgtggcaactggaaaagatattaaatcatttgagcacactgcggagggacagagataaaatacaagggtttcaggcaaaaggcgaggcagacattcttgcggcgctgaaaaagctgcaggaccagagacagtacattgtggccgaattcgagcaaggacaccagtttctgcgcgagagagaggagcacttgctggagcagctggccaagcttgaacaggaattgacagaaggccgcgaaaagtttaagagcaggggcgtaggcgagcttgcaagatag

SEQ ID NO: 305066 - DNA, 474 bp, Artificial Sequence
  derived and/or modified sequence
atggccaccagcgcccccctgcggagcctggaggaggaggtgacctgctccatctgtttggactatttaagggaccctgtcacaatcgactgcgggcatgtcttttgcagaagctgcaccaccgatgttcggcccatcagcggctcgcgcccagtgtgccccttgtgtaagaagccgttcaagaaggaaaacattaggcctgtttggcagctcgcctcacttgttgagaatatcgaacggctgaaggtggacaagggcagacagcctggcgaggtgacacgcgagcaacaggatgctaagctgtgtgagcggcatcgggagaaactccactattattgcgaggatgatgggaaactactctgtgttatgtgtcgggaaagtcgtgaacacagaccacataccgcagttctaatggaaaaagccgcacagcctcatcgggaaaagatactgaaccatctctcgactctgcggtag

SEQ ID NO: 305067 - DNA, 603 bp, Artificial Sequence
  derived and/or modified sequence
gtgcaggagcgggacccggaacagaccgccgtgagagaggaggggcgccggccgggattcgcggcccggagctcgggaccggagaagaagtcctcaccagtgaacggagacctctctgaactaaggataccatggccacgtcagccccactacggagcctggaagaggaggtgacctgctccatctgtcttgattacctgcgggaccctgtgaccattgactgtggccacgtcttctgccgcagctgcaccacagacgtccgccccatctcagggagccgccccgtctgcccactctgcaagaagccttttaagaaggagaacatccgacccgtgtggcaactggccagcctggtggagaacattgagcggctgaaggtggacaagggcaggcagccgggagaggtgacccgggagcagcaggatgcaaagttgtgcgagcgacaccgagagaagctgcactactactgtgaggacgacgggaagctgctgtgcgtgatgtgccgggagtcccgggagcacaggccccacacggccgtcctcatggagaaggccgcccagccccacagggaaaaaatcctgaaccacctgagtaccctaagga

SEQ ID NO: 305068 - DNA, 682 bp, Artificial Sequence
  derived and/or modified sequence
ggaaacctgttgagatcacagagaatatactgacggcataaaagggcagaaccatagcagggtgcgcctcgcagtcacctctgtgccctgctggttgtcttcccagcgctgctgtagttgccttccatggatctataggagagcaagtcctccaggagaagaagtcctcaccagtgaacggagacctctctgaactaaggataccatggccacgtcagccccactacggagcctggaagaggaggtgacctgctccatctgtcttgattacctgcgggaccctgtgaccattgactgtggccacgtcttctgccgcagctgcaccacagacgtccgccccatctcagggagccgccccgtctgcccactctgcaagaagccttttaagaaggagaacatccgacccgtgtggcaactggaaaaaatcctgaaccacctgagtaccctaaggagggacagagacaaaattcagggcttccaggcaaagggagaagctgatatcctggccgcgctgaagaagctccaggaccagaggcagtacattgtggctgagtttgagcagggtcatcagttcctgagggagcgggaggaacacctgctggaacagctggcgaagctggagcaggagctcacggagggcagggagaagttcaagagccggggcgtcggggagcttgcccgg

SEQ ID NO: 305069 - DNA, 603 bp, Artificial Sequence
  derived and/or modified sequence
gtgcaggagcgggacccggaacagaccgccgtgagagaggaggggtgccggccgggattcgcggcccggagctcgggaccggagaagaagtcctcaccagtgaacggagacctctctgaactaaggataccatggccacgtcagccccactacggagcctggaagaggaggtgacctgctccatctgtcttgattacctgcgggaccctgtgaccattgactgtggccacgtcttctgccgcagctgcaccacagacgtccgccccatctcagggagccgccccgtctgcccactctgcaagaagccttttaagaaggagaacatccgacccgtgtggcaactggccagcctggtggagaacattgagcggctgaaggtggacaagggcaggcagccgggagaggtgacccgggagcagcaggatgcaaagttgtgcgagcgacaccgagagaagctgcactactactgtgaggacgacgggaagctgctgtgcgtgatgtgccgggagtcccgggagcacaggccccacacggccgtcctcatggagaaggccgcccagccccacagggaaaaaatcctgaaccacctgagtaccctaagga

SEQ ID NO: 305070 - DNA, 554 bp, Artificial Sequence
  derived and/or modified sequence
ggccgggattcgcggcccggagctcgggaccggagaagaagtcctcaccagtgaacggagacctctctgaactaaggataccatggccacgtcagccccactacggagcctggaagaggaggtgacctgctccatctgtcttgattacctgcgggaccctgtgaccattgactgtggccacgtcttctgccgcagctgcaccacagacgtccgccccatctcagggagccgccccgtctgcccactctgcaagaagccttttaagaaggagaacatccgacccgtgtggcaactggccagcctggtggagaacattgagcggctgaaggtggacaagggcaggcagccgggagaggtgacccgggagcagcaggatgcaaagttgtgcgagcgacaccgagagaagctgcactactactgtgaggacgacgggaagctgctgtgcgtgatgtgccgggagtcccgggagcacaggccccacacggccgtcctcatggagaaggccgcccagccccacagggaaaaaatcctgaaccacctgagtaccctaagga

SEQ ID NO: 305071 - DNA, 603 bp, Artificial Sequence
  derived and/or modified sequence
gtgcaggagcgggacccggaacagaccgccgtgagagaggaggggcgccggccgggattcgcggcccggagctcgggaccggagaagaagtcctcaccagtgaacggagacctctctgaactaagaataccatggccacgtcagccccactacggagcctggaagaggaggtgacctgctccatctgtcttgattacctgcgggaccctgtgaccattgactgtggccacgtcttctgccgcagctgcaccacagacgtccgccccatctcagggagccgccccgtctgcccactctgcaagaagccttttaagaaggagaacatccgacccgtgtggcaactggccagcctggtggagaacattgagcggctgaaggtggacaagggcaggcagccgggagaggtgacccgggagcagcaggatgcaaagttgtgcgagcgacaccgagagaagctgcactactactgtgaggacgacgggaagctgctgtgcgtgatgtgccgggagtcccgggagcacaggccccacacggccgtcctcatggagaaggccgcccagccccacagggaaaaaatcctgaaccacctgagtaccctaagga

SEQ ID NO: 305072 - DNA, 474 bp, Artificial Sequence
  derived and/or modified sequence
atggcaactagtgccccactaaggtctcttgaggaggaggtaacttgtagcatttgcctggattatctgcgcgaccctgtgacgatcgactgtggtcacgtattctgtcggtcttgcaccactgacgtcaggccaatcagcggctctagacccgtgtgtcctttgtgtaaaaagccgtttaagaaagaaaacattaggcctgtttggcagctagcaagtttggtcgagaacatcgagcggcttaaggtggataaaggtcgacagccaggagaagtgactcgggagcaacaggacgccaaattgtgtgagcgccaccgggaaaaacttcattattactgcgaggatgacggtaagcttctctgtgttatgtgccgcgagtctagggagcacagaccccataccgccgttttgatggagaaagccgctcaaccccacagggaaaagatcttgaatcatctttccaccttacgatag

SEQ ID NO: 305073 - DNA, 480 bp, Artificial Sequence
  derived and/or modified sequence
atggcaacgtccgcaccattacgaagcctcgaagaagaggtcacctgcagtatttgtctcgattatctccgcgatcccgtcacaatcgactgcggacatgtcttttgtcggtcgtgtaccactgatgtccgccctataagtgggtcccgacctgtgtgtcccctatgcaagaagccttttaagaaagagaacattcggccagtgtggcagcttgagaagattttaaatcatttatccacactgagacgcgatcgggataagattcaggggtttcaggcgaagggggaagctgatatcctggcagcattaaagaagctgcaggaccagcggcagtatattgtggcagaattcgaacagggccaccagttcctccgcgagcgagaagagcatcttctggaacagctcgctaagttggagcaggaacttacggaaggccgagaaaaatttaagtctcggggagtcggggagctggcaagatag

SEQ ID NO: 305074 - DNA, 474 bp, Artificial Sequence
  derived and/or modified sequence
atggctacctccgctccgctgaggtccctagaggaggaagtcacatgcagcatttgtttggattatctgcgtgacccagtaaccatagactgtgggcatgtcttctgtcgctcctgtaccaccgacgtgcgaccaatttccggatcaaggcctgtgtgccccctgtgcaaaaaaccatttaaaaaggagaatatcaggccagtttggcagctggcttcccttgtggaaaacatagaacgattgaaggtcgacaagggacgacaaccaggagaagtcacgcgggagcagcaggacgctaagctctgcgaacggcacagagagaagctgcattattattgtgaggacgacgggaaactgctgtgcgtcatgtgtcgcgagtcaagggagcaccgccctcacacagccgtactaatggagaaggcggcacaaccacatcgggagaagatccttaaccacctgagcacattacggtag

SEQ ID NO: 305075 - DNA, 474 bp, Artificial Sequence
  derived and/or modified sequence
atggcaacctccgccccactgcggagcctggaggaggaggtcacatgttccatttgcttggactatctacgcgaccctgtgacaattgactgcgggcacgtcttttgcagaagttgcacgaccgacgtgcgcccaatttcgggctcgcgtcccgtctgccccctgtgtaagaaaccttttaagaaggaaaacatccgacctgtgtggcaactggcatctctggttgagaacatcgagagactcaaggttgacaaggggagacagcctggggaagtgacaagagagcaacaagacgctaagctgtgtgaaaggcatcgggagaaactgcactattactgcgaagatgatggaaagcttctgtgtgtgatgtgccgggagtcccgagaacaccggcctcacaccgcagtcctgatggaaaaggcagcacagccccaccgagaaaaaatactcaaccatctctcaacactaaggtag

SEQ ID NO: 305076 - DNA, 474 bp, Artificial Sequence
  derived and/or modified sequence
atggcaacttccgcccctctgcgcagtctcgaagaggaggtgacttgttctatttgtctggattatctgcgggaccctgttacaatagactgtggacatgtattctgtcgttcatgcactactgacgttagaccgatctcaggttcccgccctgtgtgtcctctgtgcaagaaaccattcaagaaggagaacattcggcctgtctggcagcttgccagcctcgtcgagaatatcgagagactgaaggtggataaagggaggcagccaggggaagtaaccagagaacaacaggatgccaagctctgtgagagacaccgtgagaaacttcactattattgcgaggatgacggcaaactattgtgtgtgatgtgccgagaatcgcgcgagcaccggcctcatactgccgtgctgatggagaaagcagctcagccacaccgagaaaaaatcttgaaccacctgtctaccctgaggtag

SEQ ID NO: 305077 - DNA, 480 bp, Artificial Sequence
  derived and/or modified sequence
atggctaccagcgcgccactgaggtcactcgaagaagaagtcacttgctcaatctgcctggattatctgcgagaccccgtaacgatcgactgtggtcatgtgttttgtagaagctgcactactgatgtgcgcccaatatcgggcagcaggcctgtgtgtccattgtgcaagaagccttttaagaaagaaaatatcaggccagtttggcagctcgaaaaaatcctcaaccacctgtctactttgcggagggatagggacaagatccagggattccaggcaaaaggagaagcggatattctcgcggctttaaagaagttgcaggaccagagacagtacattgtggctgagtttgagcagggccaccaattcctgcgtgagcgggaagagcaccttctggaacaactggccaagctggagcaggagctgactgaaggcagggaaaaatttaagtcaagaggcgtgggggagctcgctagatag

SEQ ID NO: 305078 - DNA, 474 bp, Artificial Sequence
  derived and/or modified sequence
atggcaacaagtgctccccttcgttctcttgaggaggaggttacctgcagcatctgcctggactacttaagggaccctgtgaccatagattgtggacatgtcttctgccgatcgtgtacaacagacgtgcggccaatctctggaagccgcccagtatgtcctctgtgtaagaaaccgtttaagaaggagaacatcagacctgtgtggcagcttgcttcactcgttgaaaacatcgagcggctaaaagtggacaagggaaggcagccaggggaggtaactcgtgaacagcaagacgccaaactgtgcgagcggcatcgtgaaaagctgcattactattgcgaagatgatggaaagctgctgtgcgtgatgtgcagggagagccgtgaacacaggccccataccgccgtgctgatggagaaggccgctcagcctcatcgagagaagattctgaaccatctgtctactctgcgatag

SEQ ID NO: 305079 - DNA, 480 bp, Artificial Sequence
  derived and/or modified sequence
atggccacttcagcgccactgcgttccttggaagaggaggtgacatgttctatttgtcttgactacctcagggacccggttaccatcgactgtggtcacgtgttctgtcgctcctgcaccactgacgtgcggcctatcagcgggagccgccctgtttgcccactgtgtaagaaaccgtttaagaaggaaaatatcagaccagtgtggcagctcgagaaaatcctgaatcatctcagcactctcaggcgcgatagggataaaatccaagggttccaggcgaagggcgaagcagatatccttgccgctttgaaaaagctccaggaccaaaggcaatacattgttgccgagttcgaacagggacatcagttccttcgtgagagggaagagcacttgctagaacaactcgcaaagctggagcaggaactaacggagggcagagaaaagtttaaatcaagaggcgtgggcgagctggcgagatag

SEQ ID NO: 305080 - DNA, 369 bp, Artificial Sequence
  derived and/or modified sequence
atggcaacttcagccccactacgatcattagaagaggaggtgacatgtagtatttgccttgactacttgcgggatcccgtcaccatcgactgtggccacgtgttttgccgttcgtgtactaccgacgtgcgccctatttccggcagccgacctgtctgccccctgtgcaagaagcctttcaagaaagagaacattcggccagtttggcagctggcctccttagtcgaaaacatagaacgtctgaaggtggacaaggggaggcagccaggagaggtgacccgcgagcaacaagacgccaaactctgcgaacgacatcgcgagaagctgcattattactgcgaggatgacggtaaactgctgtgtgtgtag

SEQ ID NO: 305081 - DNA, 369 bp, Artificial Sequence
  derived and/or modified sequence
atggcgacatctgcaccactgaggtctctggaggaggaggtcacatgctcaatttgcttggactatcttcgggacccggtgacaatcgactgtggtcatgttttctgcagatcttgtacaacagatgtgagacccatctcaggctccaggcctgtatgtccactgtgcaaaaagccatttaagaaggagaacatccggccagtgtggcagctggcttctctggtggaaaatatagaaagattaaaggtcgacaagggcaggcagccaggggaggttaccagggagcagcaggatgccaaactgtgtgagagacatagagaaaaactgcattattattgtgaggacgatgggaaactgctatgtgtctag

SEQ ID NO: 305082 - DNA, 369 bp, Artificial Sequence
  derived and/or modified sequence
atggcgacaagcgcccctctaaggtccctagaagaggaggtcacatgctcaatttgcctggactatctccgggaccctgtgaccattgactgtggccatgtgttttgtcggtcgtgtactacagatgtacggccaatttctgggtctagaccggtttgccccttatgtaaaaagccattcaaaaaagagaatattagacctgtgtggcagctagcatccctggtggagaatattgaacgtctgaaggtagacaaagggagacaacctggggaggtgacccgtgaacagcaagatgcaaagctgtgtgagcggcatagggagaaactgcactattattgcgaagatgacggaaagttgctctgtgtctag

SEQ ID NO: 305083 - DNA, 474 bp, Artificial Sequence
  derived and/or modified sequence
atggcaacaagcgcaccactgcgctcgctcgaggaagaggtgacatgtagcatctgtctcgattatcttcgtgaccccgtcaccattgattgcggccatgtcttctgccgcagttgtacgactgatgtcagacccattagcggaagccgacctgtgtgccccctgtgcaagaaacctttcaagaaagaaaatattcggccagtgtggcagctggcctctctggttgagaacatcgaaaggttaaaggtcgacaaggggagacagccaggcgaagtgactcgggagcaacaggatgctaagctgtgtgagaggcacagagaaaagctgcactactattgtgaggatgacgggaaactgttatgtgtgatgtgcagagagtccagggagcatcgacctcacaccgctgtgctcatggagaaagcagctcaaccacacagagagaaaatcctgaatcacctgtccacgctacgttag

SEQ ID NO: 305084 - DNA, 474 bp, Artificial Sequence
  derived and/or modified sequence
atggccacctcagctcctctgcggagcctggaagaagaagttacgtgttcaatttgtctggactatctgagagatcccgttaccatcgactgcgggcacgtattttgccgatcatgcactacagatgttcgaccaatcagcggaagcagaccagtgtgccccttatgtaagaagccattcaagaaagagaacatccgtccagtgtggcagttggctagcctggttgaaaacatcgagcgcctgaaagtagacaaggggaggcagccaggagaggtgacacgcgagcagcaggatgctaagctctgcgaaagacatcgagaaaaactgcactactactgcgaggacgacggcaaattactttgtgtcatgtgtagagagtcgagagaacatagaccgcatactgccgtcctaatggagaaagcagcccagccccaccgggaaaagatcttaaatcatctgtcaacattgagatag

SEQ ID NO: 305085 - DNA, 369 bp, Artificial Sequence
  derived and/or modified sequence
atggcgacaagtgctccgctcaggtcacttgaagaagaggttacttgttcgatctgtctcgattatctgagagatcccgttacaattgattgtgggcatgtgttttgccgatcatgtacgacggatgtcaggcctatcagtgggtcccgacctgtgtgtccactatgcaagaaaccattcaaaaaggagaacattcggcctgtgtggcaacttgcctctctagtcgagaatattgagaggcttaaggtagacaagggcaggcagcccggtgaagtgacaagggaacagcaggacgccaagctgtgcgaacgccatcgggagaagttgcattactactgcgaagacgacggcaagctgctctgcgtttag

SEQ ID NO: 305086 - DNA, 369 bp, Artificial Sequence
  derived and/or modified sequence
atggcaacatccgcgcctcttaggtccttagaggaggaggtgacgtgttctatctgtctcgattacctgagggatcctgtgaccattgactgcggacacgtgttctgtcgatcttgtacgacggacgtacgaccaatctctggcagcagacctgtttgccccctgtgtaagaaaccatttaaaaaagagaatatacgcccagtttggcagctggcttcgctggtcgaaaatattgaacgtctgaaagtggacaagggcagacagccgggtgaagtaactcgggagcagcaggacgccaaactttgcgagcggcatcgtgagaagcttcattactactgcgaagatgacggaaaactgctgtgcgtgtag

SEQ ID NO: 305087 - DNA, 480 bp, Artificial Sequence
  derived and/or modified sequence
atggccacctccgcaccactgagaagtcttgaggaggaggtaacctgttccatatgcctcgactacctgcgggacccagtcaccatcgactgtggccatgtcttctgccgatcgtgcaccacagatgtgcggcctatcagtggcagccgccctgtttgtcccctctgtaagaagccatttaagaaggaaaacattcggccagtgtggcagttggagaagattctcaatcacctatctacgctgcgtcgagatagagataagatacaaggcttccaagccaaaggggaggctgacattttagccgcacttaagaaactgcaggaccaaaggcaatatatcgtggccgaattcgaacagggtcaccagttcctgagggaaagggaggaacacctacttgaacaactggccaaactggaacaagaactgactgaagggcgtgagaagttcaaatcccggggagtgggtgaactggcaagatag

SEQ ID NO: 305088 - DNA, 369 bp, Artificial Sequence
  derived and/or modified sequence
atggccacaagtgccccactgcggtccttggaagaggaggtgacctgtagtatctgcctggattacctccgggaccccgtcacaattgattgtggccacgtcttttgccggtcttgtaccaccgatgttcgtcctatatctgggtctcggccagtgtgtcctttgtgtaagaagccgttcaaaaaagagaatatacggccagtttggcaattagcctccctggtggagaatatcgagcgactgaaggtggacaagggcaggcagcctggcgaggtgactcgcgagcagcaagatgccaaattatgcgaacggcatcgcgagaagcttcactactactgcgaagacgatggcaaattgctgtgcgtctag

SEQ ID NO: 305089 - DNA, 480 bp, Artificial Sequence
  derived and/or modified sequence
atggcgacatccgctccacttcgaagtttggaggaggaagtcacttgttctatctgcttggattacttaagggacccagtgacgatcgattgcggccacgtgttttgtcggtcgtgcacaaccgatgttcggccaatcagtggctcccgccctgtgtgtcccttgtgcaagaaacctttcaagaaggaaaatatccgaccagtttggcagctggaaaaaatactgaatcacttgtccaccctgcgacgggacagagataagatccaagggttccaggccaaaggcgaggccgacattctggcagcccttaagaagctgcaggaccaacggcagtacattgtagctgagtttgagcagggacatcaatttctccgggaaagggaggagcacctccttgaacaattagcaaagttggaacaggaactcactgaaggcagagaaaaatttaaatccaggggcgtcggtgagctcgcccgatag

SEQ ID NO: 305090 - DNA, 582 bp, Artificial Sequence
  derived and/or modified sequence
aacagaccgccgtgagagaggaggggtgccggccgggattcgcggcccggagctcgggaccggagtcaggaatggagagaagggtaatggttttacctcttattgtggaaacctgttgagatcacagagaatatactgacggcataaaagggcagaaccatagcagggtgcgaagtcctcaccagtgaacggagacctctctgaactaaggataccatggccacgtcagccccactacggagcctggaagaggaggtgacctgctccatctgtcttgattacctgcgggaccctgtgaccattgactgtggccacgtcttctgccgcagctgcaccacagacgtccgccccatctcagggagccgccccgtctgcccactctgcaagaagccttttaagaaggagaacatccgacccgtgtggcaactggccagcctggtggagaacattgagcggctgaaggtggacaagggcaggcagccgggagaggtgacccgggagcagcaggatgcaaagttgtgcgagcgacaccgagagaagctgcactactactgtgaggacgacgggaagctgctgtgcgtg

SEQ ID NO: 305091 - DNA, 369 bp, Artificial Sequence
  derived and/or modified sequence
atggctaccagcgccccactgagaagcctggaggaagaggtgacctgcagtatctgcttggactacctccgggatcctgtgaccattgattgcggccatgtattttgcagatcatgcaccaccgatgtgaggccgatctcaggctctagacctgtctgccctctttgtaagaagcctttcaaaaaggaaaatattagaccagtatggcagctggcttctctggtggagaatatcgagaggctgaaggtggacaagggacggcagccaggggaggtgactagggaacagcaagacgcgaagctttgcgagagacaccgtgagaaattgcattattattgcgaggacgatgggaaactcctttgtgtatag

SEQ ID NO: 305092 - DNA, 369 bp, Artificial Sequence
  derived and/or modified sequence
atggccacttcagcccctctgaggtctttggaggaagaagtgacgtgtagcatctgtcttgattatttacgggatccggtgaccatcgactgtggacacgtcttctgtcgaagttgcacaaccgatgtgaggccaatctctggaagcaggccggtatgtcctctctgtaagaagccttttaagaaggaaaacattcggcctgtgtggcagctcgcttccctggtggaaaatatcgaaagattaaaggtggacaaaggcagacaacctggcgaagttacgagagagcagcaagatgcaaaactctgtgagcgccacagggagaagctgcattattattgtgaagacgatggaaaactgttatgcgtttag

SEQ ID NO: 305093 - DNA, 480 bp, Artificial Sequence
  derived and/or modified sequence
atggccacctcggcaccactgagatctctggaggaggaagtaacttgtagtatttgcctagattacctcagagatcctgtgaccattgattgcggacatgtgttttgcaggtcttgcactaccgatgtgcggccaataagtggctcaaggccagtctgcccactgtgcaaaaagccctttaagaaggagaatatccgcccagtgtggcaactggaaaaaatcttaaatcacttgtccactttgaggcgtgaccgggacaaaattcagggatttcaggctaaaggtgaagcagatatcctggccgctttaaaaaaactgcaggaccagcgccagtatatagtcgccgagtttgagcagggacaccaatttctgcgcgagcgcgaggagcaccttcttgagcagctggctaaactggagcaggagttaaccgagggtagggaaaaattcaagtctcggggtgtcggggaactcgctcggtag

SEQ ID NO: 305094 - DNA, 480 bp, Artificial Sequence
  derived and/or modified sequence
atggcgactagcgcgccactccgatctttggaggaggaagttacctgttcaatatgtctggactatctccgcgatcctgtaacaattgactgtgggcacgtgttttgtcgatcatgtaccaccgatgtgcggccaatctcaggatcccggccagtgtgccccttgtgtaagaaaccgttcaaaaaggaaaacatcaggcctgtgtggcagctagagaaaatcttgaaccatctctctactctgcgaagagatagggataaaatacaaggcttccaggccaaaggggaggctgatatcttggcagcacttaagaaacttcaggatcagcgacagtacatcgtcgccgagttcgagcagggccaccagttcctgagggaaagagaggaacacctgctcgaacaactggcaaaactggaacaggagctaacagaagggagggaaaagtttaaatcaagaggggttggagaattggccagatag

SEQ ID NO: 305095 - DNA, 474 bp, Artificial Sequence
  derived and/or modified sequence
atggctacgtcagcaccactgcggtctttagaggaggaggttacatgctccatatgccttgattacttaagggacccggttacgatcgactgcgggcatgtcttctgcagaagctgtactaccgatgttcggccaatcagtgggtctcggccagtgtgtcccctttgtaagaagccatttaaaaaagaaaacatccgtcctgtctggcagctggcttcccttgtagagaacattgagcggttgaaagtagataaaggcaggcagcccggtgaggtgacccgcgagcagcaggacgccaaactttgcgagaggcacagggagaagctgcactattattgcgaggacgacgggaagttactctgcgtcatgtgccgtgaaagccgagagcatcgaccacacacagcggtcctgatggagaaggccgcacagccacacagagaaaagatcctcaatcatctcagtactctccgctag

SEQ ID NO: 305096 - DNA, 582 bp, Artificial Sequence
  derived and/or modified sequence
aacagaccgccgtgagagaggaggggcgccggccgggattcgcggcccggagctcgggaccggagtcaggaatggagagaagggtaatggtgttacctcttattgtggaaacctgttgagatcacagagaatatactgacggcataaaagggcagaaccatagcagggtgcgaagtcctcaccagtgaacggagacctctctgaactaaggataccatggccacgtcagccccactacggagcctggaagaggaggtgacctgctccatctgtcttgattacctgcgggaccctgtgaccattgactgtggccacgtcttctgccgcagctgcaccacagacgtccgccccatctcagggagccgccccgtctgcccactctgcaagaagccttttaagaaggagaacatccgacccgtgtggcaactggccagcctggtggagaacattgagcggctgaaggtggacaagggcaggcagccgggagaggtgacccgggagcagcaggatgcaaagttgtgcgagcgacaccgagagaagctgcactactactgtgaggacgacgggaagctgctgtgcgtg

SEQ ID NO: 305097 - DNA, 582 bp, Artificial Sequence
  derived and/or modified sequence
aacagaccgccgtgagagaggaggggcgccggccgggattcgcggcccggagctcgggaccggagtcaggaatggagagaagggtaatggtgttacctcttattgtggaaacctgttgagatcacagagaatatactgacggcataaaagggcagaaccatagcagggtgcgaagtcctcaccagtgaacggagacctctctgaactaagaataccatggccacgtcagccccactacggagcctggaagaggaggtgacctgctccatctgtcttgattacctgcgggaccctgtgaccattgactgtggccacgtcttctgccgcagctgcaccacagacgtccgccccatctcagggagccgccccgtctgcccactctgcaagaagccttttaagaaggagaacatccgacccgtgtggcaactggccagcctggtggagaacattgagcggctgaaggtggacaagggcaggcagccgggagaggtgacccgggagcagcaggatgcaaagttgtgcgagcgacaccgagagaagctgcactactactgtgaggacgacgggaagctgctgtgcgtg

SEQ ID NO: 305098 - DNA, 552 bp, Artificial Sequence
  derived and/or modified sequence
ggccgggattcgcggcccggagctcgggaccggagtcaggaatggagagaagggtaatggttttacctcttattgtggaaacctgttgagatcacagagaatatactgacggcataaaagggcagaaccatagcagggtgcgaagtcctcaccagtgaacggagacctctctgaactaaggataccatggccacgtcagccccactacggagcctggaagaggaggtgacctgctccatctgtcttgattacctgcgggaccctgtgaccattgactgtggccacgtcttctgccgcagctgcaccacagacgtccgccccatctcagggagccgccccgtctgcccactctgcaagaagccttttaagaaggagaacatccgacccgtgtggcaactggccagcctggtggagaacattgagcggctgaaggtggacaagggcaggcagccgggagaggtgacccgggagcagcaggatgcaaagttgtgcgagcgacaccgagagaagctgcactactactgtgaggacgacgggaagctgctgtgcgtg

SEQ ID NO: 305099 - DNA, 582 bp, Artificial Sequence
  derived and/or modified sequence
aacagaccgccgtgagagaggaggggcgccggccgggattcgcggcccggagctcgggaccggagtcaggaatggagagaagggtaatggttttacctcttattgtggaaacctgttgagatcacagagaatatactgacggcataaaagggcagaaccatagcagggtgcgaagtcctcaccagtgaacggagacctctctgaactaaggataccatggccacgtcagccccactacggagcctggaagaggaggtgacctgctccatctgtcttgattacctgcgggaccctgtgaccattgactgtggccacgtcttctgccgcagctgcaccacagacgtccgccccatctcagggagccgccccgtctgcccactctgcaagaagccttttaagaaggagaacatccgacccgtgtggcaactggccagcctggtggagaacattgagcggctgaaggtggacaagggcaggcagccgggagaggtgacccgggagcagcaggatgcaaagttgtgcgagcgacaccgagagaagctgcactactactgtgaggacgacgggaagctgctgtgcgtg

SEQ ID NO: 305100 - DNA, 682 bp, Artificial Sequence
  derived and/or modified sequence
ggaaacctgttgagatcacagagaatatactgacggcataaaagggcagaaccatagcagggtgcgcctcgcagtcacctctgtgccctgctggttgtcttcccagcgctgctgtagttgccttccatggatctataggagagcaagtcctccaggagaagaagtcctcaccagtgaacggagacctctctgaactaaggataccatggccacgtcagccccactacggagcctggaagaggaggtgacctgctccatctgtcttgattacctgcgggaccctgtgaccattgactgtggccacgtcttctgccgcagctgcaccacagacgtccgccccatctcagggagccgccccgtctgcccactctgcaagaagccttttaagaaggagaacatccgacccgtgtggcaactggaaaaaatcctgaaccacctgagtaccctaaggagagacagagacaaaattcagggcttccaggcaaagggagaagctgatatcctggccgcgctgaagaagctccaggaccagaggcagtacattgtggctgagtttgagcagggtcatcagttcctgagggagcgggaggaacacctgctggaacagctggcgaagctggagcaggagctcacggagggcagggagaagttcaagagccggggcgtcggggagcttgcccgg

SEQ ID NO: 305101 - DNA, 682 bp, Artificial Sequence
  derived and/or modified sequence
ggaaacctgttgagatcacagagaatatactgacggcataaaagggcagaaccatagcagggtgcgcctcgcagtcacctctgtgccctgctggttgtcttcccagcgctgctgtagttgccttccatggatctataggagagcaagtcctccaggagaagaagtcctcaccagtgaacggagacctctctgaactaagaataccatggccacgtcagccccactacggagcctggaagaggaggtgacctgctccatctgtcttgattacctgcgggaccctgtgaccattgactgtggccacgtcttctgccgcagctgcaccacagacgtccgccccatctcagggagccgccccgtctgcccactctgcaagaagccttttaagaaggagaacatccgacccgtgtggcaactggaaaaaatcctgaaccacctgagtaccctaaggagagacagagacaaaattcagggcttccaggcaaagggagaagctgatatcctggccgcgctgaagaagctccaggaccagaggcagtacattgtggctgagtttgagcagggtcatcagttcctgagggagcgggaggaacacctgctggaacagctggcgaagctggagcaggagctcacggagggcagggagaagttcaagagccggggcgtcggggagcttgcccgg

SEQ ID NO: 305102 - DNA, 234 bp, Artificial Sequence
  derived and/or modified sequence
aaggccttcagccagagaacccacctggtgcagcaccagagaatccacaccggcgagaagccctacacctgcaacgagtgcggcaaggccttcagccagagaggccacttcatggagcaccagaagatccacaccggcgagaagcccttcaagtgcgacgagtgcgacaagaccttcaccagaagcacccacctgaccaccagcaagaacagctactggagaaagaacctgtag

SEQ ID NO: 305103 - DNA, 234 bp, Artificial Sequence
  derived and/or modified sequence
aaggcattctcacagcgcacccacctggttcagcatcagcggattcatactggggagaagccttatacctgcaatgagtgcggtaaggcattttctcaaaggggccactttatggaacaccaaaagatacataccggcgagaaaccatttaagtgcgatgagtgcgacaagacatttaccaggtctacacatcttaccacctcgaagaattcgtattggaggaagaacttgtag

SEQ ID NO: 305104 - DNA, 234 bp, Artificial Sequence
  derived and/or modified sequence
aaggccttcagccagaggacccacctggtgcagcaccagaggatccacactggagagaagccctacacctgcaatgaatgtgggaaggccttcagccagaggggccacttcatggagcaccagaagatccacactggagagaagcccttcaagtgtgatgaatgtgacaagaccttcaccaggagcacccacctgaccaccagcaagaacagctactggaggaagaacctgtag

SEQ ID NO: 305105 - DNA, 234 bp, Artificial Sequence
  derived and/or modified sequence
aaggccttcagccagcggacccacctggtgcagcaccagcggatccatacaggagaaaagccttatacttgcaacgagtgtggcaaggctttttctcagagagggcattttatggaacaccagaaaattcataccggcgaaaagccattcaaatgcgatgaatgcgacaagacattcacaaggagtacacatctcacaacttctaaaaactcatactggaggaaaaacctgtag

SEQ ID NO: 305106 - DNA, 234 bp, Artificial Sequence
  derived and/or modified sequence
aaagccttctcacagcgaacccatcttgtgcaacatcagcgaatccacactggcgagaaaccctatacatgcaacgagtgtggcaaagctttctcacagcgcggacacttcatggagcatcagaaaatacataccggtgagaaaccatttaaatgcgacgagtgtgacaagaccttcacaagatccacacatttgacgaccagtaaaaactcatactggagaaaaaacttatag

SEQ ID NO: 305107 - DNA, 234 bp, Artificial Sequence
  derived and/or modified sequence
aaagcctttagtcagaggacccatcttgttcagcatcagagaattcatactggcgagaagccatacacttgtaatgagtgtggaaaagcctttagccagagaggccactttatggaacatcagaaaattcatacgggagaaaaaccttttaaatgtgatgaatgtgataaaaccttcaccaggagcacacaccttactacatcaaaaaattcatactggagaaaaaacctataa

SEQ ID NO: 305108 - protein, 445 aa, Artificial Sequence
  derived and/or modified sequence
MNTNSKEVLSLGVQVPEAWEELLTMKVEAKSHLQWQESRLKRSNPLAREIFRRHFRQLCYQETPGPREALTRLQELCYQWLRPHVSTKEQILDLLVLEQFLSILPKELQGWVREHCPESGEEAVILLEDLERELDEPQHEMVAHRHRQEVLCKEMVPLAEQTPLTLQSQPKEPQLTCDSAQKCHSIGETDLIRSLRRRAVLIPLGAHLFSTDTFLFSKPVVIPQLKGGGETWPNNRGVLRDEVTKTEDRELVLRKDCPKIVEPHGKMFNEQTWEVSQQDPSHGEVGEHKDRIERQWGNLLGEGQHKCDECGKSFTQSSGLIRHQRIHTGERPYECNECGKAFSRSSGLFNHRGIHNIQKRYHCKECGKVFSQSAGLIQHQRIHKGEKPYQCSQCSKSYSRRSFLIEHQRSHTGERPHQCIECGKSFNRHCNLIRHQKIHTVAELV

SEQ ID NO: 305109 - DNA, 1791 bp, Artificial Sequence
  derived and/or modified sequence
atctttgttccctgcccggccattgttcgtgccgcgcttctagcaacgccgggccggtaaccccctctccctccttgcgcgttccgggtctcgcaagcgcctccaaggtttgtcttgaagcatagctccagctggagggtaccttttaagctgttcaaggtcaagatgaatacaaactcaaaggaggttttatccctgggtgttcaagttcccgaggcatgggaagaacttctgacaatgaaagtggaagcaaaaagtcaccttcaatggcaggaatccagactgaaacgcagtaatccactggcaagggaaatcttccgaaggcactttcgacagctgtgctaccaagagacccctggaccaagggaggctcttactcgactccaggaactttgctaccagtggttgaggccacatgtgagcacaaaggagcagattttggatctgctggtgctggagcagtttctatccattctgcccaaggagctccagggctgggtgagggaacactgtccagagagtggagaagaggctgtgattttgctggaggatctggagagagagctcgatgaaccacaacatgagatggtggcccacagacacagacaagaagtcctctgtaaagagatggtgcctctagcagagcagacaccactgacccttcagtcccagcctaaggagccacagctcacatgtgactctgctcagaagtgccattctattggagagacagatttaatacgaagtttgaggagaagggcagtactgatcccacttggggcccatctgttctctacagacacatttttattttccaaacctgttgtgatcccccagctaaaaggaggaggagaaacatggcctaacaacagaggagtcctaagagatgaagtaaccaagactgaggacagagagttggtgctaaggaaagactgtcctaagatagtggaaccacatgggaaaatgtttaatgagcagacctgggaggtatcacagcaggatccctcacatggagaagttggtgaacataaggataggatagagaggcagtggggaaacctcttaggagaggggcaacacaaatgtgatgaatgtgggaagagctttactcagagctcaggtctcattcgacatcaaagaattcatactggagaaagaccttatgaatgtaatgaatgtgggaaagccttcagtcgaagttctggtctttttaatcaccgaggaatccacaatatacagaaacggtaccactgcaaggagtgtgggaaggtcttcagtcagagtgcgggtcttatccagcatcagagaatccacaaaggagaaaagccgtatcagtgcagccagtgcagtaagagctacagtcggcgttcatttctcattgaacatcagagaagccacacaggggagcgacctcaccagtgcattgaatgtgggaaaagctttaatcgacactgcaacctcattcgccatcagaagatccacacagtggctgagctggtctagggcttggctatgagcaagttttccagatcaccacccaagttgtgtggggcaggttgagactagaaaatgcctctttcttcctttctccatgaaatgtgtttgaaacaaatcctgacttaaggcccagggacttccttaaaggaaagttgggtgtttgaagctactgttttctcttttgttcattttacctctttcttactcttactagctgtgtccctcttatttataatttatttatttttttgagatggctgctaaacccttctaataatataataaatggcactg

SEQ ID NO: 305110 - protein, 394 aa, Artificial Sequence
  derived and/or modified sequence
MNTNSKEVLSLGVQVPEAWEELLTMKVEAKSHLQWQESRLKRSNPLAREIFRRHFRQLCYQETPGPREALTRLQELCYQWLRPHVSTKEQILDLLVLEQFLSILPKELQGWVREHCPESGEEAVILLEDLERELDEPQHEMVAHRHRQEVLCKEMVPLAEQTPLTLQSQPKEPQLTCDSAQKCHSIGETDEVTKTEDRELVLRKDCPKIVEPHGKMFNEQTWEVSQQDPSHGEVGEHKDRIERQWGNLLGEGQHKCDECGKSFTQSSGLIRHQRIHTGERPYECNECGKAFSRSSGLFNHRGIHNIQKRYHCKECGKVFSQSAGLIQHQRIHKGEKPYQCSQCSKSYSRRSFLIEHQRSHTGERPHQCIECGKSFNRHCNLIRHQKIHTVAELV

SEQ ID NO: 305111 - DNA, 1667 bp, Artificial Sequence
  derived and/or modified sequence
gggcattgttcgtgccgcgcttctagcaacgccgggccggtaaccccctctccctccttgcgcgttccgggtctcgcaagcgcctccaaggtttgtcttgaagcatagctccagctggagggtaccttttaagctgttcaaggtcaagatgaatacaaactcaaaggaggttttatccctgggtgttcaagttcccgaggcatgggaagaacttctgacaatgaaagtggaagcaaaaagtcaccttcaatggcaggaatccagactgaaacgcagtaatccactggcaagggaaatcttccgaaggcactttcgacagctgtgctaccaagagacccctggaccaagggaggctcttactcgactccaggaactttgctaccagtggttgaggccacatgtgagcacaaaggagcagattttggatctgctggtgctggagcagtttctatccattctgcccaaggagctccagggctgggtgagggaacactgtccagagagtggagaagaggctgtgattttgctggaggatctggagagagagctcgatgaaccacaacatgagatggtggcccacagacacagacaagaagtcctctgtaaagagatggtgcctctagcagagcagacaccactgacccttcagtcccagcctaaggagccacagctcacatgtgactctgctcagaagtgccattctattggagagacagatgaagtaaccaagactgaggacagagagttggtgctaaggaaagactgtcctaagatagtggaaccacatgggaaaatgtttaatgagcagacctgggaggtatcacagcaggatccctcacatggagaagttggtgaacataaggataggatagagaggcagtggggaaacctcttaggagaggggcaacacaaatgtgatgaatgtgggaagagctttactcagagctcaggtctcattcgacatcaaagaattcatactggagaaagaccttatgaatgtaatgaatgtgggaaagccttcagtcgaagttctggtctttttaatcaccgaggaatccacaatatacagaaacggtaccactgcaaggagtgtgggaaggtcttcagtcagagtgcgggtcttatccagcatcagagaatccacaaaggagaaaagccgtatcagtgcagccagtgcagtaagagctacagtcggcgttcatttctcattgaacatcagagaagccacacaggggagcgacctcaccagtgcattgaatgtgggaaaagctttaatcgacactgcaacctcattcgccatcagaagatccacacagtggctgagctggtctagggcttggctatgagcaagttttccagatcaccacccaagttgtgtggggcaggttgagactagaaaatgcctctttcttcctttctccatgaaatgtgtttgaaacaaatcctgacttaaggcccagggacttccttaaaggaaagttgggtgtttgaagctactgttttctcttttgttcattttacctctttcttactcttactagctgtgtccctcttatttataatttatttatttttttgagatggctgctaaacccttctaataatataataaatggcactgccacagccaacatgcccaaaaaaaaaaaaaaaaaaaaaaaaaaaaa

SEQ ID NO: 305112 - DNA, 1621 bp, Artificial Sequence
  derived and/or modified sequence
ggccattgttcgtgccgcgcttctagcaacgccgggccggtaaccccctctccctccttgcgcgttccgggtctcgcaagcgcctccaaggtttgtcttgaagcatagctccagctggagggtaccttttaagctgttcaaggtcaagatgaatacaaactcaaaggaggttttatccctgggtgttcaagttcccgaggcatgggaagaacttctgacaatgaaagtggaagcaaaaagtcaccttcaatggcaggaatccagactgaaacgcagtaatccactggcaagggaaatcttccgaaggcactttcgacagctgtgctaccaagagacccctggaccaagggaggctcttactcgactccaggaactttgctaccagtggttgaggccacatgtgagcacaaaggagcagattttggatctgctggtgctggagcagtttctatccattctgcccaaggagctccagggctgggtgagggaacactgtccagagagtggagaagaggctgtgattttgctggaggatctggagagagagctcgatgaaccacaacatgagatggtggcccacagacacagacaagaagtcctctgtaaagagatggtgcctctagcagagcagacaccactgacccttcagtcccagcctaaggagccacagctcacatgtgactctgctcagaagtgccattctattggagagacagatgaagtaaccaagactgaggacagagagttggtgctaaggaaagactgtcctaagatagtggaaccacatgggaaaatgtttaatgagcagacctgggaggtatcacagcaggatccctcacatggagaagttggtgaacataaggataggatagagaggcagtggggaaacctcttaggagaggggcaacacaaatgtgatgaatgtgggaagagctttactcagagctcaggtctcattcgacatcaaagaattcatactggagaaagaccttatgaatgtaatgaatgtgggaaagccttcagtcgaagttctggtctttttaatcaccgaggaatccacaatatacagaaacggtaccactgcaaggagtgtgggaaggtcttcagtcagagtgcgggtcttatccagcatcagagaatccacaaaggagaaaagccgtatcagtgcagccagtgcagtaagagctacagtcggcgttcatttctcattgaacatcagagaagccacacaggggagcgacctcaccagtgcattgaatgtgggaaaagctttaatcgacactgcaacctcattcgccatcagaagatccacacagtggctgagctggtctagggcttggctatgagcaagttttccagatcaccacccaagttgtgtggggcaggttgagactagaaaatgcctctttcttcctttctccatgaaatgtgtttgaaacaaatcctgacttaaggcccagggacttccttaaaggaaagttgggtgtttgaagctactgttttctcttttgttcattttacctctttcttactcttactagctgtgtccctcttatttataatttatttatttttttgagatggctgctaaacccttctaataatataataaatggcactg

SEQ ID NO: 305113 - DNA, 579 bp, Artificial Sequence
  derived and/or modified sequence
atacaaattccaggctaacggtgacagtggctgcctcggggagtgggactaaggaggggtaggtggggtttgacattttactttattaattttggtattgtctgagggtttttaaaccataaataatgtattaattttaaaaatgcttttaaaaatcatcattttcaatagttaacggtctatgcttcatcaacgttttccgtttaaaacctgtgtgcggcccacacacgtatgacattctgattatgtgattcactgctgaaaaagaactggacgccaggaaattgggggttgagtccgaagcaaggtgaacgccggacatcgagacatggaatcctagaccggcccggaagtgcctctgctccgtccgccttcgaggagaggcaagcgcctccaaggtttgtcttgaagcatagctccagctggagggtaccttttaagctgttcaaggtcaagatgaatacaaactcaaaggaggttttatccctgggtgttcaagttcccgaggcatgggaagaacttctgacaatgaaagtggaagcaaaaagtcaccttcaatggcaggaatccagactgaaa

SEQ ID NO: 305114 - DNA, 1601 bp, Artificial Sequence
  derived and/or modified sequence
ggccattgttcgtgccgcgcttctagcaacgccgggccggcaagcgcctccaaggtttgtcttgaagcatagctccagctggagggtaccttttaagctgttcaaggtcaagatgaatacaaactcaaaggaggttttatccctgggtgttcaagttcccgaggcatgggaagaacttctgacaatgaaagtggaagcaaaaagtcaccttcaatggcaggaatccagactgaaacgcagtaatccactggcaagggaaatcttccgaaggcactttcgacagctgtgctaccaagagacccctggaccaagggaggctcttactcgactccaggaactttgctaccagtggttgaggccacatgtgagcacaaaggagcagattttggatctgctggtgctggagcagtttctatccattctgcccaaggagctccagggctgggtgagggaacactgtccagagagtggagaagaggctgtgattttgctggaggatctggagagagagctcgatgaaccacaacatgagatggtggcccacagacacagacaagaagtcctctgtaaagagatggtgcctctagcagagcagacaccactgacccttcagtcccagcctaaggagccacagctcacatgtgactctgctcagaagtgccattctattggagagacagatgaagtaaccaagactgaggacagagagttggtgctaaggaaagactgtcctaagatagtggaaccacatgggaaaatgtttaatgagcagacctgggaggtatcacagcaggatccctcacatggagaagttggtgaacataaggataggatagagaggcagtggggaaacctcttaggagaggggcaacacaaatgtgatgaatgtgggaagagctttactcagagctcaggtctcattcgacatcaaagaattcatactggagaaagaccttatgaatgtaatgaatgtgggaaagccttcagtcgaagttctggtctttttaatcaccgaggaatccacaatatacagaaacggtaccactgcaaggagtgtgggaaggtcttcagtcagagtgcgggtcttatccagcatcagagaatccacaaaggagaaaagccgtatcagtgcagccagtgcagtaagagctacagtcggcgttcatttctcattgaacatcagagaagccacacaggggagcgacctcaccagtgcattgaatgtgggaaaagctttaatcgacactgcaacctcattcgccatcagaagatccacacagtggctgagctggtctagggcttggctatgagcaagttttccagatcaccacccaagttgtgtggggcaggttgagactagaaaatgcctctttcttcctttctccatgaaatgtgtttgaaacaaatcctgacttaaggcccagggacttccttaaaggaaagttgggtgtttgaagctactgttttctcttttgttcattttacctctttcttactcttactagctgtgtccctcttatttataatttatttatttttttgagatggctgctaaacccttctaataatataataaatggcactgccacagccaacatgcc

SEQ ID NO: 305115 - protein, 251 aa, Artificial Sequence
  derived and/or modified sequence
MPHLASLFTASSRCCPHPLRPEGSGAMGPEALSSLLLLLLVASGDADMKGHFDPAKCRYALGMQDRTIPDSDISASSSWSDSTAARHSRLESSDGDGAWCPAGSVFPKEEEYLQVDLQRLHLVALVGTQGRHAGGLGKEFSRSYRLRYSRDGRRWMGWKDRWGQEVISGNEDPEGVVLKDLGPPMVARLVRFYPRADRVMSVCLRVELYGCLWRGEWLSFLGICFLSRGLEGGECGEWASRIPSPAGKLSL

SEQ ID NO: 305116 - protein, 196 aa, Artificial Sequence
  derived and/or modified sequence
MPHLASLFTASSRCCPHPLRPEGSGAMGPEALSSLLLLLLVASGDADMKGHFDPAKCRYALGMQDRTIPDSDISASSSWSDSTAARHSRLESSDGDGAWCPAGSVFPKEEEYLQVDLQRLHLVALVGTQGRHAGGLGKEFSRSYRLRYSRDGRRWMGWKDRWGQEVISGNEDPEGVVLKDLGPPMVARLVRFYPRA

SEQ ID NO: 305117 - protein, 112 aa, Artificial Sequence
  derived and/or modified sequence
MGPEALSSLLLLLLVASGDADMKGHFDPAKCRYALGMQDRTIPDSDISASSSWSDSTAARHSRLESSDGDGAWCPAGSVFPKEEEYLQVDLQRLHLVALVGTQGRHAGGLGK

SEQ ID NO: 305118 - protein, 166 aa, Artificial Sequence
  derived and/or modified sequence
MGPEALSSLLLLLLVASGDADMKGHFDPAKCRYALGMQDRTIPDSDISASSSWSDSTAARHSRLESSDGDGAWCPAGSVFPKEEEYLQVDLQRLHLVALVGTQGRHAGGLGKEFSRSYRLRYSRDGRRWMGWKDRWGQEVISGNEDPEGVVLKDLGPPMVARLVRF

SEQ ID NO: 305119 - protein, 139 aa, Artificial Sequence
  derived and/or modified sequence
MGPEALSSLLLLLLVASGDADMKGHFDPAKCRYALGMQDRTIPDSDISASSSWSDSTAARHSRLESSDGDGAWCPAGSVFPKEEEYLQVDLQRLHLVALVGTQGRHAGGLGKEFSRSYRLRYSRDGRRWMGWKDRWGQE

SEQ ID NO: 305120 - protein, 209 aa, Artificial Sequence
  derived and/or modified sequence
MGPEALSSLLLLLLVASGDADMKGHFDPAKCRYALGMQDRTIPDSDISASSSWSDSTAARHSRLESSDGDGAWCPAGSVFPKEEEYLQVDLQRLHLVALVGTQGRHAGGLGKEFSRSYRLRYSRDGRRWMGWKDRWGQEVISGNEDPEGVVLKDLGPPMVARLVRFYPRADRVMSVCLRVELYGCLWRDGLLSYTAPVGQTMYLSEAVY

SEQ ID NO: 305121 - protein, 147 aa, Artificial Sequence
  derived and/or modified sequence
MGPEALSSLLLLLLVASGDADMKGHFDPAKCRYALGMQDRTIPDSDISASSSWSDSTAARHSRLESSDGDGAWCPAGSVFPKEEEYLQVDLQRLHLVALVGTQGRHAGGLGKEFSRSYRLRYSRDGRRWMGWKDRWGQEVISGNEDP

SEQ ID NO: 305122 - protein, 919 aa, Artificial Sequence
  derived and/or modified sequence
MGPEALSSLLLLLLVASGDADMKGHFDPAKCRYALGMQDRTIPDSDISASSSWSDSTAARHSRLESSDGDGAWCPAGSVFPKEEEYLQVDLQRLHLVALVGTQGRHAGGLGKEFSRSYRLRYSRDGRRWMGWKDRWGQEVISGNEDPEGVVLKDLGPPMVARLVRFYPRADRVMSVCLRVELYGCLWRDGLLSYTAPVGQTMYLSEAVYLNDSTYDGHTVGGLQYGGLGQLADGVVGLDDFRKSQELRVWPGYDYVGWSNHSFSSGYVEMEFEFDRLRAFQAMQVHCNNMHTLGARLPGGVECRFRRGPAMAWEGEPMRHNLGGNLGDPRARAVSVPLGGRVARFLQCRFLFAGPWLLFSEISFISDVVNNSSPALGGTFPPAPWWPPGPPPTNFSSLELEPRGQQPVAKAEGSPTAILIGCLVAIILLLLLIIALMLWRLHWRRLLSKAERRVLEEELTVHLSVPGDTILINNRPGPREPPPYQEPRPRGNPPHSAPCVPNGSALLLSNPAYRLLLATYARPPRGPGPPTPAWAKPTNTQAYSGDYMEPEKPGAPLLPPPPQNSVPHYAEADIVTLQGVTGGNTYAVPALPPGAVGDGPPRVDFPRSRLRFKEKLGEGQFGEVHLCEVDSPQDLVSLDFPLNVRKGHPLLVAVKILRPDATKNASFSLFSRNDFLKEVKIMSRLKDPNIIRLLGVCVQDDPLCMITDYMENGDLNQFLSAHQLEDKAAEGAPGDGQAAQGPTISYPMLLHVAAQIASGMRYLATLNFVHRDLATRNCLVGENFTIKIADFGMSRNLYAGDYYRVQGRAVLPIRWMAWECILMGKFTTASDVWAFGVTLWEVLMLCRAQPFGQLTDEQVIENAGEFFRDQGRQVYLSRPPACPQGLYELMLRCWSRESEQRPPFSQLHRFLAEDALNTV

SEQ ID NO: 305123 - protein, 378 aa, Artificial Sequence
  derived and/or modified sequence
  misc_feature (1)..(1): Xaa can be any naturally occurring amino acid
XYSGDYMEPEKPGAPLLPPPPQNSVPHYAEADIVTLQGVTGGNTYAVPALPPGAVGDGPPRVDFPRSRLRFKEKLGEGQFGEVHLCEVDSPQDLVSLDFPLNVRKGHPLLVAVKILRPDATKNASFSLFSRNDFLKEVKIMSRLKDPNIIRLLGVCVQDDPLCMITDYMENGDLNQFLSAHQLEDKAAEGAPGDGQAAQGPTISYPMLLHVAAQIASGMRYLATLNFVHRDLATRNCLVGENFTIKIADFGMSRNLYAGDYYRVQGRAVLPIRWMAWECILMGKFTTASDVWAFGVTLWEVLMLCRAQPFGQLTDEQVIENAGEFFRDQGRQVYLSRPPACPQGLYELMLRCWSRESEQRPPFSQLHRFLAEDALNTV

SEQ ID NO: 305124 - protein, 153 aa, Artificial Sequence
  derived and/or modified sequence
MGPEALSSLLLLLLVASGDADMKGHFDPAKCRYALGMQDRTIPDSDISASSSWSDSTAARHSRLESSDGDGAWCPAGSVFPKEEEYLQVDLQRLHLVALVGTQGRHAGGLGKEFSRSYRLRYSRDGRRWMGWKDRWGQEVISGNEDPEGVVLK

SEQ ID NO: 305125 - protein, 51 aa, Artificial Sequence
  derived and/or modified sequence
MGPEALSSLLLLLLVASGDADMKGHFDPAKCRYALGMQDRTIPDSDISASS

SEQ ID NO: 305126 - protein, 41 aa, Artificial Sequence
  derived and/or modified sequence
MGPEALSSLLLLLLVASGDADMKGHFDPAKCRYALGMQDRT

SEQ ID NO: 305127 - protein, 73 aa, Artificial Sequence
  derived and/or modified sequence
MGPEALSSLLLLLLVASGDADMKGHFDPAKCRYALGMQDRTIPDSDISASSSWSDSTAARHSRLESSDGDGAW

SEQ ID NO: 305128 - protein, 132 aa, Artificial Sequence
  derived and/or modified sequence
MGPEALSSLLLLLLVASGDADMKGHFDPAKCRYALGMQDRTIPDSDISASSSWSDSTAARHSRLESSDGDGAWCPAGSVFPKEEEYLQVDLQRLHLVALVGTQGRHAGGLGKEFSRSYRLRYSRDGRRWMGW

SEQ ID NO: 305129 - protein, 70 aa, Artificial Sequence
  derived and/or modified sequence
MGPEALSSLLLLLLVASGDADMKGHFDPAKCRYALGMQDRTIPDSDISASSSWSDSTAARHSRLESSDGD

SEQ ID NO: 305130 - protein, 78 aa, Artificial Sequence
  derived and/or modified sequence
MGPEALSSLLLLLLVASGDADMKGHFDPAKCRYALGMQDRTIPDSDISASSSWSDSTAARHSRLESSDGDGAWCPAGS

SEQ ID NO: 305131 - protein, 127 aa, Artificial Sequence
  derived and/or modified sequence
MGPEALSSLLLLLLVASGDADMKGHFDPAKCRYALGMQDRTIPDSDISASSSWSDSTAARHSRLESSDGDGAWCPAGSVFPKEEEYLQVDLQRLHLVALVGTQGRHAGGLGKEFSRSYRLRYSRDGR

SEQ ID NO: 305132 - protein, 143 aa, Artificial Sequence
  derived and/or modified sequence
MGPEALSSLLLLLLVASGDADMKGHFDPAKCRYALGMQDRTIPDSDISASSSWSDSTAARHSRLESSDGDGAWCPAGSVFPKEEEYLQVDLQRLHLVALVGTQGRHAGGLGKEFSRSYRLRYSRDGRRWMGWKDRWGQEVISG

SEQ ID NO: 305133 - protein, 170 aa, Artificial Sequence
  derived and/or modified sequence
MGPEALSSLLLLLLVASGDADMKGHFDPAKCRYALGMQDRTIPDSDISASSSWSDSTAARHSRLESSDGDGAWCPAGSVFPKEEEYLQVDLQRLHLVALVGTQGRHAGGLGKEFSRSYRLRYSRDGRRWMGWKDRWGQEVISGNEDPEGVVLKDLGPPMVARLVRFYPRA

SEQ ID NO: 305134 - protein, 138 aa, Artificial Sequence
  derived and/or modified sequence
MGPEALSSLLLLLLVASGDADMKGHFDPAKCRYALGMQDRTIPDSDISASSSWSDSTAARHSRLESSDGDGAWCPAGSVFPKEEEYLQVDLQRLHLVALVGTQGRHAGGLGKEFSRSYRLRYSRDGRRWMGWKDRWGQ

SEQ ID NO: 305135 - DNA, 2760 bp, Artificial Sequence
  derived and/or modified sequence
atgggccccgaggccctgagcagcctgctgctgctgctgctggtggcttccggcgatgcggatatgaagggccatttcgaccctgcgaagtgccgatatgccctggggatgcaggataggacgatccctgattcagacatatctgcaagttcgtcttggtccgacagtaccgctgctcgtcactcaaggttggaaagctctgatggagacggcgcttggtgccccgcaggctccgtgtttcctaaggaggaagagtacctgcaagtggacctgcagcggctccaccttgtggctttggtgggtacacaaggacgacacgcggggggactggggaaagaattcagccgcagctatcgtctgcgctacagtagagacgggcgcagatggatgggctggaaagatagatggggccaagaagtaatttctgggaacgaagatcctgagggggttgttctgaaagacttagggccccctatggtggcgcggctggtgagattctatccaagagcagacagggtaatgtcagtttgcttgagagtggaactgtacggatgcttatggcgggacggccttctttcatatactgccccggtgggccagacaatgtatctgagcgaggctgtgtatctgaatgactctacatacgacgggcacacagtgggaggacttcaatatggcgggttgggacagctcgccgatggagtggtgggactggacgacttccgcaaatctcaggaactgagagtgtggcctggctatgattacgtggggtggtccaatcacagcttttctagtggctatgtggagatggagttcgagtttgatcgtctgcgggctttccaggcaatgcaggtgcactgtaataatatgcacacgcttggcgcccggcttccgggaggcgtagagtgccggttcagacgcggtcctgcaatggcctgggagggcgaacctatgcgacacaatctcggcggaaatctcggagatccaagggctagagccgtatcagtgccccttggaggacgcgtggcaagattccttcaatgtagatttcttttcgccggtccgtggctgctattcagcgaaataagttttatttctgatgtggtgaacaattcctctcccgctttgggcgggacgtttcctccggcaccatggtggccccccggtccacccccaaccaacttttcatccttagagctggagcctcgcggccaacagccagtagccaaggccgaaggcagcccaaccgcaattctgatcgggtgcttggtcgcgatcattctactcctgttgctaatcatcgccctgatgctctggcgtcttcactggaggcggctcctcagcaaggccgaaaggcgtgtgttagaggaggagctaaccgtgcatctctcagtacccggcgatacgattctgattaataaccggccaggtccacgtgagccccccccttaccaggagcccagacccaggggcaacccaccccatagcgctccttgcgtgcccaatggtagcgcgttattgctgtccaacccagcatatcgcctgctcctggccacatatgcccggcctcctaggggcccaggcccccctacaccagcctgggctaaacctactaacacacaggcttattctggtgactatatggagccagaaaagcctggcgccccgctgttacccccccctccccagaatagtgttccacactacgcggaggccgatattgtcaccctccagggagtgacaggtgggaatacttatgccgtccccgctctcccccccggagccgtgggcgacggccccccgagggtggatttcccacgttccagactgcgatttaaagagaaactgggcgagggccagttcggagaagtgcacctgtgcgaagttgactccccccaggacttggtgagtctcgactttccattgaacgtcagaaaggggcatcctctgctcgtggctgtgaaaatactgcggcccgacgccacaaaaaacgccagcttctcactgttttcaagaaatgacttcttaaaggaagttaaaattatgagcaggctgaaggacccgaatatcattcgcctgctcggggtgtgcgtgcaggacgatccattgtgcatgatcacggactacatggagaatggggacctcaaccagttccttagtgctcatcagcttgaagacaaggctgcagagggcgcgcccggtgacgggcaggccgcgcagggccccaccatcagctatcctatgctgctccacgtggccgcacagatcgcttcagggatgagatatctggccacactcaactttgtgcaccgagatctggccacccgcaactgcctggtgggcgaaaactttacgataaagatcgctgattttggcatgagtcgtaacctctacgccggagattactacagagtgcagggcagggcagtgctgccaataagatggatggcttgggagtgcattcttatgggtaaattcaccactgcgtcagacgtttgggcattcggggtgaccctctgggaagtgctgatgctgtgtcgggcccagcccttcgggcagttgaccgatgaacaggtcatcgagaacgccggtgagtttttcagggatcagggtcgtcaggtctacttgagcaggcctccggcatgtccccaagggctctacgagctgatgctgcgatgttggagccgggagtcagagcagagaccacccttttctcaactccatcgatttttggcagaggacgcgctaaatacagtctag

SEQ ID NO: 305136 - DNA, 2760 bp, Artificial Sequence
  derived and/or modified sequence
atgggccccgaggccctgagcagcctgctgctgctgctgctggtggcttccggtgatgctgacatgaaaggccactttgacccggccaagtgtcggtatgcattgggaatgcaggacaggaccattccagactctgatatcagcgccagctccagctggtcagattccactgcggcccgacattccaggttggaatcttccgatggagacggggcttggtgcccagctggtagcgtgttcccgaaagaggaggagtatctccaggtggatttgcaacgattgcacctagtcgccttagttggcacccagggacggcacgcggggggtctgggtaaagagttctcaaggtcttaccgcctcagatacagtcgggatggccgcaggtggatgggatggaaggatagatggggacaggaagtgatctcaggcaacgaagacccagaaggcgtggtactgaaggaccttggtccacctatggtggcacgcttggttagattttatccgcgtgccgatcgagtgatgtccgtgtgcctgagggtcgagctctacggctgtctgtggcgagacggtctgctctcttacaccgcacccgtgggacagactatgtatctgtctgaagccgtgtatcttaatgactcaacttacgacggccacacagtaggcggactccagtacggcggactcgggcagctcgccgatggtgttgtgggattggatgattttcgcaaaagtcaggagttaagagtgtggcctgggtatgattatgtgggttggagtaatcacagcttctcatccggttacgtagagatggaattcgagttcgacagactgcgagccttccaggctatgcaggttcattgcaacaacatgcacacgctgggcgcgaggcttccaggcggtgtggagtgtcgttttcggcgcggcccagccatggcttgggagggcgaacccatgcgacacaacctcggcggtaacctcggagaccctcgagcgagagccgtctccgtccctctgggaggtagggtcgctagattcctgcagtgccggtttcttttcgccgggccctggctccttttcagtgagattagcttcatctcagatgtggtgaacaattccagcccagccctgggtggaaccttcccacccgccccatggtggccaccggggccaccgcccacaaatttttcatctttagagctggagcctcgtggccagcagcctgttgccaaagcagagggcagcccaacagctatcctcatcggatgccttgtggccatcatcttgctactccttctcataattgccctgatgctgtggcgcttacattggaggcggctcctcagcaaagccgagcgccgggtcttggaggaggaactgacagtgcacttgtctgtgcccggcgatactatccttatcaacaaccgccccggccctagggaaccccccccctatcaggaaccaagacctcgggggaacccccctcatagtgctccctgtgttccaaacggatcagcccttttgctgagcaatcctgcctatagactgttgctagcaacctatgcgaggccacctaggggacctggcccacccacccccgcatgggcaaagccgacaaacacacaggcatactctggagactatatggaaccagagaaacccggcgcccccttgctcccacccccccctcaaaatagtgttccccactatgctgaagctgatatcgtgaccctgcagggggtgacaggtggaaatacctacgcggtaccagctcttccccccggggccgttggcgacggcccacctcgggttgatttccccaggtcgaggctgcgctttaaagaaaaacttggggagggacagtttggcgaggtacacttgtgtgaggtagactctcctcaggatttggtgagcctggactttccactgaatgtgagaaaagggcatccactgttggtggcagttaagattctaagacccgacgcgaccaagaacgcctctttctcactcttcagtagaaacgacttcctcaaggaagttaagattatgtctcggctcaaggatcctaacatcattagactgctgggggtttgtgtgcaagacgatccactgtgcatgatcaccgattacatggagaacggcgacttgaatcagttcctgagcgctcaccaactggaagataaggcagccgagggggcgccaggtgatggccaggcagcccaaggtcctactatcagttatccgatgttgctgcatgtggccgcccaaatcgcatccggcatgcgctacttagctacactgaatttcgttcatagggatctagcaacaaggaactgtttagtcggcgagaacttcactatcaagattgcagacttcggaatgagtcgtaacctgtacgcaggagactactaccgggttcaggggcgagcagtgctgcctatcaggtggatggcatgggagtgcatcctaatggggaagtttacgacagcctccgatgtttgggcatttggggtgactctgtgggaggtgctgatgctgtgtcgcgctcagccatttggacagctgacggacgaacaggttattgagaatgccggggaattcttcagagatcaaggtaggcaagtctatctctctcggccccccgcctgtccccagggtctctacgagctgatgctgcggtgctggtcaagagagtccgagcaacggcccccgtttagccagctgcatcgattcctggccgaagacgcactgaacactgtgtag

SEQ ID NO: 305137 - DNA, 2760 bp, Artificial Sequence
  derived and/or modified sequence
atgggccccgaggccctgagcagcctgctgctgctgctgctggtggctagcggtgatgccgacatgaagggccatttcgacccagccaaatgtagatatgcacttggaatgcaggaccgcaccatccctgatagcgatatctccgcgagctcctcttggagtgactcaacagccgcacgccacagtcgcctggagtcgagcgatggcgacggtgcatggtgtccagcgggctcagtgttccccaaagaggaggaatacttgcaggtggatctccagagactacatttggtggcccttgtgggtactcaggggcgtcacgcaggaggcctcggtaaggagttcagtcggagctataggctgagatacagtagggatgggcggagatggatggggtggaaagatagatggggacaggaggtgatcagtgggaatgaagacccagagggggtggtccttaaagacctgggcccaccgatggtggcccgtctagttcgcttttatccaagggctgacagagtcatgagtgtgtgcctgcgagttgagttatacggatgtctctggcgggacgggctgctcagctataccgccccagtgggacaaaccatgtacctctccgaagcagtgtatttgaacgattctacgtacgatggacacactgtggggggccttcagtacggcggcctgggccaattagccgatggggtcgtaggcctggatgatttcaggaaatcccaggaattgagagtctggcctggatacgattatgtgggatggtctaaccatagcttctcatctggatacgtcgaaatggagtttgagtttgaccggcttcgggcattccaggccatgcaagtgcactgtaacaatatgcacaccttaggcgccagactgccaggtggagtggaatgtcggttcaggagagggcctgccatggcatgggagggtgaacctatgcggcacaatctgggtggtaacctgggagatcctcgcgcaagagctgtatccgtgccactaggtggtagggtggccaggttcctgcagtgtcggttcttgttcgcaggcccgtggctgctgttttctgagattagttttatctctgacgtggtgaacaatagtagcccagccctcggcggtacctttccccctgctccctggtggcctcccgggccccctcctacaaatttttcttccttagagttggagcctaggggccagcagcccgtggccaaagccgaggggagtcccacagcaatcctcatcgggtgtctggtggccataattctcctgctgctgcttatcattgcacttatgctgtggcgcctgcattggcggaggctgctgagcaaggctgaacgacgtgtgcttgaggaagaactgacagtacatctgagcgtacccggggacacaattttgattaacaatcgccctggtccccgggagccgcccccataccaggaaccccggccgagaggaaatcctccccactcggctccctgtgtgccgaatggtagcgcgctgctgctctcaaaccccgcctatagactgttgctggctacttacgctagaccccctcggggaccaggccctccgactcccgcctgggccaaaccaaccaatactcaggcctacagtggcgattatatggagccggaaaagcctggtgctcccctactgccccccccacctcaaaatagtgttccccattacgccgaggctgacattgtaacgctacagggggtgactggaggcaacacgtacgccgttcctgctttgcctcctggcgcagtgggcgacggcccaccccgcgtcgatttcccacgttcacggctccgcttcaaggagaagcttggagagggtcagtttggcgaagttcacctttgcgaagtggactctcctcaggatctagtctcgttggatttccctctgaatgtaaggaaggggcaccccctcctcgtcgccgtgaaaattctgagacccgacgcgacgaagaatgcgtccttcagtctattcagtcgaaacgatttcctgaaggaagtgaaaattatgtcaaggttaaaggatccaaacatcatccggctgctgggagtgtgcgtccaggatgacccattgtgtatgatcacagactacatggaaaatggggatctaaatcagtttttaagtgctcaccagttagaggataaggccgcagaaggtgcccccggtgatggccaggcagcccaaggaccgacaatcagctacccgatgctcttgcatgtcgccgcccaaatcgcaagtgggatgcgttatctagctacactgaacttcgtgcaccgtgatttggccaccagaaactgccttgtcggagagaatttcaccattaagattgccgatttcggaatgtcgcgaaatctctacgcaggcgactactaccgcgtacaggggagggcggtgctccccattcgttggatggcatgggagtgcattttgatgggaaaatttaccacagcttctgatgtgtgggcattcggagtaactctgtgggaagtcttaatgctctgtcgtgctcagcccttcgggcagttgactgacgaacaagtaatagaaaacgccggtgaatttttccgcgatcagggccggcaagtttacctgtcacggcctcctgcgtgcccccaggggctgtatgagctaatgcttcgttgctggtctcgggaatcggaacagagacctcccttttcgcaattgcatagattcttagccgaagatgcgctaaatactgtgtag

SEQ ID NO: 305138 - DNA, 2760 bp, Artificial Sequence
  derived and/or modified sequence
atgggccccgaggccctgagcagcctgctgctgctgctgctggtggcttctggagacgccgatatgaagggacatttcgacccggccaagtgtcggtacgcactcggaatgcaggacagaaccattcccgattccgatatctccgcctctagctcttggtccgactccacggccgcaagacatagcaggttggagagttcggatggcgacggagcgtggtgccccgcgggctcagtcttccccaaggaggaggagtatcttcaggtcgacttacaaagactacacttggtcgcactggtgggaacacaagggcgacacgccggcggcctgggtaaggaatttagcaggtcctaccgactgaggtattctagagacggccgcaggtggatgggatggaaagatagatggggacaggaagttatctctggtaacgaggatccagagggagtggtgctgaaggatttggggccgcctatggtagctcggctggtgcggttctacccgagagccgatcgtgtcatgtccgtttgtttgagagttgaattatatggatgcttgtggcgagacggcctacttagctacacagctccagtgggtcagaccatgtacttgtctgaggcagtttacctcaacgattcgacctatgacggccataccgttggggggctgcagtatggagggttaggtcagctggccgacggggtggtgggtctggacgacttccggaagtctcaggagctacgcgtgtggcccggctatgattacgtgggctggagcaatcattctttctcgtcgggctacgttgaaatggaatttgaattcgacagactcagggcatttcaggcgatgcaagttcattgtaacaacatgcatacactgggagctagattaccagggggtgtggagtgtcgctttcgccgcggaccggccatggcctgggagggcgagcccatgcggcacaacctgggaggtaacctgggggatccaagagcacgcgctgtctcagtccctttaggtgggagagtggcacggtttctccagtgtagattcctgtttgccgggccttggttgctgttctcagaaatatcattcatatctgatgtggtaaacaactcaagtcctgcactgggtggtacctttccccccgctccttggtggccacctggtccaccacccactaacttctcctctctagaactagagcctagaggacagcaacctgtagccaaagcagaggggtcccctacggcaatcctgattggctgcctggtcgccattatccttcttttactcttaatcattgccctgatgttgtggcggttgcactggaggcgtctgctgtcaaaagcagaaagacgggtgcttgaggaggagctgactgtacatctgtcggtgcccggagacaccatcctgatcaataatcgtcctggcccacgagagccacccccttatcaggaacctcggccgcgcgggaacccgccccatagcgctccgtgcgtgccaaacggctccgcgttgttgttgtccaatcctgcttacagacttcttctggcgacatatgcccggccccctagagggcccggtccaccgacacctgcctgggctaagccaacaaatacacaggcatattctggagactacatggaacctgagaagcccggggcgcctcttttaccccctcccccacaaaacagcgtaccccactacgctgaggctgacattgttacgctccagggggtcacagggggaaacacctacgcagtccctgctctgccccccggtgctgtgggcgacggacccccacgggtcgactttccaagatcccggctgagattcaaggaaaagcttggagagggtcagtttggcgaagtgcacctctgtgaggttgattctccacaagatcttgtttcccttgacttcccactgaatgtccgcaagggccaccccctgctggttgcggtgaaaattcttaggcctgacgccaccaaaaatgcttccttcagtttgttctcccgcaacgatttcctcaaagaggttaaaatcatgtccagacttaaggaccccaatataattcgcctgttgggggtctgcgtgcaggacgatccattatgtatgatcaccgattacatggagaatggggacctgaatcagttcttgagcgcacaccagctggaggataaagcagctgaaggcgcccccggcgacggacaggcagcgcaggggcccaccatttcttaccctatgctgctgcacgtggcggcacagatcgcatcggggatgaggtatttggccactctgaacttcgtccacagggatctcgccacgagaaattgcctagtgggtgagaacttcactatcaaaatcgccgattttggaatgagcagaaatttgtacgcaggagactactatagagtccaagggcgggccgtcctgcctattagatggatggcctgggagtgcatattaatgggaaaattcacaaccgctagcgacgtgtgggctttcggtgttacgctctgggaggttctgatgctgtgtcgagcgcagccctttgggcaattaaccgacgaacaagtcatagagaatgccggggaatttttccgggaccaggggcgtcaggtgtacctgtcaagacctcccgcatgtccacagggcttatatgaactgatgctaaggtgctggagcagggagagcgagcagcgtcctcctttttctcaattgcatcgatttcttgccgaggatgcgctgaataccgtctag

SEQ ID NO: 305139 - DNA, 2760 bp, Artificial Sequence
  derived and/or modified sequence
atgggacccgaggctctgagctccttgctcctgctcctattagtcgcttccggggacgcagacatgaaagggcactttgaccctgccaagtgcaggtatgcgttaggcatgcaggacagaaccatccccgatagcgatattagcgcctcctctagttggtccgatagcaccgccgctagacattcccggttggaatcctccgatggggatggagcctggtgcccagcgggttccgtgttcccaaaagaggaagagtatctacaggtagatctgcagcgactacatctcgtggcactggttggcactcagggcaggcacgcaggcggacttggtaaggaattcagcagaagctatcgcctccgttattccagagacggaagacgatggatgggatggaaagaccggtggggccaggaagtcatttccggaaatgaagaccccgaaggggtggtcctgaaagacctgggtccaccaatggttgctagactcgtaaggttctatcctcgggctgatagggtcatgtcagtgtgtctgagagtggagctttacgggtgtctttggcgggacggactgctctcttatactgcccctgtcggtcaaactatgtacctaagcgaggcagtttacttaaacgatagtacatatgacggccacaccgttggaggactgcagtatgggggactcgggcaactcgctgatggcgtcgtcggactggatgacttcagaaaatctcaagagctgcgagtatggcctggctacgattacgtcggatggtccaatcactcattttcgagcggctatgtcgaaatggagtttgagtttgaccgccttagagcattccaggctatgcaggtgcactgcaacaacatgcatacgctcggagccagactgcccggaggtgtggagtgcaggttcagacggggaccggctatggcatgggagggtgagccaatgcgccacaacctcgggggaaatctgggagatccacgagctcgtgccgtctcggtcccactggggggtcgcgtagctaggtttctgcagtgcaggttcctgtttgcgggaccttggctgctctttagtgaaatctcctttatatctgacgtggtcaacaatagttcccccgcactgggcggaacattccccccagcaccttggtggccgcctgggcctccacccactaacttcagcagcctagagctggagccacggggtcagcagccggtagctaaggccgagggctctccaactgctatcctgatcggctgcctcgtggcaatcattctgttgcttttactgatcatcgccctaatgctctggcggctgcattggcgaaggttactgagtaaagcggagcgaagggtcttggaggaagaactgacggtacatctgtcggtgccaggggacacgatactgattaataatcgccctgggccaagggaaccccctccctatcaagaaccccgacctcgcggaaatcctccccacagcgcaccgtgcgtgcctaacggaagtgctctgctgcttagcaatcccgcttaccgcctcctgttggcaacctatgcaagaccacctagaggacccggaccccctacacctgcatgggctaagcctactaatacacaggcatattccggcgactacatggagccagagaagcctggtgccccactgctgcccccacccccacagaatagtgttcctcactatgccgaggctgacatagtgactctgcagggggtgaccggaggcaacacctacgctgtacctgctctccctcctggcgcagtcggcgacgggcctccccgagtggactttccaagaagcagactgaggttcaaggagaaactgggcgagggacagttcggcgaggtgcacctatgcgaagtcgacagtccacaagatttggtgtccctcgacttccccttgaacgtgaggaagggccacccattgctggtggccgtcaagatattgcggcctgacgccacaaaaaatgcttccttctccttattttccaggaacgacttcctaaaggaggttaagatcatgagcagactcaaggacccaaacatcattagactgctgggagtttgcgttcaggacgacccactctgcatgatcaccgattatatggagaatggagatctgaaccagttcctatctgcacaccagctagaagacaaggccgcagagggggctcccggagacggtcaggctgctcagggcccaactataagttatcccatgcttctacatgtggccgcacagatcgccagcggcatgagatatctcgctactcttaacttcgtgcacagggacttggctacaaggaactgcctggtcggagagaacttcacaatcaaaatcgccgattttggcatgtcacgtaacctatacgctggcgattactatcgcgtgcagggcagagccgttctgccgatcagatggatggcctgggagtgcatcttaatggggaaatttacgacagcttcagacgtgtgggcattcggagttacactgtgggaagtgctgatgctctgcagagcgcagcctttcgggcagttgacggacgaacaggtcatagaaaacgcaggcgaatttttcagagaccaggggcgacaggtctacctgtcaagacctcctgcatgcccacaggggctctatgaactcatgttacgctgttggagtcgtgagtccgagcaacggcctccgttttcacagctgcacaggtttctcgctgaagacgctctgaacactgtttag

SEQ ID NO: 305140 - DNA, 2760 bp, Artificial Sequence
  derived and/or modified sequence
atgggaccggaggcgttgtccagccttttgttactgcttttagtggcttcaggtgatgctgatatgaaaggtcactttgacccagcaaagtgtcgttatgccttgggtatgcaggacagaacgattccggattctgacataagtgcgtcatcatcttggagcgatagcacggccgcacggcattctcggctggagagttcagacggggatggtgcatggtgccccgcaggtagcgtgtttcctaaagaggaggagtatctgcaggttgatctacagaggttacacctggtcgcccttgtagggactcagggacggcacgccggagggttaggtaaagagttctccagatcttatagattgcgatatagcagagatggtaggcggtggatggggtggaaagacagatggggacaggaagtgatcagcgggaacgaagatcctgaaggcgttgtgctgaaggatctcggacccccaatggtggcccgattagtcagattttaccctagggcagacagggtaatgtccgtgtgcctccgtgttgaactgtatgggtgtctctggagagacggattgctgagctacacagccccagtgggacagaccatgtacttgtctgaggcggtctatctgaacgattcgacctacgacggacatacggttgggggattgcagtacggcggactgggacagttggctgatggcgttgtgggtctggatgatttcaggaaaagccaggaactgagagtatggcccggttacgattatgtcggttggagcaatcactcattctccagcggctatgtcgaaatggagttcgaatttgaccgcctgagggcttttcaagcgatgcaggtgcattgtaacaatatgcacaccctgggcgctcggctccccggaggtgttgaatgtagattcaggagagggcctgccatggcttgggagggggagcccatgaggcacaatctgggcggtaatctcggagaccctcgcgcacgtgccgtttcagtacccttgggcggtagagtggccaggtttctccagtgccggtttttgttcgccggaccatggctactgttctcagaaatctcctttatcagcgatgtagtgaacaatagctctcccgctttgggaggtaccttcccgcctgccccatggtggcctcccggtccgccaccaactaatttttcgtccctggagcttgaaccgagggggcagcaaccggtggctaaagctgagggcagtcctaccgctattcttatcgggtgtctcgtggccatcatccttttgttgctgctgatcattgcgttgatgctgtggagactccactggaggcgattactgtccaaggctgagcggagggtcctggaggaggagctcaccgttcacctgagtgtccctggcgatacaattctgattaacaaccggccagggccacgagaacccccaccctaccaggagccccgaccaagagggaacccacctcatagcgccccttgcgtgccaaacggctccgctctcttactttctaaccccgcttatagactcctcctggccacctatgctcgcccaccacggggtcccggaccaccgactcctgcctgggctaagcccacaaatactcaggcctactctggggattatatggaacccgaaaagcctggcgctcctctcctgccacccccacctcaaaactccgtcccgcactatgctgaggcagacattgtaacactgcagggagtgaccggcggaaacacttacgctgtgcctgctcttcctcccggagcagtgggggatgggccaccacgtgtcgattttcctcggtccaggctgagattcaaggaaaaattgggagagggccaattcggcgaagtgcacctttgtgaagtggacagtcctcaggatctggtgagtctagatttccctctgaacgtgcgcaagggtcatcccttattggtggctgtaaaaattctgaggccagatgcaactaaaaatgccagtttttcccttttctcaagaaacgacttcctgaaggaggtgaagattatgtcaagactcaaagaccctaacattattagattgcttggggtatgcgtgcaggacgaccccctctgtatgattaccgactatatggagaatggagatttaaaccagttcctgtctgcccaccagctggaggataaagcagccgagggcgcacccggtgatggccaggctgcccagggtccaaccatatcttaccctatgttactacacgtggcagctcagatagctagcggtatgcggtatcttgccacgctgaactttgtgcacagagatctggctactagaaattgtttagtcggcgagaacttcacgattaagatcgccgattttggcatgagccggaacttatacgccggagactactatcgggtgcagggacgagcagtcctccccattcggtggatggcgtgggaatgcatactcatggggaaattcacaactgcttctgacgtgtgggcttttggggtgaccctctgggaagtactgatgctctgtcgcgcacagcctttcggccaactgaccgatgagcaggtaatcgaaaatgccggagagtttttccgggaccaaggcaggcaggtgtaccttagccggccacctgcttgtccccaagggctttacgagctgatgctccggtgttggagcagggagtcggagcagagacctccattctctcagttgcaccgttttctggcggaagatgctttaaacactgtctag

SEQ ID NO: 305141 - DNA, 2760 bp, Artificial Sequence
  derived and/or modified sequence
atggggcctgaagcgctatctagtttattactcctccttttggttgcttctggggatgcagatatgaaaggccattttgatccggctaagtgcagatacgctcttgggatgcaggaccgaacaatacctgatagcgatatatctgcatcttcgtcctggtctgattccactgccgcaaggcactctcgattggagagcagtgacggcgatggagcttggtgccctgcgggtagcgtgtttccgaaagaggaggagtatctgcaagttgatcttcaaaggctgcatttagtagcccttgtaggaacacagggaagacacgccggtggacttggaaaggaattctcccgttcctatcggctcagatattcccgggatgggaggcggtggatgggctggaaagaccggtggggccaagaggtgatttctggcaacgaggacccagagggagtggtgctgaaagacttagggccacctatggtggccagattagtgcggttctaccctagggcagacagagttatgagtgtctgcctcagggtggagctgtacggatgtctgtggcgggatggcctcctgtcttataccgctcctgtcggccaaaccatgtacctgtccgaggccgtgtacctgaatgattcgacatacgatggacacaccgtcggcggacttcagtatggcggactgggtcaactagccgatggggttgtgggtttggacgactttcggaagagccaggaactgcgggtctggcctgggtacgactacgtgggttggagtaatcatagcttcagctctggatacgttgaaatggagtttgaattcgatcgtctacgggcttttcaggccatgcaggtacattgtaacaatatgcatactctcggcgctcggttgccaggtggtgtggaatgtagatttagaagaggcccagccatggcatgggagggcgaaccaatgaggcacaacctgggaggtaacctgggggatcctagagctcgtgctgttagcgtgccactgggagggcgtgtcgccaggttcctccagtgcagattcctgttcgctggtccgtggctcctgttttccgagatcagtttcatctcagatgttgtgaacaatagtagtccagctctgggaggtaccttccccccagcgccatggtggcctcccggtcctccacccaccaacttcagttcgctagaactcgagccccgaggacagcaacccgtcgctaaggcagagggctcccccaccgccattcttattgggtgcctggttgccatcattctgcttctgctgttaatcatagcactgatgctgtggcgccttcactggcgtagacttctctctaaggcggaacgtcgcgtgctggaagaagagctcacagtccacctgagcgtgcctggcgacacgattctcatcaacaacaggccaggcccaagggagccccctccataccaggagcctcggcctagaggcaacccaccacactcggcaccctgcgtgccgaatggttccgccctgctactatcaaacccagcctaccgactgcttctggcgacatacgctcgtcccccacggggaccaggacctcccacccctgcctgggccaagcccacaaacacacaagcctactcaggggactatatggagcccgaaaagccaggggctcccctgctcccgcctcctccacagaattcagtgccgcactatgcggaggcagatattgtgaccctgcagggggtaactggcggtaacacatacgccgtccccgcactgccaccaggagcggtgggagacggacccccaagagtggactttcctcgttctcgcctgcggtttaaggaaaaactgggggagggtcagttcggggaggtgcacctctgtgaggtcgactctccacaggacttagtttcattagacttcccactgaacgtacggaaagggcatccactgcttgtcgccgtgaagattctgcgcccagatgcgacaaagaatgcctctttttctctgttcagtcggaacgactttctaaaagaggtcaaaatcatgagcagactgaaggacccgaacattattcgcctgctcggagtttgcgtccaagatgacccattgtgtatgattaccgattatatggaaaacggtgatctgaaccagtttctcagcgcccaccagctagaggacaaggccgcagaaggtgcacctggtgacggccaggcagcccagggtccgaccattagctatcccatgttgctgcacgtggccgcacagatcgcctcaggcatgcggtacctggcaactctcaacttcgtgcatcgcgatctggctaccaggaactgtctggttggcgagaacttcactatcaagattgccgacttcggtatgtccagaaacttgtacgcgggtgattactaccgggtgcaggggcgagccgtcttgccgatccgctggatggcctgggagtgtattttgatgggcaaattcacgactgcatctgacgtatgggccttcggcgttacattgtgggaggtgctaatgctctgcagagcccagcccttcggtcagcttactgatgagcaagtgattgagaatgctggcgagttctttcgagatcaaggacgccaggtgtacttatcccgacctcccgcttgtccacagggcctgtatgagctgatgctgcggtgttggagcagagagagcgagcaacgtcccccttttagccagctgcacagattcctggctgaagacgccttaaacacagtatag

SEQ ID NO: 305142 - DNA, 2760 bp, Artificial Sequence
  derived and/or modified sequence
atgggccctgaagcgctgtcatctctcctcttactgttgctcgtagccagcggcgatgccgacatgaagggacacttcgaccctgccaaatgccggtacgctctcgggatgcaggaccggactattcccgactctgatatatccgcatctagcagctggtcggactcaaccgctgccaggcacagtaggcttgaaagttctgatggtgatggtgcctggtgccctgctggcagcgtgttccctaaagaggaggagtacctccaggtcgatctgcagcgcttgcacttggtggctctcgtgggcactcaggggcgacacgccggtggacttgggaaagagttcagtaggagttaccggctacgctactcaagggatgggcgtaggtggatgggctggaaggatcggtgggggcaggaggtcatttcaggaaacgaggacccagagggcgttgttcttaaggatttgggcccaccaatggttgctcggttggtcaggttctatcctagggctgaccgcgttatgtcggtctgtttgagagtggaattgtacggctgtctctggagggatggcctgttgagctataccgctccggtaggccagactatgtacctgagtgaagcagtttatctgaacgacagcacgtatgacggccataccgttgggggtttgcaatatggcggactcggccagcttgccgatggggttgtgggtttggacgacttccggaagagccaggagctgcgggtctggcccggttatgactacgttggctggtctaatcactcattttcctctggctatgtcgaaatggaattcgagttcgatcgcctgcgggcattccaggcgatgcaggtccattgcaataatatgcatacgctgggcgcacggctccctgggggagtggagtgtcgcttcaggcggggacccgcaatggcctgggagggcgaacctatgcgacacaacctgggcggaaatttgggagatccccgtgccagggcagtgagcgtgccactagggggacgggtggccaggttcctccaatgtcgctttctgtttgcaggtccctggctgctgttctcagaaatcagttttatctccgatgtcgtgaacaattcttcaccggctctcggaggaacattccccccagcaccctggtggccacccggtccgcctcccacaaatttttcgtccctggaactcgagccgaggggtcagcaaccggtggcaaaggctgagggtagccctactgctatcctgatcgggtgtttggtggctattattctgctgttgttactaattatagctctgatgttatggagactccactggcgacgcctccttagtaaggcagagaggcgcgtactcgaggaggaactgactgtgcacctctccgtcccgggagacactattctgatcaacaatcgtccgggacctagagaacctcctccttatcaagagccccgtccgaggggaaacccgccacactctgctccatgcgtacctaatggaagcgctctgcttttgtctaacccagcctacagactgttgttagctacctatgccagaccgcctcgaggtccaggtcccccaaccccagcttgggctaaaccgaccaatactcaagcatatagtggagactacatggagccagaaaaacctggggctccattgctgccaccacctcctcagaattccgttcctcactatgccgaagcagacatcgtgaccctgcagggggtgactggaggaaacacctacgctgtgcctgctctgccacccggagctgtgggcgacggtccacctcgtgtggattttccaaggtctagattacgatttaaggaaaaactcggagaggggcagttcggagaagttcatctgtgcgaggtcgacagccctcaagaccttgtgtctcttgacttccctctgaacgtgaggaaagggcacccgctgcttgtggctgttaagatcctgaggcctgatgctacaaagaatgcttctttcagtctttttagtagaaatgactttctgaaggaggtcaaaataatgtctcgattaaaggaccctaatatcattcggttactgggggtatgtgtccaggatgatcctctgtgtatgatcacggactatatggagaacggcgatctaaaccagttcctctccgcgcatcagctggaagataaagccgctgagggggctccgggagacggacaggctgctcagggaccaaccatcagctatccaatgttactgcatgtagcggctcagattgcctctggaatgagatatctggctactcttaattttgttcatcgcgacctagccacccggaattgtctggtgggcgagaactttaccattaaaatcgctgacttcggaatgagtcggaacctttacgctggcgactactaccgtgtacaagggcgagccgtgctgccaatccggtggatggcctgggagtgtatcctgatgggtaaatttacaactgcctccgatgtctgggctttcggcgttaccctctgggaggtgctgatgctttgtagggcccagccctttggtcagcttaccgatgagcaggtcatcgaaaatgcaggcgaattcttcagagaccaagggagacaggtctatctctctcgccctcccgcatgtcctcagggtttatacgaactgatgctaagatgctggtctcgtgagagcgagcagcggccacctttttcccaactgcatagattcctcgccgaggacgctttaaataccgtttag

SEQ ID NO: 305143 - DNA, 2760 bp, Artificial Sequence
  derived and/or modified sequence
atgggtcccgaggccctgtcctctttgctcctgcttctgctggtggcttctggtgacgcggatatgaagggccattttgaccccgctaaatgtcgatacgccctgggtatgcaggatcgtacaattcctgatagtgacatctctgcctcctcctcatggagcgactctacagcagccagacactcgcggctagaatcctctgatggagacggggcatggtgtccagctggctcagtcttcccgaaggaggaagaatacttgcaagttgacctgcagcggcttcatctggtcgctctggtagggacacaggggcgtcatgctggaggactgggcaaagagttttcacgctcctaccgattacgctatagtcgggacggaagacgttggatgggctggaaagatagatggggacaagaagtcatctctggcaacgaagacccagagggtgtggtgctcaaagaccttggtcccccaatggttgccagactcgtgaggttctatcctcgcgctgatagggtcatgtccgtctgtctgcgcgtagaactctacggctgtctgtggcgagatgggctgctttcttacaccgcaccagttgggcagaccatgtatctctccgaggctgtctacttaaacgatagcacctacgatggtcatacagtggggggacttcaatacggaggtctcgggcagctcgccgatggcgtagtcggcctggacgactttcgcaagtcacaggagctgcgggtatggcctggctacgactatgtggggtggagcaatcacagtttttcttcaggatatgtggaaatggaatttgagtttgaccggttacgcgcattccaggcgatgcaagtgcattgcaacaacatgcacaccctgggtgctaggctgcccggtggggtcgagtgcagatttcgtaggggcccagctatggcctgggagggtgagccaatgcgtcataatcttgggggaaacctcggggatcctcgggctcgcgcagtgagtgtgccgctgggcggtcgggtggcaaggttcctccagtgtcggttcctctttgccggaccatggctgctgttcagtgaaatttctttcatcagtgacgtggtgaacaacagctctccagcattgggcggaaccttcccacctgctccctggtggccacccggaccacctccaacgaacttctcttctctggaactcgagcctcgcggacagcagcccgttgctaaagctgaaggttcccccactgccattctgattggctgcttagtggcgattattttactgctgctgctgatcatcgccctcatgctatggcgcctgcactggaggcgcctcctttccaaagccgagaggagggtcctggaggaagagctgacagtgcacctcagtgtgccgggtgacacaatcctgatcaacaacaggccaggcccacgtgagccccctccctatcaggagccacgcccaagaggcaacccacctcattcagctccttgtgttcctaacggatccgcacttctgctatccaatccagcatatagactgttgctggctacctatgccaggccacccaggggacccggacctccaaccccagcttgggctaagcctacaaatactcaagcttatagcggcgactatatggaacccgaaaaaccaggggcacctctcctgccacctccccctcagaactctgtccctcattacgccgaagccgatatagtcactctccagggcgtgactggcggtaatacttatgccgttccagccttacccccaggcgcagtgggcgatggaccccctcgcgttgacttccctcgatccaggctgcgcttcaaagagaaactaggcgaagggcagtttggcgaagtccacctgtgtgaagtcgattctcctcaggacttggttagtctggatttcccacttaatgtccggaaggggcatcctttactggtcgccgtaaagatattgcgccctgacgcaaccaagaatgctagcttttctctgttctcgcgcaacgattttttgaaggaggtgaagataatgtccagactgaaagatcccaatataatcaggcttctcggtgtatgtgtccaagacgacccgctctgtatgatcactgattatatggaaaacggtgacctcaaccaatttctcagcgctcatcagctagaagataaggctgccgagggggcacccggagacggacaggccgctcaaggcccaacaatctcctatcccatgctgttgcacgttgccgcacagatagcctcaggaatgaggtacttggccacgctgaacttcgtccatagggacctcgcaaccaggaactgcctagtaggagagaacttcacaatcaaaattgctgattttggcatgtctcgaaatctgtatgccggagactactatcgagtgcaggggcgtgcagtcctcccaatcaggtggatggcctgggaatgtattctgatgggaaagttcacgacagcctcagatgtgtgggccttcggggtgactttgtgggaagtgctgatgttatgtagggctcaaccttttggacagctcactgacgaacaggtaatcgagaatgctggcgagttttttagagatcaggggcgacaagtgtacctcagtaggcccccagcctgccctcagggattgtacgagctcatgttgaggtgttggtctcgagagagtgaacagcggcctccattcagccaactacacaggtttcttgctgaggatgccttgaacactgtctag

SEQ ID NO: 305144 - DNA, 2760 bp, Artificial Sequence
  derived and/or modified sequence
atgggacctgaggcactttcttctctgctgttacttctactggtggcctctggggacgctgacatgaagggccactttgatcctgcaaaatgtcgatacgcactgggcatgcaggaccgcaccattccagacagtgatataagcgcatccagctcatggagcgatagcacagccgcaaggcactctcgactcgagtctagcgacggcgatggagcatggtgccccgctgggtctgtcttccccaaggaggaagagtacctgcaggtcgatctgcaacggctacacctcgttgctctcgtgggcacacagggtaggcacgctggcggtctcgggaaggagttctctcgatcgtacaggctacgctattctcgtgacggcaggaggtggatgggatggaaggaccggtggggtcaagaagtaatttctgggaacgaagacccagaaggggtggtgctgaaagatctggggccaccaatggttgccagactggttcggttttacccaagggccgacagagtgatgagtgtatgtctgagggtggagctttatggatgtctttggagagatggattgctgtcttacacagcacccgtgggccagactatgtacttgagtgaggcagtgtatctgaatgacagcacatacgacgggcacactgtcggtggactgcaatacggaggactggggcagctggccgacggtgtggtaggtctggacgactttcgcaaatctcaggagcttagggtgtggccagggtatgattacgtcggatggtcgaaccatagcttcagctctggttacgtggaaatggagtttgagttcgatcggttgcgcgctttccaagctatgcaggtgcattgtaacaacatgcatactctcggagcacggctacccggaggggtggaatgcagatttcgaagaggcccagctatggcttgggaaggcgaacctatgagacataacttaggcggtaatttgggagaccctagggcaagagcagttagtgtccccctgggcggtcgcgtggcgagatttcttcaatgccgctttctgttcgccggtccctggttattatttagcgagatctcctttatttcagacgtggtgaacaacagttctcccgctctaggaggcacattccctcccgctccatggtggccacccggaccgccaccaactaacttttcctccctggaactcgaaccacgcggtcagcagccggtggccaaggccgagggcagccctaccgccatcttgatcggctgtctggtagccatcattttactgctcttgttgattatcgctctgatgctttggagactccattggcggagattgctctccaaagctgaacggagggtcctggaggaagagcttacagttcacttgtctgtcccgggtgacaccatacttattaataatagaccagggccaagggagccacccccataccaggagcctcgcccaaggggcaacccaccacactccgccccatgtgtccccaatggcagtgccctacttctgagcaaccctgcttatagactattgcttgcgacatacgccagaccccctcggggaccgggtccccctacccccgcatgggccaagcccacaaatacacaggcatattccggggactacatggagcctgagaagccaggcgctccgctgctcccacctccaccccagaattctgtgccacactatgctgaagctgacatcgtgaccctgcaaggagtgactggcggaaacacttatgctgtccccgctctgcctccaggggctgtaggcgacgggccaccacgcgttgacttccctaggagtaggctgcgcttcaaggagaaacttggcgaggggcagttcggagaagtgcatctctgcgaggttgactccccgcaggatctggtgtccttagatttccccctcaatgttcggaaggggcaccccctcctcgtggccgtcaagatcttacggccagatgcaacaaagaatgccagcttctcactgttttctcgaaacgactttcttaaggaggtcaaaataatgagtcgactcaaggatcccaacatcataaggctgttgggggtatgcgtgcaggacgatccactgtgtatgataacggattacatggaaaacggagacctcaatcagttcttgtccgcacatcaactcgaggacaaggccgcagaaggagcacccggagatggccaggctgcacagggacctaccatctcctaccccatgctcctccacgtggcagctcagatcgcgtcaggaatgcgctatcttgccacgctgaacttcgtgcatcgagacttagccacccggaattgcctggtgggagagaattttaccatcaaaatcgccgacttcggaatgagcagaaatctgtacgccggagactattacagggtccagggacgagccgtgctacctatcagatggatggcttgggagtgcatcttgatgggaaaatttaccaccgcctccgacgtttgggcatttggggttacgctatgggaggtgctgatgttgtgccgcgcacagcccttcggccagttaacagacgaacaagtgattgagaacgccggagaatttttcagagaccagggacgacaggtgtatctgagtcgcccacccgcttgtccccagggcctgtacgagttgatgctgcgttgctggagtagagaatccgagcagcgaccacctttttcccaactgcaccgcttcctcgccgaagacgctctcaacaccgtgtag

SEQ ID NO: 305145 - DNA, 2760 bp, Artificial Sequence
  derived and/or modified sequence
atgggtccggaagctctgtcgtccctcctccttctactgttagtggcttctggagatgccgatatgaaaggccatttcgatcccgcaaaatgtaggtacgcgctcggcatgcaggatcggacaatccctgacagtgatatcagtgccagttcatcatggagcgatagtacagcagcaaggcactcccggctagagtcatcagatggcgatggcgcctggtgccctgctgggtcggtgttcccgaaggaagaagaatacctacaggtggatttgcagagacttcaccttgtcgctttggtcggaacacagggtcggcacgccggaggacttggcaaggaattttcccggtcctatcggctacgctattcccgggatggccggaggtggatgggatggaaagatcggtggggacaggaagtgatctctggcaatgaagatcctgagggagtggtcctaaaagacctgggaccaccaatggtggctcggctcgttaggttttatccccgcgcagaccgggtaatgtctgtctgcctgcgagtggagctttacggctgcctctggcgcgatggcctgctgagctacacagcccctgtcgggcaaacgatgtacctgagcgaagccgtttacctgaatgactctacctacgacggccacacagtggggggcctgcagtatggcgggctgggccaactcgcagatggggtggtcgggctcgatgatttccgtaagagtcaggagttgcgcgtttggcctggttacgactatgtggggtggtccaatcactctttttcttctgggtatgtggaaatggagtttgagtttgatagactgcgggccttccaggccatgcaggtacattgcaataatatgcacaccctcggtgcccgacttccagggggagtggagtgcaggtttagacgtggccctgctatggcatgggagggcgaacccatgcgacataatttggggggaaacctgggagatccaagagctcgcgcagtgtcggtgcccctggggggccgggtggccaggtttttgcagtgtcggttcctcttcgctgggccgtggttgctcttttccgaaatcagcttcatctccgatgttgtgaataattcgagccccgcactcggaggcacgttccctcctgccccttggtggccaccaggacctccaccgacaaatttctctagtctcgagttggaacctcgcggccagcaacctgtcgctaaggccgaaggcagcccgaccgccatccttatcggttgtcttgtagccatcattctgctgctcctgctgatcatcgctcttatgctctggagactgcactggcgcagattgctatccaaggctgaacggagagttttagaggaggaattgacagtccatttatccgtgcctggtgataccattctgatcaataaccggccaggtccgcgggaaccccccccgtaccaggagccccgaccaaggggcaatcctccccacagtgccccgtgcgtacccaatgggtccgcattgctgctctcaaatcccgcctatcgattgcttctcgctacttatgcaaggccccctcggggtccaggcccacctactcccgcctgggccaagcccacgaatacacaagcttacagtggcgactatatggagccggagaagccaggcgcgcctctcctgcctccccctccacagaattccgtccctcattacgccgaggcagacatcgtcacactgcagggagtgaccggcggcaatacctatgcagtacccgcgctgcctcctggagccgtgggcgatggacctccccgagttgattttcccaggagtaggctgaggtttaaagagaagctgggcgaaggacaattcggggaagtgcatctgtgcgaagtcgacagcccacaagatcttgtcagccttgactttcctctcaatgtacgtaaaggtcatccccttctcgttgcagtgaaaatccttaggccagatgcaacgaagaatgccagtttctcactgttttcccgaaacgactttctgaaagaggttaaaattatgtctaggttgaaggaccccaatattatcagattattgggagtctgtgtgcaggatgatcccctttgcatgataacagattacatggaaaacggagacctaaaccagtttctgagcgcgcaccagctggaggataaagccgctgagggagccccgggagatggccaggccgctcaaggccccacaatctcctaccctatgttgctgcatgtggctgctcagatcgccagtgggatgaggtacctagcgacactcaatttcgtacaccgggacctcgctacgaggaactgtctcgtaggcgagaatttcacaatcaaaatcgcagacttcggcatgagtaggaatctgtacgccggggactattatagggtccaggggcgggcagtccttccaatcagatggatggcctgggagtgtattttaatgggcaagtttactacagcctcagacgtctgggcattcggcgttaccctatgggaagtactcatgctgtgcagggcacagccatttggccagctgaccgatgaacaggtgatcgagaacgccggagaatttttccgagatcagggccggcaggtgtatctcagtaggcccccggcttgcccacagggcttgtatgagctaatgttacgctgctggagcagagaatcagagcagcgccctcccttcagccaactgcaccggtttctggcggaagatgctctcaacactgtttag

SEQ ID NO: 305146 - DNA, 2760 bp, Artificial Sequence
  derived and/or modified sequence
atgggcccagaagctcttagcagcctactgctgctgctgctggtcgcatcaggcgacgccgatatgaagggtcattttgaccccgcaaaatgcagatacgccctcggtatgcaggaccgtactattcccgactctgatattagcgcttcatcttcgtggagtgattctaccgcagcgaggcactccaggctcgaaagttctgatggagacggcgcctggtgccccgctgggagtgtgttcccaaaggaagaagagtacttacaggttgacctccaacgccttcacttggtggcacttgtgggcacccagggccgtcacgcaggtggactgggcaaagaattcagcagatcttacagactcaggtatagccgggatgggaggcggtggatggggtggaaagacagatggggccaggaggtgatttccggcaatgaagatccagagggggtggttcttaaagacctgggacccccaatggtggctagattggtacgtttctacccgcgcgcagacagggtcatgagcgtttgtctccgcgtggagctctatggatgcctgtggagagacggtcttctatcttatacggcgccagtcggccagacgatgtacctcagcgaggctgtttacctcaatgacagtacttacgatggtcatacagttgggggcctacaatatggagggcttggacagttagccgatggcgttgtgggcctggatgatttccggaagagtcaagagttacgggtatggccgggctacgattacgtcgggtggtctaatcatagtttcagctctggatatgtggagatggagttcgagtttgacaggttgagggcctttcaggccatgcaggtacactgcaacaatatgcacaccttaggtgccagactaccgggaggcgtggagtgccggtttcgacgcggtcctgccatggcttgggagggtgaaccaatgagacacaatctcggtggaaatctgggagacccgagggccagagccgtgtcagttccattaggtggcagggtagccaggtttctgcagtgccgatttttattcgccggtccttggttgctattctcagaaatcagtttcatctctgatgtggtcaacaattcttctccagcactgggaggaactttcccccccgcaccttggtggcccccgggcccacctcctacaaacttcagttccctggaactggagccccggggtcagcagcccgtcgccaaggccgaggggtctccgaccgctatcctgattggttgcctagtcgccattatcctactgctcctgctcataatcgccctgatgctttggcggctacattggcggcgactgttaagtaaggcagaacgcagagtgctcgaggaagagttgaccgtgcatctctccgtgccaggcgatacaatccttattaataatcgaccgggaccccgtgaacccccaccataccaagaacccaggcctaggggcaacccacctcactctgccccatgtgtccctaacggctccgccctgttgctctccaacccagcttataggttactgctagcaacatacgcaaggcccccacgcggtcccggccctcctacccccgcttgggctaaaccgacaaacacccaggcctactccggtgattacatggaacctgagaaacccggagcgccacttttgccccctccccctcagaactctgtcccacattatgccgaagcggacatcgtaactctccagggagtgaccggggggaatacatacgccgtcccagctctcccccccggcgccgtgggtgacggcccgcccagagtggatttcccaagatcacggcttcgtttcaaagaaaaactgggagagggacaattcggggaagtgcatctctgcgaggtggacagtccacaggatctagttagcctcgacttcccattaaatgttaggaaaggccatccattgttagttgccgtgaagatactgcgcccagatgcaaccaaaaacgcctcttttagtctgttttccaggaatgacttcctgaaggaggtgaagatcatgagcaggttaaaggaccctaacataataaggctgctcggagtctgcgtccaggacgatcctctgtgtatgattactgactacatggaaaacggggatctgaatcagttccttagcgcccatcagttagaagacaaggccgctgaaggtgcccccggggacggtcaagctgcccaaggccctacaatctcatatcccatgcttcttcatgttgcagctcaaattgcctcaggtatgcggtatcttgctacactaaactttgttcatcgggatcttgccactcggaactgtctggtgggagaaaatttcacaatcaaaatcgcggatttcggtatgagtcggaatctctacgctggcgattactatcgggtccagggaagggccgtactacctatcagatggatggcatgggagtgcattctgatggggaagtttactaccgcatcggacgtgtgggctttcggggtaaccctctgggaggtcttaatgttgtgtcgggcccagccttttggacagctgacagacgagcaagtgatcgagaacgccggtgagtttttcagagatcaggggagacaggtttacctctcccggcctccagcatgtccgcaagggctttatgagttaatgttgagatgttggagtcgggagtccgaacagcgacccccgtttagtcagcttcaccgcttcttagccgaggatgctctgaatacagtatag

SEQ ID NO: 305147 - DNA, 2760 bp, Artificial Sequence
  derived and/or modified sequence
atgggccccgaggctctaagctctttgctcctgctgctgttggtggcttccggtgatgctgatatgaagggacatttcgaccctgcaaagtgcaggtatgctctgggtatgcaggaccggactatcccagatagcgacatcagtgcctcaagctcctggtccgactccacagcggcacgccattcccgactagaatcctctgacggcgatggagcatggtgcccagctgggagtgtatttcccaaagaagaggagtacctccaggtggatctgcagcgactgcatttagtagctcttgtgggcacccaagggcggcatgctggaggacttgggaaggagttttcccgcagttacagactcagatattctcgagatggaagacgctggatgggatggaaagatagatggggacaagaagttatcagtggcaatgaggaccccgagggggtggtactcaaagacctaggccccccaatggtggcccgcctcgtcagattctacccaagggcagatagagtgatgagcgtgtgtctgagagtcgaactgtacggatgcctgtggcgtgatggcctgctatcctacaccgcccctgtagggcagacaatgtacttgagcgaggcagtgtacttgaacgactctacttatgatggtcatacagtgggtggcctccagtatggaggcttgggccagctggccgacggagtggtgggcctggatgactttcggaagtctcaggagttgagagtgtggccaggatatgattatgtggggtggagtaatcactccttttcgagtggatacgtggaaatggaatttgaattcgacaggctgcgcgcatttcaagctatgcaggtgcactgtaacaacatgcatacactcggagccagactgcccggaggggtagaatgtaggtttcgcagaggacctgcgatggcttgggaaggcgagcccatgcggcataacctgggagggaacctaggagatcctcgagctcgcgccgtctctgtgccactgggggggagagtggccagattcttgcagtgtcgcttcttgttcgccggaccttggctgctgttcagcgagataagtttcattagcgacgtagttaacaattcatccccagcactggggggaacattcccccccgccccatggtggccacctggccctccacctacgaatttttcgtctctggaactggaacccagaggccagcaacctgtggccaaagctgaaggctcccctacagcgattcttattgggtgtttggttgccattatcctgcttctcctcctgataatagccctgatgctgtggaggctccattggagacggcttctgtccaaggctgagagacgtgttcttgaagaggagttgaccgtgcaccttagtgtgcccggcgatactatactgatcaataatcggccaggcccccgcgagccccccccttaccaggaaccccgccccaggggcaatcccccgcactccgccccttgcgtccctaacggttctgctctgcttctgtcaaatcctgcttaccgtctgttgcttgctacatatgcgcgcccaccacggggtccaggcccccctaccccagcctgggcaaagccaactaatacccaagcgtattctggcgattacatggaacctgagaaacctggcgccccgctgctccccccacctccacagaattccgtaccccattatgccgaagccgatattgtgaccctgcagggagtgaccggcggcaatacctacgccgtacccgcccttcctcctggagccgttggagacggtcccccccgagtcgactttccccgatcacggcttcgattcaaggagaaactgggcgagggccaatttggtgaagttcatctgtgtgaagttgatagcccccaggatctggtttcactcgatttcccactcaatgtgagaaaaggccatcccctcttagtggccgtcaagatcctgaggccagatgctaccaaaaacgcctcattttcactgttctctaggaacgacttcctcaaagaagttaaaattatgtctaggctaaaggatcctaatataatacgcctactcggggtgtgtgtgcaggacgaccctctttgcatgattaccgattatatggagaatggcgacctgaatcagtttcttagcgcccatcagctggaagacaaagccgcagagggagcccccggggatggacaagcggcccagggtccaaccattagctatccgatgctccttcatgtggccgctcagattgcctcggggatgagatacctggcaacgctgaacttcgtgcaccgagatctcgccaccagaaactgcttggttggcgagaatttcactatcaagatcgccgatttcgggatgtctaggaatctgtacgccggcgactattaccgggttcagggcagagctgtgcttccaatccggtggatggcatgggagtgtatcttgatgggcaagtttaccaccgcatcagacgtgtgggccttcggggtgacactatgggaggtattgatgttatgcagagctcagccctttggacagctgactgatgagcaagttatagagaacgctggggagtttttcagggatcagggacgacaggtgtatctctccaggcctcctgcttgcccacaagggctctatgaattaatgttacgttgttggagccgcgaatccgagcagagaccccccttttcacaactgcaccgctttcttgcggaggacgctttgaatacagtttag

SEQ ID NO: 305148 - DNA, 2760 bp, Artificial Sequence
  derived and/or modified sequence
atgggccccgaggcactcagttccctgctcctactgctcctcgttgccagtggggatgccgacatgaaaggacatttcgacccggccaagtgccgctatgccctggggatgcaggatagaacaatacctgattccgacatttccgccagcagctcatggagcgatagtaccgctgcccggcactccaggctcgaatcctcagatggtgacggcgcctggtgtccagctgggtctgttttcccaaaagaggaggaatacttacaggtcgatttgcagagactgcaccttgttgccctcgtaggcactcagggtcggcacgccggaggtctgggtaaagagttttcccgttcttaccgactcaggtactcccgggacggccgcagatggatgggatggaaggatagatggggccaggaggtcatctcaggcaatgaggaccccgaaggagtagtgttgaaagacctcggtccaccgatggttgcacgcttggtcagattctatccaagagctgatcgagtcatgagcgtctgcctgcgcgtcgagctgtacggttgtctctggcgagatggtctgctctcttacacagcacctgtagggcaaacgatgtacttatcagaggcagtctatttgaatgacagcacctatgatgggcacactgtcgggggcctccagtatggaggacttggacaattagcagacggcgtggtcggcctagatgacttccgcaagtctcaggaactacgtgtgtggcctggttacgactacgtgggatggagcaaccactctttcagctcaggctatgttgaaatggaattcgagtttgacagattgcgcgcattccaggcgatgcaagtacactgcaataacatgcacacgctcggagctcggctcccagggggagtggagtgtcggttccgaaggggacccgccatggcatgggaaggggagccaatgaggcacaacttaggggggaatctgggtgaccccagagctcgagccgtctccgtccctctgggcggaagggtggcccgatttctgcaatgtagatttctatttgctgggccctggcttctctttagcgagatttcatttatctcagatgtggtgaacaattcctctccggctctgggagggacgttcccccccgctccctggtggcctcctgggcctccccccaccaatttcagttctttggagctcgagccaagaggtcagcagcccgttgcgaaggccgaagggtcgccaacagccattttaatcggctgcttagtagccattatcctactcctcctactgatcattgccctcatgttgtggcgattgcattggagaagactcctgagtaaggcggagcgccgggttctggaagaggaacttacagtgcacctcagtgtgcctggggatactatcttgatcaacaatcgccctgggcctagagaacccccaccgtaccaggagcctcgccctaggggtaacccaccccatagcgccccatgtgtaccaaacgggtccgcactcctgttgtcaaatcctgcttatcgcctccttctcgccacctatgcaagaccaccaagaggacccggaccgccaacccccgcctgggcgaaacctaccaatacacaggcatatagcggggattatatggaacctgaaaagccgggggctcctttgctgcccccccctccccagaactccgttccacattatgccgaagctgacattgtgactctgcagggagttacaggaggcaatacatatgccgttccagccttgcctcccggcgctgtcggggacggacctccaagagtcgatttcccacggagtcggctgcgttttaaagagaagctgggagaaggacaattcggagaggtccacctctgtgaagttgattcgccacaggatctcgtgtccctagactttcctctgaacgtaaggaaaggtcacccactcctggttgccgtgaagatccttcgccccgatgccactaaaaatgcctcgttttccctattcagcagaaatgattttctgaaggaggtgaaaatcatgagtcgattgaaggatcccaacattatccgactgttgggggtttgcgtgcaagacgacccactgtgcatgattacagattatatggagaatggcgatcttaaccagtttctgtcagctcaccagttggaagacaaggccgctgagggggctcccggggatggacaggccgctcagggcccaaccatttcttaccccatgttattgcacgtggcagcccagatcgcctccggaatgcgctacttagcaaccctcaacttcgtgcaccgtgatttggctactagaaattgtctggtgggagagaatttcaccataaaaatcgcagactttggtatgtctcggaatctgtatgctggcgattattatagggtgcaggggagggcagtgctgccaattagatggatggcctgggagtgtatcctgatgggtaagttcacgactgccagtgacgtgtgggcttttggtgtgacactgtgggaggtgttgatgctctgtcgggcacagccttttggtcaattaactgacgagcaggttatcgaaaatgctggcgagtttttcagggaccaagggcgtcaggtgtatttaagtcgccccccagcctgtccccagggcctctatgaattgatgttacgatgttggtccagagagtccgaacagcggccacctttctcacaactccacagatttctggctgaggatgccttaaatacagtctag

SEQ ID NO: 305149 - DNA, 2760 bp, Artificial Sequence
  derived and/or modified sequence
atgggccctgaggcactgtcctcactgttgttactgctactcgtggcatcgggcgacgccgatatgaagggccactttgatcccgccaagtgcaggtacgcgctgggtatgcaggacaggactatccctgacagcgatatctctgcctcatcttcttggtctgactccactgcggccaggcacagcagactggagagttctgacggggatggcgcatggtgccccgccggcagcgttttccctaaagaagaagaatatcttcaggttgaccttcagagattacatcttgtggccttagtagggactcaggggcgccacgccggcggcctcggcaaggaatttagtcgctcatataggctgcggtacagtcgcgatggaaggaggtggatggggtggaaggacaggtggggccaagaggtcattagtggtaatgaagatcccgagggcgttgtgctgaaagacctgggaccccccatggtagctaggctggtccggttttacccacgagctgaccgagtaatgtccgtatgtcttagggttgagctctacgggtgtctatggcgagatgggctgttatcttacaccgcccccgttggccaaactatgtatcttagcgaagctgtctacctgaatgactctacctacgatggtcacacagttggcggattgcaatacggaggccttggtcagcttgcggatggcgtggttgggctggatgactttcgaaagtcacaagaattacgggtgtggcctggctatgattacgtgggctggtctaatcacagtttcagctcgggctatgtagagatggagtttgagttcgaccgtctgcgtgcttttcaggcaatgcaggtgcactgtaacaacatgcatactttgggcgcacgactgccggggggcgttgagtgtagattcagacgagggccggctatggcctgggagggggaacccatgcggcacaatctgggaggcaacctgggggacccaagagcccgcgctgtgtccgtgccactcggaggccgcgtagctcgatttttacagtgcagattcctgtttgccgggccctggctactgttctcggagatctcctttattagcgacgttgtgaataattcttctccagcccttggaggcacgtttccgcccgctccctggtggccccctgggcccccaccaactaacttctccagccttgaactcgaacctcggggccagcagccagttgctaaggctgaaggatcaccaaccgcaatactgattggatgtctagtggcgattatactgcttcttttgcttattattgccttgatgctctggcgattacactggcgacgcctcttaagtaaggccgaacgacgagtcctagaggaagaattaaccgtgcacctaagcgtcccgggcgacactatcctaatcaataatcgcccaggcccccgggagccccccccttaccaagaacctagacctcgtggaaacccccctcattcagcaccatgcgtgccaaatggcagcgccctgttgctgagcaacccagcttatcgcctgcttctcgcgacctatgccaggccacctaggggacctggaccacccactcccgcctgggcaaaacctactaatactcaagcttatagtggagactatatggagcctgagaagcccggcgcccccctgctgccacctcctccccagaactcagtgccccactacgccgaagctgatatagtgacactgcagggcgtaactggtggtaatacctatgccgtgcccgccctgccgcccggcgcagtgggggacggtcccccacgggtcgacttccctcgatctcgcctgcgttttaaagaaaagctgggagaaggccagtttggagaggtgcatctgtgcgaagtggactcccctcaggatctcgtcagcctcgacttccccctcaacgtcagaaaaggccatcccttactggtcgctgtaaagattctgcgacctgatgctaccaagaacgcctccttctctctgttttcgagaaatgattttctgaaagaagtcaagataatgtctcgcctgaaggatccaaatatcatccgcttattgggtgtttgcgtccaggatgaccccttgtgcatgattaccgattacatggaaaacggggatttgaaccaattcctttccgcccaccagttggaagacaaggcagcagaaggcgcaccaggtgacggtcaggccgcgcaaggccccactatcagttacccgatgctactgcatgtggcagctcagatcgcctctggcatgcgctaccttgccacactgaattttgttcacagagacctcgccacacgaaattgtcttgtgggtgagaattttacgataaagattgccgacttcggcatgtccagaaacttgtacgccggcgactactatagggttcagggccgcgcagtgcttccgattaggtggatggcctgggagtgtatccttatgggaaagttcaccaccgccagtgatgtctgggcttttggggtgactctatgggaagttctgatgttgtgcagggcccaaccttttggtcagctgactgacgagcaggttattgagaacgctggcgagtttttcagagatcagggtcggcaagtctacctttcaagaccgccagcctgtcctcagggtttgtatgagctcatgctgcgttgttggtcacgagagtctgagcagcgaccccccttttcacagttgcataggtttctcgcggaagacgccttgaacaccgtgtag

SEQ ID NO: 305150 - DNA, 2760 bp, Artificial Sequence
  derived and/or modified sequence
atgggccctgaagccctttcctcccttctgctccttttactggttgccagcggagacgccgatatgaagggccactttgatccagccaaatgcagatacgcgctgggtatgcaggaccgcactattcccgattctgacataagtgcctcatcttcttggtcagatagtacagcagcccggcatagtcgcctggaaagtagtgacggcgatggagcctggtgccccgctggctctgtcttccccaaagaagaggagtatctgcaagttgacctgcagagactgcatttagtggctttggtcggcactcagggaaggcacgcaggcggtttgggtaaggaattcagccggagttaccgcttgaggtatagtcgagacgggagacggtggatgggatggaaggaccggtggggccaagaagtgatctcgggcaatgaagatcctgagggcgtcgttttaaaggatttgggcccccccatggtggcccgcttagtgaggttctatccgcgcgccgatagggtgatgtctgtttgcctgcgcgtggagctgtacggatgcctgtggagagatggtctcctctcttacacagcccctgtgggtcagacaatgtacctctccgaagcggtatatctcaatgatagcacgtatgacgggcataccgtgggggggttacagtacggtggactagggcaattggccgatggcgtggtcgggctggacgatttccgcaagtcacaggaactgagagtgtggcctggatacgattacgtgggctggtcaaaccattcgttttcaagcggatacgtagagatggagtttgagttcgacaggctgagagcctttcaggcaatgcaggtccactgcaataatatgcacactttgggggcaaggctgccaggtggcgtcgagtgtcgtttccggcggggccccgccatggcctgggaaggagaacccatgcggcataatttggggggaaaccttggggaccctagagcacgggccgtaagcgttccacttggaggccgggtggccaggtttctgcagtgcagatttttatttgcagggccctggttgctgttcagtgagatttcatttatatcagacgttgtaaacaattcatcaccggcactgggtggcacctttcctcctgccccatggtggcccccggggccgccccccacaaacttcagctctctcgaactggaaccacgaggtcagcagccagtcgctaaagccgaaggttcgccaaccgctattttgataggctgcctagtcgccattatcctgctactcctcttgatcatcgccttaatgctttggcgtttgcactggagaagattgctgtccaaagctgaaagacgtgtgctggaggaggaactcacggtgcacctcagtgtgccaggggatacaatccttattaataatcgcccaggccccagggaaccgcctccctaccaggaacccaggccaagaggtaatcctccgcactcagccccatgcgttcctaacggtagcgcattgctgttaagcaacccagcctaccggctgttgctggctacctatgcccggcccccccgaggaccaggaccacccaccccagcatgggcaaaacccaccaacacacaagcctattctggtgattatatggagccagaaaaaccaggcgctcctctgttacctcctccaccccaaaatagcgtcccgcattacgccgaggcggatattgtgactctacagggcgtaactgggggaaatacctatgctgttccagcactcccccctggagcagttggcgatggaccaccaagagttgactttcctaggagcaggcttcgctttaaggaaaagctcggggaggggcagtttggagaagtgcatctgtgtgaagtggatagcccccaagatctggttagcctagattttccactgaacgtcagaaagggacatccattgctggtagccgtaaagattctgcgtcccgacgccaccaagaatgcatctttctcactttttagccgcaacgacttcctgaaggaagtgaaaattatgagtcggttaaaggaccctaacattatcagattactaggcgtgtgtgttcaagacgacccgctttgcatgatcacggattacatggagaatggtgatctgaaccagtttcttagcgcccatcaactcgaagacaaagcagccgagggggcacccggggatgggcaggccgcccaagggcctactatttcctacccaatgttgctacacgtagccgcccagattgcctccgggatgaggtatttggccactctgaacttcgtacatagggacctggcgactaggaattgcctggtgggagagaattttaccataaaaatagccgactttggtatgtccagaaacctgtacgctggagactattatagagtgcaaggaagggcggtgctccccattagatggatggcctgggaatgtattcttatgggtaaatttaccaccgcttcagacgtctgggcgttcggtgtcacgctttgggaagttttaatgttgtgccgagcacaaccctttgggcaactcaccgacgagcaggtgatcgaaaacgcgggtgaattcttccgcgaccaaggaagacaagtgtatctgtcccgacctcccgcctgcccccaggggctctacgaactgatgctgaggtgctggtctcgggagtctgaacagaggcccccattctcccaactccacaggttcctcgccgaagacgcgctgaacaccgtctag

SEQ ID NO: 305151 - DNA, 2760 bp, Artificial Sequence
  derived and/or modified sequence
atgggtcccgaagccctgtcctctttgcttctgctcctgctggtagcctctggcgacgccgatatgaagggtcacttcgatccagcaaagtgtagatacgccctgggtatgcaagaccgcacaatcccagattccgacatttccgcaagctcaagttggtccgactcaactgctgctcggcattctcgtttagagtcctctgatggtgatggcgcttggtgtccagctggttccgtgtttcccaaagaagaggagtacctgcaagttgacttgcagcgattacacctggtcgccctcgtgggaactcagggcaggcacgcggggggactgggaaaagaattttctcgaagctatcggttgagatatagcagggatggccgtagatggatgggctggaaggatcggtgggggcaagaagtgattagcgggaatgaggatcctgaaggggtggtgctgaaggacctggggcctcccatggtcgcacggttggtaagattttatcccagagcagacagagtcatgagtgtttgcctgcgcgtcgagttatacggttgtctgtggcgggatggactcctgagttacacagccccagtcggacagaccatgtatctatcagaagctgtgtaccttaatgacagcacctacgatggtcatactgtgggcggcctgcagtacggcggactcggacaattggcggacggagtggtgggtcttgatgatttccgcaaatctcaggagctgcgcgtgtggcccggatacgactacgtaggttggagtaaccattctttcagttcaggttacgtggagatggagttcgagttcgacaggttaagggcctttcaagccatgcaagttcactgtaacaacatgcatacccttggcgctcggctccctggaggcgtggagtgccggtttcgaagaggccccgcaatggcttgggaaggagagcctatgcgccacaacctcgggggtaatctaggagatccccgggctcgagcggtcagtgtcccactcggtgggcgggttgcgcgtttcctccaatgtagattcctatttgcaggaccgtggcttctatttagcgaaatctcttttatctcagacgtggtgaataactcttcgcccgcccttggtggaacctttcctcctgccccgtggtggcccccgggcccccctcccaccaatttctcgtccttggaacttgaacctaggggccaacagccggtggccaaggctgagggctctccaaccgcaatcctgattggctgtctggtcgctattatccttctgctgcttctaataattgctctcatgctatggcgcctccattggcgcagacttttgtccaaagctgaaaggcgggtcctcgaagaagagttaaccgtgcatctgagcgtgcctggggatacaattttgatcaacaaccggccaggcccccgcgaaccacctccataccaagaaccaagacctagagggaatcctccccacagcgctccttgcgtgcccaatggatctgcactgcttttgtccaacccagcctatagactcttgctagccacatacgctcgacccccacggggccccggcccaccaacccccgcttgggccaaaccgacaaatacccaggcctactcaggggactatatggaacctgagaagcccggcgcacccttgctgccgccgcctccccaaaactccgtcccgcactacgctgaagccgatatcgtgactttacagggcgttactggaggtaacacctacgcggtccccgccttgcctcccggggccgttggggacggacctccacgggtcgatttccctagatcacggctccgatttaaggagaagctgggcgaaggacagttcggtgaagttcacttgtgtgaggtcgacagcccccaagatctagtctccttagatttcccattgaacgtgaggaagggacatccactccttgtggcggtgaagatcttgaggccagacgccactaagaatgcaagcttcagtctctttagccgtaacgactttctgaaagaagttaagataatgagcagactcaaggacccaaacataattcggttgttgggcgtgtgtgtgcaggacgatcccctgtgcatgattacagattacatggagaatggcgacctgaaccaattcctttccgcacatcaattagaggacaaagctgctgaaggggcacctggagatggacaagccgcacagggacccacaatctcttaccccatgcttcttcatgtcgctgcacagatcgctagcggcatgcggtacttggctacccttaacttcgtgcaccgcgatctggctacaagaaactgtctcgtgggggaaaacttcactatcaagattgcagatttcggcatgagtaggaacctgtacgccggtgattactacagggtccaaggtcgggcggtactgcccatacgctggatggcttgggagtgtatactaatgggcaaatttaccactgcgagtgatgtttgggcttttggcgttacgctttgggaagttctgatgctgtgccgcgcgcagccatttggccaactgacagatgaacaggtaatcgaaaacgctggtgaatttttccgcgaccagggcagacaggtctatttgtcaaggcctccagcttgtccacagggcctatacgaactcatgttgagatgttggagccgcgaatctgagcaacgcccacccttttcacaacttcaccgcttcctcgctgaagatgctttaaacactgtttag

SEQ ID NO: 305152 - DNA, 2760 bp, Artificial Sequence
  derived and/or modified sequence
atgggccctgaagccctgtcctcattacttttattgttactggtcgccagcggtgatgctgacatgaaaggccattttgacccagcaaaatgccggtacgccctgggcatgcaggaccgaactatccctgacagtgacatctctgcttcctcttcctggtccgactccaccgccgctagacactctcggttggaaagctcagacggagatggtgcttggtgccctgccggatccgtcttccccaaggaagaagaatacctgcaggtggatctgcagagattgcatttagtcgccctggtagggacacagggccggcacgcgggtggcctcggcaaggagttttcacgatcttacaggcttagatatagtagagatggacgccgctggatgggatggaaagatagatggggtcaggaggtaatctctggtaatgaagatccggaaggagtcgtgctaaaagacctcggaccaccgatggtggcccggcttgtaaggttttatccaagggcagatagggtgatgagcgtgtgtctgagagtagagctctatggctgtttatggcgagacggtttactgagctacacagctccagtcgggcagactatgtatctcagtgaagccgtgtacctcaatgactcaacttatgacggtcatactgtcggggggcttcagtacggtggattgggacaacttgcagacggagtggtcggattagacgatttcagaaaaagccaggagctgcgtgtttggccagggtacgattatgttggatggtccaatcacagcttctctagcggttatgtggaaatggagttcgagttcgatagactccgagcttttcaagccatgcaggtgcactgtaacaacatgcacaccttaggggctcgccttcccggaggggtagaatgccgttttagaagaggccccgccatggcttgggagggcgaacctatgcgtcataatctgggcggcaatctcggagaccctagagcccgcgcagtgagcgtacctcttggtgggcgggtggctcgtttcctacagtgccgattcctttttgccggtccttggctgctatttagtgaaatcagctttattagcgacgtcgtaaacaattcctcaccagccttaggtgggacctttcctcccgccccttggtggccccctggaccacctcccaccaacttcagctctttagaacttgagccaagaggccagcaacctgtagccaaggccgaagggagtccaactgctatcctgatagggtgcctagtcgcgatcattctcttactcctgctcatcattgccctgatgctctggcgcttgcactggcgtcgactgttatcaaaggccgagcgccgcgtgctggaggaagagcttaccgtgcacctgagtgtgcccggagacaccatcttaatcaataatagacccgggccgagagaacctcccccctaccaagagcctagacctcgcggtaacccacctcattccgctccgtgtgtacctaacggctccgccctgttgctctccaacccagcttataggttactgctagcaacatacgcaaggcccccacgcggtcccggccctcctacccccgcttgggctaaaccgacaaacacccaggcctactccggtgattacatggaacctgagaaacccggagcgccacttttgccccctccccctcagaactctgtcccacattatgccgaagcggacatcgtaactctccagggagtgaccggggggaatacatacgccgtcccagctctcccccccggcgccgtgggtgacggcccgccccgtgttgacttcccccggtcaaggcttcgtttcaaggagaaacttggtgaaggccagtttggagaagtgcacttatgcgaggtcgatagcccccaagatctagtcagcctcgacttcccccttaatgtgcgcaaaggacatccactgttggttgccgtgaagatcctccgacctgatgcaacaaagaatgcctccttcagtctcttttccagaaacgacttcttaaaggaagtgaagatcatgagccggctgaaagatcctaatattattagattgctgggtgtttgtgtccaggacgatccactctgtatgatcaccgattacatggaaaatggagatttgaaccaattcctctctgctcaccagctggaagataaagccgccgagggcgcccccggggatggccaagctgcacaaggacctacgattagttatccaatgctgttacatgtagccgcacagatagctagtggaatgcgatacctggccacactgaatttcgtgcatagagatctcgccactcgtaattgcttggtgggagaaaacttcactattaagatcgccgattttggcatgtcgaggaatttgtacgccggggattattaccgagttcagggaagagcagttctcccgatccgatggatggcctgggaatgcattctcatggggaaattcactaccgcttccgatgtctgggcctttggtgtcactctttgggaagtcctgatgctttgtcgagcccagcccttcggccagttgacggatgaacaagtaatcgagaacgcaggcgaatttttccgcgatcaaggtcgccaggtatatctgagtcggcctccggcatgtccgcaggggctgtacgagctgatgctaaggtgttggtccagggaatcagaacagagaccaccattttcacagcttcatcgattcctagcagaagacgcactaaataccgtatag

SEQ ID NO: 305153 - DNA, 2760 bp, Artificial Sequence
  derived and/or modified sequence
atgggtccggaagccctgagcagtcttctcttactacttctcgtcgctagcggtgatgccgatatgaagggacatttcgatcctgccaagtgcagatacgcccttggtatgcaagacagaacaataccagattccgacatctcagcctcatcaagctggtctgatagtacagcggccagacactctcgactggagagcagcgatggcgacggggcctggtgccctgcggggtcagttttcccaaaagaagaagagtatctccaggtagatttgcagcgcctgcaccttgtggcactggtaggaacccaaggacgacatgctggaggactgggcaaggaatttagcagaagctaccggctgaggtatagtagagacggccgacggtggatgggctggaaagacaggtgggggcaggaggttattagcggaaacgaggaccctgaaggagtcgtcttaaaggacttggggccccccatggtagctcggcttgttagattttatcctagagccgatcgtgtgatgtcagtctgcctgagagtggagctctacggatgtttatggcgggacggattgttaagctatacagctcctgtgggccagacaatgtacctctccgaagccgtctatctcaacgatagtacatatgacggacataccgtcggtggactgcagtatggagggctggggcaactggctgatggagtggtgggcctcgacgactttcggaaatctcaggaattaagagtctggccaggatacgactatgtgggatggagcaaccatagcttctcttcagggtatgtggaaatggagttcgagtttgatcggttaagagcgtttcaggctatgcaggttcattgcaataacatgcacacactgggcgcacgtctccctggtggcgtagagtgcagattccgcaggggccccgctatggcctgggaaggcgaacccatgaggcacaacctgggaggcaatctcggcgacccacgggcccgtgctgttagtgtgccacttggcggaagggttgcccggtttctccaatgtagattcctcttcgcagggccctggcttttattctccgaaatctcctttatttcggacgtcgtaaacaactcttccccagcactcggcggaaccttccctcccgcaccatggtggccaccaggacccccccccacaaacttttcttcccttgagctcgagccacgcggccagcaacccgtcgcaaaagccgagggatctccgaccgccatcctgattggatgtctggttgctatcatacttttgctactgctcattatagctcttatgctctggcgactgcactggcgccggctcctctctaaggctgaacgtcgcgttctcgaggaggagctcaccgtgcatctgtctgtacccggagatacaattctgatcaataatcggcctgggcctagagaacccccaccctaccaagagccccgaccacgtggaaaccctccccacagcgccccttgtgtgcctaacggttctgctctgcttctgtcaaatcctgcttaccgtctgttgcttgctacatatgcgcgcccaccacggggtccaggcccccctaccccagcctgggcaaagccaactaatacccaagcgtattctggcgattacatggaacctgagaaacctggcgccccgctgctccccccacctccacagaattccgtaccccattatgccgaagccgatattgtgaccctgcagggagtgaccggcggcaatacctacgccgtacccgcccttcctcctggagccgttggagacggtcccccccgtgttgatttcccaaggtctagactaaggtttaaggagaaactaggcgaagggcaatttggtgaggtgcacctatgtgaggtagactcaccacaggatcttgtgtccctcgactttcccctgaatgtgcgaaagggtcaccctctcctggtggcggtgaagattctgagacccgatgctaccaagaacgccagcttcagtctgttcagccggaacgatttcctgaaagaagtgaagattatgtcacgtttaaaggaccctaatattattcgccttctgggcgtgtgcgtccaagacgatccactttgtatgattactgactacatggagaatggagatttaaaccagtttctgtctgcacatcaactggaagataaagccgccgagggagctccaggagatgggcaggcagcccagggcccaactatttcctaccctatgctgctgcacgtcgccgctcagatcgctagtggaatgcgctatctcgccactctaaactttgttcacagggacttagccacacgtaattgcttagttggtgaaaatttcacaatcaaaatcgcagatttcggcatgtctagaaacttgtatgcgggtgattattaccgggtccagggtcgcgcagtcctgcctattaggtggatggcttgggagtgcatcttgatgggaaagtttaccactgcctcagacgtttgggccttcggcgtaaccctctgggaggtattgatgctttgtcgtgcccagccattcggacagcttacagacgaacaagtaatcgaaaacgccggggaattcttcagagatcagggtcgacaggtgtatctgtcccggccacctgcatgcccacagggattgtacgaactcatgctgcgctgttggagtagggagagtgaacagcggcccccgttctcccagttacatcgtttcctcgccgaagacgcattgaatacagtttag

SEQ ID NO: 305154 - DNA, 2760 bp, Artificial Sequence
  derived and/or modified sequence
atgggtcctgaagccttgagcagcctcctcctcctgcttcttgttgcctcgggtgacgcagatatgaaaggccattttgaccccgctaaatgccgctacgcccttggtatgcaggatcgcacgattcccgactccgatatcagcgcctcttcatcttggtccgattcaaccgcggcaaggcactccagactggaaagctccgacggtgacggagcgtggtgccccgccggtagcgtcttccctaaagaggaagagtaccttcaggtcgatctgcaacgtctgcacctcgtcgctctggtgggcacgcagggtcgtcatgcaggtgggctgggcaaggagttttccagatcatatagattgcgatactcacgtgatggcaggcggtggatggggtggaaggatcgctgggggcaggaagtaatttccggaaatgaagaccccgaaggcgtggtgctgaaggatctggggcccccgatggtagctaggttagtccgtttctatccccgagcagatcgggtaatgtctgtttgcttacgggtcgagttgtacgggtgtttatggagagatggtctccttagttatactgcacctgtagggcagacgatgtatctgagtgaggccgtgtatttgaatgacagcacatacgacgggcatacagttggagggttacagtatggggggttgggccaactcgccgatggagtggtaggtctggacgacttcagaaagagtcaggagctacgcgtgtggcctgggtacgattacgttggctggtcaaatcattctttctcatccggctacgtggagatggagttcgaattcgacagattgagagcctttcaggctatgcaagttcattgtaacaatatgcacactctcggcgctagattacctggaggcgtggagtgtagatttagacgaggtccagcaatggcgtgggaaggcgagcccatgcgtcataacttaggcgggaacctgggagacccgagagccagggccgtgtcagtgcccctcggcgggagggttgcaaggttcctgcaatgccgcttcctgtttgccggcccttggctactgttttcagagatttctttcatttccgatgtggtgaataactcctcccctgcacttggcggcacatttcctcctgccccttggtggcctccagggcctcctccaacaaacttctcatccctggaattagaaccacgaggacagcaaccagtggcgaaggcagaaggctcaccaactgctatactcatcgggtgtttagtggccatcatcttgctgttattacttattatcgccttaatgctctggaggctccattggcgaagactgcttagcaaggctgagaggcgtgtcttagaagaagaactcaccgttcacttaagcgtaccaggcgatactatattgatcaacaacagacccggcccacgcgaacctcctccttatcaggaaccgcgtcctaggggcaacccccctcacagcgccccctgtgtgcctaacggctccgcattattgctttctaatccagcatatagactgcttctggccacttatgcacgcccacccagagggcctggaccaccgacccccgcttgggcaaagcccaccaacacccaagcctattccggagactacatggaacctgaaaagccaggcgccccactcttgccccccccacctcagaactccgtcccacactatgccgaggctgacatcgtgacactacaaggggtgaccggtggcaacacatatgccgtccctgcattacccccaggggcagtaggcgatggcccaccacgcgtggacttccctcgatctagattgcgcttcaaggaaaagctcggggaaggacagttcggcgaagtccacctctgtgaagtggattcccctcaggatcttgtgagtttggactttcccctcaacgtgaggaaaggacacccactcctcgtggccgttaagattcttaggcctgatgccaccaaaaatgcttctttctctctcttctcaagaaatgactttctcaaggaggtgaagattatgagtagactcaaagatcccaatatcatcagactgcttggcgtctgcgttcaagatgatccactttgtatgattaccgactacatggagaatggtgacctgaatcagttcctctccgcccatcagctcgaagacaaggctgccgaaggcgctcctggagacggccaggcggcacagggacccactatatcttatcccatgcttcttcatgttgccgcccagattgcctctggcatgagatatctggccacattaaatttcgtccaccgcgacctagccacccgaaattgtctcgtcggagaaaactttactattaaaattgccgacttcgggatgtccaggaacttgtacgctggcgattactaccgcgtacagggccgcgctgtgctgccaattcgttggatggcttgggagtgcatccttatgggcaagtttaccacagcttctgatgtctgggcctttggggtcacgctctgggaggtcttaatgttgtgtagggcccaacctttcggccagcttactgacgagcaggtcattgagaacgcaggtgagttttttcgcgaccaagggaggcaagtctacttatctcggcccccggcatgccctcagggcttatatgaactgatgctgcgatgttggagtagagagtcggaacagagaccaccattctcccagctccatcgcttcctcgccgaagacgccctaaacaccgtatag

SEQ ID NO: 305155 - DNA, 2760 bp, Artificial Sequence
  derived and/or modified sequence
atgggccctgaagctctttccagtctgttgcttttgctcctggtggcctcaggagacgccgatatgaaaggacatttcgaccccgctaaatgccggtacgccttgggcatgcaggaccgcacgatcccggacagcgatataagtgctagctcttcctggtccgactctaccgccgctcgacatagccggcttgaatcaagtgatggcgatggagcatggtgccccgctgggagcgtatttccaaaggaagaagagtatctacaggttgacctgcagcgattacatctggtcgcgctcgttggaacccagggccggcatgcgggtgggttaggaaaagagttctcccgctcatacagactcaggtactctagagatggtcggcgatggatgggatggaaagaccggtggggacaagaggtgattagtgggaatgaggaccccgaaggagttgtgctgaaggaccttggaccccccatggtggcccgccttgttcgattttatcctagagcagacagagtgatgagcgtgtgcctgcgagtggaattgtacggttgtctctggcgggatggtttgttgagctatactgcaccagtgggccagacaatgtatttatctgaggcggtgtatctgaacgactctacttacgatggacacacagtgggtggcctgcagtacggaggactcgggcagttagccgacggagtggttggcctcgatgactttaggaaatcccaggagctgcgggtatggccaggctatgactatgtcggatggagcaaccacagcttttcctcaggatatgtggaaatggaattcgaatttgacagactgcgcgctttccaggccatgcaagtgcattgcaacaacatgcatacactgggagcaaggctgccaggcggggtcgaatgccgtttccggaggggtccagccatggcatgggaaggagaacccatgcgccataatctgggaggcaaccttggtgacccaagggccagagctgtgtccgtgccactgggcggacgggtggctcgtttcttgcagtgtagattccttttcgctggaccctggctcctgttttccgaaatatcattcatttctgacgtcgtcaataactcctcacctgctctcggaggcaccttccccccggccccttggtggcctcccggccccccgcccactaacttcagcagcctcgaactggaacctcggggccagcagccagttgctaaggctgaaggatcaccaaccgcaatactgattggatgtctagtggcgattatactgcttcttttgcttattattgccttgatgctctggcgattacactggcgacgcctcttaagtaaggccgaacgacgagtcctagaggaagaattaaccgtgcacctaagcgtcccgggcgacactatcctaatcaataatcgcccaggcccccgggagccccccccttaccaagaacctagacctcgtggaaacccccctcattcagcaccatgcgtgcctaacggcagcgctctgctcctctcaaacccagcataccgccttttactggccacctacgcacgccctcctaggggacctgggccaccgactcctgcttgggccaagccaactaatacccaggcatacagcggggactacatggaaccggaaaagccaggtgccccacttttaccccctccacctcagaacagcgttccacactatgccgaggcagacatcgtaactcttcaaggcgttaccggaggaaatacatacgccgtacctgcgcttccccctggcgccgtgggagatggccctccccgagtcgacttccctaggagcagattaaggtttaaagaaaagctgggggagggacagtttggtgaggtgcacttgtgcgaagtagattctccccaggacctggtgtctctggattttccactgaatgtgagaaaagggcacccactgctcgtggcagtaaaaatcctacggccagatgccacaaagaacgctagctttagcctgttctcccgcaacgatttcctgaaagaggttaaaattatgtctcgactgaaagaccccaacatcatccgtctcttgggtgtttgcgtccaggatgaccctctctgtatgattacagattatatggaaaacggagacttgaatcagtttctttccgcacatcaactggaggacaaggctgcagagggtgcccctggggacggtcaggccgcacaaggtccaacgatatcttatcctatgttactgcacgtggccgcacagatcgcgtctggcatgcgctacctggcgacactgaattttgttcaccgtgacctagccaccaggaactgtctcgttggagagaattttactatcaagatcgccgacttcgggatgtctagaaacttgtacgctggggattactatcgcgtgcaaggaagagccgtgctaccgattagatggatggcctgggagtgcatactgatgggcaaattcaccaccgcatctgatgtgtgggcatttggcgttacactttgggaggtcctcatgctgtgccgcgcacaaccctttggccaactgactgacgagcaagttattgaaaacgccggagaattttttcgagatcagggacggcaggtctatctctcaaggccacccgcctgcccccaaggactgtacgaattgatgctgcggtgttggagtcgggagtcggagcaacggccccccttttcccaactccacaggttccttgccgaagatgctctcaataccgtttag

SEQ ID NO: 305156 - DNA, 2760 bp, Artificial Sequence
  derived and/or modified sequence
atgggacccgaagctcttagttctctgctactcctgttgttggtagcatctggcgacgctgatatgaaaggacacttcgatcccgcaaagtgcaggtacgctctgggaatgcaggatcggacgattcccgacagcgatatctctgcaagcagtagttggtcagattccacagccgccagacactctagactggaaagctctgacggcgatggagcctggtgcccagcaggaagcgtctttccgaaagaagaggaatacctccaggtggatttgcagcgccttcatctcgttgctctggtggggacgcaagggagacatgctggaggattggggaaagagttcagtcggagctatcggctgcgatacagtagggacggccgacgctggatgggatggaaggatcgctggggccaggaagtgattagcggcaacgaggatccggaaggggttgtactgaaagacttaggccctccaatggttgcaaggctggtgcggttctatcccagggctgatcgcgttatgtccgtgtgcctgagagtagaactctatggatgtctgtggcgggatgggcttttgagctatacagctcctgtcggacagactatgtatttatccgaagcggtttacctgaatgacagcacatatgacggacataccgttgggggccttcagtacggaggactgggacagttggcagatggcgtggtgggtctggacgacttcaggaagtcgcaggaattacgagtctggcctggctacgattatgtgggatggtcaaaccacagcttttcatccgggtatgtggaaatggaattcgaatttgatcgcctgcgtgcatttcaagcgatgcaggtacactgcaataacatgcataccttgggcgcccgactgcctggtggggtcgaatgccgatttaggaggggacctgcgatggcctgggagggtgagccaatgaggcataacttaggcggcaatttaggcgatccaagagctagggcagtttctgttcctctcggaggtagagtggctcgctttctgcagtgcaggtttctcttcgctggaccatggctgctattttccgaaataagtttcattagcgatgttgttaataactcttcaccagctctcggtggcacctttcctcccgcaccgtggtggccaccaggacctccgcctacaaacttttccagccttgaactggagccgagaggtcagcagcccgtcgctaaggctgagggtagcccaaccgcgatcctgattggttgtttggtcgccataattctattgctgctgctcataatcgctttaatgttgtggagacttcactggcgccgcctgctgtccaaagccgaacgtcgcgtgctggaagaggaactcaccgtgcatctctccgtccctggagatacaattctgataaataaccggcctggcccaagagagccccctccatatcaggagcccagacctaggggaaatccacctcattccgcaccatgtgttcccaatgggtctgcacttcttttgagcaatccagcttatagattgctcctcgcgacttacgcacgcccgccacgaggacctggcccaccgacaccagcgtgggctaaaccgactaatacgcaggcttatagtggcgactacatggaaccagaaaagcctggcgcccctctgttacctccacctcctcagaactctgtcccgcattatgccgaagccgatattgttaccctgcaaggtgtcaccggaggaaatacgtatgcagtccctgcccttccccccggagctgtgggcgacgggcctccccgagttgactttccaagatcgagactgcggtttaaggaaaagctaggcgaagggcaatttggagaagtgcatctttgcgaggtagatagcccccaagaccttgttagccttgactttcccctcaatgttcgcaagggccaccccctgctcgtcgctgttaaaatactccgtcccgatgcaaccaagaacgccagcttcagccttttttctcgaaatgacttcctcaaggaagtgaagataatgtcccgcttgaaggacccgaacatcatcagactgcttggagtgtgcgtgcaggatgatccactgtgtatgatcaccgattacatggaaaacggagatctaaaccagtttcttagcgcccaccaacttgaagacaaggctgctgaaggagcaccgggtgacggacaagctgcccagggcccaacaataagttaccctatgctgctgcatgttgctgcccaaatagcttccggtatgaggtacctcgcaacacttaactttgtccacagggatctcgctactcgtaactgcctcgtgggagaaaactttaccattaagatagccgactttggcatgtccagaaatctctatgctggtgattattaccgtgtccaaggaagagccgtgctgccgattagatggatggcctgggaatgcattctcatgggaaaatttaccaccgcttccgacgtttgggcattcggagttacactatgggaggttcttatgttgtgtcgagcacagcctttcggacaactgacagatgaacaagtaattgaaaacgccggcgaattcttcagggatcagggcagacaggtctatctatccagaccccccgcttgccctcaagggctttatgagctaatgctgcgctgctggagtagggaatccgaacagcgacccccattctcacagctccaccgatttttagcagaagatgcacttaacaccgtgtag

SEQ ID NO: 305157 - DNA, 2760 bp, Artificial Sequence
  derived and/or modified sequence
atgggccccgaggccctgagcagcctgctgctgctgctgctggtggccagcggcgacgccgacatgaagggccacttcgaccccgccaagtgcagatacgccctgggcatgcaggacagaaccatccccgacagcgacatcagcgccagcagcagctggagcgacagcaccgccgccagacacagcagactggagagcagcgacggcgacggcgcctggtgccccgccggcagcgtgttccccaaggaggaggagtacctgcaggtggacctgcagagactgcacctggtggccctggtgggcacccagggcagacacgccggcggcctgggcaaggagttcagcagaagctacagactgagatacagcagagacggcagaagatggatgggctggaaggacagatggggccaggaggtgatcagcggcaacgaggaccccgagggcgtggtgctgaaggacctgggcccccccatggtggccagactggtgagattctaccccagagccgacagagtgatgagcgtgtgcctgagagtggagctgtacggctgcctgtggagagacggcctgctgagctacaccgcccccgtgggccagaccatgtacctgagcgaggccgtgtacctgaacgacagcacctacgacggccacaccgtgggcggcctgcagtacggcggcctgggccagctggccgacggcgtggtgggcctggacgacttcagaaagagccaggagctgagagtgtggcccggctacgactacgtgggctggagcaaccacagcttcagcagcggctacgtggagatggagttcgagttcgacagactgagagccttccaggccatgcaggtgcactgcaacaacatgcacaccctgggcgccagactgcccggcggcgtggagtgcagattcagaagaggccccgccatggcctgggagggcgagcccatgagacacaacctgggcggcaacctgggcgaccccagagccagagccgtgagcgtgcccctgggcggcagagtggccagattcctgcagtgcagattcctgttcgccggcccctggctgctgttcagcgagatcagcttcatcagcgacgtggtgaacaacagcagccccgccctgggcggcaccttcccccccgccccctggtggccccccggccccccccccaccaacttcagcagcctggagctggagcccagaggccagcagcccgtggccaaggccgagggcagccccaccgccatcctgatcggctgcctggtggccatcatcctgctgctgctgctgatcatcgccctgatgctgtggagactgcactggagaagactgctgagcaaggccgagagaagagtgctggaggaggagctgaccgtgcacctgagcgtgcccggcgacaccatcctgatcaacaacagacccggccccagagagccccccccctaccaggagcccagacccagaggcaaccccccccacagcgccccctgcgtgcccaacggcagcgccctgctgctgagcaaccccgcctacagactgctgctggccacctacgccagaccccccagaggccccggcccccccacccccgcctgggccaagcccaccaacacccaggcctacagcggcgactacatggagcccgagaagcccggcgcccccctgctgcccccccccccccagaacagcgtgccccactacgccgaggccgacatcgtgaccctgcagggcgtgaccggcggcaacacctacgccgtgcccgccctgccccccggcgccgtgggcgacggcccccccagagtggacttccccagaagcagactgagattcaaggagaagctgggcgagggccagttcggcgaggtgcacctgtgcgaggtggacagcccccaggacctggtgagcctggacttccccctgaacgtgagaaagggccaccccctgctggtggccgtgaagatcctgagacccgacgccaccaagaacgccagcttcagcctgttcagcagaaacgacttcctgaaggaggtgaagatcatgagcagactgaaggaccccaacatcatcagactgctgggcgtgtgcgtgcaggacgaccccctgtgcatgatcaccgactacatggagaacggcgacctgaaccagttcctgagcgcccaccagctggaggacaaggccgccgagggcgcccccggcgacggccaggccgcccagggccccaccatcagctaccccatgctgctgcacgtggccgcccagatcgccagcggcatgagatacctggccaccctgaacttcgtgcacagagacctggccaccagaaactgcctggtgggcgagaacttcaccatcaagatcgccgacttcggcatgagcagaaacctgtacgccggcgactactacagagtgcagggcagagccgtgctgcccatcagatggatggcctgggagtgcatcctgatgggcaagttcaccaccgccagcgacgtgtgggccttcggcgtgaccctgtgggaggtgctgatgctgtgcagagcccagcccttcggccagctgaccgacgagcaggtgatcgagaacgccggcgagttcttcagagaccagggcagacaggtgtacctgagcagaccccccgcctgcccccagggcctgtacgagctgatgctgagatgctggagcagagagagcgagcagagaccccccttcagccagctgcacagattcctggccgaggacgccctgaacaccgtgtag

SEQ ID NO: 305158 - DNA, 2760 bp, Artificial Sequence
  derived and/or modified sequence
atggggcccgaagccttgagtagcctcctgctgttgctgctggtcgcttctggggatgccgacatgaagggtcactttgatccggcaaaatgtaggtatgcgctcggtatgcaggaccgcacaattcctgattcagatatttcagcgtcatcctcatggtcagattccaccgctgcaaggcactcgagattggaatcatcagacggcgacggagcctggtgccccgcgggcagtgtattcccaaaagaggaggagtacttgcaggtcgacctccaacgcctgcaccttgtggctcttgtcggcacccaaggcaggcatgctggcggactggggaaggagttcagtcgcagttatcggctgagatacagccgcgacgggagacggtggatgggttggaaggaccgatggggccaggaagttattagtggaaacgaagaccccgaaggcgttgttttaaaggacctcgggcctcccatggtagcaaggctggtgagattctatccacgggcggacagggttatgtctgtgtgtctgagggtggagttatatggatgcctctggcgcgacggactgctgtcttatacggcccctgtggggcagaccatgtatctctcggaagccgtgtatctcaacgactctacatacgatgggcatactgtgggcggactccaatacggaggccttggccagctagcagacggcgtcgtggggctggatgatttcagaaagagtcaggaactgagagtgtggcctggatacgattacgtgggctggagcaatcactcattcagcagtggctacgtcgagatggaattcgagttcgacaggctgcgcgcattccaggctatgcaggttcactgcaacaatatgcatactctgggggcgcggctgcctgggggggtggaatgccgtttcagaaggggtccagcgatggcctgggagggagaacccatgaggcacaacctgggtgggaacctgggggaccccagggcccgggccgtttccgttccacttggcggtcgcgtcgcccgtttcttgcaatgccgttttctgttcgcgggcccctggctcttattcagtgaaatctcatttatatcggatgtcgtgaacaacagtagtcccgcccttggtgggacattcccacccgcaccctggtggcccccgggtccaccccctactaactttagtagcctggaacttgagcctcgcggacaacagcctgtagccaaggctgaaggatcccctaccgcaatcttaattggctgtctggtcgccattatcctgctgctcctgctgatcatagctctaatgttatggcgcctgcactggaggcgattgctatccaaagccgaacgtagggtgctcgaggaggagctcactgtccacctgtcagttccaggggacacaatcctgattaacaaccgccccggcccccgcgagcctccaccttatcaggaaccacgccctcggggtaatcctccccacagcgccccgtgtgtgcccaacggcagcgctcttcttctgtccaacccagcctaccggctgctactagccacctatgccaggcctcctcgcggccctggccctccaacgcccgcctgggcgaaaccaacaaacacccaggcatacagtggtgactacatggaaccagagaaaccgggcgcgcctctgctccctccaccgccccagaatagtgtaccacactacgcagaagcagacattgttactctgcagggagtgacgggtgggaatacttacgctgtccccgctctgccacccggggcggtgggcgatggacccccacgagtcgattttccaaggtctcggctgcgtttcaaggaaaaactgggcgagggtcagtttggcgaggtccacctttgtgaagtagattctccgcaggatctggtcagtctggactttccactgaacgtgcgaaagggtcaccctttactggtggccgtcaagattctgcggcctgacgctacgaaaaacgccagcttctccctgtttagcaggaacgattttcttaaagaggtgaaaattatgtccaggctcaaggatccaaatatcatccgtctccttggagtttgtgttcaagacgaccctctctgcatgattactgattacatggagaatggggaccttaatcaatttttatcagcccatcagttggaggataaggccgctgaaggcgcgccgggtgatggccaggccgctcagggacccacgattagttatcctatgcttctgcacgtggcagcgcagatagctagcgggatgcgctacctggcaactctgaacttcgttcacagggacctagccacccgcaactgcctggtgggagaaaattttaccatcaagattgctgacttcgggatgtccagaaacctctacgcgggtgactactatagagtacaggggcgcgctgtgctccccattcgctggatggcgtgggagtgcatccttatgggaaaattcactacggcaagcgacgtgtgggctttcggagtaacgctgtgggaggtactgatgttgtgccgggctcaaccatttggccagctgactgacgaacaggtcatcgagaatgccggggagtttttcagagaccaagggagacaggtgtatctgtctagacctcctgcgtgtcctcagggcctctatgagctgatgctgcggtgttggagccgcgaatccgagcagcgcccccccttctctcagcttcaccgattcctggctgaagacgccctgaacaccgtttag

SEQ ID NO: 305159 - DNA, 2760 bp, Artificial Sequence
  derived and/or modified sequence
atgggccccgaggctctttcatccctcttgctgctcctcctggtcgcatccggcgatgccgatatgaaagggcactttgacccagcgaagtgtagatatgcactgggaatgcaagaccggacaatccccgactccgatataagcgcttccagcagttggtctgactcaacagccgccaggcactcccggctcgaatctagtgacggcgacggcgcatggtgcccagctgggagcgtgtttcctaaggaggaggagtatctccaggttgacctgcagcggctgcacctggtcgctctcgtaggaacacaaggtaggcatgccggtgggctggggaaggaattctccagatcatatcgcctgcgttatagccgagacggccggcgatggatgggctggaaagaccggtggggacaggaggtcatctctggaaatgaagaccccgagggtgtggtgctcaaggacctgggacctcccatggtggctcggcttgttaggttctacccccgggccgacagggtgatgtccgtgtgtctgcgggtggagctgtacggttgcctgtggcgggacggactgctcagttacactgctcccgttggccagacaatgtaccttagtgaagccgtatacttaaatgattcaacctacgacggtcacaccgtcggtggtctgcagtacggcggccttggccagctagctgatggagtggtgggactggacgatttcaggaagtcccaggaattgagggtctggcccggctacgactacgtcggatggtctaatcactcattctctagtggatatgtagaaatggagttcgagtttgatagattgcgggcctttcaggctatgcaggtacactgtaacaatatgcacacactaggagccagactgcccggcggcgtagagtgccgatttagacgcggcccagcaatggcctgggaaggcgaacctatgaggcataacttgggagggaatctgggcgatcctcgagcccgggcggtgagtgtcccccttggcggaagagtcgctaggttcctacagtgtcgattcctttttgccggtccatggctcctctttagtgagatcagcttcattagcgatgttgtgaacaatagtagccctgcgttggggggcactttcccacccgctccctggtggccccccggcccgcctccaacaaattttagctccttggagcttgaacctcggggccaacaacctgtggctaaggcagaaggatcgcctactgccatcctgatcggatgtctggtcgcaatcattcttcttctgctgctcataatcgccctgatgctttggagactgcattggcgcagactcctaagcaaagctgagcgcagggtactagaggaggagctcacggtccatttgagcgtacctggcgacacaattttaatcaataatcgtccggggcccagggaaccgccgccttatcaagagccccggccgcgtggcaaccctccccacagcgcgccctgcgtaccaaatgggagcgcattgcttctcagtaacccagcctacaggttgctgctcgcaacctatgctagacccccccgagggcctggtcccccaaccccggcgtgggcgaagccaaccaatacacaggcctactccggggattatatggagcctgagaaacctggtgcccctctactcccccccccaccccagaacagtgtgcctcactacgctgaagccgacattgtgacgttgcagggggtgaccggaggaaacacctatgccgttcctgcattaccccctggcgcagtgggggatggcccaccgcgtgtggatttcccccggtcaagactacggtttaaagaaaagctgggcgagggccagttcggcgaggtgcacctgtgcgaggtcgactctccacaggatttagtgtccctggattttcctcttaacgtgcggaaaggccatcccctcctggtggctgtgaaaatcctccgccctgatgccaccaagaatgctagttttagcctcttttctcgcaacgattttctgaaagaggtgaaaatcatgtcacggctgaaggaccctaatattattcgacttctcggcgtgtgcgtccaggatgacccgttgtgtatgataaccgactatatggaaaatggcgacctgaaccagtttctgagtgctcaccagctcgaggacaaagcagcagagggagccccaggcgacggacaggcagcccaaggccccaccatttcctaccctatgttgttgcacgtggccgcacagattgcgtccggcatgagatacctagcgacattaaactttgtgcatagggatctggcgacgcgaaactgcctggtgggcgagaacttcacgatcaaaattgctgattttggcatgagcaggaatctgtacgccggcgattactaccgggtccagggccgcgcggtgctacccattaggtggatggcctgggaatgtattctaatgggcaagttcacgacggcgtcagatgtgtgggcatttggcgtgactttgtgggaagtgctgatgctgtgtcgggcccagccttttgggcaactcaccgatgaacaggtgatcgagaacgcaggagagtttttccgcgaccagggcagacaagtatatttaagtcgaccccccgcctgtccccagggactgtacgaactcatgctgcgatgttggagccgggagtccgaacagagaccacctttttcacagctgcatagattccttgcagaagatgccctcaacacggtgtag

SEQ ID NO: 305160 - DNA, 2760 bp, Artificial Sequence
  derived and/or modified sequence
atgggcccagaggcgctgagctcgctgctgttgctgcttctagtggcttccggagatgccgacatgaagggccactttgaccccgctaaatgtagatacgccctcggcatgcaagatcgaacgatcccagatagcgatatctcagcctcaagctcgtggtcagacagcactgccgcgaggcacagcaggctggagtcctctgacggggacggagcatggtgtccggcaggcagtgtgtttcccaaagaagaagaatacctgcaggtggatctgcaaaggctgcacctggtcgccctagtcggaactcaggggagacacgcaggcggcttaggcaaggaattcagtagatcataccgtcttaggtactcccgggacggtcggcggtggatgggatggaaggaccggtgggggcaggaggttatatccgggaatgaagaccccgagggcgtggtgctgaaggatctcggaccacccatggttgccagactggtgcgcttctaccctcgggccgaccgggtcatgtccgtttgtctacgcgtggagctttacggctgtctttggcgggacggacttctgagttacaccgcaccggttgggcagacaatgtacttgtctgaggccgtctacctcaacgatagtacctacgatggccacactgttggtggtctccaatatggaggcctggggcaactggctgatggggtggtgggattagatgactttcgaaagagccaggagctgagggtctggccaggctacgattatgtgggttggtcaaatcacagtttctcgtcaggctatgtggagatggagttcgagttcgacaggctgcgggccttccaggccatgcaggtgcattgtaacaacatgcacacactcggcgccaggctccctggcggtgtggagtgcaggttcagacgtggacctgccatggcatgggaaggcgaacccatgaggcacaatctcggggggaatcttggtgatccccgggctagggccgtgtctgtgcccttgggcggaagagtcgcaagattcctccagtgtcgtttcctgttcgcagggccatggcttttgttttcagagatctcattcatcagcgacgtggtgaacaactcgagccccgccttggggggcactttcccacctgccccttggtggcctcctggcccgccccccactaactttagtagccttgagctggaacctcggggacaacagcccgtggctaaggccgaaggatctcccacggcaatactgatcggttgcctggtggccatcatacttctgttgctcctgataattgcactaatgttatggcgtcttcactggcgccggctgttgtccaaggcagaacggcgcgtgctggaagaagaactgaccgtccatctctccgtacctggggatactatcttaatcaacaacaggccaggcccaagggaaccccccccatatcaagagccgcgtccacgcggcaatccacctcatagcgctccttgcgtaccgaatggttccgctctccttctgagcaatcctgcataccggctgctgctcgcaacttatgcacgtcctccccgtggtcccggtcccccaacacccgcttgggctaaaccaaccaacacccaggcatactccggcgactacatggagcctgaaaagcccggcgccccactgctgcctccccctccccagaactccgtgcctcattatgcagaagccgacatcgtgaccctgcagggcgtgactggaggtaatacctacgccgtcccggctcttccacccggggccgtcggcgatgggcccccacgagttgatttccctcggtcacggctgcgcttcaaagagaaacttggggagggccagttcggagaagtccacctctgtgaggtggactctccacaggacctggtgagcctggacttccctctcaacgtcaggaagggccaccctctgctggtcgctgtcaagattttaaggccagacgccactaagaatgcttccttttcgctgttttccaggaacgattttctgaaagaagtgaaaattatgtccagactcaaggaccctaacataatacggctgttgggtgtgtgcgtccaggatgaccccctctgcatgatcacagactacatggaaaatggggacctcaatcaatttctctcagctcatcaactggaggataaagccgccgaaggggctcctggcgacggccaagccgctcagggtccaactatctcataccctatgctcttgcacgttgctgcgcagatcgcgagcggcatgcgatatttggcaaccctgaactttgtgcaccgcgaccttgcaactaggaactgcctggttggggagaacttcacgattaagattgctgattttggtatgagccgaaatctctacgcgggcgactattatcgcgtgcaggggcgtgccgtgcttcccatcagatggatggcatgggagtgcatcctgatgggcaaattcacaactgcaagtgatgtttgggcctttggggttaccctgtgggaagttcttatgttgtgtcgcgctcagccttttggacagttgaccgatgagcaggtaattgagaatgccggggagttttttagagaccagggccgccaggtttatctttcgcggcccccggcctgcccccaaggcctctatgagctgatgttaaggtgttggtccagagagtcggaacagcgcccacccttctcacaactgcatcggtttctggcagaggatgctttgaatactgtttag

SEQ ID NO: 305161 - DNA, 2760 bp, Artificial Sequence
  derived and/or modified sequence
atgggccctgaggctctttcatccttgctgcttctccttctggtcgcgagcggggatgcggacatgaagggacactttgatccggccaaatgccgctatgctttgggaatgcaggacaggacaatccctgactctgacattagcgccagcagcagttggtccgattccaccgcagcacgccacagcagactggagtccagcgacggggatggtgcctggtgtcccgccggctcagtgttcccaaaagaagaagaatacctacaagtggacctgcagcgactccatctggtggccttggttggcacccagggcaggcacgccggaggtttgggcaaggaattctctagaagctataggcttaggtactccagagacggccggagatggatgggctggaaagacaggtggggccaggaggttataagcggaaacgaagatcccgaaggggtggtgttaaaagacctcggacctcccatggtagcacgcctggtcagattttatccacgagcagacagagttatgagcgtctgtttaagggtagagctgtacggctgcttgtggagagatggcttgctaagctacacagcacccgtgggacaaactatgtaccttagtgaggcggtttatcttaatgactccacatatgacgggcatactgtgggcgggctgcagtacggcgggcttggccagctcgccgacggcgtagtaggcctcgacgatttccgcaaatcccaagagctgagggtatggccaggatacgactatgtcggttggtccaatcactccttctcatccggttatgtggaaatggagtttgaattcgatcggctgagagcctttcaggcaatgcaggtccactgcaacaacatgcacactctgggagcacggctgcctgggggagttgaatgccgtttccgccgaggacccgcaatggcttgggaaggcgaacctatgaggcataacctgggggggaacttaggcgatccaagggcccgcgccgtgtccgtgcccctgggcggccgggtggctagatttcttcagtgccgctttctgtttgccggtccctggctgctgtttagtgagattagcttcatttctgatgtggtaaacaattccagcccggcactgggaggtaccttccctcccgcaccatggtggcctccgggcccaccccccaccaatttctcaagtctggaattagagccaagaggccagcagcccgtggcaaaggctgagggctcaccaaccgcaattctcatcggatgtctggtggctatcatccttctgctgctccttatcattgcccttatgctctggaggttgcactggcggcgactgctctccaaagctgagaggcgggtgctcgaagaggagttgacagtgcacctgtctgttccgggggacacaattcttattaacaataggcccggtcctcgtgagcctcccccataccaagaaccgagaccaaggggtaaccctcctcacagtgccccttgtgttcctaacggatctgctctcctcctctcaaatcccgcttacaggctccttctagctacttacgccagaccgccccgtggacccggaccgcccactcccgcatgggccaaaccaactaacactcaggcgtactccggggactacatggagccggaaaaacctggagcacccctcctccctcccccaccccaaaacagtgtgccacactacgcagaggccgatatcgttacgctgcaaggagtgaccgggggcaatacatacgcagtgcctgccctgcctcctggcgctgtgggagatggcccccctcgggtcgacttccccaggagccgcttacggtttaaagagaaactgggcgagggacagtttggagaggttcatctgtgtgaagttgattcaccacaagatcttgtcagtctggacttcccactgaatgtgcgtaaggggcatccattgctggtagctgttaaaatcttgcgtccggacgctactaagaatgcgagcttttcactgtttagccgcaatgacttcttgaaagaggtgaagattatgagtcggctcaaagaccctaacattatccgtttgcttggagtctgcgtccaggatgatccactttgcatgattactgactatatggaaaacggggatctcaaccagttcttatccgcccatcaattagaggacaaggctgctgagggcgcgcccggcgacggccaggcggctcagggccctaccatttcttatcccatgctgcttcacgtggctgcacagatcgcctctggcatgcggtatctagcaaccctcaacttcgtgcaccgagacttagctacaagaaattgtctggtgggtgaaaatttcactatcaagattgcagactttggtatgagtcgaaatctgtatgcgggtgattattaccgggtgcaaggccgggctgtcctaccgatcagatggatggcatgggaatgcatccttatggggaagtttactaccgcctccgacgtgtgggcctttggcgtcacactctgggaagtcttaatgctgtgccgtgctcagcccttcgggcagcttacagatgaacaggtcattgaaaatgcaggcgagttctttagggatcaagggcggcaggtgtatctgagcaggcctcctgcttgtcctcaaggcctgtatgaattgatgttaagatgctggtctagagaaagcgagcaaaggccccctttcagtcagctgcaccgatttctcgctgaagatgcccttaatacggtgtag

SEQ ID NO: 305162 - DNA, 2760 bp, Artificial Sequence
  derived and/or modified sequence
atggggcccgaagcgttgtcctccttactgcttctgctgcttgtcgcatccggagacgctgacatgaagggtcactttgatcccgctaagtgtcgctacgccctgggaatgcaggatagaacaatacctgactcggatattagtgcttctagctcttggtcagactcgacggcagctcggcactctcggctcgagtctagcgatggcgacggtgcgtggtgccctgcaggaagcgtgttccctaaggaagaggagtatctgcaagtagacctgcagaggttgcaccttgtggccctggtgggaactcagggacggcacgctggtggcctgggtaaagaattcagccgttcctaccgccttcgctactcccgcgacgggcgccgatggatgggttggaaggaccggtgggggcaggaagtgatcagcggtaacgaagatcctgaaggcgtggttctgaaggatttgggtcctccaatggtggctcggctcgtacgcttctatcctcgggccgaccgcgtgatgagcgtgtgcctcagagtggaactttatggatgcctctggcgagacggcttactgtcctacacggcccctgtggggcagactatgtatctgagcgaagcagtgtacctgaacgactcaacatatgatgggcacactgtgggcggccttcaatacgggggtctgggccagctggcggatggcgtagtagggttagacgacttccgtaaatcccaggaactgagagtttggccaggatacgactacgttggatggtccaatcatagcttctccagtgggtatgtggagatggaatttgagttcgatcggctgagagcgtttcaagccatgcaggtccattgcaacaatatgcacaccctgggtgccaggttgccgggtggcgtcgaatgtagatttcggcgaggccctgccatggcctgggaaggagagccgatgcgccacaacctcggcggcaacctgggagatcccagggctcgtgcagtttctgtgccgctcggagggcgggtggcccggtttcttcagtgtaggttcctgttcgccgggccttggcttttattttcagagatatcttttatctcagacgtggttaacaatagctcaccagccctgggcggtaccttccctccagcgccatggtggccgcccggcccccctcctactaatttctctagtttggaattggaacctcggggccagcagccagttgcaaaagccgaggggagtcctacggcaattctcatcggctgcctagtcgccattatcctgctccttctactgattattgccctgatgttatggaggctgcattggcgccggctcctgagcaaggcagaaaggcgggtcttagaagaagagttaacagtccatttatccgtcccaggggacactatcctgatcaacaacagaccaggccccagagaaccccccccttaccaagagccccgcccaagaggcaatcctcctcattccgccccttgcgttccaaatggctctgctctgctactgagcaaccccgcctataggttgttgttggccacttacgcacgcccccctagaggaccagggcctcccaccccagcctgggctaagccaaccaacacccaagcgtacagcggcgattatatggaacccgagaagcctggagccccactgctcccaccacctccccagaactcggtgccccattacgcagaggctgatatcgtcaccctgcaaggggtgactggcggcaacacttatgcagtccctgccctgccccccggagccgttggtgatggacccccccgagtcgactttccgagatcccggttgcgtttcaaagagaaactgggcgaagggcagttcggcgaggtacacctttgcgaagtggacagtccgcaggatctcgtttcccttgatttccctttgaatgtccgcaaagggcacccactgttagtcgcggtgaagatcctcagacctgacgctaccaagaatgcgtcatttagcttattttctcggaacgatttcttgaaggaggtgaagataatgagtcgattaaaggatccaaacattattcgactcctcggggtttgcgtgcaagatgatcccctatgtatgattacagattacatggagaacggggacctgaatcagtttctgtccgcccatcagttggaggacaaggcagccgagggagcccccggtgatgggcaggcggcacagggacccacaatctcctacccaatgctcctccatgtggcggcacagattgcctcggggatgagatatctggcgacacttaacttcgtacacagggatctggccactcgcaactgcctggtgggtgagaacttcaccatcaaaattgccgatttcggaatgtctcgcaacctgtatgccggcgattactaccgagtccaagggagggctgtgctcccaatccgctggatggcctgggagtgcatccttatgggaaaattcactacagcttccgatgtgtgggccttcggtgtcaccctttgggaggtcttaatgctgtgtcgggcccagccatttggtcaacttactgacgaacaggtcatcgaaaacgcaggagagttcttccgcgaccaagggcgccaggtttacctgtctcgaccgccagcctgcccccagggcctgtacgagctgatgctgagatgttggtcaagggaatcggaacaaagacccccattttctcagctgcaccgttttctggcagaggatgctctgaacactgtgtag

SEQ ID NO: 305163 - DNA, 2760 bp, Artificial Sequence
  derived and/or modified sequence
atgggacctgaggcattgtcaagcctgttgttgcttctcctggttgcaagcggagatgccgacatgaaaggccacttcgatccagccaaatgtcggtatgcgctaggtatgcaagaccgcactattccagactccgacatctcagcgtccagcagctggtcagatagcacagctgcccgacactcgcggcttgaatcgtcagacggcgacggagcatggtgtcccgctggctctgtgttcccaaaggaggaagagtatctgcaggttgatcttcagcgcctccacttagtggcactagtaggcacccagggtcgtcatgctggcgggctcggaaaggaattttcacggtcttacagactgcgctactcccgagatggacgccgatggatgggttggaaggacagatggggtcaggaagttatctcaggcaatgaggatcctgaaggggtggtgttgaaggatctggggcctccaatggtggccagactagtgcgtttttaccctcgagcagacagagttatgagcgtgtgccttagagtggagctgtacggatgtctctggcgagatgggctgttaagctacactgcaccggttggccaaacaatgtacttgtccgaggccgtctacctgaatgacagtacatatgacggccatacagtgggcggactgcaatacggagggctcgggcagttggctgatggggttgtgggactggacgatttcagaaaatctcaagaactgagggtttggccaggatatgactatgtagggtggtctaaccactcttttagcagtggatacgtggaaatggagttcgaatttgacagacttcgggcatttcaggcgatgcaggtccattgtaataatatgcacaccttaggggctagactgccaggcggggtagagtgccggttcaggcgaggaccggccatggcttgggaaggtgagcctatgcgccataatttgggaggtaacctgggggatccaagagccagagccgtaagtgtgcctctcggcggaagggtggctagatttcttcaatgccggttcctgtttgcgggaccatggctcttgttcagcgagataagcttcatatccgacgtggtgaataatagttcccccgctcttggaggcacatttccccctgccccgtggtggcctcctggcccccctcccaccaacttttcaagcctggagttagaaccaaggggacagcagccagtcgcgaaggccgaagggtctccaactgccatcctgattggatgcctagtcgcgattatcttgctgcttctgcttattatcgctcttatgctgtggcgccttcattggcggaggctgctcagcaaagccgagagacgcgttcttgaggaggagctaacagtacacctaagtgtacctggagacacaattctgataaataaccgccccggccccagagagcctcctccgtatcaagagcctcggccaaggggcaatcctccccactcggcaccctgtgtgccaaacggctctgcactgctcctgtctaaccctgcctatcggctgctgcttgcaacttacgctcgacccccaaggggaccaggaccccctacgccagcttgggctaaacccacaaacactcaggcgtacagcggagattacatggaacccgaaaagcccggcgcccctctgcttccccccccgcctcagaatagcgtccctcattacgcagaagctgacatcgtgaccctccaaggagtgacaggtgggaatacctatgctgtgccagccctccctcccggggctgttggcgacggacccccacgtgtagacttccctaggagcagattgagattcaaggagaaacttggggagggccagttcggagaagtccacctatgtgaagtagacagtccacaggacctggtgagcttagatttccccctcaatgtaaggaaaggacaccctttactggttgccgttaaaatccttcggccagatgcgactaagaatgccagttttagcctgttcagcaggaacgactttctgaaggaagtcaagattatgtcccggctgaaggacccaaacatcattaggctgcttggtgtgtgcgtccaggacgacccgctctgtatgattaccgactacatggagaatggagatctgaaccaatttctctccgcccaccaactggaagacaaggctgcagagggcgctcctggggacggacaggccgcacagggccctactatcagctatccaatgcttctgcacgtggcagcccagattgccagtggtatgcgctacctcgccacactgaactttgtccacagggatctcgcaactaggaactgcctggtcggggaaaactttaccataaaaatagctgacttcggaatgagcagaaatttgtatgctggcgactattacagggtccagggccgcgcagtcctgccgattcgatggatggcctgggagtgcatcctaatgggaaaattcacgacggccagtgatgtctgggcctttggagtgacactatgggaagtgcttatgttgtgcagagcacagccatttggacagctgacagatgagcaagtgatcgaaaacgccggggaattctttcgggatcaaggtcgccaggtttatttaagccgtccccccgcttgtccgcagggactgtatgagctgatgctcaggtgctggtcccgcgaatcagagcagaggcctccattctcccagctgcaccggtttctagccgaggacgccctcaacaccgtttag

SEQ ID NO: 305164 - DNA, 2760 bp, Artificial Sequence
  derived and/or modified sequence
atgggccctgaggccctgagcagcctgctgctgctgctgctggtggccagcggagatgctgacatgaagggccactttgatcctgccaagtgccgctatgccctgggcatgcaggacaggaccatcccagacagcgacatcagcgccagcagctcctggagcgacagcacagctgcccggcacagccggctggagagcagtgatggagatggagcctggtgcccagctggcagcgtcttccccaaggaggaggagtacctgcaggtggacctgcagaggctgcacctggtggccctggtgggcacccagggcagacatgctgggggcctgggcaaggagttcagccgcagctaccgcctgcgctacagcagagatggaagacgctggatgggctggaaggaccgctggggccaggaggtgatctctggaaatgaagatcctgagggcgtggtgctgaaggacctgggcccccccatggtggcccggctggtgcgcttctaccccagggctgacagagtgatgtctgtgtgcctgcgggtggagctgtatggctgcctgtggagagatggcctgctgagctacacagcccctgtgggccagaccatgtacctgtctgaggccgtgtacctgaatgacagcacctatgatggccacacagtgggcggcctgcagtatggaggcctgggccagctggctgatggagtggtgggcctggatgacttcaggaagagccaggagctgcgggtgtggccaggctatgactatgtgggctggagcaaccacagcttcagcagcggctacgtggagatggagtttgaatttgaccggctgcgggccttccaggccatgcaggtgcactgcaacaacatgcacaccctgggcgcccggctgcccggcggcgtggagtgccgcttccggcggggccctgccatggcctgggagggggagcccatgaggcacaacctgggcggcaacctgggggacccccgggcccgggctgtgtctgtgcccctgggcggccgggtggcccgcttcctgcagtgccgcttcctgtttgctggcccctggctgctcttcagcgagatctccttcatcagtgatgtggtgaacaacagcagccctgccctgggcggcaccttccccccagccccctggtggcccccaggccccccacccaccaacttcagcagcctggagctggagccccggggccagcagcctgtggccaaggccgagggcagccccacagccatcctgattggctgcctggtggccatcatcctgctgctgctgctgatcatcgccctgatgctgtggaggctgcactggaggcggctgctgagcaaggccgagcggcgggtgctggaggaggagctgactgtgcacctgtctgtgcctggggacaccatcctgatcaacaaccggcccggcccccgggagcccccaccctaccaggagccccggccccggggcaaccccccccacagcgccccctgtgtgcccaacggcagcgccctgctgctgagcaacccagcctaccgcctgctgctggccacctacgcccggcccccccggggccctggcccccccaccccagcctgggccaagcccaccaacacccaggcctacagcggggactacatggagcctgagaagccaggggcccccctgctgcccccaccaccccagaacagcgtgccccactacgccgaggccgacatcgtgaccctgcagggcgtgactggaggcaacacctatgctgtgcctgccctgcccccaggagctgtgggagatggccccccccgggtggacttccccaggagccggctgcgcttcaaggagaagctgggggagggccagtttggagaggtgcacctgtgtgaggtggacagcccccaggacctggtgtccctggacttccccctgaatgtgaggaagggccaccccctgctggtggccgtgaagatcctgcggccagatgccaccaagaatgccagcttcagcctcttcagcagaaatgacttcctgaaggaggtgaagatcatgagccggctgaaggaccccaacatcatccggctgctgggcgtgtgtgtgcaggatgaccccctgtgcatgatcacagactacatggagaatggagacctgaaccagttcctgagcgcccaccagctggaggacaaggctgctgagggcgcccctggagatggccaggccgcccagggccccaccatctcctaccccatgctgctgcacgtggccgcccagatcgccagcggcatgagatacctggccaccctgaactttgtgcaccgggacctggccaccaggaactgcctggtgggggagaacttcaccatcaagattgctgactttggcatgagcaggaacctgtatgctggggactactacagagtgcagggccgggctgtgctgcccatccgctggatggcctgggagtgcatcctgatgggcaagttcaccacagccagtgatgtgtgggcctttggagtgaccctgtgggaggtgctgatgctgtgccgggcccagcccttcggccagctgacagatgagcaggtgattgaaaatgctggggagttcttccgggaccagggccggcaggtgtacctgagccggcccccagcctgcccccagggcctgtatgagctgatgctgcgctgctggagccgggagagcgagcagaggcctcccttcagccagctgcaccgcttcctggctgaagatgccctgaacacagtgtag

SEQ ID NO: 305165 - DNA, 2760 bp, Artificial Sequence
  derived and/or modified sequence
atgggccccgaggccctgagcagcctgctgctgctgctgctggtggcctccggggacgcagatatgaaagggcactttgacccagctaaatgccgctacgctctggggatgcaggaccgcactatacctgacagcgacatctctgctagttcaagttggtccgactcaaccgctgcccgtcatagtcgcctggaatcctctgacggggatggcgcctggtgccccgcaggctcggtgtttcccaaggaggaagagtatttgcaggtcgacctccaacggctgcatctcgttgcgctcgtcggtacccaaggacggcatgcgggtggtctgggcaaagaattctcaaggtcctataggttacgttatagtcgtgatggtcggcggtggatggggtggaaggataggtggggccaagaagtcataagcgggaatgaggaccccgagggcgtggtcctgaaagacctggggccaccaatggttgcccgacttgtgcggttctacccaagagctgatcgggtgatgagcgtatgcctccgcgttgaactgtacggttgcttgtggagggacgggctgctgagctataccgccccagttgggcagaccatgtacctttcagaggcagtctatctcaacgattcaacatatgacggccacaccgtgggcggtcttcagtacggtgggttaggccagctggctgatggcgtcgtcgggctagatgattttcgaaaatcccaggaacttcgcgtgtggcccggctacgactatgtaggttggtcaaaccactccttctccagcggatatgtggagatggaatttgaatttgatcgcctgagggctttccaggcaatgcaggttcactgcaataatatgcatacattaggcgcccgtctgcccggtggagtggaatgcagattccgcagaggaccagccatggcgtgggagggcgagcccatgcgtcacaacctaggcgggaacctgggagatccacgggccagagccgtaagcgtccccctcggaggtagggtggcaaggtttctgcaatgtagattcctgtttgccggaccttggctgctgtttagcgaaattagttttatctctgacgtggtcaacaactccagccccgccttaggggggacctttcctccggccccctggtggccacccgggccaccccccacaaacttcagcagtctggagctggaacctaggggtcagcagccggtagcgaaggccgaggggtctccaaccgccatcctcataggctgcctggtcgccattattttattactgctattgatcatagctctgatgctctggagactccattggcggaggctgttgtctaaggctgaacgtcgggtgctcgaagaagaacttaccgtacacctgagcgtccctggggatactatcttgattaataatcgtcctggcccccgggagccacccccataccaggagccccgcccccgaggcaatccaccacatagcgcaccttgcgttcctaacggctccgctttactcctctccaatcctgcctatcggctcctgctggcgacttatgctagacctcctaggggtcctgggcctccgacgccagcgtgggctaaacctacaaacacgcaagcgtacagtggcgactatatggagcctgaaaaacccggggcacccctgctgccacctccaccacagaacagtgtaccccattatgccgaggctgatatagtcacccttcagggtgtgaccgggggcaatacctacgcagtgcccgccttgccaccaggggcagtaggtgatggacccccaagagttgatttccctagatcaaggctgcggttcaaagaaaagctgggggaggggcagtttggggaggtgcacctctgtgaggtcgattctcctcaagatctggtctctctagatttccctttaaacgttcggaaggggcacccgctgctggttgctgtgaaaattctccgacccgacgccactaaaaatgcctctttcagtctcttctccaggaacgactttcttaaggaagtgaaaatcatgtcaaggctgaaggaccccaacatcatccggttacttggggtctgcgttcaggatgatccactctgcatgatcactgactatatggaaaatggggacctcaaccagtttctgtctgcacatcagttggaagacaaggcggccgaaggggcgccgggggacggccaggctgcccagggccctaccatcagttatcccatgctcctacacgtggcagcacagattgcatccgggatgcgatatctcgccacccttaacttcgtgcaccgtgatttagccaccagaaattgtctggtgggggaaaatttcaccatcaagatcgctgattttggaatgtctaggaatctatatgctggagattattatcgcgtgcagggcagagccgtcctaccaatcaggtggatggcctgggaatgcatacttatgggcaagtttacaaccgcctctgatgtgtgggcgttcggggtcaccctgtgggaggtcctcatgctgtgtcgtgcccagccattcgggcagcttactgatgagcaagtaattgagaatgcgggggagttttttcgggaccagggtcggcaggtctatctgtcccgaccacccgcatgcccgcagggactgtatgagctgatgttacggtgttggagtcgggagagtgagcaacgtccacccttctctcagctgcacaggtttcttgcggaagatgcactcaatacagtgtag

SEQ ID NO: 305166 - DNA, 2760 bp, Artificial Sequence
  derived and/or modified sequence
atgggccccgaggccctgagcagcctgctgctgctgctgctggtggcctcaggagacgcagacatgaagggacactttgatccagctaaatgtcgctacgccctaggcatgcaggaccggactatcccagacagcgatatatccgcttcctctagctggtcagatagtaccgctgccagacatagcaggctcgaaagttccgatggcgacggcgcctggtgtcccgccggatcagtgttcccaaaggaggaggaataccttcaggtcgatctgcaacgtcttcacctcgtcgcccttgtcggaacccaggggaggcacgccggcggcctgggcaaggagttcagcagatcctacagactgcgctacagtagagatggcaggaggtggatgggctggaaggacaggtgggggcaagaggtcatatctggaaatgaggatcctgaaggtgtagtcctgaaggacctggggccacccatggttgctcgcttagttagattttatccacgcgctgatagagtcatgagtgtgtgcctccgagttgaactttatggctgcctgtggcgtgacggtcttctttcctacaccgcgcctgtggggcagactatgtatctgtcagaggccgtttatctgaacgactctacctacgacggccatacagtgggcggcctgcagtacggaggtctgggccagttagccgacggggttgtgggactggacgactttaggaaatcccaggagctcagggtttggcctggctatgactatgtgggatggagcaaccactcctttagctcagggtacgttgagatggaattcgaattcgaccgactgcgcgcattccaggccatgcaggtacactgtaataatatgcatactctgggggcgcgtcttccgggcggtgtcgaatgtcgcttcaggcgcggccctgctatggcttgggagggggagcccatgagacataacctgggcggtaacttaggagatccgagagcccgtgctgtgtccgtacctcttgggggccgcgttgccaggttcttacaatgtcggttccttttcgctggaccatggctgctctttagtgagatctcgtttatctccgatgtggttaacaactcatcacccgctctgggcggtaccttccccccagctccctggtggccacctggtccaccccctaccaatttttcatccctcgaactagaacccagaggtcagcagcccgttgccaaggctgaaggatccccaacagctattctcatcgggtgccttgtcgccattatattgttactcctccttatcattgcccttatgctatggcggcttcactggcgacgcctgctttccaaagcagagcgcagggtactcgaggaagaacttacggtccatctgtcggttcctggagacacaattcttataaacaaccgccctgggcctcgggagccccctccatatcaagaaccccggccccgcgggaatccaccacatagcgccccttgtgtgccgaatgggtcagctctgcttctctctaatccagcataccggctgttgctcgccacatatgctagacctcccaggggacccggccccccaacgccggcttgggccaaacccacgaatactcaggcctatagtggggattatatggagccagagaaacctggcgccccactcctacctcccccaccacagaactcagtgccacactatgcggaggccgacattgtgactcttcaaggggtcacaggaggcaatacctacgcagtgccggccctgcctccaggagcagtaggcgatggccctccccgggtggatttccccaggtctagactaagattcaaagagaagctgggagaagggcagttcggggaggtacacctctgtgaggtggatagccctcaggatctggtgtcactggacttcccactcaatgttcgaaaggggcaccccctcctggttgctgtgaagatcctgaggcccgatgccactaagaatgcttcattcagcctatttagccggaacgacttcctgaaggaggttaaaattatgtctcggctgaaagatccaaacataatcaggctgttaggggtgtgcgttcaagacgaccccttatgcatgattacagattatatggaaaacggggatctaaaccaattcctcagtgcccaccaactcgaagataaggctgccgaaggcgccccaggcgacggacaagctgcacaggggcctaccatctcttatcccatgcttctccacgtcgcagcccagatagctagtggcatgaggtatctcgccaccctgaactttgttcacagagatctggcaacacggaactgcctggtaggcgaaaacttcacgattaaaatagctgacttcgggatgagccggaacttgtacgcaggcgattactatcgggtccaagggcgcgccgtcttgcctattagatggatggcctgggagtgtatactcatgggaaaattcacaaccgcaagtgacgtatgggccttcggggtaactctgtgggaggtcctgatgctgtgtagggcacaaccgttcggacagctgacggatgaacaagtgatagagaacgcgggcgagttcttccgcgatcaggggagacaagtataccttagcaggcccccagcatgtcctcagggtctgtacgagctcatgcttcggtgttggagccgggagtccgagcagcggccaccatttagtcagctccataggttcttggccgaagacgcactgaacactgtttag

SEQ ID NO: 305167 - RNA, 2760 nt, Artificial Sequence
  derived and/or modified sequence
auggguccggaagcucugucgucccuccuccuucuacuguuaguggcuucuggagaugccgauaugaaaggccauuucgaucccgcaaaauguagguacgcgcucggcaugcaggaucggacaaucccugacagugauaucagugccaguucaucauggagcgauaguacagcagcaaggcacucccggcuagagucaucagauggcgauggcgccuggugcccugcugggucgguguucccgaaggaagaagaauaccuacagguggauuugcagagacuucaccuugucgcuuuggucggaacacagggucggcacgccggaggacuuggcaaggaauuuucccgguccuaucggcuacgcuauucccgggauggccggagguggaugggauggaaagaucgguggggacaggaagugaucucuggcaaugaagauccugagggagugguccuaaaagaccugggaccaccaaugguggcucggcucguuagguuuuauccccgcgcagaccggguaaugucugucugccugcgaguggagcuuuacggcugccucuggcgcgauggccugcugagcuacacagccccugucgggcaaacgauguaccugagcgaagccguuuaccugaaugacucuaccuacgacggccacacaguggggggccugcaguauggcgggcugggccaacucgcagaugggguggucgggcucgaugauuuccguaagagucaggaguugcgcguuuggccugguuacgacuauguggggugguccaaucacucuuuuucuucuggguauguggaaauggaguuugaguuugauagacugcgggccuuccaggccaugcagguacauugcaauaauaugcacacccucggugcccgacuuccagggggaguggagugcagguuuagacguggcccugcuauggcaugggagggcgaacccaugcgacauaauuuggggggaaaccugggagauccaagagcucgcgcagugucggugccccuggggggccggguggccagguuuuugcagugucgguuccucuucgcugggccgugguugcucuuuuccgaaaucagcuucaucuccgauguugugaauaauucgagccccgcacucggaggcacguucccuccugccccuugguggccaccaggaccuccaccgacaaauuucucuagucucgaguuggaaccucgcggccagcaaccugucgcuaaggccgaaggcagcccgaccgccauccuuaucgguugucuuguagccaucauucugcugcuccugcugaucaucgcucuuaugcucuggagacugcacuggcgcagauugcuauccaaggcugaacggagaguuuuagaggaggaauugacaguccauuuauccgugccuggugauaccauucugaucaauaaccggccagguccgcgggaaccccccccguaccaggagccccgaccaaggggcaauccuccccacagugccccgugcguacccaauggguccgcauugcugcucucaaaucccgccuaucgauugcuucucgcuacuuaugcaaggcccccucgggguccaggcccaccuacucccgccugggccaagcccacgaauacacaagcuuacaguggcgacuauauggagccggagaagccaggcgcgccucuccugccucccccuccacagaauuccgucccucauuacgccgaggcagacaucgucacacugcagggagugaccggcggcaauaccuaugcaguacccgcgcugccuccuggagccgugggcgauggaccuccccgaguugauuuucccaggaguaggcugagguuuaaagagaagcugggcgaaggacaauucggggaagugcaucugugcgaagucgacagcccacaagaucuugucagccuugacuuuccucucaauguacguaaaggucauccccuucucguugcagugaaaauccuuaggccagaugcaacgaagaaugccaguuucucacuguuuucccgaaacgacuuucugaaagagguuaaaauuaugucuagguugaaggaccccaauauuaucagauuauugggagucugugugcaggaugauccccuuugcaugauaacagauuacauggaaaacggagaccuaaaccaguuucugagcgcgcaccagcuggaggauaaagccgcugagggagccccgggagauggccaggccgcucaaggccccacaaucuccuacccuauguugcugcauguggcugcucagaucgccagugggaugagguaccuagcgacacucaauuucguacaccgggaccucgcuacgaggaacugucucguaggcgagaauuucacaaucaaaaucgcagacuucggcaugaguaggaaucuguacgccggggacuauuauaggguccaggggcgggcaguccuuccaaucagauggauggccugggaguguauuuuaaugggcaaguuuacuacagccucagacgucugggcauucggcguuacccuaugggaaguacucaugcugugcagggcacagccauuuggccagcugaccgaugaacaggugaucgagaacgccggagaauuuuuccgagaucagggccggcagguguaucucaguaggcccccggcuugcccacagggcuuguaugagcuaauguuacgcugcuggagcagagaaucagagcagcgcccucccuucagccaacugcaccgguuucuggcggaagaugcucucaacacuguuuag

SEQ ID NO: 305168 - RNA, 2760 nt, Artificial Sequence
  derived and/or modified sequence
augggcccagaagcucuuagcagccuacugcugcugcugcuggucgcaucaggcgacgccgauaugaagggucauuuugaccccgcaaaaugcagauacgcccucgguaugcaggaccguacuauucccgacucugauauuagcgcuucaucuucguggagugauucuaccgcagcgaggcacuccaggcucgaaaguucugauggagacggcgccuggugccccgcugggaguguguucccaaaggaagaagaguacuuacagguugaccuccaacgccuucacuugguggcacuugugggcacccagggccgucacgcagguggacugggcaaagaauucagcagaucuuacagacucagguauagccgggaugggaggcgguggaugggguggaaagacagauggggccaggaggugauuuccggcaaugaagauccagagggggugguucuuaaagaccugggacccccaaugguggcuagauugguacguuucuacccgcgcgcagacagggucaugagcguuugucuccgcguggagcucuauggaugccuguggagagacggucuucuaucuuauacggcgccagucggccagacgauguaccucagcgaggcuguuuaccucaaugacaguacuuacgauggucauacaguugggggccuacaauauggagggcuuggacaguuagccgauggcguugugggccuggaugauuuccggaagagucaagaguuacggguauggccgggcuacgauuacgucggguggucuaaucauaguuucagcucuggauauguggagauggaguucgaguuugacagguugagggccuuucaggccaugcagguacacugcaacaauaugcacaccuuaggugccagacuaccgggaggcguggagugccgguuucgacgcgguccugccauggcuugggagggugaaccaaugagacacaaucucgguggaaaucugggagacccgagggccagagccgugucaguuccauuagguggcaggguagccagguuucugcagugccgauuuuuauucgccgguccuugguugcuauucucagaaaucaguuucaucucugauguggucaacaauucuucuccagcacugggaggaacuuucccccccgcaccuugguggcccccgggcccaccuccuacaaacuucaguucccuggaacuggagccccggggucagcagcccgucgccaaggccgaggggucuccgaccgcuauccugauugguugccuagucgccauuauccuacugcuccugcucauaaucgcccugaugcuuuggcggcuacauuggcggcgacuguuaaguaaggcagaacgcagagugcucgaggaagaguugaccgugcaucucuccgugccaggcgauacaauccuuauuaauaaucgaccgggaccccgugaacccccaccauaccaagaacccaggccuaggggcaacccaccucacucugccccaugugucccuaacggcuccgcccuguugcucuccaacccagcuuauagguuacugcuagcaacauacgcaaggcccccacgcggucccggcccuccuacccccgcuugggcuaaaccgacaaacacccaggccuacuccggugauuacauggaaccugagaaacccggagcgccacuuuugcccccucccccucagaacucugucccacauuaugccgaagcggacaucguaacucuccagggagugaccggggggaauacauacgccgucccagcucucccccccggcgccgugggugacggcccgcccagaguggauuucccaagaucacggcuucguuucaaagaaaaacugggagagggacaauucggggaagugcaucucugcgagguggacaguccacaggaucuaguuagccucgacuucccauuaaauguuaggaaaggccauccauuguuaguugccgugaagauacugcgcccagaugcaaccaaaaacgccucuuuuagucuguuuuccaggaaugacuuccugaaggaggugaagaucaugagcagguuaaaggacccuaacauaauaaggcugcucggagucugcguccaggacgauccucuguguaugauuacugacuacauggaaaacggggaucugaaucaguuccuuagcgcccaucaguuagaagacaaggccgcugaaggugcccccggggacggucaagcugcccaaggcccuacaaucucauaucccaugcuucuucauguugcagcucaaauugccucagguaugcgguaucuugcuacacuaaacuuuguucaucgggaucuugccacucggaacugucuggugggagaaaauuucacaaucaaaaucgcggauuucgguaugagucggaaucucuacgcuggcgauuacuaucggguccagggaagggccguacuaccuaucagauggauggcaugggagugcauucugauggggaaguuuacuaccgcaucggacgugugggcuuucgggguaacccucugggaggucuuaauguugugucgggcccagccuuuuggacagcugacagacgagcaagugaucgagaacgccggugaguuuuucagagaucaggggagacagguuuaccucucccggccuccagcauguccgcaagggcuuuaugaguuaauguugagauguuggagucgggaguccgaacagcgacccccguuuagucagcuucaccgcuucuuagccgaggaugcucugaauacaguauag

SEQ ID NO: 305169 - RNA, 2760 nt, Artificial Sequence
  derived and/or modified sequence
augggccccgaggcucuaagcucuuugcuccugcugcuguugguggcuuccggugaugcugauaugaagggacauuucgacccugcaaagugcagguaugcucuggguaugcaggaccggacuaucccagauagcgacaucagugccucaagcuccugguccgacuccacagcggcacgccauucccgacuagaauccucugacggcgauggagcauggugcccagcugggaguguauuucccaaagaagaggaguaccuccagguggaucugcagcgacugcauuuaguagcucuugugggcacccaagggcggcaugcuggaggacuugggaaggaguuuucccgcaguuacagacucagauauucucgagauggaagacgcuggaugggauggaaagauagauggggacaagaaguuaucaguggcaaugaggaccccgagggggugguacucaaagaccuaggccccccaaugguggcccgccucgucagauucuacccaagggcagauagagugaugagcgugugucugagagucgaacuguacggaugccuguggcgugauggccugcuauccuacaccgccccuguagggcagacaauguacuugagcgaggcaguguacuugaacgacucuacuuaugauggucauacaguggguggccuccaguauggaggcuugggccagcuggccgacggaguggugggccuggaugacuuucggaagucucaggaguugagaguguggccaggauaugauuaugugggguggaguaaucacuccuuuucgaguggauacguggaaauggaauuugaauucgacaggcugcgcgcauuucaagcuaugcaggugcacuguaacaacaugcauacacucggagccagacugcccggagggguagaauguagguuucgcagaggaccugcgauggcuugggaaggcgagcccaugcggcauaaccugggagggaaccuaggagauccucgagcucgcgccgucucugugccacugggggggagaguggccagauucuugcagugucgcuucuuguucgccggaccuuggcugcuguucagcgagauaaguuucauuagcgacguaguuaacaauucauccccagcacuggggggaacauucccccccgccccaugguggccaccuggcccuccaccuacgaauuuuucgucucuggaacuggaacccagaggccagcaaccuguggccaaagcugaaggcuccccuacagcgauucuuauuggguguuugguugccauuauccugcuucuccuccugauaauagcccugaugcuguggaggcuccauuggagacggcuucuguccaaggcugagagacguguucuugaagaggaguugaccgugcaccuuagugugcccggcgauacuauacugaucaauaaucggccaggcccccgcgagccccccccuuaccaggaaccccgccccaggggcaaucccccgcacuccgccccuugcgucccuaacgguucugcucugcuucugucaaauccugcuuaccgucuguugcuugcuacauaugcgcgcccaccacgggguccaggccccccuaccccagccugggcaaagccaacuaauacccaagcguauucuggcgauuacauggaaccugagaaaccuggcgccccgcugcuccccccaccuccacagaauuccguaccccauuaugccgaagccgauauugugacccugcagggagugaccggcggcaauaccuacgccguacccgcccuuccuccuggagccguuggagacggucccccccgagucgacuuuccccgaucacggcuucgauucaaggagaaacugggcgagggccaauuuggugaaguucaucugugugaaguugauagcccccaggaucugguuucacucgauuucccacucaaugugagaaaaggccauccccucuuaguggccgucaagauccugaggccagaugcuaccaaaaacgccucauuuucacuguucucuaggaacgacuuccucaaagaaguuaaaauuaugucuaggcuaaaggauccuaauauaauacgccuacucggggugugugugcaggacgacccucuuugcaugauuaccgauuauauggagaauggcgaccugaaucaguuucuuagcgcccaucagcuggaagacaaagccgcagagggagcccccggggauggacaagcggcccaggguccaaccauuagcuauccgaugcuccuucauguggccgcucagauugccucggggaugagauaccuggcaacgcugaacuucgugcaccgagaucucgccaccagaaacugcuugguuggcgagaauuucacuaucaagaucgccgauuucgggaugucuaggaaucuguacgccggcgacuauuaccggguucagggcagagcugugcuuccaauccgguggauggcaugggaguguaucuugaugggcaaguuuaccaccgcaucagacgugugggccuucggggugacacuaugggagguauugauguuaugcagagcucagcccuuuggacagcugacugaugagcaaguuauagagaacgcuggggaguuuuucagggaucagggacgacagguguaucucuccaggccuccugcuugcccacaagggcucuaugaauuaauguuacguuguuggagccgcgaauccgagcagagaccccccuuuucacaacugcaccgcuuucuugcggaggacgcuuugaauacaguuuag

SEQ ID NO: 305170 - RNA, 2760 nt, Artificial Sequence
  derived and/or modified sequence
augggccccgaggcacucaguucccugcuccuacugcuccucguugccaguggggaugccgacaugaaaggacauuucgacccggccaagugccgcuaugcccuggggaugcaggauagaacaauaccugauuccgacauuuccgccagcagcucauggagcgauaguaccgcugcccggcacuccaggcucgaauccucagauggugacggcgccugguguccagcugggucuguuuucccaaaagaggaggaauacuuacaggucgauuugcagagacugcaccuuguugcccucguaggcacucagggucggcacgccggaggucuggguaaagaguuuucccguucuuaccgacucagguacucccgggacggccgcagauggaugggauggaaggauagauggggccaggaggucaucucaggcaaugaggaccccgaaggaguaguguugaaagaccucgguccaccgaugguugcacgcuuggucagauucuauccaagagcugaucgagucaugagcgucugccugcgcgucgagcuguacgguugucucuggcgagauggucugcucucuuacacagcaccuguagggcaaacgauguacuuaucagaggcagucuauuugaaugacagcaccuaugaugggcacacugucgggggccuccaguauggaggacuuggacaauuagcagacggcguggucggccuagaugacuuccgcaagucucaggaacuacguguguggccugguuacgacuacgugggauggagcaaccacucuuucagcucaggcuauguugaaauggaauucgaguuugacagauugcgcgcauuccaggcgaugcaaguacacugcaauaacaugcacacgcucggagcucggcucccagggggaguggagugucgguuccgaaggggacccgccauggcaugggaaggggagccaaugaggcacaacuuaggggggaaucugggugaccccagagcucgagccgucuccgucccucugggcggaaggguggcccgauuucugcaauguagauuucuauuugcugggcccuggcuucucuuuagcgagauuucauuuaucucagauguggugaacaauuccucuccggcucugggagggacguucccccccgcucccugguggccuccugggccuccccccaccaauuucaguucuuuggagcucgagccaagaggucagcagcccguugcgaaggccgaagggucgccaacagccauuuuaaucggcugcuuaguagccauuauccuacuccuccuacugaucauugcccucauguuguggcgauugcauuggagaagacuccugaguaaggcggagcgccggguucuggaagaggaacuuacagugcaccucagugugccuggggauacuaucuugaucaacaaucgcccugggccuagagaacccccaccguaccaggagccucgcccuagggguaacccaccccauagcgccccauguguaccaaacggguccgcacuccuguugucaaauccugcuuaucgccuccuucucgccaccuaugcaagaccaccaagaggacccggaccgccaacccccgccugggcgaaaccuaccaauacacaggcauauagcggggauuauauggaaccugaaaagccgggggcuccuuugcugccccccccuccccagaacuccguuccacauuaugccgaagcugacauugugacucugcagggaguuacaggaggcaauacauaugccguuccagccuugccucccggcgcugucggggacggaccuccaagagucgauuucccacggagucggcugcguuuuaaagagaagcugggagaaggacaauucggagagguccaccucugugaaguugauucgccacaggaucucgugucccuagacuuuccucugaacguaaggaaaggucacccacuccugguugccgugaagauccuucgccccgaugccacuaaaaaugccucguuuucccuauucagcagaaaugauuuucugaaggaggugaaaaucaugagucgauugaaggaucccaacauuauccgacuguuggggguuugcgugcaagacgacccacugugcaugauuacagauuauauggagaauggcgaucuuaaccaguuucugucagcucaccaguuggaagacaaggccgcugagggggcucccggggauggacaggccgcucagggcccaaccauuucuuaccccauguuauugcacguggcagcccagaucgccuccggaaugcgcuacuuagcaacccucaacuucgugcaccgugauuuggcuacuagaaauugucuggugggagagaauuucaccauaaaaaucgcagacuuugguaugucucggaaucuguaugcuggcgauuauuauagggugcaggggagggcagugcugccaauuagauggauggccugggaguguauccugauggguaaguucacgacugccagugacgugugggcuuuuggugugacacugugggagguguugaugcucugucgggcacagccuuuuggucaauuaacugacgagcagguuaucgaaaaugcuggcgaguuuuucagggaccaagggcgucagguguauuuaagucgccccccagccuguccccagggccucuaugaauugauguuacgauguugguccagagaguccgaacagcggccaccuuucucacaacuccacagauuucuggcugaggaugccuuaaauacagucuag

SEQ ID NO: 305171 - RNA, 2760 nt, Artificial Sequence
  derived and/or modified sequence
augggcccugaggcacuguccucacuguuguuacugcuacucguggcaucgggcgacgccgauaugaagggccacuuugaucccgccaagugcagguacgcgcuggguaugcaggacaggacuaucccugacagcgauaucucugccucaucuucuuggucugacuccacugcggccaggcacagcagacuggagaguucugacggggauggcgcauggugccccgccggcagcguuuucccuaaagaagaagaauaucuucagguugaccuucagagauuacaucuuguggccuuaguagggacucaggggcgccacgccggcggccucggcaaggaauuuagucgcucauauaggcugcgguacagucgcgauggaaggagguggaugggguggaaggacagguggggccaagaggucauuagugguaaugaagaucccgagggcguugugcugaaagaccugggaccccccaugguagcuaggcugguccgguuuuacccacgagcugaccgaguaauguccguaugucuuaggguugagcucuacgggugucuauggcgagaugggcuguuaucuuacaccgcccccguuggccaaacuauguaucuuagcgaagcugucuaccugaaugacucuaccuacgauggucacacaguuggcggauugcaauacggaggccuuggucagcuugcggauggcgugguugggcuggaugacuuucgaaagucacaagaauuacggguguggccuggcuaugauuacgugggcuggucuaaucacaguuucagcucgggcuauguagagauggaguuugaguucgaccgucugcgugcuuuucaggcaaugcaggugcacuguaacaacaugcauacuuugggcgcacgacugccggggggcguugaguguagauucagacgagggccggcuauggccugggagggggaacccaugcggcacaaucugggaggcaaccugggggacccaagagcccgcgcuguguccgugccacucggaggccgcguagcucgauuuuuacagugcagauuccuguuugccgggcccuggcuacuguucucggagaucuccuuuauuagcgacguugugaauaauucuucuccagcccuuggaggcacguuuccgcccgcucccugguggcccccugggcccccaccaacuaacuucuccagccuugaacucgaaccucggggccagcagccaguugcuaaggcugaaggaucaccaaccgcaauacugauuggaugucuaguggcgauuauacugcuucuuuugcuuauuauugccuugaugcucuggcgauuacacuggcgacgccucuuaaguaaggccgaacgacgaguccuagaggaagaauuaaccgugcaccuaagcgucccgggcgacacuauccuaaucaauaaucgcccaggcccccgggagccccccccuuaccaagaaccuagaccucguggaaaccccccucauucagcaccaugcgugccaaauggcagcgcccuguugcugagcaacccagcuuaucgccugcuucucgcgaccuaugccaggccaccuaggggaccuggaccacccacucccgccugggcaaaaccuacuaauacucaagcuuauaguggagacuauauggagccugagaagcccggcgccccccugcugccaccuccuccccagaacucagugccccacuacgccgaagcugauauagugacacugcagggcguaacuggugguaauaccuaugccgugcccgcccugccgcccggcgcagugggggacggucccccacgggucgacuucccucgaucucgccugcguuuuaaagaaaagcugggagaaggccaguuuggagaggugcaucugugcgaaguggacuccccucaggaucucgucagccucgacuucccccucaacgucagaaaaggccaucccuuacuggucgcuguaaagauucugcgaccugaugcuaccaagaacgccuccuucucucuguuuucgagaaaugauuuucugaaagaagucaagauaaugucucgccugaaggauccaaauaucauccgcuuauuggguguuugcguccaggaugaccccuugugcaugauuaccgauuacauggaaaacggggauuugaaccaauuccuuuccgcccaccaguuggaagacaaggcagcagaaggcgcaccaggugacggucaggccgcgcaaggccccacuaucaguuacccgaugcuacugcauguggcagcucagaucgccucuggcaugcgcuaccuugccacacugaauuuuguucacagagaccucgccacacgaaauugucuugugggugagaauuuuacgauaaagauugccgacuucggcauguccagaaacuuguacgccggcgacuacuauaggguucagggccgcgcagugcuuccgauuagguggauggccugggaguguauccuuaugggaaaguucaccaccgccagugaugucugggcuuuuggggugacucuaugggaaguucugauguugugcagggcccaaccuuuuggucagcugacugacgagcagguuauugagaacgcuggcgaguuuuucagagaucagggucggcaagucuaccuuucaagaccgccagccuguccucaggguuuguaugagcucaugcugcguuguuggucacgagagucugagcagcgaccccccuuuucacaguugcauagguuucucgcggaagacgccuugaacaccguguag

SEQ ID NO: 305172 - RNA, 2760 nt, Artificial Sequence
  derived and/or modified sequence
augggcccugaagcccuuuccucccuucugcuccuuuuacugguugccagcggagacgccgauaugaagggccacuuugauccagccaaaugcagauacgcgcuggguaugcaggaccgcacuauucccgauucugacauaagugccucaucuucuuggucagauaguacagcagcccggcauagucgccuggaaaguagugacggcgauggagccuggugccccgcuggcucugucuuccccaaagaagaggaguaucugcaaguugaccugcagagacugcauuuaguggcuuuggucggcacucagggaaggcacgcaggcgguuuggguaaggaauucagccggaguuaccgcuugagguauagucgagacgggagacgguggaugggauggaaggaccgguggggccaagaagugaucucgggcaaugaagauccugagggcgucguuuuaaaggauuugggcccccccaugguggcccgcuuagugagguucuauccgcgcgccgauagggugaugucuguuugccugcgcguggagcuguacggaugccuguggagagauggucuccucucuuacacagccccugugggucagacaauguaccucuccgaagcgguauaucucaaugauagcacguaugacgggcauaccguggggggguuacaguacgguggacuagggcaauuggccgauggcguggucgggcuggacgauuuccgcaagucacaggaacugagaguguggccuggauacgauuacgugggcuggucaaaccauucguuuucaagcggauacguagagauggaguuugaguucgacaggcugagagccuuucaggcaaugcagguccacugcaauaauaugcacacuuugggggcaaggcugccagguggcgucgagugucguuuccggcggggccccgccauggccugggaaggagaacccaugcggcauaauuuggggggaaaccuuggggacccuagagcacgggccguaagcguuccacuuggaggccggguggccagguuucugcagugcagauuuuuauuugcagggcccugguugcuguucagugagauuucauuuauaucagacguuguaaacaauucaucaccggcacuggguggcaccuuuccuccugccccaugguggcccccggggccgccccccacaaacuucagcucucucgaacuggaaccacgaggucagcagccagucgcuaaagccgaagguucgccaaccgcuauuuugauaggcugccuagucgccauuauccugcuacuccucuugaucaucgccuuaaugcuuuggcguuugcacuggagaagauugcuguccaaagcugaaagacgugugcuggaggaggaacucacggugcaccucagugugccaggggauacaauccuuauuaauaaucgcccaggccccagggaaccgccucccuaccaggaacccaggccaagagguaauccuccgcacucagccccaugcguuccuaacgguagcgcauugcuguuaagcaacccagccuaccggcuguugcuggcuaccuaugcccggcccccccgaggaccaggaccacccaccccagcaugggcaaaacccaccaacacacaagccuauucuggugauuauauggagccagaaaaaccaggcgcuccucuguuaccuccuccaccccaaaauagcgucccgcauuacgccgaggcggauauugugacucuacagggcguaacugggggaaauaccuaugcuguuccagcacuccccccuggagcaguuggcgauggaccaccaagaguugacuuuccuaggagcaggcuucgcuuuaaggaaaagcucggggaggggcaguuuggagaagugcaucugugugaaguggauagcccccaagaucugguuagccuagauuuuccacugaacgucagaaagggacauccauugcugguagccguaaagauucugcgucccgacgccaccaagaaugcaucuuucucacuuuuuagccgcaacgacuuccugaaggaagugaaaauuaugagucgguuaaaggacccuaacauuaucagauuacuaggcguguguguucaagacgacccgcuuugcaugaucacggauuacauggagaauggugaucugaaccaguuucuuagcgcccaucaacucgaagacaaagcagccgagggggcacccggggaugggcaggccgcccaagggccuacuauuuccuacccaauguugcuacacguagccgcccagauugccuccgggaugagguauuuggccacucugaacuucguacauagggaccuggcgacuaggaauugccuggugggagagaauuuuaccauaaaaauagccgacuuugguauguccagaaaccuguacgcuggagacuauuauagagugcaaggaagggcggugcuccccauuagauggauggccugggaauguauucuuauggguaaauuuaccaccgcuucagacgucugggcguucggugucacgcuuugggaaguuuuaauguugugccgagcacaacccuuugggcaacucaccgacgagcaggugaucgaaaacgcgggugaauucuuccgcgaccaaggaagacaaguguaucugucccgaccucccgccugcccccaggggcucuacgaacugaugcugaggugcuggucucgggagucugaacagaggcccccauucucccaacuccacagguuccucgccgaagacgcgcugaacaccgucuag

SEQ ID NO: 305173 - RNA, 2760 nt, Artificial Sequence
  derived and/or modified sequence
augggucccgaagcccuguccucuuugcuucugcuccugcugguagccucuggcgacgccgauaugaagggucacuucgauccagcaaaguguagauacgcccuggguaugcaagaccgcacaaucccagauuccgacauuuccgcaagcucaaguugguccgacucaacugcugcucggcauucucguuuagaguccucugauggugauggcgcuugguguccagcugguuccguguuucccaaagaagaggaguaccugcaaguugacuugcagcgauuacaccuggucgcccucgugggaacucagggcaggcacgcggggggacugggaaaagaauuuucucgaagcuaucgguugagauauagcagggauggccguagauggaugggcuggaaggaucggugggggcaagaagugauuagcgggaaugaggauccugaagggguggugcugaaggaccuggggccucccauggucgcacgguugguaagauuuuaucccagagcagacagagucaugaguguuugccugcgcgucgaguuauacgguugucuguggcgggauggacuccugaguuacacagccccagucggacagaccauguaucuaucagaagcuguguaccuuaaugacagcaccuacgauggucauacugugggcggccugcaguacggcggacucggacaauuggcggacggaguggugggucuugaugauuuccgcaaaucucaggagcugcgcguguggcccggauacgacuacguagguuggaguaaccauucuuucaguucagguuacguggagauggaguucgaguucgacagguuaagggccuuucaagccaugcaaguucacuguaacaacaugcauacccuuggcgcucggcucccuggaggcguggagugccgguuucgaagaggccccgcaauggcuugggaaggagagccuaugcgccacaaccucggggguaaucuaggagauccccgggcucgagcggucagugucccacucggugggcggguugcgcguuuccuccaauguagauuccuauuugcaggaccguggcuucuauuuagcgaaaucucuuuuaucucagacguggugaauaacucuucgcccgcccuugguggaaccuuuccuccugccccgugguggcccccgggccccccucccaccaauuucucguccuuggaacuugaaccuaggggccaacagccgguggccaaggcugagggcucuccaaccgcaauccugauuggcugucuggucgcuauuauccuucugcugcuucuaauaauugcucucaugcuauggcgccuccauuggcgcagacuuuuguccaaagcugaaaggcggguccucgaagaagaguuaaccgugcaucugagcgugccuggggauacaauuuugaucaacaaccggccaggcccccgcgaaccaccuccauaccaagaaccaagaccuagagggaauccuccccacagcgcuccuugcgugcccaauggaucugcacugcuuuuguccaacccagccuauagacucuugcuagccacauacgcucgacccccacggggccccggcccaccaacccccgcuugggccaaaccgacaaauacccaggccuacucaggggacuauauggaaccugagaagcccggcgcacccuugcugccgccgccuccccaaaacuccgucccgcacuacgcugaagccgauaucgugacuuuacagggcguuacuggagguaacaccuacgcgguccccgccuugccucccggggccguuggggacggaccuccacgggucgauuucccuagaucacggcuccgauuuaaggagaagcugggcgaaggacaguucggugaaguucacuugugugaggucgacagcccccaagaucuagucuccuuagauuucccauugaacgugaggaagggacauccacuccuuguggcggugaagaucuugaggccagacgccacuaagaaugcaagcuucagucucuuuagccguaacgacuuucugaaagaaguuaagauaaugagcagacucaaggacccaaacauaauucgguuguugggcgugugugugcaggacgauccccugugcaugauuacagauuacauggagaauggcgaccugaaccaauuccuuuccgcacaucaauuagaggacaaagcugcugaaggggcaccuggagauggacaagccgcacagggacccacaaucucuuaccccaugcuucuucaugucgcugcacagaucgcuagcggcaugcgguacuuggcuacccuuaacuucgugcaccgcgaucuggcuacaagaaacugucucgugggggaaaacuucacuaucaagauugcagauuucggcaugaguaggaaccuguacgccggugauuacuacaggguccaaggucgggcgguacugcccauacgcuggauggcuugggaguguauacuaaugggcaaauuuaccacugcgagugauguuugggcuuuuggcguuacgcuuugggaaguucugaugcugugccgcgcgcagccauuuggccaacugacagaugaacagguaaucgaaaacgcuggugaauuuuuccgcgaccagggcagacaggucuauuugucaaggccuccagcuuguccacagggccuauacgaacucauguugagauguuggagccgcgaaucugagcaacgcccacccuuuucacaacuucaccgcuuccucgcugaagaugcuuuaaacacuguuuag

SEQ ID NO: 305174 - RNA, 2760 nt, Artificial Sequence
  derived and/or modified sequence
augggcccugaagcccuguccucauuacuuuuauuguuacuggucgccagcggugaugcugacaugaaaggccauuuugacccagcaaaaugccgguacgcccugggcaugcaggaccgaacuaucccugacagugacaucucugcuuccucuuccugguccgacuccaccgccgcuagacacucucgguuggaaagcucagacggagauggugcuuggugcccugccggauccgucuuccccaaggaagaagaauaccugcagguggaucugcagagauugcauuuagucgcccugguagggacacagggccggcacgcggguggccucggcaaggaguuuucacgaucuuacaggcuuagauauaguagagauggacgccgcuggaugggauggaaagauagauggggucaggagguaaucucugguaaugaagauccggaaggagucgugcuaaaagaccucggaccaccgaugguggcccggcuuguaagguuuuauccaagggcagauagggugaugagcgugugucugagaguagagcucuauggcuguuuauggcgagacgguuuacugagcuacacagcuccagucgggcagacuauguaucucagugaagccguguaccucaaugacucaacuuaugacggucauacugucggggggcuucaguacgguggauugggacaacuugcagacggaguggucggauuagacgauuucagaaaaagccaggagcugcguguuuggccaggguacgauuauguuggaugguccaaucacagcuucucuagcgguuauguggaaauggaguucgaguucgauagacuccgagcuuuucaagccaugcaggugcacuguaacaacaugcacaccuuaggggcucgccuucccggagggguagaaugccguuuuagaagaggccccgccauggcuugggagggcgaaccuaugcgucauaaucugggcggcaaucucggagacccuagagcccgcgcagugagcguaccucuuggugggcggguggcucguuuccuacagugccgauuccuuuuugccgguccuuggcugcuauuuagugaaaucagcuuuauuagcgacgucguaaacaauuccucaccagccuuaggugggaccuuuccucccgccccuugguggcccccuggaccaccucccaccaacuucagcucuuuagaacuugagccaagaggccagcaaccuguagccaaggccgaagggaguccaacugcuauccugauagggugccuagucgcgaucauucucuuacuccugcucaucauugcccugaugcucuggcgcuugcacuggcgucgacuguuaucaaaggccgagcgccgcgugcuggaggaagagcuuaccgugcaccugagugugcccggagacaccaucuuaaucaauaauagacccgggccgagagaaccuccccccuaccaagagccuagaccucgcgguaacccaccucauuccgcuccguguguaccuaacggcuccgcccuguugcucuccaacccagcuuauagguuacugcuagcaacauacgcaaggcccccacgcggucccggcccuccuacccccgcuugggcuaaaccgacaaacacccaggccuacuccggugauuacauggaaccugagaaacccggagcgccacuuuugcccccucccccucagaacucugucccacauuaugccgaagcggacaucguaacucuccagggagugaccggggggaauacauacgccgucccagcucucccccccggcgccgugggugacggcccgccccguguugacuucccccggucaaggcuucguuucaaggagaaacuuggugaaggccaguuuggagaagugcacuuaugcgaggucgauagcccccaagaucuagucagccucgacuucccccuuaaugugcgcaaaggacauccacuguugguugccgugaagauccuccgaccugaugcaacaaagaaugccuccuucagucucuuuuccagaaacgacuucuuaaaggaagugaagaucaugagccggcugaaagauccuaauauuauuagauugcuggguguuuguguccaggacgauccacucuguaugaucaccgauuacauggaaaauggagauuugaaccaauuccucucugcucaccagcuggaagauaaagccgccgagggcgcccccggggauggccaagcugcacaaggaccuacgauuaguuauccaaugcuguuacauguagccgcacagauagcuaguggaaugcgauaccuggccacacugaauuucgugcauagagaucucgccacucguaauugcuuggugggagaaaacuucacuauuaagaucgccgauuuuggcaugucgaggaauuuguacgccggggauuauuaccgaguucagggaagagcaguucucccgauccgauggauggccugggaaugcauucucauggggaaauucacuaccgcuuccgaugucugggccuuuggugucacucuuugggaaguccugaugcuuugucgagcccagcccuucggccaguugacggaugaacaaguaaucgagaacgcaggcgaauuuuuccgcgaucaaggucgccagguauaucugagucggccuccggcauguccgcaggggcuguacgagcugaugcuaagguguugguccagggaaucagaacagagaccaccauuuucacagcuucaucgauuccuagcagaagacgcacuaaauaccguauag

SEQ ID NO: 305175 - RNA, 2760 nt, Artificial Sequence
  derived and/or modified sequence
auggguccggaagcccugagcagucuucucuuacuacuucucgucgcuagcggugaugccgauaugaagggacauuucgauccugccaagugcagauacgcccuugguaugcaagacagaacaauaccagauuccgacaucucagccucaucaagcuggucugauaguacagcggccagacacucucgacuggagagcagcgauggcgacggggccuggugcccugcggggucaguuuucccaaaagaagaagaguaucuccagguagauuugcagcgccugcaccuuguggcacugguaggaacccaaggacgacaugcuggaggacugggcaaggaauuuagcagaagcuaccggcugagguauaguagagacggccgacgguggaugggcuggaaagacaggugggggcaggagguuauuagcggaaacgaggacccugaaggagucgucuuaaaggacuuggggccccccaugguagcucggcuuguuagauuuuauccuagagccgaucgugugaugucagucugccugagaguggagcucuacggauguuuauggcgggacggauuguuaagcuauacagcuccugugggccagacaauguaccucuccgaagccgucuaucucaacgauaguacauaugacggacauaccgucgguggacugcaguauggagggcuggggcaacuggcugauggaguggugggccucgacgacuuucggaaaucucaggaauuaagagucuggccaggauacgacuaugugggauggagcaaccauagcuucucuucaggguauguggaaauggaguucgaguuugaucgguuaagagcguuucaggcuaugcagguucauugcaauaacaugcacacacugggcgcacgucucccugguggcguagagugcagauuccgcaggggccccgcuauggccugggaaggcgaacccaugaggcacaaccugggaggcaaucucggcgacccacgggcccgugcuguuagugugccacuuggcggaaggguugcccgguuucuccaauguagauuccucuucgcagggcccuggcuuuuauucuccgaaaucuccuuuauuucggacgucguaaacaacucuuccccagcacucggcggaaccuucccucccgcaccaugguggccaccaggacccccccccacaaacuuuucuucccuugagcucgagccacgcggccagcaacccgucgcaaaagccgagggaucuccgaccgccauccugauuggaugucugguugcuaucauacuuuugcuacugcucauuauagcucuuaugcucuggcgacugcacuggcgccggcuccucucuaaggcugaacgucgcguucucgaggaggagcucaccgugcaucugucuguacccggagauacaauucugaucaauaaucggccugggccuagagaacccccacccuaccaagagccccgaccacguggaaacccuccccacagcgccccuugugugccuaacgguucugcucugcuucugucaaauccugcuuaccgucuguugcuugcuacauaugcgcgcccaccacgggguccaggccccccuaccccagccugggcaaagccaacuaauacccaagcguauucuggcgauuacauggaaccugagaaaccuggcgccccgcugcuccccccaccuccacagaauuccguaccccauuaugccgaagccgauauugugacccugcagggagugaccggcggcaauaccuacgccguacccgcccuuccuccuggagccguuggagacggucccccccguguugauuucccaaggucuagacuaagguuuaaggagaaacuaggcgaagggcaauuuggugaggugcaccuaugugagguagacucaccacaggaucuugugucccucgacuuuccccugaaugugcgaaagggucacccucuccugguggcggugaagauucugagacccgaugcuaccaagaacgccagcuucagucuguucagccggaacgauuuccugaaagaagugaagauuaugucacguuuaaaggacccuaauauuauucgccuucugggcgugugcguccaagacgauccacuuuguaugauuacugacuacauggagaauggagauuuaaaccaguuucugucugcacaucaacuggaagauaaagccgccgagggagcuccaggagaugggcaggcagcccagggcccaacuauuuccuacccuaugcugcugcacgucgccgcucagaucgcuaguggaaugcgcuaucucgccacucuaaacuuuguucacagggacuuagccacacguaauugcuuaguuggugaaaauuucacaaucaaaaucgcagauuucggcaugucuagaaacuuguaugcgggugauuauuaccggguccagggucgcgcaguccugccuauuagguggauggcuugggagugcaucuugaugggaaaguuuaccacugccucagacguuugggccuucggcguaacccucugggagguauugaugcuuugucgugcccagccauucggacagcuuacagacgaacaaguaaucgaaaacgccggggaauucuucagagaucagggucgacagguguaucugucccggccaccugcaugcccacagggauuguacgaacucaugcugcgcuguuggaguagggagagugaacagcggcccccguucucccaguuacaucguuuccucgccgaagacgcauugaauacaguuuag

SEQ ID NO: 305176 - RNA, 2760 nt, Artificial Sequence
  derived and/or modified sequence
auggguccugaagccuugagcagccuccuccuccugcuucuuguugccucgggugacgcagauaugaaaggccauuuugaccccgcuaaaugccgcuacgcccuugguaugcaggaucgcacgauucccgacuccgauaucagcgccucuucaucuugguccgauucaaccgcggcaaggcacuccagacuggaaagcuccgacggugacggagcguggugccccgccgguagcgucuucccuaaagaggaagaguaccuucaggucgaucugcaacgucugcaccucgucgcucuggugggcacgcagggucgucaugcaggugggcugggcaaggaguuuuccagaucauauagauugcgauacucacgugauggcaggcgguggaugggguggaaggaucgcugggggcaggaaguaauuuccggaaaugaagaccccgaaggcguggugcugaaggaucuggggcccccgaugguagcuagguuaguccguuucuauccccgagcagaucggguaaugucuguuugcuuacgggucgaguuguacggguguuuauggagagauggucuccuuaguuauacugcaccuguagggcagacgauguaucugagugaggccguguauuugaaugacagcacauacgacgggcauacaguuggaggguuacaguaugggggguugggccaacucgccgauggagugguaggucuggacgacuucagaaagagucaggagcuacgcguguggccuggguacgauuacguuggcuggucaaaucauucuuucucauccggcuacguggagauggaguucgaauucgacagauugagagccuuucaggcuaugcaaguucauuguaacaauaugcacacucucggcgcuagauuaccuggaggcguggaguguagauuuagacgagguccagcaauggcgugggaaggcgagcccaugcgucauaacuuaggcgggaaccugggagacccgagagccagggccgugucagugccccucggcgggaggguugcaagguuccugcaaugccgcuuccuguuugccggcccuuggcuacuguuuucagagauuucuuucauuuccgauguggugaauaacuccuccccugcacuuggcggcacauuuccuccugccccuugguggccuccagggccuccuccaacaaacuucucaucccuggaauuagaaccacgaggacagcaaccaguggcgaaggcagaaggcucaccaacugcuauacucaucggguguuuaguggccaucaucuugcuguuauuacuuauuaucgccuuaaugcucuggaggcuccauuggcgaagacugcuuagcaaggcugagaggcgugucuuagaagaagaacucaccguucacuuaagcguaccaggcgauacuauauugaucaacaacagacccggcccacgcgaaccuccuccuuaucaggaaccgcguccuaggggcaaccccccucacagcgcccccugugugccuaacggcuccgcauuauugcuuucuaauccagcauauagacugcuucuggccacuuaugcacgcccacccagagggccuggaccaccgacccccgcuugggcaaagcccaccaacacccaagccuauuccggagacuacauggaaccugaaaagccaggcgccccacucuugccccccccaccucagaacuccgucccacacuaugccgaggcugacaucgugacacuacaaggggugaccgguggcaacacauaugccgucccugcauuacccccaggggcaguaggcgauggcccaccacgcguggacuucccucgaucuagauugcgcuucaaggaaaagcucggggaaggacaguucggcgaaguccaccucugugaaguggauuccccucaggaucuugugaguuuggacuuuccccucaacgugaggaaaggacacccacuccucguggccguuaagauucuuaggccugaugccaccaaaaaugcuucuuucucucucuucucaagaaaugacuuucucaaggaggugaagauuaugaguagacucaaagaucccaauaucaucagacugcuuggcgucugcguucaagaugauccacuuuguaugauuaccgacuacauggagaauggugaccugaaucaguuccucuccgcccaucagcucgaagacaaggcugccgaaggcgcuccuggagacggccaggcggcacagggacccacuauaucuuaucccaugcuucuucauguugccgcccagauugccucuggcaugagauaucuggccacauuaaauuucguccaccgcgaccuagccacccgaaauugucucgucggagaaaacuuuacuauuaaaauugccgacuucgggauguccaggaacuuguacgcuggcgauuacuaccgcguacagggccgcgcugugcugccaauucguuggauggcuugggagugcauccuuaugggcaaguuuaccacagcuucugaugucugggccuuuggggucacgcucugggaggucuuaauguuguguagggcccaaccuuucggccagcuuacugacgagcaggucauugagaacgcaggugaguuuuuucgcgaccaagggaggcaagucuacuuaucucggcccccggcaugcccucagggcuuauaugaacugaugcugcgauguuggaguagagagucggaacagagaccaccauucucccagcuccaucgcuuccucgccgaagacgcccuaaacaccguauag

SEQ ID NO: 305177 - RNA, 2760 nt, Artificial Sequence
  derived and/or modified sequence
augggcccugaagcucuuuccagucuguugcuuuugcuccugguggccucaggagacgccgauaugaaaggacauuucgaccccgcuaaaugccgguacgccuugggcaugcaggaccgcacgaucccggacagcgauauaagugcuagcucuuccugguccgacucuaccgccgcucgacauagccggcuugaaucaagugauggcgauggagcauggugccccgcugggagcguauuuccaaaggaagaagaguaucuacagguugaccugcagcgauuacaucuggucgcgcucguuggaacccagggccggcaugcggguggguuaggaaaagaguucucccgcucauacagacucagguacucuagagauggucggcgauggaugggauggaaagaccgguggggacaagaggugauuagugggaaugaggaccccgaaggaguugugcugaaggaccuuggaccccccaugguggcccgccuuguucgauuuuauccuagagcagacagagugaugagcgugugccugcgaguggaauuguacgguugucucuggcgggaugguuuguugagcuauacugcaccagugggccagacaauguauuuaucugaggcgguguaucugaacgacucuacuuacgauggacacacaguggguggccugcaguacggaggacucgggcaguuagccgacggagugguuggccucgaugacuuuaggaaaucccaggagcugcggguauggccaggcuaugacuaugucggauggagcaaccacagcuuuuccucaggauauguggaaauggaauucgaauuugacagacugcgcgcuuuccaggccaugcaagugcauugcaacaacaugcauacacugggagcaaggcugccaggcggggucgaaugccguuuccggagggguccagccauggcaugggaaggagaacccaugcgccauaaucugggaggcaaccuuggugacccaagggccagagcuguguccgugccacugggcggacggguggcucguuucuugcaguguagauuccuuuucgcuggacccuggcuccuguuuuccgaaauaucauucauuucugacgucgucaauaacuccucaccugcucucggaggcaccuuccccccggccccuugguggccucccggccccccgcccacuaacuucagcagccucgaacuggaaccucggggccagcagccaguugcuaaggcugaaggaucaccaaccgcaauacugauuggaugucuaguggcgauuauacugcuucuuuugcuuauuauugccuugaugcucuggcgauuacacuggcgacgccucuuaaguaaggccgaacgacgaguccuagaggaagaauuaaccgugcaccuaagcgucccgggcgacacuauccuaaucaauaaucgcccaggcccccgggagccccccccuuaccaagaaccuagaccucguggaaaccccccucauucagcaccaugcgugccuaacggcagcgcucugcuccucucaaacccagcauaccgccuuuuacuggccaccuacgcacgcccuccuaggggaccugggccaccgacuccugcuugggccaagccaacuaauacccaggcauacagcggggacuacauggaaccggaaaagccaggugccccacuuuuacccccuccaccucagaacagcguuccacacuaugccgaggcagacaucguaacucuucaaggcguuaccggaggaaauacauacgccguaccugcgcuucccccuggcgccgugggagauggcccuccccgagucgacuucccuaggagcagauuaagguuuaaagaaaagcugggggagggacaguuuggugaggugcacuugugcgaaguagauucuccccaggaccuggugucucuggauuuuccacugaaugugagaaaagggcacccacugcucguggcaguaaaaauccuacggccagaugccacaaagaacgcuagcuuuagccuguucucccgcaacgauuuccugaaagagguuaaaauuaugucucgacugaaagaccccaacaucauccgucucuuggguguuugcguccaggaugacccucucuguaugauuacagauuauauggaaaacggagacuugaaucaguuucuuuccgcacaucaacuggaggacaaggcugcagagggugccccuggggacggucaggccgcacaagguccaacgauaucuuauccuauguuacugcacguggccgcacagaucgcgucuggcaugcgcuaccuggcgacacugaauuuuguucaccgugaccuagccaccaggaacugucucguuggagagaauuuuacuaucaagaucgccgacuucgggaugucuagaaacuuguacgcuggggauuacuaucgcgugcaaggaagagccgugcuaccgauuagauggauggccugggagugcauacugaugggcaaauucaccaccgcaucugaugugugggcauuuggcguuacacuuugggagguccucaugcugugccgcgcacaacccuuuggccaacugacugacgagcaaguuauugaaaacgccggagaauuuuuucgagaucagggacggcaggucuaucucucaaggccacccgccugcccccaaggacuguacgaauugaugcugcgguguuggagucgggagucggagcaacggccccccuuuucccaacuccacagguuccuugccgaagaugcucucaauaccguuuag

SEQ ID NO: 305178 - RNA, 2760 nt, Artificial Sequence
  derived and/or modified sequence
augggacccgaagcucuuaguucucugcuacuccuguuguugguagcaucuggcgacgcugauaugaaaggacacuucgaucccgcaaagugcagguacgcucugggaaugcaggaucggacgauucccgacagcgauaucucugcaagcaguaguuggucagauuccacagccgccagacacucuagacuggaaagcucugacggcgauggagccuggugcccagcaggaagcgucuuuccgaaagaagaggaauaccuccagguggauuugcagcgccuucaucucguugcucugguggggacgcaagggagacaugcuggaggauuggggaaagaguucagucggagcuaucggcugcgauacaguagggacggccgacgcuggaugggauggaaggaucgcuggggccaggaagugauuagcggcaacgaggauccggaagggguuguacugaaagacuuaggcccuccaaugguugcaaggcuggugcgguucuaucccagggcugaucgcguuauguccgugugccugagaguagaacucuauggaugucuguggcgggaugggcuuuugagcuauacagcuccugucggacagacuauguauuuauccgaagcgguuuaccugaaugacagcacauaugacggacauaccguugggggccuucaguacggaggacugggacaguuggcagauggcguggugggucuggacgacuucaggaagucgcaggaauuacgagucuggccuggcuacgauuaugugggauggucaaaccacagcuuuucauccggguauguggaaauggaauucgaauuugaucgccugcgugcauuucaagcgaugcagguacacugcaauaacaugcauaccuugggcgcccgacugccugguggggucgaaugccgauuuaggaggggaccugcgauggccugggagggugagccaaugaggcauaacuuaggcggcaauuuaggcgauccaagagcuagggcaguuucuguuccucucggagguagaguggcucgcuuucugcagugcagguuucucuucgcuggaccauggcugcuauuuuccgaaauaaguuucauuagcgauguuguuaauaacucuucaccagcucucgguggcaccuuuccucccgcaccgugguggccaccaggaccuccgccuacaaacuuuuccagccuugaacuggagccgagaggucagcagcccgucgcuaaggcugaggguagcccaaccgcgauccugauugguuguuuggucgccauaauucuauugcugcugcucauaaucgcuuuaauguuguggagacuucacuggcgccgccugcuguccaaagccgaacgucgcgugcuggaagaggaacucaccgugcaucucuccgucccuggagauacaauucugauaaauaaccggccuggcccaagagagcccccuccauaucaggagcccagaccuaggggaaauccaccucauuccgcaccauguguucccaaugggucugcacuucuuuugagcaauccagcuuauagauugcuccucgcgacuuacgcacgcccgccacgaggaccuggcccaccgacaccagcgugggcuaaaccgacuaauacgcaggcuuauaguggcgacuacauggaaccagaaaagccuggcgccccucuguuaccuccaccuccucagaacucugucccgcauuaugccgaagccgauauuguuacccugcaaggugucaccggaggaaauacguaugcagucccugcccuuccccccggagcugugggcgacgggccuccccgaguugacuuuccaagaucgagacugcgguuuaaggaaaagcuaggcgaagggcaauuuggagaagugcaucuuugcgagguagauagcccccaagaccuuguuagccuugacuuuccccucaauguucgcaagggccacccccugcucgucgcuguuaaaauacuccgucccgaugcaaccaagaacgccagcuucagccuuuuuucucgaaaugacuuccucaaggaagugaagauaaugucccgcuugaaggacccgaacaucaucagacugcuuggagugugcgugcaggaugauccacuguguaugaucaccgauuacauggaaaacggagaucuaaaccaguuucuuagcgcccaccaacuugaagacaaggcugcugaaggagcaccgggugacggacaagcugcccagggcccaacaauaaguuacccuaugcugcugcauguugcugcccaaauagcuuccgguaugagguaccucgcaacacuuaacuuuguccacagggaucucgcuacucguaacugccucgugggagaaaacuuuaccauuaagauagccgacuuuggcauguccagaaaucucuaugcuggugauuauuaccguguccaaggaagagccgugcugccgauuagauggauggccugggaaugcauucucaugggaaaauuuaccaccgcuuccgacguuugggcauucggaguuacacuaugggagguucuuauguugugucgagcacagccuuucggacaacugacagaugaacaaguaauugaaaacgccggcgaauucuucagggaucagggcagacaggucuaucuauccagaccccccgcuugcccucaagggcuuuaugagcuaaugcugcgcugcuggaguagggaauccgaacagcgacccccauucucacagcuccaccgauuuuuagcagaagaugcacuuaacaccguguag

SEQ ID NO: 305179 - protein, 47 aa, Artificial Sequence
  derived and/or modified sequence
SEAVYLNDSTYDGHTVGGLQYGGLGQLADGVVGLDDFRKSQELRVWP

SEQ ID NO: 305180 - DNA, 1137 bp, Artificial Sequence
  derived and/or modified sequence
tgatactctggcgactatatggaacctgagaagccaggggcacccctgctgcccccaccgccacagaattcagttccacactatgccgaggccgatatcgtgacactgcaaggagttaccggcggtaacacttatgcggttcccgctttaccccctggagctgttggcgacgggccaccacgagtggacttcccccgaagcaggttgcgtttcaaggaaaaactgggcgagggacaatttggggaggtgcacctgtgtgaggtagatagccctcaggatctcgtgtctctggacttccccctcaacgtccgcaagggacacccattgcttgtagctgtcaagatcctgcgaccagatgcaaccaaaaatgcaagtttttccctcttctcccggaatgattttctgaaagaggtaaaaatcatgagccgcttgaaagatcccaatattattagactgttgggggtgtgcgtgcaggatgaccccctatgcatgatcacagactacatggagaacggagatttgaaccaattcctgagtgcacatcagctcgaggacaaggccgctgagggcgcacctggtgacggccaagccgctcagggaccaacaatttcctacccaatgctacttcacgtggcggcacaaatcgcctctggtatgaggtacctggccacgctgaacttcgtgcacagggatttggccactagaaattgtcttgtgggagaaaacttcactattaaaatagcagatttcggaatgtcccgtaatctatacgccggtgattactacagggtgcaagggagagctgtgttgcctatcagatggatggcatgggagtgcattttgatgggcaagtttactacagcatcagacgtgtgggccttcggcgtcacattgtgggaagtgctcatgctgtgcagggcccagccatttggccagctgaccgacgagcaagtgatcgaaaatgcaggcgagttctttagggaccaaggaaggcaagtttacctcagtagaccccctgcatgcccccaggggttgtatgaactgatgctgcgatgttggagccgggagagtgagcagcggcctcccttcagtcagctccatcgcttcctggccgaggatgccctgaacacagtatag

SEQ ID NO: 305181 - DNA, 1137 bp, Artificial Sequence
  derived and/or modified sequence
tagtactccggcgattatatggaacccgaaaaacccggtgctcccctgttgcccccacctcctcaaaatagcgtccctcactacgccgaggctgacatagtcaccctgcaaggcgtcacaggcggtaacacctacgccgttcccgctttgcctcctggcgcagtcggcgacggacctccccgagtcgattttccacggagtcgactccggttcaaggaaaaactgggagaagggcagtttggggaggtccatctgtgcgaggtggattctccgcaggacctcgtgagtttagatttcccattaaatgtgagaaagggacatcccctgctagttgctgtcaagatcctgcggcctgacgccacaaagaacgccagtttttctctcttttccagaaacgatttcttaaaagaggtcaaaataatgtctcggctgaaggatcctaacatcatccgactgctgggagtgtgcgtccaggatgatcccctttgtatgatcacagattacatggaaaacggggatctcaatcaattcctgagcgcccaccagctggaggataaagccgctgagggagcccctggcgacggccaggctgcccagggcccaaccatctcctatcctatgctcctgcatgtggctgcacagattgcctctggcatgcgctacttagccacattgaatttcgtgcatagggacctggcaacaaggaactgcctcgtgggagaaaactttacaataaaaattgccgattttggcatgagtcggaatttgtacgcaggagactattacagggttcaaggcagagcagttctgccgatccgctggatggcatgggagtgcatcctgatgggaaaattcactactgctagtgacgtttgggcctttggggtcactttgtgggaagtactgatgctctgtcgcgcacagcctttcggacagctcacagacgagcaggtgatcgagaatgcgggtgagtttttccgcgaccagggaagacaggtgtacctgtcccggcctcccgcttgtccccagggactgtatgagttgatgttaaggtgctggtctcgggaatctgaacagaggcccccatttagtcagctgcaccggttcctggctgaggacgcactgaacacagtgtag

SEQ ID NO: 305182 - DNA, 1137 bp, Artificial Sequence
  derived and/or modified sequence
tgatactccggcgattacatggaacctgagaagcccggagccccactgctgcctccgccacctcaaaacagtgtaccacactacgctgaggccgatatcgttaccctgcagggcgtcaccggagggaacacgtacgccgtgccggcactgcctcctggcgctgttggtgacggcccacctcgggtggacttccctcgcagcagattgcggttcaaagagaagctgggagaaggccaatttggggaagtgcatttgtgcgaggtggactcgccccaggatctggttagcctggacttcccactcaatgtgcgcaaagggcaccccttgcttgtggccgtgaagatactacgtcccgatgctacaaaaaatgcctcgttctctctgttcagccggaatgacttcttgaaagaagtaaagatcatgagcagactcaaggatcccaatattattcggctgctcggagtgtgcgtccaggacgaccctctgtgtatgatcacggattacatggaaaacggagacctcaaccagttcctgtcagcacatcagctggaggataaggctgcagaaggtgctccaggtgatggccaggcggcacagggaccgaccatctcataccctatgcttcttcatgttgctgcgcagatcgctagcggaatgagatacctagccacactgaactttgtgcatagggacttagccacacgtaattgtctggtcggcgagaactttacaattaaaatcgctgactttggcatgagcagaaatttgtatgccggtgattattaccgcgtccaggggagggccgtcctgcctattcgctggatggcttgggagtgtattcttatgggaaaatttactaccgcatccgacgtatgggcattcggggtgaccttgtgggaggtcctcatgctttgccgcgctcaaccattcgggcagttgacagatgagcaggtgatcgagaacgccggtgaattttttagggaccaaggtaggcaagtgtatctgagtcgtccgccagcatgcccccagggtttatacgagctgatgctacgttgctggagccgggagagcgaacagagacccccattttcacagttgcataggttcctcgcagaggatgcactgaataccgtgtag

SEQ ID NO: 305183 - DNA, 1137 bp, Artificial Sequence
  derived and/or modified sequence
tgatactccggggattacatggagcccgagaagcccggtgcccctctcctgcctccccctccacaaaactcagtgccccactatgcagaagctgatatcgttacactgcaaggcgtgacaggaggcaacacttacgccgtccccgcactgccccctggcgcagtaggtgacggaccaccgcgtgtggacttcccaaggagcaggctacgatttaaggaaaaactaggcgagggacagttcggggaggtccacctttgtgaggttgactcaccacaagatctggtctcccttgactttcctctgaatgtacgcaaaggtcatcccctgctggttgctgtgaagatcctaaggccagacgctaccaagaatgcctccttttcactttttagcaggaacgacttcctgaaggaagtcaaaatcatgtccagactgaaggaccccaatattatccgattactgggagtgtgtgttcaggatgatcccctgtgcatgatcactgactacatggaaaatggcgacctcaatcaatttctgagtgcacaccagctggaggacaaagcggcagagggagcccctggtgacggtcaggctgctcaggggccaacaattagctacccaatgttgctgcacgtcgcagcccagattgcatccgggatgcgctacctagccaccttgaacttcgtccaccgggatctagcaactcggaattgtctggtgggagaaaactttactatcaagattgcggatttcggcatgtctaggaatctctatgctggagactactaccgagtgcagggaagagccgtactgcccatccggtggatggcttgggagtgcatcctgatgggtaaatttacaaccgccagtgacgtctgggcattcggcgtgactttatgggaagtcctgatgctctgcagggctcagcctttcggtcagcttacagacgaacaggtaattgaaaacgctggagagtttttccgagatcagggaaggcaggtgtatctttctagaccccctgcctgtccacagggactgtatgagctgatgttgaggtgctggtcacgcgagagtgaacagaggcccccattttctcagctacatagatttcttgctgaggacgccctgaatactgtttag

SEQ ID NO: 305184 - DNA, 1137 bp, Artificial Sequence
  derived and/or modified sequence
taatacagcggcgactacatggaaccggaaaaacctggtgccccattgttaccgcccccaccacaaaattccgtcccgcactacgccgaggctgatattgttacattacaaggcgttacaggaggaaatacctacgctgtacctgcattgccaccaggtgccgtgggggatggacctccaagagtcgatttcccccggtctcgattacggttcaaggaaaagttgggcgagggtcagtttggcgaggtccacctttgcgaggttgactcaccccaggatctggttagtttagactttccactgaacgtccgcaagggccaccccttactggttgccgtgaagatactaagacccgatgccactaaaaacgcatcattttccctcttcagccgcaacgatttcctcaaggaggtcaagatcatgtcaagactgaaggaccccaacatcatccggcttctcggcgtgtgtgtccaggacgaccccttgtgcatgattaccgattacatggagaacggcgacttaaaccagttccttagcgctcaccagctcgaggataaagccgctgagggtgctcccggcgatggccaggctgcccagggtccaaccatctcctacccaatgctcctgcacgttgccgcccaaatagcatcagggatgagatatctagccaccctgaacttcgtgcaccgggacttagccacaaggaactgcctggttggcgaaaacttcaccatcaagattgcagattttggaatgtcaagaaacttgtacgccggtgactactacagagttcaaggcagagctgtactgcctatccgctggatggcttgggaatgtatcttaatgggtaagttcacaacagcgtccgacgtgtgggcattcggagtcacactgtgggaggtgctaatgttatgtagagcgcaaccttttggccagttaacagatgagcaggttattgaaaacgctggggaattttttcgagatcagggacgccaggtgtacctgtctcgccctcccgcctgtccacagggtctgtacgaactgatgttgagatgctggtcaagagaaagcgaacaacgccctcccttctcacagcttcacaggtttcttgctgaggacgccttgaatacggtttag

SEQ ID NO: 305185 - DNA, 1137 bp, Artificial Sequence
  derived and/or modified sequence
tgatactctggagattacatggaacctgaaaagcctggagcacccttgctcccccctccgccccaaaactctgtaccacattacgccgaggcggacatcgtcactctgcagggcgtaacaggtggcaatacctacgccgtgccagcccttccacccggcgctgtgggggacggacctcccagggttgatttcccacgctcacgtctgcgattcaaggagaagctaggcgaggggcagtttggagaagtacatctgtgtgaagtcgacagtccccaagacttggtatcccttgactttcccctgaatgtccgaaaaggccatcctcttctcgtcgccgtaaaaatcctgagacccgacgctaccaagaatgctagctttagcctgttctctcgcaatgatttcttgaaagaagtaaaaatcatgagcaggctaaaggaccctaatattatccgtctgctgggggtatgcgtccaggacgaccccctctgtatgattaccgactacatggagaacggggaccttaaccaatttctctccgctcaccagcttgaagataaagctgccgaaggggcaccaggcgatggccaggctgcccaaggcccgacaatttcttacccgatgctccttcacgtagctgcgcagatcgcctctgggatgaggtaccttgcaactttgaactttgtgcatcgcgatctggccacacggaactgtttagtgggcgagaactttactataaagatcgccgatttcggtatgtcgcgcaacctctacgctggagattattatagggtgcagggccgagccgtgctccccatcaggtggatggcttgggaatgcatcctcatgggcaaatttaccactgcaagcgatgtttgggcattcggcgttactctttgggaagtcctgatgttatgtcgcgcacagccctttggccagctcaccgatgagcaggtgatcgaaaatgcgggagaattctttagggaccagggaagacaagtgtatctgtcgagacctcccgcttgtccccagggcctctatgagctcatgttgagatgctggagtcgcgaatccgagcagcggcctcctttcagtcagcttcaccgatttctagcggaggacgccttgaacaccgtgtag

SEQ ID NO: 305186 - DNA, 1137 bp, Artificial Sequence
  derived and/or modified sequence
tgatactccggagattacatggagcctgagaaaccaggagctccactactaccacccccaccccagaattcagtgccccattacgcggaggcagacatagtgacgctccaaggcgtaactggcggaaatacatacgccgttcccgccttgccacctggcgccgtcggagatggaccaccccgagtggactttccacgcagtcgcctgaggttcaaagaaaagctgggcgagggccaattcggagaagtgcacttgtgtgaggtggactctccacaagatctagtctccttagatttcccgctgaacgttcggaagggccacccactattggtggccgtaaaaatattgcgtcccgatgctaccaagaatgcatctttttctttgttttctcgaaatgacttccttaaagaagttaaaatcatgtcgaggttaaaggacccaaatattatccgccttctgggagtttgcgttcaagatgatccactgtgcatgatcacagattacatggaaaacggagatttgaaccagttcctgagcgcccaccagctggaagataaggctgccgaaggggctccaggcgacggacaggcagctcaaggaccaaccatttcctatcctatgttactccacgtggctgcccaaatcgcatcaggaatgagatacctcgcaacactaaacttcgttcacagagatttagcaacacgtaattgtctggttggggagaacttcacaattaagatcgcggatttcggtatgtctcggaacttatacgctggggattattaccgcgtacaggggcgtgcagttctacctattagatggatggcctgggagtgtatcctgatgggcaaatttactactgcaagtgacgtctgggcgtttggcgtgacgctctgggaggtactgatgctctgcagagctcagccttttgggcaactaaccgacgagcaggtaatcgagaacgccggcgagtttttcagggatcaagggaggcaggtgtatctgagccgaccacctgcatgcccccagggtttatacgaactgatgcttagatgctggagtagggaatctgaacagcgcccacccttttcccaactgcatagattcctggcggaggacgctttgaatacggtatag

SEQ ID NO: 305187 - DNA, 1137 bp, Artificial Sequence
  derived and/or modified sequence
tgatattctggcgattatatggaacccgaaaaacccggcgctccactgttaccgccacccccccagaacagcgtgccacattatgccgaggccgacatagtcaccctgcagggtgtgactggcggtaatacttatgcagtgccagcgctgccacccggagccgtgggcgacggccctccccgagttgactttccccgcagcaggctaagatttaaagaaaaacttggcgaaggacagttcggcgaagtacatctatgcgaggttgatagtccacaggatctcgtgagtctcgactttcccttgaatgtgcgaaaggggcatcctctcctggtggccgtgaaaatcctcagaccggacgcaactaaaaatgccagcttctccctcttttcccgcaacgactttttgaaggaggtcaaaattatgtctcggctcaaagatcctaatataatacgattgctcggcgtctgtgttcaggatgatccactatgcatgatcacagactatatggagaatggcgacctaaaccagtttctcagtgcacaccagctcgaggacaaagctgcagaaggcgctccaggcgacggacaagccgcacaagggcccaccatcagttatcctatgctgctgcacgtcgctgcgcagatcgcctctgggatgcgctacttggccacgctcaacttcgttcacagggatcttgcaacacgaaattgccttgttggggaaaactttacaattaaaatcgccgactttggaatgagcagaaatctgtatgcaggcgattactatcgggtccaggggcgagccgtactacccatccgctggatggcctgggagtgtatcctgatgggtaaattcaccacagcaagcgacgtgtgggcgttcggcgtgacgctgtgggaagtgctgatgctgtgtcgcgcgcaacccttcggccaactgaccgacgaacaggtaatcgagaacgccggcgaattcttccgagatcaaggccgccaagtctatttgagcaggcctcctgcctgtcctcagggattgtatgagttgatgttgcgatgttggagcagagagtcagagcagaggccaccatttagccagcttcacaggttcctcgccgaggacgctctcaataccgtttag

SEQ ID NO: 305188 - DNA, 1137 bp, Artificial Sequence
  derived and/or modified sequence
taatattcaggcgattacatggaacccgagaagccaggcgctcccctgctcccacccccgccacaaaattctgttccacattacgctgaagcagacatagtgacacttcaaggtgtgaccggaggcaacacttacgcagtccctgctcttcccccaggcgccgtgggggacggaccacctagggttgacttccccagaagccgcttaagatttaaagagaagctgggggaaggacagtttggcgaggtccatctttgcgaggtggatagtcctcaggatctggtgtctttagacttccctctgaacgttagaaagggccacccacttcttgtggctgtgaagattctgagacctgacgctacgaaaaatgccagcttcagcttattctcaaggaacgactttctgaaggaagttaagataatgtctcgattaaaggatcctaatataatcagactcttgggtgtctgtgtgcaggacgaccctttgtgtatgatcactgactatatggagaacggagatttgaaccaattcctgtctgctcatcagctggaagataaggccgcggaaggagcacccggggacggacaagctgctcaggggcctacgatcagctatccaatgcttcttcacgttgccgcgcagattgccagcggaatgagatatctggccaccctaaatttcgtgcaccgagatttagcaacccgaaattgtctggtgggcgaaaattttacaatcaagattgctgactttggcatgtcccgaaatctgtatgccggtgattactatcgtgtgcaagggagggcagtcctgcccatacggtggatggcatgggaatgcatcttaatggggaagttcacaaccgcctctgacgtctgggcttttggagtaacgctttgggaagtgctaatgttatgtagagcgcaaccttttggccagttaacagatgagcaggttattgaaaacgctggggaattttttcgagatcagggacgccaggtgtacctgtctcgccctcccgcctgtccacagggtctgtacgaactgatgttgagatgctggtcaagagaaagcgaacaacgccctcccttctcacagcttcacaggtttcttgctgaggacgccttgaatacggtttag

SEQ ID NO: 305189 - DNA, 1137 bp, Artificial Sequence
  derived and/or modified sequence
tagtacagcggtgactacatggagcccgagaaaccgggagcgcctctgttgccacccccacctcagaattcagttccgcactacgccgaagccgacatcgtcacactccaaggcgtgactggcggaaacacctacgctgtccctgccttgccacccggggccgtgggcgatggacccccccgcgtggacttcccccgatccaggttgcgatttaaggaaaagcttggcgagggacaatttggagaagtgcacttgtgcgaagttgatagccctcaggatctagtgagtctcgactttccattgaacgtacgcaaaggacatccgctcttagtcgctgtgaagattctgcgcccggacgcaaccaaaaacgcatcttttagtcttttttctcgcaacgatttcctcaaggaagtgaagatcatgagccgacttaaggaccccaatataatccgcctcttaggagtgtgtgtccaagatgacccgctttgtatgatcacagactacatggaaaacggagacctgaatcagttcctgtccgcgcatcagctcgaggacaaagctgccgagggggctccaggggatggccaggcggctcaggggccgacgatctcgtatccaatgttacttcacgtggccgcccagatcgcaagcgggatgagataccttgctaccctgaattttgtacacagagacctggctacccgcaactgtttggttggcgagaatttcacgatcaagattgctgacttcggcatgtcaagaaacctatatgcaggcgactattatcgcgtacaaggcagagcagtgctgcctatacggtggatggcatgggaatgcatcctgatggggaaattcactactgcttcagatgtgtgggcttttggtgttaccctttgggaagtcctgatgttatgtagagcacagcccttcggacaactcaccgatgagcaagtaattgagaatgcaggggagttctttagagaccagggaagacaagtctacctctctaggccaccagcgtgcccccagggactgtacgagctgatgcttcgttgctggagtagagaatctgagcaaagaccacccttctcacaactgcaccgtttcctagcagaggatgccctcaacaccgtgtag

SEQ ID NO: 305190 - DNA, 1137 bp, Artificial Sequence
  derived and/or modified sequence
taatattctggggattacatggaaccggagaagccaggcgcacccctcctgcccccacccccacagaactctgtgccccactacgctgaagccgatatcgttacactacagggagtaacgggtggaaatacctatgccgtgccagccctgccccctggagctgttggcgatgggcccccgagagtggactttccaagaagtcgcctgcgctttaaggagaaactgggagagggacaatttggcgaggttcacctttgtgaggtagactccccacaggacttggtatcccttgatttccctcttaacgtacgaaagggtcacccactgctggttgctgttaaaatccttaggcctgatgctaccaaaaacgcttctttttctctcttctcacggaatgatttcctgaaagaggtgaaaataatgagccgtctgaaagatcccaatattataaggctgctaggggtgtgtgttcaggatgacccgctgtgtatgatcaccgattacatggagaatggcgaccttaatcagtttctcagcgctcaccagcttgaagacaaggcagcagagggcgctcctggagatgggcaggctgctcaaggaccaaccatttcctatcctatgttactccacgtggctgcccaaatcgcatcaggaatgagatacctcgcaacactaaacttcgttcacagagatttagcaacacgtaattgtctggttggggagaacttcacaattaagatcgcggatttcggtatgtctcggaacttatacgctggggattattaccgcgtacaggggcgtgcagttctacctattagatggatggcctgggagtgtatcctgatgggcaaatttactactgcaagtgacgtctgggcgtttggcgtgacgctctgggaggtcttaatgctgtgccgcgcacaaccattcggccaactcaccgatgagcaggtaatagagaatgcaggagaattctttagagatcagggtcggcaagtgtacctgtccaggcctcccgcgtgcccacaaggtttgtatgagcttatgttaagatgttggagtcgggagtccgaacagagacccccatttagccaactgcaccgattcttagccgaggacgccctcaatactgtgtag

SEQ ID NO: 305191 - DNA, 1137 bp, Artificial Sequence
  derived and/or modified sequence
tgatacagtggggattatatggaacccgagaaacccggcgcgccactacttccccccccaccacaaaattcggttccacactacgccgaagccgacatcgtgaccctacagggtgtgaccggagggaatacgtatgccgtgccagcactgcccccgggagctgtcggggatgggcctcctagagttgacttccctagaagcaggctccgttttaaagaaaaactcggcgaaggacagtttggcgaggtgcacttgtgcgaggtggactccccccaggacctagtgtcactcgatttcccattgaatgtgaggaaaggccacccattgctggtcgccgtgaagatactacgtccagacgcaactaaaaatgcttccttctcgcttttctcacggaacgatttcctaaaggaggtgaagatcatgagtagactaaaagatcctaacatcattcgcttactcggcgtgtgcgtgcaggacgatccactttgcatgattaccgactacatggagaacggagacttaaaccagtttctgtcagcccaccagctcgaagataaggctgcagagggggctccaggtgacggacaagcggcacaaggccctactatttcatatccaatgctgcttcacgtcgctgcacagattgctagtgggatgaggtatctggcaacactcaacttcgtgcatagagacctggcaactcgcaactgtctggtgggcgaaaactttaccattaagatcgcggacttcggtatgagcagaaatctttatgcgggcgactattatagggtccagggacgggccgtgcttccaatcagatggatggcctgggagtgtattctcatgggaaagtttacaaccgcttccgatgtatgggccttcggcgtgaccctctgggaagtgctgatgttgtgcagggcacagccttttggccaactgacagatgagcaagtgattgagaacgcaggcgaattctttcgcgatcaaggccgccaagtgtatctatcccggcccccagcctgtccacagggactctatgaattgatgctccgatgctggtcccgcgaatccgaacagcgccccccattcagccagctgcatcgatttctcgcagaagacgcgctgaacactgtgtag

SEQ ID NO: 305192 - DNA, 1137 bp, Artificial Sequence
  derived and/or modified sequence
tgatacagcggcgactacatggagcccgagaagcccggcgcccccctgctgcccccccccccccagaacagcgtgccccactacgccgaggccgacatcgtgaccctgcagggcgtgaccggcggcaacacctacgccgtgcccgccctgccccccggcgccgtgggcgacggcccccccagagtggacttccccagaagcagactgagattcaaggagaagctgggcgagggccagttcggcgaggtgcacctgtgcgaggtggacagcccccaggacctggtgagcctggacttccccctgaacgtgagaaagggccaccccctgctggtggccgtgaagatcctgagacccgacgccaccaagaacgccagcttcagcctgttcagcagaaacgacttcctgaaggaggtgaagatcatgagcagactgaaggaccccaacatcatcagactgctgggcgtgtgcgtgcaggacgaccccctgtgcatgatcaccgactacatggagaacggcgacctgaaccagttcctgagcgcccaccagctggaggacaaggccgccgagggcgcccccggcgacggccaggccgcccagggccccaccatcagctaccccatgctgctgcacgtggccgcccagatcgccagcggcatgagatacctggccaccctgaacttcgtgcacagagacctggccaccagaaactgcctggtgggcgagaacttcaccatcaagatcgccgacttcggcatgagcagaaacctgtacgccggcgactactacagagtgcagggcagagccgtgctgcccatcagatggatggcctgggagtgcatcctgatgggcaagttcaccaccgccagcgacgtgtgggccttcggcgtgaccctgtgggaggtgctgatgctgtgcagagcccagcccttcggccagctgaccgacgagcaggtgatcgagaacgccggcgagttcttcagagaccagggcagacaggtgtacctgagcagaccccccgcctgcccccagggcctgtacgagctgatgctgagatgctggagcagagagagcgagcagagaccccccttcagccagctgcacagattcctggccgaggacgccctgaacaccgtgtag

SEQ ID NO: 305193 - DNA, 1137 bp, Artificial Sequence
  derived and/or modified sequence
tgatattctggtgactacatggagcccgagaaacctggcgccccccttctccctcctcccccccagaacagcgtgcctcattacgccgaggcggatatagtgaccctgcagggggtgacaggcggcaatacctatgctgttcccgcactcccccccggcgcagttggagacggcccgcccagagtggactttcccagatcccgacttaggttcaaggaaaagctgggagagggacagttcggggaagttcacctgtgtgaagtagattcccctcaggacctggtgagcctcgacttccctctcaacgtgagaaaaggacaccctctcctggtggctgtgaaaattctcaggccagacgccaccaagaacgcatctttctcactgttctcccgcaatgatttcctaaaggaggtaaagataatgtcaagactcaaagaccccaacataattaggctcctgggcgtgtgcgttcaggacgaccctctgtgtatgataaccgattatatggagaacggtgacttgaatcagtttttgtccgcacatcagcttgaggataaagccgccgagggcgctcccggcgacgggcaagctgcccaaggccctactatttcgtatcctatgctgctacacgtggcagcgcagattgcttcgggcatgcgatatctagctactctgaattttgttcatcgagacctcgccactcgcaactgcctggtgggcgagaattttacaatcaaaattgctgattttggtatgtcaaggaacttatatgccggggattattacagagtgcagggaagggcagtgctgcctattcggtggatggcctgggagtgcattctgatgggcaagttcacaaccgccagcgacgtgtgggccttcggcgtgacactatgggaagtgctgatgctttgtagagctcagccttttggccagttaactgacgaacaggtgattgagaacgcaggtgaattctttcgagatcaagggaggcaagtctaccttagcaggccgcctgcttgcccacaaggtctgtatgagctgatgctgagatgttggtctcgggagtccgaacagaggccacctttttcccagctgcataggtttcttgccgaggacgctttgaacaccgtatag

SEQ ID NO: 305194 - DNA, 1137 bp, Artificial Sequence
  derived and/or modified sequence
taatatagtggggattacatggagccagagaagcccggcgcccctctgctgccacctccaccacagaactctgtgcctcattacgctgaggctgatatcgtgaccttgcagggcgtgaccggtggtaacacatacgccgtgcccgcattaccacccggcgcggtgggtgacggtcctcctagggtggactttcctagaagcagactaaggttcaaggagaaacttggagaggggcagttcggtgaagtgcacctgtgtgaggtggattcaccacaggacctggtgtcgctggacttccccctgaatgtgcgaaagggacatccactgctggtggccgtgaaaatccttcgccctgacgccactaaaaatgccagtttcagtctgttctccagaaatgactttttgaaggaggtcaaaattatgtcccgattgaaggatcccaacatcatcagattgctgggcgtgtgtgtacaggatgatcctctgtgcatgattacagattacatggagaacggcgacttaaatcagttcctgtccgcccaccagctggaggataaggccgccgagggagcccccggtgacggacaggctgcacaaggcccaaccattagctaccccatgctcctgcacgtggccgctcagatcgcttcaggaatgcgctatctggccaccctcaatttcgtgcaccgtgatctcgctacccgaaactgtctggtgggagaaaactttacaataaaaattgcagactttggcatgtcccggaacctatacgcgggggactactacagggtgcaagggcgggcggtgctgcctatccgttggatggcatgggaatgtatcttaatgggcaagtttactactgccagtgacgtttgggcatttggtgtgactctctgggaggtgttgatgttgtgtagggcccagccttttggacaactaacggatgaacaggtgatcgagaacgccggagaattttttagggatcagggtaggcaggtttacctctctaggcctcccgcttgtccccagggactttacgagttgatgttgcgttgttggtcacgggagagtgagcagcggccgcccttctcacaactgcaccgcttcctggctgaggatgctctcaacacagtttag

SEQ ID NO: 305195 - DNA, 1137 bp, Artificial Sequence
  derived and/or modified sequence
tagtatagtggcgactacatggaacctgagaaacctggcgcccctctcttgcctcctccccctcagaactccgtccctcattacgctgaggctgacattgtgaccctacaaggcgtgacgggcggaaatacatatgccgtgccagcccttccgcccggcgccgtgggagacgggcctcccagggtagacttcccccgatctcggctccgcttcaaagagaaactgggggagggacagttcggcgaagtgcacctgtgcgaagtggactcccctcaggacttggtctcactagatttccctctcaacgtcaggaaaggccatccactcctggtagcggtgaaaatccttcggcccgatgcaactaaaaatgcaagcttctcactgttcagccgaaacgactttttaaaggaggtgaaaatcatgagccgcctgaaagaccctaacataatcagactcctgggcgtatgcgttcaggacgaccccctgtgtatgatcaccgattatatggagaatggtgatctcaatcagtttctgtccgctcaccagctggaggataaggctgcggaaggggccccaggcgacggacaggcagcacaggggcctacaatctcgtatcctatgttgcttcacgtggctgctcagatcgcatctggaatgaggtacttggcaaccctgaattttgtgcaccgtgaccttgcgacacgtaactgtctcgtcggtgaaaattttactatcaagatagccgacttcggcatgtctagaaatctgtatgctggggactactaccgtgtgcaggggagagctgtgttgcctatcagatggatggcctgggaatgcatcctgatggggaagttcaccactgcgagcgatgtctgggctttcggagtgactctgtgggaggtgctcatgctttgccgggcacagccgttcggtcagttgaccgatgagcaggtgatcgaaaacgcaggggagttttttcgcgatcagggtcggcaggtgtatctgtcccgcccaccagcctgtccgcagggcctgtatgagctgatgctgagatgctggtctagggaatcagaacagcgccctccattcagtcagctgcatcggttcctggcagaagatgcgctgaacaccgtgtag

SEQ ID NO: 305196 - DNA, 1137 bp, Artificial Sequence
  derived and/or modified sequence
tgatacagtggcgattacatggaacccgagaagccgggggcacctctcctcccaccaccaccgcagaactctgttccacactatgctgaggccgatatagtaactctgcagggtgtgacaggcggcaatacatacgctgtcccagccctaccaccaggcgcagtgggtgacgggccacctcgcgtggactttcctagatccaggctgcgctttaaggagaaattgggagaaggtcagttcggggaagtgcacctttgtgaggtcgacagcccccaggacctcgtgagccttgattttccactcaatgttaggaaaggccatccgttgctggtcgctgtcaaaattctccgccccgacgcgaccaagaatgcttctttctcactatttagcaggaacgactttctgaaagaagtgaagatcatgagtagactgaaagatccaaacatcatccgtctcctcggcgtttgtgtccaggacgatcctctctgtatgattacagactatatggaaaacggagacctgaatcagtttctgtccgcccaccagctggaagataaggcagccgaaggggctcctggagatggacaggcagcacaggggccaacaattagctaccccatgctgctccacgtcgccgctcagattgcctccggcatgagatatctggcaactctaaactttgtccatagggaccttgccacccggaactgccttgtgggcgaaaactttactatcaagatagccgattttggtatgtccagaaacttgtacgcaggcgattactatagagtgcaggggagggctgtcctgcccattcgctggatggcctgggagtgcatcttgatgggcaagttcaccacagcctcagatgtgtgggctttcggcgtgactctctgggaggtgctaatgctgtgccgagcccaaccgtttgggcaactgaccgacgagcaagtaatagaaaacgccggagaattttttagggaccagggtcgtcaggtttacttgtcccggccccccgcctgccctcagggcctgtacgagctaatgctgcgctgctggtcccgcgagtccgagcagcgacctccatttagtcagttgcacaggttcctcgctgaggacgctttgaataccgtgtag

SEQ ID NO: 305197 - DNA, 1137 bp, Artificial Sequence
  derived and/or modified sequence
tgatattctggggactacatggagcctgagaagccaggggcccccctgctgcccccaccaccccagaacagcgtgccccactatgcagaggccgacatcgtgaccctgcagggcgtgactggaggcaacacctatgctgtgcctgccctgcccccaggagctgtgggagatggccccccccgggtggacttccccaggagccggctgcgcttcaaggagaagctgggggagggccagtttggagaggtgcacctgtgtgaggtggacagcccccaggacctggtgtccctggacttccccctgaatgtgaggaagggccaccccctgctggtggccgtgaagatcctgcggccagatgccaccaagaatgccagcttcagcctcttcagcagaaatgacttcctgaaggaggtgaagatcatgagccggctgaaggaccccaacatcatccggctgctgggcgtgtgtgtgcaggatgaccccctgtgcatgatcacagactacatggagaatggagacctgaaccagttcctgagcgcccaccagctggaggacaaggctgctgagggcgcccctggagatggccaggccgcccagggccccaccatctcctaccccatgctgctgcacgtggccgcccagatcgccagcggcatgagatacctggccaccctgaactttgtgcaccgggacctggccaccaggaactgcctggtgggggagaacttcaccatcaagattgctgactttggcatgagcaggaacctgtatgctggggactactacagagtgcagggccgggctgtgctgcccatccgctggatggcctgggagtgcatcctgatgggcaagttcaccacagccagtgatgtgtgggccttcggcgtgaccctgtgggaggtgctgatgctgtgccgggcccagcccttcggccagctgacagatgagcaggtgattgaaaatgctggggagttcttccgggaccagggccggcaggtgtacctgagccggcccccagcctgcccccagggcctgtatgagctgatgctgcgctgctggagccgggagagcgagcagaggcctcccttcagccagctgcaccgcttcctggccgaggatgccctgaacacagtgtag

SEQ ID NO: 305198 - DNA, 1137 bp, Artificial Sequence
  derived and/or modified sequence
tgatacagcggcgactacatggagcccgagaagcccggcgcccccctactgcccccccccccccagaacagcgtgcctcactatgcagaggctgacattgtgacgcttcaaggggtgacaggcggcaatacgtacgccgtaccagccctgcccccaggcgcagtgggggacgggcctcctagagttgactttccacgatctaggctgaggttcaaagagaaattgggagaggggcaattcggggaggtgcacctgtgtgaggtggattcacctcaggacttagtgtcacttgactttcctctgaacgtacgcaaaggacatcccttactcgtcgcggttaaaattctccgcccagacgccacgaagaatgcgtcattctccttattctctcggaatgacttcctcaaggaggtgaaaatcatgtctcgactgaaggaccccaacatcataaggttacttggcgtctgcgtgcaggatgaccctctgtgtatgatcacagattatatggaaaacggagacctgaaccagtttctctcggcacaccaactcgaggataaagctgcagagggtgctccgggggacggccaggccgctcaagggcctacaattagttacccaatgctgctgcacgtggccgctcagattgcatctgggatgcggtacctggctacgctcaattttgtccaccgcgaccttgcaacccgaaattgcctggtcggcgagaatttcacgattaagattgccgacttcggcatgagccggaatctgtacgctggagactactaccgggttcaggggcgtgcagtgctgcccatacgatggatggcgtgggagtgtattctgatgggaaagttcacgacagcaagcgacgtatgggcattcggtgtgaccttgtgggaagtgcttatgttgtgtagagcacaacccttcggccagttaactgacgagcaggttatagaaaacgctggcgagttcttccgggatcaggggaggcaggtgtacctgtctcgacctcccgcctgtccacaaggtctctacgaactgatgttgcgctgttggtctcgtgaaagcgagcagagaccaccatttagccaacttcatcggtttctcgctgaggacgctcttaatacggtgtag

SEQ ID NO: 305199 - DNA, 1137 bp, Artificial Sequence
  derived and/or modified sequence
tgatacagcggcgactacatggagcccgagaagcccggcgcccccctcttgcccccccccccccaaaattctgtgccacactatgccgaggccgatatagtaacactccagggtgtgaccgggggcaacacctatgcagtgccagcactgccccccggcgccgtgggggacggccccccccgggtggacttcccacgcagtcgcctccgcttcaaagagaaacttggcgagggtcagtttggtgaggtgcatctgtgtgaggtcgattcccctcaggacttagtctccctggatttccccctgaacgtcagaaaaggacatcccctcctcgtggccgtgaaaatattgaggcccgatgctacgaaaaatgcgtcattctcccttttcagtcgaaatgactttctgaaagaggtgaaaataatgagcaggctgaaagacccaaacatcataagactcctaggagtgtgtgtgcaggatgacccgctgtgtatgatcacggattatatggaaaatggagacctgaatcaatttctgtccgcacatcagcttgaagataaggccgcggaaggggccccaggggatggacaggccgcacagggccctaccatctcctatcccatgctgcttcacgttgccgcccagattgctagcggaatgaggtatctcgccaccttaaactttgtccatcgagatctggccacccggaattgtctcgtgggagagaacttcactatcaagatcgctgactttggcatgtctaggaacctctatgccggggactattacagggtccagggccgcgccgtgctccccattagatggatggcttgggaatgcatcttaatggggaaattcaccacagcttccgacgtttgggcctttggagtcaccctatgggaggttcttatgctctgtagggcacagccattcgggcagctgaccgacgagcaagtgattgaaaacgctggcgagttctttcgagaccaggggcgacaggtttacctgtcccggcctccagcttgtcctcaggggctctatgagctgatgctcagatgttggagcagggaaagcgaacaacgacctccattttcacagctccacaggttcctcgcagaagatgccctgaacactgtgtag

SEQ ID NO: 305200 - DNA, 1137 bp, Artificial Sequence
  derived and/or modified sequence
tgatacagcggcgactacatggagcccgagaagcccggcgcccccttattaccccctcctcctcagaattccgtaccccattatgcagaagcggacattgtaactctgcagggggtgaccggaggtaatacctatgctgtgccagcccttccccccggtgccgtgggagatggtcctcctagagtggacttcccacgctcgcgccttcggtttaaagagaagcttggcgagggtcagttcggggaggttcacctctgcgaggttgattccccacaggacttggtgagtctggattttcctctgaacgtaagaaaaggacaccctcttcttgtggccgtgaagatcctgagaccggacgctaccaagaacgcaagcttcagtctatttagtcgcaacgattttctgaaggaagttaagataatgtctcggctaaaagatcccaatataatcaggctgcttggcgtatgtgtacaggatgatccactttgtatgattaccgactatatggagaacggagatctcaaccagtttctatccgctcaccaactcgaggataaagctgctgaaggggccccgggagacggtcaagccgcccagggtccgactatcagctatccaatgttgcttcacgttgccgcacagatcgcaagcgggatgagatacctggccacccttaatttcgttcacagggatttagcgactagaaactgcttagtcggcgaaaacttcacaatcaaaattgcagacttcggcatgtctaggaacttgtacgctggcgattactatcgcgtacagggacgcgccgtgttgcccatcaggtggatggcgtgggaatgcattctaatgggcaagttcacaaccgcgagcgacgtatgggcgttcggagttaccctctgggaggtcctgatgctctgcagggcacagccctttggtcagctcactgacgagcaagtgatcgagaacgcgggcgaatttttcagggatcagggcagacaggtctatttgtcccgtccccccgcttgccctcagggtctgtatgaacttatgctgcgttgttggagcagggagagcgagcaaaggcctcccttttcacagcttcatcgatttctagccgaggacgcactgaatacagtttag

SEQ ID NO: 305201 - DNA, 1137 bp, Artificial Sequence
  derived and/or modified sequence
tgatacagcggcgactacatggagcccgagaagcccggcgcccccctgctcccaccccctccacagaatagcgtgccccattacgcagaggccgatatcgtgactctccagggggtgacaggcggtaatacgtatgccgtgccagcactgcctcctggagccgtgggcgacgggccaccacgagtggatttcccacgttctagacttcggttcaaggaaaagttaggcgagggacagttcggcgaagtgcacttgtgtgaggtagacagccctcaggatttggtctctctcgattttcctctgaatgtgcgaaaggggcaccctcttctggtggccgtcaagattctgcgtccagacgccactaaaaacgctagtttcagcttgttctcacgcaacgactttctaaaggaggtgaagatcatgtcccgccttaaagaccctaacatcattaggttgctcggtgtgtgcgtgcaggatgaccctttgtgtatgatcacagactatatggaaaacggagacctgaaccagtttctgtctgctcaccagctcgaagataaggccgctgagggtgcccccggagatgggcaagcagcccagggccctaccatctcctatcctatgctgctgcatgtggcagcccaaatcgcctccggcatgcgctacctcgcaacactgaactttgtacaccgtgatttagctacccggaattgtctcgtgggcgagaactttaccattaagatagccgactttgggatgagcaggaatctgtatgcaggcgactactaccgagtccagggaagagctgtactgccaatccgatggatggcctgggaatgcatcctaatgggaaaatttactacagcttcagatgtgtgggctttcggagtgacattatgggaagtgcttatgttgtgcagagcacagcctttcggacaactgaccgacgaacaggtaatcgagaacgccggggaatttttcagggaccagggacgccaggtataccttagtcggccccctgcatgtccgcaggggctttatgagctgatgctgcggtgttggagtcgcgaaagcgagcagaggcccccattctctcaacttcatcggttcttggccgaagacgctttaaatactgtgtag

SEQ ID NO: 305202 - RNA, 1137 nt, Artificial Sequence
  derived and/or modified sequence
uaauacagcggcgacuacauggaaccggaaaaaccuggugccccauuguuaccgcccccaccacaaaauuccgucccgcacuacgccgaggcugauauuguuacauuacaaggcguuacaggaggaaauaccuacgcuguaccugcauugccaccaggugccgugggggauggaccuccaagagucgauuucccccggucucgauuacgguucaaggaaaaguugggcgagggucaguuuggcgagguccaccuuugcgagguugacucaccccaggaucugguuaguuuagacuuuccacugaacguccgcaagggccaccccuuacugguugccgugaagauacuaagacccgaugccacuaaaaacgcaucauuuucccucuucagccgcaacgauuuccucaaggaggucaagaucaugucaagacugaaggaccccaacaucauccggcuucucggcguguguguccaggacgaccccuugugcaugauuaccgauuacauggagaacggcgacuuaaaccaguuccuuagcgcucaccagcucgaggauaaagccgcugagggugcucccggcgauggccaggcugcccaggguccaaccaucuccuacccaaugcuccugcacguugccgcccaaauagcaucagggaugagauaucuagccacccugaacuucgugcaccgggacuuagccacaaggaacugccugguuggcgaaaacuucaccaucaagauugcagauuuuggaaugucaagaaacuuguacgccggugacuacuacagaguucaaggcagagcuguacugccuauccgcuggauggcuugggaauguaucuuaauggguaaguucacaacagcguccgacgugugggcauucggagucacacugugggaggugcuaauguuauguagagcgcaaccuuuuggccaguuaacagaugagcagguuauugaaaacgcuggggaauuuuuucgagaucagggacgccagguguaccugucucgcccucccgccuguccacagggucuguacgaacugauguugagaugcuggucaagagaaagcgaacaacgcccucccuucucacagcuucacagguuucuugcugaggacgccuugaauacgguuuag

SEQ ID NO: 305203 - RNA, 1137 nt, Artificial Sequence
  derived and/or modified sequence
ugauacucuggagauuacauggaaccugaaaagccuggagcacccuugcuccccccuccgccccaaaacucuguaccacauuacgccgaggcggacaucgucacucugcagggcguaacagguggcaauaccuacgccgugccagcccuuccacccggcgcugugggggacggaccucccaggguugauuucccacgcucacgucugcgauucaaggagaagcuaggcgaggggcaguuuggagaaguacaucugugugaagucgacaguccccaagacuugguaucccuugacuuuccccugaauguccgaaaaggccauccucuucucgucgccguaaaaauccugagacccgacgcuaccaagaaugcuagcuuuagccuguucucucgcaaugauuucuugaaagaaguaaaaaucaugagcaggcuaaaggacccuaauauuauccgucugcuggggguaugcguccaggacgacccccucuguaugauuaccgacuacauggagaacggggaccuuaaccaauuucucuccgcucaccagcuugaagauaaagcugccgaaggggcaccaggcgauggccaggcugcccaaggcccgacaauuucuuacccgaugcuccuucacguagcugcgcagaucgccucugggaugagguaccuugcaacuuugaacuuugugcaucgcgaucuggccacacggaacuguuuagugggcgagaacuuuacuauaaagaucgccgauuucgguaugucgcgcaaccucuacgcuggagauuauuauagggugcagggccgagccgugcuccccaucagguggauggcuugggaaugcauccucaugggcaaauuuaccacugcaagcgauguuugggcauucggcguuacucuuugggaaguccugauguuaugucgcgcacagcccuuuggccagcucaccgaugagcaggugaucgaaaaugcgggagaauucuuuagggaccagggaagacaaguguaucugucgagaccucccgcuuguccccagggccucuaugagcucauguugagaugcuggagucgcgaauccgagcagcggccuccuuucagucagcuucaccgauuucuagcggaggacgccuugaacaccguguag

SEQ ID NO: 305204 - RNA, 1137 nt, Artificial Sequence
  derived and/or modified sequence
ugauacuccggagauuacauggagccugagaaaccaggagcuccacuacuaccacccccaccccagaauucagugccccauuacgcggaggcagacauagugacgcuccaaggcguaacuggcggaaauacauacgccguucccgccuugccaccuggcgccgucggagauggaccaccccgaguggacuuuccacgcagucgccugagguucaaagaaaagcugggcgagggccaauucggagaagugcacuugugugagguggacucuccacaagaucuagucuccuuagauuucccgcugaacguucggaagggccacccacuauugguggccguaaaaauauugcgucccgaugcuaccaagaaugcaucuuuuucuuuguuuucucgaaaugacuuccuuaaagaaguuaaaaucaugucgagguuaaaggacccaaauauuauccgccuucugggaguuugcguucaagaugauccacugugcaugaucacagauuacauggaaaacggagauuugaaccaguuccugagcgcccaccagcuggaagauaaggcugccgaaggggcuccaggcgacggacaggcagcucaaggaccaaccauuuccuauccuauguuacuccacguggcugcccaaaucgcaucaggaaugagauaccucgcaacacuaaacuucguucacagagauuuagcaacacguaauugucugguuggggagaacuucacaauuaagaucgcggauuucgguaugucucggaacuuauacgcuggggauuauuaccgcguacaggggcgugcaguucuaccuauuagauggauggccugggaguguauccugaugggcaaauuuacuacugcaagugacgucugggcguuuggcgugacgcucugggagguacugaugcucugcagagcucagccuuuugggcaacuaaccgacgagcagguaaucgagaacgccggcgaguuuuucagggaucaagggaggcagguguaucugagccgaccaccugcaugcccccaggguuuauacgaacugaugcuuagaugcuggaguagggaaucugaacagcgcccacccuuuucccaacugcauagauuccuggcggaggacgcuuugaauacgguauag

SEQ ID NO: 305205 - RNA, 1137 nt, Artificial Sequence
  derived and/or modified sequence
ugauauucuggcgauuauauggaacccgaaaaacccggcgcuccacuguuaccgccacccccccagaacagcgugccacauuaugccgaggccgacauagucacccugcagggugugacuggcgguaauacuuaugcagugccagcgcugccacccggagccgugggcgacggcccuccccgaguugacuuuccccgcagcaggcuaagauuuaaagaaaaacuuggcgaaggacaguucggcgaaguacaucuaugcgagguugauaguccacaggaucucgugagucucgacuuucccuugaaugugcgaaaggggcauccucuccugguggccgugaaaauccucagaccggacgcaacuaaaaaugccagcuucucccucuuuucccgcaacgacuuuuugaaggaggucaaaauuaugucucggcucaaagauccuaauauaauacgauugcucggcgucuguguucaggaugauccacuaugcaugaucacagacuauauggagaauggcgaccuaaaccaguuucucagugcacaccagcucgaggacaaagcugcagaaggcgcuccaggcgacggacaagccgcacaagggcccaccaucaguuauccuaugcugcugcacgucgcugcgcagaucgccucugggaugcgcuacuuggccacgcucaacuucguucacagggaucuugcaacacgaaauugccuuguuggggaaaacuuuacaauuaaaaucgccgacuuuggaaugagcagaaaucuguaugcaggcgauuacuaucggguccaggggcgagccguacuacccauccgcuggauggccugggaguguauccugauggguaaauucaccacagcaagcgacgugugggcguucggcgugacgcugugggaagugcugaugcugugucgcgcgcaacccuucggccaacugaccgacgaacagguaaucgagaacgccggcgaauucuuccgagaucaaggccgccaagucuauuugagcaggccuccugccuguccucagggauuguaugaguugauguugcgauguuggagcagagagucagagcagaggccaccauuuagccagcuucacagguuccucgccgaggacgcucucaauaccguuuag

SEQ ID NO: 305206 - RNA, 1137 nt, Artificial Sequence
  derived and/or modified sequence
uaauauucaggcgauuacauggaacccgagaagccaggcgcuccccugcucccacccccgccacaaaauucuguuccacauuacgcugaagcagacauagugacacuucaaggugugaccggaggcaacacuuacgcagucccugcucuucccccaggcgccgugggggacggaccaccuaggguugacuuccccagaagccgcuuaagauuuaaagagaagcugggggaaggacaguuuggcgagguccaucuuugcgagguggauaguccucaggaucuggugucuuuagacuucccucugaacguuagaaagggccacccacuucuuguggcugugaagauucugagaccugacgcuacgaaaaaugccagcuucagcuuauucucaaggaacgacuuucugaaggaaguuaagauaaugucucgauuaaaggauccuaauauaaucagacucuugggugucugugugcaggacgacccuuuguguaugaucacugacuauauggagaacggagauuugaaccaauuccugucugcucaucagcuggaagauaaggccgcggaaggagcacccggggacggacaagcugcucaggggccuacgaucagcuauccaaugcuucuucacguugccgcgcagauugccagcggaaugagauaucuggccacccuaaauuucgugcaccgagauuuagcaacccgaaauugucuggugggcgaaaauuuuacaaucaagauugcugacuuuggcaugucccgaaaucuguaugccggugauuacuaucgugugcaagggagggcaguccugcccauacgguggauggcaugggaaugcaucuuaauggggaaguucacaaccgccucugacgucugggcuuuuggaguaacgcuuugggaagugcuaauguuauguagagcgcaaccuuuuggccaguuaacagaugagcagguuauugaaaacgcuggggaauuuuuucgagaucagggacgccagguguaccugucucgcccucccgccuguccacagggucuguacgaacugauguugagaugcuggucaagagaaagcgaacaacgcccucccuucucacagcuucacagguuucuugcugaggacgccuugaauacgguuuag

SEQ ID NO: 305207 - RNA, 1137 nt, Artificial Sequence
  derived and/or modified sequence
uaguacagcggugacuacauggagcccgagaaaccgggagcgccucuguugccacccccaccucagaauucaguuccgcacuacgccgaagccgacaucgucacacuccaaggcgugacuggcggaaacaccuacgcugucccugccuugccacccggggccgugggcgauggacccccccgcguggacuucccccgauccagguugcgauuuaaggaaaagcuuggcgagggacaauuuggagaagugcacuugugcgaaguugauagcccucaggaucuagugagucucgacuuuccauugaacguacgcaaaggacauccgcucuuagucgcugugaagauucugcgcccggacgcaaccaaaaacgcaucuuuuagucuuuuuucucgcaacgauuuccucaaggaagugaagaucaugagccgacuuaaggaccccaauauaauccgccucuuaggaguguguguccaagaugacccgcuuuguaugaucacagacuacauggaaaacggagaccugaaucaguuccuguccgcgcaucagcucgaggacaaagcugccgagggggcuccaggggauggccaggcggcucaggggccgacgaucucguauccaauguuacuucacguggccgcccagaucgcaagcgggaugagauaccuugcuacccugaauuuuguacacagagaccuggcuacccgcaacuguuugguuggcgagaauuucacgaucaagauugcugacuucggcaugucaagaaaccuauaugcaggcgacuauuaucgcguacaaggcagagcagugcugccuauacgguggauggcaugggaaugcauccugauggggaaauucacuacugcuucagaugugugggcuuuugguguuacccuuugggaaguccugauguuauguagagcacagcccuucggacaacucaccgaugagcaaguaauugagaaugcaggggaguucuuuagagaccagggaagacaagucuaccucucuaggccaccagcgugcccccagggacuguacgagcugaugcuucguugcuggaguagagaaucugagcaaagaccacccuucucacaacugcaccguuuccuagcagaggaugcccucaacaccguguag

SEQ ID NO: 305208 - RNA, 1137 nt, Artificial Sequence
  derived and/or modified sequence
uaauauucuggggauuacauggaaccggagaagccaggcgcaccccuccugcccccacccccacagaacucugugccccacuacgcugaagccgauaucguuacacuacagggaguaacggguggaaauaccuaugccgugccagcccugcccccuggagcuguuggcgaugggcccccgagaguggacuuuccaagaagucgccugcgcuuuaaggagaaacugggagagggacaauuuggcgagguucaccuuugugagguagacuccccacaggacuugguaucccuugauuucccucuuaacguacgaaagggucacccacugcugguugcuguuaaaauccuuaggccugaugcuaccaaaaacgcuucuuuuucucucuucucacggaaugauuuccugaaagaggugaaaauaaugagccgucugaaagaucccaauauuauaaggcugcuagggguguguguucaggaugacccgcuguguaugaucaccgauuacauggagaauggcgaccuuaaucaguuucucagcgcucaccagcuugaagacaaggcagcagagggcgcuccuggagaugggcaggcugcucaaggaccaaccauuuccuauccuauguuacuccacguggcugcccaaaucgcaucaggaaugagauaccucgcaacacuaaacuucguucacagagauuuagcaacacguaauugucugguuggggagaacuucacaauuaagaucgcggauuucgguaugucucggaacuuauacgcuggggauuauuaccgcguacaggggcgugcaguucuaccuauuagauggauggccugggaguguauccugaugggcaaauuuacuacugcaagugacgucugggcguuuggcgugacgcucugggaggucuuaaugcugugccgcgcacaaccauucggccaacucaccgaugagcagguaauagagaaugcaggagaauucuuuagagaucagggucggcaaguguaccuguccaggccucccgcgugcccacaagguuuguaugagcuuauguuaagauguuggagucgggaguccgaacagagacccccauuuagccaacugcaccgauucuuagccgaggacgcccucaauacuguguag

SEQ ID NO: 305209 - RNA, 1137 nt, Artificial Sequence
  derived and/or modified sequence
ugauacaguggggauuauauggaacccgagaaacccggcgcgccacuacuuccccccccaccacaaaauucgguuccacacuacgccgaagccgacaucgugacccuacagggugugaccggagggaauacguaugccgugccagcacugcccccgggagcugucggggaugggccuccuagaguugacuucccuagaagcaggcuccguuuuaaagaaaaacucggcgaaggacaguuuggcgaggugcacuugugcgagguggacuccccccaggaccuagugucacucgauuucccauugaaugugaggaaaggccacccauugcuggucgccgugaagauacuacguccagacgcaacuaaaaaugcuuccuucucgcuuuucucacggaacgauuuccuaaaggaggugaagaucaugaguagacuaaaagauccuaacaucauucgcuuacucggcgugugcgugcaggacgauccacuuugcaugauuaccgacuacauggagaacggagacuuaaaccaguuucugucagcccaccagcucgaagauaaggcugcagagggggcuccaggugacggacaagcggcacaaggcccuacuauuucauauccaaugcugcuucacgucgcugcacagauugcuagugggaugagguaucuggcaacacucaacuucgugcauagagaccuggcaacucgcaacugucuggugggcgaaaacuuuaccauuaagaucgcggacuucgguaugagcagaaaucuuuaugcgggcgacuauuauaggguccagggacgggccgugcuuccaaucagauggauggccugggaguguauucucaugggaaaguuuacaaccgcuuccgauguaugggccuucggcgugacccucugggaagugcugauguugugcagggcacagccuuuuggccaacugacagaugagcaagugauugagaacgcaggcgaauucuuucgcgaucaaggccgccaaguguaucuaucccggcccccagccuguccacagggacucuaugaauugaugcuccgaugcuggucccgcgaauccgaacagcgccccccauucagccagcugcaucgauuucucgcagaagacgcgcugaacacuguguag

SEQ ID NO: 305210 - protein, 2149 aa, Artificial Sequence
  derived and/or modified sequence
MSDRSGPTAKGKDGKKYSSLNLFDTYKGKSLEIQKPAVAPRHGLQSLGKVAIARRMPPPANLPSLKAENKGNDPNVSLVPKDGTGWASKQEQSDPKSSDASTAQPPESQPLPASQTPASNQPKRPPAAPENTPLVPSGVKSWAQASVTHGAHGDGGRASSLLSRFSREEFPTLQAAGDQDKAAKERESAEQSSGPGPSLRPQNSTTWRDGGGRGPDELEGPDSKLHHGHDPRGGLQPSGPPQFPPYRGMMPPFMYPPYLPFPPPYGPQGPYRYPTPDGPSRFPRVAGPRGSGPPMRLVEPVGRPSILKEDNLKEFDQLDQENDDGWAGAHEEVDYTEKLKFSDEEDGRDSDEEGAEGHRDSQSASGEERPPEADGKKGNSPNSEPPTPKTAWAETSRPPETEPGPPAPKPPLPPPHRGPAGNWGPPGDYPDRGGPPCKPPAPEDEDEAWRQRRKQSSSEISLAVERARRRREEEERRMQEERRAACAEKLKRLDEKFGAPDKRLKAEPAAPPAAPSTPAPPPAVPKELPAPPAPPPASAPTPETEPEEPAQAPPAQSTPTPGVAAAPTLVSGGGSTSSTSSGSFEASPVEPQLPSKEGPEPPEEVPPPTTPPVPKVEPKGDGIGPTRQPPSQGLGYPKYQKSLPPRFQRQQQEQLLKQQQQHQWQQHQQGSAPPTPVPPSPPQPVTLGAVPAPQAPPPPPKALYPGALGRPPPMPPMNFDPRWMMIPPYVDPRLLQGRPPLDFYPPGVHPSGLVPRERSDSGGSSSEPFDRHAPAMLRERGTPPVDPKLAWVGDVFTATPAEPRPLTSPLRQAADEDDKGMRSETPPVPPPPPYLASYPGFPENGAPGPPISRFPLEEPGPRPLPWPPGSDEVAKIQTPPPKKEPPKEETAQLTGPEAGRKPARGVGSGGQGPPPPRRESRTETRWGPRPGSSRRGIPPEEPGAPPRRAGPIKKPPPPTKVEELPPKPLEQGDETPKPPKPDPLKITKGKLGGPKETPPNGNLSPAPRLRRDYSYERVGPTSCRGRGRGEYFARGRGFRGTYGGRGRGAAGNSAVTESFEEMMGVEVGQGDQTTLLLPEAALPARHGARVQSMRKSPSGAGSGAQKQAARPMRVIWLLQTRRLPHPRREHSPRSRSPTTRSPTFPAPARFTPGVGESSLPEGISPGPRRREPPQVCPGWSPPAKSLAPKKPPTGPLPPSKEPLKEKLIPGPLSPVARGGSNGGSNVGMEDGERPRRRRHGRAQQQDKPPRFRRLKQERENAARGSEGKPSLTLPASAPGPEEALTTVTVAPAPRRAAAKSPDLSNQNSDQANEEWETASESSDFTSERRGDKEAPPPVLLTPKAVGTPGGGGGGAVPGISAMSRGDLSQRAKDLSKRSFSSQRPGMERQNRRPGPGGKAGSSGSSSGGGGGGPGGRTGPGRGDKRSWPSPKNRSRPPEERPPGLPLPPPPPSSSAVFRLDQVIHSNPAGIQQALAQLSSRQGSVTAPGGHPRHKPGLPQAPQGPSPRPPTRYEPQRVNSGLSSDPHFEEPGPMVRGVGGTPRDSAGVSPFPPKRRERPPRKPELLQEESLPPPHSSGFLGSKPEGPGPQAESRDTGTEALTPHIWNRLHTATSRKSYRPSSMEPWMEPLSPFEDVAGTEMSQSDSGVDLSGDSQVSSGPCSQRSSPDGGLKGAAEGPPKRPGGSSPLNAVPCEGPPGSEPPRRPPPAPHDGDRKELPREQPLPPGPIGTERSQRTDRGTEPGPIRPSHRPGPPVQFGTSDKDSDLRLVVGDSLKAEKELTASVTEAIPVSRDWELLPSAAASAEPQSKNLDSGHCVPEPSSSGQRLYPEVFYGSAGPSSSQISGGHGLSITSKQWRRPGTPSLHPYRSQPLYLPPGPAPPSALLSGLALKGQFLDFSTMQATELGKLPAGGVLYPPPSFLYSPAFCPSPLPDTSLLQVRQDLPSPSDFYSTPLQPGGQSGFLPSGAPAQQMLLPMVDSQLPVVNFGSLPPAPPPAPPPLSLLPVGPALQPPSLAVRPPPAPATRVLPSPARPFPASLGRAELHPVELKPFQDYQKLSSNLGGPGSSRTPPTGRSFSGLNSRLKATPSTYSGVFRTQRVDLYQQASPPDALRWIPKPWERTGPPPREGPSRRAEEPGSRGDKEPGLPPPR

SEQ ID NO: 305211 - protein, 2149 aa, Artificial Sequence
  derived and/or modified sequence
MSDRSGPTAKGKDGKKYSSLNLFDTYKGKSLEIQKPAVAPRHGLQSLGKVAIARRMPPPANLPSLKAENKGNDPNVSLVPKDGTGWASKQEQSDPKSSDASTAQPPESQPLPASQTPASNQPKRPPAAPENTPLVPSGVKSWAQASVTHGAHGDGGRASSLLSRFSREEFPTLQAAGDQDKAAKERESAEQSSGPGPSLRPQNSTTWRDGGGRGPDELEGPDSKLHHGHDPRGGLQPSGPPQFPPYRGMMPPFMYPPYLPFPPPYGPQGPYRYPTPDGPSRFPRVAGPRGSGPPMRLVEPVGRPSILKEDNLKEFDQLDQENDDGWAGAHEEVDYTEKLKFSDEEDGRDSDEEGAEGHRDSQSASGEERPPEADGKKGNSPNSEPPTPKTAWAETSRPPETEPGPPAPKPPLPPPHRGPAGNWGPPGDYPDRGGPPCKPPAPEDEDEAWRQRRKQSSSEISLAVERARRRREEEERRMQEERRAACAEKLKRLDEKFGAPDKRLKAEPAAPPAAPSTPAPPPAVPKELPAPPAPPPASAPTPEKEPEEPAQAPPAQSTPTPGVAAAPTLVSGGGSTSSTSSGSFEASPVEPQLPSKEGPEPPEEVPPPTTPPVPKVEPKGDGIGPTRQPPSQGLGYPKYQKSLPPRFQRQQQEQLLKQQQQHQWQQHQQGSAPPTPVPPSPPQPVTLGAVPAPQAPPPPPKALYPGALGRPPPMPPMNFDPRWMMIPPYVDPRLLQGRPPLDFYPPGVHPSGLVPRERSDSGGSSSEPFDRHAPAMLRERGTPPVDPKLAWVGDVFTATPAEPRPLTSPLRQAADEDDKGMRSETPPVPPPPPYLASYPGFPENGAPGPPISRFPLEEPGPRPLPWPPGSDEVAKIQTPPPKKEPPKEETAQLTGPEAGRKPARGVGSGGQGPPPPRRESRTETRWGPRPGSSRRGIPPEEPGAPPRRAGPIKKPPPPTKVEELPPKPLEQGDETPKPPKPDPLKITKGKLGGPKETPPNGNLSPAPRLRRDYSYERVGPTSCRGRGRGEYFARGRGFRGTYGGRGRGAAGNSAVTESFEEMMGVEVGQGDQTTLLLPEAALPARHGARVQSMRKSPSGAGSGAQKQAARPMRVIWLLQTRRLPHPRREHSPRSRSPTTRSPTFPAPARFTPGVGESSLPEGISPGPRRREPPQVCPGWSPPAKSLAPKKPPTGPLPPSKEPLKEKLIPGPLSPVARGGSNGGSNVGMEDGERPRRRRHGRAQQQDKPPRFRRLKQERENAARGSEGKPSLTLPASAPGPEEALTTVTVAPAPRRAAAKSPDLSNQNSDQANEEWETASESSDFTSERRGDKEAPPPVLLTPKAVGTPGGGGGGAVPGISAMSRGDLSQRAKDLSKRSFSSQRPGMERQNRRPGPGGKAGSSGSSSGGGGGGPGGRTGPGRGDKRSWPSPKNRSRPPEERPPGLPLPPPPPSSSAVFRLDQVIHSNPAGIQQALAQLSSRQGSVTAPGGHPRHKPGPPQAPQGPSPRPPTRYEPQRVNSGLSSDPHFEEPGPMVRGVGGTPRDSAGVSPFPPKRRERPPRKPELLQEESLPPPHSSGFLGSKPEGPGPQAESRDTGTEALTPHIWNRLHTATSRKSYRPSSMEPWMEPLSPFEDVAGTEMSQSDSGVDLSGDSQVSSGPCSQRSSPDGGLKGAAEGPPKRPGGSSPLNAVPCEGPPGSEPPRRPPPAPHDGDRKELPREQPLPPGPIGTERSQRTDRGTEPGPIRPSHRPGPPVQFGTSDKDSDLRLVVGDSLKAEKELTASVTEAIPVSRDWELLPSAAASAEPQSKNLDSGHCVPEPSSSGQRLYPEVFYGSAGPSSSQISGGHGLSITSKQWRRPGTPSLHPYRSQPLYLPPGPAPPSALLSGVALKGQFLDFSTMQATELGKLPAGGVLYPPPSFLYSPAFCPSPLPDTSLLQVRQDLPSPSDFYSTPLQPGGQSGFLPSGAPAQQMLLPMVDSQLPVVNFGSLPPAPPPAPPPLSLLPVGPALQPPSLAVRPPPAPATRVLPSPARPFPASLGRAELHPVELKPFQDYQKLSSNLGGPGSSRTPPTGRSFSGLNSRLKATPSTYSGVFRTQRVDLYQQASPPDALRWIPKPWERTGPPPREGPSRRAEEPGSRGDKEPGLPPPR

SEQ ID NO: 305212 - DNA, 288 bp, Artificial Sequence
  derived and/or modified sequence
atggcgcacttcaaggacgacctccagacaaacgttgagatcataccaggagagagcgcccctaggaaggagtcccctagaccacccgcaccacctagcagtgctgccggtgtggggggatgctctaaccactcgccatccgtacaggaatccccactatcacctcccgcactcgcccagctgggctccgcccagcagcctagtatgcggactgagctttcattctcagaaaagaaggataccatgatcatctggcagattacgatcacagtgtggtgccagagatag

SEQ ID NO: 305213 - DNA, 1650 bp, Artificial Sequence
  derived and/or modified sequence
atgtctgatcggtcaggccctaccgcaaaagggaaggacggcaaaaaatacagctcgttaaaccttttcgacacatacaaaggaaaaagtctcgagattcagaagccagccgtggctccgagacacggccttcagtcactgggaaaggtagctatcgctcggaggatgcccccacccgcaaatctgccatcgttaaaggcagagaataaggggaacgacccgaacgtctcactagtgccaaaggacggcaccggttgggcctccaagcaagaacagtccgacccaaaatcatcagatgcatctaccgcccaaccccccgagtcccaacctctgcctgcctctcagacccccgccagtaaccagccaaagcgccccccagcagcccctgagaacactccactggtgccaagtggggtgaagagctgggcccaggcttctgtaacccacggtgcgcacggcgatgggggcagggcaagctctttactcagtagattctcacgggaagaattccctacgctccaagccgcaggagaccaggataaagccgccaaggagagggagagcgcagaacaatccagtggacctgggccaagcttacggccacagaactcaactacgtggcgcgatggcggcgggcgtggccccgatgagctagaaggtccagacagcaagctgcaccacggacatgatccgaggggcggtcttcaaccctcagggccgccacagtttcccccataccgaggcatgatgccaccttttatgtaccccccctacctgccatttcccccgccatatgggccccaggggccctatcgctaccctacccctgatgggccgagcaggtttccaagagtggcgggccctagagggtctggcccccctatgcggcttgtggaaccagttggacgcccatccatcctgaaggaggacaacctgaaggagttcgaccagcttgaccaggagaatgatgacggctgggcaggagctcatgaagaagtggattataccgagaaacttaagttctcagacgaggaggatgggagggattccgacgaggagggtgccgaaggccatagggattctcagtctgctagcggcgaagagagacctcctgaagccgacgggaagaagggtaacagtcctaacagtgaacctccaaccccaaagactgcatgggccgagacatctcgcccgccagaaaccgagcctggaccaccggctcccaaacctccccttccaccaccccatagggggcccgctggcaactgggggccgcccggagactaccctgacaggggggggccgccttgtaaacccccggcccccgaagatgaagacgaagcatggagacagcggcgaaagcagtcctcttctgagatttccttggccgtagaacgcgctagacgaagacgtgaagaagaagaacggcgcatgcaggaggagagacgggccgcttgtgctgaaaagttgaagagactggatgaaaaatttggcgctcctgacaagagactgaaggccgaacccgctgcacctcctgccgctcccagtacacccgcgccacccccggccgcctctgaggtgcctctcatggaggactccaggggacagcagcgcgatccaccccgaggcttagaggcccctcatccctag

SEQ ID NO: 305214 - DNA, 1650 bp, Artificial Sequence
  derived and/or modified sequence
atgagcgataggagcggaccaactgctaagggcaaagacgggaagaagtactcatccctcaacctgtttgacacttataaaggaaagtcactggagattcagaagcctgcagtagcgccccggcacggactgcaatccctgggaaaagttgcaatcgccaggcgcatgccaccacctgccaacctgccatccctgaaggcagagaacaaggggaacgacccaaacgtctccctggtgccaaaggatggcactggctgggctagcaaacaagagcagtcagaccctaagagctcagacgcttctactgcacagccacccgaatcgcaacccctgccagcctcacaaacacctgcttcaaaccagcctaaaagaccccccgcagcaccagagaacaccccactggttccatccggagtgaagtcatgggcacaggcatctgtcacccacggagcccatggcgacggcgggcgtgcgtccagtctgctgagtcgattttccagagaagagtttcctacacttcaggctgccggcgatcaagataaggccgcaaaggagcgcgagtcggcagagcaatcgagtggtcctggtcctagtctaaggccacagaacagcacgacttggagggatggaggcggtagaggccccgatgaactcgagggacctgattccaagctccaccacggccacgaccctaggggtggattacaaccatctggccctccccagtttccaccatacaggggcatgatgccgccattcatgtaccccccctatctcccgttccctcctccttacggcccccagggaccatataggtatcccacacccgatggccccagcagattccctcgtgtcgcgggccctcggggctcgggacctccaatgaggttggtggagcccgtcgggagaccctctatcctgaaggaggacaacctgaaagagttcgatcagcttgaccaggaaaacgacgacggctgggccggcgcacatgaagaagtggactacaccgagaaacttaagtttagcgacgaggaggacgggcgagactctgatgaagaaggggccgaggggcacagggacagccagtctgcctctggcgaagaaagaccaccagaggcagatggaaaaaaggggaatagccctaattcagagcctcctaccccaaagaccgcttgggctgagactagtaggccccctgagacggagccaggaccgcctgcccccaaaccaccactgccaccacctcatagaggacctgccgggaattggggtccccctggtgattatcctgaccgcggaggaccaccatgtaagccaccggcaccagaggacgaggatgaagcctggcgccagcgaagaaagcagtctagtagcgaaatctctttggccgttgaacgcgctaggcgcagacgggaggaagaggagagacggatgcaggaagaacggcgggccgcctgtgcagagaagcttaagaggctagacgagaaatttggcgcacccgataaaaggctgaaagccgagcccgccgctcccccagccgctcccagtacacctgcccctccacccgcagctagcgaggtgcctttgatggaggacagtagaggtcaacagagggaccctccacgtggtttggaggcgccacacccctag

SEQ ID NO: 305215 - DNA, 1650 bp, Artificial Sequence
  derived and/or modified sequence
atgtccgacagatcgggtccaacggcgaagggaaaagatggcaaaaagtacagttcactgaacctgttcgatacctataaagggaagagccttgaaatccaaaagcccgccgtagcaccccgtcacggccttcagagccttgggaaggtcgccattgctcgccgcatgccccctcccgccaatctgcctagcctcaaagctgaaaacaagggaaatgacccgaatgtgtcacttgtgccaaaggatggtaccggctgggctagcaaacaggagcagtcagacccaaaaagctccgatgcttccacagcccagccgcccgagagccagcccctgccggcttcacagacacctgcttcaaaccaaccaaagcggccgcctgcggctccagaaaatacccctctggtgccgagtggagtcaaatcttgggcacaggcatccgtgacccacggcgcgcacggagatggcggtagagcgtcatccctgctgagcaggttttctcgtgaagaattcccaacactgcaggcggccggggaccaggataaggcagccaaggagagagaatcggcggagcagtcctcagggcccggaccttccctccgccctcagaacagcaccacttggagagacggtggggggaggggtccagacgagctcgaaggcccagactctaagcttcaccacgggcatgatccacgcgggggcttgcagccctcaggaccaccgcagttcccaccctacagaggtatgatgccccccttcatgtacccaccatatctgcctttccctcctccatatgggcctcaggggccatatcgctatcctaccccggatggcccctctcgcttcccccgagtggccggccccagagggtctgggccacccatgagactggtggagccagtaggtcgccctagcattctgaaagaagacaatctgaaggagttcgaccagctagatcaagagaatgatgatgggtgggctggcgctcacgaagaagttgactacactgaaaagttgaaatttagcgatgaggaagacggacgggactcagatgaagaaggtgccgaaggccaccgcgattctcagagcgcctccggcgaagaacggcctccagaggctgacggaaaaaaaggcaactcccctaactctgagcccccaacccccaagactgcttgggctgagactagcagaccgcccgagaccgagccgggcccacctgcccccaaacctccgctcccacctccccaccgcgggccagccggcaactggggccccccaggagactatcccgatagggggggtccaccatgcaaaccccccgcccccgaggatgaagatgaggcctggagacaaagacggaagcagtcaagctcagaaatcagtctcgcagtggaacgggcccgacggagaagagaggaggaggagaggagaatgcaagaagagcggcgggcagcctgtgctgaaaagctgaaacggctggacgagaagtttggtgctcccgacaagaggctgaaagcggaacccgccgccccacctgccgccccaagtactccggctccgccccctgccgcatccgaggtgccgttgatggaggattcacgcggccaacagcgtgaccctcctcgcggactggaggccccacatccatag

SEQ ID NO: 305216 - DNA, 1650 bp, Artificial Sequence
  derived and/or modified sequence
atgtctgacaggtccggtccaactgctaaagggaaagacgggaaaaaatacagtagcctcaacctgttcgacacatataagggtaaatcacttgaaattcagaagcccgctgtagcccccaggcatggactgcagtccttaggaaaagtggcaattgcaagacgcatgcccccccccgccaatctgccgagtctcaaggctgaaaacaaaggaaatgacccaaacgtctctttggtcccgaaggacggaacaggatgggctagcaaacaggagcagtccgatcctaagagtagtgatgcaagtaccgctcagccccccgaatcacaacccctgcctgcttcgcagacacccgcatctaaccagccaaaacggccacccgccgcaccagaaaatacaccactggtgccctcaggggtgaaatcgtgggcccaggcaagcgtgacacacggggcacacggggatggagggcgcgcatcgagcttgctttcaaggtttagcagagaggagttccctacactccaggcagcgggcgaccaagacaaggcggcgaaagaacgcgaaagtgccgagcagtcctctgggccaggaccctcactgcgtccacagaactcaacaacctggcgcgatggcggcggccggggccctgatgagcttgaaggccccgactctaagttacatcacggacacgatcccaggggcggacttcaaccctcagggcccccccagtttccaccatatcgaggcatgatgcccccgttcatgtatcccccctacttaccatttcccccaccgtacggccctcaggggccttatcggtatccaacccctgacgggccttccaggttcccccgcgtagccggtcctcgtgggagcggaccacccatgagactagttgagccagtcggtcgaccgtcaatcctgaaggaagacaatttaaaggagtttgaccagttggatcaggagaacgatgacggctgggcaggtgctcacgaagaagttgattatactgagaagttgaagttcagtgatgaggaggacggccgcgattctgatgaggagggagcagaaggacaccgggactctcaatctgcgtctggcgaagaacggccaccagaagcggacggaaagaaaggtaatagccctaactccgagccgcccactccaaaaactgcgtgggcagaaacctctagacccccagagactgaaccaggccccccagctcctaagccaccactcccccctccccatcgcggaccagctggaaactggggtccccccggggattatccagaccgtggtgggcccccgtgcaaaccacctgcccctgaggacgaagatgaagcttggcggcagcggcgtaagcagagtagttctgaaattagtttggccgttgagagggcgaggcggagaagagaggaggaggagagacgtatgcaggaagagcggcgtgccgcatgcgccgagaaactgaaaagactggatgagaagtttggcgccccggataagcgactgaaggctgaacccgcagctcccccagcagccccttctaccccggctcctcctccggcagcgtcggaggtaccactgatggaggattcccgagggcagcagcgtgatccccccagaggccttgaggctccccacccttag

SEQ ID NO: 305217 - DNA, 1650 bp, Artificial Sequence
  derived and/or modified sequence
atgagcgatagaagcggtccaactgctaaggggaaggacggcaaaaaatattcatccttgaaccttttcgatacctacaaaggaaagagccttgagatacagaaaccagcagtcgcgcctaggcatggattgcagtcactaggtaaggttgccatcgctcgtaggatgccaccacctgccaacttaccgtctctgaaggcggagaataaaggaaatgatcctaatgtgtcgctggttcctaaagacgggaccgggtgggcttctaagcaggagcagtcagacccaaaatccagtgacgcttctaccgctcagcctcccgaatcgcagcctctgcctgcgtcacagactcccgcttcaaatcaacctaaacgaccacccgcggcaccggaaaacaccccattagtcccttccggggtgaagagctgggctcaagctagtgtgacccacggagctcatggcgatgggggccgcgcatccagcttgttgtcaaggttcagccgcgaggagttccctactttgcaagccgccggagatcaagacaaagcagctaaagaacgtgagagcgctgaacaaagctcagggcccggtccctctttgcgcccccagaattccacaacatggagagacggcgggggaaggggccccgacgagctcgaaggtccagacagtaaattgcaccatggtcatgacccaaggggtgggctgcagccctcaggcccacctcagttcccaccctacagaggtatgatgccccctttcatgtacccgccttatctgcccttccctcctccttatgggccacagggcccctaccggtatccaacccctgacggccctagtaggttccctcgggtcgcggggcccaggggctctggacctccaatgcgcttagtggagcctgtcggtaggccttcaattttaaaggaggataatctgaaagaattcgaccaactcgaccaagagaatgacgacggatgggcgggggcacatgaagaagtagattatacagagaaactgaagttttcagatgaagaggatggccgcgactccgatgaagagggtgctgaaggacatcgggatagccagtccgcaagtggggaggaaaggccccccgaggctgatggtaagaaaggaaactccccgaatagcgagcccccaactcccaaaaccgcctgggctgagacaagtcgcccgccagaaactgaaccgggccccccagcacctaaaccacccctgcccccgccacacaggggacctgccggaaattgggggcctcctggtgactacccagatagaggaggacccccttgtaaaccaccggctccggaagacgaggatgaagcatggcgacagcggaggaaacagtcttctagtgagatttcactggctgtggagagggctcgacgacgcagagaggaggaggagagacgcatgcaagaagaacgtagggcagcttgtgccgaaaaactgaagaggctcgacgagaagtttggagcccccgacaaaagactcaaggctgagccggcagctccacccgcagcaccgtctacgcctgcgccgccacctgccgcaagtgaagtacctctgatggaggattctcgcgggcagcagagagatccacctagaggcttggaggctccacacccttag

SEQ ID NO: 305218 - DNA, 1650 bp, Artificial Sequence
  derived and/or modified sequence
atgtctgacagaagtggccccacagccaagggcaaggatggcaagaagtacagcagcctgaacctgtttgacacctacaagggcaagagcctggagatccagaagccagctgtggcccccaggcatggcctgcagagcctgggcaaggtggccatcgcccggaggatgcctcctccagccaacctgcccagcctgaaggccgagaacaagggaaatgaccccaacgtgtccctggtgcccaaggatggcaccggctgggccagcaagcaggagcagagcgaccccaagagcagtgatgccagcacagcccagcccccagagagccagcccctgcctgccagccagaccccagccagcaaccagcccaagaggcctcctgctgcccctgagaacacccccctggtgcccagcggcgtgaagtcctgggcccaggcctctgtgacccatggagcccatggagatggcggccgggccagcagcctgctgagccgcttcagccgggaggagttccccaccctgcaggccgccggggaccaggacaaggccgccaaggagcgggagagcgctgagcagagcagcggccctggccccagcctgcggccccagaacagcaccacctggagagatggcggcggccggggcccagatgagctggagggccctgacagcaagctgcaccacggccatgacccccggggcggcctgcagcccagcggccccccccagttccccccctaccggggcatgatgccacccttcatgtacccaccctacctgcccttccccccaccctacggcccccagggcccctaccgctaccccaccccagatggccccagccgcttcccccgggtggccggcccccggggcagcggcccccccatgaggctggtggagcctgtgggccggcccagcatcctgaaggaggacaacctgaaggagtttgaccagctggaccaggagaatgatgatggctgggccggggcccacgaggaggtggactacacagagaagctgaagttcagtgatgaagaagatggccgggacagtgatgaggagggcgctgagggccaccgggacagccagagcgccagcggggaggagcggcccccagaggctgatggcaagaagggcaacagccccaacagcgagccccccacccccaagacagcctgggccgagaccagccggcccccagagacagagcccggccccccagcccccaagccacccctgcccccaccccaccggggccctgctggcaactggggccccccaggggactacccagacagaggaggccccccctgcaagcccccagccccagaagatgaagatgaggcctggaggcagaggaggaagcagagcagcagcgagatcagcctggccgtggagcgggccaggagaagaagagaggaggaggagaggaggatgcaggaggagcggcgggccgcctgtgccgagaagctgaagaggctggatgagaagtttggagccccagacaagaggctgaaggccgagcctgctgcccctcctgctgcccccagcaccccagcccctcctcctgctgccagcgaggtgcccctgatggaggacagccggggccagcagagggaccccccccggggcctggaggccccccacccctag

SEQ ID NO: 305219 - DNA, 1650 bp, Artificial Sequence
  derived and/or modified sequence
atgagcgaccggagcggccccaccgccaagggcaaggacggcaagaagtacagttctcttaacctgttcgacacttacaaggggaagtctctcgagatacagaagcccgcggtcgcacctcgccatggcctgcaatccctgggtaaagtcgcgatcgctaggcgaatgccacctccggctaacctccctagtctcaaggctgaaaataagggaaacgatcccaatgtttcactggttcctaaggatggcacgggttgggcctccaagcaggaacagtccgatcccaagtctagcgatgcatccacagcgcagcctcccgagtcgcagcccctacccgctagccagacacctgctagcaatcaaccaaaacggcctccggctgcaccagagaatacaccactggtgcccagtggagtgaagtcatgggcccaggccagtgtcactcacggagctcatggcgatggaggtcgcgctagtagtctgttatctagatttagtagggaggagttccctactctgcaggctgcgggtgaccaagataaagccgccaaagagagagagtccgcagagcagtccagtggccccggtcctagtcttaggccacaaaatagcaccacctggcgcgacggcggaggacgcggtcctgatgagctcgaagggcccgacagcaagctacatcacggccatgacccccgcggtggtctccagccctctggacctcctcagtttccgccttatcgtggtatgatgccccctttcatgtaccctccctacctgcccttccctccaccatatggcccccagggaccatacagatatcctacgcccgacgggccttccagattcccacgggtggcgggccccaggggctccggccccccgatgaggctggtagaacctgtgggtcgaccaagcatactgaaggaggacaatctgaaagaatttgatcagctcgatcaagagaacgacgatggctgggcaggagcccatgaggaggtagactacaccgagaagctgaaattttccgatgaagaagatgggcgcgattcagatgaagaaggcgccgaaggacaccgggattcccagtccgctagcggagaggaacgtccccccgaagctgacggcaagaaaggtaattcccctaattccgaaccccccacacccaagacggcctgggccgagaccagcagacccccggaaaccgagcctggaccaccagctcccaagccccctctgccgcccccacatcgcggacctgccggtaactggggaccacccggggattatccagatagggggggtcccccatgcaagccccctgcacccgaggatgaggacgaagcctggaggcaaagacggaaacagtctagtagcgagatctctctggccgtagagcgggccagacgcaggcgagaagaagaggagcgacggatgcaggaggagcggcgcgctgcctgcgcagagaaactcaaacggctggacgagaaattcggtgctcctgacaaacggcttaaggcggagcctgccgctcctccagcagccccaagcactcccgccccgccgcctgctgcctccgaggtgcctttaatggaggacagtcggggtcaacaacgtgatccacctcggggcctggaagcaccgcacccgtag

SEQ ID NO: 305220 - DNA, 1650 bp, Artificial Sequence
  derived and/or modified sequence
atgagcgaccggagcggccccaccgccaagggcaaggacggcaagaagtatagcagcctaaacctgtttgacacctacaaggggaaatccctggaaatccagaaaccagctgtagcccccagacacgggctgcagtcactgggtaaggtggcaatcgccaggcggatgccccctcccgctaacctgccttctctgaaagctgaaaataagggcaatgatcctaatgttagtttagtccctaaggatggcaccggatgggcttcaaagcaagagcagagcgatcccaagagcagtgacgctagcaccgcacaacccccagaatcccagcccctccccgccagccaaacgcctgcttctaatcagccaaaaaggccccccgccgctccggagaatacgccattagtcccttctggagtcaaatcatgggcccaggcaagcgtcacgcatggggcccacggggacgggggacgggcgagctcattattatctaggtttagtcgtgaggaattccctacactacaagcagctggagaccaagataaggccgcgaaggagagggagagcgccgaacagtcttccggacctggcccctccctgcgcccccagaactccaccacctggagagatgggggcgggcgggggccagacgagctcgagggccccgattctaagctacaccacgggcatgatccgaggggaggactgcagccttccgggccaccgcagttcccaccctacagggggatgatgcccccctttatgtatccaccttacctcccttttccccctccctacggcccacaaggtccatacaggtaccccacccctgacggaccctcccgatttccccgcgtcgcaggaccacggggctcgggcccacccatgaggctggtggagccggtgggccgcccaagcatattaaaagaagacaatctgaaggagtttgatcagcttgaccaggagaacgacgatgggtgggcgggagctcatgaagaggtggactataccgagaagctcaaattcagcgacgaagaggacggtagagacagcgatgaggaaggagcggagggtcaccgcgacagtcagagcgctagtggcgaagagagacctcccgaggccgacggcaagaaaggcaattctcctaattccgagccgccaaccccaaagaccgcctgggcggaaacctccaggcctcctgaaaccgagccagggcctccagcccctaagccaccgttgccacccccgcaccgcggccccgccggcaattggggtccgcccggtgactaccccgaccggggtgggccaccgtgtaaaccacccgcccccgaagatgaagatgaggcctggaggcaaaggcgtaagcaaagtagttccgagatttctcttgcagtcgaaagggccagacggcggcgggaggaggaggagagacggatgcaggaggagcgccgcgcagcgtgtgcagaaaagctgaagagactcgacgagaagtttggggcccctgacaaacgtttgaaggcagaacctgccgctcctccagccgcaccatctacgcccgcccccccacccgcggcctcagaggttccactgatggaagactccaggggccagcagagagaccctccaagagggttggaggctcctcacccatag

SEQ ID NO: 305221 - DNA, 1650 bp, Artificial Sequence
  derived and/or modified sequence
atgagcgaccggagcggccccaccgccaagggcaaggacggcaagaagtacagttccctgaacctgtttgacacttacaaagggaaatctctcgagatccaaaagccagcggttgctcctcggcacggtctgcaatccctgggtaaggtggccatcgcacgacggatgcctccacccgccaacctgcccagtctcaaggccgaaaataaaggtaacgacccaaacgtgagtctggtgcctaaagacggtacggggtgggcatcgaagcaggaacaatcagacccaaagtccagcgacgcaagtacagctcagcctcctgaaagccagcccctgccagcatcacagacacccgcctccaaccagcccaaacggccacctgccgctccagagaatacacccctggttccttctggagtgaagtcgtgggcacaggccagcgtcacacacggggcccacggtgacggcgggagggcatcctcattattgtctagatttagcagggaggaatttcctacacttcaggctgctggagaccaggataaggccgccaaagagcgtgagtctgctgagcagtcatctggaccaggaccatctctgcggccccaaaacagcacaacctggcgagatggaggaggaagggggcccgacgaactggaggggcccgattcgaaacttcatcacggacatgaccccaggggaggactacagccaagcggcccccctcaatttccaccataccgaggcatgatgccaccctttatgtaccccccatatctgccctttcctccgccctacggacctcaaggcccatacaggtaccccactcctgacggacccagcaggtttccccgggtggcaggtccacggggcagtggacctccgatgcgtctggtggaaccagtaggcaggccaagtatcttaaaagaagataatctgaaagaattcgatcagttagaccaagagaatgacgatggctgggcgggtgcacatgaggaggtagattacacagagaagctgaagttctctgacgaggaggacggccgagattccgacgaagaaggcgccgagggccaccgagacagccagagtgcttctggcgaagagcgcccaccagaggctgatggaaagaaaggtaatagtccgaattccgagccccccactccaaaaacagcctgggcggagacctccagaccacctgaaacagaaccagggccaccagcacccaaacctccactcccccccccccacagaggccccgccggcaactgggggccccctggagactatcccgacaggggcggcccaccctgtaagccacccgctccggaggatgaagatgaagcttggagacagcgccggaaacagtcatccagcgaaattagcttggcagtcgaacgggctcggcgccggagggaggaagaagagcgccgcatgcaggaagagaggcgggccgcctgtgcagagaagctgaaacgcttggatgagaaatttggagcccctgataaaaggttgaaagcggagccggcggcaccgcctgcagctccatccacacctgctccaccgcctgctgccagcgaagtccctctcatggaagacagccgggggcagcagcgtgaccccccccggggtttggaggctccacatccgtag

SEQ ID NO: 305222 - DNA, 1650 bp, Artificial Sequence
  derived and/or modified sequence
atgagcgaccggagcggccccaccgccaagggcaaggacggcaagaaatacagttcactgaatctgttcgatacctacaaaggcaagtctcttgagatccaaaagcctgctgtggctcctaggcacggcctgcaatccctgggcaaagtggcaatcgccaggagaatgccccctccagccaacctcccttccctgaaagctgaaaacaagggcaacgatcctaacgtttccctggttcctaaagacggaacagggtgggctagcaagcaggaacagtctgatccaaaaagttcagacgcctccactgcccagcccccggaatctcagcctttgcccgcaagccagacgcccgcatccaatcaacctaagcgccctcctgcagcacctgaaaatacaccactggtcccgagcggtgttaagtcatgggcgcaggcctcggtgacacatggtgcccatggagatggcggaagagctagctctctgctatcccggttctcacgcgaagaatttccaaccctgcaggcggcaggagatcaagacaaggccgcaaaggagcgtgaatccgccgaacaaagcagtggaccaggcccttcactccgaccacagaactcaacaacatggcgcgacggaggtgggcgcggtcctgacgaactggagggtcctgatagtaaactccaccacggccatgacccaagaggcggcctgcagccatcggggccgccacagttcccaccatacagggggatgatgccaccattcatgtatccaccttatcttcctttcccaccaccctatggaccacagggaccctatcggtatccgaccccagatggacctagcagatttcctcgcgtcgctggtccacggggttccggcccacccatgcggctggttgagcctgttggacggcctagcatcttgaaagaggataatctcaaagagttcgatcagttggatcaggaaaacgacgacggctgggccggggctcacgaggaggtcgattacacagaaaaactgaaattcagcgacgaggaagatggaagggacagtgacgaggaaggcgctgaagggcatcgggactcccagtctgcatcgggagaggagcgaccccccgaggccgacggaaaaaaggggaacagcccaaactccgaaccaccaactcccaaaaccgcttgggcagagacgagtagacctccggaaacagaaccagggccccctgccccgaagcctccacttccacccccacatcggggtccagctggcaactggggtcccccgggcgactatcccgaccgaggcggtcccccttgtaaaccgcctgcacccgaagatgaagacgaggcgtggcgccagaggcggaaacagtccagttcagaaatcagcctcgccgtagagagagcaagacgccggcgcgaagaagaggagcggcggatgcaggaagagcgtcgtgctgcatgcgctgagaaactgaaacgactggacgagaagtttggcgccccggataagcgtctaaaagctgaacctgctgctcccccggcagccccttcaactcccgcccctcctcccgccgcctcggaagtgcctctcatggaggactcccggggccagcagcgtgacccgcctagaggacttgaggcgccccacccatag

SEQ ID NO: 305223 - DNA, 1650 bp, Artificial Sequence
  derived and/or modified sequence
atgagcgaccggagcggccccaccgccaagggcaaggacggcaagaaatatagttccctgaatctcttcgatacttataagggtaaatccttggaaattcagaagcccgccgtggctccgcgacacgggctgcagtccttgggcaaagtggccatagcccgtagaatgccgccgccggcaaatctgccgtctctcaaggcagagaacaagggaaacgaccccaatgtatccctggtgccaaaggatggaacgggttgggccagtaaacaggaacagtcagatccaaaatcttcggacgcctccacagcgcaaccacctgagagtcagcctttgccggcctctcagacacccgcgtcgaaccaaccaaaacgcccacccgctgctccagaaaatacaccattggtgccttctggtgtaaaaagttgggcgcaggcctcagtcactcatggcgcccacggggacggaggacgtgctagtagcttattgtccaggttttcccgtgaggagtttcccactctgcaggctgccggagaccaggacaaagctgccaaggagagggagtctgccgagcaatctagtggaccaggcccatccctccgcccccagaattccaccacttggcgtgatgggggcggccgggggccagatgaactggagggccccgatagtaaactgcatcatggacacgacccaaggggtggtctgcagccctcgggacccccacagtttccgccataccgcggcatgatgccgccgttcatgtatccaccataccttcccttcccacctccatatggtccacagggcccttacagatatccgacacctgacggcccaagtaggtttccacgggtagccggcccgaggggttccggcccccccatgcgtcttgttgagcctgttggccggccgagcatactcaaggaagacaacctgaaggagttcgaccagttggatcaggagaacgacgacggttgggccggtgctcacgaagaggttgactatactgagaagctgaagttcagtgacgaggaggacggcagagacagcgatgaggagggggccgagggccaccgcgattctcagtccgctagtggggaagagcggccgcccgaagctgatggcaaaaaaggtaatagtcccaacagtgagccacccacgcctaaaaccgcatgggccgaaacgagtcgacctcctgagactgagcccggtcctcccgcaccgaaaccaccattgcctcccccacataggggtccagccggcaattgggggcctccaggtgactaccctgacagaggcggccccccctgcaagcctcctgcccccgaggacgaggatgaggcctggcgacagcgacggaaacaatcatcatctgagatttccctggccgtggagcgcgctcggcggaggcgcgaagaggaagagaggcgtatgcaggaagagagaagggccgcctgcgcagagaagctcaaaagattggatgagaagttcggggcgcctgacaaacggctaaaggctgagcccgcagctccccctgcagcccctagtacccccgcacccccccctgccgcctcagaagttcctttgatggaagattcccggggtcaacaaagggatcccccacggggattagaggctccccatccttag

SEQ ID NO: 305224 - DNA, 1650 bp, Artificial Sequence
  derived and/or modified sequence
atgagcgatcggtctgggcctactgcgaaaggaaaagatggaaagaagtactcatcattgaatctcttcgatacatataaaggaaagtcattagagatccagaagcctgcggtggcacctagacatggcctccagtcactgggaaaggtggccatagccagacgaatgccaccaccggctaatctcccctcattaaaagcagagaataaaggaaacgacccaaatgtgtcactggttcctaaagacgggactgggtgggcaagtaagcaagaacagagtgatccgaagtcaagcgacgcctccaccgcccaacctccggagtctcaaccactcccagctagtcagactccagcctcgaatcagcccaagcgacctccggctgcacccgagaatacaccactcgttccttctggagttaagagttgggctcaagctagcgttacacatggggctcacggtgacggtggcagggcctcttctctcctgtcccgcttttctcgagaagaattccccaccctgcaggccgcaggggaccaggacaaagcggctaaggaacgagaaagtgctgaacagtcttccgggccagggcctagtttaagaccgcaaaatagcacaacttggagggacggtgggggacggggacctgacgaactggaaggtccagattctaaactgcatcatgggcatgacccgagaggtggtctccaaccctctggccctccacaattcccaccatataggggcatgatgccacctttcatgtacccaccatacttgcccttccccccaccatacggccctcaagggccataccgctacccgaccccagatggaccctccagattccctcgggtggcaggcccaaggggaagcgggcctcccatgcgtctggtagaaccggtcgggcgtccgtccatccttaaagaggataaccttaaagagttcgatcagctggaccaggaaaatgatgacggctgggccggagctcacgaagaagttgattataccgagaaactgaaatttagtgacgaggaggatgggagggactccgatgaagaaggcgcagagggacaccgcgacagccagtccgccagcggggaggagcgccctcctgaagccgatggtaagaagggcaactctcccaatagtgaaccccctacacccaagactgcttgggctgagaccagcagaccacccgagaccgaacctggaccacccgctcccaaaccccctctccccccaccccacaggggacccgctggcaactggggcccaccaggcgattacccggatagaggtggaccgccatgtaaacccccagcgccagaagatgaggacgaagcctggagacagaggcggaaacagagcagttctgagatttctctcgccgtagaacgggctcgaagacggagggaggaagaggaacgccgtatgcaggaagagcgacgggctgcttgcgcagaaaagcttaaacgcttggacgagaaattcggggctcctgataagcggctaaaggcggagcccgctgctccaccggcagcccctagtacccccgctccccctcccgctgctagcgaggtacctctgatggaagatagtagggggcagcagagggaccctccaagagggttggaggcccctcatccgtag

SEQ ID NO: 305225 - DNA, 1650 bp, Artificial Sequence
  derived and/or modified sequence
atgagtgacagatccgggccaaccgctaaggggaaggacgggaagaagtatagctccttaaatttatttgacacatacaagggaaaatccctggaaattcaaaaaccggcagttgcgccaagacacgggttgcaatcattgggcaaggtggcgatcgccagaaggatgccgcctccagcaaatctgccctcactgaaagccgaaaacaagggcaatgatcccaacgtgtctctggtgcccaaggacggtacaggctgggcttctaagcaggagcaaagcgatcctaagtcctcagacgcatccacggctcagcctcccgaatcacaacccctgcctgccagccagactccagcttctaatcagcctaaacgaccgcctgccgcacccgagaatactcccctggtcccttcgggggtgaaatcctgggcccaagctagcgtgacgcacggtgcccatggagacggcggacgggcttcttctctgttgagccggttcagccgcgaggaattccctacactgcaggctgccggagaccaggataaggctgccaaggagagggagtctgcagaacagagcagcggaccgggaccgagcttgcggcctcaaaattctacaacctggagggatgggggaggacgcggtccggatgaactagaaggcccagacagcaagcttcatcacgggcatgatcctagggggggacttcagccgtccgggcctccccagtttcctccttaccgcggaatgatgccccctttcatgtatcccccttacctgccatttccgcctccatacggccctcaggggccatatcggtaccccacacccgacgggccttcccgcttccctcgagttgccggacctcgaggcagcggccctcccatgcgtctggtggagcctgttggtcggcctagcatcctcaaggaggacaacctgaaggagttcgatcagctggaccaagaaaacgacgacgggtgggcaggcgcacacgaagaagtggactacaccgagaagctaaagttcagtgacgaagaggatgggagggattccgatgaggaaggggcagaaggacaccgtgatagccaaagtgcctctggggaagaaaggccacctgaggcggatggtaagaaaggcaattcccctaattcagaaccccctacacccaaaactgcttgggctgagacctcaagacccccagaaaccgaacctggccctccagcgccaaaaccacccctgcccccacctcaccgcggaccggcaggtaactgggggccacccggagattatccagaccggggagggcctccctgcaaacctcctgctccggaggatgaggacgaggcatggcggcagcggcgtaagcaatcttcctcagagatctctctggcagtggagagggcacggaggagacgtgaggaggaggagcgacgtatgcaagaagaaagacgcgctgcatgcgctgaaaaactcaaaagactggatgagaaatttggtgctccagacaagcgtcttaaggcagaacccgcagctcccccagctgctccctctacccccgcacctcctcctgccgctagcgaagtgccccttatggaggatagtcgtggacagcaacgggaccctccacgcggtcttgaggcccctcacccctag

SEQ ID NO: 305226 - DNA, 1650 bp, Artificial Sequence
  derived and/or modified sequence
atgtcagataggtcaggccctacagcaaaaggaaaagacggcaaaaagtactctagcctaaatctgtttgacacctacaagggaaaaagtcttgaaattcagaaaccggcagttgcccctcgccatggactgcaaagtcttggaaaagttgcgattgctcgcagaatgccaccccctgccaatctgccttctctcaaagcagagaacaagggaaacgacccaaatgtcagcttagtccctaaagacggcactggctgggcttcaaagcaggagcaatctgacccaaaatctagcgacgcctctactgcccaacctccagagagccaacctctgcctgcgagtcagacccccgcatccaaccaacctaagcggccacccgctgcccctgaaaacacccctcttgtgcccagtggcgtcaagtcttgggcccaagcctcagttacccacggggctcacggagatggaggccgtgcttcctccctgctgtctcgtttcagccgcgaagagttccctactctgcaagccgctggcgatcaagacaaggcagccaaggaaagagagagcgctgaacaatcctctggaccaggcccttctcttcgcccacagaattctactacctggcgagatggcggaggcagaggcccagatgagctcgaagggccagactcaaagcttcaccacggccatgaccctcggggtggtcttcaaccctccggaccaccacagtttcctccctataggggaatgatgcccccatttatgtaccctccttatttacctttcccacccccttacggaccccaaggcccttacagatacccgaccccagatgggcctagtcgctttccccgagtagcaggacctcgaggatctggcccacccatgagacttgtcgaacccgtgggcagaccttcaattctcaaagaggataacctgaaggagttcgaccagctggaccaagaaaacgacgacggttgggcgggtgcgcatgaagaggtggattataccgagaagctgaagttttccgatgaagaagacggccgagactcagacgaggagggcgcagaaggacacagggactcccagtcagcttcaggggaggagcgcccacctgaggccgatggaaagaaggggaattcacctaatagtgagcccccaactcctaagaccgcctgggctgaaacatcccggccaccagaaactgagccagggcctccagcacccaagccacccctccctccccctcatcggggacccgcagggaattggggaccccctggagattaccctgatcgaggtggaccgccatgcaagccccctgctccagaggacgaggacgaggcctggaggcagcgaagaaaacagtcttcttccgagatttcactggccgttgagcgcgctcgccgacgtagggaggaggaagagagacgcatgcaggaagagaggagagctgcatgcgctgaaaaactgaaaagacttgacgaaaagtttggagcccctgacaaacgattaaaagcagagcccgcagctcccccagccgcacctagcacaccagctcccccacccgctgcctccgaagttccgctgatggaagatagtagaggccagcaacgtgaccccccaagggggctggaagcacctcacccctag

SEQ ID NO: 305227 - DNA, 1650 bp, Artificial Sequence
  derived and/or modified sequence
atgtcagacagaagcgggcctactgcaaagggaaaggacggtaagaaatattcctcactcaatctattcgacacatacaagggcaaaagcctggagattcagaagcccgcagtcgccccaagacatggcctgcagagcttggggaaagtcgccattgctcgacggatgccaccccctgccaaccttccctccctgaaagctgagaataaggggaatgacccaaacgtgtcccttgtgcctaaggacgggaccggatgggcctccaagcaagaacagtccgatcctaaatcatcagacgcctccacggcgcagcctcctgagtctcagcccctccccgctagccagactcctgcgtccaatcaacccaagaggccccctgccgctccagaaaacactcctctggtaccctctggggtcaagtcctgggcccaggcctccgttacccacggtgcgcacggagatggtggtcgcgcttcatccttgctgtcaaggttcagcagagaagaattccctacactccaggctgccggtgatcaggacaaagcagccaaggaaagagagtctgcagagcagagctcaggccctggcccaagcctccgtccccagaacagcaccacctggcgggacggagggggtaggggcccagatgaactggagggtccagattccaagctacatcacggacatgatccgaggggagggctacagcccagtggccctccacagtttccgccatataggggtatgatgcctccattcatgtaccccccttatcttcccttcccgccaccttatggtccacagggaccttataggtaccctacacccgatggacccagcagatttccaagggtggccggaccaaggggtagcggtccccctatgaggcttgtggaacccgttgggagaccctcaatcctgaaggaggacaatctaaaagaattcgaccaactggaccaggaaaacgacgatggatgggcaggcgctcacgaggaagttgactacactgagaagcttaagttttccgacgaggaggatgggagagactccgatgaggagggtgcggaggggcaccgcgacagtcagtctgcctccggcgaggagcgccctcctgaagccgacggcaagaaaggtaatagcccgaactccgaacctccgactcctaagacggcttgggccgagacttctcggcctccagaaaccgaaccagggccaccggctccgaaaccacccctcccgcctccccatcggggacctgcaggtaactgggggccaccaggggactaccctgaccgagggggtcctccgtgtaagcctcctgctcctgaagacgaggatgaagcctggcggcagcgacgaaagcagtcttcctctgaaatctctcttgctgtggagcgggcacggagacgtagggaggaagaagaaaggcgcatgcaggaggaaaggcgggctgcctgtgcagaaaagttaaaaaggctggacgagaagtttggcgctcctgacaaacgactcaaggcagagcccgcagcaccacctgctgcaccatccactccagccccaccaccagccgctagcgaggtgccattgatggaagactcccggggacaacaacgagatcctccgcgagggctcgaagcgccacacccatag

SEQ ID NO: 305228 - DNA, 1650 bp, Artificial Sequence
  derived and/or modified sequence
atgtccgaccgctccggccctacagcaaaaggcaaggacggaaagaagtattctagcctgaacctgtttgatacatacaaggggaaatccctggagatccagaagccagctgtagctccacgtcacgggctgcagtcactcggtaaagtcgcaatagcgcgacgaatgcccccacctgctaacctgcctagtctcaaggctgagaacaagggcaacgatcccaatgtgtccctggtccccaaggacgggaccggctgggcaagtaagcaagaacagtcggacccaaagtccagtgatgccagcacagctcagcctcccgagtcccagcctctccctgcaagtcaaaccccagcctcaaaccagcccaagaggcctccagccgcaccagaaaataccccattggtgccatctggcgtcaaatcatgggctcaggcctcggtgacccacggcgcacatggtgatggtggcagagcatctagcctcctctctcgattctccagagaagagttccctaccctccaggcggctggcgatcaggacaaagccgctaaagagcgggaatcagctgagcagtcaagcggacctggcccatccttgcggccacagaacagtactacttggcgtgacggaggcggacgcggaccagacgagctggaaggacctgactccaagttacaccatggccatgatcctcgcggaggcctccagccctcagggcctccacagtttccaccctacagagggatgatgcctccatttatgtatcctccttacctgccattcccccctccatacggccctcagggtccctaccgctatcccaccccagatggtccatcacgctttcctcgcgttgcgggaccgaggggaagcggccctcccatgcgacttgttgagccagtgggtaggccttccatcttaaaggaggacaacctgaaggagttcgatcagttagaccaagagaacgacgacggatgggccggagcccatgaggaggtagactataccgagaagctgaagttttccgatgaggaagacggaagggacagcgatgaagagggtgctgaggggcaccgcgactctcagtccgcaagtggagaggagcggcctcctgaagctgacggtaaaaagggcaatagtccaaactcagagcctccaactcccaagactgcatgggctgagacctctaggcctcccgaaactgagccgggtcccccagctcccaaacccccactgcccccaccacaccggggaccagcagggaattgggggcctccaggcgattacccagaccgcggaggccctccttgtaagcccccagcccctgaggacgaagacgaagcctggcgacaacggaggaaacagagttcctctgaaatatctcttgctgtggagcgagcacgaaggaggagggaggaagaggaaaggcggatgcaagaggaaagaagggctgcttgcgcagaaaagttgaaaagactggatgaaaagttcggcgctcctgataaaagactaaaagccgaaccagccgctccccctgccgcacccagcacccctgctcctccccctgctgccagcgaggtgcccctgatggaggacagcaggggtcagcagagagaccctcccagaggactggaggccccacacccctag

SEQ ID NO: 305229 - DNA, 1972 bp, Artificial Sequence
  derived and/or modified sequence
gttagtcggggctcagccgcggagtgagcgagggagacgggaggagccgaacccggcgccatccgccgccatcctcccccgccccaccgccatcccgtcccggggagcccctaggcccgggtcccggatccccgcgcacccggccaggctctggcacgttttgggggaggtgcctgcaggacccaacatactcaatgagcttccagcgcaatgtccgatcgctcggggccgactgccaagggaaaggatggaaagaagtattcctcgctcaacctgtttgatacgtataagggcaagtccttagagatccagaaacccgctgttgcccctcgccatggcctgcagagtctcgggaaagttgccattgcccggcgtatgccacctccagccaaccttccaagcctgaaagccgagaacaaaggcaatgaccccaatgtctcactagtgccaaaagacggaacaggatgggcaagcaaacaggagcagtccgaccccaagagttccgatgcctcaaccgctcagccgccggaatcgcagccactgccggcttcacagacgcctgcctccaaccagccgaaacgacccccagcagcccccgagaacactcctttggttccaagcggggtaaagtcctgggcacaagccagcgtcacccatggagcacatggagatggtggaagggcatcaagcctactgtcacgattctctcgagaggaatttccgaccctgcaggcggctggcgaccaggacaaggctgccaaggaaagggagtctgccgaacagtcgtctgggcccggaccaagcctccgcccccaaaattctacaacttggagggacggaggtgggcgtggccctgatgagctggagggcccggactccaaacttcatcatggtcatgatccccggggtgggctacagccttcaggcccaccccagttccctccctaccgcggaatgatgccgcctttcatgtatcccccatatctcccgttccctccgccctatggaccccaggggccttaccgataccccactcctgatgggcccagccgttttccccgtgtggcgggcccccgaggctcagggccaccaatgcgcttagtagagcctgtgggtcgtccctctattctcaaagaggataatctcaaagagtttgatcagttggatcaggagaatgatgatggttgggcaggggcccatgaagaggttgactacactgaaaagctcaagttcagcgatgaggaagatgggcgagactctgatgaggagggagctgagggccacagggattcccaatcagcttctggtgaggaacggccccctgaagcagatggcaaaaagggcaactcccccaacagcgaaccgcccactcctaagacggcctgggcagaaacctctcggcctccagagacagagccgggacctcctgccccaaagcctcccctacccccacctcaccggggccccgccgggaactggggcccccctggggactacccagatcgtgggggtcctccctgcaagcccccagcacctgaagatgaggatgaggcatggcggcagcgacgaaagcagtcgtcatctgagatttccctggcagtggagcgggcccggcgacggcgagaagaagaggagcggcgcatgcaagaagagcgccgggcagcctgtgctgagaagctcaagcgactcgatgaaaagtttggggcacctgacaagcggctcaaagcagagcctgctgccccacctgctgccccttctaccccagctccaccacctgcagccagcgaagttcccctgatggaggactcaagggggcagcagagggaccccccaagaggcctggaggctcctcacccctgaatgctgttccttgtgagggtccacctggctctgaacctcctaggagaccaccacctgccccccacgatggggacagaaaggagctgccccgggagcagcctctgccccctgg

SEQ ID NO: 305230 - DNA, 1650 bp, Artificial Sequence
  derived and/or modified sequence
atgagcgacagaagcggccccaccgccaagggcaaggacggcaagaagtacagcagcctgaacctgttcgacacctacaagggcaagagcctggagatccagaagcccgccgtggcccccagacacggcctgcagagcctgggcaaggtggccatcgccagaagaatgcccccccccgccaacctgcccagcctgaaggccgagaacaagggcaacgaccccaacgtgagcctggtgcccaaggacggcaccggctgggccagcaagcaggagcagagcgaccccaagagcagcgacgccagcaccgcccagccccccgagagccagcccctgcccgccagccagacccccgccagcaaccagcccaagagaccccccgccgcccccgagaacacccccctggtgcccagcggcgtgaagagctgggcccaggccagcgtgacccacggcgcccacggcgacggcggcagagccagcagcctgctgagcagattcagcagagaggagttccccaccctgcaggccgccggcgaccaggacaaggccgccaaggagagagagagcgccgagcagagcagcggccccggccccagcctgagaccccagaacagcaccacctggagagacggcggcggcagaggccccgacgagctggagggccccgacagcaagctgcaccacggccacgaccccagaggcggcctgcagcccagcggccccccccagttccccccctacagaggcatgatgccccccttcatgtaccccccctacctgcccttcccccccccctacggcccccagggcccctacagataccccacccccgacggccccagcagattccccagagtggccggccccagaggcagcggcccccccatgagactggtggagcccgtgggcagacccagcatcctgaaggaggacaacctgaaggagttcgaccagctggaccaggagaacgacgacggctgggccggcgcccacgaggaggtggactacaccgagaagctgaagttcagcgacgaggaggacggcagagacagcgacgaggagggcgccgagggccacagagacagccagagcgccagcggcgaggagagaccccccgaggccgacggcaagaagggcaacagccccaacagcgagccccccacccccaagaccgcctgggccgagaccagcagaccccccgagaccgagcccggcccccccgcccccaagccccccctgccccccccccacagaggccccgccggcaactggggcccccccggcgactaccccgacagaggcggccccccctgcaagccccccgcccccgaggacgaggacgaggcctggagacagagaagaaagcagagcagcagcgagatcagcctggccgtggagagagccagaagaagaagagaggaggaggagagaagaatgcaggaggagagaagagccgcctgcgccgagaagctgaagagactggacgagaagttcggcgcccccgacaagagactgaaggccgagcccgccgccccccccgccgcccccagcacccccgcccccccccccgccgccagcgaggtgcccctgatggaggacagcagaggccagcagagagacccccccagaggcctggaggccccccacccctag

SEQ ID NO: 305231 - protein, 262 aa, Artificial Sequence
  derived and/or modified sequence
MEPNDSTSTAVEEPDSLEVLVKTLDSQTRTFIVGAQMNVKEFKEHIAASVSIPSEKQRLIYQGRVLQDDKKLQEYNVGGKVIHLVERAPPQTHLPSGASSGTGSASATHGGGSPPGTRGPGASVHDRNANSYVMVGTFNLPSDGSAVDVHINMEQAPIQSEPRVRLVMAQHMIRDIQTLLSRMECRGGPQPQHSQPPPQPPAVTPEPVALSSQTSEPVESEAPPREPMEAEEVEERAPAQNPELTPGPAPAGPTPAPETNAP

SEQ ID NO: 305232 - protein, 244 aa, Artificial Sequence
  derived and/or modified sequence
MEPNDSTSTAVEEPDSLEVLVKTLDSQTRTFIVGAQMNVKEFKEHIAASVSIPSEKQRLIYQGRVLQDDKKLQEYNVGGKVIHLVERAPPQTHLPSGASSGTGSASATHGGGSPPGTRGPGASVHDRNANSYVMVGTFNLPSEPRVRLVMAQHMIRDIQTLLSRMECRGGPQPQHSQPPPQPPAVTPEPVALSSQTSEPVESEAPPREPMEAEEVEERAPAQNPELTPGPAPAGPTPAPETNAP

SEQ ID NO: 305233 - protein, 215 aa, Artificial Sequence
  derived and/or modified sequence
MEPNDSTSTAVEEPDSLEVLVKTLDSQTRTFIVGAQMNVKEFKEHIAASVSIPSEKQRLIYQGRVLQDDKKLQEYNVGGKVIHLVERAPPQTHLPSGASSGTGSASATHGGGSPPGTRGPGASVHDRNANSYVMVGTFNLPSEPRVRLVMAQHMIRDIQTLLSRMECRGGPQPQHSQPPPQPPAVTPEPVALSSQTSEPVESEAPPREPMEAEEV

SEQ ID NO: 305234 - protein, 206 aa, Artificial Sequence
  derived and/or modified sequence
MEPNDSTSTAVEEPDSLEVLVKTLDSQTRTFIVGAQMNVKEFKEHIAASVSIPSEKQRLIYQGRVLQDDKKLQEYNVGGKVIHLVERAPPQTHLPSGASSGTGSASATHGGGSPPGTRGPGASVHDRNANSYVMVGTFNLPSEPRVRLVMAQHMIRDIQTLLSRMECRGGPQPQHSQPPPQPPAVTPEPVALSSQTSEPVESEAPP

SEQ ID NO: 305235 - protein, 226 aa, Artificial Sequence
  derived and/or modified sequence
  misc_feature (1)..(1): Xaa can be any naturally occurring amino acid
XSGFGARLLELCNQGLFECLALNLHCLGGQQMELAAVINGRIRRMSRGVNPSLVSWLTTMMGLRLQVVLEHMPVGPDAILRYVRRVGDPPQPLPEEPMEVQGAERASPEPQRENASPAPGTTAEEAMSRGPPPAPEGGSRDEQDGASAETEPWAAAVPPEWVPIIQQDIQSQRKVKPQPPLSDAYLSGMPAKRRKLRSDIQKRLQEDPNYSPQRFPNAQRAFADDP

SEQ ID NO: 305236 - protein, 158 aa, Artificial Sequence
  derived and/or modified sequence
MEPNDSTSTAVEEPDSLEVLVKTLDSQTRTFIVGAQMNVKEFKEHIAASVSIPSEKQRLIYQGRVLQDDKKLQEYNVGGKVIHLVERAPPQTHLPSGASSGTGSASATHGGGSPPGTRGPGASVHDRNANSYVMVGTFNLPSDGSAVDVHINMEQAPI

SEQ ID NO: 305237 - protein, 185 aa, Artificial Sequence
  derived and/or modified sequence
  misc_feature (1)..(1): Xaa can be any naturally occurring amino acid
XLACTPPRHLHVVRPMSHYTTPMVLQQAAIPIQINVGTTVTMTGNGTRPPPTPNAEAPPPGPGQASSVAPSSTNVESSAEGAPPPGPAPPPATSHPRVIRISHQSVEPVVMMHMNIQGQQVPGFPTAPTRVVIARPTPPQARPSHPGGPPVSGTLQGAGLGTNASLAQMVSGLVGQLLMQPVLVA

SEQ ID NO: 305238 - DNA, 558 bp, Artificial Sequence
  derived and/or modified sequence
tgactggcatgtacccccccacgtcatctgcacgtggtccgacctatgtcacattacaccactccaatggtgctccagcaagcagccattccaattcaaatcaacgtaggtacgacagtgaccatgaccggaaacggaacacgacctccccccacccctaacgctgaagcacccccgccaggtcccgggcaggcttcttcagttgccccgtcttcaactaacgtggagagctcagccgaaggtgctccaccccctgggcctgccccaccgcccgccactagccacccacgcgttatcaggatttcccaccagagtgtggagcctgttgttatgatgcacatgaacatccagggccagcaggtgcctggattccctacagcccccacccgcgtggtaattgctcgccccactcctccccaggctcgacctagtcatcccggaggcccgcccgtctcggggactctgcagggagccgggctcgggactaacgcgtcccttgcacagatggtatcgggcctggttggtcagcttcttatgcagcctgtacttgtggcttag

SEQ ID NO: 305239 - DNA, 558 bp, Artificial Sequence
  derived and/or modified sequence
taattagcctgcactccccctcgccacctgcatgtggtgaggccaatgagccactacacaacgccaatggttctgcagcaggcagctatacccatacagattaacgtaggcactactgtaacaatgacaggaaatggcactcgccccccccctacacctaatgccgaggcaccccccccaggaccaggccaggcaagcagcgtggcccctagttcgactaacgtcgaatcttccgcagagggcgctccgcctccaggccccgctcctcccccagcgacaagtcaccctagggtcattcgaattagccaccagtcagtagaacctgtagttatgatgcacatgaacatccaggggcagcaggtgccggggtttccaacagctcccacacgtgtggtgatagcgcgcccaacccctccccaggctaggccatcgcaccctggcgggcccccagtcagcggaacacttcagggagccggtttgggtacaaatgcaagcctggcacagatggtgtccgggctggttgggcagttgctgatgcagccagtactagtggcttag

SEQ ID NO: 305240 - DNA, 558 bp, Artificial Sequence
  derived and/or modified sequence
taactggcatgcactccaccacgccacctgcacgtggtgagaccaatgagccactacaccacccccatggtcctgcaacaggcggcaatccctattcagatcaacgtgggaactacggtgaccatgaccggaaatggcactagacctccccccactcctaacgccgaggctcctcccccaggcccggggcaggcaagttccgtagccccctcttctacaaatgtcgagtcttctgccgagggggcacccccaccgggcccagctcctcctccagctacctcccatcctcgggttatccgcatctcccaccagtcggtggagcccgtggtgatgatgcatatgaacatccagggacagcaggtccccggcttcccaaccgcacctacacgggttgttattgcccggcccacacctccacaagcccgtccaagccacccaggcggaccacccgttagtgggactttacaaggggcgggcttaggtactaatgccagtctggcgcagatggtgagtgggctggttgggcagctgctcatgcagcccgtgctggtggcctag

SEQ ID NO: 305241 - DNA, 558 bp, Artificial Sequence
  derived and/or modified sequence
tagttagcttgtacgcctcctagacaccttcatgtagttcggccaatgagtcattacacgacacccatggtactgcaacaagccgctattccaattcagattaatgtgggcactacagtgactatgacgggtaacggcactaggccaccccccacaccgaacgctgaagccccaccaccaggaccaggtcaggctagttccgtggccccatccagcaccaatgtggaaagttctgctgagggagcccccccacccggccccgctccgccaccagcaaccagtcatccacgggtgatccgcatatctcaccaatctgtagagcccgtcgtgatgatgcatatgaatattcagggccagcaggtgccaggcttccccaccgcacctacaagggtcgttatagcccggcctacgccgccacaggcgaggccttcacaccctggaggcccacccgtaagcggtacgctgcaaggagctggactgggtaccaatgcttcactcgcgcagatggtgtcggggttggtaggccagctgctgatgcagcctgtcttggtcgcctag

SEQ ID NO: 305242 - DNA, 558 bp, Artificial Sequence
  derived and/or modified sequence
tgattggcctgcacccctcccaggcatcttcacgttgtgcgtcccatgtctcattacacgacccctatggtactacaacaggcagccatcccgatccaaattaatgtgggaactacggtgaccatgaccggtaacggcaccagacctcccccgacacctaatgcagaggcccccccacccggtcccggtcaggccagcagcgtggcccccagctccacaaatgttgagagctccgcggagggagcccccccaccagggccagcaccccctccagcgacaagtcacccacgggtgatcagaatctctcaccagtcagttgagccagtcgttatgatgcacatgaacatccagggccaacaagtaccaggcttcccgaccgctcccacacgggtggtcatcgcccgacccactcctccccaggcccgcccaagccacccgggagggccccccgtgtctgggactctacagggcgccggtctgggcacaaacgccagtcttgcccaaatggtgtctggattggtaggtcagctgctgatgcagccggtgcttgtggcctag

SEQ ID NO: 305243 - DNA, 558 bp, Artificial Sequence
  derived and/or modified sequence
tgactggcttgcactccccctagacatcttcatgtagtccgtccaatgtcccattacacaactcctatggttctccagcaggcagctattccaatccagattaatgtcggcacaactgtgaccatgaccggcaacggaacgagaccaccacccacacctaacgcagaagcccctccaccgggccctggacaagcatcctccgtcgccccgtctagtaccaatgttgaatctagcgccgaaggagctccaccccccggccctgccccccctccggccacttcacaccctcgagtgattcggatatcacatcagagcgtcgagcctgtggttatgatgcatatgaacatccagggacagcaagttcccggcttcccaactgccccaactagagtcgtaattgcccgtcctacccctcctcaggcccggccatcacaccctggcggaccccctgtcagcgggacattgcaaggagcaggtctcggtaccaacgcaagtctagcacagatggtgagtggcctggtcgggcaactccttatgcagcccgtgctagtagcttag

SEQ ID NO: 305244 - DNA, 558 bp, Artificial Sequence
  derived and/or modified sequence
tagcttgcctgcacaccgccacgccacctgcatgtggtgagacccatgagccactatacaacccccatggtcctacagcaagctgctataccaatccagatcaatgttgggacaaccgtcaccatgaccgggaatgggactagaccgcccccaacccctaacgccgaagccccacctccagggcccggccaagcctcttctgtggccccctctagcacaaatgtggaatcgagtgccgagggcgcccctcctcctgggcccgcccctcctccggccacaagccacccccgcgtgattaggatcagccatcagagcgtcgagcctgtggtgatgatgcacatgaacatacagggacagcaagtgcctggattccccacggcccccaccagagtggtaatcgcgcgccccaccccgccgcaggcgaggccatctcaccctggtggcccgcccgtatcaggcactctgcagggtgcaggtctcgggacaaacgccagcctggcccaaatggtcagcggactcgttggccagctcctgatgcagccagtgctggttgcctag

SEQ ID NO: 305245 - DNA, 558 bp, Artificial Sequence
  derived and/or modified sequence
tgactggcctgcaccccacccaggcacctgcacgtggtgcggcccatgagccactacaccacccccatggtgctgcagcaggccgccatccccatccagatcaacgtgggcaccaccgtgaccatgactggaaatggcacccggcccccacccaccccaaatgctgaggcccctcctcctggccctggccaggccagctctgtggcccccagcagcaccaacgtggagagcagcgctgagggcgcccctcctcctggccctgcccctcctccagccaccagccaccccagggtcatccgcatcagccaccagagcgtggagcctgtggtgatgatgcacatgaacatccagggccagcaggtgcccggcttccccacagcccccaccagggtggtgattgcccggcccaccccaccccaggcccggcccagccaccctgggggcccccctgtgtctggcaccctgcagggcgccggcctgggcaccaatgccagcctggcccagatggtgtctggcctggtgggccagctgctgatgcagcctgtgctggtggcctag

SEQ ID NO: 305246 - DNA, 558 bp, Artificial Sequence
  derived and/or modified sequence
tgactggcctgcacccccccccggcacctgcacgtggtgcggcccatgtctcactacaccacgcctatggtgctccagcaagcggcaataccgattcagattaacgtcggtaccaccgttaccatgacgggtaacggaactcgccccccgcccaccccaaacgcagaggctccaccgccaggccccggacaagcttcaagcgtggcgccctcgtccacaaacgtcgaatccagtgcagagggagcacctccccccggacctgcccccccgcccgcaacctctcaccctcgagtgatcaggattagtcatcaaagtgtagagcccgtagtgatgatgcacatgaatattcaaggacagcaggtgccaggcttccccaccgcccccacaagagtcgtcatcgctcgcccaacacccccccaggctaggccttcacatcccggtggccctcccgttagtggaactctgcagggagccgggctgggtacaaatgccagccttgctcagatggtcagcggactagtcgggcagttactaatgcagcctgttctcgtggcatag

SEQ ID NO: 305247 - DNA, 558 bp, Artificial Sequence
  derived and/or modified sequence
tgactggcctgcacccccccccggcacctgcacgtggtgcggcccatgtctcattataccactcctatggttctacaacaggccgccattcccattcagattaacgttgggaccaccgtgaccatgactgggaacggcactaggcctcctccaacaccgaatgctgaagctcctcctcccggacccgggcaagcaagtagtgtggctccctcatccactaatgtcgaatcatccgccgaaggtgcaccacctccgggtcccgcgccccctccagctacaagccatcccagggtgatccggattagccatcagagcgttgaaccagtagtgatgatgcacatgaacattcaggggcaacaggtcccaggctttcctaccgcccccacccgggttgtgatagctcggcccaccccacctcaagctcggccatcccatccgggcggccctcccgtgagcggtacactgcagggagcgggtctcggaacgaacgcctctctggctcaaatggtgagcgggcttgtcggacaactgctgatgcagcctgttcttgtagcttag

SEQ ID NO: 305248 - DNA, 558 bp, Artificial Sequence
  derived and/or modified sequence
tgactggcctgcacccccccccggcacctgcacgtggtgcggcccatgtcccactataccaccccgatggttctgcagcaggcagctatccctattcagatcaatgtcggtactacagtgactatgaccggcaatggaacacgacccccgccgacgccaaatgccgaggccccacccccgggacccggacaggccagcagcgtagcccctagctcaactaacgttgaaagctctgcagagggcgccccgcccccgggccctgcccctccaccagccacctctcatcctagggtgatcaggatctctcaccagtctgtggagcccgtggtgatgatgcacatgaatatccagggccagcaggtccccggcttcccaaccgccccaacccgggtcgtcatcgcacgacctacccccccccaggcccggccatcgcaccccggggggccccccgtctcaggtactctgcagggggcaggacttggtaccaacgcgtctctggctcagatggtttcagggttagtggggcagctgctgatgcagcccgtacttgtagcttag

SEQ ID NO: 305249 - DNA, 558 bp, Artificial Sequence
  derived and/or modified sequence
tgactggcctgcacccccccccggcacctgcacgtggtgcggcccatgagccattataccacccctatggtgcttcagcaggctgccatcccgattcaaattaatgtgggtaccacagtgaccatgacaggcaatgggacccggccgccacccaccccaaacgcggaagctcctccacctggtcctggacaggcatcctctgttgcgccatcaagcacgaatgttgagagcagcgcagaaggtgctcctcctcctgggcctgccccacctccagctaccagccacccacgggtgattagaataagtcaccagtctgtcgaaccggtggtaatgatgcacatgaatatccaaggccagcaagtcccagggttccccacggcacccacccgggtcgtgatagcaaggccgaccccccctcaggctcggccgagccacccagggggtcctcctgtgtcgggtacgctccaaggagctggactgggcaccaacgcaagtctggcacagatggttagcggtttggtgggccagctgctcatgcagccggttctggtggcttag

SEQ ID NO: 305250 - DNA, 558 bp, Artificial Sequence
  derived and/or modified sequence
tgactggcctgcacccccccccggcacctgcacgtggtgcggcccatgtcacactataccactcctatggtgctgcagcaggcggccataccgattcaaattaacgtcgggacaacggtgaccatgaccgggaatggcactagaccgccgccaactccaaacgcagaggctcctcctcctggcccagggcaggcgtcatccgtggcgccctcgtctaccaacgttgaaagttctgccgaaggagccccccctcccggccctgccccgccccctgcaacctcacatcctagagtgattcgcatcagccatcaatcagttgagccagttgtcatgatgcacatgaacatacagggtcagcaggtgcccggattccctaccgccccaaccagagttgttatcgccagacctaccccgcctcaagcgaggccatcccacccaggtgggccacctgtgtctggcactctgcaaggcgccggcctcggcacaaatgccagtctggcgcagatggtctccggactggtggggcagttgcttatgcagcctgtcctggtggcatag

SEQ ID NO: 305251 - DNA, 558 bp, Artificial Sequence
  derived and/or modified sequence
tgactggcctgcacccccccccggcacctgcacgtggtgcggcccatgtcacattatactacgcctatggtactccagcaggctgccatcccaattcaaattaatgtgggcactacagtgaccatgacaggaaacgggacccgtcccccacctactcctaacgctgaggcgcctcctcccggcccaggacaggctagtagcgtggctccgtcaagtacaaacgtagaatcctccgccgaaggggcacctccccccggcccagcgcctccacccgcgacgtcccaccccagagtcatccgcatttcacaccaaagcgttgagcccgttgtcatgatgcacatgaatattcagggccaacaggttcccggtttcccaacagcccccaccagagtggtgatcgctagaccaacgcctccacaggcacgtcctagtcacccaggaggaccacctgtttcaggcacactgcagggggcaggactgggcacgaatgccagcctggcgcaaatggtgagcggcctcgtggggcagctgcttatgcagccagtactggtggcttag

SEQ ID NO: 305252 - DNA, 558 bp, Artificial Sequence
  derived and/or modified sequence
tgactggcctgcacccccccccggcacctgcacgtggtgcggcccatgtcgcattatacaacccccatggtgctgcagcaggccgctatccctattcagattaacgtcggcaccaccgtcacaatgacaggcaacggtactcggcccccccccacacccaacgctgaggccccgcctcctggaccgggccaagcttccagcgtcgcgccttcctcaacgaacgtggagagtagtgcagagggtgcccctccgccagggcctgccccacctccagccacaagccaccctcgagttatcaggatatcacatcagtcagttgagccggtggtgatgatgcacatgaatatacagggccagcaggttccgggattcccaacagcacccacgagggttgtgatagctagacctacaccaccccaggctagaccctctcaccccggcggtccacccgtgagtggaacactgcagggggctggcctggggacaaacgcttctctggctcaaatggtttccggccttgtgggacagctcctgatgcagcctgtccttgtggcttag

SEQ ID NO: 305253 - DNA, 558 bp, Artificial Sequence
  derived and/or modified sequence
tgacttgcttgcaccccccctcgccacctccacgtggtgcggccaatgagtcactatactacgcctatggtactgcaacaggctgctatcccgattcagatcaacgtcggcaccacggttaccatgacgggaaatggtacacggccaccccctactcctaacgccgaggctccccctcctggtcccggacaagcttcttcggtggcccctagtagcaccaacgtggaaagctctgccgaaggggctcccccacctggacctgcgcctcctcctgcaacatcacacccacgggtcattcggataagtcatcagtccgtggaacccgttgtcatgatgcacatgaacatccagggtcaacaggtccctggattccccactgccccaaccagggtcgtaatcgcacgaccaactcctccgcaggccaggccaagtcaccccggaggcccaccagtgagcggtaccttacagggagccggactcggcacaaacgcaagtttagcccagatggtgagcggcctggtcggccagcttctcatgcagccagtcctggtggcctag

SEQ ID NO: 305254 - DNA, 558 bp, Artificial Sequence
  derived and/or modified sequence
tagttagcatgcaccccccctaggcacctccatgtggtacgccctatgagccattacacaacccctatggtgctccaacaggccgctatccccatacagatcaacgtcggcaccaccgtcacgatgactgggaacggcaccaggccccctcctaccccaaatgcagaggcaccgcctcccggtcctggtcaggcctccagcgtagccccttcttctactaacgtggaaagtagtgcagagggtgcacccccaccaggtcccgcaccccctccagctactagtcaccctcgcgttatccgaatctctcaccagagcgtcgagcctgttgttatgatgcacatgaacatacaggggcagcaagtgcccggatttcccaccgctccaactagagtggtcattgccagaccaacgccacctcaggcacgtccctcacaccccggtggcccaccggtgtcaggaaccctgcagggagctgggctgggtacaaatgcatcgctggcccagatggtgtcaggcctcgttgggcagttgttaatgcagcccgtcctcgttgcctag

SEQ ID NO: 305255 - DNA, 558 bp, Artificial Sequence
  derived and/or modified sequence
taattagcatgtacaccgccacgccatctgcacgtggtcaggccgatgtcccactatacaactcccatggtattgcagcaagccgcaatacctatccagattaacgtaggtacaaccgtcacaatgaccggcaatggtaccaggcccccacccactccaaatgccgaggccccacctcctggcccagggcaggcttcttccgtagccccttcctcaacaaatgttgagtccagcgcagaaggcgcaccacctcctgggccagctcccccacccgcaacctcccatcccagagtgatccggatcagccatcagagcgtggaaccggtagtgatgatgcacatgaacatccaggggcagcaagttccagggttcccaacagctcctacccgagttgtcatagcccgtcctacaccaccacaggcgagaccgagccatcccggagggcctccagtcagtggtactctgcagggcgctggccttggcaccaacgcgtcccttgcacagatggtttccgggctcgtcggccagctgctgatgcagcctgtcctcgtcgcatag

SEQ ID NO: 305256 - DNA, 558 bp, Artificial Sequence
  derived and/or modified sequence
taactcgcttgcacaccgccacggcatttgcacgtggtgcgcccaatgtcgcactataccacacctatggtcctacaacaggcagccatcccaatccagatcaatgtgggaactacagtcacaatgacaggaaatggcacaagacctcccccaaccccaaacgcggaagcccctcctcccggtcccggtcaggcgtcttccgtcgctccctccagcactaatgtagagtcttctgccgaaggcgcaccaccaccaggaccggcaccacctccggcaactagccatcctcgcgtgattagaattagtcaccagtcagttgagcctgtggtgatgatgcatatgaacatccaaggccagcaggtgcccggatttccaaccgctcctactagagtagtgatcgcgcgtccaaccccacctcaggccagaccttcccatccaggcggtcctcccgtgagtggaaccctccaaggggcagggcttgggacaaatgcctctcttgctcaaatggtgagcgggcttgtcggtcaactgctaatgcagccagtccttgtggcttag

SEQ ID NO: 305257 - DNA, 558 bp, Artificial Sequence
  derived and/or modified sequence
taactggcctgtacacctccaaggcatcttcacgttgtgagacctatgtcacactacacgactcctatggtgctgcagcaggctgcaattccaattcagatcaatgttggaacaaccgttaccatgacaggaaacggtacccgaccacctcccaccccaaacgccgaggctccccctccaggcccaggccaggcaagtagtgtagccccttcctctaccaacgtggaatcctcagctgagggagccccaccaccaggacccgctccaccacctgctactagccaccctcgggttattagaatcagtcatcagtcggtcgaacctgtcgtgatgatgcatatgaatatccaaggacagcaggtccctggcttccccactgcaccaactcgcgtggtcatcgcacgccctaccccgcctcaggctagaccaagccatccagggggtccacctgttagcgggaccctccaaggagccggactcggtacgaatgcaagcttagcccaaatggtgagtggactggtgggccagctccttatgcagccagtactcgtggcctag

SEQ ID NO: 305258 - DNA, 558 bp, Artificial Sequence
  derived and/or modified sequence
tgactggcctgcaccccaccgagacacctgcacgtggtgagacccatgtcacattacactactccaatggtgcttcagcaggccgcaattcctatccaaattaacgtagggaccactgttactatgacaggcaatggcacacgacctcctcccacacctaatgcagaggctccccctccaggtcccggacaggccagttccgttgccccaagctcaaccaatgtggagagctctgcggagggtgctccacccccaggtcctgcaccgccacctgctacatcacatccacgcgtcatcagaatttcccaccagtccgttgagcccgtggttatgatgcatatgaacatccaggggcagcaggtgccagggtttcccactgctcccactagggtggtgatcgccaggcccactccccctcaagcgagaccttcacacccaggcggaccacccgtatccggcacactgcagggcgctgggctcggtacaaatgccagcctggctcagatggtgtccggcttagtcggacagctactcatgcagcccgttctggtcgcctag

SEQ ID NO: 305259 - DNA, 558 bp, Artificial Sequence
  derived and/or modified sequence
taactggcatgcacaccacctagacatctgcacgtagtccggccaatgtcacattacacaactcccatggtactgcaacaggcagccataccaatccaaatcaatgtcggcactaccgtaacgatgacaggaaacggtaccaggcctccacctacgccaaacgcagaagctcctcccccaggccctgggcaagcctcgtccgtggcacctagctccaccaatgtggaaagctctgctgagggcgctcctcccccaggcccagctccgccacctgccacgtcacatccccgtgtgatccggataagccatcagtctgtcgaaccggtggtcatgatgcacatgaacatccagggtcagcaggtgcccggatttcccactgcacctactcgggtggtgatcgcccgacccacgccaccccaggcgcgtccttctcaccccggaggacctccggtttctggcacactgcagggtgccggtctgggcacaaacgcatctctagcccagatggtttctggcctcgtgggccaactgctgatgcagcccgtgctggtcgcctag

SEQ ID NO: 305260 - DNA, 554 bp, Artificial Sequence
  derived and/or modified sequence
tctggcctgcacgcccccacgacacctgcatgtggtccggcctatgtctcactacaccacccccatggtgctccagcaggcagccattcccatacagatcaatgtgggaaccactgtgaccatgacaggaaatgggactcggccccccccaactcccaatgcagaggcacctccccctggtcctgggcaggcctcatccgtggctccgtcttctaccaatgtcgagtcctcagctgagggggctcccccgccaggtccagctcccccgccagccaccagccacccgagggtcatccggatttcccaccagagtgtggaacccgtggtcatgatgcacatgaacattcaaggacagcaggtgccaggcttcccaacagctccaacccgggtggtgattgcccggcccactcctccacaggctcggccttcccatcctggagggcccccagtctctgggacactgcagggcgccggtctgggtaccaatgcctcgttggcccagatggtgagcggccttgtggggcagcttcttatgcagccagtccttgtggctc

SEQ ID NO: 305261 - DNA, 558 bp, Artificial Sequence
  derived and/or modified sequence
tgactggcctgcaccccccccagacacctgcacgtggtgagacccatgagccactacaccacccccatggtgctgcagcaggccgccatccccatccagatcaacgtgggcaccaccgtgaccatgaccggcaacggcaccagacccccccccacccccaacgccgaggcccccccccccggccccggccaggccagcagcgtggcccccagcagcaccaacgtggagagcagcgccgagggcgcccccccccccggccccgcccccccccccgccaccagccaccccagagtgatcagaatcagccaccagagcgtggagcccgtggtgatgatgcacatgaacatccagggccagcaggtgcccggcttccccaccgcccccaccagagtggtgatcgccagacccacccccccccaggccagacccagccaccccggcggcccccccgtgagcggcaccctgcagggcgccggcctgggcaccaacgccagcctggcccagatggtgagcggcctggtgggccagctgctgatgcagcccgtgctggtggcctag

SEQ ID NO: 305262 - protein, 136 aa, Artificial Sequence
  derived and/or modified sequence
  misc_feature (1)..(1): Xaa can be any naturally occurring amino acid
XRMSRGVNPSLVSWLTTMMGLRLQVVLEHMPVGPDAILRYVRRVGDPPQPLPEEPMEVQGAERASPEPQEWVPIIQQDIQSQRKVKPQPPLSDAYLSGMPAKRRKLRSDIQKRLQEDPNYSPQRFPNAQRAFADDP

SEQ ID NO: 305263 - DNA, 2232 bp, Artificial Sequence
  derived and/or modified sequence
atggagcctaacgacagcacgtcaactgcagtcgaggaacccgatagcctcgaggtcttagtcaagaccctggactcacagacgaggacattcattgtgggggctcagatgaacgttaaggaattcaaagaacacatcgctgctagcgtgtctatcccttcagagaaacagaggctgatttaccaggggagggtgctgcaggacgacaagaagctgcaggaatataatgtgggcggcaaggtcattcacctggtcgagcgggctccacctcagacccatctcccctcaggcgcctcttccggtactggcagtgcctccgccacgcatggtggtgggtccccaccgggaaccagaggtcccggcgccagcgtgcatgataggaatgctaactcttacgtgatggtggggacattcaacttaccgtcagatggcagtgctgtggacgtgcacattaacatggagcaggcccctatccagtccgaacctagagttaggctcgtgatggctcagcacatgatcagggacatccagacactcctgtctcggatggagtgccgcggtggcccccagccacagcactcacagccaccgcctcagccccctgcagttacccctgagcctgtggccctgagcagccagacttcggaacctgtagagagtgaagcaccccctcgagaacctatggaggctgaggaagtggaagaaagagcgccagcacagaaccctgagcttacccccggcccagcccctgctggccctacgccggcccctgagactaacgccccgaaccacccttcacccgccgagtacgttgaagtgcttcaggaacttcagcgactggagtctcgactgcagcctttcctgcagagatactacgaggtccttggggctgccgccacaactgattataacaataaccatgaaggacgcgaggaggatcagaggctgattaacctagtgggagagagtctcaggctgctcggaaatacattcgttgctttgtcagacttgcgatgcaatctagcatgcaccccaccgagacacctccatgtggtgagaccgatgtcacactatacaactcccatggttctgcagcaggcggccattcccatccagattaacgtgggcactactgtgaccatgactggtaatggcacacggccaccacctacccccaacgcggaagcaccgcccccggggccaggacaagcaagttcagtagcccctagctccaccaatgtagaatccagcgccgagggagctccaccgccagggccagctcctccacccgcaaccagccacccaagagtcatccgaatatcccatcagagcgtcgaacccgtagtgatgatgcatatgaacattcaggatagcggcacccagcccggcggagtacccagtgcccccaccggacccctaggtccccctggccatggtcagacattgggttcgaccctgattcagctaccatccttacctcccgaatttatgcatgcggtggctcatcaaattacccaccaggccatggttgcagcagtggctagtgctgccgccgggcagcaggtgcccgggttccctactgcacccacaagagtcgtgattgcacggccaacccccccccaggccaggccgagccatcccggcggccctccagtgtcaggcacattacagggcgcagggttgggcactaacgcatccctggcacaaatggtcagtgggctggtggggcaactgctgatgcagcccgtactggttgcacagggaacgccgggtatggctcccccacccgcccccgccacagcctctgcctccgcaggtacaacgaacacggcaacaacagcaggaccagctcccgggggtcccgcccagcctccaccaacccctcagccctcgatggcagaccttcagtttagccagttgctgggcaacctcctgggccctgcagggcccggggcagggggccccggggtagcctcacccactataacagtggctatgccgggagtccctgcttttctgcaggggatgaccgatttcctgcaggctacacaaacagcccctcccccgcctccccctcccccgccccctcccccagcacctgaacagcagacaatgccccccccgggatcaccaagtggaggtgccgggtctcctggtgggctgggcctagagagcttgtcacctgagttctttacgagtgtcgtccagggcgtactgagtagcctgctttag

SEQ ID NO: 305264 - DNA, 2232 bp, Artificial Sequence
  derived and/or modified sequence
atggaaccaaacgactccacatctacagccgtggaagagccggattcattggaggtgttagtaaagactctcgattctcagactcgcacgttcatcgtgggagctcagatgaatgtcaaggaatttaaggagcatattgcagcatcagtgtctatcccatccgagaaacaacggctgatttaccaggggagggtcttgcaggacgacaaaaagctgcaggaatacaatgtcggcggcaaagtaatccacctcgtggaacgggccccgcctcagactcacctgccctctggcgcttcttccggcacaggcagcgcatccgctacacacggaggtgggtctccaccgggcacccgtggtccgggtgcctccgtacatgaccgcaatgccaattcctatgttatggtaggtacatttaatttgccctctgatgggagcgctgtggacgttcacattaacatggaacaagctccaattcaaagtgaacctcgggtaagattggtgatggcgcaacatatgatcagggacatccagacattgctgtctcggatggaatgcagaggggggccacagcctcagcacagtcagccccctccccagccccccgctgtgacacctgaaccagtggccctgagcagccagacctctgagccagtagagagcgaagcacctccaagggagcccatggaggccgaggaagtcgaagagcgcgccccagcgcagaatcccgagctaacccccggccctgccccagccggaccaacgccagcgcctgagacgaacgctccaaaccacccctccccagccgaatatgtagaggtcttgcaggaactccaacgcctcgagtctcgactgcagccttttctgcagcgctattatgaggtattaggcgcagctgccacaacagactataacaacaatcacgagggcagggaggaggaccagaggctgatcaacctggttggagaaagtttgaggctcttagggaacacatttgtggcgctgtctgatctgcgctgtaatctggcttgcacaccgcctcgacatttacatgtggtgcgtcctatgtcccactatacaaccccaatggtgcttcaacaggccgccattcccatccaaatcaatgtgggcacaactgtaactatgaccggcaacggaacacgccctccgccgacccctaacgccgaagcccccccaccaggtccgggccaagcaagtagcgtggcgccctcctcgaccaacgtagaatctagcgccgagggcgcccctccccccggtcccgcccctcccccagcaacatcccatccgcgggtgatcagaatcagccaccagagcgtggagcccgtagtgatgatgcacatgaacattcaggacagcggcacacagccgggaggggttccctccgctcctactggaccactgggaccccctggccatggccaaactctcggctcaacattgattcagctgcccagcttgcctcccgagtttatgcacgcggtggcacaccaaattacacaccaggcaatggttgccgcggtggcctcagctgctgccggccaacaggttcccgggtttcctacagcacccaccagggtggttatcgcccgacctacccccccgcaggcacgcccaagccatccagggggaccacccgtaagcggcacccttcagggagcaggcctcgggaccaacgccagtttggcacagatggtgtctggactggttgggcaactattgatgcaaccagttctagtggcccagggcacaccgggcatggccccaccacctgcgccagcgacagcgagcgccagtgctggcacaacaaatactgccacaaccgctgggcccgcccctgggggccccgcccagccaccccctactccccagccctcaatggccgacctgcagttctcgcagcttctagggaaccttctaggaccagcggggcctggcgctggtgggagtggggtggccagccccacaatcacagtagcaatgcctggcgtgccagccttcctccagggcatgacagattttttgcaggccacgcagaccgctccaccacctccaccaccacctcccccacctcccccagcacccgaacaacagaccatgcctccaccaggatccccttccggcggcgccgggagtcctgggggactgggattggaatccctgtcccccgagttcttcacttccgtcgtgcagggcgtcctctccagtcttctgtag

SEQ ID NO: 305265 - DNA, 1548 bp, Artificial Sequence
  derived and/or modified sequence
atggagccaaatgattccacgagcacggctgtcgaggagcctgatagcctcgaggtcctggtcaagactctagattctcagactcggacgttcatagtgggggcccaaatgaatgtaaaagagttcaaagaacatattgccgcttccgtctcaatacccagtgaaaaacaaaggctaatataccagggccgtgtgctgcaggatgacaagaaactgcaagagtacaacgttggcggcaaagtaatccaccttgtcgaacgggcccctcctcagacacatttaccaagcggtgcctcttccgggaccggaagcgcttccgcaactcacggaggaggcagtcccccaggcactcgcgggccaggcgcgtcagtgcatgataggaacgctaacagctacgtaatggtcgggacattcaacctcccgagtgacgggagcgccgtggacgtccacattaacatggagcaggcccccattcagagcgaaccccgcgttcgcctcgtcatggctcagcacatgatcagagatatccagacactgttgagtcgcatggagtgcaggggagggcctcaacctcagcattcccagccacccccacagccccccgccgtcacacccgagcccgttgccctaagtagccagaccagtgaacctgtggaatccgaggctcccccacgggagcccatggaggcagaagaggtggaggaaagagctcctgcacagaacccagagctaacccccgggcccgcgcctgctgggccaacccccgcaccggaaaccaacgcccctaaccacccaagcccagccgaatatgtcgaggtacttcaggagctgcagagactggaaagccgcctgcagccattcctgcagcgatactacgaggtgcttggggctgccgcgacaacagattataataacaaccacgagggcagggaagaagatcagaggctcatcaaccttgtgggagaaagtttgcggctgttgggtaataccttcgtggccctcagtgatttgagatgcaatctggcatgcacaccgccccggcacctgcacgtggtgcgtccgatgtcccactataccacacccatggttctccaacaagctgccatccccatccaaattaacgtaggaaccaccgtaaccatgaccggtaacgggacccggcctcctcccacgcctaacgcggaggcacctcctcctgggccagggcaggcgtcctcagtggctccgtcatccaccaatgtggaatctagcgcagaaggggctccccccccaggtccggcccctccccccgcgacctcccaccctcgagtcatccgaatttcacaccagagcgttgaacccgtcgtcatgatgcacatgaacatacaggacagtggcacccagcccggaggcgtccccagtgcgccaacagggcccctgggacctccgggacatgggcagaccctcgggtcaacccttattcagctgccctccctaccccccgaatttatgcacgccgtggcccaccagataacacatcaggctatggtggctgcagttgcttcttag

SEQ ID NO: 305266 - DNA, 2232 bp, Artificial Sequence
  derived and/or modified sequence
atggagccaaacgacagcacgtctactgctgtggaagagcccgacagtctggaggtgctggtaaaaaccctggacagccagactcgtacatttattgtgggagcacaaatgaatgtgaaggaatttaaagaacatattgcagcatcggtctccattccatctgaaaagcagaggcttatttaccagggccgggtcctccaggacgataaaaagctgcaggagtataatgtgggaggcaaagtcattcacctggttgaacgagccccaccccagacccaccttccaagcggcgctagctcgggaacgggctccgctagtgccactcatgggggcggaagcccccccggaacccgcgggcccggagcgagcgtccacgataggaacgctaactcatacgtgatggttggcactttcaacctgccaagcgacgggtctgcggtggatgtgcacattaatatggagcaggcccccatacagtcagaacctcgagttagattggttatggcccagcacatgatcagagacatccagaccctgctgtccagaatggagtgccgagggggacctcagccccaacactctcagcctcctcctcagcctccggccgtgacgcctgaacccgtagccctgtcgtcacagacctctgaaccagtggagtcggaagcgccaccccgggaacctatggaggcagaggaggtggaggagagggctcctgcacaaaatccagagcttactccagggcccgcccccgcaggccctacaccagcaccagaaactaatgctcccaaccatcccagcccagccgaatacgtggaagtcctacaggaactgcagagactagagagccggctgcagccttttcttcagcgttactacgaagtgctgggggcagccgctaccaccgattacaataataatcacgagggtagagaggaagaccagcgtttgatcaacctggtgggagagtctctcagattgctcgggaataccttcgtggcactctccgacctgcgctgtaacctagcttgtacacccccccgacacctgcatgttgtccgccctatgagtcactacactacccctatggtcttgcagcaggcagccattccaattcagattaatgttggcactaccgtgaccatgacggggaatgggacacggccacctccaacccctaacgcagaggcccccccccccggccccggacaggcctcctcggtggccccaagcagcactaacgtagagtcaagcgcggaaggggcccccccccctggccctgcaccaccacctgccaccagccacccccgagtcattcggatttctcaccagtccgtcgaacccgtggtcatgatgcacatgaacattcaggacagcggaactcagcctggtggcgttccctctgctcctacaggccctctgggacctcctggtcacggccagacgctgggttcgactctgatccagcttccttcacttcctcccgaatttatgcatgctgtggcgcatcagattacccaccaggccatggttgccgcagtagcttccgccgcggccggacagcaggtgcccggcttccctacagcccctaccagggttgttattgcacgcccaactcctccacaggcacgccctagtcatcccggtgggccccctgtgtcaggcacccttcaaggcgccggcttaggcaccaatgcctccttggctcagatggttagcggcttggtaggacagctgctcatgcagccggtcctggtcgcacagggcacgcccggtatggctcccccccctgcccccgccacagcctccgcctcagctggtactacaaatacggctactacggcaggcccagcccctggcgggcctgctcagcctcctcctactccacaaccctcaatggcagatctgcagttttctcagcttctgggcaacctgctgggcccggccgggccaggcgctggcgggagtggagtagcttctccaaccataactgttgcgatgcccggggtccctgccttcttacagggcatgactgacttcctacaggcaacccagacggcaccaccaccaccacccccaccgcccccccccccgccagcaccggaacaacagacaatgccccctccggggagcccatcaggaggagcgggcagccctggaggactcggcctcgagtccctttctcccgagttcttcacctcggtggtgcagggcgtgctcagcagtctcctatag

SEQ ID NO: 305267 - DNA, 1548 bp, Artificial Sequence
  derived and/or modified sequence
atggaaccaaacgactcaaccagtaccgcagtcgaagagccagacagcttagaagtgctcgttaagacccttgactcacaaactaggaccttcattgtgggggctcagatgaacgtgaaggagttcaaggagcacatcgcagcttccgtaagtataccctcagagaagcagagactgatttaccaggggcgtgttcttcaggatgataaaaaactccaggagtataacgtaggggggaaagtgattcacttggtggagcgggcccccccccagactcacctgccctctggcgccagttccgggacaggctctgcctccgccactcacgggggcgggtctccacctggaacccgcggaccaggagcaagcgttcacgaccgcaatgcaaattcctacgttatggtgggtacattcaacttgccctcggatggcagcgccgtagacgttcacatcaatatggaacaggctcctatccagtctgaacctcgtgtccggctcgttatggctcaacatatgatcagagacatccaaaccctgttaagccggatggagtgcagaggcggacctcagccccagcactcacagccccccccccagccacccgcggtcactccagaacccgtggccctctcttcccagacttccgaaccagtcgagagcgaggcaccccccagagagcctatggaagctgaggaggtggaggagagagctccagcccagaaccccgaactgacaccaggacctgccccagccggcccaaccccggctcccgagaccaatgcaccaaaccacccatcaccagccgagtatgttgaagtgctgcaggagctgcagaggcttgagtcccgattgcagccgtttttacagcgctactacgaggtcctgggggcagctgcaaccacggattataataataaccacgaaggcagggaggaagatcaaaggctcattaacctcgttggtgagtcacttaggcttctgggaaacacattcgtcgccttgagcgacctacggtgtaatctcgcatgtacaccaccacggcacctccatgtggtgcgccccatgtcccactacaccacacctatggtgctccaacaggccgcgatccctattcagatcaacgtgggcactaccgtgacgatgactggcaacggtacacggccccctccaactccaaacgccgaagccccaccaccgggccctggtcaggcctcgtctgtagctcccagcagcacgaatgtagagtcatcggccgagggagcaccgcctcctggtccggcccccccccccgccacgagccacccgcgcgtaatcaggattagtcaccagtctgtagagcccgtggttatgatgcacatgaacatccaagatagtgggacgcaacctggaggagtgccctctgcgccaaccggtcccctgggcccaccgggtcacggccagactctaggctccaccctgattcagctcccctccctcccccctgagtttatgcacgccgtcgcacaccagatcactcaccaggctatggttgccgcagtggcctcctag

SEQ ID NO: 305268 - DNA, 1548 bp, Artificial Sequence
  derived and/or modified sequence
atggagcctaatgatagtacttccactgcggtagaagaaccagactccctcgaagttcttgtgaagacattggattcacagacacggacgtttatcgtgggagcccagatgaacgttaaggagtttaaggagcacattgctgcaagcgtttccataccttccgagaagcagaggctcatctaccagggccgtgtactccaagacgataaaaagctgcaagagtataatgtgggcgggaaagtgatacatctggttgagagggcccctcctcagacccatctgcccagtggggcctcgtccggcacgggctccgcctctgccactcacggggggggatcaccaccaggaacaagagggcccggcgcttccgtacacgatcggaacgcgaattcatacgtcatggtcggcaccttcaacctgccctcagatggcagtgcagtggatgtgcacatcaacatggagcaggcaccaattcagtctgaaccccgggttcgcttagttatggcccagcacatgatccgagatatccaaacactcttgtcccgtatggaatgcagaggtggacctcagcctcaacactcccagccccctccccaaccccccgctgtaacccccgaacctgtggcgctgtcaagccagacatctgagcccgtcgagtcagaggcacctcctcgggagcctatggaggccgaggaagtagaggaacgcgcccccgcccaaaaccctgagttgactccagggcccgcccccgcagggcccacccccgctcctgagactaacgccccaaaccatccctcccccgctgaatacgtggaggtgttgcaggagttgcagcgactcgagtctcgacttcaacccttcctccagcgttattatgaggtgctgggggcggccgctaccacagattacaacaacaaccatgaaggcagagaagaggaccagcgactgatcaaccttgtgggagagagccttaggctgttaggaaacacctttgtcgctctgagcgacctccggtgtaacctggcatgtacaccgcccaggcacctgcacgtggtcagacctatgtcgcattataccactccaatggtgctgcagcaggctgccatcccaattcaaattaacgtgggcacaacggttaccatgactggcaatggcactcggccaccaccgactccaaatgctgaggcaccacctcctggccctggacaagcttccagcgtcgcccctagtagcactaatgtggagagctccgcagaaggggcccctcctcccggtccagcgccccccccagcaaccagtcaccccagggtgataagaatctcccatcagtctgttgagcccgtagttatgatgcatatgaatattcaagactccgggactcaaccaggcggtgtgccttctgcccctactggtcctctcggccctccaggccacggacagaccctgggcagtaccctcatccagctgccgtcactgccccccgaattcatgcacgctgtggctcatcagataactcatcaggcgatggtcgcggccgtggcttcctag

SEQ ID NO: 305269 - DNA, 1548 bp, Artificial Sequence
  derived and/or modified sequence
atggagccgaacgatagtacttccactgccgtcgaagagcccgactctctcgaagtgctagtgaagactttggacagccagacgcgcacttttatcgtgggcgcacaaatgaacgtgaaggagtttaaggagcatatcgctgcctctgtcagtataccgtccgaaaaacaaagattaatctaccagggccgggtactgcaagacgataaaaagcttcaagagtacaacgttggagggaaggtgattcatctagttgagagagctcctccacagacgcacctgcccagcggcgccagtagcggcactgggtctgcctcagcaactcacggggggggctcaccccctggaaccaggggaccaggggcatcagtccatgatcgaaacgctaactcatatgtgatggtgggcactttcaatctcccctccgatggtagcgccgtggacgtgcacatcaatatggaacaggccccaatccagtccgagccccgcgtgcggctcgttatggcccagcacatgattcgcgatattcagacattactatcacgcatggaatgtagaggagggcctcagccccagcacagccagcccccaccccagcctccggccgtgactcccgagccagtcgcactttcaagccagacatccgaaccagtggagtcagaggcacctcctcgggagcccatggaagctgaggaagtcgaagagcgcgcgcctgcacaaaaccccgaactgacacctggacccgctcctgccgggcccactcccgcccccgagacaaacgccccgaatcacccctcacccgccgagtacgttgaggtgctacaagagctgcagcgacttgagtcacgactgcagccatttttgcaacggtactacgaagtgcttggcgcagcagcaaccactgactataataataaccatgagggtcgtgaagaagatcagcgcttaattaacttggtcggagagtcccttcggctgcttggtaatacctttgtggcacttagtgacctccgctgcaatctcgcctgtacgccccctagacatctccatgtggtgcggcccatgtctcattatacaacacctatggtgttgcagcaggctgccattcccatacagatcaatgtcggcacgaccgtcacaatgaccggaaacggtacccgcccgccacccacaccaaatgctgaggcacctcctcctggccctggccaagccagctccgtcgcgccctcaagcaccaacgtggaatcgagcgcggagggcgctccccctcctgggccagcacccccccccgcaacaagtcatcccagagtcattcggataagccatcagagtgtggagccggtcgttatgatgcacatgaatatacaggacagcgggacccaaccaggcggcgtaccatcggcacccaccggcccattgggaccacccgggcatgggcaaacccttggaagcactctgatccaattgccttccctccccccagaatttatgcacgccgtggctcaccagattactcatcaagctatggtggctgccgttgcctcgtag

SEQ ID NO: 305270 - DNA, 2232 bp, Artificial Sequence
  derived and/or modified sequence
atggagccgaacgactctacttccacagccgtggaggaacccgattcactggaggttttggtaaaaacactcgatagccaaactcggacgttcatagtgggtgcacaaatgaatgtgaaggaatttaaggaacacattgcggcatcagtgagtattcccagtgaaaagcagaggctgatctaccaggggcgagtccttcaggacgacaaaaagttgcaggaatataatgtaggcggaaaggtgatccacctcgtggaaagggctcctcctcagacccacttgccctccggtgcaagttctggcaccgggtccgcaagcgcaacccatggtggtggttctccacctggcacacgcggtcccggtgctagtgtgcacgatcgcaacgctaacagttatgtcatggttgggacctttaacctgccaagcgacggttctgctgtggacgtgcatattaacatggagcaggcccctatccaaagcgaacccagggtgcggctggtgatggctcaacacatgattcgcgacattcagactctgctgagcaggatggaatgtagaggagggccccaacctcagcactcccagcctccgcctcagcctccagcagtgacccccgaacccgtggccctgtcttcgcaaacgagcgaacccgtcgaaagcgaagcccctccacgcgaacctatggaggccgaggaagtggaggagagagcgcccgctcagaacccagagctgacccccggccctgcacctgcaggtcccactcccgcgccagagactaatgcacccaaccatccctctcccgcagagtacgtcgaagttctgcaggagttgcagcggctggagtctcggctgcagcctttccttcaaaggtattatgaggtactaggcgcagctgcaaccactgactacaacaacaaccacgaggggcgggaagaagatcaaagactgatcaacctggtgggggagtccctgcgtctgttaggcaacacctttgttgcactttcagacctacggtgtaacctggcatgcacaccgccacgccacctgcatgtcgtgcgcccaatgtctcactatactaccccgatggtgcttcaacaggccgccatacctattcagattaacgtgggcactacagtaactatgactgggaatggtacacgtccccccccaacccctaatgctgaagctccaccaccaggacctggtcaggcgagcagtgtggctcctagctcgactaacgtggagtcttctgctgaaggcgcacccccccccggcccagctcctcctcccgctacctcacacccgagggttatcaggatctctcaccagagtgtagagcccgtggtcatgatgcacatgaatatacaggacagcggaacacagccaggcggtgtcccctccgcgcccactggtccactgggacctccaggccacggtcagaccctgggtagcaccctcatccagctccccagtctgccaccggagtttatgcacgccgttgctcaccagattacgcaccaggctatggttgcggccgtggcgtccgccgcagcgggccagcaggttccgggctttcccactgctcccactcgggtggttatcgccagaccaaccccacctcaggcccggccgagtcaccccggagggccccccgtgtcagggaccctgcagggagccgggctgggcacaaacgctagcctggcccagatggtcagcggtcttgtcggccagcttcttatgcagcctgtgttggtggcccagggcacccccggcatggccccaccacctgcgcccgccacagcctccgccagcgccggaacgaccaacaccgcgaccaccgctgggccggcgcccggcgggcccgctcaaccgccacctaccccccaaccaagcatggctgatctgcagttctctcaactgctggggaacctccttgggccagccggcccaggagcaggcgggagcggtgttgcttccccgaccatcactgttgctatgccaggggttccggccttcctgcagggaatgactgattttctgcaggctacccagaccgcaccacctccccccccaccacctcctccacccccaccggcacctgagcagcagactatgccaccacctgggagccccagcgggggagccgggagccccggcgggcttggtcttgaatccctctctcccgaattcttcacatctgttgtgcaaggcgtactgtcgtccctcctttag

SEQ ID NO: 305271 - DNA, 2232 bp, Artificial Sequence
  derived and/or modified sequence
atggagcccaacgattccacaagtacagctgttgaggaacccgatagtctggaagtcctggtcaagaccctagattcccagactcggaccttcatcgtgggtgcccagatgaacgtgaaggaatttaaagaacatatcgcagcctccgtgagcatcccctcagaaaagcagaggttgatttatcagggtcgcgttctccaggatgacaagaaactccaggagtataacgtgggcggcaaagtgatccatctggtggagagagccccaccacaaacacatctccccagcggagcctcatcaggaacaggatctgcctctgctacacacgggggcggatctccaccgggtactcgcggaccaggggctagtgtgcacgatcgcaacgccaacagctatgtgatggtgggcaccttcaacttgccctccgatggatccgcagttgatgtgcatattaatatggaacaggcaccaattcaaagtgaaccgcgcgtgcgtctagtcatggcccagcatatgatccgcgatattcagacgctgttgtcccgaatggagtgtcggggcggcccccagcctcagcatagtcagccccctccacagcctccagctgtgacacccgagcctgttgccttaagttcacagacgtccgagcctgtcgaatctgaggcaccaccaagagaaccaatggaggccgaagaagttgaagagcgtgcgcctgctcagaatccagaactcacgccaggaccagcccctgctgggcccacccccgctcctgagacaaacgcccctaatcatccgagtcctgccgagtacgttgaggtcctgcaggagctgcagagattggagtctcgcctccagccattcctccagaggtattatgaagtgctgggtgccgcggcgactactgactacaacaacaaccacgagggtcgcgaggaagaccaacggttgattaatctagtaggagaatcactcagactgctgggtaatactttcgtggcactgagtgacctgagatgtaatctagcttgtacacctcctcgccacctgcatgtggttcgcccgatgagccactacaccacccccatggtgttgcagcaagcagccatccctatccagattaatgtgggcactacagtgacaatgaccggcaacggcaccaggcctcctccgacacctaatgctgaggctccacctccgggtccaggtcaagcttcttctgtggccccgtcttctactaacgttgagagcagtgccgagggagcgcccccacccggcccggcaccacctcccgccacctcccatccgcgcgtgattcgcatcagtcatcagagtgtggagcctgtagtaatgatgcacatgaatattcaggactccggcacacaacccgggggtgtgcccagcgcacctacaggcccccttggtccccccggacacgggcagacactgggctctactctcattcagctgccctccctgccgccagaatttatgcacgccgtggcccaccagatcacccatcaggcaatggttgccgccgtggcctccgccgcagcaggacaacaagtacctggatttccgacagccccgactcgcgtcgtcatagctaggcctactcctccccaagctagaccatcgcaccccggcggacctcccgtgtcaggcactctccagggcgccggacttggcaccaacgctagtttggcccagatggtgagtggactcgtcggacagttactgatgcagcctgtactggttgcacaaggcacaccagggatggctcccccccctgcccccgctacagcctctgcatccgctgggacaacgaacactgcgactaccgctgggcctgctccaggcgggcctgctcagccacccccaacccctcagccctccatggctgacctccagttcagccagctgctcgggaatctattgggaccagcagggcccggtgcggggggcagtggggtagcatcccccaccattacggtggcaatgccgggtgttcctgcattcctccagggtatgacagacttccttcaggccacacagactgcccctcctccaccaccaccccctccaccccccccaccagcacccgagcagcagacaatgccccccccagggtcaccctccgggggagccgggtcacctggcggcctgggcctggaaagtttgagccctgagttctttactagtgtagtgcagggggtgctatcatccttgctctag

SEQ ID NO: 305272 - DNA, 2232 bp, Artificial Sequence
  derived and/or modified sequence
atggaacctaatgacagcacatcaacagccgtcgaggagccggactcgctcgaggtcttggtcaaaacactggatagtcagactcggacctttattgtgggggctcaaatgaacgtcaaggagtttaaggaacacatcgctgcaagcgtctcaattccgagcgaaaagcagaggctgatctaccaaggaagagtgctccaggacgacaagaaactgcaggagtacaacgtaggcgggaaggtgatacacctggttgagcgcgccccaccccaaacacatctgccaagcggcgcctcttccggtaccgggtctgcgtcggctacccatggaggcggctcaccacccggcactagggggcccggggcctcagtccatgaccggaatgctaattcgtacgtcatggtcggcacatttaatctaccttctgatggatcggcagtcgacgtgcatataaatatggagcaggccccaatccagagtgaacctcgcgtcaggcttgtgatggcccaacatatgattagagacattcagaccctgctgagtcggatggagtgtagagggggcccacagccacaacattcccagcctccgcctcaaccccccgccgtgaccccagagccagtggccctgtcctcgcagacatctgaaccagtcgagagcgaagctccaccacgagagccaatggaagctgaggaggtggaagagagagcacctgcccagaacccagaactgactcctggcccagccccagccgggccgaccccagcccctgaaacgaatgcccccaatcatcccagcccagccgaatacgtagaggtgttgcaggaactacagaggctcgaatcccgcctgcagcctttcctgcaacgatactatgaggtccttggagcagcagcaactaccgattacaataataatcacgaaggcagggaggaggaccaaagacttatcaatctggtcggtgagagccttcgattactgggcaacacattcgtggcactgagcgaccttaggtgtaacctagcctgcaccccgccacgacacctgcacgttgtgcgccccatgtcccactacaccaccccaatggtgctgcaacaagcggcaatacctatccaaatcaacgtcggaaccacagtgaccatgaccgggaatggaacaaggcctccgccaacccccaatgccgaagcgccccctcccgggcccgggcaagcctcatccgtcgctccaagttcaactaacgtagaatcatcagcagaaggggctcctccccctgggccagcaccgccccctgccacctctcatcccagggtcataaggatttcccatcagtcagtggaacctgtagtgatgatgcacatgaacatacaggattctgggacacagcccggaggcgtgccatccgctcccacggggccactagggccccccggacatggccagactttggggagtacactcattcagctgccttccctccctccagagttcatgcatgccgtggctcaccagataactcaccaggcaatggttgcagcagtggccagtgctgccgccgggcaacaggttcctgggttccccaccgccccaactcgggtcgtaattgccaggcctactccccctcaggcacgcccgtcgcacccaggtgggccacctgtctctggcactctccagggcgccggtctgggcacaaatgcatcactggcccaaatggtctcaggcctggtaggacagcttttaatgcagccggttctggtggctcaggggactcccgggatggctcccccccccgccccggcaactgctagcgccagcgcagggacgactaataccgctacaaccgctggcccggctcctggaggccccgcccaaccacctcctacgccacagccaagtatggccgatctccagttctcacaactccttggaaacctgctggggcccgccggccccggggccggcgggccaggggtggccagtccaactataactgtagctatgcctggagttccagccttccttcagggtatgacagacttcctgcaggcgactcagactgcccccccccctcccccacccccacctcctccaccacctgcacctgagcaacagacaatgcctccccctggatccccaagtggcggcgcagggagtccaggaggtctgggactggaatccctgagtccggagtttttcacaagtgtggttcagggcgtactctcctctctactttag

SEQ ID NO: 305273 - DNA, 1548 bp, Artificial Sequence
  derived and/or modified sequence
atggagcccaacgactccacctccacggcggttgaggagcccgatagcctggaagttctggtcaagaccctggattcccagactcggacttttattgtcggagcacagatgaacgtaaaggagtttaaggagcacatcgctgcctccgtttccatcccatccgagaagcagcggctgatatatcagggacgggtgctccaagacgataaaaagctgcaggagtataatgtgggcggcaaagtaatccatctggtcgaacgggctccgccacagactcacctccccagcggggcttcttctggtacaggctccgcctccgcaacccatggcggggggtctcctcccggcaccaggggacccggagcgagcgtgcatgatcgaaatgctaactcttacgtgatggtcgggacattcaacctcccatcagacggatcagcagtggacgtgcatataaacatggaacaggctccaattcaatcagaaccgagggtaagactagtgatggctcagcatatgattagggacattcagactctgctgagtagaatggagtgccgcgggggaccacagcctcagcactcccagcctcccccccagccccctgcagttacgccagaacctgtggccctgtcatcacagacgtcagagccggtcgaatctgaagccccgccccgcgagccaatggaggccgaggaggtggaggagagagcccccgcccaaaacccggagctgacccccggcccagctcctgccgggccaacacccgccccagagactaatgcacctaatcatccaagtccagctgaatatgtcgaggtgctgcaggaactgcagaggctggagtccaggctccagcccttccttcagcgttactacgaagtgcttggcgcagcggccactacggactataacaacaaccacgagggaagggaagaggatcagagattaataaacctggtgggcgagtcactgcggctcctcgggaacaccttcgtcgctttgagcgatctgcgctgcaatctcgcctgtacccctccgcggcacctccacgtggtgagacccatgagtcattataccacacccatggtcctccagcaggccgccattccaattcagattaatgttggaacgacagtgacaatgactgggaacggtactcgcccgcctccaacacctaacgcggaggcgcctcccccggggccaggacaggcaagctcagttgcgccctctagtacaaacgtggagagttccgcagagggcgcacctcctccagggccagccccgccaccagccaccagtcatcctagagtgatccgcatcagtcatcagtcagtagaaccagtcgtcatgatgcacatgaatatacaggattccggcacacaaccggggggggtacccagcgctcccacagggcccttgggacccccaggccacggccagaccctggggagcactctgatccagctgcccagtctgccaccagaattcatgcacgccgttgctcaccaaatcactcatcaggccatggtcgcagccgtagctagctag

SEQ ID NO: 305274 - DNA, 1548 bp, Artificial Sequence
  derived and/or modified sequence
atggagcccaatgattccacatcaacagctgtagaagaacccgattccctggaggttttggttaaaaccctggactcacaaacgaggacattcatcgtcggcgcccagatgaatgtgaaggagttcaaggaacacatcgcagcctctgtcagtatcccctcagagaaacagcgccttatttaccaagggcgcgttcttcaagacgacaaaaagctccaggaatacaacgtaggggggaaagtcattcatctggtggagagagcccccccgcagacacatctgcccagcggcgcctctagcggcactggctccgccagcgccacccacggcggcgggagccctccaggcactagagggccaggtgcctcggtgcacgatagaaatgcaaacagttatgtcatggttgggacgtttaatctgccttctgacggctccgccgtcgacgtccatatcaatatggagcaggcaccaatccagtcggagccgcgagtccgactggtaatggctcagcacatgatacgggatatacaaactctcctctcgagaatggagtgtcgcgggggcccacagccacaacattcacaaccccccccacagcctccagccgttacgccggagcccgtagctttaagctctcagacctccgagcccgttgaatctgaggctccaccgcgggagcctatggaggctgaggaagttgaggagcgagctccagcccagaatcctgaactgacccccggacctgcgccagctggcccgacccctgcgcctgagaccaacgccccaaatcatcccagccccgcggagtatgtggaagtgttgcaggaattacaaagactggagtcccgcctgcagcctttcctgcagcgctattacgaggtgctgggggcagccgctaccacagattacaataataatcatgaagggcgggaagaagaccagcggttaataaacctggtcggagagagcctcagactgctgggcaacaccttcgtggcattgtcagacctccggtgtaacctagcctgcactccgccacggcacctccacgtggtacgacctatgagccactacactaccccgatggtgctgcagcaggctgctattccaatacagattaatgtgggaactaccgtgaccatgactggcaacggcacaaggcctccacctacccctaatgccgaagcgccgcccccaggccctggtcaagctagttctgtcgctccatcctcgacaaacgtggaatcctccgctgaaggtgcccccccaccgggtcctgcgccacctcccgcaacctcgcatccccgagtcattcgaatctcgcaccagagcgtggaacccgtcgtgatgatgcacatgaatattcaggactcgggtactcagccaggaggcgttccgtccgcacctacaggccccttagggccaccaggccatgggcaaactctggggtcaacgcttattcaactgcctagcctcccgccagagttcatgcatgccgtcgcgcaccaaatcacccaccaagccatggttgccgccgtggcttcttag

SEQ ID NO: 305275 - DNA, 1548 bp, Artificial Sequence
  derived and/or modified sequence
atggaacctaatgattcaactagcaccgctgtcgaggagcccgatagcctggaagttcttgtcaaaacactcgatagccagactagaaccttcatcgttggcgcacagatgaacgttaaggaatttaaggagcacatcgcagcaagcgtgtctattccaagtgagaagcagcgtcttatctatcaaggaagggttttacaggacgacaaaaagctgcaggagtataatgtcggcggcaaagtaatccatctagtggagagggcccctcctcagacccatctgccatcaggcgcatctagcgggaccggtagcgccagtgctacacacgggggcggtagtccgccaggaacccggggtccgggagcatctgtgcacgatcgtaacgcaaatagttatgtcatggttggcacctttaacctaccctccgacggatcagcagtcgacgttcatattaatatggagcaggcgcccatccagagcgaaccccgcgtgcgcctagtgatggcacagcatatgatccgcgacatccagactctcctaagcagaatggaatgcagaggtggaccccagcctcagcatagtcaacccccaccacaacctcccgccgtgacgcccgagccagtggccctatcttcccagacttccgagcccgttgaatctgaggcccctccccgggagcccatggaggcggaggaagtggaggaaagagctcccgcacagaaccctgaactgacaccggggccggcccctgcggggcctacacctgcccctgagacaaacgctcctaaccacccttccccagccgagtacgtggaagttctccaggagctgcagagactggagtccagactccaaccatttctccagagatactacgaggtgttgggggccgccgcaactacagactataacaacaatcatgagggccgggaagaagatcaacgactcatcaacctcgtgggggagtctctgcggctgctgggaaacacctttgtcgccctcagcgatctgcgctgtaacctagcttgtaccccgccacggcacctccacgtggtgaggccaatgtcgcactacaccactcctatggttctgcagcaggccgctatcccaatccaaattaatgtaggaacaactgtaacaatgaccggaaacggaacacgcccccctccgactcctaatgcagaggcaccccctccgggtccaggccaggcatctagtgtggccccatcttccaccaacgttgagagctcagccgagggcgctccacctccggggccggcccctcctcccgcgacttcccaccccagagtaataaggatcagccatcagtccgtcgagccggtggtgatgatgcacatgaatatccaagactccggcacgcagccagggggcgtcccaagcgctcctactggacctttaggcccaccgggccatggccaaacgctagggagcaccttgatacagctcccaagccttccaccggaattcatgcacgcagtggcccaccagatcacccatcaggcaatggtggccgctgtagcctcttag

SEQ ID NO: 305276 - DNA, 2232 bp, Artificial Sequence
  derived and/or modified sequence
atggaacccaacgactctacttccacggcagtggaagagcctgacagcctcgaagttctggtgaagacgctcgactcacaaacccgtacctttattgtgggagcgcagatgaatgtgaaggagttcaaggaacacatcgcggcttctgtgtctatcccttcagagaagcagcggctgatttaccagggacgagtgctgcaggacgataaaaagctccaagagtacaacgtgggggggaaagtcattcaccttgttgaaagggcacccccgcaaacgcacctgcccagtggcgccagcagcggaaccggctccgcatctgctactcacggaggaggctccccccccggcacaagaggacccggtgcttctgtccacgaccggaacgcgaactcgtacgtgatggtgggcacgttcaatcttccgtctgacggctcggcagtcgatgtgcacatcaatatggagcaagcccctatccagagtgagccccgagttagactggtgatggctcagcacatgattagagatattcagactctgctttcccgtatggagtgcagaggtggtccgcagccacagcatagccagcctccaccccaaccaccagccgtcactcctgaacctgtggctctgtcctctcagactagcgagcccgtggaatctgaagctcccccacgagagcctatggaagccgaggaagtggaagagcgcgcgcccgctcagaaccccgagctgaccccgggaccagcccccgctgggcccacccccgcacccgagacaaatgccccaaatcacccctctccagcagagtacgtggaggtgctgcaagaacttcagagactggagtcgagactgcagccctttcttcaaaggtattacgaggtactcggagcggcagccaccactgattacaacaacaatcacgaggggagggaggaggaccagagactgatcaacttagttggagagagcctgcggctgttagggaacacctttgtggccctttccgaccttcgctgcaatctcgcttgtactcctccccgtcacctccatgtggtgcgacccatgtctcactacaccacacccatggtgctacagcaggctgccatacccatccagataaacgtcggaactaccgtaaccatgacgggtaacgggacaagacctccccccacccctaatgcagaggcaccgcccccagggcctggccaggcatcctctgtggcaccatccagtaccaacgtggagagcagcgccgaaggcgcacctccgccgggccccgctccaccccccgctacttcgcatcctagggtaatcaggatttctcatcagagcgtggagccggtggtaatgatgcacatgaacattcaggattcaggaacccagccgggtggcgtgccctccgccccgacaggtccactggggcccccgggacatgggcagactttaggcagtactctcatccagctcccaagcctacccccggagtttatgcacgccgtcgctcaccagataactcaccaagccatggtcgccgccgtggcttctgccgcagccgggcagcaggtgccagggttccctacagcaccaacccgggtcgtgatcgctcgcccaactccgccccaagctaggccctcgcatcccggcggacccccggtgtctggcacactccagggagcagggctggggactaatgctagtctggcgcagatggtcagcggcttagtgggacagctcctgatgcagccggttcttgtcgctcaagggacacccggaatggcacccccccctgcaccagccacagcatctgcgagtgcaggtaccaccaacacagcaacaacagctgggccagccccgggcggccctgcacagcctccccctacgccgcagccaagtatggctgacctgcagttcagtcagctgttgggtaacttactgggcccagctggaccaggtgctggaggccctggtgtcgcgtcaccaacgattaccgtggccatgccgggagtacccgctttcctgcagggtatgacagattttctgcaggcgactcagacggcgcccccaccccccccaccacctccccctcccccaccagcacccgagcagcagactatgccccctcctggctctccttcagggggggcagggtcccctgggggactcggattagaaagcctatctccagagttttttacaagtgtcgtgcagggggtgttgtccagtttactgtag

SEQ ID NO: 305277 - DNA, 2232 bp, Artificial Sequence
  derived and/or modified sequence
atggagcccaatgacagcaccagcacagctgtggaggagccagacagcctggaggtgctggtgaagaccctggacagccagaccaggaccttcatcgtgggcgcccagatgaatgtgaaggagttcaaggagcacatcgccgcctctgtgtccatccccagcgagaagcagaggctcatctaccagggccgggtgctgcaggatgacaagaagctgcaggagtacaacgtgggcggcaaggtgatccacctggtggagcgggccccaccccagacccacctgcccagcggggccagcagcggcaccggcagcgccagcgccacccatggaggcggcagccccccaggcacccggggccctggggcctctgtgcatgacagaaatgccaacagctatgtgatggtgggcaccttcaacctgcccagtgatggcagcgctgtggatgtgcacatcaacatggagcaggcccccatccagagcgagccccgggtgcggctggtgatggcccagcacatgatccgggacatccagaccctgctgagcaggatggagtgccggggcggcccccagccccagcacagccagcccccaccccagcccccagctgtgaccccagagcctgtggccctgagcagccagaccagcgagcctgtggagagcgaggccccaccccgggagcccatggaggccgaggaggtggaggagcgggccccagcccagaaccctgagctgaccccaggccctgccccagctggccccaccccagcccctgagaccaatgcccccaaccaccccagccctgcagaatatgtggaggtgctgcaggagctgcagaggctggagagccggctgcagcccttcctgcagcgctactatgaggtgctgggcgccgccgccaccacagactacaacaacaaccacgagggccgggaggaggaccagaggctcatcaacctggtgggggagagcctgcggctgctgggcaacacctttgtggccctgagtgacctgcgctgcaacctggcctgcaccccacccaggcacctgcacgtggtgcggcccatgagccactacaccacccccatggtgctgcagcaggccgccatccccatccagatcaacgtgggcaccaccgtgaccatgactggaaatggcacccggcccccacccaccccaaatgctgaggcccctcctcctggccctggccaggccagctctgtggcccccagcagcaccaacgtggagagcagcgctgagggcgcccctcctcctggccctgcccctcctccagccaccagccaccccagggtcatccgcatcagccaccagagcgtggagcctgtggtgatgatgcacatgaacatccaggacagcggcacccagcccggcggcgtgcccagcgcccccaccggccccctgggccccccaggccacggccagaccctgggcagcaccctcatccagctgcccagcctgcccccagagttcatgcatgctgtggcccaccagatcacccaccaggccatggtggccgctgtggccagcgctgctgctggccagcaggtgcccggcttccccacagcccccaccagggtggtgattgcccggcccaccccaccccaggcccggcccagccaccctgggggcccccctgtgtctggcaccctgcagggcgccggcctgggcaccaatgccagcctggcccagatggtgtctggcctggtgggccagctgctgatgcagcctgtgctggtggcccagggcaccccaggcatggcccctcctccagccccagccacagccagcgccagcgctggcaccaccaacacagccaccacagctggccctgcccctgggggccctgcccagcccccacccaccccccagcccagcatggctgacctgcagttcagccagctgctgggcaacctgctgggccctgctggccctggggccggcggccctggggtggccagccccaccatcaccgtggccatgcctggggtgcctgccttcctgcagggcatgacagacttcctgcaggccacccagacagcccctcctcctcctcctcctcctcctcctcctcctccagcccctgagcagcagaccatgcctcctcctggcagccccagcggcggggccggcagccctgggggcctgggcctggagagcctgagccctgagttcttcacctctgtggtgcagggcgtgctgagcagcctgctgtag

SEQ ID NO: 305278 - DNA, 2232 bp, Artificial Sequence
  derived and/or modified sequence
atggagcccaatgacagcaccagcacagctgtggaggagccagacagcctggaggtgctggtgaagaccctggacagccagaccaggaccttcatcgtgggcgcccagatgaatgtgaaggagttcaaggagcacatcgccgcctctgtgtccatccccagcgagaagcagaggctcatctaccagggccgggtgctgcaggatgacaagaagctgcaggagtacaacgtgggcggcaaggtgatccacctggtggagcgggccccaccccagacccacctgcccagcggggccagcagcggcaccggcagcgccagcgccacccatggaggcggcagccccccaggcacccggggccctggggcctctgtgcatgacagaaatgccaacagctatgtgatggtgggcaccttcaacctgcccagtgatggcagcgctgtggatgtgcacatcaacatggagcaggcccccatccagagcgagccccgggtgcggctggtgatggcccagcacatgatccgggacatccagaccctgctgagcaggatggagtgccggggcggcccccagccccagcacagccagcccccaccccagcccccagctgtgaccccagagcctgtggccctgagcagccagaccagcgagcctgtggagagcgaggccccaccccgggagcccatggaggccgaggaggtggaggagcgggccccagcccagaaccctgagctgaccccaggccctgccccagctggccccaccccagcccctgagaccaatgcccccaaccaccccagccctgcagaatatgtggaggtgctgcaggagctgcagaggctggagagccggctgcagcccttcctgcagcgctactatgaggtgctgggcgccgccgccaccacagactacaacaacaaccacgagggccgggaggaggaccagaggctcatcaacctggtgggggagagcctgcggctgctgggcaacacctttgtggccctgagtgacctgcgctgcaacctggcctgcaccccacccaggcacctgcacgtggtgcggcccatgagccactacaccacccccatggtgctgcagcaggccgccatccccatccagatcaacgtgggcaccaccgtgaccatgactggaaatggcacccggcccccacccaccccaaatgctgaggcccctcctcctggccctggccaggccagctctgtggcccccagcagcaccaacgtggagagcagcgctgagggcgcccctcctcctggccctgcccctcctccagccaccagccaccccagggtcatccgcatcagccaccagagcgtggagcctgtggtgatgatgcacatgaacatccaggacagcggcacccagcccggcggcgtgcccagcgcccccaccggccccctgggccccccaggccacggccagaccctgggcagcaccctcatccagctgcccagcctgcccccagagttcatgcatgctgtggcccaccagatcacccaccaggccatggtggccgctgtggccagcgctgctgctggccagcaggtgcccggcttccccacagcccccaccagggtggtgattgcccggcccaccccaccccaggcccggcccagccaccctgggggcccccctgtgtctggcaccctgcagggcgccggcctgggcaccaatgccagcctggcccagatggtgtctggcctggtgggccagctgctgatgcagcctgtgctggtggcccagggcaccccaggcatggcccctcctccagccccagccacagccagcgccagcgctggcaccaccaacacagccaccacagctggccctgcccctgggggccctgcccagcccccacccaccccccagcccagcatggctgacctgcagttcagccagctgctgggcaacctgctgggccctgctggccctggggccggcggcagcggcgtggccagccccaccatcaccgtggccatgcctggggtgcctgccttcctgcagggcatgacagacttcctgcaggccacccagacagcccctcctcctcctcctcctcctcctcctcctcctccagcccctgagcagcagaccatgcctcctcctggcagccccagcggcggggccggcagccctgggggcctgggcctggagagcctgagccctgagttcttcacctctgtggtgcagggcgtgctgagcagcctgctgtag

SEQ ID NO: 305279 - DNA, 1548 bp, Artificial Sequence
  derived and/or modified sequence
atggagcccaatgacagcaccagcacagctgtggaggagccagacagcctggaggtgctggtgaagaccctggacagccagaccaggaccttcatcgtgggcgcccagatgaatgtgaaggagttcaaggagcacatcgccgcctctgtgtccatccccagcgagaagcagaggctcatctaccagggccgggtgctgcaggatgacaagaagctgcaggagtacaacgtgggcggcaaggtgatccacctggtggagcgggccccaccccagacccacctgcccagcggggccagcagcggcaccggcagcgccagcgccacccatggaggcggcagccccccaggcacccggggccctggggcctctgtgcatgacagaaatgccaacagctatgtgatggtgggcaccttcaacctgcccagtgatggcagcgctgtggatgtgcacatcaacatggagcaggcccccatccagagcgagccccgggtgcggctggtgatggcccagcacatgatccgggacatccagaccctgctgagcaggatggagtgccggggcggcccccagccccagcacagccagcccccaccccagcccccagctgtgaccccagagcctgtggccctgagcagccagaccagcgagcctgtggagagcgaggccccaccccgggagcccatggaggccgaggaggtggaggagcgggccccagcccagaaccctgagctgaccccaggccctgccccagctggccccaccccagcccctgagaccaatgcccccaaccaccccagccctgcagaatatgtggaggtgctgcaggagctgcagaggctggagagccggctgcagcccttcctgcagcgctactatgaggtgctgggcgccgccgccaccacagactacaacaacaaccacgagggccgggaggaggaccagaggctcatcaacctggtgggggagagcctgcggctgctgggcaacacctttgtggccctgagtgacctgcgctgcaacctggcctgcaccccacccaggcacctgcacgtggtgcggcccatgagccactacaccacccccatggtgctgcagcaggccgccatccccatccagatcaacgtgggcaccaccgtgaccatgactggaaatggcacccggcccccacccaccccaaatgctgaggcccctcctcctggccctggccaggccagctctgtggcccccagcagcaccaacgtggagagcagcgctgagggcgcccctcctcctggccctgcccctcctccagccaccagccaccccagggtcatccgcatcagccaccagagcgtggagcctgtggtgatgatgcacatgaacatccaggacagcggcacccagcccggcggcgtgcccagcgcccccaccggccccctgggccccccaggccacggccagaccctgggcagcaccctcatccagctgcccagcctgcccccagagttcatgcatgctgtggcccaccagatcacccaccaggccatggtggccgctgtggccagctag

SEQ ID NO: 305280 - DNA, 2232 bp, Artificial Sequence
  derived and/or modified sequence
atggagcccaacgacagcaccagcaccgccgtggaggagcccgacagccttgaagtcttggtgaaaactttagatagtcagacccgcacatttatcgtgggggcccagatgaacgtgaaagagttcaaggaacatatcgctgcaagtgttagcatcccgagtgaaaaacagagactgatctaccagggtcgggtacttcaggacgataaaaaactacaggagtacaatgttggaggaaaagtgatccacttggtggaacgcgcccctccccagactcatttaccctcaggtgcatcttccggcactggcagcgcctccgcaacacacggcgggggttctccccccggcacacgcggtcctggcgcttccgtgcatgatcggaatgctaactcctatgtaatggtcggaacattcaatctgccaagtgacgggagtgcggtagatgtgcacataaacatggaacaagcccctattcaaagcgaacctcgcgtcaggctagttatggcacagcatatgattcgggacatccagaccttgctcagtaggatggagtgcaggggtggcccgcaaccccaacattcacagccgcctccccagccgcccgctgtcacacccgaacccgttgccctgagctcccagacatccgagccagtggagagtgaagcccctccacgtgaacctatggaagcagaggaggtcgaggagagagcccccgcccagaatcccgagctgacccctgggccagcgccggctggcccaacccctgcccccgagaccaatgcccccaaccacccaagccccgctgagtacgtcgaggtgctgcaggaattacaaaggttggagtctagactccagcccttcctgcaacggtattatgaggtcttgggggccgccgccacaacagactataataacaaccacgaagggcgcgaggaggaccagcgattgatcaatctagtgggcgaatctctcagactgctgggcaatacatttgtggccctgtcagatctgaggtgtaacctggcgtgcacaccccctcgccacctgcacgtggtgcgcccgatgtcccattatactacaccaatggtactacagcaggccgccattcctatccaaataaacgtcggaacgacggtcacaatgactggtaacggtactagacctccacccaccccgaacgcagaagctccacctccaggccccgggcaggctagttccgtggccccaagttcaacaaatgttgagtcttccgccgaaggtgccccaccacctgggccagcacccccgcctgccactagccatcctcgtgttatccgaatttcccaccagagcgtagagcccgtggtcatgatgcacatgaacatccaggactctgggacacagcccggcggtgtgccgagtgcccccaccggccccctcggccccccaggacatggacagacactgggatcaacactcatacagttgcctagtctgcccccagagttcatgcacgcagtcgcgcatcagatcactcaccaagctatggtggcagccgtcgcttctgccgccgcaggtcagcaggtgcctggatttccgaccgctccaacaagggtagtcattgccagaccaacaccaccccaagcaaggccctcacatcccggcgggccccctgtgtctggcactctgcagggggccgggctgggcacgaatgcctctctggcccaaatggtgagcggtctggtaggccaacttctcatgcagccggtattggtggcccaggggacgcctggcatggccccccctcctgcgcctgcgaccgcctccgcctccgcggggaccactaatacggccacaactgccggccccgcacccggtggaccagcccagcctccaccaaccccacaaccctcaatggccgatctgcagttctctcagctgctgggaaatttgctcggcccagctggcccgggggcaggagggcccggagttgccagccctaccatcacagtggcaatgcccggagtccctgcatttctgcaagggatgactgacttcctccaagcaacccaaacagctccaccacctcctccacctccccccccccctcccccggcacccgagcagcaaacgatgccgcctccgggctccccttcgggtggcgccggctcgcccgggggcctgggacttgaatctctatccccagaattcttcacgtcagtggtgcagggtgtgctgtcttctttgctgtag

SEQ ID NO: 305281 - DNA, 2232 bp, Artificial Sequence
  derived and/or modified sequence
atggagcccaacgacagcaccagcaccgccgtggaggagcccgactccctcgaggtactggtgaagacattggactcccagactcggacttttatcgtcggcgctcagatgaacgttaaagagttcaaagaacacattgccgcttcagtgtcaattcctagtgagaaacagagactaatttaccagggccgcgtcctgcaggatgataaaaagttgcaggaatacaacgttgggggaaaagtgatacatctggttgaaagagccccaccacaaacacatctcccgtccggcgcatcgtctgggaccggaagtgcctccgcaacccatggtggtgggagcccccccgggacgagggggccgggtgcctccgtgcacgatagaaacgctaacagctacgtgatggtggggactttcaacctgccctccgatgggtcagccgttgatgttcacatcaacatggagcaggcaccaattcagtcagagccacgggtgcggttagttatggctcaacacatgatacgggatattcaaacgttgctgagcagaatggagtgccgggggggaccacaaccacagcacagccagccgcctcctcagcctcccgcggtgacgcctgagcccgtggctctgtcctctcagactagcgaacccgtcgaatcagaagcaccaccgcgcgaaccaatggaagccgaggaggtggaggaaagagcacccgcccaaaatccagaactgacccctggtcctgccccagcaggacccactccggccccggagacaaatgctccaaatcacccttccccggcggaatatgtggaagttctgcaggagctgcagcgattggaaagcagactgcagcctttcctgcaaaggtattacgaggtgctgggcgccgcagctaccaccgattataacaataaccacgagggacgcgaggaagaccaacgattgattaacctcgtgggtgaatccctgaggttgctgggtaatacattcgtcgcattgagtgatctgaggtgtaacttggcctgtaccccgccacggcatctacatgtggtccgtcctatgtcacactataccacccccatggtgttacagcaggctgcaatccccattcaaatcaatgtaggaaccacggtcactatgaccgggaacggtacccgacctcctccaactccaaatgcagaggcacctcctccaggcccgggccaggccagctctgtggctccctcttcaaccaatgtggaaagctccgcagaaggagcaccaccaccagggccggctcccccacctgccacctcacacccgcgagtcatccgaatctctcaccagagtgtcgagcccgtagtgatgatgcacatgaatatccaggactcaggcacacagccaggaggcgtgccgtctgctccgaccggccccttggggccaccaggtcatggccagacacttggatctacactgatccagctcccttccctgccccctgagttcatgcacgcggtcgcccaccagattacccatcaagctatggttgcagcagtcgcctcagcagctgctggacagcaggtcccaggctttcctactgcacccacgagagtcgtgatcgcccgtcccacccctccccaggcaagaccctcgcacccaggcgggccacctgttagcggaacgttgcagggcgctggattagggacaaatgcttcccttgcacagatggtgtctggtcttgtgggccagttgttaatgcaaccggttctggtggctcagggcactccagggatggctcctcctccggcccccgccacagcatccgctagcgctggcactaccaataccgcgaccactgcaggcccggctcccggcgggcctgcccaaccaccacccactccccagccaagtatggccgacttacaattctcccagcttctcggaaatctgctggggcccgcaggccctggggcaggaggcagtggggttgcgagtccgactataactgtggccatgccaggggtgccagcgttcctgcagggcatgaccgactttctgcaggcaactcagactgctcctccgccccccccaccccctccacccccaccaccggctcccgaacagcagacaatgccccccccagggtctccatccgggggtgcagggtcccccggaggcctgggactcgagtcactgtcacccgagtttttcaccagcgtcgtgcaaggcgtcctgagcagcttgctctag

SEQ ID NO: 305282 - DNA, 1548 bp, Artificial Sequence
  derived and/or modified sequence
atggagcccaacgacagcaccagcaccgccgtggaggagcccgactccttagaggttctggtgaagaccctcgacagccagacccgaactttcatcgtcggggcccagatgaacgtgaaggagttcaaggagcacattgctgcgagcgtgagcatcccgagtgagaaacaacggctaatctaccagggccgggtgcttcaagatgataaaaagctgcaggaatacaatgtgggcggtaaagtgatccacctggtagaacgagcacctcctcagacccatctgccgagcggcgcgtcgtctgggaccggttcagcgagcgcgacccatggggggggatcacccccggggacccgaggtcctggggccagcgttcacgatcggaacgccaactcctatgtcatggtcggaacctttaacctcccaagtgatggatctgccgtggacgtgcacatcaatatggagcaagcacctattcagtccgagcctagggttaggctggtgatggctcaacacatgatacgcgacatccaaaccctgttatctcggatggaatgtcgcggtggtcctcagccacaacattctcagccaccaccgcagccccccgctgtgacacccgaacccgtcgcactgtcctcccaaaccagtgaaccagtggagtccgaagctccaccaagagagcccatggaggctgaggaggtggaagaaagggcaccagcccagaaccccgagcttactcctggacctgctcccgctggccctaccccagcacctgagactaatgccccaaatcacccaagccctgccgaatatgtggaggtgctccaggagctgcagcggctagagagtcgcctccagcctttcctacagcggtattacgaggtactgggcgctgcagccacaaccgactacaacaataaccatgagggtcgggaggaggatcagcggctcatcaacttagtcggagaatctctcaggctgctgggcaatacctttgtggcccttagcgatctgagatgtaacctagcctgcacccctcctcggcatctccacgttgtccggccaatgtcacattacacaacaccaatggttctacagcaagctgctatccccattcagattaatgtcggtaccactgtgaccatgactggaaatgggacccggcctcccccaacccctaacgcagaggcaccgcccccgggacctggacaggcatcctcagtggcaccctcgtctactaacgtggagtcttcggcagagggggctccacccccagggcccgcccccccaccagccaccagccacccacgcgtgatccgcatttctcatcaaagcgtggagcccgtggtcatgatgcacatgaacatccaggactccgggactcagcctggaggagtcccaagcgctccaaccggcccactgggacctccaggacacggacagactcttgggagtacgctcattcagctcccttcactgcctcccgagttcatgcacgcagtcgcacaccagatcacccatcaggccatggtcgccgcagtcgccagttag

SEQ ID NO: 305283 - DNA, 2232 bp, Artificial Sequence
  derived and/or modified sequence
atggagcccaacgacagcaccagcaccgccgtggaggagcccgacagtctggaggtgcttgttaaaaccctggacagtcagacccgaactttcatagtgggcgcccagatgaacgtgaaggagtttaaagagcacatagccgcatctgtgtctattcccagcgagaaacagagattaatctatcaggggcgggtattacaggacgacaaaaagctccaagagtataatgtcggagggaaggtgattcacctggttgagcgcgcgccacctcagacgcacctccccagtggggcatcgagcgggacgggcagcgcttcagcaactcacggagggggatccccccctggaacacggggaccaggcgcttcggtacacgatcgcaatgctaacagctacgtaatggtgggcacctttaacctgccaagtgacggttcggctgtggatgtgcacattaatatggagcaggcccccattcaatctgagcccagagtgaggctcgtgatggctcagcacatgattagggacatacagacattgctttccaggatggaatgtagaggcgggccacagccacagcattcacagccacctccacaaccccccgcagtcacccctgagccagtggctctgtcctctcagacatcggagcccgtggagagtgaagcccctccaagggaaccaatggaggctgaggaggttgaggaacgggctccagctcagaaccccgagcttactccaggtccagctcctgccgggcctaccccggcgcctgagactaacgcaccgaaccacccaagcccggcggagtatgttgaggtcttgcaggagctgcagagactggagtccagactccagccgtttctccaacgttactacgaagtcttgggagccgctgcaactaccgattacaataacaaccatgaaggaagggaagaagatcagagactgattaatctcgtaggagagtcactgcgactcttagggaatacctttgtggctctgtccgacctacgctgtaatctcgcatgcacgccaccacggcacctccatgtagtacgtcctatgagtcactataccacccctatggtcctccagcaggctgcgatccccattcaaatcaacgtgggaacgacagtgacaatgacagggaacggcacaagaccacccccgactccgaatgctgaggccccaccacccggcccagggcaggcctcatccgttgcccctagctcaaccaatgtcgaatcgtctgctgagggcgcacccccccctggcccagcccctccccccgccacttcccacccccgggtgatacgcatttctcaccagtcagtggaacccgttgtaatgatgcatatgaacatccaagatagcggcacgcagccagggggggtgccctcagcacctacaggaccattgggcccccccggccacggccagacgctagggtctactctgatccaactgccctccctaccacccgaatttatgcacgccgtggcacatcagatcacgcatcaagctatggtcgctgctgtggccagtgctgccgcggggcagcaggtgcccggatttcccaccgctccaactcgcgtcgttatcgcccgacccactccaccacaagcccgccctagtcaccctggtggcccccccgtgagcggtaccctgcagggagccggtctcggcacaaacgcaagtctggcacagatggttagtggattagtgggccaattgctgatgcagcccgtgctggtggcccaggggacacctggcatggcacctccacctgcgcctgcgactgcttcagcctcagccggcaccaccaacacggccacaaccgcggggcccgcgcccggtggcccggcgcaacctccgcccacaccacaaccctctatggccgatttgcagttcagtcagttattgggcaacctgctggggcctgcagggccaggtgcgggcgggagtggggtcgcgtcacccactatcacggtggccatgccaggcgtgccagcattcctgcaggggatgacagacttcctgcaggcgacacaaactgcaccaccccctccccctcctcccccgcctccaccccctgctcccgagcagcagactatgccaccgccgggttcacccagcgggggtgcaggatcaccaggaggcctgggtctcgaaagcctgtctcccgaattctttacatcagtggttcagggggtgctgtctagcctgctctag

SEQ ID NO: 305284 - DNA, 1548 bp, Artificial Sequence
  derived and/or modified sequence
atggagcccaacgacagcaccagcaccgccgtggaggagcccgactctctcgaagtactggtgaagactctcgattcacaaacccgcactttcatcgtgggcgcccagatgaacgttaaggagtttaaggaacatatcgcagcgagcgtgagcatcccctccgagaaacagagattgatatatcagggtagggtcctgcaggacgacaaaaagctccaagaatacaatgtcggagggaaggttatacacttggtggaaagggctcccccacagacccacctgccctctggagcctcaagtggcacaggatctgcttccgccacccatggcggtggctcacctcctggcacaagggggcctggagcttccgtccacgaccggaatgcaaattcttacgtgatggtgggcaccttcaatctcccatcagatggatctgcggtggacgtgcacatcaacatggagcaggctcctattcaaagcgaaccccgagttaggctggtaatggctcaacacatgatacgtgacatccagacattgctcagccggatggagtgcaggggagggcctcagcctcagcacagccagcccccaccccagcccccagctgtaacaccggagccggtggcgctgtcaagtcaaactagcgagccagtcgaatcagaagcaccaccgagggagcctatggaggccgaggaagtggaggagcgagctccagctcaaaatcccgagctgacacccggcccagcacccgccggtcctacccctgctcctgaaactaatgcgccaaatcatccatctcccgctgagtatgtagaagtcctgcaggagctacagcggcttgagagcaggttacagccttttctgcagcggtattatgaggtgctcggcgccgcagccacaaccgactacaacaacaaccacgaaggacgcgaggaggaccagaggctgataaatttggtgggagaaagtctcaggttgttaggaaacacctttgtggccctgagtgacctgcgctgtaacctggcatgtacaccacccaggcacctgcacgtagtccggcctatgagccactacacgactcctatggtgctgcagcaggccgccataccaattcagattaacgtgggcactaccgtgacgatgacaggaaatggcacgcggccaccccccacccccaacgcggaagccccgcctcctggaccgggccaggcaagcagcgttgccccaagctccacgaatgtcgagtcaagtgctgagggcgctcctccgcctggaccagcccccccgcccgctacatcacacccccgggtgataaggatttcacatcaatccgttgagccagtggtgatgatgcacatgaatatacaagattctggcacgcaaccgggaggcgtgccctcggctccaactggtcctctgggcccccctggtcatggccagactctcgggagcaccttgatacagctgccatcgttaccaccagaattcatgcacgcggtcgcccaccagataacacatcaggctatggtggctgccgtagcgtcctag

SEQ ID NO: 305285 - DNA, 1548 bp, Artificial Sequence
  derived and/or modified sequence
atggagcccaacgacagcaccagcaccgccgtggaggagcccgacagcctggaagttctggtgaaaaccttggattctcagacccgtacatttattgtcggcgcacagatgaacgtcaaagaatttaaggaacacatagcggcatcagtgtcaatccctagcgagaagcagcggctgatttatcagggcagagtccttcaggacgacaaaaaactacaagagtataacgtcggcgggaaagtgatacatctggtggaacgcgccccacctcagacacatctccctagtggagcatcatccgggaccggtagtgcaagtgccacccacggcgggggttctcctccaggcaccagaggcccaggagcttccgtacatgaccgtaatgccaactcatatgttatggtgggcacctttaacctgccatctgatggttccgctgtggatgttcatatcaatatggagcaggccccaatacagagcgaaccaagagtgcgtcttgtgatggcgcagcacatgattcgtgacattcagaccctcctgtccaggatggagtgtcggggtggcccacaacctcagcattcccaaccaccaccacaacctccagccgtgacacctgagcccgttgcgctatccagtcagacatctgagcccgtggagagcgaagcacctccccgggagccaatggaggcggaagaagtggaagagcgggctccagcgcagaaccctgaactcacacccggccccgcccctgccggccccactccggccccagagaccaacgcacccaaccatccctccccagccgaatacgtggaggtcttgcaggagctacagcggttagagagcagactacagcctttcctgcagagatattatgaggtgttgggcgcagctgcgacaactgattacaacaacaaccacgaagggcgcgaagaggatcagcgcctgatcaacctggtgggtgagagcctcaggcttctaggtaatactttcgttgcattaagcgaccttagatgcaatctggcgtgtaccccgccccgacacctgcacgtggtgcggcctatgtcacattataccacgccaatggtcctgcagcaggcggcaatccctattcaaatcaatgttggaaccacggtgacgatgactggcaacggcaccagaccgccgcctacacccaacgccgaagccccccctccgggcccagggcaggcgtccagcgtggccccttcctcaacaaacgtggaatcgagcgctgaaggagccccaccgccaggaccagctccacctcccgccactagccaccctagggtgatccggatcagtcaccagagcgtcgaaccagtagttatgatgcatatgaatatacaggactctggtacacagcccggcggtgtgccctctgctccgacaggtcctctggggccccccggacatggccagacgcttggctctacgctgattcaacttccatcgcttcctccggaatttatgcatgcggtggcacaccagatcacccaccaggccatggtggctgcagtggccagctag

SEQ ID NO: 305286 - DNA, 1548 bp, Artificial Sequence
  derived and/or modified sequence
atggagcccaacgacagcaccagcaccgccgtggaggagcccgacagtctggaggtgctcgtaaagaccctcgactcacagacccgaacctttatcgtgggagcccagatgaacgtaaaagagtttaaggagcacatcgctgcaagtgtctctattcctagcgagaaacagcggctgatatatcagggtcgcgtgctacaagatgacaagaagcttcaggaatacaatgttggaggtaaggtcattcatctggtggagcgtgcaccacctcagacccacctgccatctggtgctagtagtggtacaggcagcgcgtccgccactcacggagggggctccccacccggtaccagaggcccgggcgccagcgtccacgacaggaacgccaacagctacgtcatggtcgggacttttaatctgccctctgatggttcagccgttgatgtacacattaacatggaacaggccccaatacagtcagagccaagggtgaggctcgttatggctcagcacatgatcagagacattcagactttgctcagcagaatggaatgcagaggtggcccgcaaccacagcatagccagcctcctcctcagccacctgccgtcacccccgaacccgtcgcactttccagccagaccagtgagcccgttgaaagtgaggccccgccccgggagccaatggaagccgaggaagtggaggagcgcgctcctgcccagaatcctgaactgacaccaggacctgctccggccggaccgactccggcccccgagacaaatgcccccaatcatccttcgcccgcagaatatgtcgaggtactacaggagctgcaacgcctggaatcaaggcttcagccatttctgcagcggtactatgaagttttgggtgcagctgctacaacagattataacaataatcacgaaggcagagaggaagatcagagactgatcaacttggtaggtgaatctttgcggttgctgggaaacacatttgtggcactgtctgacctgcgctgtaatctggcatgcacaccacctaggcatctgcacgtagtcagacccatgtctcactacacaactcctatggtgttgcaacaggcggcgattcccattcaaataaatgttgggactaccgtaacgatgacaggaaacggcacccggccgccacccacccctaacgccgaggctccgccaccgggaccaggacaggccagctcagttgccccaagctcaacaaacgtcgaatccagtgcagaaggcgccccaccacctgggccggcgcctccgccggctacatcacatcctcgggtgatcagaattagccatcaaagcgttgaaccagtggtgatgatgcacatgaacatccaagacagcgggacccagccgggtggggtgccttcagcccccaccggacctttagggccccctggacacgggcagactttgggcagcacactgattcagttaccctctctccctcctgagttcatgcacgcagtcgcccaccagattacgcatcaggccatggtggcagctgtggccagttag

SEQ ID NO: 305287 - DNA, 2232 bp, Artificial Sequence
  derived and/or modified sequence
atggagcccaacgacagcaccagcaccgccgtggaggagcccgactctctggaagtactcgtcaagactttggacagccagaccagaacctttatcgtgggagctcagatgaatgtcaaggaattcaaagaacatatcgccgcgtccgtgagcattccatccgagaaacagagacttatttatcaggggagagtgcttcaggacgataaaaagcttcaagaatacaacgttggcgggaaggtgatacacctcgtcgaaagggcaccacctcagacacatctgccaagtggagcctcttcaggaacgggctcagcaagcgctacccacggtggaggatcgccccccggtacccgtggtccaggggcctccgttcatgatagaaatgctaattcatacgtgatggtgggcaccttcaatctcccttccgatgggtctgcggtggacgtccatatcaatatggagcaagccccgattcagagcgagccccgggtgcgcttggtgatggcccagcacatgatccgagatatccagaccctgctgagccgaatggagtgcagaggcggcccccagcctcagcacagccagcctcctccacagccgcccgcagtcacccccgagcccgtagctctgtcttcccaaaccagtgagcctgttgaatccgaggcaccccctagggaacctatggaagctgaagaggtcgaggaacgggcccccgcacaaaacccggaacttactcctggccctgccccagccggtccaaccccagctccagagacaaatgctcctaatcatccatcaccggctgaatacgtggaggttctgcaagagcttcaaagactggaatctcgcctacagccttttctccaaaggtactacgaagtgctcggagccgcagcgaccactgattacaacaacaatcatgaagggcgcgaagaggaccagagactgattaaccttgtcggagaatcactgcgcctactcggcaatacatttgtagccctgagtgaccttcgctgcaacctggcatgtacaccccctagacacctgcacgttgtgcggccgatgagccattatacaacccctatggtgctccagcaggccgccattccaatccagataaatgtcgggacaacggtgactatgactggcaatggaacgcgacctcctcctactcccaatgccgaagctccaccgcccggccccgggcaggcctcaagcgtggccccttcaagcacaaacgttgagagcagcgctgaaggggcccccccaccagggcccgcaccacctccagctacaagtcacccaagagtgattcggatatcacaccagtcggtcgagcccgtcgtaatgatgcatatgaacattcaagactccggtacccagccaggaggggtcccgagtgcgccaacaggccccctaggcccgccggggcatggccagacactcggttcaaccctcattcagttgccgtcgctccctcccgagttcatgcacgccgtggcgcaccagatcactcaccaggcaatggtggctgctgttgctagcgccgcggccggtcaacaggtccccgggtttcccactgcccccacacgggtcgttattgctaggcctacccccccacaagctcgtccgtcccatcccggaggaccgccagtctccgggacattgcagggagccgggctgggcaccaatgcgtctctagcgcaaatggtgtccggtctggtggggcagctgctgatgcaaccagtgttggtggcccagggcactcctggtatggctcctccccctgcccctgccaccgcttccgcatccgcgggaaccacaaatactgcaacaaccgctggacctgctccaggcggccccgcccagccaccacctactccgcagcccagcatggccgacctccagttctcacagctgcttggaaatctgttaggccccgctggtcctggagctggtgggtcaggtgtggcctcacccactatcaccgtagccatgcctggggtgcccgcattcctgcaagggatgaccgactttttgcaagcaacccaaactgctccccccccccctccacccccccctccgccgccccccgcccccgaacagcagaccatgccccctccaggtagcccgtctggcggtgcagggtctccgggcgggctggggctggaaagcctgtcaccagagttctttactagtgtggtgcaaggagtcctgtccagtctgctttag

SEQ ID NO: 305288 - DNA, 2232 bp, Artificial Sequence
  derived and/or modified sequence
atggagcccaacgacagcaccagcaccgccgtggaggagcccgactcactggaggtgctggtgaaaactctggactcacaaacacgaacttttattgtgggggcacagatgaacgtgaaagaatttaaggaacatatcgccgcatctgtcagtattcccagtgagaaacagcggctcatctatcagggaagggtcctgcaagatgacaaaaagcttcaagagtacaatgtcggtggcaaagtgatccatctggtagagcgcgctcctcctcagacccacctgccttccggggcgagctcagggactggttccgcaagcgccacacacggtggtggcagccctcctggcaccaggggtcctggagcaagtgtgcacgaccgtaacgccaattcttacgtcatggtgggtactttcaatttgccttccgatgggagcgccgtagacgtccacatcaacatggaacaggcccctattcaaagtgagccccgcgtccgcctcgtcatggcccagcatatgatcagagatatccagactcttctatcgaggatggagtgtaggggaggaccacagccccagcactcacagcctccgccacagccacccgccgtgactccggagcctgttgctctgagttcacagacatctgagcctgtggaaagtgaggctcctccccgggagccaatggaggctgaggaggttgaggaaagggcccccgcccaaaatccagaactcaccccaggaccagccccggctggcccgacccccgcgcctgagaccaacgcccccaaccacccatcacccgctgaatacgtggaggtgttgcaagaactacaacgattggaaagcaggctacagccatttctgcaacgctactacgaggtcttaggcgccgccgcaacaaccgactataataacaaccacgagggcagggaggaggatcagcgtctcatcaacttagttggtgaatctctgcgcctgctggggaacactttcgtcgcattatctgaccttaggtgcaacttggcttgcaccccacctcggcatctccacgtggtaagacccatgtcacactatacaacacccatggtgctgcagcaagccgccattccgattcaaattaacgtgggaacaactgtgaccatgacaggaaacgggacccggccccccccaacccctaacgccgaagcacctcccccaggccctggtcaagcctcttcggtggcccccagttccactaacgtagagagctctgccgaaggcgctccgccgccggggcccgctccgcctccagctacaagtcaccccagggtgattaggatctctcaccagtctgttgagcccgtagtaatgatgcacatgaatattcaagatagtggaacacaacctggcggggtccctagcgccccaaccggcccgctgggacccccgggccatggtcagaccctgggaagcacactgattcagttgccttctttgccacctgagttcatgcacgctgtggctcaccagattacccatcaggccatggtggccgcagtggcctcagccgccgctggccaacaggtgcccgggtttccaactgcacccaccagggtcgtcatcgctcgaccaacccctccccaggcccgcccttcccatcctggcggaccccctgtgagcggtactctccagggtgccggcctggggaccaacgccagtctcgcccagatggtttcaggccttgttggacagctgctgatgcaacctgtcctcgtggcccagggtacccctggaatggctcccccccctgcccccgcgacggcctctgcctcggcaggtactaccaatactgccactactgccggccccgctccgggaggaccagcgcagcctcctcccacaccccagccttcgatggcagacctgcagttttctcagcttctgggcaacctcctgggacccgccggtcccggcgccggtggaagcggcgttgcgagtcctacaataactgtcgcaatgccaggcgtgccagccttcttgcaggggatgactgacttcctgcaggccacacagaccgctcccccccccccaccacctccacctcccccacctccagccccagagcagcagactatgccaccacccggatctccctccggaggggcagggtctcccggcggactgggattggagagcctgtctcccgagttctttacctcggtggtgcaaggcgtgttgtcaagtctgctgtag

SEQ ID NO: 305289 - DNA, 2232 bp, Artificial Sequence
  derived and/or modified sequence
atggagcccaacgacagcaccagcaccgccgtggaggagcccgacagcctggaggtgcttgtgaagaccctggatagtcagaccaggacatttattgttggggctcaaatgaatgtcaaggagttcaaagagcacatcgccgcatcagtgtctatcccaagtgagaagcaaagactgatctaccaaggtagagtgctgcaggatgacaaaaaactgcaggaatacaatgtgggtggcaaggtcattcatttggtggagagggcccctcctcagacccatctgccttcaggtgcgagtagcggcacgggatccgcaagtgcaactcacggcggagggtcacccccaggcaccagaggacctggagcctctgtgcacgacagaaacgcaaatagctatgtcatggtcggcacttttaatttgccgtccgacggcagcgccgtcgatgtacatattaatatggaacaggctcccattcaatctgagccaagagttcgtcttgttatggcacaacacatgataagagacattcaaactctgctgagtcgaatggagtgcaggggcgggcctcagcctcagcactctcagcctccaccacaacctcccgcggtgacacctgagcccgttgccctgagctcacagactagcgaaccagtggaatctgaagctcctccccgagagcctatggaagcagaggaagttgaggagcgtgcaccggctcaaaatccagaacttactcccgggccagcacctgcaggccctacccctgcccccgagacgaacgctccgaaccatccttcgccagctgaatatgtggaggtcttgcaggaactccaacgtttggaatctcggctccagcctttcctgcagcgctactacgaggttttgggtgccgcagcgaccacggactataacaataaccacgaagggcgcgaagaggatcagcgcctgatcaatctcgtgggggagtcactaaggctgctcggaaatacgttcgtggccctctctgacctccgctgcaatctggcttgtacccccccaagacacttacacgtggtgcgccctatgtcacactacaccactccaatggttcttcagcaggctgcaattccaatccagatcaacgtgggcactacagtgactatgaccggaaatggaacacggcctccccctactccaaatgctgaagcccccccccctgggcccggacaggccagctccgtcgctccgtcttcaactaacgtagagtcctccgcagaaggcgcacctccccctgggccggctcctcctccagccacaagccacccacgagtaatcaggatcagccaccagagcgtggagccggtcgtcatgatgcatatgaacatacaggacagcggcacacaacctgggggagttccctccgcaccaaccgggcccctcgggccacccggacacggacagacacttgggagcaccctgatccagcttccttctctgcccccggagtttatgcacgctgttgcccaccagatcacgcaccaggccatggtagccgcagtggcctccgcggcggcagggcagcaagttccgggctttcctacggcccctaccagggtcgttatcgcccgtccaactcctccgcaggcaagaccttcccacccagggggaccgccagtgagtggaacccttcagggagccggactcggtaccaacgcgagtctagcccaaatggtcagtggactggtgggccagctgctgatgcaacccgtgctggtcgcgcagggcactccaggcatggccccaccgcctgctcccgcgactgcctcagcttctgccggcacgaccaataccgccacgacagccggacctgctcccggtggaccagcccagcctccccccactcctcagccaagcatggctgatttgcagttctctcagctgctcggcaacctcctcggccctgctggaccgggagcaggcggcccgggagtggcctccccgacaattaccgtcgctatgcctggcgtccccgccttcctgcagggaatgaccgatttcctccaggctacacaaacagccccacccccacctccaccacctcctccaccgcctcctgcccccgagcagcagacaatgcctccgcctggttcaccttccggtggggcgggttctccgggaggattgggacttgaaagtcttagccccgagttctttacttctgttgttcagggggtgttaagcagtttgttgtag

SEQ ID NO: 305290 - DNA, 1548 bp, Artificial Sequence
  derived and/or modified sequence
atggagcccaacgacagcaccagcaccgccgtggaggagcccgacagcctcgaagtgctcgtaaaaacgttggacagccagactcgcacattcatcgttggtgcacagatgaatgtcaaagagttcaaggaacatatcgccgcgagcgtgtccataccctctgagaagcagcgtcttatctatcaggggcgagtgctgcaggatgataagaagcttcaagaatacaatgtgggcggcaaagtcattcacctggtggaaagagcccctccacagactcacctgccttccggcgccagttccggaacggggagcgccagcgccacacacggtggaggcagtcccccagggacccgaggacctggcgcttccgtgcacgaccgcaatgccaacagctatgtgatggtcggtacgttcaacctgccctctgatggcagcgcagtggacgtgcatataaacatggagcaagctcccattcagtccgaacctcgcgtgcgactcgtcatggcccaacacatgatccgtgacatccaaacattgcttagccggatggaatgccgaggtggtccacagccacagcactcacagccacctccgcaacctcctgctgtgacacctgaacctgtcgcactgagcagccaaacctctgagccggtggaatccgaagcacccccccgtgagcccatggaggccgaggaagtggaggagcgagcaccagcgcagaatccggagctcaccccaggccccgcccctgctgggcccacacccgcgcccgagacaaatgctcccaatcatccgtctcccgccgagtacgtggaagttctccaggagttgcagcgtttggagtcccggttgcagcctttcttgcagcgctactatgaagtgctaggggctgccgccaccaccgattacaataacaatcacgagggccgtgaggaggaccaacgcttgatcaatctggtgggcgaaagcttacgtctactgggcaacacttttgtcgctctttctgatctcagatgtaatctagcctgcacccctccacgccacttacacgtagtgcggccaatgagccactacactacacccatggtcctgcagcaggctgctatcccaatccagattaatgtgggaaccaccgtgaccatgacaggcaacggcactcgccctccccccacaccaaacgcagaagccccccccccaggtccaggacaagcttcctctgtcgccccttcaagcacaaatgtggaaagctctgcagagggcgctcccccccctggccctgcacctcctcctgccacctcacatcccagggtaatccgtataagccaccagtccgtcgagccagttgtgatgatgcacatgaatatccaggactctggaactcagcctgggggcgtcccatctgcaccaacgggaccactgggccctcctggacacggccagacactcggctctaccctgattcagctgcctagcctcccaccagagttcatgcacgccgtggctcatcaaatcacccaccaggcaatggtggccgcagtagcgtcctag

SEQ ID NO: 305291 - DNA, 1548 bp, Artificial Sequence
  derived and/or modified sequence
atggagcccaacgacagcaccagcaccgccgtggaggagcccgactccctcgaagtcttggttaaaactcttgattctcagactcgaaccttcatcgtcggcgcacagatgaatgtcaaggagttcaaagagcatattgccgccagcgtgagtattccaagtgagaagcaaagactgatctatcaagggcgagtcctgcaggatgacaaaaagttacaggagtacaacgtgggaggaaaagtcatacatttagttgaacgcgcccctccgcagacccacctaccctctggcgcgagcagtggcactggatctgctagtgccacccatggcggggggtcacctcccggaacgcgagggcccggcgcttccgtgcacgataggaacgccaatagctatgtcatggttggaacttttaaccttcctagcgacgggtcagctgtcgatgtccacatcaacatggaacaagctcccatccaaagcgagccaagggtgagacttgttatggcacagcacatgatcagagatatccagacactgctgtcaaggatggaatgccggggaggaccgcaacctcagcatagccagcctcctcctcagcctcctgccgtcacgcccgaacctgtggcgctgtctagccagacctccgagcccgtggagtcagaagccccacctcgggaacccatggaggcagaggaggtcgaggaacgcgctcccgcccaaaacccagagctgactcctgggcccgcgccagcaggccctactcctgcccctgagacaaatgcccccaaccacccatccccagccgagtatgtggaggttctgcaggagttgcagagactcgagagccggctccaacccttccttcagcggtattacgaggtgcttggggccgctgctactaccgattacaacaacaatcatgaggggagagaggaggatcagagactaatcaacttagttggtgaatctctgagacttctcgggaatacattcgtagctttatcagatctgagatgtaatctcgcttgtacacccccccggcatcttcacgtcgtccgacccatgagtcactatacaactcccatggtactgcagcaggctgccattccaattcaaatcaacgtaggaactaccgtgaccatgacaggaaacggaacgcgcccacctcctacgccaaacgcggaggcccctccacctgggccaggtcaggctagcagcgtagctccttcttccacaaatgtggaaagtagcgccgagggggcacccccccccggcccagcccctcccccagctacctcccaccctcgcgtgattcggattagccaccagagtgtggagcccgtggttatgatgcacatgaatattcaggacagcggcacacaaccaggcggggttccctctgctccaacaggaccactcggcccacctggccatggccagacgctggggtccaccctgattcagctgccctcactgccccctgagttcatgcatgcagttgcccatcagattacacatcaagccatggtcgcggccgttgcctcctag

SEQ ID NO: 305292 - DNA, 1548 bp, Artificial Sequence
  derived and/or modified sequence
atggagcccaacgacagcaccagcaccgccgtggaggagcccgactccctcgaggtgttggtaaaaacattggacagccagacacgcacattcattgtgggggcacagatgaacgtgaaggaattcaaagaacacattgcagcatctgtgtcaatcccatccgagaaacagcgcctgatctatcagggccgggtcctccaggatgacaagaaactgcaggagtataatgtgggcggaaaggtgatccatttggtggaaagagcgcctccccagacccatctgccctccggcgccagctcaggaacaggaagtgccagtgcgacccacggcggcggttcacccccaggtacccgcgggccaggagcatcagtgcacgacaggaatgcaaattcttatgttatggtcggtacttttaacctgccatcagacgggtccgcagttgatgtccatatcaacatggaacaggctccaatccagagcgaaccaagggtccgcctggttatggcccagcacatgatcagagatattcaaaccctgctgtctcgaatggagtgccgcggtgggccacagccacagcactcacagccacctccacaacctcccgccgtcacaccggaacccgtagccctgtctagccagacatccgagcctgtcgagagcgaagcaccgcctcgtgaacctatggaagcggaagaggtggaggagcgagcacccgcgcaaaatccggagttgacacccggccctgcacctgccgggccaacccccgccccagagacgaacgctcctaatcatccctctccggctgagtacgtagaggtcttgcaggaacttcagcggctggaatccaggctccagcctttcctccagcgatactacgaggttctgggagctgccgcaacaactgattacaacaacaatcacgagggcagagaggaagatcagaggctcatcaatttggtgggggaaagtctgagattgttgggcaacactttcgttgcactcagcgaccttcgttgtaatttggcgtgcactccaccaaggcaccttcatgtcgtgcgacccatgtctcattataccactcctatggtactgcaacaagcagcaattcctattcagatcaatgtgggtaccacagttactatgacagggaatggaacaagaccaccgccaactccaaatgctgaagctccccctccaggccccggccaggcttcaagcgtggcccctagttccaccaatgtggagtccagcgccgagggagctccgccacctggccctgcacccccccccgctactagtcacccaagggtgatccggatctcacaccaaagtgtggagccagtcgtcatgatgcacatgaatatccaggactcaggtacgcaaccggggggggtgcccagcgctccaacagggccactgggcccacctggacacggccagaccttagggagcactctgatacaactgccttctcttccaccagagttcatgcacgctgtcgcccaccagattacccatcaagccatggtcgccgccgtggcaagctag

SEQ ID NO: 305293 - DNA, 2232 bp, Artificial Sequence
  derived and/or modified sequence
atggagcccaacgacagcaccagcaccgccgtggaggagcccgactctctggaagtgctcgtgaaaactcttgactctcagactcgaacctttatagttggcgcgcaaatgaacgtcaaagagtttaaggaacacatcgccgcgtctgtgagcatacccagcgagaaacagcggctgatctaccagggcagggtgttgcaggatgataaaaagctccaggagtacaatgttggcggcaaggtgatacatctggtggagcgagctcctccccagacacatctcccatccggcgcttctagtggtaccggatcagccagtgccacacacggcgggggcagtccacctggtacaaggggccctggtgccagcgtgcacgaccgcaacgcgaactcgtatgtcatggtgggaacctttaacctcccgagcgatggttctgccgtcgatgtgcacattaacatggagcaagccccgattcagtcagagcctagggtccgtttggttatggcacaacatatgattagggatattcaaaccctactatccaggatggaatgccggggtggtccacagccacagcatagccagccacccccacagccaccagccgtaacgccagagccggtcgcactgagttctcagaccagcgaacccgtcgagtccgaggctcctcccagggagccaatggaggcagaggaagtggaagagagagctcctgcacagaaccctgagctaacaccggggccggcaccagctgggcctactcccgctcctgagacaaacgctcccaatcatcctagcccggccgaatatgtggaggtcctccaagagttgcagaggctcgaaagtagactacaacccttcttgcagcgatactatgaggtgctaggggctgctgccaccactgactataacaacaaccacgagggccgagaggaggaccagcggctcattaatctggtgggcgaatctttaagactgttggggaacaccttcgtggcgctaagtgaccttaggtgtaacctggcatgcacaccaccacggcacctgcatgttgttcgacctatgagccattacaccacgcccatggtgttacagcaggccgccatccccatccagataaatgtgggaaccacagtcaccatgacgggcaacggtacgcgtcctcctcctaccccaaacgctgaagcacctcctccaggccccggccaggcatcctccgtcgccccctcttctactaatgtggaaagcagtgccgaaggggctccccctcctggccccgctccaccacccgccactagccacccacgcgtgattcgaatctcccaccagtctgttgagcccgtagttatgatgcacatgaatattcaggattcaggtactcagccaggtggcgttccttcagcccccaccggcccactcggccctccaggccatggtcagacccttggatcaacactgatccagttgccatccctgcccccagaatttatgcacgctgtcgcccatcaaattacacaccaggctatggtcgccgccgtcgcaagtgcagcagcaggccagcaagtgcctggatttcctaccgccccaacgcgcgtggtgatcgccaggcccacaccaccccaagccaggccgagtcatccgggtggtcctccagtgtcaggtaccctgcagggagccggtctggggactaacgcctcgctcgctcaaatggtaagcggtctggtggggcagctgctgatgcagcctgtcctagttgcgcagggtacaccaggcatggcccctccacctgctccagctaccgccagtgcgagcgcaggcaccacaaatactgccacaaccgccgggcccgcccccggcggcccagcccagccccccccaacccctcaaccttcaatggccgacctgcagttcagtcagctgctaggcaatctactggggcctgccggcccgggggctgggggtccaggtgtggctagcccaaccataaccgtagccatgcctggcgtaccagcgttccttcaggggatgaccgacttcttacaggcgactcagaccgccccacctcctcccccacctccgccaccacctccgccggccccagagcaacagacgatgccaccccctggcagtccctcaggaggtgcaggctcacctggcggcttggggctcgaatcactgtcccccgagttttttacctccgtcgtgcagggagtgttgtctagccttctgtag

SEQ ID NO: 305294 - DNA, 2232 bp, Artificial Sequence
  derived and/or modified sequence
atggagcctaatgactcgacatccaccgcggtggaagagcccgacagcctagaggtgctagtgaaaactcttgactcccagactaggaccttcatagtgggagcacagatgaacgtgaaggaattcaaagagcacatcgccgcaagtgtctctattccaagtgaaaagcagcgtcttatctatcagggaagagttctccaggatgacaagaaattgcaagagtataatgtgggcggaaaagtgatacacctggtagagagggccccaccccagactcatctccctagcggtgcttcaagcggaactggctccgcatctgccacccatggtggagggtcgccacctggaaccagaggcccaggggcttccgtccacgatagaaatgccaattcttatgtgatggtcggaactttcaatctgccaagtgacggatccgccgtggatgtgcatattaatatggaacaggctcctatccagtccgaacccagggtccggcttgtgatggctcagcatatgattagagatatccagacactcctctctagaatggaatgcaggggaggccctcagccacaacacagccagcccccaccccagccacctgctgttactcccgaacctgtcgcactcagtagtcaaacgtctgagcccgtggagagcgaggcccctcccagagagcccatggaggccgaagaggtggaagagagggcccctgctcagaatcccgagctgaccccaggccctgcgccagcgggtccgaccccagctccagaaacaaacgccccaaaccatccgtccccagcagagtatgtcgaagtcctccaggaattgcagcgcctcgaaagtcgcctgcagccattcctgcaaagatactatgaggtgctaggcgctgcggctacaactgattacaacaacaatcacgagggtagagaggaggatcagcggcttatcaatttggtgggggaatctctgagattgcttggaaatacattcgtcgcccttagtgacctcaggtgcaatttggcctgcacacctccgcgtcacttacacgtggttcgccctatgtcacattataccacaccaatggtgttgcagcaagccgctatccctattcagattaatgttggcaccacggttactatgacaggcaacgggacacggcctcccccaactcctaatgccgaggctcccccaccaggccctgggcaggcctcgtcagtggcgccaagttccacaaacgttgaatcttccgcagaaggggctcctccccctggtccggctcctccacctgccacgagtcacccccgagttattcgaatctcacatcagtctgttgagcccgtggtaatgatgcacatgaacatacaggactctggcacgcagcctgggggagtgccctctgcacctaccggtcctttgggtccacctgggcatggtcaaactctaggatccactctgattcagctgccctcccttccgcctgagttcatgcacgccgtcgcccaccaaattacccaccaggcaatggttgcggctgtggccagcgcagctgccggacagcaagtgcctggattcccaacggcccctactagggtggtcatcgcccgtccaacaccgccacaagctcgcccaagtcaccccggaggacctccggtttcaggcaccctccagggagctggcctcgggacaaatgcaagtttggctcagatggtctccggacttgtagggcagctgcttatgcagcccgtcctcgttgcccaggggacccccggaatggctccaccccctgcgccagcgacagcgagtgcctcagctgggaccactaatacggctacaaccgccggtccagcacccggaggcccagcacagcccccacctacaccgcagccaagcatggcggacctgcagttttcacagctgcttggaaacctgctgggccctgcagggcctggcgctggcggtcccggagttgcaagtccaaccattactgtagccatgcctggagttccagccttcttgcagggtatgactgatttcctgcaggcaacccagactgccccaccgccaccccctccccctccacctcctcctcctgctccggaacagcagaccatgccccctcctggatcccctagcggtggtgccggtagtccaggtggcttgggattggaaagccttagtcccgagtttttcacttctgtggtgcagggagtactctcttccctgctctag

SEQ ID NO: 305295 - DNA, 2232 bp, Artificial Sequence
  derived and/or modified sequence
atggaaccgaatgactccacttctaccgccgtggaggaacccgacagtctggaggtgctggtgaagaccctggactctcagacccgtaccttcattgtgggggcacaaatgaatgtgaaggaatttaaggaacacattgctgcgtctgttagcatcccctccgaaaaacaacggcttatatatcagggcagggtcctgcaagacgacaaaaagctgcaggagtacaatgtggggggtaaagtgattcatttggtggagcgggcaccaccacagacacacctcccatctggagccagctctggcactggttccgcgagtgctacccatgggggagggagcccccctggaacccgaggtccgggagcctccgtgcatgacaggaatgctaattcctacgtaatggtgggaacctttaacctgccttccgacggatccgccgtagacgtccacattaacatggagcaagctccgatacaaagcgaacctcgcgtgcggctggtcatggcccagcacatgattagagatattcagaccctgctgagccggatggagtgtagagggggtccccaaccgcaacacagccaaccaccaccacagccaccggctgtgacgcccgagcccgtggcgcttagctctcaaaccagcgagcctgtggaaagtgaggcccctcctcgggagcctatggaggctgaagaagtcgaagaacgggctcccgctcagaatcctgaattaacaccaggacccgctcctgctggccctactcctgccccagagacaaatgctcctaatcacccaagccccgctgaatatgttgaggtgttacaggaattgcagcgcttagagagcaggctacaaccgtttctgcagaggtattatgaagtgctgggtgctgccgctacgacggactataacaataatcacgaggggagagaagaagatcaaaggttgattaatctcgttggagagtccctcaggctgctggggaacacctttgtagccttgtcagacttgcgctgtaacctggcctgcacacccccacgccacttgcatgtggttaggccaatgagccactatacaaccccaatggtccttcagcaggccgctatccctatacaaattaacgtcggaacaacagtaaccatgacaggcaacgggacgagaccaccccctacacccaacgcagaagcccctcctccaggccctggccaagcaagtagcgtggccccttcctctaccaacgtggaatcctctgctgagggcgcacctcctccaggacctgcccctcctcctgcaactagccacccaagagtgattcggatcagccatcagtctgtcgagccagtcgtgatgatgcacatgaatattcaggacagtggaactcagcccggaggagtgcccagcgcccctacaggtccattgggacccccaggtcatggacagaccttaggcagtactctaatccagctcccttcattgccccctgagtttatgcacgcagttgcacatcagatcactcaccaagccatggtcgctgcagtggcctcagccgcagccggacaacaggttcccggtttcccaacagcccctactcgcgtggtgatcgcacgccctacaccacctcaggctcgtccttcacatccaggaggcccacctgtgagcggcactttgcagggagcaggactgggcacaaatgcaagcctggcacagatggtgtcgggcctggtcggtcaactgctgatgcagccagtgcttgtcgctcagggcactccaggaatggctccacccccagcacctgcaacagcatcagcatccgcaggaaccacaaatacagccacaaccgccggaccggcacccggtggacctgctcagccaccacctaccccccaaccctctatggcagatctgcaattttctcaacttctgggcaacctgttggggccagccggacctggagcgggaggtagcggggtcgcgtcccccactatcacggtagcaatgccaggggttccagctttcctgcagggtatgacagattttctgcaggcgacgcaaacagcccctcctcctccacctccccctcctcccccacctccagcgccagagcagcaaacaatgccccctcctgggtcacccagcgggggagccggatccccgggaggtctgggactagagagcctctcgccggagttttttacgtctgtagtgcagggggtgttgagctcgctcctctag

SEQ ID NO: 305296 - DNA, 1548 bp, Artificial Sequence
  derived and/or modified sequence
atggaacctaacgattcgacatctacagcagtggaggagcccgattctctggaggtgcttgtcaaaactttggactcccagacccgtacatttatcgtcggagctcaaatgaatgtcaaagaatttaaggaacatatcgctgcatccgttagtatcccctccgagaaacaacgcttgatttaccaggggcgtgtgctccaggatgacaagaaactacaggaatacaacgtgggcggaaaagtgattcacctggtggaacgcgcacccccacagacacatctgccatcgggagcctcctcagggactggatccgcctcagccacccacggaggcggatcaccaccaggaactcgaggacccggagcttctgtccacgaccgaaatgcgaattcttacgtgatggtgggcactttcaatcttccgtctgacgggagcgctgtggatgtccatattaatatggagcaggcacccatccagtcagagccgagggtccgtcttgtgatggctcagcacatgattagagatattcaaaccttactttccaggatggagtgtcgagggggtccacagccccaacatagccagcctccccctcagccacccgcagtcactccagagcctgtggcgcttagcagtcagacaagcgaaccggtggaaagcgaagccccaccacgcgaacccatggaggccgaagaagtggaagaaagggcaccagcccagaacccagagctgacccctggaccggctccagccggtcccacccctgcgccagaaactaatgcccctaatcatccgagtcccgctgaatatgtagaagtgttgcaggagctgcagaggctcgaaagcagactacagccatttctgcaacggtattacgaggtgctgggcgcagcggctaccactgactacaataataaccacgaaggaagggaagaagatcagaggctgatcaatctcgtcggtgaaagcctccgactactgggaaacaccttcgttgcactgtccgatctcaggtgcaatctggcctgcactcctcctagacatctccacgtcgttcgccctatgtctcactacacaaccccgatggttctgcagcaagccgcaattcccattcagatcaacgtgggaacaaccgtgactatgacaggcaacgggacgcgcccaccccctacacccaacgctgaggcccctcccccaggcccaggccaggcctccagcgttgctccaagctcaactaatgtggagtccagtgcagaaggggctcctccgcctggcccagctccaccccctgccacttctcaccctcgagtgatcagaatatcacatcagtcggtggagcctgtagtcatgatgcacatgaacatacaggactccggcacacaaccaggaggggtgccatctgctcctactgggccattagggccacccggtcacggccagactctcggatctactctgatccagttgccatctctgcctcccgagttcatgcacgctgtggcgcatcaaataacacaccaggcaatggttgctgccgtcgcttcttag

SEQ ID NO: 305297 - DNA, 2232 bp, Artificial Sequence
  derived and/or modified sequence
atggagcctaatgacagcacctctaccgccgtcgaggaaccagacagcctggaagttttagtcaaaacattagattcccagacacgcacatttattgtgggagctcagatgaacgtgaaagagttcaaagagcatatcgctgcgtctgtgtcaataccctctgaaaagcagcgcttgatctaccaaggacgtgttcttcaggatgacaaaaagctgcaggagtacaatgtgggtggcaaggttatccatctggttgaaagagccccaccccagactcacttacccagtggcgcaagtagcgggacaggttccgcctctgcaacccatggaggtgggtctcctccgggtactcggggaccaggcgcatcggttcatgatcggaacgctaattcttacgttatggtcggcacctttaacctgccctccgacggatccgctgtcgatgtgcatataaacatggagcaagcccctatccagagcgagcccagagtgaggctggtcatggcccagcacatgatccgtgatatacaaacgttgctttcgagaatggagtgtagaggtggaccccagcctcagcatagccaacctccccctcagcctccagcagttacaccagaacctgtcgctttgtcgagtcagactagtgaaccagtggaaagtgaggcaccgcctcgggagcccatggaggccgaagaagtggaggaaagggcccctgctcagaaccccgagctcacaccaggccctgctcccgctgggcctaccccggcacccgagactaacgcaccaaatcatccgtcccctgccgaatacgtggaagtgttacaagagctgcagaggctggaaagtcggctacagccttttttgcaaagatactacgaggtgcttggtgcagccgctacaaccgactataataacaatcacgaggggagggaagaggaccagagacttatcaacttggtcggtgaaagtctgcgtctcctggggaacactttcgtcgccctctccgacctcaggtgtaatctcgcgtgtacgcctcctagacatctgcatgtagtccggcctatgtcacattacaccactccgatggtgctgcagcaagcagccatccctatccagatcaatgtcggcactaccgtgaccatgactggtaatgggacccgcccaccgcctacacctaatgcagaagcgccacctcccggaccaggccaggctagctcagtagcgcctagctccacaaacgtggagtctagcgcggagggggcacctcctccaggccctgcgccaccacctgccacctcacatcccagggtgatcagaatcagccatcagtcagtcgaaccagtggtgatgatgcacatgaatatccaggattctggcactcagcccggaggagtgccgtccgccccaaccggtcctctcggacctcccggtcacgggcagaccctcggatccaccctaattcagttaccatcgcttcctccggagttcatgcacgctgtggcacatcagatcacacatcaggctatggttgctgctgtcgcttcagctgcggctggacaacaggtgcctgggttcccaactgcgcctacccgcgtggttattgcgagacctaccccccctcaggcacggccatcccatccaggagggcctcctgttagcggtaccctacagggagctgggcttggaacgaacgcttccctggcgcaaatggtcagcggcctagtcggacagctgctgatgcagccggtgttggtcgcccagggaacaccaggaatggcccctcctccagctcctgcaactgcttcggcttcggcaggaactactaatactgcgactacagcaggcccagccccaggcggtcccgctcagccgcctcccacgccgcagccaagcatggccgacctgcagtttagccagcttcttgggaacctgttggggccagccggacccggagctggcggttccggtgtcgctagcccaacgattaccgttgccatgcccggagtgcctgctttcctacaggggatgaccgacttcctgcaggcgacacaaaccgcccctccccctccaccaccccctccgcctcccccaccggcacccgagcagcagacaatgccccctccagggtctccgagtggtggggctgggagccccggaggtctgggccttgaaagtctctcacccgagttcttcacaagtgttgtacaaggggtactgtcctcactcctctag

SEQ ID NO: 305298 - DNA, 1548 bp, Artificial Sequence
  derived and/or modified sequence
atggagccaaatgacagtacctcaaccgcagtggaggaaccggattctctggaggtgctcgtcaagactctggatagccagactagaacattcatcgtgggggctcagatgaatgtcaaggagtttaaagagcatatcgcggcttcagtgtctatccctagtgagaagcagaggctcatttaccaaggccgtgtcctccaggatgacaagaagctgcaggaatacaacgtaggaggcaaggtaatacatcttgtggagagggcacctccgcaaacacatttgccatccggcgctagcagtgggaccggctcagccagcgctactcacggaggcggatcaccccctggcacccggggaccaggcgcaagcgtgcacgatcgcaacgccaactcgtacgtgatggttggaacctttaacctccccagcgacggcagcgccgtggacgtccatattaacatggagcaggctcctattcagtctgagcctcgggtaaggttagttatggcccaacatatgattagagatattcagactcttctgtcaagaatggagtgtcgtgggggaccacagccacagcacagccaaccgcctccccagccccctgcagttactcctgaacctgtggcacttagctcccagacgtctgagcctgtggaaagtgaggccccacccagagaaccgatggaggccgaagaagttgaggagagagcaccagcccagaatcccgaactaacaccgggtcctgctccggctggcccaacccccgctccggaaacaaatgctcccaatcacccctcccccgcagaatacgtcgaagtgttgcaagagctccaacgtctggaaagccggctgcaaccattccttcagcgatactatgaagtgctgggcgcagctgcaacaaccgactacaataacaaccatgagggccgtgaggaagatcaacgcctgatcaacctggtcggggagtccctgcgcttacttggcaatacatttgtggcacttagtgatctgcggtgtaatttggcgtgcactccgcctcggcatctgcacgtagtgcgacctatgtcccactacaccacgccaatggtgcttcagcaggccgcaattcccatccagattaatgtcgggacgactgtcaccatgactgggaacggaaccaggccaccgccaactcccaatgctgaggccccacccccaggcccagggcaggcctcttcagtggcgccatcatccacaaacgtggaaagttcagctgagggagcaccccctccaggcccagctcctcctccggcaaccagtcatccgcgtgtaatccggatatcccatcagtctgtcgagcccgttgtgatgatgcatatgaacatccaggatagtgggacccagccagggggtgtgccctctgcacctacaggtcctctggggcctcctggccacggacagacgctcgggagtaccttgatccaattaccttctctcccgccagagtttatgcatgcagtagctcaccagatcacacatcaggcgatggtggccgcagtcgctagctag

SEQ ID NO: 305299 - DNA, 1548 bp, Artificial Sequence
  derived and/or modified sequence
atggagcccaacgattctacatccacggccgtggaggagcccgactccctggaagtgttggtgaaaacccttgattctcagacaaggaccttcatcgtgggggctcagatgaacgtcaaagagtttaaagagcatattgcggcatcggtgtccattcctagcgagaaacagcgcctaatttaccagggacgagtcctccaagacgataagaagctccaggagtataatgtgggcggtaaggtgattcatctggtcgaacgggctcctccacagacccacctcccgagtggagcctcatcggggacaggttcggcgtctgccacccacggaggtggctctccccctggcacacgaggtcccggagctagcgttcatgatagaaacgcaaactcttacgtaatggtaggcacatttaatctgccgagtgatggatcagccgttgacgtgcacatcaatatggagcaggcgcctattcagtcggagcccagagttagactggtcatggctcagcacatgattcgggacattcaaacattattatctagaatggaatgccggggtggaccccagcctcaacattctcagccacctcctcagccaccagccgtgacacccgaacctgtcgcgttatcatctcagacctctgagccggtggagtctgaagccccaccacgagagccaatggaggccgaagaggtggaagaacgcgcaccagctcagaatcctgaactgactcctgggcctgcccctgcgggacccacgccagcaccagagacaaacgccccaaaccaccccagccccgcagaatacgtggaagtgctgcaggaactccagaggctggagtccagacttcaacccttcctacagagatattatgaggtactgggcgctgctgctaccactgattacaataacaaccacgagggccgagaagaagaccagagattaatcaacctggtgggggaaagtttaaggctcctaggcaacacatttgtagctctttcagacttgagatgtaatcttgcctgcacacctccgaggcacctacacgtcgttagacctatgagccactatactaccccaatggtactccagcaggccgctatccccatacagataaacgtcgggacaactgtgacaatgaccggaaacggcacaagacctcctcctactcccaatgccgaagcacctccaccaggcccaggacaggcatcctccgtggccccttccagcaccaatgttgagtcaagcgcagagggggctccgcctcccggaccggctcccccacctgctacttctcacccacgggtgatcagaatcagccaccagtccgtagaaccagttgtgatgatgcatatgaatatacaagatagcggcacgcagccaggcggtgttccttccgcccctaccggccctctcgggcctcctgggcatgggcagacgctggggtcaactctgatccagctgccctcattgccccctgagttcatgcacgctgtggcgcaccagatcacccaccaagctatggtcgctgctgtagcttcttag

SEQ ID NO: 305300 - DNA, 1548 bp, Artificial Sequence
  derived and/or modified sequence
atggaacctaacgatagcacctctacagccgtggaagagcccgactcgctggaggtgctggtcaagacacttgattcccagacacgtactttcattgtgggcgctcagatgaatgtgaaagaattcaaagagcacatcgctgcctctgtatccattccatcagaaaagcaaaggctgatataccaagggagggtgctgcaggatgataagaagctccaagagtataacgtgggtggcaaggtcatccatctcgtggagagggcccctcctcagactcacctgccctccggagcatcctcaggaacaggaagtgcctccgccacacatggaggcggttcgcccccagggacccgaggaccaggcgcatctgtgcacgaccggaatgccaactcttacgtaatggtaggtactttcaacctaccgtctgatggctcggctgtcgacgtgcacataaatatggagcaggcacctatccagtctgagccacgtgtcagattagtgatggcacagcacatgattcgcgatatacagacactactttcaaggatggagtgccgcggaggaccccagccccaacactcgcagccgccaccacagcctccagcagtgacgccagaacctgtcgctctcagtagtcagacgagcgaacccgtagagtcggaagctccccctagagagccaatggaggcggaggaagtggaggagagagctccagcccagaatcctgagttaacaccagggcctgctcctgccggtcctacaccagcacctgaaaccaatgcccctaatcaccctagccctgcagagtacgtggaagtattgcaagagttgcaaagactggagtcacggctgcaaccattcctccagagatactacgaagtgctcggagccgcagcgaccacagactacaacaacaaccatgagggaagggaggaggaccagagattgattaacttggtcggagaaagtcttagacttttaggcaataccttcgttgctttatctgacctgcgctgcaacctagcctgtaccccaccgagacatctgcatgttgtcaggccgatgtcccactatactaccccgatggtgcttcagcaggcggctattcctatccagataaatgtcggcaccacagtgactatgactggaaacggcacacgccctccacccaccccaaatgcggaagctccaccaccaggaccgggacaggcaagttcagtcgcgccaagctctacaaatgtggaatcctcagcagaaggagccccaccacctggtcccgcacccccacctgccacctcccacccacgcgtcatcagaatcagccaccagagtgtggaacccgtggtcatgatgcatatgaatattcaggattccggcacccagccagggggagttccctcagctccaactggaccactggggcctcccggacacggacagaccctggggtccacactgatccaactgccctctctccctcccgagttcatgcacgcggttgctcaccagattacccatcaggccatggttgctgccgttgcttcctag

SEQ ID NO: 305301 - DNA, 2232 bp, Artificial Sequence
  derived and/or modified sequence
atggaacctaacgactcaactagtacagccgtggaggaacccgattcccttgaggtgttggtcaagactctagattctcagacccggacattcattgtgggtgctcagatgaatgtgaaggagttcaaggaacacatagcagctagtgtgtctatccccagcgagaaacagagactcatctatcagggtcgcgtgctgcaggacgataaaaaactccaggagtacaacgtggggggtaaggtgattcacttggttgaaagggccccacctcaaacccacctgcctagtggtgcatccagcggtaccggttctgcctctgctacacacggaggcggttcccctccgggtactcgcggtcccggtgcttccgtgcatgacagaaatgccaattcctatgtgatggtgggcacctttaacttgccaagcgatggatccgccgttgatgtccatataaatatggaacaggcacctatccagtcggaaccgagagttaggctggtgatggcgcagcacatgattcgggacatacaaacgcttctcagcagaatggaatgtcgcggaggcccacaaccccaacattcacagcctcctcctcagccacccgcagtgacacctgaacccgtcgccttaagctctcaaacctccgaacctgtggaatccgaggctcccccaagagaaccgatggaggcggaggaggtggaggagcgagcccctgctcagaatccagagctaacccccggtcctgcgcctgctggtcccacacccgcaccggagacaaacgccccaaaccacccatcccccgcagagtacgtggaagtgctccaagagttgcagcgcctggaatcaagactgcagccttttctacagcgctactatgaggttctaggagcagcggcaaccactgattacaataataatcatgaggggagggaggaagaccagagattgatcaatctggtgggggaatcacttaggctgctgggcaacacttttgtggccctctccgatctgaggtgtaatctggcctgcaccccaccccgacacctgcacgtcgtccggccaatgagtcactatacaacacccatggtcctccagcaggctgccatccccatacagatcaatgttggcaccaccgtcaccatgactgggaacgggacacgcccaccacccacccctaacgcagaagcacctccacctggacccggtcaggcatcctccgtcgcaccatcttcaaccaacgtagaaagtagtgcagagggggcacctccgcctggccctgcacctcccccagccacttctcaccccagggtcatccgaatatcccaccagagtgttgaacctgtggtgatgatgcacatgaacatccaagattcaggaactcagcccggtggcgtcccatccgcccctaccgggcctcttggccctcctggtcacggacagaccttgggcagcacactcatacagctgccttccctgccaccagaatttatgcacgccgtcgcccatcagattactcatcaggcaatggtcgctgcagtggcttccgccgctgcgggacagcaagtgcccggattccccacggcacctacaagggtggtcatcgcaagacctactcccccacaggcaagaccttcacaccccggaggccctcctgtgtctggtaccctgcagggggctgggcttggcactaatgctagtcttgcccagatggtgagcgggctggtcggtcagcttctaatgcagccggtcctcgtggcccagggcactcccggaatggcgcctccacctgccccagccaccgcgagtgccagtgcaggaacgacgaacaccgctactacagcaggcccagctccaggtggccctgcgcagccgcctcctacacctcagccaagcatggccgatctgcagttctctcagcttctgggaaatctgctgggtcccgctgggccaggtgctggcggtagcggagttgcatcaccgaccattacagtagctatgcctggagtgcccgctttcctgcagggtatgactgattttctccaggcaacacagacagctccaccccctcctcctccacctccgccacctcctccagctcctgagcagcagactatgcctccaccaggatcacctagcggaggggctggctcacccggaggattgggcctggagagcctcagtccagaattctttacttcggtagtgcagggagtactctctagcctgctttag

SEQ ID NO: 305302 - DNA, 2232 bp, Artificial Sequence
  derived and/or modified sequence
atggaacctaatgacagtacctctaccgcagtggaagaaccagatagcctagaggttttagtaaagactctcgattcccagacccggacctttatcgtaggtgcccagatgaacgtgaaggaatttaaagagcatatcgcagcctctgtctcaatacctagcgagaaacaacgcctgatttaccaggggagagtgcttcaggacgataagaaactgcaggaatacaacgtgggcggaaaggtgatacatctggtcgaacgggcaccacctcagacacacctcccttccggcgctagctctggaactggctcagcctccgcaactcacggcggaggcagtcccccaggtaccaggggtccaggggcatccgttcatgaccgcaacgccaattcttatgttatggtaggcacattcaacctgccgtccgacggctccgcagtggatgtgcacatcaacatggagcaggcccctattcagagcgaacctagagttagattagttatggcccagcacatgatccgagacatccagaccctgttatccagaatggagtgtcgcggaggcccacagccacagcatagtcagccaccgccacagcccccagccgtgacacctgaaccagtggccttgtcatctcagacatccgagcctgtcgaaagtgaggcgccacccagggagcctatggaggccgaagaagtggaggagcgtgcccctgcgcaaaacccggagcttacccccggtcctgccccagcgggacctacacccgctcctgaaaccaatgctcctaatcaccctagtcctgccgagtatgttgaggtcctgcaggaattacaacggctggagagcaggcttcagccattcttgcaaagatactacgaagtcctgggtgctgcagccacaacagactataataacaatcacgaaggccgtgaagaagaccaacgtctcatcaatttagttggcgagagcctcaggctcctgggtaatacattcgttgcactgtccgacctccgatgcaacctagcttgcacgcctccacgacatctgcatgttgtacggccaatgtcccactacaccacacccatggtgctgcagcaagcagctattcccatacaaattaatgtaggcaccaccgttacgatgaccggaaatggcacacgtccccctccaactccgaatgccgaggctcccccacctggccctgggcaggcttcctcagtcgcaccaagcagcacaaacgtcgagagcagcgccgaaggagcccctcccccaggtccagcccctcctcccgctacttcccatcctagagtaatcaggatctcccaccagtccgtggagcctgtggtcatgatgcacatgaatatccaggatagcggcactcagcctggcggagtgccatccgcccctaccggccctctggggcctcccggacacggccaaacattggggtctaccctgatccagctgccctcgctcccacccgagttcatgcacgcagtggcacaccagatcacgcaccaggccatggttgctgcagttgctagcgcagccgctggtcagcaggtgccaggttttcctactgctcccactagggtcgtaattgctcggcctactccaccccaagcgagacctagccaccccggaggccctcctgtctctggaacactgcagggggctggtcttggtaccaatgcgtccctggcacaaatggtgtccggactggtgggacaactgcttatgcagcccgtgcttgtggctcagggtactccaggtatggctccaccccctgcgccagccacggccagcgcctccgccggtactacaaatacagccaccactgcaggacctgcacctggaggccctgctcagcctcccccaacccctcagccaagtatggcagatctacaattttcacagctcctgggcaacctgcttgggccagctggaccgggagcgggaggcagcggtgtcgccagcccgaccattaccgtggccatgcccggagtgccagcctttctccaggggatgactgacttcctgcaggccacacagacagcccctccccctccccctccacccccacctcctccaccggctcctgaacagcagaccatgcctccgccaggctcacctagtggaggcgcaggatctcccggtggcttgggccttgagtccttgagtcccgaatttttcacgagcgtggtacagggagtactcagctcgctgttgtag

SEQ ID NO: 305303 - DNA, 2232 bp, Artificial Sequence
  derived and/or modified sequence
atggaacctaatgatagtacatctacagccgtggaggagcccgatagtctggaggtacttgtgaagaccctggattcacagacacggaccttcatagttggggctcagatgaacgtgaaagagtttaaggaacatatcgctgccagtgtcagcataccttccgaaaaacagagacttatctaccaaggtagggtcctgcaggatgacaaaaaactgcaggagtacaacgtgggaggcaaggtgatacacctggttgagcgcgctccgcctcagacacacctgccttcgggtgcttcatctgggactggatcagcttcagccactcacggtggcggatctcccccagggactcgcggacctggtgcgtcagtccacgaccgaaatgccaacagttatgttatggtgggaacctttaacctgccttcagatggctctgccgtggacgtgcatattaacatggagcaggccccaatccagagtgaacccagagtcaggctggtgatggcacaacacatgattagagatattcagacgttattaagtcgaatggagtgcagaggtgggcctcagcctcagcactcccagcccccaccacagccgccagccgtcactccagagcctgtcgctctgagttcccagacgagtgaacctgtggagtctgaggccccaccccgtgagcccatggaggctgaagaggtggaagagagagccccagcccagaaccctgaacttacccccggaccagcacctgccggacccaccccagccccagagacaaatgcaccaaaccacccctctcccgctgagtacgtggaggtgctgcaagagctgcagcgcctcgaatctcggctacagccctttctacagaggtactacgaggtgctgggggcagctgccacgactgattacaataataatcatgagggtagggaggaagatcagcggctgataaatctcgttggtgagtccctgcgactcctggggaacacgttcgttgcactctctgacctgagatgtaaccttgcctgtactccaccccgacacctgcatgtggtgcgacccatgtcccattacacaacccccatggtgctccagcaagctgctattcccattcagataaacgtgggaaccaccgtgacaatgacaggtaacggaactcgccctcctcccacccctaacgctgaggctccaccccctggcccaggccaggcgtcaagcgttgcaccctcttctaccaacgtagagtctagcgctgagggagctcccccaccaggaccagccccaccacccgctacctcccatcctcgcgtcatccggatcagtcaccaatctgtagagccggtcgtgatgatgcatatgaacattcaggactctggcacccagcctggtggagtccctagcgcaccaaccgggccactgggtcctcccggacacggtcagacactgggctcaacactcatacagttgccgagcctgccaccggagtttatgcacgccgtggctcaccagatcacacatcaggctatggtcgccgcagtggcttctgcagcggctggacaacaggtaccgggattccctacagctccaactagggtggtgatcgcaagacccacacctccgcaggctcgtccttcccatcctgggggtcccccagtgtcaggcactctgcaaggggcaggtctgggcacaaatgccagtctggcccagatggtctcaggcctggtgggccaactgctgatgcaaccggttcttgtagcacagggcacaccagggatggcccctccccctgcccctgcaacagcttccgctagcgcaggaaccactaacacagcgacaaccgccggtccagccccaggtggtcctgctcaacccccaccaacccctcaacccagcatggctgatctgcagttttctcagctcctgggaaacctcctgggtcctgccggacctggcgcaggagggccaggtgttgcgagtcctacaatcacagtcgcaatgcctggtgttcccgctttcttacagggaatgaccgacttcctacaggctacccagacagcccctcctccccctccaccacctcccccacctcctcccgcaccagagcaacaaactatgccccctcccggtagcccttccggaggcgctggatcaccgggtggactgggacttgagagtctaagtccagagttcttcacctcagtagttcagggggttctttcctctctcctgtag

SEQ ID NO: 305304 - DNA, 1548 bp, Artificial Sequence
  derived and/or modified sequence
atggagcctaacgacagcacatctacagctgtagaggagccggattcgctggaggtgctcgttaagacgctcgattcccagacaagaacattcattgtgggggcacaaatgaacgtgaaagagttcaaggagcacatagctgcctccgtgagcattccttctgaaaaacagagattgatttatcaggggcgagtgctgcaggacgataaaaaattgcaggagtacaatgtgggcggtaaagtgatccacctcgtggaacgcgcaccaccccagacacacctgccttccggggcatcaagcggcactggaagcgcctcggccacacacggcggtggcagtccgcctggcacaagggggcctggtgcctctgttcacgaccggaatgctaactcttatgtaatggtgggtacgtttaatctgccctctgacggctccgcagtggacgtgcacattaatatggagcaggctcccattcagtccgagcctcgcgtacgcctcgtcatggcccagcacatgatccgagatatccagactcttctcagccgaatggaatgtcgtggagggccacaaccccaacacagtcagccccctccacagccccctgccgtgacgccagaacccgttgccctgtcaagtcagacttctgagccggtggagtccgaagctccccctagagagccgatggaggccgaggaggtcgaggagcgggcaccagcccaaaatccagagctcacccccggacctgctcctgccggtccaacaccagcccctgagactaacgccccaaaccatccaagcccagcagagtacgtggaagtattgcaagaactccagcgcttggagtcacgacttcagccgtttctgcagcgatactatgaggtacttggagctgccgctacaaccgattataacaataaccacgagggccgagaagaagaccagaggttaatcaacctcgtaggagaatccttgcggctcctgggcaacaccttcgtcgctctaagcgatctacgctgcaatctcgcctgtacgcccccaaggcacctccacgtcgtgagacccatgagccattacactacacccatggtgcttcagcaggccgctatcccaattcaaattaacgttgggactacggtgactatgactggaaacggcacaagacccccaccaacaccaaacgccgaagctccccctccgggtcccggtcaagcttcttccgtggctccgagttcgacaaatgtggaaagttctgctgagggcgctcctcccccaggacccgcaccgcctcccgcaacctcacacccgagggttatcagaatcagccaccagtcagtggagcccgttgtgatgatgcacatgaacatacaggactctggaacacaacctggtggggtacccagtgcacccacgggcccactcggcccaccagggcatggtcagacgttgggaagtactctgatacaactaccatcactccccccagagttcatgcacgccgtggcacatcagatcacccaccaggccatggtcgccgctgtggcatcatag

SEQ ID NO: 305305 - DNA, 1548 bp, Artificial Sequence
  derived and/or modified sequence
atggaacctaacgactccacaagcaccgccgttgaagaaccagactccctcgaggtccttgtgaaaactttagactcccaaacaaggacttttattgttggtgcccagatgaacgtaaaagagttcaaggagcacatcgctgcctctgtttctatcccctccgagaaacaacgattaatataccagggtcgggttctgcaggacgataagaaacttcaagagtataacgtaggcggaaaggttatacatctggtggagcgcgctccacctcaaacccatctgccctctggtgcttcttctgggactgggagcgcctcggctacccacggaggcggaagccctccgggaactcgcggtccgggtgcatctgtgcacgatagaaatgcaaactcctacgtaatggtgggcactttcaaccttcctagtgacggctcagctgtagacgtgcacatcaacatggagcaagcacccatccaatccgagccgcgagtgagactcgtcatggctcagcacatgatccgggacattcagaccctcctaagcaggatggagtgtcgaggagggccacagccacaacattcacaaccccctccgcagcctccagccgttacacctgaacccgttgcactctcttcacagactagtgaaccggtcgaatcagaggctcctccacgcgagcctatggaagccgaggaggtggaagagagggctccagcgcagaacccagagctgactccgggacctgctccagccggacctacccccgctcccgaaaccaacgcacctaatcacccatcgccagccgaatacgtggaggtacttcaggagttgcagcgtctggaatcccgcctacagccttttctacagagatactatgaggttctgggagccgcagcaactaccgactacaacaacaaccacgaggggcgtgaggaagaccaaagactaattaatttagtaggtgagtcccttcgacttcttgggaatactttcgtggcgctatccgacctcagatgcaatctggcctgcacccccccaaggcacctacacgtggtgcggcctatgagccattacacgacccccatggtactccaacaggctgccattccaatccagataaatgtcggcaccactgttactatgacaggtaacggcacgcgccctccgccaacgcccaatgctgaggctcctcctcctggcccaggccaggcatcctctgtggcgcctagcagcacgaatgtggagtcttccgccgaaggcgctccacctcctggtcccgcaccacccccagccaccagccatccccgtgtgattcgaatcagtcaccagtccgtggaaccagttgtcatgatgcatatgaatattcaggatagcggaacccagccgggaggggtcccttccgccccaacaggtccactcggcccaccaggccatggccaaaccctcggttctaccctgatacagctgcctagtctgcctcccgaattcatgcatgcagtggctcaccagattactcatcaggctatggtcgctgctgtcgcctcttag

SEQ ID NO: 305306 - DNA, 1548 bp, Artificial Sequence
  derived and/or modified sequence
atggaacccaacgacagtaccagcaccgctgtcgaggagccagattccctggaggtgctcgtgaaaactttggattcacagactcgaacctttattgtgggcgctcagatgaatgttaaggaatttaaagaacacatcgccgcaagcgtcagcataccatccgaaaagcaaagactaatttaccagggtcgcgtactgcaggacgataagaagctccaggagtataacgtaggcggtaaggtaatccacctggtagagcgagcacctcctcaaacacacctaccctcgggcgcaagcagtgggacgggaagcgcatcagccactcacggcggagggtcgcccccaggtacccgaggccctggcgcttccgtgcacgacagaaatgctaatagctacgttatggttggcacctttaacttgccatcggatggcagcgctgtggatgttcacattaatatggagcaggccccaatccaatctgagcccagagtaaggcttgtgatggctcagcacatgatccgcgatatccaaaccttattgtcacggatggagtgtcgcggtggtccacaaccacagcactctcaacctccaccccagccccctgctgtgacaccagagcccgtggctctctcttcccaaacatccgaacctgtcgaaagtgaggccccaccacgggagccgatggaagccgaggaagtcgaagagcgtgcacctgcacagaatcccgaattgacccccggacctgcgcctgccggtccaacacctgccccagaaaccaatgcccctaaccacccatcccctgcagaatacgtggaagttctccaggagctccagagacttgagtctcggttgcagcctttcctccagagatactatgaggtgctgggagcggcagcaacaaccgactataacaataaccacgaggggcgagaggaggatcagaggttgatcaacctggtgggcgagtcactgcggctcttagggaatactttcgttgccctttccgatctgcggtgtaatctagcatgcactccaccacgtcatctccatgttgtgcggccaatgagccactatacgactccaatggtgcttcagcaggccgcaattcccattcagatcaatgtggggactacagtcacaatgactggcaacggcactaggcctccacctacaccgaacgctgaggcacccccaccaggcccaggtcaagcctcgtctgtcgccccttcatccactaacgtggaaagctccgcagagggagcgccacctcctgggcctgctccaccacctgcaactagccacccacgcgtaatccggatctcgcatcaatccgtagaacctgtcgtgatgatgcatatgaacatccaggacagcggaacacagcctggtggggtgccctctgcacccacaggccctctcggccctccagggcatgggcagacgctgggcagcacgctgatacagctgccttctttgccgcctgagtttatgcacgccgtggcacatcaaataacacatcaggctatggtggcagcagtcgcctcttag

SEQ ID NO: 305307 - DNA, 2232 bp, Artificial Sequence
  derived and/or modified sequence
atggagccaaacgactctacctctacagctgtggaggagccagactctcttgaggttctggttaagactctggattctcagacgcgcacattcatcgtcggggcacagatgaacgtcaaggagtttaaggagcacattgctgcgtcggtgtcaatcccatctgaaaagcagaggcttatctatcagggaagagttcttcaagatgacaagaagctgcaggagtacaatgttggcggtaaagtcattcacctggtggagcgtgcaccccctcaaacccatctcccctcaggggcttcctcaggtacaggctcagcctcggcaacccatggagggggatctccgccaggtactaggggcccaggtgcttcagtgcatgaccgcaacgcaaatagctatgtgatggtgggtacattcaatctgcccagcgacggctcagccgtcgatgtgcatattaacatggagcaggcaccaatccaaagcgaacccagggttcgactggttatggcacagcacatgatcagggacatccagaccctcctgtcccgcatggagtgccgtggaggtccccagccccaacattcacagcctcctccccagcctcctgccgtcactcccgaacctgtagcattgtcaagccaaaccagcgaaccagtcgagtcggaggccccacccagggagcccatggaggcagaggaggtggaggaaagagcgccagcccaaaaccccgagcttaccccaggtcctgcccctgctggaccgacccccgctcccgagacgaatgccccaaatcacccgagccccgctgaatatgtggaagtgcttcaggaactccagagactcgagtcacgcctgcagccatttctgcagcgttactacgaagtgttaggggctgctgccactaccgattacaacaataatcacgagggacgggaggaggaccagcgactcatcaatctggtgggggagtcattaaggttactggggaacactttcgtggcgctctctgatctccgctgcaacctggcatgcaccccccctaggcacctgcatgtggtgcggcctatgagtcactacaccacacccatggtcctgcaacaggccgctatacctattcagatcaatgttggcaccaccgtcaccatgaccggaaatggcacacgtcctccacccactcctaatgccgaagctcctccaccgggtccaggacaagcatcttccgtggccccaagctcaaccaacgtcgagagcagtgcagagggagcaccacctccaggtccagccccaccaccagccacaagccacccgcgagtaatccgcattagtcatcagtctgtcgaacctgtggtcatgatgcatatgaatatacaggactcaggcactcagcctggcggagttccctccgccccaaccggccctctgggcccacccggacacgggcagacactaggttcaacactcatccaattaccatcgctgccacctgagttcatgcatgccgtcgcgcaccagataactcatcaggctatggtcgctgcagttgccagtgcagctgcaggacaacaggtccctggctttccaaccgcacccaccagagtggtgattgctagacctactcctcctcaggctaggccctcccatcccggtggaccacccgtgagcggaaccctacagggagctggtcttgggaccaatgctagtttagctcagatggtaagcgggttagtgggacagctgcttatgcagcctgtgttggtcgctcaaggcaccccagggatggccccaccgcctgcaccagcaacagcaagcgccagtgcaggtaccacgaataccgcaacaactgccggtcccgctccaggaggtcccgcacaaccaccaccaaccccgcagccatcaatggccgatctgcaattttctcagttactcggtaatctactgggtccagcaggacctggcgcaggagggcctggtgttgcctctccgaccatcacagttgctatgccaggcgtcccggcattcctccaggggatgaccgactttctgcaggcaacccagaccgcccctccaccaccccctcccccaccacctcctccgcctgcccctgagcagcagacaatgcctccaccaggctcgccgagtggtggggctggtagtccagggggactggggctcgagtctctgtctccggagttctttacgagtgttgtccaaggcgtcctgtcctccctgttgtag

SEQ ID NO: 305308 - DNA, 2407 bp, Artificial Sequence
  derived and/or modified sequence
cgcatccgtagtgcgacgcacgcaggcgtagtacggtcccccgggcgacagcggtggcggctcctcggggtgctcggctccctcccacctaggccggccccggcccgactcgccctcagaaactcactgtttggggctgcggactttctcgtcgtgccccacaaaaagacctgtcggccatggagcctaatgatagtaccagtaccgctgtggaggagcctgacagcttggaggtgttggtgaagaccttggactctcaaactcgtacctttattgtgggggcccagatgaatgtaaaagagtttaaggagcacattgctgcctctgtcagcatcccatctgaaaaacaacggctcatttaccagggacgagttctgcaagatgataagaagcttcaggaatacaatgttgggggaaaggttatccacctggtggaacgggctcctcctcagactcacctcccttctggggcatcttctgggacggggtctgcctcagccactcatggtgggggatccccccctggtactcgggggcctggggcctctgttcatgaccggaatgccaacagctatgtcatggttggaaccttcaatcttcctagtgacggctctgctgtggatgttcacatcaacatggaacaggccccgattcagagtgagccccgggtacggctggtgatggctcagcacatgatcagggatatacagaccttactatcccggatggagtgtcgaggagggccccaaccgcagcacagtcagccgcccccgcagccaccggctgtgaccccggagccagtagccttgagctctcaaacatcagaaccagttgaaagtgaagcacctccccgggagcccatggaggcagaagaagtggaggagcgtgccccagcccagaacccggagctcactcctggcccagccccagcgggcccaacacctgccccggaaacaaatgcacccaaccatccttcccctgcggagtatgtcgaggtgctccaggagctacagcggctggagagtcgcctccagcccttcttgcagcgctactacgaggttctgggtgctgctgccaccacggactacaataacaatcacgagggccgggaggaggatcagcggttgatcaacttggtaggggagagcctgcgactgctgggcaacacctttgttgcactgtctgacctgcgctgcaatctggcctgcacgcccccacgacacctgcatgtggtccggcctatgtctcactacaccacccccatggtgctccagcaggcagccattcccatacagatcaatgtgggaaccactgtgaccatgacaggaaatgggactcggccccccccaactcccaatgcagaggcacctccccctggtcctgggcaggcctcatccgtggctccgtcttctaccaatgtcgagtcctcagctgagggggctcccccgccaggtccagctcccccgccagccaccagccacccgagggtcatccggatttcccaccagagtgtggaacccgtggtcatgatgcacatgaacattcaagattctggcacacagcctggtggtgttccgagtgctcccactggccccctgggaccccctggtcatggccaaaccctgggctccaccctcatccagctgccctccctgccccctgagttcatgcacgccgtcgcccaccagatcactcatcaggccatggtggcagctgttgcctccgcggccgcaggacagcaggtgccaggcttcccaacagctccaacccgggtggtgattgcccggcccactcctccacaggctcggccttcccatcctggagggcccccagtctctgggacactgcagggcgccggtctgggtaccaatgcctcgttggcccagatggtgagcggccttgtggggcagcttcttatgcagccagtccttgtggctcaggggaccccaggtatggctccaccgccagcccctgccactgcttctgccagtgctggcaccaccaacacagctaccacagctggccccgctcctggggggcctgcccagcctccacccacccctcaaccctccatggctgatcttcagttctctcagcttctggggaacctgctagggcctgcagggccaggggctggagggcctggtgtggcttctcccaccatcactgtggcgatgcctggtgtccctgcctttctccaaggcatgactgacttcttgcaggcaacacagacagcccctccaccacccccacctcctccacccccaccacctgccccagagcagcagaccatgcccccaccaggctccccttctggtggcgcagggagtcctggaggcctgggtcttgagagcctgtcaccggagttttttacctcagtggtgcagggtgtgctcagctccctgct

SEQ ID NO: 305309 - DNA, 2407 bp, Artificial Sequence
  derived and/or modified sequence
cgcatccgtagtgcgacgcacgcaggcgtagtacggtcccccgggcgacagcggtggcggctcctcggggtgctcggctccctcccacctaggccggccccggcccgactcgccctcagaaactcactgtttggggctgcggactttctcgtcgtgccccacaaaaagacctgtcggccatggagcctaatgatagtaccagtaccgctgtggaggagcctgacagcttggaggtgttggtgaagaccttggactctcaaactcgtacctttattgtgggggcccagatgaatgtaaaagagtttaaggagcacattgctgcctctgtcagcatcccatctgaaaaacaacggctcatttaccagggacgagttctgcaagatgataagaagcttcaggaatacaatgttgggggaaaggttatccacctggtggaacgggctcctcctcagactcacctcccttctggggcatcttctgggacggggtctgcctcagccactcatggtgggggatccccccctggtactcgggggcctggggcctctgttcatgaccggaatgccaacagctatgtcatggttggaaccttcaatcttcctagtgacggctctgctgtggatgttcacatcaacatggaacaggccccgattcagagtgagccccgggtacggctggtgatggctcagcacatgatcagggatatacagaccttactatcccggatggagtgtcgaggagggccccaaccgcagcacagtcagccgcccccgcagccaccggctgtgaccccggagccagtagccttgagctctcaaacatcagaaccagttgaaagtgaagcacctccccgggagcccatggaggcagaagaagtggaggagcgtgccccagcccagaacccggagctcactcctggcccagccccagcgggcccaacacctgccccggaaacaaatgcacccaaccatccttcccctgcggagtatgtcgaggtgctccaggagctacagcggctggagagtcgcctccagcccttcttgcagcgctactacgaggttctgggtgctgctgccaccacggactacaataacaatcacgagggccgggaggaggatcagcggttgatcaacttggtaggggagagcctgcgactgctgggcaacacctttgttgcactgtctgacctgcgctgcaatctggcctgcacgcccccacgacacctgcatgtggtccggcctatgtctcactacaccacccccatggtgctccagcaggcagccattcccatacagatcaatgtgggaaccactgtgaccatgacaggaaatgggactcggccccccccaactcccaatgcagaggcacctccccctggtcctgggcaggcctcatccgtggctccgtcttctaccaatgtcgagtcctcagctgagggggctcccccgccaggtccagctcccccgccagccaccagccacccgagggtcatccggatttcccaccagagtgtggaacccgtggtcatgatgcacatgaacattcaagattctggcacacagcctggtggtgttccgagtgctcccactggccccctgggaccccctggtcatggccaaaccctgggctccaccctcatccagctgccctccctgccccctgagttcatgcacgccgtcgcccaccagatcactcatcaggccatggtggcagctgttgcctccgcggccgcaggacagcaggtgccaggcttcccaacagctccaacccgggtggtgattgcccggcccactcctccacaggctcggccttcccatcctggagggcccccagtctctgggacactgcagggcgccggtctgggtaccaatgcctcgttggcccagatggtgagcggccttgtggggcagcttcttatgcagccagtccttgtggctcaggggaccccaggtatggctccaccgccagcccctgccactgcttctgccagtgctggcaccaccaacacagctaccacagctggccccgctcctggggggcctgcccagcctccacccacccctcaaccctccatggctgatcttcagttctctcagcttctggggaacctgctagggcctgcagggccaggggctggagggtctggtgtggcttctcccaccatcactgtggcgatgcctggtgtccctgcctttctccaaggcatgactgacttcttgcaggcaacacagacagcccctccaccacccccacctcctccacccccaccacctgccccagagcagcagaccatgcccccaccaggctccccttctggtggcgcagggagtcctggaggcctgggtcttgagagcctgtcaccggagttttttacctcagtggtgcagggtgtgctcagctccctgct

SEQ ID NO: 305310 - DNA, 1710 bp, Artificial Sequence
  derived and/or modified sequence
tcgggggcggagccgcggggtggtgggtgggtgtgtgtgtgtgtgtgtgtgtgtgtgtgtgtgtgtttggctgtgggttagttgtgccgttctgctggaacaccgtgggaaggcagtagacgcgggcagtcagctagcaggtccgtcgccccagacctgtcggccatggagcctaatgatagtaccagtaccgctgtggaggagcctgacagcttggaggtgttggtgaagaccttggactctcaaactcgtacctttattgtgggggcccagatgaatgtaaaagagtttaaggagcacattgctgcctctgtcagcatcccatctgaaaaacaacggctcatttaccagggacgagttctgcaagatgataagaagcttcaggaatacaatgttgggggaaaggttatccacctggtggaacgggctcctcctcagactcacctcccttctggggcatcttctgggacggggtctgcctcagccactcatggtgggggatccccccctggtactcgggggcctggggcctctgttcatgaccggaatgccaacagctatgtcatggttggaaccttcaatcttcctagtgacggctctgctgtggatgttcacatcaacatggaacaggccccgattcagagtgagccccgggtacggctggtgatggctcagcacatgatcagggatatacagaccttactatcccggatggagtgtcgaggagggccccaaccgcagcacagtcagccgcccccgcagccaccggctgtgaccccggagccagtagccttgagctctcaaacatcagaaccagttgaaagtgaagcacctccccgggagcccatggaggcagaagaagtggaggagcgtgccccagcccagaacccggagctcactcctggcccagccccagcgggcccaacacctgccccggaaacaaatgcacccaaccatccttcccctgcggagtatgtcgaggtgctccaggagctacagcggctggagagtcgcctccagcccttcttgcagcgctactacgaggttctgggtgctgctgccaccacggactacaataacaatcacgagggccgggaggaggatcagcggttgatcaacttggtaggggagagcctgcgactgctgggcaacacctttgttgcactgtctgacctgcgctgcaatctggcctgcacgcccccacgacacctgcatgtggtccggcctatgtctcactacaccacccccatggtgctccagcaggcagccattcccatacagatcaatgtgggaaccactgtgaccatgacaggaaatgggactcggccccccccaactcccaatgcagaggcacctccccctggtcctgggcaggcctcatccgtggctccgtcttctaccaatgtcgagtcctcagctgagggggctcccccgccaggtccagctcccccgccagccaccagccacccgagggtcatccggatttcccaccagagtgtggaacccgtggtcatgatgcacatgaacattcaagattctggcacacagcctggtggtgttccgagtgctcccactggccccctgggaccccctggtcatggccaaaccctgggctccaccctcatccagctgccctccctgccccctgagttcatgcacgccgtcgcccaccagatcactcatcaggccatggtggcagctgttgcctcc

SEQ ID NO: 305311 - DNA, 1714 bp, Artificial Sequence
  derived and/or modified sequence
tcgggggcggagccgcggggtggtgggtgggtgggtgtgtgtgtgtgtgtgtgtgtgtgtgtgtgtgtgtttggctgtgggttagttgtgccgttctgctggaacaccgtgggaaggcagtagacgcgggcagtcagctagcaggtccgtcgccccagacctgtcggccatggagcctaatgatagtaccagtaccgctgtggaggagcctgacagcttggaggtgttggtgaagaccttggactctcaaactcgtacctttattgtgggggcccagatgaatgtaaaagagtttaaggagcacattgctgcctctgtcagcatcccatctgaaaaacaacggctcatttaccagggacgagttctgcaagatgataagaagcttcaggaatacaatgttgggggaaaggttatccacctggtggaacgggctcctcctcagactcacctcccttctggggcatcttctgggacggggtctgcctcagccactcatggtgggggatccccccctggtactcgggggcctggggcctctgttcatgaccggaatgccaacagctatgtcatggttggaaccttcaatcttcctagtgacggctctgctgtggatgttcacatcaacatggaacaggccccgattcagagtgagccccgggtacggctggtgatggctcagcacatgatcagggatatacagaccttactatcccggatggagtgtcgaggagggccccaaccgcagcacagtcagccgcccccgcagccaccggctgtgaccccggagccagtagccttgagctctcaaacatcagaaccagttgaaagtgaagcacctccccgggagcccatggaggcagaagaagtggaggagcgtgccccagcccagaacccggagctcactcctggcccagccccagcgggcccaacacctgccccggaaacaaatgcacccaaccatccttcccctgcggagtatgtcgaggtgctccaggagctacagcggctggagagtcgcctccagcccttcttgcagcgctactacgaggttctgggtgctgctgccaccacggactacaataacaatcacgagggccgggaggaggatcagcggttgatcaacttggtaggggagagcctgcgactgctgggcaacacctttgttgcactgtctgacctgcgctgcaatctggcctgcacgcccccacgacacctgcatgtggtccggcctatgtctcactacaccacccccatggtgctccagcaggcagccattcccatacagatcaatgtgggaaccactgtgaccatgacaggaaatgggactcggccccccccaactcccaatgcagaggcacctccccctggtcctgggcaggcctcatccgtggctccgtcttctaccaatgtcgagtcctcagctgagggggctcccccgccaggtccagctcccccgccagccaccagccacccgagggtcatccggatttcccaccagagtgtggaacccgtggtcatgatgcacatgaacattcaagattctggcacacagcctggtggtgttccgagtgctcccactggccccctgggaccccctggtcatggccaaaccctgggctccaccctcatccagctgccctccctgccccctgagttcatgcacgccgtcgcccaccagatcactcatcaggccatggtggcagctgttgcctcc

SEQ ID NO: 305312 - DNA, 1689 bp, Artificial Sequence
  derived and/or modified sequence
ggtgggtgtgtgtgtgtgtgtgtgtgtgtgtgtgtgtgtgtgtgtttggctgtgggttagttgtgccgttctgctggaacaccgtgggaaggcagtagacgcgggcagtcagctagcaggtccgtcgccccagacctgtcggccatggagcctaatgatagtaccagtaccgctgtggaggagcctgacagcttggaggtgttggtgaagaccttggactctcaaactcgtacctttattgtgggggcccagatgaatgtaaaagagtttaaggagcacattgctgcctctgtcagcatcccatctgaaaaacaacggctcatttaccagggacgagttctgcaagatgataagaagcttcaggaatacaatgttgggggaaaggttatccacctggtggaacgggctcctcctcagactcacctcccttctggggcatcttctgggacggggtctgcctcagccactcatggtgggggatccccccctggtactcgggggcctggggcctctgttcatgaccggaatgccaacagctatgtcatggttggaaccttcaatcttcctagtgacggctctgctgtggatgttcacatcaacatggaacaggccccgattcagagtgagccccgggtacggctggtgatggctcagcacatgatcagggatatacagaccttactatcccggatggagtgtcgaggagggccccaaccgcagcacagtcagccgcccccgcagccaccggctgtgaccccggagccagtagccttgagctctcaaacatcagaaccagttgaaagtgaagcacctccccgggagcccatggaggcagaagaagtggaggagcgtgccccagcccagaacccggagctcactcctggcccagccccagcgggcccaacacctgccccggaaacaaatgcacccaaccatccttcccctgcggagtatgtcgaggtgctccaggagctacagcggctggagagtcgcctccagcccttcttgcagcgctactacgaggttctgggtgctgctgccaccacggactacaataacaatcacgagggccgggaggaggatcagcggttgatcaacttggtaggggagagcctgcgactgctgggcaacacctttgttgcactgtctgacctgcgctgcaatctggcctgcacgcccccacgacacctgcatgtggtccggcctatgtctcactacaccacccccatggtgctccagcaggcagccattcccatacagatcaatgtgggaaccactgtgaccatgacaggaaatgggactcggccccccccaactcccaatgcagaggcacctccccctggtcctgggcaggcctcatccgtggctccgtcttctaccaatgtcgagtcctcagctgagggggctcccccgccaggtccagctcccccgccagccaccagccacccgagggtcatccggatttcccaccagagtgtggaacccgtggtcatgatgcacatgaacattcaagattctggcacacagcctggtggtgttccgagtgctcccactggccccctgggaccccctggtcatggccaaaccctgggctccaccctcatccagctgccctccctgccccctgagttcatgcacgccgtcgcccaccagatcactcatcaggccatggtggcagctgttgcctcc

SEQ ID NO: 305313 - DNA, 1710 bp, Artificial Sequence
  derived and/or modified sequence
tcgggggcggagccgcggggtggtgggtgtgtgtgtgtgtgtgtgtgtgtgtgtgtgtgtgtgtgtttggctgtgggttagttgtgccgttctgctggaacaccgtgggaaggcagtagacgcgggcagtcagctagcaggtctgtcgccccagacctgtcggccatggagcctaatgatagtaccagtaccgctgtggaggagcctgacagcttggaggtgttggtgaagaccttggactctcaaactcgtacctttattgtgggggcccagatgaatgtaaaagagtttaaggagcacattgctgcctctgtcagcatcccatctgaaaaacaacggctcatttaccagggacgagttctgcaagatgataagaagcttcaggaatacaatgttgggggaaaggttatccacctggtggaacgggctcctcctcagactcacctcccttctggggcatcttctgggacggggtctgcctcagccactcatggtgggggatccccccctggtactcgggggcctggggcctctgttcatgaccggaatgccaacagctatgtcatggttggaaccttcaatcttcctagtgacggctctgctgtggatgttcacatcaacatggaacaggccccgattcagagtgagccccgggtacggctggtgatggctcagcacatgatcagggatatacagaccttactatcccggatggagtgtcgaggagggccccaaccgcagcacagtcagccgcccccgcagccaccggctgtgaccccggagccagtagccttgagctctcaaacatcagaaccagttgaaagtgaagcacctccccgggagcccatggaggcagaagaagtggaggagcgtgccccagcccagaacccggagctcactcctggcccagccccagcgggcccaacacctgccccggaaacaaatgcacccaaccatccttcccctgcggagtatgtcgaggtgctccaggagctacagcggctggagagtcgcctccagcccttcttgcagcgctactacgaggttctgggtgctgctgccaccacggactacaataacaatcacgagggccgggaggaggatcagcggttgatcaacttggtaggggagagcctgcgactgctgggcaacacctttgttgcactgtctgacctgcgctgcaatctggcctgcacgcccccacgacacctgcatgtggtccggcctatgtctcactacaccacccccatggtgctccagcaggcagccattcccatacagatcaatgtgggaaccactgtgaccatgacaggaaatgggactcggccccccccaactcccaatgcagaggcacctccccctggtcctgggcaggcctcatccgtggctccgtcttctaccaatgtcgagtcctcagctgagggggctcccccgccaggtccagctcccccgccagccaccagccacccgagggtcatccggatttcccaccagagtgtggaacccgtggtcatgatgcacatgaacattcaagattctggcacacagcctggtggtgttccgagtgctcccactggccccctgggaccccctggtcatggccaaaccctgggctccaccctcatccagctgccctccctgccccctgagttcatgcacgccgtcgcccaccagatcactcatcaggccatggtggcagctgttgcctcc

SEQ ID NO: 305314 - DNA, 1688 bp, Artificial Sequence
  derived and/or modified sequence
gtgtgtgtgtgtgtgtgtgtgtgtgtgtgtgtgtgtgtgtgtgtttggctgtgggttagttgtgccgttctgctggaacaccgtgggaaggcagtagacgcgggcagtcagctagcaggtctgtcgccccagacctgtcggccatggagcctaatgatagtaccagtaccgctgtggaggagcctgacagcttggaggtgttggtgaagaccttggactctcaaactcgtacctttattgtgggggcccagatgaatgtaaaagagtttaaggagcacattgctgcctctgtcagcatcccatctgaaaaacaacggctcatttaccagggacgagttctgcaagatgataagaagcttcaggaatacaatgttgggggaaaggttatccacctggtggaacgggctcctcctcagactcacctcccttctggggcatcttctgggacggggtctgcctcagccactcatggtgggggatccccccctggtactcgggggcctggggcctctgttcatgaccggaatgccaacagctatgtcatggttggaaccttcaatcttcctagtgacggctctgctgtggatgttcacatcaacatggaacaggccccgattcagagtgagccccgggtacggctggtgatggctcagcacatgatcagggatatacagaccttactatcccggatggagtgtcgaggagggccccaaccgcagcacagtcagccgcccccgcagccaccggctgtgaccccggagccagtagccttgagctctcaaacatcagaaccagttgaaagtgaagcacctccccgggagcccatggaggcagaagaagtggaggagcgtgccccagcccagaacccggagctcactcctggcccagccccagcgggcccaacacctgccccggaaacaaatgcacccaaccatccttcccctgcggagtatgtcgaggtgctccaggagctacagcggctggagagtcgcctccagcccttcttgcagcgctactacgaggttctgggtgctgctgccaccacggactacaataacaatcacgagggccgggaggaggatcagcggttgatcaacttggtaggggagagcctgcgactgctgggcaacacctttgttgcactgtctgacctgcgctgcaatctggcctgcacgcccccacgacacctgcatgtggtccggcctatgtctcactacaccacccccatggtgctccagcaggcagccattcccatacagatcaatgtgggaaccactgtgaccatgacaggaaatgggactcggccccccccaactcccaatgcagaggcacctccccctggtcctgggcaggcctcatccgtggctccgtcttctaccaatgtcgagtcctcagctgagggggctcccccgccaggtccagctcccccgccagccaccagccacccgagggtcatccggatttcccaccagagtgtggaacccgtggtcatgatgcacatgaacattcaagattctggcacacagcctggtggtgttccgagtgctcccactggccccctgggaccccctggtcatggccaaaccctgggctccaccctcatccagctgccctccctgccccctgagttcatgcacgccgtcgcccaccagatcactcatcaggccatggtggcagctgttgcctcc

SEQ ID NO: 305315 - DNA, 1689 bp, Artificial Sequence
  derived and/or modified sequence
ggtgtgtgtgtgtgtgtgtgtgtgtgtgtgtgtgtgtgtgtgtgtttggctgtgggttagttgtgccgttctgctggaacaccgtgggaaggcagtagacgcgggcagtcagctagcaggtctgtcgccccagacctgtcggccatggagcctaatgatagtaccagtaccgctgtggaggagcctgacagcttggaggtgttggtgaagaccttggactctcaaactcgtacctttattgtgggggcccagatgaatgtaaaagagtttaaggagcacattgctgcctctgtcagcatcccatctgaaaaacaacggctcatttaccagggacgagttctgcaagatgataagaagcttcaggaatacaatgttgggggaaaggttatccacctggtggaacgggctcctcctcagactcacctcccttctggggcatcttctgggacggggtctgcctcagccactcatggtgggggatccccccctggtactcgggggcctggggcctctgttcatgaccggaatgccaacagctatgtcatggttggaaccttcaatcttcctagtgacggctctgctgtggatgttcacatcaacatggaacaggccccgattcagagtgagccccgggtacggctggtgatggctcagcacatgatcagggatatacagaccttactatcccggatggagtgtcgaggagggccccaaccgcagcacagtcagccgcccccgcagccaccggctgtgaccccggagccagtagccttgagctctcaaacatcagaaccagttgaaagtgaagcacctccccgggagcccatggaggcagaagaagtggaggagcgtgccccagcccagaacccggagctcactcctggcccagccccagcgggcccaacacctgccccggaaacaaatgcacccaaccatccttcccctgcggagtatgtcgaggtgctccaggagctacagcggctggagagtcgcctccagcccttcttgcagcgctactacgaggttctgggtgctgctgccaccacggactacaataacaatcacgagggccgggaggaggatcagcggttgatcaacttggtaggggagagcctgcgactgctgggcaacacctttgttgcactgtctgacctgcgctgcaatctggcctgcacgcccccacgacacctgcatgtggtccggcctatgtctcactacaccacccccatggtgctccagcaggcagccattcccatacagatcaatgtgggaaccactgtgaccatgacaggaaatgggactcggccccccccaactcccaatgcagaggcacctccccctggtcctgggcaggcctcatccgtggctccgtcttctaccaatgtcgagtcctcagctgagggggctcccccgccaggtccagctcccccgccagccaccagccacccgagggtcatccggatttcccaccagagtgtggaacccgtggtcatgatgcacatgaacattcaagattctggcacacagcctggtggtgttccgagtgctcccactggccccctgggaccccctggtcatggccaaaccctgggctccaccctcatccagctgccctccctgccccctgagttcatgcacgccgtcgcccaccagatcactcatcaggccatggtggcagctgttgcctcc

SEQ ID NO: 305316 - DNA, 2232 bp, Artificial Sequence
  derived and/or modified sequence
atggagcccaacgacagcaccagcaccgccgtggaggagcccgacagcctggaggtgctggtgaagaccctggacagccagaccagaaccttcatcgtgggcgcccagatgaacgtgaaggagttcaaggagcacatcgccgccagcgtgagcatccccagcgagaagcagagactgatctaccagggcagagtgctgcaggacgacaagaagctgcaggagtacaacgtgggcggcaaggtgatccacctggtggagagagcccccccccagacccacctgcccagcggcgccagcagcggcaccggcagcgccagcgccacccacggcggcggcagcccccccggcaccagaggccccggcgccagcgtgcacgacagaaacgccaacagctacgtgatggtgggcaccttcaacctgcccagcgacggcagcgccgtggacgtgcacatcaacatggagcaggcccccatccagagcgagcccagagtgagactggtgatggcccagcacatgatcagagacatccagaccctgctgagcagaatggagtgcagaggcggcccccagccccagcacagccagccccccccccagccccccgccgtgacccccgagcccgtggccctgagcagccagaccagcgagcccgtggagagcgaggccccccccagagagcccatggaggccgaggaggtggaggagagagcccccgcccagaaccccgagctgacccccggccccgcccccgccggccccacccccgcccccgagaccaacgcccccaaccaccccagccccgccgagtacgtggaggtgctgcaggagctgcagagactggagagcagactgcagcccttcctgcagagatactacgaggtgctgggcgccgccgccaccaccgactacaacaacaaccacgagggcagagaggaggaccagagactgatcaacctggtgggcgagagcctgagactgctgggcaacaccttcgtggccctgagcgacctgagatgcaacctggcctgcaccccccccagacacctgcacgtggtgagacccatgagccactacaccacccccatggtgctgcagcaggccgccatccccatccagatcaacgtgggcaccaccgtgaccatgaccggcaacggcaccagacccccccccacccccaacgccgaggcccccccccccggccccggccaggccagcagcgtggcccccagcagcaccaacgtggagagcagcgccgagggcgcccccccccccggccccgcccccccccccgccaccagccaccccagagtgatcagaatcagccaccagagcgtggagcccgtggtgatgatgcacatgaacatccaggacagcggcacccagcccggcggcgtgcccagcgcccccaccggccccctgggcccccccggccacggccagaccctgggcagcaccctgatccagctgcccagcctgccccccgagttcatgcacgccgtggcccaccagatcacccaccaggccatggtggccgccgtggccagcgccgccgccggccagcaggtgcccggcttccccaccgcccccaccagagtggtgatcgccagacccacccccccccaggccagacccagccaccccggcggcccccccgtgagcggcaccctgcagggcgccggcctgggcaccaacgccagcctggcccagatggtgagcggcctggtgggccagctgctgatgcagcccgtgctggtggcccagggcacccccggcatggcccccccccccgcccccgccaccgccagcgccagcgccggcaccaccaacaccgccaccaccgccggccccgcccccggcggccccgcccagcccccccccaccccccagcccagcatggccgacctgcagttcagccagctgctgggcaacctgctgggccccgccggccccggcgccggcggccccggcgtggccagccccaccatcaccgtggccatgcccggcgtgcccgccttcctgcagggcatgaccgacttcctgcaggccacccagaccgccccccccccccccccccccccccccccccccccccccgcccccgagcagcagaccatgcccccccccggcagccccagcggcggcgccggcagccccggcggcctgggcctggagagcctgagccccgagttcttcaccagcgtggtgcagggcgtgctgagcagcctgctgtag

SEQ ID NO: 305317 - DNA, 2232 bp, Artificial Sequence
  derived and/or modified sequence
atggagcccaacgacagcaccagcaccgccgtggaggagcccgacagcctggaggtgctggtgaagaccctggacagccagaccagaaccttcatcgtgggcgcccagatgaacgtgaaggagttcaaggagcacatcgccgccagcgtgagcatccccagcgagaagcagagactgatctaccagggcagagtgctgcaggacgacaagaagctgcaggagtacaacgtgggcggcaaggtgatccacctggtggagagagcccccccccagacccacctgcccagcggcgccagcagcggcaccggcagcgccagcgccacccacggcggcggcagcccccccggcaccagaggccccggcgccagcgtgcacgacagaaacgccaacagctacgtgatggtgggcaccttcaacctgcccagcgacggcagcgccgtggacgtgcacatcaacatggagcaggcccccatccagagcgagcccagagtgagactggtgatggcccagcacatgatcagagacatccagaccctgctgagcagaatggagtgcagaggcggcccccagccccagcacagccagccccccccccagccccccgccgtgacccccgagcccgtggccctgagcagccagaccagcgagcccgtggagagcgaggccccccccagagagcccatggaggccgaggaggtggaggagagagcccccgcccagaaccccgagctgacccccggccccgcccccgccggccccacccccgcccccgagaccaacgcccccaaccaccccagccccgccgagtacgtggaggtgctgcaggagctgcagagactggagagcagactgcagcccttcctgcagagatactacgaggtgctgggcgccgccgccaccaccgactacaacaacaaccacgagggcagagaggaggaccagagactgatcaacctggtgggcgagagcctgagactgctgggcaacaccttcgtggccctgagcgacctgagatgcaacctggcctgcaccccccccagacacctgcacgtggtgagacccatgagccactacaccacccccatggtgctgcagcaggccgccatccccatccagatcaacgtgggcaccaccgtgaccatgaccggcaacggcaccagacccccccccacccccaacgccgaggcccccccccccggccccggccaggccagcagcgtggcccccagcagcaccaacgtggagagcagcgccgagggcgcccccccccccggccccgcccccccccccgccaccagccaccccagagtgatcagaatcagccaccagagcgtggagcccgtggtgatgatgcacatgaacatccaggacagcggcacccagcccggcggcgtgcccagcgcccccaccggccccctgggcccccccggccacggccagaccctgggcagcaccctgatccagctgcccagcctgccccccgagttcatgcacgccgtggcccaccagatcacccaccaggccatggtggccgccgtggccagcgccgccgccggccagcaggtgcccggcttccccaccgcccccaccagagtggtgatcgccagacccacccccccccaggccagacccagccaccccggcggcccccccgtgagcggcaccctgcagggcgccggcctgggcaccaacgccagcctggcccagatggtgagcggcctggtgggccagctgctgatgcagcccgtgctggtggcccagggcacccccggcatggcccccccccccgcccccgccaccgccagcgccagcgccggcaccaccaacaccgccaccaccgccggccccgcccccggcggccccgcccagcccccccccaccccccagcccagcatggccgacctgcagttcagccagctgctgggcaacctgctgggccccgccggccccggcgccggcggcagcggcgtggccagccccaccatcaccgtggccatgcccggcgtgcccgccttcctgcagggcatgaccgacttcctgcaggccacccagaccgccccccccccccccccccccccccccccccccccccccgcccccgagcagcagaccatgcccccccccggcagccccagcggcggcgccggcagccccggcggcctgggcctggagagcctgagccccgagttcttcaccagcgtggtgcagggcgtgctgagcagcctgctgtag

SEQ ID NO: 305318 - DNA, 1548 bp, Artificial Sequence
  derived and/or modified sequence
atggagcccaacgacagcaccagcaccgccgtggaggagcccgacagcctggaggtgctggtgaagaccctggacagccagaccagaaccttcatcgtgggcgcccagatgaacgtgaaggagttcaaggagcacatcgccgccagcgtgagcatccccagcgagaagcagagactgatctaccagggcagagtgctgcaggacgacaagaagctgcaggagtacaacgtgggcggcaaggtgatccacctggtggagagagcccccccccagacccacctgcccagcggcgccagcagcggcaccggcagcgccagcgccacccacggcggcggcagcccccccggcaccagaggccccggcgccagcgtgcacgacagaaacgccaacagctacgtgatggtgggcaccttcaacctgcccagcgacggcagcgccgtggacgtgcacatcaacatggagcaggcccccatccagagcgagcccagagtgagactggtgatggcccagcacatgatcagagacatccagaccctgctgagcagaatggagtgcagaggcggcccccagccccagcacagccagccccccccccagccccccgccgtgacccccgagcccgtggccctgagcagccagaccagcgagcccgtggagagcgaggccccccccagagagcccatggaggccgaggaggtggaggagagagcccccgcccagaaccccgagctgacccccggccccgcccccgccggccccacccccgcccccgagaccaacgcccccaaccaccccagccccgccgagtacgtggaggtgctgcaggagctgcagagactggagagcagactgcagcccttcctgcagagatactacgaggtgctgggcgccgccgccaccaccgactacaacaacaaccacgagggcagagaggaggaccagagactgatcaacctggtgggcgagagcctgagactgctgggcaacaccttcgtggccctgagcgacctgagatgcaacctggcctgcaccccccccagacacctgcacgtggtgagacccatgagccactacaccacccccatggtgctgcagcaggccgccatccccatccagatcaacgtgggcaccaccgtgaccatgaccggcaacggcaccagacccccccccacccccaacgccgaggcccccccccccggccccggccaggccagcagcgtggcccccagcagcaccaacgtggagagcagcgccgagggcgcccccccccccggccccgcccccccccccgccaccagccaccccagagtgatcagaatcagccaccagagcgtggagcccgtggtgatgatgcacatgaacatccaggacagcggcacccagcccggcggcgtgcccagcgcccccaccggccccctgggcccccccggccacggccagaccctgggcagcaccctgatccagctgcccagcctgccccccgagttcatgcacgccgtggcccaccagatcacccaccaggccatggtggccgccgtggccagctag

SEQ ID NO: 305319 - DNA, 648 bp, Artificial Sequence
  derived and/or modified sequence
atggagccgaatgacagtaccagtacagcagtcgaggagcccgactctctcgaagtgttggtgaaaaccctcgacagccagaccagaacctttatcgtcggagcgcaaatgaacgtaaaggaatttaaagagcatatcgccgcctctgtttcaattccttctgaaaagcagcgcctaatctaccagggacgcgtcctgcaggacgacaagaaactccaggaatacaatgtcggcggcaaggtgattcatttggttgaacgggcccccccacagacccatctgccatcaggggcctcctcagggacaggctccgccagcgctactcatggcgggggatccccccccggtactcgtggcccaggagcctccgtgcatgaccggaatgcaaactcgtatgtcatggtcggtacattcaacctgcccagcgaacctcgcgtaagactggttatggcccagcacatgatccgtgatatacagacactccttagccgtatggagtgcaggggcggaccgcaacctcagcactcacagcctccaccccagcctcctgccgtaactcccgagcccgtggccttgtcaagccagacaagcgaacctgttgagagcgaagccccccctcgagagccaatggaagctgaagaggtgtag

SEQ ID NO: 305320 - DNA, 735 bp, Artificial Sequence
  derived and/or modified sequence
atggaaccgaatgattccacttcgacagcagtagaagagccagattcattggaagtgctggtcaaaacgctggactctcaaacacgaaccttcattgtcggggcccagatgaatgtgaaagagttcaaagaacatattgcggcaagcgtgagcatcccctccgaaaagcagcggctcatttaccagggtagagtgctccaggatgataagaagttgcaggaatataatgtaggaggaaaagtgatccacttagtggagcgtgccccaccccagactcatctcccttccggagcctcttccggcactggttcagcctctgcaacacatggcggtgggagtcctcccgggaccagagggcccggcgccagtgttcatgaccgtaacgccaacagctatgtcatggtgggtactttcaacctgccatcggaacctagagttagactagtcatggcacagcacatgatcagagacatccaaacactactgtcgcggatggagtgcaggggtgggcctcagccccagcacagccagccacctccccaaccgccagctgttacgcctgaacccgtcgcactgtcaagccagacctccgagccggttgagtctgaggcccctccacgggagccaatggaggctgaggaagttgaggagagagctccagcccagaatcccgaactcacacccggacctgctccagccgggcccacccccgctccggaaacaaatgcgccctag

SEQ ID NO: 305321 - DNA, 621 bp, Artificial Sequence
  derived and/or modified sequence
atggagcccaacgatagcacctcgactgctgtggaagagcctgacagtcttgaagtgcttgtgaagacgctggactcacagacccgcaccttcatcgtcggggcccaaatgaatgtcaaagaatttaaggagcatattgcggcatccgtctcaattccttccgagaaacagcgcctgatctatcaggggcgggtcctgcaagacgacaaaaaactccaggagtataatgtagggggcaaggtgatccacctcgtggagcgggccccccctcagactcacctgccgtccggcgctagtagtggcacaggttcagcctctgccactcatggcggtggtagcccaccaggcacaagagggcctggggcaagcgtgcacgaccgaaatgcaaactcgtatgtgatggtgggcactttcaacctcccaagtgaacctagggtgcgcctagtgatggctcagcatatgattcgtgatattcaaaccttgctgtctcgtatggagtgcagggggggccctcagccccagcattcacagcctccgccgcaacccccagccgtaactccagagccagtcgcattatcatcgcagaccagcgagcctgttgaaagcgaagcaccaccatag

SEQ ID NO: 305322 - DNA, 735 bp, Artificial Sequence
  derived and/or modified sequence
atggaaccaaacgactccaccagcacggctgtagaggagcctgactctctcgaggttctggttaagacgctcgatagccaaacgaggacttttatcgtgggcgctcagatgaacgtcaaggaattcaaagagcacattgcagcctctgttagcatccccagcgaaaaacagagactgatctaccaggggcgtgtgttacaggacgataaaaaacttcaggaatacaatgtggggggtaaagtaattcacctcgtcgagagagccccacctcagacccatctgccgtctggcgcctccagcggtaccggcagcgcctcagccacgcacgggggaggctcccctccaggaacgcgggggccaggtgcatctgtgcatgaccgaaacgccaactcgtatgtgatggtgggcacgttcaacctgccgtctgagcctagagtgcgactggtgatggctcagcatatgatcagagacatccagacactactcagtagaatggaatgccggggagggccgcagccacagcattcacaaccccccccacaacctcccgccgttactcctgagcctgtcgcactgtctagtcagacttccgaaccagtggaatcagaggcgccccctcgggaacctatggaggcagaagaggttgaagaacgtgccccagctcaaaacccagagcttacaccaggccctgcgccagccggacccacccctgcccctgaaactaatgccccttag

SEQ ID NO: 305323 - DNA, 735 bp, Artificial Sequence
  derived and/or modified sequence
atggagccaaacgattctaccagtacggccgttgaggaaccggactcactcgaagtgctggtcaaaactttggatagccagacacgcacatttatagtcggcgcccagatgaatgtgaaggagttcaaggaacatatcgccgcttccgttagcattccgtccgaaaagcagcgtctcatctatcagggccgagtccttcaggatgacaaaaagcttcaggagtataacgtgggggggaaggtcattcacctggttgagagagctccgcctcagacacatttacctagtggggccagttcagggaccgggagcgcctccgctacccatggaggcgggagtccaccaggcactcgcggtcccggagccagtgtgcatgatcgtaacgccaactcctacgtcatggtgggaacatttaatttgccttctgaaccccgtgtgcgccttgtcatggcccagcatatgatcagagacatccagacactcctgtcgagaatggaatgtcgcggtggtccccaaccacagcacagccagccacccccgcaaccgccggccgtgacccccgagccggtcgccctaagttcccagacgtccgaacccgtggaatccgaggccccccccagagagccaatggaggccgaggaggtggaagagcgcgccccggcgcaaaatcccgagctgactcctggccctgcccctgctggtccgactcccgcccctgaaaccaatgcaccttag

SEQ ID NO: 305324 - DNA, 735 bp, Artificial Sequence
  derived and/or modified sequence
atggagccaaacgactctacgtcaaccgccgtggaagagccagactcactggaggtgctcgttaagacactggattcccaaaccagaacgtttatcgtaggtgcacagatgaacgtgaaggagttcaaggagcacatcgccgcaagtgttagtataccaagtgagaaacaacgcttgatatatcagggtcgggtcctgcaggatgataaaaagttacaggaatacaacgtcggtggcaaagtcatccatctggttgagcgagctcctccacagacacacttaccaagtggcgcttcctccggaaccgggtcagcaagcgctactcacggcggtggcagtccaccaggaacaagggggcctggagcctcggtgcacgacagaaacgctaattcctacgtaatggtagggactttcaacctgccctccgaaccccgagtcaggctggtcatggcacagcacatgatcagggacattcagacgctgctttccagaatggagtgtcgcggcggaccacagcctcagcactcccaaccccccccacagccccctgcagtgacgcctgagccagtggctctgtcctcccaaacgagcgagcccgtagagtccgaggcccccccaagggagccaatggaggcggaggaggttgaggagagagcccccgcacagaatcctgagctgacacctggtccagcacccgccggacccactccagccccggagaccaatgctccctag

SEQ ID NO: 305325 - DNA, 735 bp, Artificial Sequence
  derived and/or modified sequence
atggagcccaatgattcaacatcgacggcagtggaggaaccagattccctggaagtcctggttaagacactagattcacagacgcgaacctttatcgtgggagctcaaatgaatgtgaaggagtttaaagagcacatcgccgcatcagtgtctatcccctctgagaaacagaggctcatctaccagggccgggttttacaggatgacaagaagttgcaagagtataacgtgggaggtaaagttatccacctagtggaacgggctcccccacagactcatctcccctcaggcgctagctccggcaccgggtcagcctcagccacccatggtggcgggagcccaccaggcacaagggggcctggtgcaagtgtccatgaccgtaacgcaaatagctatgtgatggttggaactttcaatctcccctccgagccccgcgttaggttggtaatggctcagcacatgatcagagacattcaaacactcctttctagaatggagtgccggggcgggccacagcctcagcactcccaacctcctcctcagccacccgctgtgaccccagaaccagtggcattatcaagccaaaccagcgaaccagttgagtccgaagctccaccgagggaacccatggaagctgaggaagtagaggagagagctccggcccagaatcccgagctgacccccgggccggcccccgcaggtcctactcccgcccctgagactaatgcaccatag

SEQ ID NO: 305326 - DNA, 648 bp, Artificial Sequence
  derived and/or modified sequence
atggagccgaatgattcgacttctacggctgttgaagaacctgacagtttggaagtgcttgtcaaaacactcgactcccagaccaggacttttattgttggagcccagatgaatgtaaaagaattcaaagaacacatagccgccagtgtctctatcccgtcagaaaagcagcgccttatctatcagggccgagtgctgcaggatgataagaagttacaggaatacaatgtgggagggaaggtgatccatctggtggagcgggccccaccacagacacacttgccaagtggtgcaagttcaggaacaggctctgcctctgcgacacacggcgggggaagtcctccaggcaccagaggacccggagcgtccgtgcacgatcgtaatgctaacagctacgtcatggtggggacattcaatctcccttctgagccccgggttcgactcgtgatggcccaacacatgatccgggatatccagactcttctatcgaggatggagtgtagagggggaccgcagcctcagcatagccagcccccaccccagccaccggccgttactcccgagccagtagctctgagctcccagaccagtgaaccagtggaaagtgaggcacccccacgcgagccgatggaggctgaagaggtgtag

SEQ ID NO: 305327 - DNA, 735 bp, Artificial Sequence
  derived and/or modified sequence
atggagcctaatgatagcactagtactgcagtggaggagcctgattccctcgaggtgctggtgaagacgttagatagtcaaacacgaaccttcatcgtcggtgcccaaatgaatgtcaaagagtttaaggagcatatcgctgccagtgtaagcatcccatctgaaaagcagagactgatttatcaaggcagagttctgcaggacgacaagaaactccaggagtataacgtcggaggcaaggtaatccacctggtcgagcgtgctcctccccagacgcacctgccatctggagcctccagtggtacggggtcagcctcagcaacccatggtggcggatctcccccaggcactcgtgggcccggagcatccgtgcacgatcgcaatgccaatagctatgtgatggtggggactttcaatttaccctctgaacccagggtaagactggtcatggctcaacacatgatcagagacattcaaaccctcctttctagaatggagtgtcgggggggtccgcagcctcagcactctcagccccctccccaacccccggccgttaccccagagcccgtggcccttagtagccagacgtcggaaccggtggagtccgaggctcccccccgcgagccgatggaggcggaggaggtggaagaaagagctcccgcccaaaatcccgaattaacccccggaccagcccccgcgggccctacgcctgctcccgagacgaatgcaccatag

SEQ ID NO: 305328 - DNA, 735 bp, Artificial Sequence
  derived and/or modified sequence
atggagcccaatgatagcactagcaccgccgttgaggagcccgacagcctcgaggtcctggtgaagactctcgactcacagacccggacttttatcgtgggcgcccagatgaacgtaaaagagtttaaagagcatatcgctgcttccgtgtcgatcccaagtgagaagcaacgattgatctatcaaggtcgggtcctgcaagacgataagaaactccaagaatataacgttggagggaaagtaattcatcttgtcgagcgtgcgccgccccagacgcacctgccgagcggcgcatcctcaggaaccgggtctgcatccgcaacgcacgggggaggtagtccaccaggcacccgcggtccgggtgcctctgttcatgacaggaacgccaattcctacgtaatggtgggcacttttaacttgccttctgaaccgcgagtccgtctggtcatggcgcaacacatgattcgagacatacaaaccttactgtctagaatggagtgtaggggagggccgcagccccagcacagccaacccccgccccagccccctgcggtgacccccgagccagtggcgttgtccagtcagacgagtgagccggtggagtctgaagccccaccacgagagccgatggaggcagaggaggtggaggagagagcgcccgcacaaaatccggagttaaccccaggaccggcccctgctggacctactccggctcccgagacaaatgccccctag

SEQ ID NO: 305329 - DNA, 735 bp, Artificial Sequence
  derived and/or modified sequence
atggagccaaatgatagtacgtccaccgccgtggaagaaccggactctctggaggtgctggtgaagacactcgatagccaaactaggacattcattgtgggcgctcagatgaatgtgaaagaatttaaggaacacatcgctgcctcagtgagcattccttccgagaagcagagactaatctatcaaggccgcgtcttgcaggacgacaagaaattacaggaatataacgtaggtggaaaggtcattcacttagtggagcgagcccccccacagacgcatctgcccagtggggctagtagcggtacaggcagcgcatctgcaacgcacggcggtggcagcccccccgggactcggggccccggagcctctgtacatgacagaaatgctaattcttatgtgatggttggaacattcaatctgccatctgagccgagggtcaggctcgtgatggctcagcatatgattagagacatccaaaccttgctttccaggatggagtgtcggggcggaccccaacctcagcacagccagcccccaccacaaccgccagcagtgacccctgagcctgttgcactgtcttcccaaactagtgaacccgttgaatctgaggctcctccccgggagccgatggaagcagaggaggtggaagagagggccccagcccaaaaccccgagctgacacctggcccagcgccagcaggcccaacccccgcccccgaaaccaatgcaccttag

SEQ ID NO: 305330 - DNA, 621 bp, Artificial Sequence
  derived and/or modified sequence
atggagcctaatgattctaccagcacagcagtggaggagccagactccttggaggtgctggttaagacccttgactcccaaacccgaacctttatcgtgggggcacagatgaatgtgaaggagttcaaggaacacattgcagcttctgtcagcataccttccgaaaaacaacggcttatctaccaaggtcgcgtgctccaggacgataagaaactgcaggagtataacgtgggtggaaaagtcatacatctagttgagagggcgccgccccagacccacctgccttcaggtgctagttctggcaccggaagtgcatctgctacacatggagggggcagcccacccggtacgcgaggaccaggtgcttctgtgcacgataggaatgctaatagctacgttatggtaggtactttcaacttaccgtctgaacccagggtccgtcttgttatggcccagcacatgatccgcgacattcagacattactgtctcgcatggagtgccgcggcggaccgcagccccaacactcccagcccccaccccagcccccagccgtcactccggagcctgtcgctctgtccagtcagacatcagaacctgtcgaaagcgaggcccccccttag

SEQ ID NO: 305331 - DNA, 735 bp, Artificial Sequence
  derived and/or modified sequence
atggaacccaacgacagtacctcgaccgcggtggaagagcctgacagcctcgaagtgttggtgaagaccttggatagtcaaactcgtacatttatcgtgggagcacagatgaatgtgaaggaatttaaggagcacattgcagccagcgtgtctattccctccgaaaaacagcgacttatttatcagggtcgagtgctccaagatgataaaaaactgcaggaatacaacgttggcggtaaagtgatccatttggtagagcgcgccccccctcaaacacacctgccgagcggcgcctcgagcggcacgggcagcgcaagtgcaactcacggcggcgggtcccccccggggaccagagggccaggagcttctgtgcacgacaggaacgctaattcatacgtcatggtgggcaccttcaacctgccttctgaacccagagtgcgccttgttatggcccagcatatgattagggacatccagaccctgctatctcggatggagtgccgaggtggacctcaaccacagcattctcagcctccgccacagccaccagctgtgaccccagagcccgtagccttatcgtcacagaccagcgagccagtcgaaagcgaagcccctccccgagaaccaatggaagctgaggaagtggaggagagagctcccgctcagaacccagagcttactccagggccggcccccgccggccccactcctgccccagagacaaacgccccctag

SEQ ID NO: 305332 - DNA, 621 bp, Artificial Sequence
  derived and/or modified sequence
atggagccgaatgattccactagcaccgccgtcgaagagcctgattccttggaggtgcttgttaagaccttagactctcagaccaggacatttatcgtgggcgctcagatgaacgttaaagaattcaaggagcacatagccgcctcggtttccatcccctccgaaaagcaacgcctgatttaccagggcagagttcttcaagatgataagaagcttcaggaatacaatgtgggcgggaaagtgatccatctggtggagagagcccctccccaaacccatctgcccagtggggcctcttcgggaaccggctctgctagtgccacgcatgggggcggctctccccccgggactcgaggccctggagcctctgtgcacgatcggaacgccaactcctatgtgatggttggcacttttaacctgccttccgaaccccgtgttagactggtaatggctcagcacatgattagagacatccaaacccttctttctcggatggaatgccgcggcggaccccaaccacagcacagtcagcctcctccgcagcccccagcagtcaccccggaacccgttgctctgagctcacagacttctgaacccgttgagagcgaagctcccccatag

SEQ ID NO: 305333 - DNA, 735 bp, Artificial Sequence
  derived and/or modified sequence
atggagcccaatgacagcacctcaaccgcagtcgaagagccagattctctcgaagtgctggtgaaaaccctcgactcgcagacccgtacttttattgtgggcgcgcaaatgaatgttaaagaatttaaggagcacattgccgcatctgtgagcatcccatccgagaagcagagactgatctatcagggaagggtacttcaggatgacaaaaaacttcaagaatacaacgtggggggcaaagtcattcacctggtcgaacgcgccccacctcagacccaccttccatctggtgcctccagcgggaccggcagcgcttcagcgacacacggcggggggagtcccccaggcaccaggggccccggcgcctccgtgcatgacagaaacgctaactcatacgtcatggttggaacattcaatctgccctccgaaccccgcgttcgcttggtaatggctcagcacatgatcagagatattcagaccttgttgtcccgcatggaatgcagaggcggtccacagccccaacattcgcagcccccacctcaaccacccgctgttacacccgagcccgtggccctgtcctcacagactagcgaaccagttgagagcgaggctcccccaagggagcctatggaggccgaagaggtggaggagcgggctccagcccagaacccagaattgactccaggccctgcccccgcaggacctacaccagcacccgagacgaatgctccctag

SEQ ID NO: 305334 - DNA, 648 bp, Artificial Sequence
  derived and/or modified sequence
atggagcccaacgacagcacctctaccgcagtcgaggagcccgactcgctcgaggttttagtcaagacactggactcacagactcggacgttcatcgttggtgcccagatgaatgtcaaagagttcaaagaacacatagccgcctctgtcagcatcccatctgaaaaacaacgtctgatttaccagggtagggtcctccaggatgataagaagctgcaggagtataatgtggggggaaaggttatccatttggtcgaacgggcccccccacagacccaccttccgagtggtgcgtcgtcggggactggcagcgcatccgcaactcatggggggggatcccccccaggcacaagaggtccaggcgcatctgtgcacgaccgaaacgctaattcttacgtgatggttgggacatttaatttacccagcgaacctagggttagactggtgatggcacagcacatgatccgcgatatccagaccctactgtctcgcatggaatgcagaggaggcccgcagcctcagcactcccagcccccaccacaaccaccggcggttaccccagagcccgtagcacttagttctcaaacctcagagccagtcgagtccgaagcccctccaagggaaccaatggaggccgaggaagtatag

SEQ ID NO: 305335 - DNA, 735 bp, Artificial Sequence
  derived and/or modified sequence
atggagccaaatgattccaccagtacagccgtcgaggaacctgactctctggaagttctggttaaaaccctggacagccaaacccgtacctttattgtcggggcacagatgaacgtgaaagagtttaaagagcacatcgcagcaagtgtgagcatacctagcgagaagcagcggctgatctaccagggcagggtgcttcaggatgacaagaaactgcaagaatacaacgttggtggaaaggtgatacatctcgtggaacgcgcccccccacagacccacttgccaagcggagcctcttccggaaccgggtctgcctccgccactcatggggggggctctcctcccggtacccggggtccgggcgccagcgtccacgaccggaatgcaaacagctacgtcatggtgggaacctttaacttgcctagtgaaccgcgtgtgaggctggtcatggctcagcacatgatccgggatatccagacgttgctgtctcgcatggagtgccgcggaggcccccagccccagcactcccaaccccctccacaacctcctgctgtgaccccagagccagtggctctctcctcccagacatcagaacccgtggaaagcgaggcccctccaagagagccgatggaggcagaggaggtggaggaacgcgcacctgcccagaatcctgagctcacacccggccccgccccagccggtcctaccccagcaccagagacaaatgctccttag

SEQ ID NO: 305336 - DNA, 648 bp, Artificial Sequence
  derived and/or modified sequence
atggaacccaacgattccacatcaacggccgttgaagagcccgatagtcttgaggtgctggtcaagactttggattcacaaactcgtacatttatagttggcgctcaaatgaatgtaaaggaatttaaggaacatatcgccgcttcagtttcgattcccagcgagaaacagaggctgatctaccaagggagagtgctccaggatgataagaagctgcaggaatacaatgtaggaggcaaagtgattcacctcgtagagcgggctccaccccaaacacacctcccaagcggggctagctcggggactggctctgctagcgcaacacacgggggggggagtccccccggaacccgaggacccggggcctccgtgcacgaccggaacgccaactcctatgtgatggtgggaacattcaacctgcctagcgagccacgggtgagactagtcatggcccagcatatgataagggacatccagacactgctgagcaggatggaatgtcgcgggggcccacagccccaacactcccagccccctcctcagcctcccgccgtgactcctgagccggtggcactgtctagtcagaccagcgaacctgtggagagtgaggctcctccgcgcgaaccaatggaggccgaagaggtgtag

SEQ ID NO: 305337 - DNA, 648 bp, Artificial Sequence
  derived and/or modified sequence
atggagcccaatgactctacttcaaccgccgttgaggagccggatagcctggaggtgctggtcaaaacactggacagtcaaaccagaacctttatcgtgggagcccagatgaacgtgaaagaattcaaggagcatattgctgcttccgtgtccatcccaagcgaaaagcagaggctgatctaccagggccgagtgcttcaggacgataagaaattacaagaatataatgtcggggggaaggttatccacctcgttgaacgagcccccccacagacacacctgccctctggcgcctctagcggcactggctccgcctcagcgacccatggcggcggctctccaccaggcactcggggtcccggggcatctgttcacgaccgaaacgcaaacagctacgtgatggtcgggactttcaatttgcccagcgaacccagggtgaggctcgtgatggcgcagcatatgatccgcgatatccagaccctcctgtccaggatggaatgcagggggggccctcagccccagcatagtcaacctcctccccagccccctgcagtgacacccgaaccagtggccctgagctcgcagacatcagaaccggtcgagtctgaggcccctcctagagagccgatggaggctgaagaagtttag

SEQ ID NO: 305338 - DNA, 621 bp, Artificial Sequence
  derived and/or modified sequence
atggagcccaatgattcaactagcaccgccgtggaggagcctgatagcctggaggtcctcgtaaaaaccttggacagccagacacggacattcatagtgggggcacagatgaatgtcaaggagttcaaggaacacattgcggcatctgtaagtataccttcagaaaagcagcggttgatttaccaggggcgggtactgcaggatgacaagaagctccaggagtacaatgtgggtggcaaggtgatccaccttgtcgaacgcgctcccccccagactcatctaccgtcaggagcttcgagcgggacaggttccgccagcgccacgcacggaggtggttccccgcctgggacccggggtcccggcgcctctgtccatgatagaaacgcaaactcctatgtgatggtagggacattcaatctcccgagcgagcccagagtgcggttagtgatggcgcaacatatgatcagggatatacagaccctcttaagtcgcatggaatgcagaggggggccgcaaccacagcattcacagccccctccacagcccccagccgtgacccccgagcccgtagccttgtcatcccagactagcgagccagtggaatctgaagcacccccatag

SEQ ID NO: 305339 - DNA, 735 bp, Artificial Sequence
  derived and/or modified sequence
atggaacccaacgattcaacctcgaccgcagttgaggagcccgactcactggaagtcctcgtgaaaacactcgacagccagacaagaacattcatcgttggcgcccagatgaacgtcaaggagttcaaggagcacatcgctgcatctgttagtattccgagcgagaagcaacgtctgatttaccagggtcgtgtcctgcaggacgacaaaaaactgcaagagtataatgttggcggcaaggttattcatctggtggagagagctcctcctcagacacatctgccatccggcgcttcatctggcacaggatccgcatccgctacacacggcggcggctctccacctggcacgaggggaccaggagcctctgtgcatgatcgtaacgcaaattcttacgtcatggttgggacctttaacctgccaagcgagcccagagtgagactggtgatggcgcagcacatgattcgggacatacagaccttgctgagcaggatggagtgccggggaggaccacagccacagcactcccagcccccccctcagccacccgcagtcaccccggagccggtggctttgtcgtcccaaaccagcgagcccgtggaatctgaagctccgccccgtgaaccgatggaagctgaagaagtcgaggaaagggcgccagctcagaatcctgagctcacgccggggcctgctcccgcaggccccacacccgcccccgagacaaacgcaccatag

SEQ ID NO: 305340 - DNA, 735 bp, Artificial Sequence
  derived and/or modified sequence
atggaacccaatgacagcactagtactgcggtggaagaaccggactctcttgaggtgctcgtgaagacgcttgatagccaaacccgcacattcattgtcggggcccaaatgaatgtgaaggagtttaaagagcacatcgccgcgagcgtgtccatcccttcagagaaacagcggctcatctatcaaggacgcgtccttcaggatgataagaagctacaagagtacaacgtcgggggcaaagtcattcatcttgtggaaagggccccacctcagactcaccttcccagcggcgcttcctccggcaccggatctgccagcgctacccacggtggtggttccccacccgggacacgagggccaggcgcgagcgtgcacgacagaaatgctaacagctatgtgatggtagggacctttaaccttccttctgaaccccgggtcagactcgtcatggctcaacatatgattcgcgatattcagactttgttgtccaggatggaatgccgcggcgggccccagccacagcactctcagccacccccccagccaccagccgtgactcctgaaccagttgccctgtcatctcagaccagtgagcccgtcgagtccgaggctcctcccagagaacccatggaggcagaggaagtggaagagcgtgcccccgcccaaaaccccgagctgacccccggcccagccccggccgggccgactcctgcccccgagaccaatgctccgtag

SEQ ID NO: 305341 - DNA, 621 bp, Artificial Sequence
  derived and/or modified sequence
atggaacccaatgatagcacgtctacggccgtggaggaaccggactctttagaggttcttgttaaaaccctggacagccagaccaggacattcatcgtgggcgcacaaatgaatgtgaaggagttcaaagagcacatcgctgcaagtgtgtccatcccttcagaaaaacagcgtcttatctaccaggggcgggtcctgcaggatgataaaaagctacaggagtacaacgtgggcggcaaggtgattcacttagttgagcgcgctccaccacagacccacctgccgagtggggcttctagcggtacaggtagtgcatccgctacacacggcggcggatccccacccggaacaaggggacctggagcctcagtccacgatagaaatgcaaactcttacgtcatggttggtactttcaatctccctagcgaaccccgagtccgcctggtgatggcacagcatatgatccgtgatattcagactctgctgtcgagaatggagtgtcgcggggggccacaacctcaacactcacagcctcctccccagcccccggccgtgacgcctgagccagtggcactgtcctcacagacctctgagccagtggaatcagaggcccctccgtag

SEQ ID NO: 305342 - DNA, 735 bp, Artificial Sequence
  derived and/or modified sequence
atggagcccaatgactctacgagtacagccgtggaagaacctgattctctggaggtgcttgtaaagaccctagactctcagacaaggacattcatcgttggagctcagatgaacgtgaaggaattcaaagaacacattgcagcctccgtgagtattccctctgagaagcagaggctgatataccagggtcgcgtactgcaggatgataaaaaactacaggagtataatgtgggcggaaaggtgatccatctcgttgaaagagcacctcctcagactcacctgccaagcggagctagcagtggaactgggtccgcctccgcaacgcacggcggcgggagcccacctggaaccagagggcccggcgcaagcgtgcacgaccgcaacgccaactcttacgttatggtcggaacctttaatctccccagcgaaccgagagtccgactggtcatggcacagcacatgattagggatatccaaactcttttatctcgcatggagtgtaggggaggaccgcaaccacagcattcacagccacccccacagcccccggccgtcaccccagagccagtggccttgtccagtcaaacctccgagcccgtcgagtctgaggccccacctagagagcccatggaagcggaagaggtggaagagagggcccctgcgcagaaccccgaattaactcctggtcctgctcctgcaggcccaacaccagcgccggagaccaatgcaccctag

SEQ ID NO: 305343 - DNA, 735 bp, Artificial Sequence
  derived and/or modified sequence
atggaacctaacgacagcacctccacggctgtggaagaacccgactccctggaagtactggtcaaaactctcgatagtcagacgcgtacttttattgtaggggctcaaatgaacgtgaaagagttcaaggagcatattgctgcctctgtcagcatcccatccgaaaaacagcgattgatttaccagggacgagtattgcaggatgacaaaaaactccaggagtataatgtgggcgggaaggtgattcatctggtagagagggctccccctcagactcacctgccctccggcgcttccagtgggaccggctctgcctccgctacccacggaggcggcagcccgcccggcactcgcggaccaggggcatcagtccacgacaggaacgccaactcttacgtgatggtggggaccttcaatctcccctctgagcctagagtcaggctggtcatggcccagcacatgatccgtgacatacagacactcttatcccgcatggaatgcagagggggaccccagcctcagcactctcagccccccccacagccccctgccgtcactccagagcccgtggctctgagttcccagacgtctgagccggtcgaaagtgaggctcccccccgagaacccatggaagcagaggaagtcgaagagagggctcctgcacaaaatccggagctcacccccgggcctgctcctgccggtcctactcccgcacctgagaccaatgcaccctag

SEQ ID NO: 305344 - DNA, 735 bp, Artificial Sequence
  derived and/or modified sequence
atggaaccgaacgattccactagcactgctgtggaagagccagacagtctcgaagtcctcgtgaagaccctggattcgcaaactaggacattcatagttggggcacagatgaacgtcaaagagttcaaggagcacatagctgcctctgtctccattccttcagagaaacagaggttaatataccagggaagggtgttacaggatgataagaagcttcaggaatacaacgttggagggaaagtgatacacctggtagagcgtgcgccccctcagacccatctaccaagcggcgctagtagtggcacggggtccgcttccgcaacccatggagggggtagccctcccggcactcgaggtcccggggccagtgtccacgaccggaatgctaactcatacgtgatggtcggtaccttcaatttaccctcagaaccgcgagtacgcctggtgatggctcaacatatgattcgggacatccagaccctactttcgagaatggagtgccgggggggcccccaaccccagcattcacaaccgcccccacagcccccggctgtaacgcctgagccagtggccctgtccagccagacttccgagcctgtggaaagcgaagctccaccaagggagccaatggaggcagaggaagtggaagaacgcgcccctgcgcagaatccagaactgacacctggccctgctccagcaggaccaacgcccgcgcccgaaaccaatgcaccatag

SEQ ID NO: 305345 - DNA, 735 bp, Artificial Sequence
  derived and/or modified sequence
atggagcctaatgacagcacctctacagctgttgaggagcctgacagcctggaggttctggtgaagacgctggacagccagacaaggacattcattgtgggagcacagatgaatgttaaagaattcaaagaacacatagctgcttctgtgtcgattccatccgagaaacagagactgatttaccaaggaagagttctgcaggacgacaaaaagctgcaggaatacaatgtggggggaaaggtgattcacctcgtcgaaagagccccaccccaaacacatttgccatcaggggcctcgtcaggcacaggttctgcgagcgccacccatggagggggatccccccctggcacacggggacccggtgccagcgtacatgatcggaacgctaacagttatgtcatggtgggaacattcaatctcccttctgagcctagagtacggctcgtgatggcccagcacatgattcgtgacatccagactttgctctcgcgtatggaatgccggggtggacctcagccccagcacagccagccacctccacagccacctgctgtcactccagaacccgttgctcttagtagccagaccagcgagccggttgagagcgaagcacctccacgggaacctatggaggctgaggaggtggaagagcgagcccccgctcagaatcccgaacttacccccggacccgcaccagctggcccaaccccagctcctgaaacaaatgcaccctag

SEQ ID NO: 305346 - DNA, 735 bp, Artificial Sequence
  derived and/or modified sequence
atggaacccaacgattcaaccagcacagccgtcgaagagcctgacagcctggaggtcctagtgaagaccttggacagccagacccgtacgttcatcgttggggcccagatgaatgttaaagaatttaaggaacacatcgctgcctcggtgtctattccaagtgagaaacagcgcctgatttaccaggggcgtgtgctccaggacgacaagaaactacaggaatataacgtcggggggaaggtcatccatttagttgagagagccccacctcagacccacctgccttcaggggcgtcatccgggactggcagcgccagcgccacccacgggggggggtcaccccctggcacacgaggacctggcgcctctgtgcacgacagaaatgccaactcttacgtcatggtgggtactttcaatcttccctcagagcctagagtccgtctagttatggctcaacatatgatcagggacatccaaacactgctttctcggatggagtgtagaggcggcccgcagccccagcattcccagcccccaccccaaccaccagctgttacacctgagcctgtcgctctgagcagccagacgtcagagccagtcgagtccgaggctcctccaagggagccgatggaagcggaagaggtggaagaaagggccccagcccagaaccctgagctaacgcccggtccagcccccgctgggcctaccccggctccagagacgaacgccccatag

SEQ ID NO: 305347 - DNA, 735 bp, Artificial Sequence
  derived and/or modified sequence
atggagccaaacgattccacatccaccgctgtagaggagcctgatagtcttgaagtgctcgtcaagacactggattctcaaacccgaacattcatcgtgggcgcccagatgaatgtaaaggagtttaaggagcacatcgccgccagcgtaagcatcccaagcgagaaacagcggttaatctatcaaggccgcgtgttgcaggacgataagaaactgcaagaatacaatgtgggtggcaaggtgattcacctggtggagcgggcgccgccccagacacacctccccagcggtgctagctccggcaccggatctgcgtccgccacccatggcggaggcagtccacccggaacccgcggccctggggcttccgtgcatgaccgaaatgcaaactcatacgtgatggtgggtacatttaatcttccttcagaaccacgcgtgaggttggtgatggcccagcacatgataagggatattcagacacttctgagtcggatggaatgtcggggcgggccacaaccgcaacattcccagccccccccccaaccccccgctgtaacacccgagccggtggcactgagttcacagacaagcgagccagttgaatccgaagctcctccccgagagcctatggaggccgaagaggtggaagaaagagcgccagcacagaatccagaactgacccctgggccagctcctgctgggcctacgcctgctcccgagaccaacgccccatag

SEQ ID NO: 305348 - DNA, 648 bp, Artificial Sequence
  derived and/or modified sequence
atggaacccaacgatagcacctccactgccgttgaagaaccagactctcttgaagtgttggtgaaaaccctagacagtcagacaaggacatttatagtcggcgcgcaaatgaatgttaaagaattcaaggagcatatcgcagcctctgtttcaatcccatccgaaaagcagcgtctgatttatcaggggagagtgctccaggacgacaaaaagctgcaagaatacaacgtaggaggaaaggtcatccacctggtggagcgcgcaccgccgcagacccaccttccctcaggtgcctcttcaggcaccggtagcgcaagcgcgacccatggaggaggaagcccacccggaacacgcggacctggcgccagcgtgcacgacagaaacgccaatagctacgtaatggtcggcaccttcaatctcccatctgagcctcgggtacggctggttatggcccaacacatgatccgagatattcaaaccttgctgagccgcatggagtgccgcggggggccccagccacagcattctcaaccaccacctcagccgcctgcggtgactcctgagcctgtcgcgctgagctcgcaaacaagtgagccagtggaaagcgaggccccaccgagagaaccgatggaggctgaagaggtctag

SEQ ID NO: 305349 - DNA, 735 bp, Artificial Sequence
  derived and/or modified sequence
atggaacctaacgactctactagcactgccgtggaagaaccagactccctggaggtactggttaagaccctcgattcacagaccagaacttttatcgtgggcgctcagatgaatgttaaagagttcaaggagcacatagctgcttcagtctccattccctcagagaaacaacgactgatttatcagggtcgcgtcctgcaggatgataagaaactccaggagtacaacgtgggcggaaaagtaattcatctcgtcgaaagagcccccccccagactcatctgccctcaggcgccagctctggtacaggcagcgccagcgctacccacggaggtggcagccccccaggcactcgaggccccggcgccagcgtgcacgaccggaacgccaattcctatgttatggttgggacattcaacttaccaagcgaaccccgcgtgcgactggttatggcccagcacatgatcagagacatacagaccttgttgtcaagaatggagtgcagagggggaccacagcctcagcactcacagccccctccccagccacccgcagttacgccagaacctgtagccctgtcgtcacaaacctctgaacctgttgaatcagaagccccaccaagagaacccatggaggcagaggaagttgaggagagggcacccgcacagaatcctgagctgacccctgggccagccccagccgggcctacacctgcccctgagaccaacgctccatag

SEQ ID NO: 305350 - DNA, 621 bp, Artificial Sequence
  derived and/or modified sequence
atggagccaaatgactctacttcaacagccgtggaggaacccgacagccttgaggttctggttaagaccttggattcacagacacgcacttttatagttggcgcccaaatgaatgtgaaagaattcaaagagcacatcgcagcaagcgtttccatcccatcggaaaagcagagactcatctaccagggcagagtactgcaggacgataaaaaacttcaggaatacaatgtgggaggaaaggtgatacatctggttgagcgcgcacctccacagacacacctgccctcaggggccagctcaggcaccggctcggcaagcgccactcatggaggaggcagtccacccgggaccaggggacctggggcctcagtgcacgatcgcaacgcgaatagttatgtcatggtaggaaccttcaatttgccatcagaacctcgcgtcagactggttatggcccagcatatgatcagagacatccaaacactgctgtcaagaatggagtgcagagggggccctcagccccagcactcacagccccctccgcagcccccagccgtcacaccggagcctgtggccctgtccagccagaccagtgagcctgtcgaatctgaggcacccccctag

SEQ ID NO: 305351 - DNA, 621 bp, Artificial Sequence
  derived and/or modified sequence
atggagccaaatgacagtacttccactgcagtcgaggaaccggactccctggaggtccttgtgaagactctggattctcagactagaacttttattgtcggcgcccagatgaatgtcaaagaattcaaagaacacatcgctgccagtgtgtcgatcccctcagagaagcagcgtctgatttaccaaggcagagtgctccaggatgataaaaaattgcaagagtacaacgtaggcggtaaagtaatccatttggtcgaacgggctccgccacaaacacaccttccaagtggggccagctcaggcactgggtccgctagtgccacccacgggggtggctcccccccaggcacgcgcggccctggcgcttccgttcacgacagaaacgccaattcctatgtcatggtgggtacatttaacctgcctagcgagccacgtgtccgcctggttatggcccaacacatgattcgggatatccagacactactaagcaggatggagtgtcgaggcggcccgcaaccacaacattcacagcctcctcctcagccccccgctgttacacctgaacccgttgctcttagttctcagacgagcgaaccggtggaatccgaagccccaccttag

SEQ ID NO: 305352 - DNA, 648 bp, Artificial Sequence
  derived and/or modified sequence
atggagccaaacgattccactagcacggccgtcgaggaacctgacagcttagaggtcttagtgaagacactcgactctcaaactcgcacattcatcgtgggagcccagatgaacgtgaaggagttcaaagaacatatcgcggcatctgtcagcatccccagtgagaaacagaggctcatctatcagggacgcgtactacaggacgataaaaagctccaagagtacaatgtcggcggaaaagtgattcatctcgttgagcgcgcacctccacagacacatctgccctccggggcctcatcgggaacgggaagcgcctcagcaactcacggggggggcagccctccgggaacaaggggccccggcgcatccgtccacgaccgaaatgctaattcttacgtgatggttggaacgtttaatcttcctagcgagccacgagtccgtctggtgatggcccaacatatgatccgcgacatccaaaccctgttgtctaggatggagtgtaggggcggccctcagccgcagcactctcagccccctcctcagccccctgccgtgacgcccgagccagtggccctgtcttctcagacatctgagcctgtcgagtcagaggcaccgcccagagagcccatggaagccgaggaagtatag

SEQ ID NO: 305353 - DNA, 735 bp, Artificial Sequence
  derived and/or modified sequence
atggagcctaacgactccaccagcacggctgtcgaggaaccagacagtctcgaagtactggtaaagactctcgactcccagactcgcacattcatagtcggtgctcagatgaacgtgaaagagttcaaggaacacatcgccgcctccgtgtcaatcccaagcgaaaagcagcgcctgatttaccagggtagagtgctacaagatgacaagaagcttcaggaatacaacgtagggggtaaggtgatccatttggtcgagcgggctccccctcaaacccacctcccaagcggcgctagttcgggcacaggatcagcttccgccacgcacggcggtggctccccgcctggaacccgaggcccaggggcatccgtgcatgacaggaacgctaattcatacgtaatggtggggacatttaacctcccctctgaacctcgagtgaggttagtcatggctcagcacatgatcagggacatccagacactactgtcacggatggagtgtaggggggggccccaaccgcaacattctcaaccacccccacagccgcccgctgttaccccagaacccgtagctctctcttcccagacttctgaaccagtggagagcgaagcccccccgcgcgaaccaatggaggcagaggaggtggaagaacgagctcccgctcaaaatccagagctcaccccaggtcctgctcccgccgggcccacccccgcaccagaaactaatgcgccttag

SEQ ID NO: 305354 - DNA, 648 bp, Artificial Sequence
  derived and/or modified sequence
atggagcccaatgacagcaccagcacagctgtggaggagccagacagcctggaggtgctggtgaagaccctggacagccagaccaggaccttcatcgtgggcgcccagatgaatgtgaaggagttcaaggagcacatcgccgcctctgtgtccatccccagcgagaagcagaggctcatctaccagggccgggtgctgcaggatgacaagaagctgcaggagtacaacgtgggcggcaaggtgatccacctggtggagcgggccccaccccagacccacctgcccagcggggccagcagcggcaccggcagcgccagcgccacccatggaggcggcagccccccaggcacccggggccctggggcctctgtgcatgacagaaatgccaacagctatgtgatggtgggcaccttcaacctgcccagcgagccccgggtgcggctggtgatggcccagcacatgatccgggacatccagaccctgctgagcaggatggagtgccggggcggcccccagccccagcacagccagcccccaccccagcccccagctgtgaccccagagcctgtggccctgagcagccagaccagcgagcctgtggagagcgaggccccaccccgggagcccatggaggccgaggaggtgtag

SEQ ID NO: 305355 - DNA, 735 bp, Artificial Sequence
  derived and/or modified sequence
atggagcccaatgacagcaccagcacagctgtggaggagccagacagcctggaggtgctggtgaagaccctggacagccagaccaggaccttcatcgtgggcgcccagatgaatgtgaaggagttcaaggagcacatcgccgcctctgtgtccatccccagcgagaagcagaggctcatctaccagggccgggtgctgcaggatgacaagaagctgcaggagtacaacgtgggcggcaaggtgatccacctggtggagcgggccccaccccagacccacctgcccagcggggccagcagcggcaccggcagcgccagcgccacccatggaggcggcagccccccaggcacccggggccctggggcctctgtgcatgacagaaatgccaacagctatgtgatggtgggcaccttcaacctgcccagcgagccccgggtgcggctggtgatggcccagcacatgatccgggacatccagaccctgctgagcaggatggagtgccggggcggcccccagccccagcacagccagcccccaccccagcccccagctgtgaccccagagcctgtggccctgagcagccagaccagcgagcctgtggagagcgaggccccaccccgggagcccatggaggccgaggaggtggaggagcgggccccagcccagaaccctgagctgaccccaggccctgccccagctggccccaccccagcccctgagaccaatgccccctag

SEQ ID NO: 305356 - DNA, 621 bp, Artificial Sequence
  derived and/or modified sequence
atggagcccaatgacagcaccagcacagctgtggaggagccagacagcctggaggtgctggtgaagaccctggacagccagaccaggaccttcatcgtgggcgcccagatgaatgtgaaggagttcaaggagcacatcgccgcctctgtgtccatccccagcgagaagcagaggctcatctaccagggccgggtgctgcaggatgacaagaagctgcaggagtacaacgtgggcggcaaggtgatccacctggtggagcgggccccaccccagacccacctgcccagcggggccagcagcggcaccggcagcgccagcgccacccatggaggcggcagccccccaggcacccggggccctggggcctctgtgcatgacagaaatgccaacagctatgtgatggtgggcaccttcaacctgcccagcgagccccgggtgcggctggtgatggcccagcacatgatccgggacatccagaccctgctgagcaggatggagtgccggggcggcccccagccccagcacagccagcccccaccccagcccccagctgtgaccccagagcctgtggccctgagcagccagaccagcgagcctgtggagagcgaggcccctccttag

SEQ ID NO: 305357 - DNA, 648 bp, Artificial Sequence
  derived and/or modified sequence
atggagcccaacgacagcaccagcaccgccgtggaggagcccgactcacttgaagtgctggtgaagacactcgacagccaaacacggacgttcatagtaggagcccagatgaacgtcaaagagttcaaggaacacattgctgcaagtgtcagcattccatctgaaaagcagcgcttaatttaccagggacgcgttctgcaggatgacaagaagttacaagaatacaatgttgggggtaaagtgattcatttggtcgagcgagctccccctcagacccatttaccatccggcgctagttcaggcaccggctccgcctcagccacacatggcggagggtctccaccaggcacaagaggaccaggagctagtgtgcacgacagaaatgccaattcttacgtgatggttggaactttcaatctgcccagtgaaccacgagtgaggctggtaatggctcaacacatgattagagatatccagacactgctgagccgtatggagtgtcggggaggcccacagccccaacatagccaacctccaccccaaccccccgccgtcacgccagaacctgtggccctgtcctcgcagacctctgaacccgtcgagagcgaggcacctcctcgggagcccatggaggctgaggaggtgtag

SEQ ID NO: 305358 - DNA, 735 bp, Artificial Sequence
  derived and/or modified sequence
atggagcccaacgacagcaccagcaccgccgtggaggagcccgactccctggaagtgctggtgaagactctagattcccagacaagaacctttattgttggcgcacaaatgaacgtcaaggaatttaaagaacatattgccgcatcggtgagcatcccttccgagaagcagaggcttatctaccaggggcgagtgcttcaagacgataagaaactccaggagtataatgtgggaggcaaagtaatccatttggtggagagggctcctccacagacccatcttccatctggggcatcttccggcaccgggagcgccagtgctacacacggcggggggagcccacctggtactcgcgggccgggggccagtgttcatgacagaaacgcaaacagctatgtgatggtgggaactttcaaccttcctagcgagcctcgcgtaagattagtgatggcccagcatatgattcgcgacatacagaccttgcttagtagaatggaatgtaggggaggaccgcaacctcagcattcccagcctccaccacaaccaccagcagtcactccagagccagtggctttgtcttcacaaaccagcgagcctgtggagtccgaggcccccccacgggagcccatggaggcggaggaggtggaagaaagggcgcctgcacaaaatccagagctgacccccggaccggcacccgcaggaccgaccccggcccctgagacaaatgctccttag

SEQ ID NO: 305359 - DNA, 621 bp, Artificial Sequence
  derived and/or modified sequence
atggagcccaacgacagcaccagcaccgccgtggaggagcccgactctttggaagtgctcgtcaagacactagactctcaaactcggaccttcatcgttggggctcagatgaatgtcaaagaattcaaagaacatattgctgcctcggtcagcatcccatccgaaaagcagcggttgatataccaagggcgcgtcctgcaggatgacaagaaactccaggaatataacgtggggggaaaggtgatccacttggtggaacgcgctccgccccagacccacctgccgagcggcgcctccagtggtacgggatctgcctctgcaacacatggagggggctcgcccccaggaacccgcgggccgggggcatctgttcatgatagaaacgccaactcctatgtgatggtgggaacgtttaacctgcctagcgaacctagagtgcgcctggtgatggcacagcatatgatccgggacatccagacccttttatcacgaatggagtgccgcggaggacctcaacctcagcacagccagcccccccctcagccccccgccgtcacacccgagcctgtggcactgagcagtcaaacatccgagcctgttgagtctgaggcgccaccttag

SEQ ID NO: 305360 - DNA, 735 bp, Artificial Sequence
  derived and/or modified sequence
atggagcccaacgacagcaccagcaccgccgtggaggagcccgacagcctggaagtattagtgaaaacccttgacagccagacacggacctttatcgtgggggcccaaatgaacgtgaaggagttcaaggaacacattgcagctagcgtgtccattccctcggagaagcagcggctcatctaccagggtcgggtcctgcaggacgataagaagcttcaggaatataacgtgggagggaaagtgatacatctggtggagagggcccccccccaaacgcatctcccgtctggcgcctcttctgggactggctcagcgtcagcaacccacggaggtggctccccccccgggacgagaggtccaggagcgtcagtgcacgaccgcaatgctaattcttatgtcatggtcggcacctttaacctgccaagcgaaccccgagtaagattggtgatggctcagcacatgattcgggatatccaaaccttacttagcaggatggagtgccgaggggggccccaacctcagcattcccaacctcccccccaaccccctgcggtaacccccgagccggtcgccctttcctctcagactagtgagcccgtcgagtccgaagccccgcctagagagccgatggaagctgaagaagtggaagagagggcccctgcccagaatcctgaactgacacctggaccagctcccgccggcccgactcccgctccagagaccaacgctccctag

SEQ ID NO: 305361 - DNA, 735 bp, Artificial Sequence
  derived and/or modified sequence
atggagcccaacgacagcaccagcaccgccgtggaggagcccgactctttggaagtactggtcaaaacactggacagtcagacccggacctttatcgtaggtgcacagatgaacgttaaagagtttaaggagcatatcgctgcttcagtgtctataccctctgaaaagcagaggcttatctaccagggtcgcgtgctccaagacgacaagaaactgcaagaatacaacgtcggcggaaaagttatacatcttgtggaacgtgctcccccacaaacacatctcccgtctggagcctcgtccggcactggctctgccagcgcgactcacggcgggggctctccgccaggcacccgcgggccaggtgcctcggttcatgaccggaatgcaaactcttacgtcatggtgggcacttttaacttaccttctgagccacgtgtgagactggtcatggcccagcacatgattcgggacatacaaactttgctgagtcggatggaatgtcgggggggcccacaacctcaacattcacagcccccaccccagccgccagccgtgacaccagaacctgttgctctgagttctcagaccagtgagccggtcgagagcgaggcacccccccgcgagccaatggaagcagaggaggtagaagaacgcgcccctgcccaaaatccagaacttacgcctggtcctgctcctgcaggccccacaccggcccccgaaacaaatgccccctag

SEQ ID NO: 305362 - DNA, 735 bp, Artificial Sequence
  derived and/or modified sequence
atggagcccaacgacagcaccagcaccgccgtggaggagcccgacagtctggaggtgttggttaaaacccttgactcccaaaccagaacttttatcgtaggtgcccagatgaatgtgaaagaattcaaagagcacatcgcggccagcgtgtctatcccatcagaaaagcagagactcatctaccaggggagagtgctccaagacgataagaaactgcaggagtataacgttggaggaaaggtgattcacctcgtggagagagccccaccacaaacacatctcccttcaggcgcctcctccggcacaggatcagccagtgctacgcatggcggcgggagcccacccggcacacggggtccaggagcttccgtgcacgacaggaacgctaactcctatgttatggtgggcacctttaacctgccgtccgagcctcgcgtgaggcttgtcatggcccaacacatgattagagacatacaaaccctgctctcacgtatggagtgtcgcggtgggcctcagcctcagcattcccagccccctccacaaccccctgctgttacacccgagccagtggccctgtcgagccagacctcagaacctgtggaaagtgaagcgcccccaagagaacctatggaggcagaggaggtcgaggagcgggcccccgcgcagaatcccgagctgactccaggtcctgctcccgctgggccgacacccgccccagagacaaacgctccatag

SEQ ID NO: 305363 - DNA, 735 bp, Artificial Sequence
  derived and/or modified sequence
atggagcccaacgacagcaccagcaccgccgtggaggagcccgactcgctggaggtgctggtgaaaacgttggactcccagacgcgtaccttcatagtcggggctcagatgaacgttaaagaatttaaggaacatattgcggcgtcggtttccatcccgagcgagaaacaaagactaatctaccagggcagggtcttgcaggacgacaagaagctgcaagagtataacgtcggaggaaaagtcattcatctcgtggaacgagcgcccccacagacccacctccctagcggggcatcaagcggcaccggaagcgctagcgccacccacgggggagggagtccaccgggcacccgcggaccaggcgcttctgtacatgacagaaacgctaattcatatgtgatggtagggacatttaacttgccctcagaaccacgtgttaggctggttatggcccagcacatgatccgcgatattcagacactgctcagtaggatggagtgtcgaggagggccccaacctcagcattcgcagccccctcctcagccccccgcagtgacacccgaaccggtggcactttcctcccaaaccagcgagcctgtcgaaagcgaggcacctccacgggaaccaatggaagccgaggaagtggaggaacgagcccctgcacaaaacccagagttgacacccggtcccgcgcccgctggacccacccccgcccctgagaccaatgcaccctag

SEQ ID NO: 305364 - DNA, 648 bp, Artificial Sequence
  derived and/or modified sequence
atggagcccaacgacagcaccagcaccgccgtggaggagcccgacagcctggaggtactcgttaagactttagacagccagaccaggactttcatcgtcggagctcagatgaacgtgaaagagtttaaggagcatatcgccgcctccgttagcattcccagcgaaaagcagcggctgatataccaggggcgtgtcttgcaggatgacaaaaaattacaagagtacaacgtcggtggcaaggtcattcatcttgtggaacgcgctcctccccagacacacttgcctagcggtgcttcctccgggacagggagtgcctccgccacgcacggaggagggtccccccccgggacacgcgggccgggggccagcgtccacgaccgtaatgctaactcctacgtgatggtcggaacctttaatttgccgtccgaacctagggtccggctggttatggctcagcatatgatccgcgacattcaaactctcctgtccagaatggaatgcaggggcgggccacagccacagcactctcagcccccgcctcagccaccagctgtgacccccgagccggtcgctctgagctcacagacaagcgaaccagtggaaagcgaggcgccgccgagagagcccatggaggcagaggaagtgtag

SEQ ID NO: 305365 - DNA, 735 bp, Artificial Sequence
  derived and/or modified sequence
atggagcccaacgacagcaccagcaccgccgtggaggagcccgacagcctggaggtacttgttaagacactggactcccagaccagaaccttcatcgtgggagctcaaatgaacgtgaaagagttcaaagagcatattgccgcatccgtttccatcccatcagagaagcagagattgatttaccaaggccgggtgttgcaggatgataagaaactgcaggaatacaatgtcggtgggaaagtgattcacttagtggaacgcgctccacctcagactcacctgcccagtggcgcatcttcggggactggatcagccagtgccacacacggcggaggctccccacctggcacgcgcggtcccggcgccagtgtgcacgaccgaaacgctaacagttacgtgatggtcgggaccttcaacctccctagcgaaccccgcgtgcggctggtgatggctcagcatatgattagagacatccagacactgctgtcacgcatggaatgccggggtggtccccagcctcagcactctcagcctcccccccaaccgcctgcagtgacccctgagcccgttgcactgagctcccaaaccagcgaacccgttgaaagcgaagcaccccctcgggaacctatggaagctgaggaggttgaggaaagagcccccgcccagaatccggaactgacaccaggaccagcacccgccggtcctacccccgcccctgaaacaaacgcaccttag

SEQ ID NO: 305366 - DNA, 735 bp, Artificial Sequence
  derived and/or modified sequence
atggagcccaacgacagcaccagcaccgccgtggaggagcccgactcactggaggtgctagttaagaccctagattcgcaaacacggacctttatcgtgggggcacagatgaacgtgaaggagtttaaggagcatattgccgcctcagtttctatcccatcagagaagcagcggctgatataccagggtagggtactgcaggacgacaagaaactgcaggaatataacgtgggcggcaaagtgatccaccttgtggaacgtgcccctccgcagacccacctgccctccggcgcctcgtccggcactggcagcgcctcggccacacacgggggcggttctccaccaggtacccggggcccaggcgctagtgttcacgataggaacgccaacagttatgtgatggttggcaccttcaacctaccttccgaaccccgagttcggcttgtgatggcccagcatatgattcgcgatattcagactcttcttagcaggatggaatgcagaggcggaccccagcctcagcactcacaacctccccctcaaccacctgcagtaacccctgaacccgtcgccctgagttcccagacatcagagccagtcgagtccgaagcccctccaagagaaccgatggaagccgaagaagtcgaggagcgagcccccgcccagaaccccgagcttacaccgggtccagctccagcgggccctacccctgcccccgagacaaacgcgccctag

SEQ ID NO: 305367 - DNA, 735 bp, Artificial Sequence
  derived and/or modified sequence
atggagcccaacgacagcaccagcaccgccgtggaggagcccgactcattagaagtgctggtcaaaactctggactcccagactcggacctttatcgttggggcccagatgaacgttaaagaatttaaagagcacatcgccgcatcagtgtcaatcccatcagaaaaacaaaggctgatttaccagggccgcgtgctccaggacgacaagaagcttcaggagtataatgtcggagggaaggtgatacacttggtagaaagagcccctccccagacccatctgccatccggggcatcaagcgggactggaagcgccagtgcgacccatgggggaggttcaccacctggcacaagaggccccggcgcatcagttcacgaccggaatgctaactcttacgtgatggttgggaccttcaacctgccgtcagagccccgggtccggctggtgatggctcagcacatgatccgcgatattcagaccctgctatccagaatggaatgcaggggaggccctcaacctcaacatagccagcccccccctcaaccaccagccgttactccagagcccgtagctctgagctcccagacatccgagcctgtggagagtgaggcgcccccccgtgagccaatggaggccgaggaggttgaggagagagccccggcacagaatcccgaattgacccctgggccggctcccgccggccccactcctgctccggagactaacgccccgtag

SEQ ID NO: 305368 - DNA, 621 bp, Artificial Sequence
  derived and/or modified sequence
atggagcccaacgacagcaccagcaccgccgtggaggagcccgacagcctggaggttctggtaaaaacgctggacagccagacaagaacctttattgtgggagctcagatgaatgtcaaggagtttaaggaacatatagcagcctccgtctccataccaagtgaaaaacagcggctcatttatcaagggagggttctgcaggatgacaagaagttgcaggagtacaatgtaggggggaaagttatccaccttgtggagagggccccaccacagacgcacctgccaagcggggctagtagtggaacgggctccgcgtccgcaacacatggtgggggttctccgcccggcaccagaggaccgggagcttccgtgcacgacaggaacgccaactcttatgtgatggtcggaacctttaatttgccgagcgagcctcgcgtaaggctcgtgatggcgcaacatatgatccgtgatattcagacgctcctctccagaatggagtgcaggggaggtccacagccccagcacagtcagcctcctcctcagccacctgcagtgacccctgaacctgtcgcgttgagttcacagactagcgagccggtggagtccgaagcgcccccatag

SEQ ID NO: 305369 - DNA, 735 bp, Artificial Sequence
  derived and/or modified sequence
atggagcccaacgacagcaccagcaccgccgtggaggagcccgacagcttggaagtgttggtgaagaccctggactcacagacgaggactttcatcgttggcgcacagatgaatgttaaagagttcaaagaacacatcgcagcttcggtgagcatcccttctgagaagcagcgcctaatttaccaggggagagtgcttcaggacgataagaagctgcaggagtacaacgtaggaggaaaggtcattcacctggtagaacgtgcaccgccacaaacccaccttccaagtggagccagctctggcacaggcagcgcaagcgcaacacatggtggaggttctcctcctggaacccgagggcccggagctagcgttcacgaccgaaatgccaattcttacgttatggtgggaaccttcaatctgcctagcgagccccgggtccgtctcgttatggcacaacacatgattagggatatccagaccctgttgtcccggatggagtgcagaggtggcccccaaccccagcattcgcagccaccaccccagccaccagctgtgaccccggagcccgtggccctctctagccagactagcgaaccggtcgagtcagaggcacctcctagggaaccaatggaggctgaggaggttgaagaaagagcaccggcccagaacccagaattgactcctggtcccgctccggccggtccaacgcctgccccagagactaatgccccatag

SEQ ID NO: 305370 - DNA, 621 bp, Artificial Sequence
  derived and/or modified sequence
atggagcccaacgacagcaccagcaccgccgtggaggagcccgactctttagaagtgctggtaaagacccttgactctcaaaccagaactttcatcgttggtgcccagatgaacgtcaaagaattcaaggaacacattgccgctagtgtttccatcccatcagagaaacagaggttaatttatcagggacgggtgctgcaagatgacaagaagctgcaggagtacaatgtgggagggaaagttatccatctcgttgaacgcgcacctcctcagacccatctgccaagtggggcttcctccggcactggcagcgcctccgccactcacgggggaggttctccaccaggtacacgcgggcctggagcctcagtccacgataggaatgcaaatagttatgtgatggtaggtactttcaatctgccatccgagccacgggtgcggctggttatggcccagcatatgattcgggatatccagacacttctttccaggatggagtgcaggggggggcctcagccacagcattctcaaccaccaccacagccccccgccgttaccccagaacctgtggcgttatcctcacagacctctgaacccgtggagtcagaagcacccccttag

SEQ ID NO: 305371 - DNA, 735 bp, Artificial Sequence
  derived and/or modified sequence
atggagcccaacgacagcaccagcaccgccgtggaggagcccgactctcttgaggttttggttaagacccttgactctcagacacgcacctttatagttggcgctcaaatgaacgttaaggaatttaaggagcacattgcggcttcagtatcaatcccaagcgagaagcagcggctgatttatcaaggacgagtacttcaggacgataaaaaactgcaggagtacaacgtgggaggcaaggtgatacacctagtcgagcgggctcccccacagacacatctccccagtggagcctccagtggtacaggcagcgcctctgccacccacggcgggggtagtcctccaggcactcgcggccccggggccagtgtccacgatcgcaatgcaaacagctatgtgatggtgggcacattcaatcttcccagcgaacctcgtgtcagactcgttatggcccagcatatgattcgcgacattcagaccctgctgagcaggatggagtgcaggggtgggcctcagcctcagcacagccagcccccgccacagcccccagcagttacccctgagcccgtggccctgagctctcagacctcagagcctgttgaatctgaggcgcctccgcgggaacctatggaggctgaggaagtggaagaacgcgccccggcccagaatcctgagttgactccaggacctgctcctgccgggcccacgcctgcccccgagacaaacgccccttag

SEQ ID NO: 305372 - DNA, 648 bp, Artificial Sequence
  derived and/or modified sequence
atggagcccaacgacagcaccagcaccgccgtggaggagcccgactcgttagaagtcctcgtgaagacgctcgacagccagacccgcacctttattgttggagcacagatgaatgtgaaggagttcaaggagcacatagcggcaagcgtgagtataccatctgaaaagcagaggctgatctaccaagggcgggtcctccaggacgacaagaagctccaggagtataacgtcggcggtaaggtcatccacctggtggaacgggctcctcctcagacgcacctgccaagtggagcgtcaagtgggaccggttctgcctcagcgacgcatggtggcggttcacctccaggcacccgtggaccgggcgcgagcgtgcacgataggaacgctaattcctacgtgatggtaggcaccttcaacctgccatccgaacctagggtccgcctggtcatggcgcagcacatgatcagggatatccaaacattgctcagccgaatggaatgtaggggtggtccccagccacaacattcacagccaccaccacagccaccggctgtaacaccggagcccgtagcactgtcaagccagacctccgagccagtagagagcgaagcccctcctcgggaacctatggaggccgaagaggtttag

SEQ ID NO: 305373 - DNA, 735 bp, Artificial Sequence
  derived and/or modified sequence
atggagcccaacgacagcaccagcaccgccgtggaggagcccgactccctcgaagtccttgtgaagactctggattcccagacacgaacttttatcgtgggcgcccagatgaacgtcaaggaatttaaggaacacatagcagcctccgtgtcaataccgtccgaaaaacagagactgatttatcaaggccgcgtcctgcaggatgataaaaaactacaggagtataatgttggaggaaaggtcatccacttagtggagcgcgcacctcctcagacgcacctgccttcaggggccagtagcgggacgggctccgcttctgctacacacggggggggatccccacctggcacccgaggtccaggcgcgtccgtgcacgacaggaatgctaacagttatgtcatggtaggaacgtttaatctgcccagcgaaccacgagtgcgacttgtgatggcccagcatatgatccgcgatatacaaacactgttaagccggatggaatgtcgggggggtcctcaaccacagcatagtcagcctccacctcaacccccggcggtgaccccagagcctgtcgctctgtctagccagacatctgaacctgtggaatccgaagccccccctcgagaaccgatggaggcggaagaggtggaagaacgcgcccccgcccaaaatcccgagcttacccccgggccagcccccgccgggcctacacctgcccccgagaccaacgcgccttag

SEQ ID NO: 305374 - DNA, 648 bp, Artificial Sequence
  derived and/or modified sequence
atggagcccaacgacagcaccagcaccgccgtggaggagcccgacagtctggaggtgctggtgaagaccctcgactctcagacgcgcacatttatcgtgggggcgcagatgaacgtgaaggaatttaaggaacatatcgctgcgtctgtgagcataccaagtgaaaagcagaggctcatttatcagggccgtgtgctgcaggacgacaaaaagcttcaggaatataacgtcggtggtaaggtcattcatttagtggagcgtgccccgccacagactcacctgccaagcggtgcgagcagcggtactggtagcgcgtccgcaactcatggaggagggtctcctcccggcaccagaggcccgggggcatctgtccacgatcgcaatgcgaacagctatgtcatggtaggtacttttaacctgccaagtgaacctagagttcgtctcgttatggctcaacacatgatccgagacatacaaaccctgctgtctcgaatggagtgccgcggaggcccccagcctcagcattcccagccaccccctcagcccccagccgtcacccccgagcccgtcgctttaagcagccagacaagcgagccagtggagtctgaggctcccccacgcgaacctatggaggctgaggaagtgtag

SEQ ID NO: 305375 - DNA, 648 bp, Artificial Sequence
  derived and/or modified sequence
atggagcccaacgacagcaccagcaccgccgtggaggagcccgacagcttggaggtcctggtcaagaccctcgacagccagaccaggacttttatcgtgggtgcccagatgaacgtgaaggaatttaaggagcatatcgccgctagcgtgtcaataccaagcgagaagcagcggctaatttatcaaggaagggtgctccaagacgataaaaagctccaggaatataacgtcggcggaaaagtcatacacttggtcgagcgcgcccctccccagacacacctcccctcaggcgcatcatcaggaacaggctcagcgtcagccacacacggtggcggctctccccctggaacacgaggccctggcgcctctgtccatgacagaaacgctaactcttatgtgatggtgggaaccttcaatctaccttcagaaccccgggtgagactagttatggcccaacatatgatcagagacatccaaaccttactgagtcgaatggagtgtaggggcggaccccagccacagcattctcagccccctcctcagccgccggctgtgacccctgagcctgtcgcactcagcagtcagacgtctgaacccgtcgaaagcgaggccccacctcgagagccgatggaggcggaggaagtgtag

SEQ ID NO: 305376 - DNA, 621 bp, Artificial Sequence
  derived and/or modified sequence
atggagcccaacgacagcaccagcaccgccgtggaggagcccgactccctggaggttttggtgaagaccctcgactcccagacccgtacctttatcgtcggagctcaaatgaacgtgaaggaatttaaggagcacatcgcagctagcgtgtctataccttccgaaaaacagcggctaatttaccagggcagagtattgcaagacgataaaaagttgcaggagtacaacgtaggagggaaggtgatacaccttgttgaacgggcaccacctcagacgcatctcccctccggcgctagctctggcacaggtagtgccagcgccactcatgggggcgggagtccacctggcactcgtggcccaggcgcttctgttcatgacagaaatgcaaattcttacgtcatggttggaaccttcaatctgcctagcgagccgagggtgaggctggtgatggcgcagcacatgatcagggatatccagacattactctctagaatggagtgcagagggggaccacaacctcaacatagccagcccccccctcagccgcccgcggtgactcccgagccggtggcactgagttcacaaacaagtgagcccgtggaatcagaagcccctccttag

SEQ ID NO: 305377 - DNA, 735 bp, Artificial Sequence
  derived and/or modified sequence
atggagcccaacgacagcaccagcaccgccgtggaggagcccgactcgctcgaggtacttgtcaaaacacttgactcccagactcgaaccttcatcgtcggagctcagatgaacgtgaaagaattcaaggagcatatcgccgcctccgtgtctatcccaagcgagaagcagcggttgatatatcaaggacgagttttacaggatgataagaagctgcaggaatacaatgtggggggcaaggtaatccacctggtagagagggctccgccccagactcacctccccagcggggcctcatctggtacgggctccgcttctgcaactcacggggggggcagtccccctgggactagaggccctggggcttccgtacacgaccgcaacgccaattcctatgtcatggtgggcaccttcaatctgccatccgaacctagggtcaggctcgtcatggcccagcacatgatacgtgatatccagaccctgctctctaggatggagtgcagaggaggacctcagccacagcattcacagcctcctccacagcctcctgcggtgacacctgaacccgttgcgctctcttcccaaacaagtgaacctgtagaaagcgaagcccctccaagggagcccatggaagcagaagaagtggaggagcgcgccccggctcagaaccctgagttgacgcctggaccagctcccgccgggccaactccagctcctgagaccaacgcaccttag

SEQ ID NO: 305378 - DNA, 735 bp, Artificial Sequence
  derived and/or modified sequence
atggagcccaacgacagcaccagcaccgccgtggaggagcccgactccctggaggtgctggttaaaacattggactctcaaacccgtacattcatcgtgggcgctcaaatgaatgttaaggagttcaaagagcacatcgccgctagcgttagtattccatccgagaaacaacgcctcatttaccagggcagggtcctgcaagacgacaagaaattgcaggagtacaacgtgggcgggaaagttatccatcttgtggagagggcgcccccacaaacccacctcccatcaggtgccagtagcgggaccggcagcgccagcgccactcacggaggagggtcaccacctggcacacgtggaccgggggcaagcgtgcacgatcggaatgccaattcctatgtgatggtggggacttttaacctgccctcagagcctcgcgtaagactggtgatggcacaacacatgattagggatattcaaacattactgagccggatggaatgccgaggaggtccgcagccgcagcatagccagcctccgccacagccgccagccgttacacctgagcccgtcgctctgagctcccaaaccagcgagccagtcgagtctgaagcccctccccgggaacctatggaagctgaggaagttgaggaacgcgccccagcacagaacccagagctgacccccggaccggcccctgccgggccaacccctgcccccgagacaaacgccccgtag

SEQ ID NO: 305379 - DNA, 621 bp, Artificial Sequence
  derived and/or modified sequence
atggagcccaacgacagcaccagcaccgccgtggaggagcccgacagccttgaagtcttggtcaagactctggatagccagactcggacgttcattgtcggcgcccagatgaacgtcaaagagttcaaagagcatatagctgcctccgtgagcattccctccgagaaacagagactcatctatcagggtcgcgtgctccaagatgataagaaactgcaggagtacaatgtgggcgggaaggtcattcatctcgttgagagagcaccaccacagacgcacctgcccagcggcgcgtcttccggaactggttccgcttctgcaacccacggcggggggtctccaccggggacacgtgggccaggggcgtccgtgcatgacaggaacgcgaactcgtacgtgatggttggaacctttaatttgccctccgagcctagagttaggctggtaatggctcaacatatgatccgggacattcagactctcctgtcaagaatggaatgccggggtggcccccaaccacagcacagccaaccaccccctcagcctccggccgtcactccggagccagtcgcccttagtagccaaactagtgagcctgtggaatccgaggcccccccatag

SEQ ID NO: 305380 - DNA, 735 bp, Artificial Sequence
  derived and/or modified sequence
atggagcccaacgacagcaccagcaccgccgtggaggagcccgactcactggaggttctggttaagacactagattcccagacaaggacatttatcgtgggcgcccagatgaacgtcaaagaatttaaagagcacatcgcggcctcggtaagcattccttcggagaaacagcgacttatatatcagggtagagtcctgcaagatgataaaaagctccaggagtacaacgtcggaggtaaggtgattcatctcgtagagcgggctcccccccagacgcacctgccaagcggggcatcatccggaactgggagcgcctccgccacgcatggtgggggttctccacccggaacccggggcccaggagcaagtgtacacgacaggaacgccaattcttacgtgatggtgggcacatttaacctgccttctgagcctagggtgaggctcgtgatggcacagcacatgattcgagacattcaaacacttttgtctcgaatggagtgcagaggcgggccacaaccacagcactcacagccaccacctcagcctcccgcggttacccctgaaccggtggctctctctagccagacaagtgagcccgtggagtctgaggcacccccaagagagcccatggaggctgaggaagtcgaagagcgcgctcctgcacagaatccagaactgacaccagggcctgccccggccggcccaacaccagctcccgaaacaaacgccccgtag

SEQ ID NO: 305381 - DNA, 735 bp, Artificial Sequence
  derived and/or modified sequence
atggagcccaacgacagcaccagcaccgccgtggaggagcccgactccctggaagttttggtgaaaaccctggattcccaaaccaggactttcattgtgggcgcccagatgaacgtgaaagaatttaaggaacatattgccgcaagcgtttctattccttcagaaaaacagcgtctgatataccagggtcgcgttcttcaggacgataagaagctgcaggagtacaatgtaggaggcaaagtgattcacttggtcgagcgtgcgcccccacagactcatctgccctctggagccagcagtggaacaggctcagctagcgcaacacacggaggtgggagcccccccggcaccaggggtcctggagcgtctgtgcacgatcgcaatgcaaacagttacgtcatggtaggcacctttaatctccccagcgaacctcgcgtccgactcgttatggcccaacatatgatccgcgatatacagacactcttgagccgcatggaatgccgcggggggccccagcctcagcactctcagccgccaccacagcccccggcagtcacccctgagcctgtcgctctgtctagccaaacaagtgagcctgtcgagtctgaagctccaccccgggaaccaatggaagccgaggaagttgaggaacgtgcaccagcccagaatcccgagctgacacccggaccagccccagccggcccaacacctgccccggaaactaacgctccttag

SEQ ID NO: 305382 - DNA, 735 bp, Artificial Sequence
  derived and/or modified sequence
atggagcccaacgacagcaccagcaccgccgtggaggagcccgactccctggaggtactggtgaaaactttagacagtcagacaaggacattcatcgtgggagctcagatgaacgtcaaagagtttaaggagcatatcgcagcatcagtgtccatcccctctgagaaacagcggttaatctaccaagggcgggtgctgcaggatgataaaaagctgcaggagtataatgtaggtgggaaagtgatacatctggtagaacgggctccaccccaaacgcatctaccatctggcgcctcaagcggcacagggagcgcctcagctacacatggtggaggcagtcccccaggtacccggggccctggtgctagcgtgcacgaccgaaacgccaattcctacgtaatggtgggcaccttcaatcttccatcggaaccaagggtcagactcgtgatggctcagcacatgattagagatattcagaccctcctgtcaagaatggagtgtcgtggcgggcctcaaccacaacacagtcagcccccaccccaacccccggcagtgacacccgaacctgtcgctctttcatcacagacatccgagcctgtggagagcgaagccccaccccgtgaacctatggaggcggaggaggttgaggagcgagctccggcccagaaccccgagctgacaccaggcccagcgcctgccggccccacgccggccccggaaacaaacgctccgtag

SEQ ID NO: 305383 - DNA, 735 bp, Artificial Sequence
  derived and/or modified sequence
atggagcccaacgacagcaccagcaccgccgtggaggagcccgactcgctcgaagttttggtcaaaaccttggactctcaaacacgaacgttcatcgtaggtgcgcaaatgaacgtgaaagagtttaaggagcatatcgccgccagcgtctccattccctccgaaaagcagagactaatttaccaaggacgtgtcctccaggacgataagaaacttcaggagtataatgtcggaggcaaggtgatccatctggtagaacgagcaccaccacagactcatctcccgtctggggcctcctcaggaacaggcagcgccagcgctacacatggcggtgggagccctcccggtacacgcggccctggggcgtcggtccacgatagaaacgctaattcgtatgtgatggtcggcacctttaatttacctagtgaaccacgtgtgcgcctagtaatggcccagcacatgattcgcgatattcagactctgctgtcacgcatggagtgccgagggggccctcaaccccagcatagtcaaccaccgccccagcccccagcagttactcctgaaccagtggcactctcttctcagacgtcagaacccgtggaatcagaagctccccccagggaacccatggaagccgaggaggtggaagagagagcacccgctcaaaatcccgaactgacaccaggccctgctcccgccggacctactccagcaccagaaacgaatgctccatag

SEQ ID NO: 305384 - DNA, 735 bp, Artificial Sequence
  derived and/or modified sequence
atggagcccaacgacagcaccagcaccgccgtggaggagcccgactctttggaggtgctcgtgaaaacactggactcgcaaacccgtacttttatcgtgggggctcagatgaatgtcaaagagttcaaagagcatattgcagcctccgtgtccattccctctgagaagcagcgactgatctatcagggtcgcgtcctgcaggacgataaaaagctccaagagtacaatgtgggggggaaagttatccacctagtcgagagagctccgcctcagactcatctcccctctggggccagcagtgggacaggcagcgcgtccgctacccacggaggaggcagcccccccggaacacggggccctggtgcaagcgtccatgaccgcaacgccaactcatatgtaatggtggggaccttcaacctcccatcagaaccccgagtcagactggtgatggcccagcacatgattagggacatccaaaccctactttctaggatggaatgccgcggcgggcctcagcctcagcacagtcagcccccaccccagccccctgctgtcacgcccgaaccagtggccttatcttcccagactagcgagcctgtggaatcagaagccccccctcgcgagcccatggaggcggaagaggtcgaagagagagcccccgctcagaaccctgagctgacccccggacctgctcctgccgggccaacccctgcccctgagactaacgccccatag

SEQ ID NO: 305385 - DNA, 735 bp, Artificial Sequence
  derived and/or modified sequence
atggagcccaacgacagcaccagcaccgccgtggaggagcccgactctctcgaagtcctagtgaaaacgctcgacagtcagactagaacctttatcgtgggtgctcaaatgaatgttaaggaatttaaggagcacatcgctgcatctgtcagcatccccagcgaaaagcagcggctgatttaccagggccgggtgttacaggacgataaaaagcttcaggagtacaacgtcggcgggaaagtcatccatttggtcgagcgagctccccctcagacccacctcccctcaggggccagcagcggtacgggcagtgcctctgcgacacacggtggaggcagtcctcccgggactcgcggacctggcgcctcagtgcacgatcgaaacgccaatagctatgtcatggtgggtacttttaacctcccctccgagccaagagtgagactggttatggcccagcatatgattcgggacatacagacgttactctctcgaatggaatgtcggggaggaccccagcctcagcattcacagccgcctccacagccccctgctgtgactcctgagcctgtggctttatcatcacagacctcggaaccagtcgagtcagaggctcccccaagagaaccaatggaggccgaggaggtagaggaacgggctcccgctcagaaccctgaactgacaccaggcccggctccagcaggacctactccggcacctgagacaaacgccccatag

SEQ ID NO: 305386 - DNA, 648 bp, Artificial Sequence
  derived and/or modified sequence
atggagcccaacgacagcaccagcaccgccgtggaggagcccgactcattggaggtcctcgtgaagacactggattctcagacccgtaccttcatagtcggagctcaaatgaatgtgaaagagtttaaggagcatatagctgcgagcgtatccatccctagcgagaaacagcgattgatataccaaggaagagttctacaagatgacaaaaagttacaggaatataatgtgggcggaaaggtgatccatctagttgaacgggcacccccccagactcatctcccgtctggggcatcatctgggaccgggagcgcctccgccactcatgggggaggctccccaccaggtactcggggccccggagcatccgtgcacgataggaatgctaacagctatgtgatggtggggaccttcaatctgccctcagaacctagagttcgactagttatggcccagcacatgatcagagatattcagaccttactatcccgcatggaatgcagaggcgggcctcaacctcagcattcccagcctccaccccagcctcctgccgtcacccctgagccagtggctctatccagccagacctctgagcccgtcgaaagcgaggcccccccccgggaacctatggaggccgaagaggtgtag

SEQ ID NO: 305387 - DNA, 735 bp, Artificial Sequence
  derived and/or modified sequence
atggagcccaacgacagcaccagcaccgccgtggaggagcccgacagccttgaggtgcttgtcaagacgttggactcacagactcgcacattcatagttggcgctcagatgaacgttaaggaattcaaagagcacattgcagcctctgtatccatccctagtgagaaacagcgtctcatctatcagggtcgggtcctccaggacgacaagaagctgcaggaatataatgtgggagggaaggttattcatttagtggagcgtgcacctccacagactcacctcccctcaggagctagttccggcacggggagcgccagtgccacacacggtgggggttctccccccggaactagaggtcccggagccagcgtacatgaccggaacgcaaacagctatgtcatggtaggaactttcaaccttcccagcgagccgcgtgtccggctcgtgatggcacagcacatgataagagacattcagacactgttgtcacggatggagtgcaggggcggaccccagccacaacattcccagcccccaccccagccccccgcagtaacacccgaaccggtggctctatcgagccagacttctgaaccagtcgagtctgaggcgccacctagggagcccatggaagccgaagaggtggaagagcgggcccctgcacagaatcctgaactgactcctggtccagctcctgcgggaccaaccccagcaccggaaaccaacgctccttag

SEQ ID NO: 305388 - DNA, 621 bp, Artificial Sequence
  derived and/or modified sequence
atggagcccaacgacagcaccagcaccgccgtggaggagcccgactctctggaagtgctggtaaaaacgctggatagtcaaacgcgtactttcatcgtgggagcccaaatgaatgttaaagagtttaaggaacatattgcagctagcgtctctatcccttctgagaaacagcgtctgatttaccagggccgggtcttgcaggacgacaagaagctgcaggaatacaacgttggggggaaagtgattcacctggttgagagagctcctccccaaacacacctcccttccggcgcatcgagtggaactgggtcagccagtgcaactcacggcggaggttctccccccggaacccgggggcctggcgcttccgtccacgatcgaaacgctaattcctacgttatggttggtacatttaaccttccctccgaaccacgagtgagactcgtgatggcacagcacatgatccgagacatacagacgctcttatcccggatggagtgccgcgggggaccccagccccaacattcccagccaccaccccagccccccgccgttacccctgaaccggtggccctcagctcccagaccagtgaacccgtggagtcagaggctccaccttag

SEQ ID NO: 305389 - DNA, 621 bp, Artificial Sequence
  derived and/or modified sequence
atggagcccaacgacagcaccagcaccgccgtggaggagcccgacagtttggaagttctggttaaaacactggatagccagacacggacattcatcgtgggcgcccagatgaacgtcaaagagttcaaagaacacatcgccgcatctgtgtccatccctagcgaaaaacagagactgatttaccaagggcgcgtgttacaggatgacaagaagctacaggagtataatgttggagggaaagtcatacatctagtggagcgagccccgccccaaactcacttgccttccggggcctcgtcagggaccggatcagccagcgccacgcacggaggaggctccccacccgggacccgaggtccaggcgccagtgtgcatgatcgaaacgccaactcctacgtgatggttgggacgtttaatctccccagtgagccgagggtcaggcttgttatggcacagcacatgattcgggacattcagacgcttctcagccgcatggaatgtagggggggaccacagccacagcatagccagccacctcctcagcctcctgccgtgaccccagaaccggtggctctcagctcccagacctcagagcctgtggagagcgaggcccctccctag

SEQ ID NO: 305390 - DNA, 648 bp, Artificial Sequence
  derived and/or modified sequence
atggagcccaacgacagcaccagcaccgccgtggaggagcccgactctctggaagtgctcgtgaagaccctcgacagccagactaggaccttcatcgttggcgcacagatgaacgtgaaagagttcaaagagcacattgcagcttccgtgtccataccttcagaaaaacagcgactgatctaccagggcagggtactgcaggacgacaagaagctgcaggagtacaacgtagggggcaaagtgatccatctggtcgaacgcgctcccccccagacacacttgccgtccggcgcctcttctgggaccggaagcgcgtctgccacacacgggggaggttccccacccgggacccgaggtccaggcgccagcgtgcatgacaggaatgccaattcctacgtgatggtgggaacatttaatctgccaagtgaacccagggtgagactggtaatggcgcagcatatgatccgagacatccagacgttgttgtccaggatggagtgtaggggcggcccgcagccccaacacagtcagcccccccctcagcctcccgctgtgactcccgagccagtcgcactgagtagccagacaagcgaaccagttgagagtgaagcccccccacgcgagccaatggaagccgaggaggtctag

SEQ ID NO: 305391 - DNA, 735 bp, Artificial Sequence
  derived and/or modified sequence
atggagcccaacgacagcaccagcaccgccgtggaggagcccgactcattggaagttctcgtgaagactttagacagccagacacgtacttttatcgtgggtgcccaaatgaacgtgaaggagttcaaagaacacatcgccgccagtgtgtccatcccctctgagaaacagcgactaatataccaggggagagtgctgcaggatgacaagaagctacaggagtacaatgtcggagggaaagttatacatctggtggaacgcgccccccctcagactcacctgccctcgggtgctagttccgggacagggtctgctagcgctacacatggtgggggatccccaccaggcactagagggcctggagcctccgtacatgatagaaatgccaacagctacgtcatggtgggcactttcaatttgccatcggaacccagagtaaggctagttatggctcaacacatgatccgcgacattcagacactgctgtcccgaatggagtgccggggcggaccacaacctcagcacagccagccacccccacagccacccgccgtaacaccagaaccagtggcactgagcagtcagacatccgaacctgtcgaaagcgaggccccaccacgcgagccaatggaagccgaagaggtcgaagagagagcgccagcccagaaccccgagctcacgccgggacctgccccagccggacctacaccagctcccgaaacgaacgccccctag

SEQ ID NO: 305392 - DNA, 648 bp, Artificial Sequence
  derived and/or modified sequence
atggagcccaatgactccacatctactgccgtagaggagcctgactcgctggaagtgctggtgaaaacattggattctcagacccgcacattcatcgtgggcgctcagatgaacgttaaggagtttaaggaacacattgccgcttctgtgtccataccatcagagaaacaaaggttgatctatcagggaagagtcttgcaggacgataagaagctgcaggagtacaatgtcggcggaaaggtgatccaccttgtagaacgagcgcctcctcagacgcacttgccatccggtgcctcctccggcacgggctccgcatctgccacacatggcggaggaagtccacccggtaccaggggacctggggctagcgtgcatgatcgcaatgcaaacagttatgtcatggtcggtaccttcaaccttccatctgaacctcgggtgagactggtgatggcgcagcacatgattcgcgatattcaaaccctgttgtcacgtatggaatgccgcggaggtccccagccacaacactcccagcctccacctcagccgcctgcagtgacaccggaacccgttgcattatcatcacagacctccgaacccgtggaaagcgaggcacctccacgtgaacctatggaggcagaggaggtctag

SEQ ID NO: 305393 - DNA, 735 bp, Artificial Sequence
  derived and/or modified sequence
atggaacctaatgattcaaccagcacagctgtggaggaacccgactctttagaggttctggttaagaccttggactcacagactcgcacttttatagtcggagcccagatgaacgtgaaagaattcaaagagcatatagccgcatcggtgagcatcccgagtgagaagcagagattgatctatcagggaagagtgttgcaagacgataagaagctgcaggaatacaacgttggaggaaaggtgattcatctagtggagagggctcccccacagacccatctgccctctggagcttcttccggaaccgggagcgcctcagcaacacatgggggagggtctcctccagggacacgaggtccaggtgcttctgtacacgaccggaacgctaacagctacgttatggtgggaacttttaatctgccatccgagcccagagtgcgcttggtcatggcgcagcatatgattcgcgatatacagactttgctgtcccggatggagtgtagaggaggccctcagcctcagcatagccaacctcctccccagcctcccgctgtgacccccgagccagtggctctctctagtcagaccagcgagcccgttgaatctgaggcaccccctcgagaacccatggaggccgaggaagtcgaagagagggctcccgcacagaaccccgagctcacacctggcccagcgcctgccggtccgacccctgctccagaaactaatgcaccatag

SEQ ID NO: 305394 - DNA, 621 bp, Artificial Sequence
  derived and/or modified sequence
atggagcccaatgatagtacaagtaccgctgtcgaggaaccagacagtctggaagttcttgttaaaacattagactcacagacccgcacctttattgtaggagcccagatgaacgttaaagagttcaaggaacacattgctgctagcgtgtccatcccatcagagaaacagcggctgatatatcagggccgagtgctgcaggatgataagaagctgcaagagtacaatgttggtggcaaggtcattcatcttgtagagagagcccctccccagacacacctgccgagcggggctagcagtggtacgggatctgcctctgccacgcatggtggaggctctcccccaggcactcgagggccaggtgctagcgttcacgaccgtaatgcgaacagctacgtgatggtggggacgttcaatctgccgtcggagccaagagtaagactagtgatggcgcagcacatgatccgggacatccaaactctgctgagcaggatggaatgcagagggggtccacagccacagcactcacagcccccaccccaaccccctgccgtcacacctgagcccgtcgctctcagtagtcagaccagcgagccagtggaaagcgaggcccctccctag

SEQ ID NO: 305395 - DNA, 735 bp, Artificial Sequence
  derived and/or modified sequence
atggagcctaatgatagcaccagtaccgctgtcgaagaacctgattcactggaggtcctggtcaaaacgctagacagccagacaaggacttttattgtcggggctcagatgaacgtcaaagagttcaaagaacatatcgccgcttctgtgagcatcccctcagagaaacagaggcttatctaccagggacgcgtgctgcaggatgacaaaaaacttcaggagtacaacgtcggtggcaaggtgatccatctggtcgaaagggcgccaccgcagacccaccttccctcaggagcttcctctggtactggaagcgcctcagccactcatgggggaggctctccccctggaacacgcggtcccggagcatctgtccacgataggaatgccaattcgtatgtgatggtgggtaccttcaatcttccaagtgagcctagagttcgcctggtcatggctcagcacatgatccgcgatatccagactctcctgtctcgcatggagtgtcggggaggtccccagccacagcatagccaaccccctccccagccaccagccgtaactcccgagcctgtcgctctctcaagtcaaacttctgagcctgtcgaatctgaggccccaccccgagagccaatggaggccgaagaggtggaagagcgcgctccagcacagaatcctgagctcacacccggtcccgcaccagcagggccaacacctgctcccgaaacaaatgcaccttag

SEQ ID NO: 305396 - DNA, 735 bp, Artificial Sequence
  derived and/or modified sequence
atggagcccaacgattctacatcaacagctgtggaagagcctgactccttggaagtgctcgtcaaaacactggactctcagacacgcacatttattgtgggtgcgcagatgaacgtgaaggagtttaaagagcacatcgccgcttcggtgtccatccctagcgagaagcaacgcctcatctatcagggtcgcgttctccaagacgataagaagctgcaagagtacaatgtgggaggaaaggtgattcaccttgtggagcgggctccaccccagactcatctgccctctggcgctagcagcgggacgggtagcgctagtgccacccatggagggggaagcccccctggcacaagaggccctggggcaagcgtgcacgaccgaaacgctaactcatatgttatggtgggaacttttaacctgcccagcgaacctagagtgaggctggtgatggcacagcacatgatcagggatatccaaacactgctctcacgtatggaatgccgagggggaccgcaaccacagcattctcagccaccccctcagccccctgccgtgacccccgagcccgtggctctgtcttcccagacctctgaaccggtcgagtccgaggcccctcccagagagcccatggaggccgaagaggtggaagaacgtgctccagcgcagaatcccgagctgacccccggacccgctcctgccggacccacccccgcaccagaaacgaacgccccatag

SEQ ID NO: 305397 - DNA, 735 bp, Artificial Sequence
  derived and/or modified sequence
atggagccgaacgattcaacttcaactgccgtggaagagcctgactcactggaggtgctcgttaaaacactggactcccagactagaaccttcatagtgggagcccagatgaatgtcaaggagtttaaagaacacattgctgcgtctgtgtctatccctagtgaaaaacagcggttaatataccaggggcgagtgctgcaggacgataagaagctgcaggagtataatgttgggggaaaggtgattcatctggtcgagagagcccctccccagacacatttacctagcggggctagctctggcactgggtccgccagcgcaactcatgggggtgggagcccacccggtacccgcggacctggcgcttctgtgcacgatagaaatgcaaactcctatgtaatggtcgggactttcaatctgccatcggaaccaagagtgaggttagtgatggctcagcatatgattcgcgatattcagaccctgctctcacggatggagtgcagagggggaccccagccccagcacagccagcctcctccccagcctccagctgttacgcctgagcccgtggccttaagtagtcaaaccagcgagccagtggagagtgaggcccctccacgggagccaatggaagcagaagaggttgaagaaagagctccagcacagaatcccgaacttaccccaggtcccgcacctgcgggtccaacccctgctccagagactaacgccccatag

SEQ ID NO: 305398 - DNA, 735 bp, Artificial Sequence
  derived and/or modified sequence
atggagccaaacgattcaacttccacagcagttgaggagccggactcactcgaggtactggtgaagacacttgatagtcagactcggacttttattgtcggagcgcaaatgaacgtgaaagagttcaaggagcacatcgccgctagcgtgtcaatcccctccgaaaagcagcgactgatctatcagggtagagttctccaagacgacaaaaaactgcaggagtataatgtcggcggaaaggtcatccacctggtggagcgtgctcctcctcagacacacctaccttccggcgcttcatccggcacgggttccgcctccgcaacacacggcggtgggagccccccaggtactcgtgggccaggcgcatctgtccacgatagaaatgcaaactcttacgtgatggtgggcacctttaacctgccgtcagagccacgcgtgaggctggtgatggcacagcacatgattcgcgatatccagactttgttgtccagaatggagtgtagaggagggccacagccccagcatagccagccgccaccacagccgcctgctgtgaccccagagcctgtggcattaagctcacagacatctgaacctgtggaaagcgaggcacctccaagggagcctatggaagctgaagaggtggaagaacgggctccagcccaaaaccccgaattgacacctggccctgcgccagctggcccaacccctgcgcctgaaactaatgccccatag

SEQ ID NO: 305399 - DNA, 648 bp, Artificial Sequence
  derived and/or modified sequence
atggagcctaacgactccacttcaacggctgttgaggagcctgattcccttgaagtcctggtgaagaccttggacagccagaccagaacatttattgttggcgctcagatgaacgtgaaagaatttaaagagcacattgctgcttcggtgagcatcccctcagaaaagcagcggttgatttaccaggggcgtgtattacaggacgataagaaactacaggagtataatgtcggtggcaaggtgattcacctggttgagagagcacctccacagacgcacctaccttcaggcgcaagtagtggcaccggctcggcctctgctacacatggcggtggctctccccctggcacaagggggcctggcgctagcgtgcacgaccggaatgcgaattcctacgtgatggtcggcactttcaatctgccttctgagccacgggtgcgtctggtaatggcccagcatatgatcagggatattcagactctgctaagccggatggagtgtcgtggcggaccccaaccacagcacagccagccaccacctcagcctcctgccgtgacccccgagccagtggcattgtccagccagacgtctgaacccgtagaaagtgaggcaccacctcgcgaacccatggaggccgaggaagtgtag

SEQ ID NO: 305400 - DNA, 735 bp, Artificial Sequence
  derived and/or modified sequence
atggagcctaatgactcaacatctaccgccgtcgaagagccggacagtctggaggtgttagtgaaaacattggacagtcagacgcgcaccttcattgtgggggctcagatgaacgtaaaggagttcaaagagcacattgcagctagcgtcagcattccttccgagaaacagcggcttatttaccagggtagagttttacaggacgataagaagctgcaagaatataacgtcggcggaaaagtcattcatctagtcgagcgcgctcctccccagactcacctgccttctggggctagcagcgggacagggtctgcctccgccacacatggaggcggatcccctcctggcacccgcggtcccggtgcttctgtgcatgaccggaacgccaattcctacgttatggtcggcacctttaacctgccatcggagcctagggtcagattagtgatggcccagcatatgatcagggatatacagacactgctttcaaggatggagtgtagaggaggccctcagccgcagcacagccagccgcctccacagcctcccgctgtaacaccggaacccgtggctctatcatcgcaaacttccgaacccgtcgagagtgaggctcccccaagagagccaatggaggctgaggaagttgaagaaagagcaccagcacagaaccctgaattaacaccaggacccgctcccgctggtcctacacccgcaccagaaacaaatgctccctag

SEQ ID NO: 305401 - DNA, 735 bp, Artificial Sequence
  derived and/or modified sequence
atggaaccgaacgattcaacgagcacagccgtggaggaaccagacagtcttgaggtgttggtgaagactctagatagccagacgcgcaccttcatcgttggagcacagatgaatgtgaaagaattcaaggagcacattgccgcatctgtatcgatcccctccgaaaaacagagacttatatatcaggggagggtgctgcaagatgataaaaagcttcaggagtacaatgtcggtggaaaggttattcacctggttgaaagggcaccaccacagacccaccttccatccggagcctcaagtgggacaggctccgcttcggctacccacggagggggaagccccccagggacacgcggtcccggtgcctccgtccacgatcggaatgcaaattcttatgttatggtcgggacttttaatttgccttctgaacccagagtgaggttagtgatggcacaacatatgattcgagatatccagaccctgctgtccaggatggagtgccggggtggaccacagcctcagcatagtcagcctccccctcagccacctgctgtaacccccgagcctgttgccctgagcagccagactagtgagccagtggagtcggaggctccacctcgggagcctatggaagctgaggaagtcgaggaacgggcacccgctcagaatcccgaactgacccccggtcctgcgcctgcgggtccgactccagctcccgaaacgaatgcaccttag

SEQ ID NO: 305402 - DNA, 735 bp, Artificial Sequence
  derived and/or modified sequence
atggagccgaatgatagcacttcaactgccgtggaggaacctgatagtctggaagtgctggttaaaactctggactcacagacgaggacctttatagtcggagcgcagatgaacgtaaaggagttcaaggaacatatcgcggcttccgtttccatacccagcgaaaaacagcgactcatctatcagggacgcgtgctgcaggacgacaaaaagcttcaggagtataatgtcggcggaaaagtgatacaccttgtggaaagggctccgccacagacacaccttccttccggcgcttccagtggtacaggctcagcctcagctacgcatggcggtggcagtcctcccggaaccagaggtcccggtgcttctgtgcacgacaggaatgcgaattcatacgtaatggtcggcacctttaacctcccaagtgagccaagagtaaggctggtgatggcacaacatatgattcgtgacatccagaccctgttatcacgaatggagtgccggggaggacctcagcctcagcacagccagccaccccctcagccgccagctgtgacgcctgaaccggtcgcactcagttctcagacaagcgagcctgtagagagtgaggcgcctccaagggaaccaatggaggccgaggaagtggaagagagggccccagcgcagaacccagagctgaccccaggcccagcgcctgctgggccaacacccgctccagagaccaatgcaccctag

SEQ ID NO: 305403 - DNA, 621 bp, Artificial Sequence
  derived and/or modified sequence
atggagcccaacgactccactagcacagccgtcgaggagccggattccctggaggtgctcgtgaagaccttggactcgcagactaggaccttcattgtcggcgcacaaatgaacgtgaaggaatttaaagagcatatcgctgcatctgtctctatcccgagtgaaaaacagcgcttgatctaccagggcagggttctgcaggatgataagaagttgcaggagtataatgtcggcggaaaagtgatccatctggttgaacgcgcacccccacagacccatttgccctcgggggcttcaagcgggactggatccgctagcgccacccatggagggggaagtccgcctgggacccgcggacccggtgcaagcgtacatgacagaaatgccaacagttatgttatggtgggcactttcaatcttccctccgagcccagggttaggttggtgatggctcaacacatgatcagagatatacagacgctgctgtctagaatggagtgcagaggcggtccacagccgcagcattctcagccacccccacaacctccagccgtgaccccagaaccggtggctctttcaagtcagacttcggaaccagttgaaagcgaagcccctccttag

SEQ ID NO: 305404 - DNA, 735 bp, Artificial Sequence
  derived and/or modified sequence
atggaacctaacgactccactagcaccgccgtggaagagcccgacagcctggaagttttggtgaaaacactggactcgcaaaccagaacgttcatagtgggcgcacaaatgaacgtcaaagagttcaaggaacacattgcagcaagcgtttctataccatctgagaaacaaagactgatctatcagggacgggtcctgcaggacgacaaaaaacttcaggaatacaatgttggagggaaagtcattcacctggtggagcgcgctcctcctcagacccacctgcccagcggagcttcctccggaacaggaagtgcctccgccacgcacggagggggtagtccgcctggcacacggggtcccggagcatctgtacatgatagaaatgctaactcgtacgtgatggtgggcacatttaacctaccatcagaacccagagtccggctggtgatggcacagcacatgatccgagatattcagacactactgtccaggatggaatgtcggggtggcccacagccacagcactctcagcctcctccacagccccctgccgtcacacccgaacctgtggcactgagctctcagacaagcgaaccagtcgagagtgaggcccctcctagagagccgatggaggcggaggaggttgaagagcgcgcacctgctcagaaccctgagctgactcctgggcctgctcccgcaggtcccaccccagcccctgagactaatgcaccctag

SEQ ID NO: 305405 - DNA, 621 bp, Artificial Sequence
  derived and/or modified sequence
atggaacccaatgatagcaccagcactgctgtggaggagccggattctctggaagtgctagtgaagacgctcgactcacaaacccgcacattcattgtcggtgctcagatgaatgtcaaagaattcaaagagcatatcgccgcttctgtctcaataccaagcgagaagcagcggttaatataccaggggagagtccttcaggacgataagaagttgcaggaatataatgtgggtggaaaggttatacatctcgtggaacgcgcaccccctcaaacgcatctgccatccggggcatcttccggcactggaagcgcttcagccacccatggcggtgggagcccacctggcactcggggaccaggtgcttcagtgcacgatcgcaatgccaattcttacgtcatggttggcacctttaatctgccatccgagccacgagttagacttgtgatggcgcagcatatgattagggacatccagaccttattgagcagaatggaatgtcggggtggacctcagcctcagcactcccagcctccccctcagccacccgctgtgaccccggagcctgtggctttatcaagccagacaagcgaaccagtcgaatcagaggcacccccatag

SEQ ID NO: 305406 - DNA, 735 bp, Artificial Sequence
  derived and/or modified sequence
atggagcctaacgactccacttccactgctgttgaagagccagattctctcgaggtcctggtcaaaacactcgactcccagactcgcacgttcattgttggcgctcagatgaacgtgaaggaattcaaggagcacatcgcagcttccgtctcaattcctagcgaaaaacagcggcttatttatcagggcagagtcctacaggatgacaagaagcttcaagagtataacgtcggcggaaaggtgatacacctcgtggaacgagccccaccgcaaacccacctgccaagcggagcaagtagcggcaccggatccgcctccgcgacacacggcggaggatctccaccaggaaccaggggtccgggagcatccgtccatgatcgtaatgccaacagctacgtgatggttggaactttcaacctgccttcagagccaagagtgagattggtgatggctcagcatatgatccgagatattcaaactctcctcagccgaatggagtgccgtgggggtccacagccacagcactcccagccacctcctcagccacccgcagttacccctgagccagtggccctatcgagccaaacaagcgaacctgtagagtctgaggcccctcccagggagcctatggaggcagaggaagtagaagagcgggctccagcacagaatcctgaattgacacctggccctgcccctgcaggacccacacccgctccggagaccaacgcaccatag

SEQ ID NO: 305407 - DNA, 648 bp, Artificial Sequence
  derived and/or modified sequence
atggagccaaacgacagcacttccactgcagtcgaagaacctgattccctcgaggtgttggtaaaaactttggactctcagaccagaacgtttattgtaggagcccagatgaacgtcaaagagttcaaggagcacatcgctgcctccgtgtctatacctagcgaaaagcagcgcctcatctaccagggccgtgtactgcaggatgataagaaactccaggaatacaatgtggggggtaaagtcattcatctcgtggagagggccccacctcagactcacttaccttccggcgctagctctggaacggggtccgcctctgccactcatggcggtggatcccctccaggtacccggggtcccggagcctcagtacacgatcgcaatgcaaattcttatgtgatggttggaaccttcaaccttcccagtgagccaagggtgcgacttgtgatggctcaacatatgattcgagacattcagacacttctgtctaggatggaatgccgcggtggtccacagccacagcatagtcagcccccaccgcagcctcctgccgtgaccccagaacctgtcgccctgtcctcacagacttcagaacccgtcgaatcggaggctcccccaagagagccaatggaggcagaagaggtgtag

SEQ ID NO: 305408 - DNA, 735 bp, Artificial Sequence
  derived and/or modified sequence
atggagcccaatgattctacatctaccgctgtggaagaaccagattctctagaagttctggtgaaaacactcgacagtcaaacgcggacctttatagtcggcgcacagatgaacgtcaaggagtttaaagaacacatcgcggcttcagtgtccatccctagcgagaaacaaaggctgatctaccagggacgggtgttacaggatgataaaaagttacaggagtacaacgtgggtggtaaggtgattcacttggtggaacgggctccaccccaaacacacttaccatctggcgcttcatccggcaccggttcagcaagtgccacccatggcggaggatctcctcctgggacaagagggccaggagcttccgtgcatgaccggaatgccaactcttacgtgatggtgggcacttttaacttgccttcggagcccagggtgcgacttgttatggcccagcacatgatcagggacatccagaccctcctgagtagaatggaatgtagaggaggaccgcaaccccagcacagccagcctccccctcaaccaccagccgtcactcctgaacctgtggctctcagtagccagacgtctgaacctgttgagtcagaggcaccacctagggaaccaatggaggccgaggaggtggaagaaagagcaccggctcagaatcccgaacttacacccggacctgcgcctgccggaccaacacccgctcctgagaccaacgcgccttag

SEQ ID NO: 305409 - DNA, 648 bp, Artificial Sequence
  derived and/or modified sequence
atggagccaaacgatagtacatcaaccgccgtggaagagccggactcactcgaggtgctggtgaagactctcgattcacagacccggaccttcattgtgggtgcacagatgaacgtgaaggagtttaaagagcatatcgcagctagcgtgagcattcccagtgagaagcagagattgatttatcagggtcgagtgctgcaggacgataagaagctccaggaatacaatgtggggggtaaagtaatccacctcgtcgagagagctccgcctcagactcacctgccgtcaggtgcgtcatctggaaccggatccgcttctgccacacatgggggaggctcaccacctggtactagggggcctggcgcatctgtgcatgatcggaacgcgaactcttacgtcatggttggaactttcaatctccccagcgagcccagagtgcgtctggtcatggcgcagcacatgattcgcgatattcagactctgttatccagaatggagtgtcgcggtggacctcaaccgcagcattcccaaccgcctccccagccacctgctgttactccagagccagtggcgctgtcctcccagactagcgaacccgtggagtctgaagctccccctcgcgaaccgatggaggcagaggaggtttag

SEQ ID NO: 305410 - DNA, 648 bp, Artificial Sequence
  derived and/or modified sequence
atggaacccaacgatagcacatccacggctgtcgaagagccagacagtctcgaagtgctggtgaagactctggatagtcagacacgtacattcattgttggcgctcagatgaacgtcaaagaatttaaggaacacattgcagcctccgtgtccattcctagtgaaaaacaaaggctgatctaccagggcagagtgttgcaggatgataaaaaattacaggaatataacgtaggaggtaaagttattcatttggttgaacgagcaccaccacagacccatctgccttctggcgcatctagtggcactggctccgcatcagcaacccacgggggaggatcaccccctgggactcggggacccggagcgagtgtccatgataggaacgctaactcctacgtgatggttggaacttttaaccttccatctgagccaagagtgcgattggtgatggcccagcacatgatacgcgatattcaaaccttgctgagcaggatggagtgcaggggaggccctcagcctcaacatagccagccccctccccaaccacctgccgtgacgcccgagccagtcgcgctctcctcccaaacaagcgaaccagtggagagtgaagcccctcctagagagccaatggaggcagaggaagtatag

SEQ ID NO: 305411 - DNA, 621 bp, Artificial Sequence
  derived and/or modified sequence
atggagcccaacgactctacctcaactgccgtggaggaacccgacagtcttgaggtcttggtcaagactctcgacagtcaaaccagaacattcatagttggggctcagatgaacgtcaaggaatttaaggaacacattgcggcttctgtcagcatcccgagcgagaaacaacgactgatttatcagggtcgagtcctccaagacgacaagaaactccaggaatacaatgtcggagggaaggtgatccacctcgttgagcgtgctccacctcagacccatcttccatcaggtgcaagctctggaaccggatctgcttcagccacgcatggtgggggatccccacctgggactcggggtcccggtgcctctgtccatgacagaaacgccaatagttacgtgatggtgggcacttttaacctcccctccgaacctagggtccgtctggttatggcccagcatatgatccgtgacatacagacgctactctctagaatggagtgcagagggggacctcagccccaacattcgcaaccgcctccacagcctccggcagttacaccagaaccggtcgcactgtccagccagacctccgaaccagtggagagcgaagcacccccttag

SEQ ID NO: 305412 - DNA, 735 bp, Artificial Sequence
  derived and/or modified sequence
atggaacccaatgacagtacctctactgctgtcgaggaaccggatagtttggaggtcctggtgaagactctggatagtcagaccagaacgttcattgtgggggctcagatgaacgtgaaggagtttaaagagcacattgctgccagcgtttctatcccctcagagaaacagaggcttatctatcaaggtcgggttctgcaagacgataagaagctgcaggagtacaatgtgggtggaaaggtgattcacttggtagaacgagctcctccacagacccacctgccctcaggggcttcttccggcacagggtccgcttccgcaacacacgggggtggctcccccccaggcacaaggggtcccggtgcatcagtgcacgaccggaatgcaaacagctacgtgatggtgggaacgtttaatttgccatcagaaccacgagtgcgactggttatggctcagcatatgataagagacatccagaccttgctgagccgcatggaatgccgcggagggcctcagccacagcactcccaaccaccaccacagcctccagcagtgacacctgaaccagtagcgttgagctctcaaacaagtgaacctgtggaaagcgaagcccctcctagggagccgatggaagcagaggaggtggaggaaagagcccctgcccagaatcccgagctgactcctgggccagccccagccggaccaacccccgcacccgaaacgaatgcaccttag

SEQ ID NO: 305413 - DNA, 735 bp, Artificial Sequence
  derived and/or modified sequence
atggaaccgaacgattccactagtactgcagtagaggaacccgattctctggaagtgttagtaaaaacactggatagtcagacacgaacatttatcgtgggcgcacaaatgaacgtgaaggagttcaaggaacacattgccgcttctgtatcaataccatctgagaaacagaggttgatttaccagggcagggtactgcaagacgacaagaaactgcaggaatacaatgtcggaggaaaggttattcatttagtagaacgggcacctcctcagacccatctgcctagcggagccagctccggcaccggcagcgcctcagccacacatggaggcggatcccctcccggtactaggggacccggtgcttccgtccacgaccggaacgccaattcttacgtgatggtcgggacttttaaccttccgtccgaacctcgcgtcaggttagtcatggcacagcacatgatcagagacatacagacccttctgtcacggatggagtgcagaggagggcctcagccccagcactctcagcctccaccacagcctccagccgtgactccagaacccgtcgctttgtcttcacaaacttcggaaccggttgaaagcgaagctcctccacgcgaacccatggaagctgaagaagtagaagaacgcgcaccggctcagaatcccgaactcactccagggcctgctcctgctggcccaacccctgccccagagacaaacgccccttag

SEQ ID NO: 305414 - DNA, 621 bp, Artificial Sequence
  derived and/or modified sequence
atggagccgaatgattccacctcaacagctgtggaggaacctgactcactggaagtgttggtgaagacattagattcacagacacgcacatttatagtaggagcgcagatgaatgttaaggagttcaaggaacatatcgccgcatccgtgtccatcccttcagagaagcagcgcctgatctaccagggcagggtgttgcaggatgacaaaaagctacaagagtataacgttggtgggaaggtgattcacttggtggagagagcgccaccgcaaacacatcttccgtccggggctagttcgggcaccggttctgccagtgctactcatggagggggttctccccctggaacccggggtccaggagcatcagtgcacgatcggaacgctaatagctatgtaatggttgggacctttaacttgccatccgaacctcgcgttaggctggttatggcacagcacatgataagagatattcaaacattgctgagtcggatggaatgtagaggtggccctcagccgcagcactcccagccaccaccccagccccctgcagtgacccctgaaccggtcgctctgtcttctcagacctcagaaccagttgaatcagaggcacccccatag

SEQ ID NO: 305415 - DNA, 735 bp, Artificial Sequence
  derived and/or modified sequence
atggaaccaaatgattccacctccacagctgtagaagagcctgattctctggaagtgctggtgaagaccctggattcacagactcgcacttttatagtgggggcacaaatgaacgtgaaggagtttaaggagcacattgccgctagcgtttctatccctagcgaaaaacagagactgatctatcagggtcgcgtactccaggacgataagaaactgcaggagtacaatgtggggggaaaggtgatccacctggttgaaagagcccctccccagacgcacttaccatcaggagctagtagcggaacggggagtgcgagtgctacacatggcggaggatctccacccggaactcggggtccaggcgctagtgtccacgaccgtaatgctaatagctatgtgatggtgggcacatttaacttgccaagtgaaccccgagtccggctagtgatggctcaacatatgatcagggatatacagactctgctgagccgcatggagtgtagagggggtccacaaccgcaacatagtcagcctccccctcagcccccagccgtgacccctgagccagtggccctgtcatcgcagactagtgaacctgtggaatccgaagcccctcccagagaacctatggaggcagaggaggtcgaggaacgcgcacctgcacagaatccagaattgacgcccggaccagcacccgcaggaccaactcctgcccctgaaacaaatgccccatag

SEQ ID NO: 305416 - DNA, 735 bp, Artificial Sequence
  derived and/or modified sequence
atggagcctaacgactctacctccactgccgtagaagaacctgattctctggaagttctagtgaaaacactggattcccagacccgaactttcatcgtaggagctcagatgaacgttaaggaatttaaagaacacattgcagcatccgttagcattccttctgaaaagcagaggctcatatatcaaggtcgggttctccaagatgacaagaagctgcaggagtacaacgttggcggtaaggtcattcatcttgttgaacgcgctccccctcagacccacctcccaagcggagcatcaagcggtaccggaagcgcaagtgcaacacatgggggaggctctccaccgggtactaggggcccaggagcttcggttcacgatagaaatgccaactcatacgttatggtgggcacctttaatctgccttcggagcctcgtgttcgcctcgtgatggcgcagcacatgatcagggatatacagaccctgttgagccggatggagtgtcgtggaggccctcagccgcagcatagtcagcctcctccacagccgcctgccgttacacccgagcctgtcgctctgtcatctcagacctctgagcccgttgagtccgaggcaccacctcgggagccaatggaggctgaggaagtggaagaacgggctcccgcacagaatcctgagctaactcccggaccagcccctgccggtcccacgcccgcaccggagactaatgccccttag

SEQ ID NO: 305417 - DNA, 735 bp, Artificial Sequence
  derived and/or modified sequence
atggaacccaacgacagtacctccacggctgtggaggagcccgattcactggaggtcttggtcaaaacactggatagccagacccggacattcatcgtcggagcccagatgaatgttaaggagttcaaggaacacatagcggcttcggtctccatccccagtgaaaagcagagactcatctatcagggacgggtgctacaagatgacaaaaagctgcaggaatacaatgtcggaggaaaggtgattcatctcgtggagcgcgctcccccacaaactcacttgccgtccggcgcaagctctggaacagggtccgccagcgccacccacgggggtggttcaccaccagggacccgcggaccaggcgctagcgttcacgaccgcaatgctaactcgtacgtgatggtaggaacctttaatttacctagcgagccccgtgtgagactggtaatggcccagcatatgattcgtgatatccagaccttgctctctagaatggagtgtagggggggaccccaaccgcaacattctcaacctccgcctcagcctcctgcagtgacccccgagcctgtcgctctgagttctcagacctcggagcccgtggaaagcgaggcaccacctcgagagccgatggaagcagaagaggttgaggagcgtgcccctgcccaaaacccagagctcactccaggcccagcccctgcagggccaaccccggcaccagaaactaacgctccatag

SEQ ID NO: 305418 - DNA, 735 bp, Artificial Sequence
  derived and/or modified sequence
atggagccaaacgatagtaccagtaccgccgttgaggaacctgatagtctagaggtgttggtgaagacgctcgatagccagactagaacctttatcgtaggcgctcagatgaacgtgaaggaattcaaggagcacattgctgccagcgtgtccattccaagcgagaaacagcgtctgatctaccaggggagggtcctgcaggacgataaaaaactccaggagtataatgtaggtggcaaggtcattcatctggtagagcgagctccccctcagactcacctgcccagcggagccagctcgggaacaggttccgccagtgcaactcacggagggggatcacccccaggaacgcgcggacctggggctagcgtgcatgatcggaacgccaattcgtacgtgatggtcggcactttcaacctaccatccgagcccagggtgcgactggtaatggctcagcacatgatccgcgatattcagacactcctctcccggatggagtgtcgtggcggtccccagccacaacatagccagccacctccccagccgcctgcagtgacacctgaaccagtggcacttagcagtcagactagcgaaccggtcgaatccgaagcccctccaagggagcctatggaagcagaggaggttgaggaacgagcgccagcacagaacccagaactgacacccggtcccgcacctgccggtcccacccccgctccagagacgaacgccccatag

SEQ ID NO: 305419 - DNA, 735 bp, Artificial Sequence
  derived and/or modified sequence
atggagcccaatgactccacttccaccgccgtggaggaaccggattccctcgaggtactggtcaagaccctggatagccaaacacggacctttatcgtcggagcccagatgaatgttaaagagtttaaggagcatatcgctgcctccgtgagcataccgtctgagaagcagcggcttatatatcagggcagggtcctgcaggacgataagaagctgcaagagtacaacgtgggcggaaaggtgatacacctggtggaaagagcccctcctcaaacacatctgccatctggcgcatccagcggaacaggcagtgcttcagctactcatggcggaggttcccctccaggtactagggggccaggcgcttctgtgcacgatcgtaatgctaattcatacgtcatggttggcactttcaatctgcccagcgagccacgcgttcggctagtgatggcacagcatatgattagagatatccagaccctgctgtcccgaatggagtgcagagggggtccgcagccccagcactcccagccccctccccaacctcctgccgtgacgcccgagcctgtggcgctttcctcccagaccagtgaaccagttgagtccgaagcccctcctcgcgagcccatggaggcagaggaggtggaagagcgcgctccagctcagaaccccgagctgacacccggacctgctcccgcagggccaacccctgcccctgagacaaacgcaccctag

SEQ ID NO: 305420 - DNA, 735 bp, Artificial Sequence
  derived and/or modified sequence
atggagccgaacgactccaccagtactgcagtcgaggaaccagactccctggaggttctcgtaaagacacttgacagtcagacacgcactttcattgtgggggcacaaatgaatgttaaggaatttaaagaacatatcgctgcatccgtgagcatcccgtccgaaaagcagagactaatttatcagggtcgcgtgttacaggacgataaaaagttgcaggaatataacgtaggaggcaaggttattcacttggtggagagagctcccccacagacccatctgccaagcggcgcaagctccggtactggatcagcatccgctacccacggcggaggctcacccccaggcaccaggggacccggtgccagcgtccacgacagaaacgccaatagttacgtgatggtcggcacattcaatcttccctctgagcccagagtgcgacttgtcatggcccaacatatgatacgggatatccagacccttctctctcgtatggaatgcaggggcggaccacaacctcagcattcgcaacccccaccgcaaccgcctgcagttaccccagaaccggtcgccctgtcgtctcagacatcagaaccagttgaaagcgaagccccacccagggaacccatggaggctgaggaggtggaggaaagggcacctgcccagaatcctgagttaactcctgggcctgccccagctgggccaacgccagcccctgaaactaacgcaccatag

SEQ ID NO: 305421 - DNA, 648 bp, Artificial Sequence
  derived and/or modified sequence
atggagccgaacgatagcacctcgactgccgttgaggaaccagactcgctggaggtcctcgttaagacccttgacagtcagacaagaacatttatagttggagcacagatgaatgttaaggagttcaaggaacatatcgctgcatctgtgtcgataccaagcgagaagcagagactgatctatcaggggagagtgctccaggatgacaagaaactccaggagtataacgtgggaggcaaggtgatccacttggttgaacgagcccctccccaaacccatttaccttctggggcatcaagcggcaccggctccgcctcagcaacacatggaggcggatcacccccagggacgcggggtcctggcgcaagtgtgcatgacaggaatgccaatagctatgttatggtcggaacctttaacctgccatccgagccacgtgtgcgcctagttatggcccaacatatgattagggacattcagacactgctgtctaggatggaatgccgtggcggtccgcagccccagcactctcagccccctccgcagccacctgcagtaaccccagagcctgtggcgctgagctcccagacctccgagcccgtggagagcgaggctcctccacgagaacctatggaagccgaggaggtttag

SEQ ID NO: 305422 - DNA, 735 bp, Artificial Sequence
  derived and/or modified sequence
atggaacctaacgattccaccagtaccgcagtggaagagcccgatagtttagaggtgctggtcaagaccctggatagccaaacgcgtacatttatagttggagcccaaatgaacgtgaaagagtttaaggaacacattgctgcatcagtcagcatccctagtgagaaacagaggctcatttaccaagggagggtactacaggacgacaagaagttgcaggagtacaatgtgggaggcaaagtgatccacctggtcgagagagcgcctccacagacccacctgccctctggagcctcttcaggtactggctctgcctccgccacccacggcggaggatcaccccctggaacaagaggtcccggagcctctgtgcacgatcggaacgccaactcctatgtgatggtgggcacgtttaatcttcctagcgagccaagggttcggctcgtgatggcccagcacatgatccgggatattcaaaccctcctgtctcgaatggaatgccgtggtggcccacagccccagcatagccagccaccaccccagccacctgctgtgacaccagagcctgtggctctttcaagccagacctccgagcctgtggagagcgaggcacccccaagggagcccatggaggccgaggaggttgaagagagggcccctgctcagaaccccgaacttacacctggaccggctcccgcagggccaacaccagctccagaaacgaacgccccttag

SEQ ID NO: 305423 - DNA, 621 bp, Artificial Sequence
  derived and/or modified sequence
atggagcccaacgatagcaccagcaccgccgtggaggagccggattccttggaggtcctggtgaaaaccctggactcacagacacgtactttcattgtgggggctcagatgaacgttaaagagttcaaggaacatattgccgcatctgttagcatcccttccgaaaaacagcgtcttatttatcagggtagagtcctccaggacgacaaaaagctgcaggaatataacgtcggtggaaaagtgatccacttggtggaacgggctcctccacagactcacttgcccagtggcgcatctagtggaaccggatcagcatccgctacacacggcggaggatcacccccagggacccgcggacccggtgcgtcagttcacgaccgtaatgctaacagctacgtgatggtagggacatttaatctgccctccgaacctcgcgttagattagtgatggcccagcatatgattagggacatccagacactgctgtctagaatggagtgccggggaggtccacagccgcagcacagccagccccctccccagccaccagccgtcactcccgaaccagtagccctgtcctcccagacttccgagccagtggagagcgaggccccaccgtag

SEQ ID NO: 305424 - DNA, 621 bp, Artificial Sequence
  derived and/or modified sequence
atggagcctaacgactcaacttccaccgccgtggaagaaccagatagcctggaggtgttggtgaagacattggattcccaaacaaggaccttcattgtgggagcgcagatgaatgtgaaggaattcaaggaacacattgctgcttctgtcagtatccctagcgaaaagcaaaggctcatctaccaaggcagggtgttgcaggacgacaagaaactgcaggagtataacgtcggcggtaaggtaattcatttagtcgaacgcgctccacctcagactcacttaccgagcggggcaagcagtgggacaggaagtgccagcgccacccatgggggtggtagcccaccaggtacacgaggcccaggggcttcagtacatgacagaaacgcaaactcttatgttatggtggggaccttcaatctgccaagcgagcctcgagttagactggtgatggcccagcacatgatcagggatatccagacattgctgagccgcatggaatgcagaggcggtccacagcctcaacacagtcagccccctccccagccccctgctgtgacgcccgagccggtagccctctcttctcaaacctctgagccagtggaaagtgaagcccctccttag

SEQ ID NO: 305425 - DNA, 648 bp, Artificial Sequence
  derived and/or modified sequence
atggagccaaatgatagcacttctaccgccgttgaagagcctgactctctcgaggtcctggtcaaaaccctcgactcccagactaggacatttatagtgggagcccagatgaatgtcaaggagttcaaggaacacatcgcagcctccgtttctattcccagcgagaaacagcggctgatctatcaagggcgtgtgcttcaagacgataaaaaattacaggagtacaatgtggggggaaaagtaatccacttagtggagcgggcaccaccccagacccacctgccaagtggagcctcctctggtaccggttcagctagcgcaacacatggtggagggtcacccccaggtacacgtgggccaggagctagtgtacacgaccgcaacgcaaatagttacgtgatggtggggacgtttaacctgccttctgaacccagagttcgccttgtgatggcacaacacatgattcgggacatacagaccttgctcagccgcatggaatgccgcggtggccctcagccccagcactcgcagcctccgcctcaaccacctgctgtgacacctgagcccgtcgctctgtctagccaaacctcagagcccgtggagtccgaggctccacctagagagcccatggaggcagaagaggtgtag

SEQ ID NO: 305426 - DNA, 735 bp, Artificial Sequence
  derived and/or modified sequence
atggagccaaacgactctacatctaccgcggtggaggagcctgatagcttagaggtgctcgtgaaaactcttgactctcagacacgtacctttatcgttggagctcagatgaatgtgaaggagtttaaggaacacatcgcggcaagtgtttccattccgagcgaaaaacaaaggctgatctatcaggggagagtccttcaggatgataaaaagcttcaagagtacaacgtcggcggtaaggtaatccaccttgtcgaacgggcacccccacaaactcacctgccgagcggagcttcttctgggaccggttctgcttccgccacccacggtggaggttcaccgccaggaacgcggggtccaggagcctcagtccatgaccgcaatgctaacagctatgtcatggttggaacgttcaatcttccttcagagcctcgggtccggcttgtcatggcccagcacatgatcagagatattcaaaccctcctctctagaatggaatgtcgaggcggaccacagccccagcatagccagcctccacctcagcctcccgctgtgacacctgagcctgtggccctgtcttcccagacctcagagcccgtggagagcgaagctcctcccagggaacctatggaggccgaagaagtcgaagaacgggctcccgcacagaatcctgagcttactcccggaccagctccagcaggtccaacccctgctcctgaaacaaatgcaccctag

SEQ ID NO: 305427 - DNA, 747 bp, Artificial Sequence
  derived and/or modified sequence
tgtttggctgtgggttagttgtgccgttctgctggaacaccgtgggaaggcagtagacgcgggcagtcagctagcaggtccgtcgccccagacctgtcggccatggagcctaatgatagtaccagtaccgctgtggaggagcctgacagcttggaggtgttggtgaagaccttggactctcaaactcgtacctttattgtgggggcccagatgaatgtaaaagagtttaaggagcacattgctgcctctgtcagcatcccatctgaaaaacaacggctcatttaccagggacgagttctgcaagatgataagaagcttcaggaatacaatgttgggggaaaggttatccacctggtggaacgggctcctcctcagactcacctcccttctggggcatcttctgggacggggtctgcctcagccactcatggtgggggatccccccctggtactcgggggcctggggcctctgttcatgaccggaatgccaacagctatgtcatggttggaaccttcaatcttcctagtgagccccgggtacggctggtgatggctcagcacatgatcagggatatacagaccttactatcccggatggagtgtcgaggagggccccaaccgcagcacagtcagccgcccccgcagccaccggctgtgaccccggagccagtagccttgagctctcaaacatcagaaccagttgaaagtgaagcacctccccgggagcccatggaggcagaagaagtg

SEQ ID NO: 305428 - DNA, 766 bp, Artificial Sequence
  derived and/or modified sequence
agaagggggatggggacagagacctgtcggccatggagcctaatgatagtaccagtaccgctgtggaggagcctgacagcttggaggtgttggtgaagaccttggactctcaaactcgtacctttattgtgggggcccagatgaatgtaaaagagtttaaggagcacattgctgcctctgtcagcatcccatctgaaaaacaacggctcatttaccagggacgagttctgcaagatgataagaagcttcaggaatacaatgttgggggaaaggttatccacctggtggaacgggctcctcctcagactcacctcccttctggggcatcttctgggacggggtctgcctcagccactcatggtgggggatccccccctggtactcgggggcctggggcctctgttcatgaccggaatgccaacagctatgtcatggttggaaccttcaatcttcctagtgagccccgggtacggctggtgatggctcagcacatgatcagggatatacagaccttactatcccggatggagtgtcgaggagggccccaaccgcagcacagtcagccgcccccgcagccaccggctgtgaccccggagccagtagccttgagctctcaaacatcagaaccagttgaaagtgaagcacctccccgggagcccatggaggcagaagaagtggaggagcgtgccccagcccagaacccggagctcactcctggcccagccccagcgggcccaacacctgccccggaaacaaatgcacccaa

SEQ ID NO: 305429 - DNA, 654 bp, Artificial Sequence
  derived and/or modified sequence
cggaagtggccgtcggtggcagagacctgtcggccatggagcctaatgatagtaccagtaccgctgtggaggagcctgacagcttggaggtgttggtgaagaccttggactctcaaactcgtacctttattgtgggggcccagatgaatgtaaaagagtttaaggagcacattgctgcctctgtcagcatcccatctgaaaaacaacggctcatttaccagggacgagttctgcaagatgataagaagcttcaggaatacaatgttgggggaaaggttatccacctggtggaacgggctcctcctcagactcacctcccttctggggcatcttctgggacggggtctgcctcagccactcatggtgggggatccccccctggtactcgggggcctggggcctctgttcatgaccggaatgccaacagctatgtcatggttggaaccttcaatcttcctagtgagccccgggtacggctggtgatggctcagcacatgatcagggatatacagaccttactatcccggatggagtgtcgaggagggccccaaccgcagcacagtcagccgcccccgcagccaccggctgtgaccccggagccagtagccttgagctctcaaacatcagaaccagttgaaagtgaagcacctcccc

SEQ ID NO: 305430 - DNA, 993 bp, Artificial Sequence
  derived and/or modified sequence
gtacggtcccccgggcgacagcggtggcggctcctcggggtgctcggctccctcccacctaggccggccccggcccgactcgccctcagaaactcactgtttggggctgcggactttctcgtcgtgccccacaaaagtaaagcttggggacctggggggagccggaagtatcgcttcgagatccccaaatactatcggggaaacggaagtggccgtcggtggcaggtttgggggagaccggaagtgacgagacctgtcggccatggagcctaatgatagtaccagtaccgctgtggaggagcctgacagcttggaggtgttggtgaagaccttggactctcaaactcgtacctttattgtgggggcccagatgaatgtaaaagagtttaaggagcacattgctgcctctgtcagcatcccatctgaaaaacaacggctcatttaccagggacgagttctgcaagatgataagaagcttcaggaatacaatgttgggggaaaggttatccacctggtggaacgggctcctcctcagactcacctcccttctggggcatcttctgggacggggtctgcctcagccactcatggtgggggatccccccctggtactcgggggcctggggcctctgttcatgaccggaatgccaacagctatgtcatggttggaaccttcaatcttcctagtgagccccgggtacggctggtgatggctcagcacatgatcagggatatacagaccttactatcccggatggagtgtcgaggagggccccaaccgcagcacagtcagccgcccccgcagccaccggctgtgaccccggagccagtagccttgagctctcaaacatcagaaccagttgaaagtgaagcacctccccgggagcccatggaggcagaagaagtggaggagcgtgccccagcccagaacccggagctcactcctggcccagccccagcgggcccaacacctgccccggaaacaaatgcacc

SEQ ID NO: 305431 - DNA, 859 bp, Artificial Sequence
  derived and/or modified sequence
gggtgtgtgtgtgtgtgtgtgtgtgtgtgtgtgtgtgtttggctgtgggttagttgtgccgttctgctggaacaccgtgggaaggcagtagacgcgggcagtcagctagcagagacctgtcggccatggagcctaatgatagtaccagtaccgctgtggaggagcctgacagcttggaggtgttggtgaagaccttggactctcaaactcgtacctttattgtgggggcccagatgaatgtaaaagagtttaaggagcacattgctgcctctgtcagcatcccatctgaaaaacaacggctcatttaccagggacgagttctgcaagatgataagaagcttcaggaatacaatgttgggggaaaggttatccacctggtggaacgggctcctcctcagactcacctcccttctggggcatcttctgggacggggtctgcctcagccactcatggtgggggatccccccctggtactcgggggcctggggcctctgttcatgaccggaatgccaacagctatgtcatggttggaaccttcaatcttcctagtgagccccgggtacggctggtgatggctcagcacatgatcagggatatacagaccttactatcccggatggagtgtcgaggagggccccaaccgcagcacagtcagccgcccccgcagccaccggctgtgaccccggagccagtagccttgagctctcaaacatcagaaccagttgaaagtgaagcacctccccgggagcccatggaggcagaagaagtggaggagcgtgccccagcccagaacccggagctcactcctggcccagccccagcgggcccaacacctgccccggaaacaaatgcacccaa

SEQ ID NO: 305432 - DNA, 747 bp, Artificial Sequence
  derived and/or modified sequence
tgtttggctgtgggttagttgtgccgttctgctggaacaccgtgggaaggcagtagacgcgggcagtcagctagcaggtctgtcgccccagacctgtcggccatggagcctaatgatagtaccagtaccgctgtggaggagcctgacagcttggaggtgttggtgaagaccttggactctcaaactcgtacctttattgtgggggcccagatgaatgtaaaagagtttaaggagcacattgctgcctctgtcagcatcccatctgaaaaacaacggctcatttaccagggacgagttctgcaagatgataagaagcttcaggaatacaatgttgggggaaaggttatccacctggtggaacgggctcctcctcagactcacctcccttctggggcatcttctgggacggggtctgcctcagccactcatggtgggggatccccccctggtactcgggggcctggggcctctgttcatgaccggaatgccaacagctatgtcatggttggaaccttcaatcttcctagtgagccccgggtacggctggtgatggctcagcacatgatcagggatatacagaccttactatcccggatggagtgtcgaggagggccccaaccgcagcacagtcagccgcccccgcagccaccggctgtgaccccggagccagtagccttgagctctcaaacatcagaaccagttgaaagtgaagcacctccccgggagcccatggaggcagaagaagtg

SEQ ID NO: 305433 - DNA, 859 bp, Artificial Sequence
  derived and/or modified sequence
gtgtgtgtgtgtgtgtgtgtgtgtgtgtgtgtgtgtgtttggctgtgggttagttgtgccgttctgctggaacaccgtgggaaggcagtagacgcgggcagtcagctagcagagacctgtcggccatggagcctaatgatagtaccagtaccgctgtggaggagcctgacagcttggaggtgttggtgaagaccttggactctcaaactcgtacctttattgtgggggcccagatgaatgtaaaagagtttaaggagcacattgctgcctctgtcagcatcccatctgaaaaacaacggctcatttaccagggacgagttctgcaagatgataagaagcttcaggaatacaatgttgggggaaaggttatccacctggtggaacgggctcctcctcagactcacctcccttctggggcatcttctgggacggggtctgcctcagccactcatggtgggggatccccccctggtactcgggggcctggggcctctgttcatgaccggaatgccaacagctatgtcatggttggaaccttcaatcttcctagtgagccccgggtacggctggtgatggctcagcacatgatcagggatatacagaccttactatcccggatggagtgtcgaggagggccccaaccgcagcacagtcagccgcccccgcagccaccggctgtgaccccggagccagtagccttgagctctcaaacatcagaaccagttgaaagtgaagcacctccccgggagcccatggaggcagaagaagtggaggagcgtgccccagcccagaacccggagctcactcctggcccagccccagcgggcccaacacctgccccggaaacaaatgcacccaa

SEQ ID NO: 305434 - DNA, 648 bp, Artificial Sequence
  derived and/or modified sequence
atggagcccaacgacagcaccagcaccgccgtggaggagcccgacagcctggaggtgctggtgaagaccctggacagccagaccagaaccttcatcgtgggcgcccagatgaacgtgaaggagttcaaggagcacatcgccgccagcgtgagcatccccagcgagaagcagagactgatctaccagggcagagtgctgcaggacgacaagaagctgcaggagtacaacgtgggcggcaaggtgatccacctggtggagagagcccccccccagacccacctgcccagcggcgccagcagcggcaccggcagcgccagcgccacccacggcggcggcagcccccccggcaccagaggccccggcgccagcgtgcacgacagaaacgccaacagctacgtgatggtgggcaccttcaacctgcccagcgagcccagagtgagactggtgatggcccagcacatgatcagagacatccagaccctgctgagcagaatggagtgcagaggcggcccccagccccagcacagccagccccccccccagccccccgccgtgacccccgagcccgtggccctgagcagccagaccagcgagcccgtggagagcgaggccccccccagagagcccatggaggccgaggaggtgtag

SEQ ID NO: 305435 - DNA, 735 bp, Artificial Sequence
  derived and/or modified sequence
atggagcccaacgacagcaccagcaccgccgtggaggagcccgacagcctggaggtgctggtgaagaccctggacagccagaccagaaccttcatcgtgggcgcccagatgaacgtgaaggagttcaaggagcacatcgccgccagcgtgagcatccccagcgagaagcagagactgatctaccagggcagagtgctgcaggacgacaagaagctgcaggagtacaacgtgggcggcaaggtgatccacctggtggagagagcccccccccagacccacctgcccagcggcgccagcagcggcaccggcagcgccagcgccacccacggcggcggcagcccccccggcaccagaggccccggcgccagcgtgcacgacagaaacgccaacagctacgtgatggtgggcaccttcaacctgcccagcgagcccagagtgagactggtgatggcccagcacatgatcagagacatccagaccctgctgagcagaatggagtgcagaggcggcccccagccccagcacagccagccccccccccagccccccgccgtgacccccgagcccgtggccctgagcagccagaccagcgagcccgtggagagcgaggccccccccagagagcccatggaggccgaggaggtggaggagagagcccccgcccagaaccccgagctgacccccggccccgcccccgccggccccacccccgcccccgagaccaacgccccctag

SEQ ID NO: 305436 - DNA, 621 bp, Artificial Sequence
  derived and/or modified sequence
atggagcccaacgacagcaccagcaccgccgtggaggagcccgacagcctggaggtgctggtgaagaccctggacagccagaccagaaccttcatcgtgggcgcccagatgaacgtgaaggagttcaaggagcacatcgccgccagcgtgagcatccccagcgagaagcagagactgatctaccagggcagagtgctgcaggacgacaagaagctgcaggagtacaacgtgggcggcaaggtgatccacctggtggagagagcccccccccagacccacctgcccagcggcgccagcagcggcaccggcagcgccagcgccacccacggcggcggcagcccccccggcaccagaggccccggcgccagcgtgcacgacagaaacgccaacagctacgtgatggtgggcaccttcaacctgcccagcgagcccagagtgagactggtgatggcccagcacatgatcagagacatccagaccctgctgagcagaatggagtgcagaggcggcccccagccccagcacagccagccccccccccagccccccgccgtgacccccgagcccgtggccctgagcagccagaccagcgagcccgtggagagcgaggcccccccctag

SEQ ID NO: 305437 - protein, 104 aa, Artificial Sequence
  derived and/or modified sequence
MLSRNDDICIYGGLGLGGLLLLAVVLLSACLCWLHRRVKRLERSWHLLSWSQAQGSSEQELHYASLQRLPVPSSEGPDLRGRDKRGTKEDPRADYACIAENKPT

SEQ ID NO: 305438 - DNA, 315 bp, Artificial Sequence
  derived and/or modified sequence
atgctgagcagaaacgatgatatttgtatctacggagggctgggactcggtgggctgctattgcttgcagtggtgcttttgagtgcatgtttgtgttggttgcacagacgcgtgaagagactggagcgctcatggcacctgctgtcttggtcacaggcacagggaagtagcgaacaagaattacattacgccagcctacagcgattgccagtgccgagtagtgagggtccagatctcagggggagagacaagagagggactaaggaagatcctagagcagattatgcctgtatcgctgaaaataagcccacttag

SEQ ID NO: 305439 - DNA, 315 bp, Artificial Sequence
  derived and/or modified sequence
atgctaagtaggaatgacgatatctgcatttatgggggcctggggctgggaggattgttactgctcgctgttgtattgctgtccgcgtgcctgtgctggctgcaccgcagagtaaagcgactggaaagatcatggcacttgctttcttggtcccaagcccaggggtcaagtgagcaggaactgcactacgcatctctgcagagactgcctgtcccaagctctgagggtcctgatctgcgaggacgcgataagaggggcacgaaggaagatcctcgtgctgattatgcctgcatcgcggagaataaaccgacatag

SEQ ID NO: 305440 - DNA, 315 bp, Artificial Sequence
  derived and/or modified sequence
atgctcagcaggaacgacgacatttgcatttatgggggtctgggcttaggtggtctgctgctgcttgccgtggttctcttatcagcatgtttgtgttggctgcatcgccgcgtaaagcgtttggaacgtagctggcacctgctgtcctggtcacaggcacagggctcgtccgagcaggagttacattacgcctctcttcagaggctgcccgtgccatctagcgagggcccagatctgaggggacgtgacaagagggggacgaaagaggacccaagggctgactacgcctgcatcgccgagaataagcctacctag

SEQ ID NO: 305441 - DNA, 315 bp, Artificial Sequence
  derived and/or modified sequence
atgctgtcacgtaacgatgacatctgcatctacggtggacttggcttgggcggactattgctgttggcggttgtgcttctgtcagcctgcctgtgttggttgcacagacgggtgaagaggctggagagatcttggcatctactctcctggtcccaagcccaaggttcatccgagcaggaactccactatgcaagtctccagcgactacctgtcccttcatccgagggccctgacttgcgcggtagagataagagaggcactaaagaagatccccgggccgattacgcatgcatcgccgaaaataagcctacatag

SEQ ID NO: 305442 - DNA, 315 bp, Artificial Sequence
  derived and/or modified sequence
atgctttcacggaacgatgacatatgcatttacgggggtcttggattgggagggttactcctactggccgtggtcctcctctctgcctgtttgtgctggttacacagacgcgtcaagagactggaacgatcatggcacctgctaagctggtcacaggcacagggaagctctgaacaggaattacattacgcaagcctgcagcggctccccgtgcccagctccgaaggccctgatctgcgaggacgggataagcgtggcacaaaagaagacccacgggccgattatgcatgcatcgcggagaacaagccaacatag

SEQ ID NO: 305443 - DNA, 315 bp, Artificial Sequence
  derived and/or modified sequence
atgttgagcagaaatgacgatatctgtatatacgggggtctcgggctaggaggcctcctactgctcgctgtcgtgcttttgagcgcttgcctgtgttggctccacagacgggtgaagaggctcgaacggtcctggcatctcctgtcttggtcgcaggcccaagggagttccgaacaggagttacactacgctagtctccagcgcttgccagtgccctcgtcagaagggcctgatctgagaggtcgggataaaagaggtacaaaagaggaccctcgcgccgattatgcttgtatcgccgaaaataagccaacatag

SEQ ID NO: 305444 - DNA, 315 bp, Artificial Sequence
  derived and/or modified sequence
atgctgagccgcaacgacgacatttgtatctacggcggtttgggcctgggaggcttgctgctgttagcagtggtgctcctttctgcatgcctttgctggctccatcgccgggtcaagagactggaacgctcttggcacctcctgtcctggtcacaggcccaggggtcgtctgagcaggagctgcattatgcatccctgcagcgactacccgtcccttcatccgaaggccctgacttaagagggagggataagcgcggtaccaaggaggatccccgagccgattacgcctgtatcgcggagaataaaccaacttag

SEQ ID NO: 305445 - DNA, 315 bp, Artificial Sequence
  derived and/or modified sequence
atgttgagtcgcaacgacgacatctgcatttatggcggactcggcttgggcggcctgttgttactcgccgttgttctcttgagcgcttgcctgtgttggttgcatcggagagtgaaacgactggagcggagttggcatcttctcagttggtcacaggctcagggatccagcgaacaggaactccactacgcatcattgcagcgactgcctgttcctagctcagaagggccagatctccgagggcgtgacaaacgcggcaccaaggaagatccaagagccgactatgcttgcatcgccgaaaataagccgacgtag

SEQ ID NO: 305446 - DNA, 315 bp, Artificial Sequence
  derived and/or modified sequence
atgctgagcagaaatgatgacatctgcatctatggaggcctgggcctgggcggcctgctgctgctggccgtggtgctgctgagcgcctgcctgtgctggctgcaccggcgggtgaagaggctggagaggtcctggcacctgctgtcctggagccaggcccagggcagcagcgagcaggagctgcactacgccagcctgcagaggctgcctgtgcccagcagcgagggccctgacctgcggggccgggacaagaggggcaccaaggaggaccccagggctgactatgcctgcatcgccgagaacaagcccacctag

SEQ ID NO: 305447 - DNA, 648 bp, Artificial Sequence
  derived and/or modified sequence
atgaggaacttgaggcaagtcaccagcccctgatcatttcgcctaaaagagcaaggactagagttcctgacctccaggccagtccctgatccctgacctaatgttatcgcggaatgatgatatatgtatctacgggggcctggggctgggcgggctcctgcttctggcagtggtccttctgtccgcctgcctgtgttggctgcatcgaagagtaaagaggctggagaggagctggcaccttctgtcctggtcccaggcccagggctcctcagagcaggaactccactatgcatctctgcagaggctgccagtgcccagcagtgagggacctgacctcaggggcagagacaagagaggcaccaaggaggatccaagagctgactatgcctgcattgctgagaacaaacccacctgagcaccccagacaccttcctcaacccaggcgggtggacagggtccccctgtggtccagccagtaaaaaccatggtccccccacttctgtgtctcagtcctctcagtccatctcgagcctccgttcaaattgatcatcatcaaaacttatgtggctttttgacctttgaatagggaattttttaaattttttaaaaattaaaataaaaaaaacacatggctcacccttccaccca

SEQ ID NO: 305448 - DNA, 648 bp, Artificial Sequence
  derived and/or modified sequence
atgaggaacttgaggcaagtcaccagcccctgatcatttcgcctaaaagagcaaggactagagttcctgacctccaggccagtccctgatccctgacctaatgttatcgcggaatgatgatatatgtatctacgggggcctggggctgggcgggctcctgcttctggcagtggtccttctgtccgcctgcctgtgttggctgcatcgaagagtaaagaggctggagaggagctggcaccttctgtcctggtcccaggcccagggctcctcagagcaggaactccactatgcatctctgcagaggctgccagtgcccagcagtgagggacctgacctcaggggcagagacaagagaggcaccaaggaggatccaagagctgactatgcctgcattgctgagaacaaacccacctgagcaccccagacaccttcctcaacccaggcgggtggacagggtccccctgtggtccagccagtaaaaaccatggtccccccacttctgtgtctcagtcctctcagtccatctcgagcctccgttcaaaatgatcatcatcaaaacttatgtggctttttgacctttgaatagggaattttttaaattttttaaaaattaaaataaaaaaaacacatggctcacccttccaccca

SEQ ID NO: 305449 - DNA, 648 bp, Artificial Sequence
  derived and/or modified sequence
atgaggaacttgaggcaagtcaccagcccctgatcatttcgcctaaaagagcaaggactagagttcctgacctccaggccagtccctgatccctgacctaatgttatcgcggaatgatgatatatgtatctacgggggcctggggctgggcgggctcctgcttctggcagtggtccttctgtccgcctgcctgtgttggctgcatcgaagagtaaagaggctggagaggagctggcaccttctgtcctggtcccaggcccagggctcctcagagcaggaactccactatgcatctctgcagaggctgccagtgcccagcagtgagggacctgacctcaggggcagagacaagagaggcaccaaggaggatccaagagctgactatgcctgcattgctgagaacaaacccacctgagcaccccagacaccttcctcaacccaggcgggtggacagggtccccctgtggtccagccagtaaaaaccatggtccccccacttctgtgtctcagtcctctcagtccatctcgagcctccgttcaaaatgatcatcatcaaaacttatgtggctttttgacctttgaatagggaattttttaaattttttaaaaattaaaattaaaaaaacacatggctcacccttccaccca

SEQ ID NO: 305450 - DNA, 315 bp, Artificial Sequence
  derived and/or modified sequence
atgctgagccggaacgacgacatctgcatctacggcggcctgggccttggtgggctcctgctgctagctgtggtacttctaagtgcctgcttgtgttggctccatcggcgtgttaagagattggaaagaagctggcatctcctgagctggagtcaggcccagggcagttccgagcaggagctgcattacgctagcctccaaagactgcctgtcccttcaagcgaaggtcctgatctgaggggccgcgataaaagaggcaccaaagaggatccaagggctgattatgcttgtatagctgagaataagcctacgtag

SEQ ID NO: 305451 - DNA, 315 bp, Artificial Sequence
  derived and/or modified sequence
atgctgagccggaacgacgacatctgcatctacggcggcctgggcctgggcggcctgctcctgttggccgtggtcctgctttcagcttgcctgtgctggctgcatcgccgggttaagcggctggagagatcctggcaccttctgtcttggtcccaggcccaggggagcagtgagcaagagctgcactacgcatccctccaacggctacctgtgccttcctcagaaggcccagatctgcgcggccgagacaaacgaggtaccaaggaggaccctcgagccgattacgcatgcatcgccgaaaacaaacctacctag

SEQ ID NO: 305452 - DNA, 315 bp, Artificial Sequence
  derived and/or modified sequence
atgctgagccggaacgacgacatctgcatctacggcggcctgggcctcgggggccttttactgctcgcagtggtccttctttctgcatgtctgtgctggttgcaccgtcgggttaagcggctcgagaggtcctggcacctgttgagctggtcacaagcccagggaagttcggaacaggaactgcactacgcaagcttacagaggttgcccgtcccctccagcgaggggccggatctgcgagggagagataaaagaggaacaaaagaggaccctagagcagactacgcctgtatagccgagaataaaccaacgtag

SEQ ID NO: 305453 - DNA, 315 bp, Artificial Sequence
  derived and/or modified sequence
atgctgagccggaacgacgacatctgcatctacggcggcctgggcctgggcggcctcctgctactcgcagtggtcctcctaagcgcttgcctgtgttggctgcatagaagagtgaagcggttggaaaggtcttggcacctcctctcctggtcccaggcccagggttcttccgaacaggagctgcattatgccagcctccaacggctgcctgtgcccagcagcgagggtcccgatttgcgaggcagagataaaagggggacaaaggaggaccccagggcagattacgcttgtatcgccgaaaataagcctacgtag

SEQ ID NO: 305454 - DNA, 315 bp, Artificial Sequence
  derived and/or modified sequence
atgctgagccggaacgacgacatctgcatctacggcggcctgggcctgggcggactgttgctgctcgctgtcgtgctgctttcggcctgcttatgttggcttcatcgcagggtgaaaagactggagcgctcctggcatcttctgtcttggagtcaggctcagggttcctccgagcaggaattgcactatgcgagcctgcagcgcctcccagttccctcatctgagggcccagacctacggggcagggacaaacgcgggacgaaggaggacccccgcgccgactatgcatgcatagccgaaaataaaccgacatag

SEQ ID NO: 305455 - DNA, 315 bp, Artificial Sequence
  derived and/or modified sequence
atgctgagccggaacgacgacatctgcatctacggcggcctgggcctggggggtctgctgctgctggccgtggttttgctttcggcttgcctgtgctggctacatagacgcgttaagcgccttgagcggtcatggcacctcctatcatggtcccaagcccagggcagctctgagcaggagttgcattatgccagcctgcaaaggctgcccgtgccatcctcagagggccctgatttgagagggcgcgacaaacggggaacaaaagaggaccctcgcgctgactatgcctgcatcgctgaaaacaagccgacatag

SEQ ID NO: 305456 - DNA, 315 bp, Artificial Sequence
  derived and/or modified sequence
atgctgagccggaacgacgacatctgcatctacggcggcctgggcttaggaggacttttacttcttgccgtggtgctgctgtcggcttgcctttgctggcttcatcgtagagtgaagcggttggaacgttcatggcaccttctgtcgtggtctcaagctcagggttcttctgagcaggagcttcactacgcaagtctgcaacgcctgccggtgcccagctcagagggacctgatcttcgtgggagggacaagaggggaactaaagaagacccccgggccgattacgcttgtatcgccgagaacaagccgacctag

SEQ ID NO: 305457 - DNA, 315 bp, Artificial Sequence
  derived and/or modified sequence
atgctgagccggaacgacgacatctgcatctacggcggcctgggcctgggtggcctgctactgctggccgttgtcctgctgagcgcctgtctatgctggctccatcgccgggttaagcgcctggagcgctcatggcacctgctctcctggagccaggctcagggtagctctgaacaggagttgcattatgcatcattgcagcggttaccagtaccgtcctctgagggacccgacctacggggcagagacaaacgagggacaaaagaggatccccgtgccgattacgcctgtatcgctgaaaataaaccgacgtag

SEQ ID NO: 305458 - DNA, 315 bp, Artificial Sequence
  derived and/or modified sequence
atgctctcccggaatgatgatatctgcatttatggagggctgggccttggcggactgcttctgctcgctgtggtgctcctgtcagcctgcctttgttggctccacaggagagttaaaaggcttgagagatcatggcacctactctcttggagtcaggcccaggggtcctcagaacaagaattacactatgcttccttgcaaaggctgcccgtgccttcttcagaaggcccagatttgagagggagagacaagcgaggcacaaaagaggaccctcgcgcagactacgcatgtatcgctgagaataagccgacgtag

SEQ ID NO: 305459 - DNA, 315 bp, Artificial Sequence
  derived and/or modified sequence
atgctatcccggaacgacgacatctgcatctacgggggtctcggattaggcggactgcttttgctggccgtggtgctcctgagtgcatgtttgtgctggcttcaccggagagtaaaaagacttgagcggtcttggcacctgctatcctggagtcaggcacaggggtcctcagagcaggagcttcactacgcttcactgcagcgactgccagtgcccagcagcgaggggcctgatctgcggggtcgcgataagagagggacaaaagaagatcctcgggcagattatgcctgtatagccgagaacaagcctacatag

SEQ ID NO: 305460 - DNA, 315 bp, Artificial Sequence
  derived and/or modified sequence
atgctcagccgtaatgatgatatttgcatttacggcggtctgggcctgggcggactcctcctgctagcagtagtgctcctgagcgcctgtttgtgttggctgcaccggagggtgaaaaggctggagcgatcatggcacctgctgtcgtggagtcaagcacagggtagtagtgagcaagagctgcattatgcttccctacagagactaccggttccttccagcgaggggcctgacctgcgcggtcgcgataaaaggggtacaaaggaagatccccgtgccgactacgcgtgcatcgccgagaataagcccacatag

SEQ ID NO: 305461 - DNA, 315 bp, Artificial Sequence
  derived and/or modified sequence
atgttgagccgaaatgatgacatctgtatttacgggggtctgggcctgggtgggttattgttgttagctgtagtgctgctgagcgcctgcctgtgctggttgcatcgacgggtgaaacgtctggaaaggagctggcatctgctttcttggagtcaggcacaaggctcctctgagcaggaattgcattatgctagcctgcaaagactccccgtgcccagttctgaaggacccgacttacggggacgggacaaacgcggaacaaaagaagacccaagagccgattacgcctgcatcgcagagaacaaacccacctag

SEQ ID NO: 305462 - DNA, 315 bp, Artificial Sequence
  derived and/or modified sequence
atgctgagcagaaacgatgatatttgcatatacggtggcctgggcctgggaggattgctgctgctggcagtggtactgctcagcgcctgcctgtgctggctgcatcgccgagtgaagcgcttggagcggtcctggcacctcctgagttggtcccaggcgcaaggaagttcagaacaggagctccactatgcctccctacagagactgcctgttccgtcctccgagggtcccgacctgcgaggacgggacaagagaggcaccaaggaggatccccgtgctgattacgcatgcatcgccgagaacaagcctacttag

SEQ ID NO: 305463 - DNA, 315 bp, Artificial Sequence
  derived and/or modified sequence
atgttaagtagaaacgatgacatttgcatttatgggggtctcggactggggggattactgctgttagcggtggtccttctctcagcctgtttgtgttggctccatagacgcgtcaagaggctggaacgtagctggcacctcctgtcctggtcccaggcacagggctcatcagaacaggaattacactatgcctccctccagcggctgccagtcccaagttcagagggacccgatctgagaggcagagataaacggggaacaaaggaagaccctagggcggattacgcttgtatcgcggaaaacaaaccaacctag

SEQ ID NO: 305464 - DNA, 315 bp, Artificial Sequence
  derived and/or modified sequence
atgttaagccgtaacgatgacatttgcatatatgggggattaggactgggtggcctgctcctgctggctgtcgtcctcctctcagcatgtctgtgttggttacatagaagagtgaagcggttggagcgctcatggcacctcctgtcttggtctcaggcccagggttctagcgagcaggagctgcactatgcctcactgcagagactgcccgtgccgtctagcgagggacccgaccttaggggaagagataaacgcggaaccaaggaggacccaagagccgattacgcgtgcatagcagaaaataagcctacgtag

SEQ ID NO: 305465 - DNA, 315 bp, Artificial Sequence
  derived and/or modified sequence
atgctgtcccgtaatgatgacatctgcatttacggaggcctcggacttggaggcttattactactggcagtcgtcctgctcagcgcttgcctgtgctggcttcatcgcagggtcaaacgcctggaacggagctggcacctgcttagctggtcccaagctcagggtagcagcgagcaggagctacattatgcctctttacagcgcctgccggtacccagctcagaggggcctgacctccggggacgagacaagagaggcaccaaggaggacccacgggcagattacgcctgtatcgccgagaacaagcctacgtag

SEQ ID NO: 305466 - DNA, 315 bp, Artificial Sequence
  derived and/or modified sequence
atgctgagcagaaacgacgacatctgcatctacggcggcctgggcctgggcggcctgctgctgctggccgtggtgctgctgagcgcctgcctgtgctggctgcacagaagagtgaagagactggagagaagctggcacctgctgagctggagccaggcccagggcagcagcgagcaggagctgcactacgccagcctgcagagactgcccgtgcccagcagcgagggccccgacctgagaggcagagacaagagaggcaccaaggaggaccccagagccgactacgcctgcatcgccgagaacaagcccacctag

SEQ ID NO: 305467 - DNA, 594 bp, Artificial Sequence
  derived and/or modified sequence
atggaacagttcgttcaagtgattatggaggcctgggttaagggggtaaacccaaagggaaacagtacaaatccttccaactgggattttggcagctccttttttttcgctggtacagtcgtgactaccatcggctatggcaacttagcgccctcaactgaggccggccaggtgttttgcgtgttttacgcactgctgggcataccactcaatgttattttcctgaaccacctagggactggcctgcgggcacaccttgccgccatcgaacgttgggaggacagaccgagacgctcacaggtcctgcaggtcctcggcctggcactgtttctgactttgggcactctggttattctcattttcccccccatggtgttcagccacgtggagggctggtcctttagcgagggcttctatttcgccttcatcacgctgtccacaatcggattcggagattacgtggtgggtctgagacagggctgtggtgccaaggccgcccctgggcgcagacccagaaggggatccactgccgctcgcggggtgcaggtgacccctcaagattttcctatctccaagaaagggttgggatcctag

SEQ ID NO: 305468 - DNA, 594 bp, Artificial Sequence
  derived and/or modified sequence
atggagcagtttgtgcaggtgatcatggaggcctgggtgaagggcgtgaaccccaagggcaacagcaccaaccccagcaactgggactttggcagcagcttcttctttgctggcaccgtggtgaccaccatcggctacggcaacctggcccccagcacagaagctggccaggtgttctgtgtgttctacgccctgctgggcatccccctgaatgtcatcttcctgaaccacctgggcaccggcctgcgggcccacctggccgccatcgagcgctgggaggaccggcccaggaggagccaggtgctgcaggtgctgggcctggccctcttcctgaccctgggcaccctggtgatcctgatcttcccccccatggtgttcagccacgtggagggctggagcttcagcgagggcttctactttgccttcatcaccctgagcaccatcggctttggagactatgtggtgggcctgcggcagggctgtggggccaaggccgcccctggaagaagaccccggcggggcagcacagctgcccggggcgtgcaggtgaccccccaggacttccccatcagcaagaagggcctgggcagctag

SEQ ID NO: 305469 - DNA, 594 bp, Artificial Sequence
  derived and/or modified sequence
atggagcagttcgtgcaggtgatcatggaggcctgggtgaagggcgttaatcccaagggcaattccactaacccaagcaattgggactttggttcatcgttcttttttgcggggaccgtggtgacaaccatcgggtatggcaatctcgctccctcaacagaggctggccaagtgttctgcgtgttctatgcgctgctcggaattccgttaaacgttatattcttaaaccatcttgggaccgggttgcgagcccacctggccgcgattgaaagatgggaagatagacccagacggtcccaggtactgcaagttctggggctggccttgttcctgactctgggtactctcgttattctgatcttccctcccatggtcttcagccacgtcgagggttggagtttttccgaaggattttatttcgcctttattactctgtcaaccatcggctttggagattatgtcgtgggcctgcggcagggatgcggggccaaggccgcgcctggaagacgacctcgcaggggaagcacggccgcccgtggggtacaggttactcctcaggactttcccatatcaaaaaaaggcttgggtagttag

SEQ ID NO: 305470 - DNA, 594 bp, Artificial Sequence
  derived and/or modified sequence
atggaacagttcgtgcaggtgattatggaagcgtgggtgaagggggtgaatcccaagggcaatagtactaatccctcaaactgggacttcggctccagcttcttttttgccggtaccgttgtgaccaccatcggttatgggaacctggccccttcaacagaggcgggacaggtattctgcgtcttttacgcccttttggggatccccctgaacgtgattttcctaaaccatctaggtacagggctgagagcccatctggccgctattgagaggtgggaagacaggccacgcaggtctcaggtgctgcaggtgcttggtctggcactgtttcttaccctggggacgctagtgatattgatttttcctccaatggtcttctcgcacgttgagggatggtccttttctgagggtttctactttgccttcatcacattgtccactatcggattcggagattatgtcgtgggattaagacagggttgcggagcaaaagccgcaccgggaagaagaccaaggagaggtagcacagcggcacggggagtgcaagtgactcctcaggacttcccaatctccaagaagggattgggatcctag

SEQ ID NO: 305471 - DNA, 594 bp, Artificial Sequence
  derived and/or modified sequence
atggagcagttcgtgcaggtgatcatggaggcctgggtgaagggcgtgaaccccaagggcaacagcaccaaccccagcaactgggacttcggcagcagcttcttcttcgccggcaccgtggtgaccaccatcggctacggcaacctggcccccagcaccgaggccggccaggtgttctgcgtgttctacgccctgctgggcatccccctgaacgtgatcttcctgaaccacctgggcaccggcctgagagcccacctggccgccatcgagagatgggaggacagacccagaagaagccaggtgctgcaggtgctgggcctggccctgttcctgaccctgggcaccctggtgatcctgatcttcccccccatggtgttcagccacgtggagggctggagcttcagcgagggcttctacttcgccttcatcaccctgagcaccatcggcttcggcgactacgtggtgggcctgagacagggctgcggcgccaaggccgcccccggcagaagacccagaagaggcagcaccgccgccagaggcgtgcaggtgaccccccaggacttccccatcagcaagaagggcctgggcagctag

SEQ ID NO: 305472 - protein, 560 aa, Artificial Sequence
  derived and/or modified sequence
MESQPAQECLMQMFLPIEPACFVEWLGTSPSQLGVVMVDEAHERTLHTDILFGLIKDVARFRPELKVLVASATMDTARFSTFFDDAPVFRIPGRRFPVDIFYTKAPEADYLEACVVSVLQIHVTQPPGDILVFLTGQEEIEAACEMLQDRCRRLGSKIRELLVLPIYANLPSDMQARIFQPTPPGARKVVVATNIAETSLTIEGIIYVLDPGFCKQKSYNPRTGMESLTVTPCSKASANQRAGRAGRVAAGKCFRLYTAWAYQHELEETTVPEIQRTSLGNVVLLLKSLGIHDLMHFDFLDPPPYETLLLALEQLYALGALNHLGELTTSGRKMAELPVDPMLSKMILASEKYSCSEEILTVAAMLSVNNSIFYRPKDKVVHADNARVNFFLPGGDHLVLLNVYTQWAESGYSSQWCYENFVQFRSMRRARDVREQLEGLLERVEVGLSSCQGDYIRVRKAITAGYFYHTARLTRSGYRTVKQQQTVFIHPNSSLFEQQPRWLLYHELVLTTKEFMRQVLEIESSWLLEVAPHYYKAKELEDPHAKKMPKKIGKTREELG

SEQ ID NO: 305473 - protein, 188 aa, Artificial Sequence
  derived and/or modified sequence
MESQPAQECLMQMFLPIEPACFVEWLGTSPSQLGVVMVDEAHERTLHTDILFGLIKDVARFRPELKVLVASATMDTARFSTFFDDAPVFRIPGRRFPVDIFYTKAPEADYLEACVVSVLQIHVTQPPGDILVFLTGQEEIEAACEMLQDRCRRLGSKIRELLVLPIYANLPSDMQARIFQPTPPGARK

SEQ ID NO: 305474 - DNA, 1683 bp, Artificial Sequence
  derived and/or modified sequence
atggaatcccaaccagcgcaggaatgtttgatgcagatgttcctgcctattgaacccgcgtgtttcgtcgagtggcttggaacctctccctcccaactgggagtcgtgatggtagatgaagcacatgagcgtacactgcacacagatatccttttcggcttaatcaaggacgtcgctcggtttcgccccgagttgaaagttctcgtagcaagtgcaaccatggatactgccaggttcagcacattcttcgatgacgcaccagtgttccggataccgggtcgtcggttccccgtggatatcttttatacgaaggccccagaggctgactatctggaggcatgcgtcgtgagtgttttgcaaatccacgtaacccaaccccccggggatatcctggtgtttcttacaggacaagaggagatcgaggcagcctgcgagatgctgcaggaccgttgcaggcgactgggctccaagattcgggaactcctggtgctgcctatctacgctaacctcccttctgacatgcaggctcgtatttttcagccaacccccccgggcgccaggaaggtcgtggtggccaccaatatcgctgagacgagcctcaccattgaggggattatttacgtgctcgaccccggcttttgcaaacagaaatcctataatccccgcactggcatggagtcactcacagtcaccccatgttctaaggcctcagcaaaccaacgggccggccgcgccggacgcgttgccgcaggcaagtgcttcaggctctacacggcctgggcctaccagcacgagctggaggaaacaacagtaccggaaatccaacgcacctcactcggaaacgttgtactcctgttaaagagcctggggatacacgacttgatgcactttgattttttggatccacccccatacgagacactcctattggctcttgagcagctctatgccctgggggccctgaaccacctgggcgagttgactacttctggccgcaaaatggctgagctacctgtcgaccccatgctctcgaagatgatcctggcgagcgaaaaatacagctgcagcgaagagatcctgaccgtggccgccatgttgtccgtgaataattctatcttctacaggcctaaggacaaagtcgtacacgcggacaacgctcgcgtcaatttcttcttacccgggggggatcacctggtgctgttaaacgtatatacacagtgggcagaaagtggatactcctcacagtggtgttatgaaaactttgtccagttcagatccatgcgtagggcccgggacgttcgagaacagctggagggcttactcgagcgcgtcgaggtggggctgagctcctgccaaggcgattatattagagtgagaaaagccattacagccggttatttctaccacactgctcggctgacaaggtccggttataggacggtgaagcaacaacaaacagtgttcatccatccgaattcttctttgttcgaacaacagcctcgatggttattgtaccatgagctggtgcttaccaccaaagaatttatgagacaggtgctggagatcgagtcctcttggctgctcgaagttgctccacactattacaaggccaaggaactcgaggacccccatgctaagaaaatgcctaagaagataggcaaaacccgggaggaactgggctag

SEQ ID NO: 305475 - DNA, 1683 bp, Artificial Sequence
  derived and/or modified sequence
atggagtctcaacccgcccaggagtgcctcatgcagatgttcctgcccatcgaacccgcctgctttgtcgaatggctgggcacttccccctcacagctgggtgtcgtcatggtggacgaggcccatgaaaggacgctgcacactgatatcctttttggtctgattaaagatgtggcacgctttaggccagaactcaaagtcctggtagcctccgcaaccatggacaccgctagattcagcacctttttcgatgatgcccctgtgttccgaatcccggggcgacgttttccagtggacattttctataccaaggccccagaagcggactatttagaggcctgcgtagtgagtgtcctgcagatccatgtgacgcagccccccggagacattttagtcttcctgacggggcaagaggaaatagaggccgcttgcgagatgctacaagatcgctgcaggcgtctagggagcaaaatcagagagcttttggtgttgcctatctatgcaaacctaccgagtgacatgcaggcaagaatcttccaacccacaccaccaggggcaaggaaggtggttgtggctacgaatatagctgagacaagtcttaccattgagggaatcatttacgtgttggatcctggcttctgtaaacagaagtcttacaatccccgcaccgggatggagtcccttactgttacaccgtgctccaaagcctctgccaatcagcgcgctgggcgggccggacgcgtggcagccgggaaatgcttcagactttacactgcatgggcttaccaacacgaactggaagagactacggtccccgagattcaaagaacctcattagggaacgtcgttcttcttcttaaaagtctcggtattcatgatctgatgcactttgactttctcgatccccctccttatgagaccctcctactggcactggagcaactctatgcactgggcgctctgaaccatctcggggaattgacgacctcaggacggaagatggcagagctgcccgtggacccgatgctttcaaagatgattcttgccagtgagaagtacagctgtagtgaggagattctgaccgtcgcagctatgctgtccgtgaacaattccatcttctaccgacccaaagataaggtggttcacgcggacaatgcccgggtgaactttttcttgccaggtggagaccacctggtgctgctcaacgtctatacccagtgggcagaaagcggctactcttcccagtggtgttatgagaacttcgtacagtttagaagtatgcgccgggctcgcgatgtacgagagcaactggaaggactcctggagagggtcgaggtgggccttagttcttgccaaggtgactacatcagggtgaggaaggcgatcaccgcagggtacttttaccacaccgcaagactcacaaggagcggataccgcacggtgaagcagcagcagacagtgttcattcacccgaacagttcactgtttgagcagcaacctagatggcttttgtatcacgaacttgttctgaccaccaaggagttcatgcgtcaggtcctggaaattgaaagctcctggctcctagaagtggctcctcattactacaaggcaaaagaactagaagatcctcacgcaaaaaaaatgccaaagaagattggcaagacccgggaggaactaggctag

SEQ ID NO: 305476 - DNA, 1683 bp, Artificial Sequence
  derived and/or modified sequence
atggagtcccagccagcccaggaatgtcttatgcagatgttcctgcccatcgaaccggcgtgttttgtcgagtggttgggaacttcaccttcccagctgggggtagtgatggtcgacgaagcacacgagcggactctgcacaccgatatcttgtttgggctgataaaggacgtggcccgtttcaggcctgaactaaaagtgctcgtcgcatccgctaccatggacacggctaggttctccactttctttgacgacgccccagtctttaggatccctggacggcgatttcctgtagacatattctacacaaaggcaccggaggcggattatctcgaggcatgcgtcgtgagtgttttgcagatacacgtaactcaacctcccggggacatcttggtgtttctgacgggccaggaagagatcgaagctgcatgcgaaatgttgcaggaccgttgcaggcgtcttggaagtaagattagggagctgcttgtgctgccgatttacgctaatctgccaagcgacatgcaggcacgtatattccagcctacgcctccaggcgcccgaaaggtggtcgttgctactaacatcgctgagacgtcactcactatcgagggcatcatctatgtgctggacccaggtttctgcaagcaaaagtcttacaatcccaggacagggatggaaagcttgacagttaccccatgctccaaagcatccgccaaccagcgtgccggaagggcgggccgggtggcagcgggtaaatgcttcaggttgtacactgcatgggcttaccagcacgagctggaagaaaccacggtgcctgaaattcaacgcacatcactgggaaatgtggtgctgttgctgaaatcgcttggaattcacgacctgatgcactttgactttttagacccccctccatacgaaactctgctactggccttagaacagctttatgctcttggcgctctgaaccaccttggcgaactgaccacctctgggcgtaaaatggcagagctcccagtggatccaatgctgtctaagatgattctcgcctcagaaaaatacagttgttcggaagaaattctgactgtcgccgccatgttatctgttaataactctattttttacaggcccaaggataaagtagttcatgccgataacgctagagtgaatttcttccttcctgggggtgaccacctggttctgctgaatgtgtacacccagtgggctgaaagcggctatagttcacagtggtgctacgaaaattttgtgcagtttagatccatgaggcgcgcgagagatgtgcgagagcaacttgaagggctcctggagcgagttgaggtgggtctatctagctgccagggagactacattcgcgtgaggaaagctataactgcaggatacttctatcatactgcaaggctgacccgcagtggctacaggaccgtcaagcagcaacagaccgtgtttatccaccctaattcaagcctgttcgagcagcaacctcgttggcttctttaccacgaattagtactgacaactaaggagtttatgcgtcaggtgttagagatcgaatcctcctggcttctagaggtagccccgcactattataaggcaaaggagttggaagatccccatgcaaagaaaatgcccaagaagattggaaagaccagggaggagctgggctag

SEQ ID NO: 305477 - DNA, 1683 bp, Artificial Sequence
  derived and/or modified sequence
atggaatcccagccagctcaggagtgcttgatgcagatgtttctgccgattgagccagcatgtttcgtggagtggctggggacatccccgtcgcagctcggggtcgttatggtcgatgaggcccacgagcggactctccacaccgacattctgttcggcctcatcaaagacgttgctcggtttcgccctgaattaaaggtgctagtggcatctgctaccatggacacggctcgattcagcaccttctttgatgatgccccagtatttcggattccaggcagaagatttcccgtcgacatattttacaccaaagctcccgaggcggattacctggaagcctgcgtcgttagcgtactgcagattcatgtgacacaacctcccggggacatcctggtgtttctgaccggacaggaggagattgaagccgcctgtgaaatgcttcaggacagatgccggcgattgggcagtaagataagggaactgcttgtgctccccatatatgctaatctgccaagtgatatgcaagctcgcatatttcagccaacccctcctggagcgcgcaaagtggtggtggcaacgaatatcgccgagacaagtctcacgatcgaggggatcatatacgtattggatccgggattttgcaagcaaaagagctacaatccgcggacaggaatggaatctttaaccgtaactccctgcagtaaggcttcagcgaatcaacgggccggccgcgccgggagagtcgcagctggcaagtgttttaggctgtacactgcctgggcatatcagcatgagttagaggagacgaccgtaccagagatccagagaacctccctgggcaatgtggtgctgttgctcaagagtttagggatccatgatctgatgcacttcgacttcctagaccctccgccttatgagaccttactgcttgctctcgagcaattatatgctcttggcgccctgaaccatctgggtgagcttacgacctcagggaggaaaatggcggagctccccgtggaccctatgctaagcaaaatgatcttggcctctgagaaatattcctgttccgaagagatcctgacggtcgctgcgatgctgtcagtgaataatagcatcttctatcggcccaaagataaggtggtccatgctgacaacgctagagttaattttttcctaccgggtggtgaccacttggtcctcctcaatgtctatactcaatgggcagaatccgggtactcgtcccaatggtgttacgaaaattttgtccagttcaggtcgatgcggcgtgcacgcgacgttcgcgaacagctcgagggcctgctggaaagggtggaagtcggcctgtcaagctgccagggggattacatcagggttaggaaggcaatcaccgccggctacttttatcacaccgcccgactgacaaggagtggataccggacagtcaagcaacaacaaactgtcttcatccaccctaacagcagcttgttcgaacagcagcctaggtggctcctctatcatgagttggtactcaccaccaaagaatttatgaggcaggttctggagatagaatcttcatggttgttggaggtggcaccgcattattataaagcgaaggaactggaggatcctcacgctaaaaagatgccaaaaaaaatcggcaagactcgtgaagaactcgggtag

SEQ ID NO: 305478 - DNA, 1683 bp, Artificial Sequence
  derived and/or modified sequence
atggagtcccagccagcccaggaatgtctgatgcaaatgtttttgccaattgagcccgcttgctttgtcgaatggttggggacttcaccatcacagttaggggtagtgatggtagatgaggctcacgaaaggacactccacacagacatcttgttcgggttgatcaaagacgtagcgagatttagacccgagctcaaggtgcttgtggcttctgccacgatggataccgccagattctccaccttcttcgatgatgcacctgtcttcagaattccgggtcgccgctttcctgttgatattttctataccaaggctcccgaggcagattacctcgaagcttgcgtggttagcgtgctccagatccacgttactcagccacccggcgatattttggttttcctgactggccaggaagaaattgaggccgcctgcgaaatgctccaggatagatgtaggaggctgggatcaaaaattcgggaactactggtgctacctatttatgccaatcttccatctgacatgcaagcccgaatctttcagccgacaccacccggcgcccgcaaagtggtcgtcgcaacaaatattgccgagacaagcctgaccattgaaggtataatttacgtgctggaccccggcttctgtaagcagaagtcttacaacccccgcactggcatggaatcccttaccgtgacaccctgcagtaaagcctccgcaaaccaaagagccgggcgagctggtagagttgccgccgggaaatgctttagattatatacagcctgggcctatcagcacgagcttgaagagacgacggtgccggaaatccagcgaacaagccttggaaacgtagtcctgctgctgaaaagcctgggcatccatgatctgatgcatttcgactttcttgatcccccaccttatgagactttgcttctcgccctggaacaactgtacgcgctcggggccctcaatcaccttggcgagctgaccacaagcggtagaaagatggctgagctccctgtcgatccaatgctcagcaagatgatactggcgtcagagaaatacagctgttccgaagagatcctcaccgtggccgctatgctgtcagtgaataactctattttttaccggcctaaggataaggttgtccacgccgacaatgctcgagtgaacttcttcctgccaggcggagatcacctggtccttctgaacgtgtacactcagtgggccgagagcgggtactcatcccagtggtgttatgaaaattttgtacagttccggagtatgcgcagggcccgggacgttagggaacagctagagggacttctcgagagggttgaggtggggctcagcagttgtcaaggcgactacatccgggtgagaaaggctatcactgccggttatttttaccacacggcaagactgactcggtccggatatcgcacagtaaaacaacagcagacagtgtttatccatccaaattcctctctgtttgaacaacagccacgctggctgctgtaccatgaattagtcttgactactaaggagttcatgaggcaggtccttgaaattgagagctcatggcttctggaggtagcaccccactattataaggccaaggaactggaagacccacacgccaaaaagatgccaaagaaaataggcaaaaccagggaggagctcggttag

SEQ ID NO: 305479 - DNA, 1683 bp, Artificial Sequence
  derived and/or modified sequence
atggaatcacagcccgctcaggagtgcctgatgcagatgttcctcccaattgaacctgcgtgtttcgtagaatggctgggaacgtccccgtcccagctcggcgtggtcatggtggacgaagcgcacgaaagaactctccatacagatatactcttcggactgatcaaagatgtggccaggtttagaccagagctgaaggtcctcgtggccagcgccacgatggacaccgccaggttttctacttttttcgacgacgcacctgtatttcgcattcctggacgacggttccccgtagatatcttttacaccaaggctcccgaggccgattacctggaggcttgcgtggtatcagtcttacaaatccacgtgacacagcccccaggagatatcctggtgtttctgactggacaggaggagatagaagcggcctgcgaaatgctacaagaccgatgcaggcgcttggggtcaaagatccgggaactcctggttttacccatatacgctaacttgcccagcgacatgcaggcccggatattccagccgactccccccggcgccaggaaagtcgtggtggcgactaatatagccgagacttcactgactatcgaaggaattatctacgttctggatcccgggttctgtaagcaaaaatcttataatccccgcactggtatggagtcgcttactgtcaccccctgctcaaaggcatcagcaaaccagcgagccggtcgagctggtcgggttgccgctgggaagtgttttaggctttatacagcatgggcctaccaacatgagttggaggagaccaccgtgcctgaaattcagaggacttcactggggaacgtggttttgctgctaaaatccctgggcatccatgacctcatgcactttgattttcttgatccaccaccctacgagacattgctgctagctctggaacagctttacgctctgggagccctcaatcatttaggcgagctgacgacaagtggtaggaagatggccgagctgcccgtggacccgatgctgtcaaaaatgatcctcgcatccgaaaaatactcatgtagcgaagaaatactaactgtggcggccatgctgagtgttaataatagcatcttttatcggcctaaagacaaagttgtgcacgctgataatgctagggtcaattttttcctgccaggcggagatcaccttgtactgctgaacgtatatactcagtgggccgagtcaggctacagttctcagtggtgttacgagaatttcgtgcaatttcgaagtatgaggcgcgcccgcgatgttcgggagcagctcgaaggcctcctcgaacgggtcgaagtggggctgtcctcatgccagggcgattatattcgcgtccgaaaagcgatcacagccggatacttctaccacaccgcccgcttgactcgtagtggataccggactgttaagcaacaacagaccgtatttatacacccaaacagctcgttgtttgaacaacagcccaggtggcttctctatcacgagctggttctgaccacaaaagagtttatgcgccaggtgcttgaaatcgagtccagctggctgttggaggtcgccccccactactacaaggccaaggagctggaggatccgcacgctaagaagatgccaaagaaaattgggaagacacgcgaggagttgggctag

SEQ ID NO: 305480 - DNA, 567 bp, Artificial Sequence
  derived and/or modified sequence
atggaaagccagcccgcccaggaatgtctgatgcagatgttcctgccaatcgaacccgcctgcttcgtcgaatggctgggaacgtcccccagccagctgggggtggttatggtcgatgaggcacacgagagaactttgcacacagacatcctctttggactgatcaaggacgtcgcaaggtttcgccccgagcttaaagttctcgtcgcgtcagctactatggatactgccagattctctactttttttgatgacgctcctgtcttcagaatcccaggcaggagatttcccgttgacatcttttacaccaaggctcctgaagccgattacttggaagcttgcgtagtcagcgttctccagatccacgtgacccaaccccctggagacattctggttttcctaaccggacaggaggagatagaagcagcctgtgaaatgctgcaggatcgctgtaggagattgggctccaaaattagggagttactggtgctgcccatctatgcgaacttgccttccgatatgcaggctcgaatattccaaccaacccctccaggagctagaaaatag

SEQ ID NO: 305481 - DNA, 1683 bp, Artificial Sequence
  derived and/or modified sequence
atggagagccagcctgcccaggagtgcctgatgcagatgttcctgcccattgaaccagcctgctttgtggagtggctgggcaccagccccagccagctgggcgtggtgatggtggatgaggcccacgagaggaccctgcacacagacatcctgtttggcctcatcaaggatgtggcccgcttccggcctgagctgaaggtgctggtggccagcgccaccatggacacagcccgcttcagcaccttctttgatgatgcccctgtgttccgcatccctggccgccgcttccctgtggacatcttctacaccaaggcccctgaggccgactacctggaggcctgtgtggtgtctgtgctgcagatccacgtgacccagcccccaggggacatcctggtgttcctgaccggccaggaggagattgaggccgcctgtgagatgctgcaggaccgctgccggcggctgggcagcaagatccgggagctgctggtgctgcccatctatgccaacctgcccagcgacatgcaggcccgcatcttccagcccaccccacctggggccaggaaggtggtggtggccaccaacattgctgagaccagcctgaccatcgagggcatcatctacgtgctggaccccggcttctgcaagcagaagagctacaaccccaggacaggcatggagagcctgactgtgaccccctgcagcaaggccagcgccaaccagagagctggccgggccggccgggtggccgccggcaagtgcttccggctgtacacagcctgggcctaccagcacgagctggaggagaccaccgtgcctgagatccagaggaccagcctgggcaatgtggtgctgctgctgaagagcctgggcatccatgacctgatgcactttgacttcctggaccccccaccctatgagaccctgctgctggccctggagcagctgtatgccctgggcgccctgaaccacctgggggagctgaccaccagcggcaggaagatggccgagctgcctgtggaccccatgctgagcaagatgatcctggccagcgagaagtacagctgcagcgaggagatcctgactgtggccgccatgctgtctgtgaacaacagcatcttctaccggcccaaggacaaggtggtgcatgctgacaatgcccgggtgaacttcttcctgcctggaggagaccacctggtgctgctgaatgtgtacacccagtgggccgagagcggctacagcagccagtggtgctatgaaaattttgtgcagttccgctccatgaggcgggccagagatgtgcgggagcagctggagggcctgctggagcgggtggaggtgggcctgagcagctgccagggcgactacatccgggtgaggaaggccatcacagctggctacttctaccacacagcccggctgaccaggagcggctacagaacagtgaagcagcagcagaccgtcttcatccaccccaacagcagcctgtttgagcagcagccccgctggctgctgtaccacgagctggtgctgaccaccaaggagttcatgaggcaggtgctggagattgagagctcctggctgctggaggtggccccccactactacaaggccaaggagctggaggacccccacgccaagaagatgcccaagaagattggcaagacccgggaggagctgggctag

SEQ ID NO: 305482 - DNA, 567 bp, Artificial Sequence
  derived and/or modified sequence
atggagagccagcctgcccaggagtgcctgatgcagatgttcctgcccattgaaccagcctgctttgtggagtggctgggcaccagccccagccagctgggcgtggtgatggtggatgaggcccacgagaggaccctgcacacagacatcctgtttggcctcatcaaggatgtggcccgcttccggcctgagctgaaggtgctggtggccagcgccaccatggacacagcccgcttcagcaccttctttgatgatgcccctgtgttccgcatccctggccgccgcttccctgtggacatcttctacaccaaggcccctgaggccgactacctggaggcctgtgtggtgtctgtgctgcagatccacgtgacccagcccccaggggacatcctggtgttcctgaccggccaggaggagattgaggccgcctgtgagatgctgcaggaccgctgccggcggctgggcagcaagatccgggagctgctggtgctgcccatctatgccaacctgcccagcgacatgcaggcccgcatcttccagcccaccccacctggggccaggaagtag

SEQ ID NO: 305483 - DNA, 1683 bp, Artificial Sequence
  derived and/or modified sequence
atggagagccagcccgcccaggagtgcctgatgcagatgttcctgcctatagagcccgcctgtttcgtggagtggctgggaacctcaccttcccagctgggcgtcgttatggtggatgaagcgcatgaaagaaccctacacacagatatcctctttggtctaataaaggatgtcgcgaggttcaggccagagctgaaagtactggtagcttccgcaacgatggacaccgcccgtttttcaacctttttcgatgacgccccagtcttcaggatccctggacggagattccccgtcgatattttttatactaaagcccccgaggccgattatctcgaagcgtgcgtcgttagcgtgctgcaaattcacgttacccagccacctggggacatcctcgtgttcctgacgggccaggaagaaatagaggcagcttgtgaaatgttgcaagatagatgtaggaggcttggttctaaaatacgtgagttactggttttacccatctacgcaaatctgccatccgacatgcaagctcggatctttcagccaacacctcccggcgccaggaaggtcgtcgtagccactaatatagccgagactagcctgactatcgagggaataatctatgtcttagacccaggattttgtaagcagaaaagctacaatccccgaaccggaatggagtccctcactgtgactccttgtagcaaggcctcagctaaccaacgggcaggacgtgcgggccgtgtagcggctggtaagtgctttcggttgtatactgcttgggcctatcagcacgagcttgaagaaaccactgtgccagaaatccaacgaacaagcttaggaaacgttgtgctcctgttgaaaagtctgggaatccatgatctgatgcacttcgacttcctggacccacccccttacgagacccttctgcttgccctcgagcagctctatgccttgggagcccttaatcaccttggggaactgaccacgtccggccgcaaaatggctgagctccccgtcgatcccatgttaagcaagatgatcttagcctctgagaagtattcttgttccgaggagatcctgactgtggccgctatgcttagcgtgaataactccattttttatcgtcctaaggacaaagtagttcacgcagacaatgcccgggtgaacttttttctgcccggtggagaccaccttgtcctgctgaatgtgtacactcagtgggccgaaagtggctatagttcacagtggtgttatgagaactttgtgcagtttcgttctatgaggagggcgcgcgatgtgagggagcagttggaggggctgctggagagggtggaggtgggtctctcgtcatgtcagggagactacattagagttagaaaagctatcacagcaggttacttttatcacacagcgagattgacgcgctccgggtataggaccgttaaacagcagcagactgtctttatccaccctaacagctccctgttcgagcagcagcctcggtggttattgtaccacgagctggtgttaacaacaaaggagtttatgcggcaggtccttgaaatcgaatcctcatggctcctggaggtggccccccactattacaaggctaaggagttggaggatccccacgccaaaaagatgcccaaaaaaatcggtaagacgagggaggaactagggtag

SEQ ID NO: 305484 - DNA, 1683 bp, Artificial Sequence
  derived and/or modified sequence
atggagagccagcccgcccaggagtgcctgatgcagatgttcctgccaatagagcctgcgtgcttcgtcgaatggttagggacctcgccctctcagctgggggtagtcatggtggacgaagcacacgaaagaaccctgcacaccgatatcctgtttggccttattaaagatgtggcccggttcagacccgagctgaaagtgctcgttgccagcgctaccatggatactgcacgtttcagcaccttttttgatgatgcgccggtctttagaatcccgggtcggcgctttcccgtcgacattttttatacaaaggcccctgaggccgattatctcgaggcttgcgtggtgtctgtcttacagatccacgttacacagcccccgggcgatattctggttttccttacaggccaggaagagatcgaggcagcctgtgagatgctccaagaccgatgtaggagactggggtcaaagatcagggagctcctagtgctccctatctacgccaacttacctagcgatatgcaggcacgcatctttcagccaactcctcccggcgctaggaaagtggtagtggccaccaatatagcagaaaccagtctgaccattgagggcattatctacgtgctggacccgggtttttgtaagcagaagtcttataatccaaggaccggtatggaatctctgaccgtcaccccgtgttcaaaggcaagcgccaatcaaagagccggcagagctggaagagtcgccgccggaaagtgcttcagattgtataccgcgtgggcctaccagcatgagctggaagagactactgtccccgagattcagcggacttctctcggcaatgtggtgctgctgttgaaatccttgggcatccatgatctaatgcattttgactttctcgatccccccccttacgagactctgctcctggcccttgaacaactatacgcgttgggggcactgaaccatctcggagaactcaccacatcaggccggaagatggcagagctgcctgtggaccccatgttgagtaaaatgattttggccagcgaaaagtattcatgttcggaggagatcctaacagtggccgccatgctgagcgttaataatagtattttctacagacctaaagacaaagtagtacacgcggataacgcgcgggttaatttttttttgcctggaggcgaccacctggtgctgctcaatgtttacactcaatgggcagaaagcggctattcttctcagtggtgctacgagaactttgtgcagttccgcagtatgcggagggctcgagacgttcgtgaacagctggagggattgctagaaagagtcgaagtggggctaagttcctgtcaaggggactatattcgagtccgtaaggccatcacggccgggtatttctaccacaccgccaggctcactcggtctgggtaccggacagtcaagcagcaacaaacagtgtttatccatcctaatagcagtctgtttgaacagcaaccacgctggctcctgtatcatgagctggtcctgacaactaaagaatttatgagacaagtgcttgagatcgagtctagctggcttctggaagtggcccctcattattacaaggccaaggagttagaggatcctcacgccaaaaagatgccgaaaaagatcggcaagaccagagaggagctcgggtag

SEQ ID NO: 305485 - DNA, 1683 bp, Artificial Sequence
  derived and/or modified sequence
atggagagccagcccgcccaggagtgcctgatgcagatgttcctgcctattgagcccgcgtgttttgtcgaatggctaggtaccagcccctcacagctgggcgtggtgatggtggacgaagcccacgaacggaccttacataccgacatactcttcggcctcataaaagacgtcgctcggttcagacccgagctgaaagtcttggtggccagcgcaactatggacactgcccgcttctctacatttttcgacgatgctcctgtttttcggatcccagggagaaggtttccagtcgatattttttatactaaggctcccgaggctgattacttggaagcctgcgtggttagtgtgctgcagatacacgtgacgcagcctcctggcgacattctggtgttcctgaccggacaagaagaaatcgaagccgcttgtgagatgcttcaggacaggtgcaggagactcggatccaaaattagggaacttttggtgctgccaatctacgctaatcttccttctgacatgcaggcccgaatttttcaacctacccccccaggagccagaaaggtggtcgtggcgactaatatcgcagaaacaagcttgacaattgaaggcataatttatgtgctcgatccgggtttctgcaagcaaaaaagctataacccacgcacaggaatggagtcgttaactgtaacgccttgctcaaaagcatcggcaaaccaacgcgctggacgggcgggccgagttgccgccggaaagtgtttccgcctgtacactgcatgggcttatcagcacgaactagaggagactacagtgccagaaatccagcgaacaagcctagggaacgtggtactgctcctcaaatcactcgggattcatgaccttatgcactttgactttctggatcctcctccgtacgagacgctcctgcttgcgttagagcaactctacgcacttggtgccctgaatcacctgggcgagctgactacgtcaggacgtaagatggctgagctgcctgttgacccaatgctgtccaagatgatcctggcgagcgaaaagtattcttgctctgaggaaatcctgacagtcgctgctatgctctctgtcaataattctatcttttaccgtccgaaggacaaagtcgtgcacgcggataatgccagagtcaatttttttttgccagggggagaccacctggtgctgctgaacgtgtatactcagtgggcggaatcagggtactcctcccagtggtgctatgaaaactttgttcagtttcggagcatgcgcagagctagagacgttcgggagcaattggaagggttactagaacgtgtggaggtaggcctgtcaagctgtcagggcgactatattcgcgtcagaaaggcaataaccgcaggttacttctaccacactgcccggcttacacggagcggatacagaactgtaaagcagcagcaaaccgtcttcattcaccccaattcctccttattcgagcagcagcccaggtggctgctttaccatgaactagtgctaaccactaaggaattcatgcggcaggtcctggagattgaatcctcttggttgttggaagtggcgccccactactacaaggctaaagagcttgaggatccccatgctaagaaaatgcctaagaagatagggaagacaagggaagagctgggctag

SEQ ID NO: 305486 - DNA, 1683 bp, Artificial Sequence
  derived and/or modified sequence
atggagagccagcccgcccaggagtgcctgatgcagatgttcctgccaatagagcccgcttgcttcgtggagtggctgggaacaagcccttctcagttgggcgtcgtgatggtcgatgaggcgcacgaacgtacattgcacactgacatcctatttggtctgatcaaggacgtggccaggttccgaccagagctgaaggtgttggtagcgtctgcaacaatggacacagcccggttctcaaccttttttgacgacgctccagtctttagaatccccggtcgcaggttcccagtggatatcttctacactaaagctcccgaagccgattacctggaagcctgtgtcgtgtcagtgctacaaatccacgtcacacagccaccgggcgatatcttagtctttctgaccggacaggaagaaatcgaggccgcgtgcgaaatgttacaagatcggtgccgtaggctcggttcaaaaatcagagagctcctcgtgctgcccatctatgcgaatctgccttccgacatgcaggccaggattttccaacctaccccacccggcgccagaaaggtggtggttgccaccaatatcgcagaaactagcctaaccatcgaaggtattatctacgtgttggatccaggattttgcaagcaaaagtcttacaatccacgcacaggcatggagagtctgactgttaccccttgcagtaaagcctccgccaatcagcgcgccgggcgcgccggcagggtcgcagcaggtaaatgcttcagattatacactgcatgggcatatcagcatgagctggaagagactaccgtgcccgagattcagagaacctccctgggtaacgtggtgttacttctgaagtcactggggatccacgacctgatgcactttgacttcctggacccacccccttatgagacgctgctactggcactcgagcagctttatgcattgggagccctgaaccacctgggagaactgaccaccagtgggcgcaagatggccgagctccctgttgatccgatgctgagtaagatgattctggcaagtgagaagtacagctgctcagaggagatacttacggtcgcggcaatgttgtcagtcaacaatagcatcttttacagacccaaagacaaggttgtccatgcggacaacgcccgtgtcaattttttcctgccaggtggcgatcacttagtcctgctgaatgtctacacacagtgggcggagtccggttacagctctcagtggtgttatgaaaattttgtccagttccgcagtatgaggcgtgccagagatgtgagagagcaattggagggcctgcttgaaagggtcgaggtcggactttctagctgtcagggcgactatatccgggtgaggaaggctatcaccgctgggtacttctatcacactgcgaggcttacccgaagcgggtacaggacagtcaagcagcagcagacagtgttcatccaccccaatagcagcctatttgagcagcagccacgctggttactgtatcacgagctggtgcttactactaaggaattcatgcgtcaggtgttagagatcgagtccagttggctcttagaggtcgccccgcattattacaaagccaaggagttggaggaccctcatgccaagaaaatgccaaagaagatcgggaagacccgtgaagagctcggatag

SEQ ID NO: 305487 - DNA, 1683 bp, Artificial Sequence
  derived and/or modified sequence
atggagagccagcccgcccaggagtgcctgatgcagatgttcctgcccatcgagcctgcttgctttgtggaatggttgggtacttccccatcccagttgggagtggtgatggtcgatgaggcccacgagcgtaccctccacactgatatactgttcgggctcatcaaagatgttgccagatttcgccccgagctcaaggtgttggttgcctccgctactatggatactgcccgattctctaccttcttcgacgacgcgcccgtttttcggatacctgggcgccggttccctgtggacatattctacacgaaggcaccagaggctgactatctggaggcctgcgtagtctctgttctgcagatccacgttactcagccaccaggcgacatccttgtcttcctgactggacaggaggaaatagaggctgcctgtgagatgctgcaggatcggtgcagacgactgggaagtaagatcagggagcttctggtcctgccaatctacgcaaatctgccttcagacatgcaggccagaatcttccagccgaccccgcccggcgccagaaaggtggtcgtcgccactaacatcgctgagactagcctgaccatcgaggggataatctatgtcctagaccctggtttttgcaagcagaaatcctataatccccgcaccggcatggaaagtctgacagtgacgccttgtagcaaagcctcagcgaatcagagggcaggccgggccggacgcgtggccgctggaaaatgtttcagactgtataccgcctgggcctaccagcatgaacttgaggagacaaccgtgccggaaattcagaggacaagcctgggcaacgtggttctgttactcaagtctctaggcatccatgatttaatgcacttcgattttctcgacccacccccttacgaaacgctattgctggcactggaacagctgtatgccctgggggcacttaaccatctcggggagctcacaacatctgggcggaaaatggccgaattgccagtcgatcctatgctgagcaaaatgatcctggcctcagaaaagtactcatgctccgaggagattctgaccgtagctgctatgctgtctgtcaacaatagcattttttacagacccaaagataaggtggttcacgctgacaacgctcgagtgaacttcttccttcccgggggtgaccacttggtattattaaatgtgtatactcagtgggcggaaagcggctattcgtctcaatggtgctatgagaacttcgttcagttcaggtcaatgagacgtgcccgtgatgtacgggagcagctggagggactcttagaaagagtggaggtgggtctgagtagctgccagggggactatattcgggtcagaaaagccatcacagccggttatttctaccacaccgcacgtttgaccagatctggttaccgcacagtgaaacagcagcagactgtcttcatccaccctaatagcagcctgttcgaacaacagcccaggtggttgctgtatcatgagctggttctgacaacaaaagagttcatgcggcaagtgctggagatcgagagttcatggctcctggaggtggcaccccactactataaggccaaagagctcgaggaccctcatgccaagaagatgcccaagaagatagggaaaacacgtgaggagctgggatag

SEQ ID NO: 305488 - DNA, 1683 bp, Artificial Sequence
  derived and/or modified sequence
atggagagccagcccgcccaggagtgcctgatgcagatgttcctgccaattgaacccgcctgttttgtcgaatggctcggcacttctccatcgcaacttggagtggtgatggtagatgaggcacatgaacgcacactgcacacggatatactctttggccttatcaaagatgtggcaagattccgccctgaactgaaagttctggtggctagcgccaccatggacactgctagattttcaacttttttcgacgacgcgccagttttccggattcccggtcggaggtttcccgtggatatcttttacactaaagctcccgaggccgactacctcgaggcatgtgtggtctcggtccttcagatacatgtaacccagccacccggagacattttagttttcctcactggccaggaggagatcgaggcggcttgtgaaatgttgcaagaccggtgtaggcggctcggcagtaaaatcagggagttactcgtgttacctatttacgctaatttacctagcgacatgcaagctcgtatttttcagcccactccccccggggcacggaaggttgtggtggctactaacatcgctgaaacctccctaacaattgaaggaatcatttatgtcctggacccaggattctgcaagcaaaagagttacaatccacggaccgggatggagtccctgacagtgacgccatgctctaaagcctcagccaaccaacgggccgggagagccgggcgggtggccgccgggaagtgttttcggctctatacagcatgggcttaccaacatgaactggaggagaccacggtgccagaaattcaaagaacttcccttggcaacgtcgtactgttgttaaagtcactgggaatccacgatctgatgcacttcgattttctggaccctccaccctatgagaccctgttgcttgcactagaacagttgtatgctctgggcgccctgaaccatcttggtgaattaactaccagcggtaggaagatggcggagctgcccgttgatccaatgctatcaaaaatgattctcgccagtgagaagtattcatgttcagaagagatactcactgtagctgcgatgctttctgtcaacaattctatattttatcgccccaaggataaggtggtgcacgcagataacgcccgtgtgaacttcttccttcctggcggtgaccatcttgtcctcctgaatgtctatacccaatgggcagagtcgggttactcatcacagtggtgttacgagaattttgtacaatttagatctatgcggagggcccgagacgtgcgcgagcagctggagggtctcctcgagcgcgtagaggtgggtctgagctcatgtcagggtgattacattcgggtccgcaaagcgatcaccgcagggtacttctatcatactgcaaggctgactagaagcggctatcgaaccgttaagcagcaacagaccgtgtttatccacccaaatagttccctgtttgaacagcagccccgctggcttctctatcacgaactcgttctgacaacaaaggaatttatgagacaagttcttgagatcgaaagctcatggcttctagaagtggcaccacactattacaaggcgaaggaactggaggacccccatgccaagaaaatgcctaagaaaattgggaagacgcgagaagagctggggtag

SEQ ID NO: 305489 - DNA, 567 bp, Artificial Sequence
  derived and/or modified sequence
atggagagccagcccgcccaggagtgcctgatgcagatgttcctgccgatagagccagcatgcttcgtcgagtggctgggcaccagtccctcgcagctcggcgtggtcatggtcgatgaggcccacgagagaactctgcatacagacattttgttcggcctcataaaggacgtcgctcgctttcgtcccgagctgaaggtgctggtcgccagcgcaaccatggataccgccagattctccactttttttgatgatgcacctgtctttcgaattcccgggcgcaggtttcccgtggatatcttttataccaaggcccccgaggccgattatctggaggcatgcgtcgtgtcagtgctgcagatccacgttacgcagccaccaggggacattctcgtcttccttacaggtcaggaggagatcgaggccgcgtgtgagatgctccaggaccgctgtcgtagactggggagcaaaatccgggaactgctcgtgctgcccatctacgcaaacctcccaagcgatatgcaggccaggatcttccagccaactcctccaggggccaggaagtag

SEQ ID NO: 305490 - DNA, 1683 bp, Artificial Sequence
  derived and/or modified sequence
atggagtctcagccggctcaggaatgcctaatgcagatgttcttgcctatcgagcctgcctgctttgtagaatggttgggcacaagccctagccagttgggggtcgtgatggtggacgaagctcacgagagaacgcttcacaccgacatactgtttggactgataaaagacgtcgccagatttcgtcccgaattaaaagtcctagtggccagcgcaacaatggatacggccagattcagcacattcttcgacgatgcgcctgtatttcgcatccctggtcgtcgattcccagttgacattttctacaccaaggcccctgaagctgattacttagaggcttgcgtggtgtccgtgctccagattcacgtgacacagccacctggtgatatcttagtttttttgacaggacaggaggagatagaggcggcatgcgagatgctgcaggataggtgtcggagattgggttctaaaatacgagagctcctcgtactccccatctatgcaaatctgccttccgacatgcaggctaggatcttccaacccactcctccaggggcacggaaagtagttgtcgccacaaatatcgctgagacctccctcaccattgagggaattatttatgttcttgacccaggcttctgcaagcaaaaatcgtacaatcctcgtaccggaatggaatccctcacagtgacaccgtgtagcaaggcaagtgccaaccagcgcgctggtcgagctgggagggtggcagctggaaaatgtttccgcctgtatacagcctgggcctaccaacacgaactggaagaaaccacggtgcccgaaatacaacgcacgtccctggggaatgtggtgcttctgctgaaatcccttgggatacatgatttgatgcattttgacttcctggacccccctccttatgagactctgctgttagctctggagcagttatacgcactgggcgctcttaatcatttgggggagctgaccacctcaggcagaaagatggcagaactgcccgttgatccgatgttgagtaaaatgatcctcgcttctgagaaatactcgtgctccgaggagatcctaacagtggcagcaatgttgtccgttaataactctattttttataggcctaaggacaaggtcgttcatgccgacaatgcaagagtgaacttctttttaccaggaggagatcacttggtactgcttaatgtctatacgcagtgggcagaaagcggatattcttcacagtggtgctacgagaatttcgtgcagttcaggtctatgagaagagcccgagatgtacgggagcaattggagggcctgttggaaagggtcgaggttggcctttcgtcatgccagggcgattatatccgcgtccgcaaggccatcacggccggttacttttaccacaccgcacggctgaccaggagtggataccgaaccgtcaagcagcagcagacagtcttcatacatcctaatagcagcctctttgaacagcaacctcggtggttattgtatcatgagctggtgcttacaacaaaagagtttatgcggcaggtgcttgagatcgagtccagctggcttttggaagttgcccctcactactacaaggcgaaggaactcgaggacccgcatgccaagaagatgcccaaaaagatcggcaaaacccgcgaggaactaggatag

SEQ ID NO: 305491 - DNA, 1683 bp, Artificial Sequence
  derived and/or modified sequence
atggagtcgcaaccggctcaggagtgcctgatgcagatgtttctacctatagagcctgcttgctttgtcgaatggctcgggacttcgccctctcagctcggagtcgtgatggtagacgaagctcacgagcgcaccttgcatactgacatcctgttcggcctgatcaaagatgtagcccgattccgaccagagctcaaggttctagtggcctcagccaccatggataccgctagattttcgacattctttgatgacgcccctgtatttcgtattccagggcgacggttccccgttgacatcttctacacgaaggcccctgaggctgactaccttgaggcttgtgttgtgtccgttttgcagatccatgtaacccagcccccaggtgacatcttagtattcctgacagggcaagaagagattgaggctgcttgtgaaatgctccaggaccgctgtagaaggctgggcagtaagatcagggagttgctagtgctcccgatctatgccaatctacctagtgatatgcaagcacggatctttcagcccaccccccctggcgctagaaaggtggtagtggcaacgaacatcgcggaaacatcacttaccatcgagggaatcatttatgtgttggatccagggttttgcaaacagaagtcctacaaccccagaaccgggatggaatccctcacagtgactccttgttctaaggcctccgctaaccagcgggctgggcgagctggacgagtagctgctgggaagtgctttcgtctctataccgcatgggcctaccaacatgagctcgaggagacgactgttcccgaaattcagaggacttccttggggaacgtcgtgctgctgctgaagtccttgggcattcacgatttgatgcatttcgacttcctggatccgccaccctatgaaactcttcttttggcgctcgagcaactttatgccctcggggcactgaaccacctgggcgagctgaccacgtcagggagaaaaatggctgagttgcccgtggaccccatgctgtctaagatgatcctcgcatccgaaaagtatagttgcagcgaggagatcttgacagtggccgctatgctatcggtgaataacagcatattttaccgacctaaagacaaggtggtgcacgcagataatgctcgggtgaattttttcctgccaggaggcgatcatcttgtgctgctcaatgtgtatacgcagtgggccgagagcggatactcaagtcagtggtgttatgaaaacttcgtccaatttcgctctatgcgcagagcacgcgatgtgagagaacagctggagggcttgctcgagcgggtggaagtggggctgtcctcctgccagggtgactatatcagagtaagaaaagctataacggccggttatttctaccataccgcccgactcactcgcagcggctatcggaccgtaaaacagcagcagactgtgttcatccaccccaacagttctctgttcgaacaacaaccgcgatggttattataccatgagctcgtgttaacaacaaaggaatttatgcggcaggtgctcgagattgaaagtagttggctgctggaagtggcccctcattattacaaagctaaagagttggaagacccccatgccaagaaaatgccaaaaaagatagggaagacccgggaagaactagggtag

SEQ ID NO: 305492 - DNA, 1683 bp, Artificial Sequence
  derived and/or modified sequence
atggaatcccagcccgctcaggaatgccttatgcagatgtttctgcccatcgagcctgcttgttttgtagagtggctgggcacaagcccctcgcagctgggcgttgttatggtcgacgaagctcacgaaagaacactgcacacagatatcttgtttggattgatcaaggacgtggccaggttccgcccagagctcaaggtattggtggcatctgctactatggacacagccaggttcagcacttttttcgacgacgcacctgtcttcagaatccccggacgcaggttcccagttgacattttttacacaaaagcacctgaggccgattatcttgaggcctgtgttgtgtccgtactgcagatccacgttactcagccacccggagacatcctagtttttctgactggccaagaggaaattgaggccgcttgtgagatgctgcaagataggtgtaggcggcttggttctaaaatccgcgaacttcttgttctacctatctacgcaaacctacccagcgatatgcaagcaaggatcttccagcctacccctccaggtgcccgaaaagttgtcgtggccacaaatattgctgaaacttccctgaccattgaaggtataatatatgtgttggatccgggtttttgcaagcagaaatcttacaaccctagaaccgggatggagtcacttaccgttactccctgctctaaagccagtgccaaccagcgagctggacgggcaggcagagtggcagccggaaagtgtttccggctgtatactgcatgggcctaccagcacgagctagaggaaactactgtacccgagatccagcggacttccctagggaacgtggtactgctgctgaagtccctaggaatacatgacctgatgcacttcgactttctggacccacctccctatgagacattactgctagcactagaacagctatacgctctcggtgccctgaaccatctgggcgagctgacaaccagcgggcgaaagatggccgagctgccagtcgaccctatgctgagtaagatgattttggccagtgagaagtactcttgttcagaagaaattcttaccgtggcagccatgttaagtgttaacaactcgatcttttacagaccgaaagacaaagtggtacacgccgataacgcaagggtgaacttttttctccccggaggagatcatctcgtgctgctgaacgtctatacacaatgggcagagtctggatactcctcacaatggtgctatgagaacttcgtgcagtttcgcagcatgagacgggcacgcgatgtccgggaacagttggagggactcctagagcgtgttgaggtgggtttgtcctcatgtcagggtgattacatccgtgtcagaaaagccatcactgctggttacttttatcacacagcccgacttacacggtcgggctaccgaaccgtcaaacagcaacagaccgttttcatccaccccaactcctccctgttcgaacagcagccccgttggctgctctaccacgagcttgttctaacaactaaggaattcatgcggcaggttcttgagatagaatcttcatggctgctggaggtcgctccccactactacaaggcgaaagagctggaggacccgcacgccaagaagatgcctaaaaagatcggtaaaactagagaggagctgggttag

SEQ ID NO: 305493 - DNA, 1683 bp, Artificial Sequence
  derived and/or modified sequence
atggaaagccaacctgcccaagaatgcttgatgcagatgttcctgcctatcgaacccgcatgcttcgtagagtggctgggcacttccccctcacaactgggagtggttatggtagacgaggcacatgagcgcaccctgcatacagacatactgttcggactaataaaggatgtggccaggtttcgacctgaactgaaggtgcttgtggccagcgcaacgatggacaccgcccgtttctctacttttttcgatgacgctccagtcttccggattccgggacgcaggtttcctgtggatattttttataccaaggcacccgaagccgattatctcgaagcttgcgtggtcagcgtactgcagatccacgtcactcagcctccaggggatattctggtcttccttaccggacaggaagaaatagaggcagcctgtgaaatgctgcaagataggtgccgcaggttgggttcaaagatccgggagttgctagttcttcccatttacgctaatttgccgtcagatatgcaagcccgtatttttcaacccaccccaccaggggcacgaaaagttgtcgtggctaccaacatcgccgagacttcacttacgattgaagggattatttatgtcctggatcctggcttctgcaagcaaaagtcttataatccgagaaccgggatggaatcactgacagttactccatgttccaaggcctctgctaaccagagagctggaagagccggtcgggtggctgctgggaagtgctttcggctctatacggcctgggcatatcagcatgaacttgaagaaacgaccgtgcccgaaatccagcgaacatcgctcggcaatgtcgtgctgctgctgaaatcactggggattcacgacctcatgcacttcgatttcctggacccccctccatatgaaacactactgctggctttggaacagttgtatgctctgggcgctctcaatcatctgggggagctcacaaccagcggccgtaaaatggcagagctccccgtggatcccatgctctccaaaatgattctcgcttcagaaaagtatagttgttctgaagaaatcctgaccgtggccgcaatgctgagtgttaacaactccatattttacagacctaaggacaaggtggtgcacgctgataatgccagagtaaacttctttttacctggcggagaccatttggtgctactgaacgtatacacccagtgggcagagagtgggtactcctcacagtggtgttacgaaaatttcgtgcagttcaggagcatgcggagagccagggatgtaagggagcagcttgaaggattgctcgagcgtgtggaggttggtctatctagttgccagggagattatattagagtgcgcaaggccatcacagcaggatatttctatcacaccgccagactgacgagaagtggctatcgtacggtgaagcagcagcaaaccgtcttcatacacccaaactctagcctgttcgagcagcagccccgatggctgctgtaccacgaactagtgctgaccacgaaggagtttatgcgccaggtgctggaaattgagtccagctggctgctcgaagtggcccctcattattacaaggccaaagaattggaagatccccacgccaagaaaatgcctaagaagattggtaagacgcgcgaggaactaggatag

SEQ ID NO: 305494 - DNA, 1683 bp, Artificial Sequence
  derived and/or modified sequence
atggagtctcagccagcgcaggagtgtctgatgcagatgtttcttccaatcgagcccgcatgcttcgtagagtggctaggtacctccccttcccaactaggggtggtgatggttgacgaggcccatgagcgaaccctccacactgatatcctgttcggtctgatcaaggacgtagcgagattcagacctgagctcaaagtactagtagcctcagctactatggataccgctagattttcgactttctttgacgatgcacctgtcttcaggatcccgggtcgtcgctttcccgtggacattttttatactaaagctcctgaagccgattatttggaggcgtgtgtagtgtcggtactccaaattcacgtgacacagcccccaggagatatcctggtgtttttgactggccaagaggagatcgaagcagcatgtgaaatgctgcaggacagatgtaggagactcgggtctaagataagagagcttctggtgctgccaatctatgccaacctgccatcggacatgcaagcaaggatttttcagcccaccccccctggcgcaaggaaggtggtagtcgcgactaatatagccgagacctcactgacaatagaaggaatcatatacgtccttgatccagggttttgtaagcagaaatcttacaatcctcggactggaatggaaagcctcacagtcaccccatgctctaaggcctccgccaaccagagagccggacgggctggccgagtggccgctggcaagtgttttcgactgtatactgcttgggcttatcaacatgagctggaggaaaccacagttccagagattcagcgaacttccctgggcaatgtggtattgctgctgaaaagcctcggcatccacgatctgatgcacttcgacttcctcgatcctcccccatacgaaacactgttactcgcactggaacagttatacgctctgggtgctttgaatcatctgggcgagctgaccacctccggtcgaaagatggccgagctgcctgtggaccctatgctatccaaaatgatcctggcatcggagaagtattcctgctctgaggagatcctgacagttgccgcaatgttaagcgtcaataatagcattttttaccgcccaaaggacaaagtcgtgcacgcagacaacgctagagtaaacttcttcctaccaggaggcgatcatcttgtgctcctgaacgtgtacacgcaatgggcagagtcaggctactcgtcacagtggtgttatgagaattttgtgcagttccggtcaatgagaagagccagggacgtgagagagcagcttgagggcctccttgagagggtcgaggttggactctctagttgccagggcgactatattcgggttcgcaaggctatcaccgccggatacttctaccacactgccagactgactagatctggctatcgcactgtgaagcaacagcaaactgttttcatccaccccaattcatcactgttcgagcagcagccaaggtggttgctataccacgaactggtgcttaccacaaaggaatttatgcggcaggttcttgagatagagtcgtcatggctcctggaagtcgcgccacactactataaggccaaagagcttgaagatccccacgccaagaaaatgcctaagaagataggcaagactcgggaggagttgggttag

SEQ ID NO: 305495 - DNA, 1683 bp, Artificial Sequence
  derived and/or modified sequence
atggaatcacagcccgcacaagaatgtcttatgcagatgttcctacctattgagccggcatgtttcgttgagtggctgggcaccagtccttctcagcttggtgtcgtgatggtagacgaggctcacgaaaggacactccataccgacattctctttggactgatcaaggacgtggctagatttcgacctgagctgaaggtgttggtggcatccgccactatggatactgctagattttccacgtttttcgacgacgcacccgtctttcgaatccccggacgtcgctttcctgtggatatcttttacaccaaagcccctgaggccgattatctggaggcatgcgtcgtctctgttctgcagatccacgtcactcagccccctggcgacatcctcgtttttcttactggacaggaagaaattgaagccgcttgcgagatgctgcaggacaggtgccgcaggctagggagtaagattcgagaattgctggtcctgcccatctatgctaacctgcctagtgatatgcaggcgcgaattttccaacccacgcccccaggagctaggaaggtggtagtcgccacaaatatcgctgagactagcctgacaatcgagggaatcatttacgtgcttgacccagggttctgcaagcagaaatcctacaacccacggactgggatggaatcgcttacagtcacaccttgctctaaagcctccgccaatcaaagagctggacgagctggtcgagtggctgcagggaaatgcttccggttgtacactgcgtgggcctatcagcacgaactcgaggaaaccaccgtgccagagatccagcgaacttcattgggaaatgttgtgttgctgctgaagtccctcggcatccacgacttgatgcacttcgactttctggatccgcctccttatgagacactgctcctggctctcgagcaactctatgccctgggagccctgaaccatctaggggagctgacaacatctggccgtaaaatggctgaacttccagtcgacccgatgttatcaaaaatgatcttggcctccgagaagtattcctgctcagaggagatccttaccgtggccgctatgctgtccgtgaacaattctatcttttatcggcctaaggacaaagtcgttcacgcagataatgcaagggttaacttcttccttccagggggtgatcatctggtcctgctcaacgtgtatacccagtgggctgaaagtggttattcctcccagtggtgttacgaaaatttcgtacagtttaggagtatgaggcgagcacgcgatgtgcgggagcagctcgagggactgctcgagcgggttgaggtgggcctgagcagctgccagggggattacatacgggtgcgtaaagccataactgctgggtacttctatcacactgcacgattaaccagatcgggatacaggacagttaagcagcagcaaacggtctttatccacccaaattctagcctgttcgagcagcagccacggtggttactgtaccatgaactggtgctcaccaccaaagagttcatgcgccaggttctggagatcgagagctcttggctgttggaagtagctcctcactattataaagctaaggagctggaagacccccatgctaagaaaatgccaaaaaagatcggcaaaacccgagaagagcttggctag

SEQ ID NO: 305496 - DNA, 567 bp, Artificial Sequence
  derived and/or modified sequence
atggagagtcagcctgcccaggaatgtcttatgcagatgttccttcctatcgagcctgcgtgcttcgtggagtggctagggactagccccagccaactgggggtggtgatggtagacgaagcgcacgagcgcacactgcatactgacattctgtttggtctgattaaagatgttgcgcgattccgaccggagctgaaggttctggtggcctcagcaacaatggacactgccaggttctctaccttctttgacgacgcacctgtctttaggatcccgggtcggcgatttcctgtggacatattttacactaaggcccctgaagcagactatctcgaggcatgtgtcgtgagcgtgctgcagattcacgtgacacaaccgccaggcgacatcttggtattcctgaccggacaagaagaaatcgaggccgcttgcgaaatgctgcaggacaggtgccggagattaggatctaagattcgcgagctccttgtactcccaatctacgcgaatcttccctccgatatgcaagccagaatctttcagccaacaccacccggagccagaaagtag

SEQ ID NO: 305497 - DNA, 1683 bp, Artificial Sequence
  derived and/or modified sequence
atggagagccagcccgcccaggagtgcctgatgcagatgttcctgcccatcgagcccgcctgcttcgtggagtggctgggcaccagccccagccagctgggcgtggtgatggtggacgaggcccacgagagaaccctgcacaccgacatcctgttcggcctgatcaaggacgtggccagattcagacccgagctgaaggtgctggtggccagcgccaccatggacaccgccagattcagcaccttcttcgacgacgcccccgtgttcagaatccccggcagaagattccccgtggacatcttctacaccaaggcccccgaggccgactacctggaggcctgcgtggtgagcgtgctgcagatccacgtgacccagccccccggcgacatcctggtgttcctgaccggccaggaggagatcgaggccgcctgcgagatgctgcaggacagatgcagaagactgggcagcaagatcagagagctgctggtgctgcccatctacgccaacctgcccagcgacatgcaggccagaatcttccagcccaccccccccggcgccagaaaggtggtggtggccaccaacatcgccgagaccagcctgaccatcgagggcatcatctacgtgctggaccccggcttctgcaagcagaagagctacaaccccagaaccggcatggagagcctgaccgtgaccccctgcagcaaggccagcgccaaccagagagccggcagagccggcagagtggccgccggcaagtgcttcagactgtacaccgcctgggcctaccagcacgagctggaggagaccaccgtgcccgagatccagagaaccagcctgggcaacgtggtgctgctgctgaagagcctgggcatccacgacctgatgcacttcgacttcctggacccccccccctacgagaccctgctgctggccctggagcagctgtacgccctgggcgccctgaaccacctgggcgagctgaccaccagcggcagaaagatggccgagctgcccgtggaccccatgctgagcaagatgatcctggccagcgagaagtacagctgcagcgaggagatcctgaccgtggccgccatgctgagcgtgaacaacagcatcttctacagacccaaggacaaggtggtgcacgccgacaacgccagagtgaacttcttcctgcccggcggcgaccacctggtgctgctgaacgtgtacacccagtgggccgagagcggctacagcagccagtggtgctacgagaacttcgtgcagttcagaagcatgagaagagccagagacgtgagagagcagctggagggcctgctggagagagtggaggtgggcctgagcagctgccagggcgactacatcagagtgagaaaggccatcaccgccggctacttctaccacaccgccagactgaccagaagcggctacagaaccgtgaagcagcagcagaccgtgttcatccaccccaacagcagcctgttcgagcagcagcccagatggctgctgtaccacgagctggtgctgaccaccaaggagttcatgagacaggtgctggagatcgagagcagctggctgctggaggtggccccccactactacaaggccaaggagctggaggacccccacgccaagaagatgcccaagaagatcggcaagaccagagaggagctgggctag

SEQ ID NO: 305498 - DNA, 567 bp, Artificial Sequence
  derived and/or modified sequence
atggagagccagcccgcccaggagtgcctgatgcagatgttcctgcccatcgagcccgcctgcttcgtggagtggctgggcaccagccccagccagctgggcgtggtgatggtggacgaggcccacgagagaaccctgcacaccgacatcctgttcggcctgatcaaggacgtggccagattcagacccgagctgaaggtgctggtggccagcgccaccatggacaccgccagattcagcaccttcttcgacgacgcccccgtgttcagaatccccggcagaagattccccgtggacatcttctacaccaaggcccccgaggccgactacctggaggcctgcgtggtgagcgtgctgcagatccacgtgacccagccccccggcgacatcctggtgttcctgaccggccaggaggagatcgaggccgcctgcgagatgctgcaggacagatgcagaagactgggcagcaagatcagagagctgctggtgctgcccatctacgccaacctgcccagcgacatgcaggccagaatcttccagcccaccccccccggcgccagaaagtag

SEQ ID NO: 305499 - DNA, 1933 bp, Artificial Sequence
  derived and/or modified sequence
ctgaacaatatgtgcctttttgactcttcagaggctgtgaatttctggtcttggaagatcacagtggagcaattggacagataggattttatccttcatatcccttgcaaaagatctctaagaacccatggagagccagccagcgcaagagtgtctgatgcagatgtttttgcccatcgagccagcctgctttgtggaatggctggggacttcaccatcacagttaggcgtggtgatggtggatgaggcacacgaaaggaccctacacacagacattctctttggattgatcaaggatgttgctcgcttccgacctgagctcaaggtcctggtggcttcagccacaatggacactgcccgtttttccaccttctttgatgacgcccctgtgtttcgaatccccggacgcaggtttcctgtggacatcttctacaccaaggctccagaggctgactacttggaagcttgtgtagtatctgtgttgcagatccatgtgacccagccccctggggatatcctggtgttcctgacaggacaggaggagattgaggctgcctgtgagatgctccaggatcgctgccgccgcctgggctccaaaatccgggagctcctggtgctgcccatttatgccaatctgccctctgacatgcaggcccgtatcttccagcccacaccacctggggcacgaaaggtggttgtggcaacgaacattgctgagacatcactcaccattgagggcatcatttatgtgctggatccagggttctgtaagcagaagagctacaacccccgcacaggcatggaatcgctcactgtcacaccctgcagcaaggcctcagccaatcagcgagctggcagggcaggtcgggtggctgcagggaagtgcttccgcctgtataccgcctgggcctatcagcacgagcttgaggaaaccacagtgcctgagatccagaggaccagcttgggcaatgtcgtgttgctgctcaagagcttagggatccatgacctaatgcactttgatttcctggaccctccaccatatgagacactgctgctggctttggagcagctgtatgctctgggagccctcaaccaccttggggagctcaccacgtctggtcgaaagatggcagagctgccggtggaccccatgctgtccaaaatgatcttagcctctgagaagtacagctgttcagaggagatcctgacagtggctgccatgctctctgtcaacaactccatcttctaccgaccaaaggacaaggtcgtccatgctgacaatgcccgtgtcaacttctttctccctggcggtgaccacctggttctgctaaatgtttacacacagtgggctgagagtggttactcttcccagtggtgctatgagaactttgtacagttcagatcgatgcgccgagcccgggatgtgcgggaacagctggaagggctcttggaacgtgtggaagttggtctcagttcctgccagggggactatatccgtgtacgcaaggccatcactgctggttacttttaccacacggcacggttgactcggagtggctaccgcacagtgaaacagcagcagacagtcttcattcatcccaactcctccctctttgagcaacagccacgctggctgctctaccacgaacttgtcttgaccaccaaagagttcatgagacaggtactggagattgagagcagttggcttctggaggtggctccccattattataaggccaaggagctagaagatccccatgctaagaaaatgcccaaaaaaataggcaaaacacgagaagagctagggtaagagaaggacgtaaacagaacctgacaccagctccttttccttctatacattatttaatacctattaaataaaattatttttggaataaagcttgtgggaacatttgggatctagagaaagtga

SEQ ID NO: 305500 - DNA, 691 bp, Artificial Sequence
  derived and/or modified sequence
ctgaacaatatgtgcctttttgactcttcagaggctgtgaatttctggtcttggaagatcacagtggagcaattggacagataggattttatccttcatatcccttgcaaaagatctctaagaacccatggagagccagccagcgcaagagtgtctgatgcagatgtttttgcccatcgagccagcctgctttgtggaatggctggggacttcaccatcacagttaggcgtggtgatggtggatgaggcacacgaaaggaccctacacacagacattctctttggattgatcaaggatgttgctcgcttccgacctgagctcaaggtcctggtggcttcagccacaatggacactgcccgtttttccaccttctttgatgacgcccctgtgtttcgaatccccggacgcaggtttcctgtggacatcttctacaccaaggctccagaggctgactacttggaagcttgtgtagtatctgtgttgcagatccatgtgacccagccccctggggatatcctggtgttcctgacaggacaggaggagattgaggctgcctgtgagatgctccaggatcgctgccgccgcctgggctccaaaatccgggagctcctggtgctgcccatttatgccaatctgccctctgacatgcaggcccgtatcttccagcccacaccacctggggcacgaaag

SEQ ID NO: 305501 - DNA, 2301 bp, Artificial Sequence
  derived and/or modified sequence
gtgggcagctccccgctctgccgctgccgccgccgtcgcccaaggaggatcggggccgggccgggccgggatgatccgggtcggaaggccgccgccgccggagggagcgggtcacccaacgccgcactgagccgcccccgccccgccccggccccgggggatgcgccgccccgagctgctgcctccgccgccgccgcagccgcagccgcagcgggcacagagcaggtagatggccccctcagggcaggcccggcggacacccctccctctggctggcggatgcagtgcctagcggccgcccttaaggacgaaaccaacatgagtgggggaggggagcaggccgacatcctgccggccaactacgtggtcaaggatcgctggaaggtgctgaaaaagatcgggggcgggggctttggtgagatctacgaggccatggacctgctgaccagggagaatgtggccctcaaggtggagtcagcccagcagcccaagcaggtcctcaagatggaggtggccgtgctcaagaagttgcaagggaaggaccatgtgtgcaggttcattggctgtggcaggaacgagaagtttaactatgtagtgatgcagctccagggccggaacctggccgacctgcgccgtagccagccgcgaggcaccttcacgctgagcaccacattgcggctgggcaagcagatcttggagtccatcgaggccatccactctgtgggcttcctgcaccgtgacatcaagccttcaaactttgccatgggcaggctgccctccacctacaggaagtgctatatgctggacttcgggctggcccggcagtacaccaacaccacgggggatgtgcggccccctcggaatgtggccgggtttcgaggaacggttcgctatgcctcagtcaatgcccacaagaaccgggagatgggccgccacgacgacctgtggtccctcttctacatgctggtggagtttgcagtgggccagctgccctggaggaagatcaaggacaaggaacaggtagggatgatcaaggagaagtatgagcaccggatgctgctgaagcacatgccgtcagagttccacctcttcctggaccacattgccagcctcgactacttcaccaagcccgactaccagttgatcatgtcagtgtttgagaacagcatgaaggagaggggcattgccgagaatgaggcctttgactgggagaaggcaggcaccgatgccctcctgtccacgagcacctctaccccgccccagcagaacacccggcagacggcagccatgtttggggtggtcaatgtgacgccagtgcctggggacctgctccgggagaacaccgaggatgtgctacagggagagcacctgagtgaccaggagaatgcacccccaattctgcccgggaggccctctgaggggctgggccccagtccccaccttgtcccccaccccgggggtcctgaggctgaagtctgggaggagacagatgtcaaccggaacaaactccggatcaacatcggcaaaagcccctgtgtggaggaggaacagagccgaggcatgggggtccccagctccccagtgcgtgcccccccagactcccccacaaccccagtccgttctctgcgctaccggagggtgaacagccctgagtcagaaaggctgtccacggcggacgggcgagtggagctacctgagaggaggtcacggatggatctgcctggctcgccctcgcgccaggcctgctcctctcagccagcccagatgctgtcagtggacacaggccacgctgaccgacaggccagtggccgcatggacgtgtcagcctctgtggagcaggaggccctgagcaacgccttccgctcggtgccgctggctgaggaggaggatttcgacagcaaagagtgggtcatcatcgacaaggagacggagctcaaggacttccctccaggggctgagcccagcacatcgggcaccacggatgaggagcccgaggagctgcggccactgcccgaggagggcgaagagcggcggcggctgggggcagagccccccttcccactcacccctgcactcgggaccccgccctcgacggagagagtcggaccccacaggcccacagagacagttggaggaggacagactctcggggcactccctcccgcggtacagccccctgcgacgactggcgtcctccgtgttctcctcctccacgctggagacggagcattaccctcaccccggcggcggcggctcctcgggctcctccggttccctcattcagcgcagccgctcggctga

SEQ ID NO: 305502 - DNA, 6932 bp, Artificial Sequence
  derived and/or modified sequence
cagccgcagccgcagcgggcacagagcaggtagatggccccctcagggcaggcccggcggacacccctccctctggctggcggatgcagtgcctagcggccgcccttaaggacgaaaccaacatgagtgggggaggggagcaggccgacatcctgccggccaactacgtggtcaaggatcgctggaaggtgctgaaaaagatcgggggcgggggctttggtgagatctacgaggccatggacctgctgaccagggagaatgtggccctcaaggtggagtcagcccagcagcccaagcaggtcctcaagatggaggtggccgtgctcaagaagttgcaagggaaggaccatgtgtgcaggttcattggctgtggcaggaacgagaagtttaactatgtagtgatgcagctccagggccggaacctggccgacctgcgccgtagccagccgcgaggcaccttcacgctgagcaccacattgcggctgggcaagcagatcttggagtccatcgaggccatccactctgtgggcttcctgcaccgtgacatcaagccttcaaactttgccatgggcaggctgccctccacctacaggaagtgctatatgctggacttcgggctggcccggcagtacaccaacaccacgggggatgtgcggccccctcggaatgtggccgggtttcgaggaacggttcgctatgcctcagtcaatgcccacaagaaccgggagatgggccgccacgacgacctgtggtccctcttctacatgctggtggagtttgcagtgggccagctgccctggaggaagatcaaggacaaggaacaggtagggatgatcaaggagaagtatgagcaccggatgctgctgaagcacatgccgtcagagttccacctcttcctggaccacattgccagcctcgactacttcaccaagcccgactaccagttgatcatgtcagtgtttgagaacagcatgaaggagaggggcattgccgagaatgaggcctttgactgggagaaggcaggcaccgatgccctcctgtccacgagcacctctaccccgccccagcagaacacccggcagacggcagccatgtttggggtggtcaatgtgacgccagtgcctggggacctgctccgggagaacaccgaggatgtgctacagggagagcacctgagtgaccaggagaatgcacccccaattctgcccgggaggccctctgaggggctgggccccagtccccaccttgtcccccaccccgggggtcctgaggctgaagtctgggaggagacagatgtcaaccggaacaaactccggatcaacatcggcaaaagcccctgtgtggaggaggaacagagccgaggcatgggggtccccagctccccagtgcgtgcccccccagactcccccacaaccccagtccgttctctgcgctaccggagggtgaacagccctgagtcagaaaggctgtccacggcggacgggcgagtggagctacctgagaggaggtcacggatggatctgcctggctcgccctcgcgccaggcctgctcctctcagccagcccagatgctgtcagtggacacaggccacgctgaccgacaggccagtggccgcatggacgtgtcagcctctgtggagcaggaggccctgagcaacgccttccgctcggtgccgctggctgaggaggaggatttcgacagcaaagagtgggtcatcatcgacaaggagacggagctcaaggacttccctccaggggctgagcccagcacatcgggcaccacggatgaggagcccgaggagctgcggccactgcccgaggagggcgaagagcggcggcggctgggggcagagcccaccgtccggccccggggacgcagcatgcaggcgctggcggaggaggacctgcagcatttgccgccccagcccctgccaccccagctgagccagggcgatggccgttccgagacgtcacagccccccacgcctggcagcccttcccactcacccctgcactcgggaccccgccctcgacggagagagtcggaccccacaggcccacagagacaggtgttctccgtggcgcccccatttgaggtgaatggcctcccacgagctgtgcctctgagtctgccctaccaggacttcaaaagagacctctccgattaccgagaacgggcgcggttgctcaacagggtccggagggtgggcttctcgcacatgctgctcaccaccccccaggtcccactggctcctgttcagcctcaggctaatgggaaggaggaagaggaggaggaggaggaagatgaggaagaggaagaagaggatgaggaagaagaagaggaggaagaggaagaggaggaggaagaagaggaggaggaggaagaggaggaggaggctgcagcggcagttgccttgggggaggtgctggggcctcgtagtggctccagcagtgaggggagtgagaggagcactgaccggagccaggagggtgccccgtccacgctgctggcagacgatcagaaggagtccaggggccgggcctccatggccgatggggacctggagcctgaggagggctccaaaacgctggtgcttgtctctcctggcgacatgaagaagtcgcccgtcactgccgaactggcccccgaccccgacctgggcaccctggctgccctcactcctcagcatgagcggccccagcccacgggcagccagctggacgtatctgagccaggcaccctgtcctctgtcctcaagtctgagcccaagcccccggggcctggggcagggctgggggccgggacagtgaccacaggggtcgggggcgtggcagtcacctcctcacccttcaccaaagttgagaggacctttgtgcacattgcggagaaaacccacctcaacgtcatgtcttccggtggacaagccttgcggtctgaggagttcagcgctgggggcgagctgggtctggagctggcctctgatgggggcgctgtggaggagggggcccgagcgcccctggagaacggcctcgccctgtcagggctgaatggggctgagatagagggctctgccctgtctggggccccccgggaaaccccctcagagatggccacaaactcactgcccaatggcccggcccttgcagacgggccagccccggtgtccccgctggagccaagccctgagaaagtggccaccatctcccccagacgccatgctatgccaggctctcgccccaggagccgtatccctgtcctgctctctgaggaggacacgggctcggagccctcaggctcactgtcggccaaagagcggtggagcaagcgggctcggccgcagcaggacctggcgcggctggtgatggagaagaggcagggccgcctgctgttgcggctggcctcaggggcctcgtcctcctccagtgaggagcagcgccgtgcctctgagaccctctcaggcacgggctctgaggaggacacgcccgcctctgagccggcagcggccttgcccaggaagagcgggagggcagccgccaccaggagccggattccccgccccattggcctccgcatgcccatgcctgttgcagcccagcagcccgccagcagatcccatggcgcggccccagcattggacacagccatcaccagcaggctccagctgcagacgcccccagggtcggccactgctgctgacctccgccccaaacaacctcctggccgcggcctgggcccagggcgagcccaagccggagccaggcccccagcgccgcgcagcccgcgcctccccgcgtccacatccgccgcgcgcaatgccagcgcgtccccccggagccagtccctgtcccgcagagagagcccctccccctcgcaccaggcccggcccggggtccccccgccccggggcgtcccgccggcccgggcccagcctgatggcaccccctcccccgggggctccaagaaaggacccagagggaaactccaggctcagcgcgcaacaaccaaaggccgggcaggaggcgcggagggccgggctggggccagataatgacgcccgctgctctccgcggtcccccaccctcaccccggccccccacccgcagccggccacactggagcagctcccagcacagccttacgcgcccgacgcgcgccacccgcggccccagctttccgcctgcacccgcgaggacgcgcgcgagcacacgcggcgccccgccaggccttagggcccgtgggggacgcggccccgcgccgcggggagggtctgcctccccttcctcgccctgtgtcctctcatcctcccgccgcccgtcaggccggccagcctcacatcagtctctccgccccggggaaggctcagccacttttcatcgaggactccacttctggggacgcctggttcgttcgcccaccaggcctaggctacgctccatgctcccccagcaatctctgcctacacctcctgcggcgccttgccctcctccgacccctttccagccaaagtccccccaccccttcagagaagcagcctcaaattccagaagtggaggctccagcctccccgcgagggtccagccccacagtcttctgggagccattgtggccagggacggcctctggactgccaggctgggttggggacccagggaacatcggtctactcaggtgtgagggggcaggtctgacctgccccaaagttggctccatcctggacaactcggtgagaggcagtgggcaagtgatcttggagatgggtgggcaggtgattctgtgggcaggggatgtgctcccctgcacctctggggtgcagaaacctcttgcctccagatttgggtggagcctctgtgggaaccataggaagtgtgtgggctgccttcctgggcaagtatttcccagtgggaagttggagggggctttaacaaagttttactccctcccctgttcccctgatctagtgctcaggacccttcaccatcaggaattccttcctgtcatctaacctcagtcctgcctactgcagttccagccaacctgctctttcctgagttcaaagcaggtggagactggctggttaccatctttgcactggcccttcggagattcggggactcagttctggtggggtcaccctccctgtcctcccgcctgtgggagggagggagggctggctcaggcatcgtctcccgcaatgggcagagagagcagagacaggtggaccaacagacagctggcccctggaggcagaaaggcccttctaacttccagattgtatgcttgagtgatgggtccccagcccaagcccactcttccctcagctcacccttcagcctgttccttcttgccctgaccccagcccgtgcagctgctctactccaggaatggatgtggggactcttcctgggttctggctcctgcatagctcaccccacctcatcatgagcctcaactgcctacatctggggcaagcagcacaccggctgcagatgggacagccagccctgcctatctggacaggcccctgcagcctctgtcccctggcctagcctctctgtccttccctgagtcacagagagcaagccaagacatccagggaaagaggaagaaaggccttagtgtgccccagcagtctggctgcgtccagccaccatcacccggaaggatgcccacaaggcagctgaccctgaaagcagcctccccctcatggagagtcagcagcttgggcagccacttccaggccagggtggtggcttctctgcagaccagctgaggggaggactcctgggtggacagcctttgacgtccaccccacgctgatgcagaagctcccagaacactcaggaaacttctccggacagagccctccttgtcaacttgaggccctcccaaggccctctactgccctctgggtccagcagagggagtggaggaagggccactgcctcccacctagagcttctccgaatgacaatcagctcgtgccaggtggggaccaggatatgactcctggtgcccaggccctgggcctgctccttgccaccaaccgaaccgtgaatgtagggcccccagcctcacctctgccccaggaccaacaacaccctggtttggagctgggaggaagaagggggcctgagagagccccaggtccattctacccccagcttcactcagcactggagctggcagagacgcaaaacccagtctgcccttgggattccaaacctccctagggctcccaactgacctcaggcctctgagtcactgaatgtcaccaggagaggtgggggagggaaagtgggccagtggggagggggtcacctaggggactgcctctgtgcctctccccaggaagcatccagggcagaggaagccacatctcccggtgcccccaaccccagctgcagcctcctccccctgagcattcattctctccaccaggcctccaggtcctgagcccttcctctgtaaaagtgtcacaccacctccctcagcacttccccatcacaacaacctatgtcactgactcagatgcagggtctgctcaccccaacacatgccttccctccccagccacaccgtgcacgaagggggcacaggagaggagaggggctgtgccccaggctccccatttcccagctcctcacagaggcctggtttgctcagtcttctgaactccagggaccagccctggtgggcatggggtggggagcagggagttgcccttcccctccctcgggaagccacctaagaatgtttacatgccaaacagaatgtaacacccctccccaagcccttcccagtcactgcatggcctctgcccatcctgcacctgtccaccccaccccaacaccctggaagccactgtcaatgattagatcgggtctcggaagggaagtagccatcacaccattaaaaagcctgtggacctttt

SEQ ID NO: 305503 - protein, 255 aa, Artificial Sequence
  derived and/or modified sequence
MTKTSTCIYHFLVLSWYTFLNYYISQEGKDEVKPKILANGARWKYMTLLNLLLQTIFYGVTCLDDVLKRTKGGKDIKFLTAFRDLLFTTLAFPVSTFVFLAFWILFLYNRDLIYPKVLDTVIPVWLNHAMHTFIFPITLAEVVLRPHSYPSKKTGLTLLAAASIAYISRILWLYFETGTWVYPVFAKLSLLGLAAFFSLSYVFIASIYLLGEKLNHWKWVSVQILQRWRLESVGICFQWPDWKSPAKHQLVKNIR

SEQ ID NO: 305504 - DNA, 768 bp, Artificial Sequence
  derived and/or modified sequence
atgacaaagactagcacttgtatctatcacttcctcgttctgtcctggtacacattcctgaattattatatttctcaggagggaaaagacgaggtaaagcctaagattctggcaaacggagcaagatggaagtatatgactctgctgaatctgttgctgcagactattttttatggggtcacctgtctggacgacgttctgaaacggaccaagggcgggaaagacattaagttcctgacagcatttagagatctgctgtttactacattagcgtttcctgtcagcactttcgtctttctggccttctggattctgtttctttacaaccgtgatctgatttaccctaaggttctggacactgttattcctgtatggcttaatcacgccatgcacacatttatcttcccaattacactcgcggaagtggtgttacgcccgcacagctatccatcaaaaaagactggtctcactttactggccgcggccagcatcgcttatatcagcaggatcttgtggctctacttcgagaccgggacttgggtttatcccgtttttgctaagctgtctctccttggactggctgccttcttctctttgagctacgttttcatagcttcaatttatctgttaggggagaagctgaatcactggaaatgggtgagcgtgcagattttgcaaaggtggcggctcgaatcagtaggaatctgcttccagtggcccgattggaaatccccagctaaacaccaactggtgaagaacattaggtag

SEQ ID NO: 305505 - DNA, 768 bp, Artificial Sequence
  derived and/or modified sequence
atgaccaagaccagcacctgcatctaccacttcctggtgctgtcctggtacaccttcctgaactactacatcagccaggagggcaaggatgaggtgaagcccaagatcctggccaatggagcccgctggaagtacatgaccctgctgaacctgctgctgcagaccatcttctacggcgtgacctgcctggatgatgtgctgaagaggaccaagggcggcaaggacatcaagttcctgacagccttccgggacctgctcttcaccaccctggccttccctgtgtccacctttgtgttcctggccttctggatcctcttcctgtacaacagagacctgatctaccccaaggtgctggacaccgtcatccctgtgtggctgaaccacgccatgcacaccttcatcttccccatcaccctggccgaggtggtgctgcggccccacagctaccccagcaagaagacaggcctgaccctgctggccgccgccagcatcgcctacatcagccgcatcctgtggctgtactttgaaacaggcacctgggtgtaccctgtgtttgccaagctgagcctgctgggcctggccgccttcttcagcctgtcctatgtgttcatcgccagcatctacctgctgggggagaagctgaaccactggaagtgggtgtctgtgcagatcctgcagcgctggaggctggagagcgtgggcatctgcttccagtggccagactggaagagccctgccaagcaccagctggtgaagaacatcagatag

SEQ ID NO: 305506 - DNA, 768 bp, Artificial Sequence
  derived and/or modified sequence
atgaccaagaccagcacctgcatctaccacttcctggtgctgagctggtacacctttctcaattactatatttcccaggagggcaaggatgaggtcaagcctaagatcctggctaatggggcccgttggaaatacatgacacttctgaatttactccttcagacaattttttatggggtgacttgcctggacgatgttctcaaacgcactaagggaggcaaagacattaagtttctgacggcgttcagggatctacttttcacaacactggccttccccgtgtcaacttttgtgtttttagcattctggatcttgtttctgtacaatagagatctcatatacccaaaagttctagataccgttataccagtgtggctgaatcatgcgatgcatacttttatcttccctattacgctcgccgaagttgtgctgagaccccacagttacccttccaaaaaaactggactgactttactcgccgctgcgtccatcgcctacatttcgaggatcctctggctctatttcgaaacaggcacatgggtttatcctgttttcgccaagctttctctgctcggacttgcagctttcttctccttgagttatgtgtttattgcctccatctatctactgggtgaaaagcttaatcactggaagtgggtaagcgttcagatcttgcagcgttggagactggaatctgttggcatctgtttccaatggcctgattggaagtcgcctgctaagcaccagctcgtgaagaacatccggtag

SEQ ID NO: 305507 - DNA, 768 bp, Artificial Sequence
  derived and/or modified sequence
atgacaaaaacctccacttgcatctatcatttcctggtgctcagctggtatacatttctgaattactatataagtcaagagggcaaggatgaggtgaaaccgaaaattttggccaatggggctcgttggaaatacatgacactactcaaccttctgctccagacaattttttacggagtcacatgcctcgatgacgtgcttaaacgcacgaaggggggtaaggatattaaatttcttactgcttttcgcgatttactctttactacgcttgcgttccccgtgtccaccttcgtttttctcgccttctggattctgtttctgtataaccgcgatctgatttatccgaaggtgctggacactgtcatccccgtgtggctgaatcacgcaatgcataccttcatattcccgattacacttgcagaggttgtgctacgaccgcacagctatccgtctaagaaaactggcctgactctgttagctgctgctagtatcgcttatatctcaagaattctgtggctctacttcgaaaccggtacctgggtgtatcctgtctttgccaaactgagtctcctgggactcgctgctttcttctctctgtcgtatgtgtttatcgcatccatttatttgctcggagagaaactgaatcactggaaatgggtgagcgttcagattctgcagagatggcgccttgagagcgtgggaatttgctttcagtggcctgactggaagagtccagcgaagcaccagctcgttaaaaatatcagatag

SEQ ID NO: 305508 - DNA, 1056 bp, Artificial Sequence
  derived and/or modified sequence
gcattgctacctgcccttctcaaagcccacatgttgtattttatgcaaatctacagattatctatcattatctaaatgcaggcatctgaaaaccagcagtaatcctgcctctgaagtttatcaggaaaggagcttaaaagagaaccaaattcagcctgtgttggaactctcagtcccagaggggtgtggtttgtagctctccggcctgctgttggacttaggctgtgacccacagaaggacgccagaaagtactcaagacattcacggtgccccggtcagcactcgccatgacgaagacttctacatgcatataccacttccttgttctgagctggtatactttcctcaattattacatctcacaggaaggaaaagacgaggtgaaacccaaaatcttggcaaatggtgcaaggtggaaatatatgacgctgcttaatctgctcttgcagaccattttctacggggtcacctgcctggatgatgtgctgaaaagaaccaaagggggaaaagacattaagttcctaactgccttcagagacctgcttttcaccactctggcttttcctgtatccacgtttgtatttttggcattctggatcctctttctctacaatcgagatctcatttaccccaaggtcctagatactgtcatccccgtgtggctgaatcatgcaatgcacactttcatattccccatcacattggctgaagtcgtcctcaggcctcactcctatccatcaaagaagacaggactcaccttgctggctgctgccagcattgcttacatcagccgcatcctatggctctactttgagacgggtacctgggtgtatcctgtgtttgccaaactcagcctcttgggtctagcagctttcttctctctcagctacgtcttcatcgccagcatctacctacttggagagaagctcaaccactggaaatgggtttctgttcagatcttgcaaagatggaggctagaatctgttggaatctgcttccagtggcccgattggaagtcaccagccaagcaccaactggtcaagaatatcaggtga

SEQ ID NO: 305509 - DNA, 768 bp, Artificial Sequence
  derived and/or modified sequence
atgaccaagaccagcacctgcatctaccacttcctggtgctgagctggtacaccttcctgaactactacatcagccaggagggcaaggacgaggtgaagcccaagatcctggccaacggcgccagatggaagtacatgaccctgctgaacctgctgctgcagaccatcttctacggcgtgacctgcctggacgacgtgctgaagagaaccaagggcggcaaggacatcaagttcctgaccgccttcagagacctgctgttcaccaccctggccttccccgtgagcaccttcgtgttcctggccttctggatcctgttcctgtacaacagagacctgatctaccccaaggtgctggacaccgtgatccccgtgtggctgaaccacgccatgcacaccttcatcttccccatcaccctggccgaggtggtgctgagaccccacagctaccccagcaagaagaccggcctgaccctgctggccgccgccagcatcgcctacatcagcagaatcctgtggctgtacttcgagaccggcacctgggtgtaccccgtgttcgccaagctgagcctgctgggcctggccgccttcttcagcctgagctacgtgttcatcgccagcatctacctgctgggcgagaagctgaaccactggaagtgggtgagcgtgcagatcctgcagagatggagactggagagcgtgggcatctgcttccagtggcccgactggaagagccccgccaagcaccagctggtgaagaacatcagatag

SEQ ID NO: 305510 - protein, 168 aa, Artificial Sequence
  derived and/or modified sequence
MTKTSTCIYHFLVLSWYTFLNYYISQEGKDEVKPKILANGARWKYMTLLNLLLQTIFYGVTCLDDVLKRTKGGKDIKFLTAFRDLLFTTLAFPVSTFVFLAFWILFLYNRDLIYPKVLDTVIPVWLNHAMHTFIFPITLAEVVLRPHSYPSKKTGLTLLAAASIAYIS

SEQ ID NO: 305511 - protein, 169 aa, Artificial Sequence
  derived and/or modified sequence
MTKTSTCIYHFLVLSWYTFLNYYISQEGKDEVKPKILANGARWKYMTLLNLLLQTIFYGVTCLDDVLKRTKGGKDIKFLTAFRDLLFTTLAFPVSTFVFLAFWILFLYNRDLIYPKVLDTVIPVWLNHAMHTFIFPITLAEVVLRPHSYPSKKTGLTLLAAASIAYISR

SEQ ID NO: 305512 - DNA, 510 bp, Artificial Sequence
  derived and/or modified sequence
atgaccaaaaccagcacctgcatctatcacttcctggtgctctcttggtatacgtttctgaactattatatttcacaggaaggaaaggatgaggtcaagcccaagattcttgccaatggagcccgatggaaatatatgactcttctgaacttattgctgcagaccatcttttatggagtcacgtgtctagatgatgtgctcaaaagaactaaaggcggaaaggacattaaattcctgactgccttccgcgatctgcttttcactacacttgcattcccggtgtcaactttcgtcttcctagccttttggatcctgtttttgtacaatagagatttgatctacccaaaagtgttggataccgtcattccagtctggctcaatcacgccatgcacacatttatctttccaatcaccctggctgaagtagttttgcgaccccacagctatccgtctaagaaaactggcctcactttgctagcggccgccagcatcgcttacatctcccgctag

SEQ ID NO: 305513 - DNA, 507 bp, Artificial Sequence
  derived and/or modified sequence
atgactaaaacttcaacctgcatctatcactttctggtgttgtcatggtacacctttctgaattactatataagtcaggagggcaaggacgaagtcaagcccaagattctggctaacggggctcgctggaaatacatgacactactcaacctcctcctccagacaatcttttacggtgtgacttgtcttgatgacgttctgaagcgcactaaaggcgggaaggatatcaaattcctgactgccttccgcgacttattgtttacaactttggcctttcctgtttctacattcgttttcctggctttttggattcttttcctatataaccgagacctgatttatccgaaggtcctggatacagtcatcccagtgtggctgaatcacgccatgcacacgtttatttttcctatcacactggctgaagtagtcttgaggccacacagctacccgagcaaaaaaaccggactgaccctgctagcggccgcttccattgcctatatcagttag

SEQ ID NO: 305514 - DNA, 510 bp, Artificial Sequence
  derived and/or modified sequence
atgaccaagaccagcacctgcatctaccacttcctggtgctgtcctggtacaccttcctgaactactacatcagccaggagggcaaggatgaggtgaagcccaagatcctggccaatggagcccgctggaagtacatgaccctgctgaacctgctgctgcagaccatcttctacggcgtgacctgcctggatgatgtgctgaagaggaccaagggcggcaaggacatcaagttcctgacagccttccgggacctgctcttcaccaccctggccttccctgtgtccacctttgtgttcctggccttctggatcctcttcctgtacaacagagacctgatctaccccaaggtgctggacaccgtcatccctgtgtggctgaaccacgccatgcacaccttcatcttccccatcaccctggccgaggtggtgctgcggccccacagctaccccagcaagaagacaggcctgaccctgctggccgccgccagcatcgcctacatcagcaggtag

SEQ ID NO: 305515 - DNA, 507 bp, Artificial Sequence
  derived and/or modified sequence
atgaccaagaccagcacctgcatctaccacttcctggtgctgtcctggtacaccttcctgaactactacatcagccaggagggcaaggatgaggtgaagcccaagatcctggccaatggagcccgctggaagtacatgaccctgctgaacctgctgctgcagaccatcttctacggcgtgacctgcctggatgatgtgctgaagaggaccaagggcggcaaggacatcaagttcctgacagccttccgggacctgctcttcaccaccctggccttccctgtgtccacctttgtgttcctggccttctggatcctcttcctgtacaacagagacctgatctaccccaaggtgctggacaccgtcatccctgtgtggctgaaccacgccatgcacaccttcatcttccccatcaccctggccgaggtggtgctgcggccccacagctaccccagcaagaagacaggcctgaccctgctggccgccgccagcatcgcctacatctcctag

SEQ ID NO: 305516 - DNA, 510 bp, Artificial Sequence
  derived and/or modified sequence
atgaccaagaccagcacctgcatctaccacttcctggtgctgagctggtacaccttcctcaactattacatttctcaagagggtaaagatgaagtcaaaccaaaaattctcgctaatggtgcacgctggaagtatatgaccttgctaaatttactgctccaaacaatcttttatggcgttacatgcctggatgatgtgctgaagcgcaccaagggtggaaaggacatcaagtttctgaccgcatttcgagatctgctgttcaccacgctggcattccctgtctccaccttcgtctttttggccttctggatcctgttcttgtataacagagatctgatctaccccaaagtgctggacacagtcatacccgtgtggctcaaccacgccatgcacactttcatttttcccattaccttggctgaggtagtcctaagacctcattcctatccttccaagaagactggtcttacgctactggccgccgccagtattgcctatatctcgaggtag

SEQ ID NO: 305517 - DNA, 507 bp, Artificial Sequence
  derived and/or modified sequence
atgaccaagaccagcacctgcatctaccacttcctggtgctgagctggtataccttcctgaactactatatctcgcaggaaggcaaggatgaggtgaaacccaaaatccttgctaacggagccaggtggaagtatatgacactgcttaatctgctgttacagactatattctacggggtcacatgcctggacgacgtgctcaagcgcactaagggggggaaggatatcaaattcctcacggcattcagagacctgctgttcacgaccttggcatttccagtctcaacctttgtgtttctcgctttttggattctcttcctttataacagagacctcatttatcctaaggttcttgacaccgtgattccagtctggctcaaccatgctatgcacacatttatattccccattaccctggcagaagtcgtcttgagaccccatagttaccctagcaagaaaacaggattgacactcctggccgcagcctctatcgcctacatttcctag

SEQ ID NO: 305518 - DNA, 510 bp, Artificial Sequence
  derived and/or modified sequence
atgacaaagacttcaacctgtatctatcactttctcgtgctgtcctggtacacctttttgaactattatatctcccaggaaggcaaggatgaggttaagcccaagatcctggcaaacggcgcaaggtggaaatatatgaccctgcttaacctgttgctgcaaactattttctacggcgtcacatgcctcgacgacgtgctgaaacggaccaaaggcggaaaggatataaaatttctaactgccttcagagaccttctctttaccactcttgcctttcccgtgagtacctttgtgtttctggctttctggatattgttcctgtacaatagggatctgatctaccccaaagtactggataccgtgattccggtgtggctgaaccacgccatgcacacgtttatctttcccataaccctggctgaagtggtactccggccacactcatatccctccaaaaagactggactgacactgctcgcagcagcttctatagcctacatctcccggtag

SEQ ID NO: 305519 - DNA, 507 bp, Artificial Sequence
  derived and/or modified sequence
atgactaagacctctacatgcatctaccactttctggtactgagctggtacacttttctcaattattatatcagccaggagggaaaagatgaagtgaaacctaagatattggccaatggagcccgatggaagtacatgacccttttgaacctcctgttgcaaacgatcttctatggagtgacctgcttggacgacgtactgaagcgcacaaaggggggaaaggacatcaagtttcttactgcattccgcgatttgttatttacgaccctggcttttcctgtctccaccttcgtgttcctggcgttctggatccttttcttgtataaccgggacttaatttaccccaaggtgctggatacggtcatcccagtttggttgaaccacgctatgcatactttcattttccccatcacacttgctgaagttgtcttacggcctcactcttatcctagcaagaagacaggcctgaccctcttggcggcagcctccatagcctacatttcatag

SEQ ID NO: 305520 - DNA, 991 bp, Artificial Sequence
  derived and/or modified sequence
agtctccaaaccagagccaccattcttgcgaagtgagttcccacccacccgagagggagatccttagctcctcatcatcgccagtcatgatgatgagatactctggaagacatccattctgtggaaaccccacaaggtgaggccacgtctaaatagcttacagagtcttgctctttcacccaggctggagtgctgtggtgttatctcagctcactgcagtttcaagctcctgggctcaagtgatcttacctcagccttctgagtagctgggactccaggcatctgaaaaccagcagtaatcctgcctctgaagtttatcaggaaaggagcttaaaagagaaccaaattcagcctgtgttggaactctcagtcccagaggggtgtggtttgtagctctccggcctgctgttggacttaggctgtgacccacagaaggacgccagaaagtactcaagacattcacggtgccccggtcagcactcgccatgacgaagacttctacatgcatataccacttccttgttctgagctggtatactttcctcaattattacatctcacaggaaggaaaagacgaggtgaaacccaaaatcttggcaaatggtgcaaggtggaaatatatgacgctgcttaatctgctcttgcagaccattttctacggggtcacctgcctggatgatgtgctgaaaagaaccaaagggggaaaagacattaagttcctaactgccttcagagacctgcttttcaccactctggcttttcctgtatccacgtttgtatttttggcattctggatcctctttctctacaatcgagatctcatttaccccaaggtcctagatactgtcatccccgtgtggctgaatcatgcaatgcacactttcatattccccatcacattggctgaagtcgtcctcaggcctcactcctatccatcaaagaagacaggactcaccttgctggctgctgccagcattgcttacatcagccg

SEQ ID NO: 305521 - DNA, 817 bp, Artificial Sequence
  derived and/or modified sequence
acctgagtcagagcctagtccggcatgctgcctagcccagccacgtctcatcctattcatggcagagcggggactctcaccctctcccagcaatgtctaaagtcaggcatctgaaaaccagcagtaatcctgcctctgaagtttatcaggaaaggagcttaaaagagaaccaaattcagcctgtgttggaactctcagtcccagaggggtgtggtttgtagctctccggcctgctgttggacttaggctgtgacccacagaaggacgccagaaagtactcaagacattcacggtgccccggtcagcactcgccatgacgaagacttctacatgcatataccacttccttgttctgagctggtatactttcctcaattattacatctcacaggaaggaaaagacgaggtgaaacccaaaatcttggcaaatggtgcaaggtggaaatatatgacgctgcttaatctgctcttgcagaccattttctacggggtcacctgcctggatgatgtgctgaaaagaaccaaagggggaaaagacattaagttcctaactgccttcagagacctgcttttcaccactctggcttttcctgtatccacgtttgtatttttggcattctggatcctctttctctacaatcgagatctcatttaccccaaggtcctagatactgtcatccccgtgtggctgaatcatgcaatgcacactttcatattccccatcacattggctgaagtcgtcctcaggcctcactcctatccatcaaagaagacaggactcaccttgctggctgctgccagcattgcttacatcagc

SEQ ID NO: 305522 - DNA, 510 bp, Artificial Sequence
  derived and/or modified sequence
atgaccaagaccagcacctgcatctaccacttcctggtgctgagctggtacaccttcctgaactactacatcagccaggagggcaaggacgaggtgaagcccaagatcctggccaacggcgccagatggaagtacatgaccctgctgaacctgctgctgcagaccatcttctacggcgtgacctgcctggacgacgtgctgaagagaaccaagggcggcaaggacatcaagttcctgaccgccttcagagacctgctgttcaccaccctggccttccccgtgagcaccttcgtgttcctggccttctggatcctgttcctgtacaacagagacctgatctaccccaaggtgctggacaccgtgatccccgtgtggctgaaccacgccatgcacaccttcatcttccccatcaccctggccgaggtggtgctgagaccccacagctaccccagcaagaagaccggcctgaccctgctggccgccgccagcatcgcctacatcagcagatag

SEQ ID NO: 305523 - DNA, 507 bp, Artificial Sequence
  derived and/or modified sequence
atgaccaagaccagcacctgcatctaccacttcctggtgctgagctggtacaccttcctgaactactacatcagccaggagggcaaggacgaggtgaagcccaagatcctggccaacggcgccagatggaagtacatgaccctgctgaacctgctgctgcagaccatcttctacggcgtgacctgcctggacgacgtgctgaagagaaccaagggcggcaaggacatcaagttcctgaccgccttcagagacctgctgttcaccaccctggccttccccgtgagcaccttcgtgttcctggccttctggatcctgttcctgtacaacagagacctgatctaccccaaggtgctggacaccgtgatccccgtgtggctgaaccacgccatgcacaccttcatcttccccatcaccctggccgaggtggtgctgagaccccacagctaccccagcaagaagaccggcctgaccctgctggccgccgccagcatcgcctacatcagctag

SEQ ID NO: 305524 - protein, 589 aa, Artificial Sequence
  derived and/or modified sequence
MLHSPHKQPQNHKCGANFLQEDSKKSLVFKWLISAGHYQPPRPTESFKAASSIYNRGYKFYLKKKGGTMASNSLFSTVTPCQQNFFWDPSTSRRFSPPSSSLQPGKMSDVSPVVAAQQQQQQQQQQQQQQQQQQQQQQQEAAAAAAAAAAAAAAAAAVPRLRPPHDNRTMVEIIADHPAELVRTDSPNFLCSVLPSHWRCNKTLPVAFKVVALGEVPDGTVVTVMAGNDENYSAELRNASAVMKNQVARFNDLRFVGRSGRGKSFTLTITVFTNPPQVATYHRAIKVTVDGPREPRRHRQKLDDSKPSLFSDRLSDLGRIPHPSMRVGVPPQNPRPSLNSAPSPFNPQGQSQITDPRQAQSSPPWSYDQSYPSYLSQMTSPSIHSTTPLSSTRGTGLPAITDVPRRISDDDTATSDFCLWPSTLSKKSQAGASELGPFSDPRQFPSISSLTESRFSNPRMHYPATFTYTPPVTSGMSLGMSATTHYHTYLPPPYPGSSQSQSGPFQTSSTPYLYYGTSSGSYQFPMVPGGDRSPSRMLPPCTTTSNGSTLLNPNLPNQNDGVDADGSHSSSPTVLNSSGRMDESVWRPY

SEQ ID NO: 305525 - protein, 507 aa, Artificial Sequence
  derived and/or modified sequence
MRIPVDPSTSRRFSPPSSSLQPGKMSDVSPVVAAQQQQQQQQQQQQQQQQQQQQQQQEAAAAAAAAAAAAAAAAAVPRLRPPHDNRTMVEIIADHPAELVRTDSPNFLCSVLPSHWRCNKTLPVAFKVVALGEVPDGTVVTVMAGNDENYSAELRNASAVMKNQVARFNDLRFVGRSGRGKSFTLTITVFTNPPQVATYHRAIKVTVDGPREPRRHRQKLDDSKPSLFSDRLSDLGRIPHPSMRVGVPPQNPRPSLNSAPSPFNPQGQSQITDPRQAQSSPPWSYDQSYPSYLSQMTSPSIHSTTPLSSTRGTGLPAITDVPRRISDDDTATSDFCLWPSTLSKKSQAGASELGPFSDPRQFPSISSLTESRFSNPRMHYPATFTYTPPVTSGMSLGMSATTHYHTYLPPPYPGSSQSQSGPFQTSSTPYLYYGTSSGSYQFPMVPGGDRSPSRMLPPCTTTSNGSTLLNPNLPNQNDGVDADGSHSSSPTVLNSSGRMDESVWRPY

SEQ ID NO: 305526 - protein, 521 aa, Artificial Sequence
  derived and/or modified sequence
MASNSLFSTVTPCQQNFFWDPSTSRRFSPPSSSLQPGKMSDVSPVVAAQQQQQQQQQQQQQQQQQQQQQQQEAAAAAAAAAAAAAAAAAVPRLRPPHDNRTMVEIIADHPAELVRTDSPNFLCSVLPSHWRCNKTLPVAFKVVALGEVPDGTVVTVMAGNDENYSAELRNASAVMKNQVARFNDLRFVGRSGRGKSFTLTITVFTNPPQVATYHRAIKVTVDGPREPRRHRQKLDDSKPSLFSDRLSDLGRIPHPSMRVGVPPQNPRPSLNSAPSPFNPQGQSQITDPRQAQSSPPWSYDQSYPSYLSQMTSPSIHSTTPLSSTRGTGLPAITDVPRRISDDDTATSDFCLWPSTLSKKSQAGASELGPFSDPRQFPSISSLTESRFSNPRMHYPATFTYTPPVTSGMSLGMSATTHYHTYLPPPYPGSSQSQSGPFQTSSTPYLYYGTSSGSYQFPMVPGGDRSPSRMLPPCTTTSNGSTLLNPNLPNQNDGVDADGSHSSSPTVLNSSGRMDESVWRPY

SEQ ID NO: 305527 - DNA, 1770 bp, Artificial Sequence
  derived and/or modified sequence
atgctgcacagcccccacaagcagccccagaaccacaagtgcggcgccaacttcctgcaggaggacagcaagaagagcctggtgttcaagtggctgatcagcgccggccactaccagccccccagacccaccgagagcttcaaggccgccagcagcatctacaacagaggctacaagttctacctgaagaagaagggcggcaccatggccagcaacagcctgttcagcaccgtgaccccctgccagcagaacttcttctgggaccccagcaccagcagaagattcagcccccccagcagcagcctgcagcccggcaagatgagcgacgtgagccccgtggtggccgcccagcagcagcagcagcagcagcagcagcagcagcagcagcagcagcagcagcagcagcagcagcagcaggaggccgccgccgccgccgccgccgccgccgccgccgccgccgccgccgccgccgtgcccagactgagacccccccacgacaacagaaccatggtggagatcatcgccgaccaccccgccgagctggtgagaaccgacagccccaacttcctgtgcagcgtgctgcccagccactggagatgcaacaagaccctgcccgtggccttcaaggtggtggccctgggcgaggtgcccgacggcaccgtggtgaccgtgatggccggcaacgacgagaactacagcgccgagctgagaaacgccagcgccgtgatgaagaaccaggtggccagattcaacgacctgagattcgtgggcagaagcggcagaggcaagagcttcaccctgaccatcaccgtgttcaccaaccccccccaggtggccacctaccacagagccatcaaggtgaccgtggacggccccagagagcccagaagacacagacagaagctggacgacagcaagcccagcctgttcagcgacagactgagcgacctgggcagaatcccccaccccagcatgagagtgggcgtgcccccccagaaccccagacccagcctgaacagcgcccccagccccttcaacccccagggccagagccagatcaccgaccccagacaggcccagagcagccccccctggagctacgaccagagctaccccagctacctgagccagatgaccagccccagcatccacagcaccacccccctgagcagcaccagaggcaccggcctgcccgccatcaccgacgtgcccagaagaatcagcgacgacgacaccgccaccagcgacttctgcctgtggcccagcaccctgagcaagaagagccaggccggcgccagcgagctgggccccttcagcgaccccagacagttccccagcatcagcagcctgaccgagagcagattcagcaaccccagaatgcactaccccgccaccttcacctacaccccccccgtgaccagcggcatgagcctgggcatgagcgccaccacccactaccacacctacctgccccccccctaccccggcagcagccagagccagagcggccccttccagaccagcagcaccccctacctgtactacggcaccagcagcggcagctaccagttccccatggtgcccggcggcgacagaagccccagcagaatgctgcccccctgcaccaccaccagcaacggcagcaccctgctgaaccccaacctgcccaaccagaacgacggcgtggacgccgacggcagccacagcagcagccccaccgtgctgaacagcagcggcagaatggacgagagcgtgtggagaccctactag

SEQ ID NO: 305528 - DNA, 1770 bp, Artificial Sequence
  derived and/or modified sequence
atgctgcactccccacacaaacaacctcagaaccataagtgcggagccaattttctccaagaggactctaagaagtcattagtgttcaagtggctgatttcagccggacactaccagccacccagacctaccgagtcgttcaaagcagcatcctcaatatataataggggatacaagttctatctaaaaaagaagggagggacaatggcctctaacagcctgttttccacagttactccgtgccagcagaatttcttctgggacccttctacaagcaggaggttttcccccccaagttcctcactgcagccaggaaagatgtcagatgtgtcccccgtggtggccgcccagcagcagcagcaacagcagcagcaacagcagcagcagcagcaacagcagcagcaacagcaacagcaggaggcggcagctgccgccgccgcggcagctgctgccgccgctgccgctgccgccgtccctaggctgagacctccccatgataatcggactatggtcgagattatcgcggaccatcccgcagaacttgtccggactgatagccccaacttcctatgtagcgttttgccatctcactggcgatgtaacaagacactacccgtggcatttaaggtagttgcgcttggagaggtgccagacggcacagttgtgactgtcatggctggcaatgatgaaaattatagtgctgagctcaggaatgcttctgccgtcatgaagaatcaggtagcgagatttaacgaccttcggttcgtcggtcgtagtggccgtggcaagtccttcaccctgaccatcaccgtgttcaccaatccgccgcaggtggccacctatcatagggccatcaaagtcaccgtggatggaccgcgcgagccccggcgacaccgacagaagctcgatgactccaagcccagcctgttttcggaccggctgtctgatctaggaagaatccctcaccccagcatgcgcgtgggagtcccgcctcagaatccaagaccaagcctgaactccgctccatctcctttcaatcctcagggccagagccaaattaccgatcctcgccaagctcaaagcagcccaccttggtcctacgaccaaagctacccgagctatctgagtcagatgacttctccctccatccactccacaacccccctctcttcaacccggggcacaggcctaccagccattacagacgtgcctaggagaatcagcgatgacgatacggctacatccgacttctgtctgtggccctccacactgtcgaagaaatctcaggcgggagctagtgaactgggccctttttctgacccgcggcagtttccctccatttctagcctgactgagagcagattttcaaatcctcgaatgcactatcctgcaacatttacttatacccctcctgtcactagcggcatgagtctgggtatgagcgccacaacccattaccatacatacctgccacctccctatcctgggtcatcacagagccagtctggaccgttccagacatcttccacgccgtacctgtactacggtacgtccagcggatcttatcagtttcctatggtgcctggaggagaccgctctccctcaaggatgctgcccccttgcacaactacttctaatgggtcgactctgcttaacccgaacctgccgaaccagaatgatggggtcgacgctgatggatctcactcgagctcccctaccgtgttaaactcctccgggagaatggacgaaagcgtgtggcggccttactag

SEQ ID NO: 305529 - DNA, 1770 bp, Artificial Sequence
  derived and/or modified sequence
atgctgcacagcccccacaagcagccccagaaccacaagtgtggggccaacttcctgcaggaggacagcaagaagagcctggtgttcaagtggctgatctctgctggccactaccagcccccccggcccacagagagcttcaaggccgccagcagcatctacaacagaggctacaagttctacctgaagaagaagggcggcaccatggccagcaacagcctcttcagcacagtgaccccctgccagcagaacttcttctgggaccccagcaccagccgccgcttcagcccccccagcagcagcctgcagcccgggaagatgtctgatgtgtcccctgtggtggccgcccagcagcagcagcagcagcagcagcagcagcagcagcagcagcagcagcagcagcagcagcagcagcaggaggccgctgctgctgctgctgctgctgctgctgctgctgctgctgctgctgctgtgccccggctgcggccccctcatgacaacagaaccatggtggagatcatcgctgaccaccctgctgagctggtgaggacagacagccccaacttcctgtgcagcgtgctgcccagccactggcgctgcaacaagaccctgcctgtggccttcaaggtggtggccctgggggaggtgcctgatggcaccgtggtgacagtgatggctggaaatgatgagaactacagcgctgagctgagaaatgccagcgctgtgatgaagaaccaggtggcccgcttcaatgacctgcgctttgtgggccgcagcggccggggcaagagcttcaccctgaccatcaccgtcttcaccaaccccccccaggtggccacctaccaccgggccatcaaggtgacagtggatggcccccgggagccccggcggcaccggcagaagctggatgacagcaagcccagcctcttcagtgaccggctgagtgacctgggccgcatcccccaccccagcatgagggtgggcgtgcccccccagaacccccggcccagcctgaacagcgcccccagccccttcaacccccagggccagagccagatcacagacccccggcaggcccagagcagccccccctggagctatgaccagagctaccccagctacctgagccagatgaccagccccagcatccacagcaccacccccctgagcagcacccggggcaccggcctgcctgccatcacagatgtgccccggcgcatcagtgatgatgacacagccaccagtgacttctgcctgtggcccagcaccctgagcaagaagagccaggccggggccagcgagctgggccccttcagtgacccccggcagttccccagcatcagcagcctgacagagagccgcttcagcaaccccaggatgcactacccagccaccttcacctacaccccacctgtgaccagcggcatgagcctgggcatgtctgccaccacccactaccacacctacctgcccccaccctacccaggcagcagccagagccagagcggccccttccagaccagcagcaccccctacctgtactacggcaccagcagcggcagctaccagttccccatggtgcctggaggagacaggagccccagcaggatgctgcccccctgcaccaccaccagcaatggcagcaccctgctgaaccccaacctgcccaaccagaatgatggagtggatgctgatggcagccacagcagcagccccaccgtgctgaacagcagcggccgcatggatgagagcgtgtggaggccctactag

SEQ ID NO: 305530 - DNA, 1770 bp, Artificial Sequence
  derived and/or modified sequence
atgctgcacagcccccacaagcagccccagaaccacaagtgcggcgccaactttctacaggaagatagtaagaagagtctcgtgtttaagtggctgatctcagctggccattaccagcctccccggcccacagaatcgttcaaggccgcaagtagtatctataacagaggctataaattctacctgaaaaagaagggagggacgatggcaagtaactctctgttctccaccgtcactccctgccagcagaatttcttctgggacccaagtacatccaggcggttcagcccaccctcaagtagtctgcagcccggtaagatgagtgacgtgtcccccgtggttgctgcgcagcagcagcagcagcagcagcagcagcagcaacagcagcaacagcagcagcagcagcagcagcagcaggaagctgccgccgcggccgcagctgccgcagctgccgccgccgcagctgctgcagtacccagactcaggccgccgcatgacaatcggactatggtcgagatcattgctgatcacccagctgagttggtccggactgacagtcccaacttcctgtgctccgtgctgccttctcattggcgctgtaacaaaacccttcctgtggcatttaaagttgtagccctgggcgaagtgcctgatgggacggtggtaactgtgatggccggcaacgatgaaaattactctgcagagttgcgaaacgccagcgcagtgatgaaaaatcaggtagccaggttcaacgacctaagattcgtgggccgaagcggccgcggtaaaagctttactctgactattaccgtgttcaccaaccctcctcaggtcgccacataccatcgggcgatcaaggtcactgtagatggccctcgagagccaaggaggcatcgacagaagctggatgattctaaaccttccttgttcagcgaccgactaagcgatcttggcagaatcccacatccctccatgcgagtgggtgtccccccacagaatccacggccaagcctgaactctgcaccgtcccctttcaacccccagggccagtctcagataacagatccacgacaagcccagagctcccctccgtggtcctacgaccagtcttacccctcctatctgtctcagatgacttcaccatctatacactcaactactccactatcaagcacgcgtgggacaggtctacccgccatcaccgacgtgcctcgccgaattagcgacgatgatacagcaactagcgacttttgtctgtggccttccacgttgtccaaaaaatctcaggcaggcgctagcgagctgggaccattcagtgatccaaggcagttccccagcatcagcagcctcactgaatcaagattttctaacccacgaatgcactatccagcgacgtttacctatacaccaccggtgacttccgggatgagtttaggcatgtctgcgaccacacactaccatacttacttacccccaccttacccagggagctctcagtcccagtccggcccttttcaaacatctagtaccccctatctatattatggcacaagtagcggttcctaccagttcccgatggtgccaggtggcgaccggtcccccagccgaatgttacctccctgcacgaccacgagtaacggttctaccctgctcaacccaaatctgcccaatcagaacgacggagtggacgcagatggttctcatagctctagccctacggtattaaactcatcgggaaggatggatgaatcagtttggcggccgtactag

SEQ ID NO: 305531 - DNA, 1770 bp, Artificial Sequence
  derived and/or modified sequence
atgctgcactccccccacaagcaaccacagaatcacaagtgtggagccaactttctgcaggaggatagcaaaaagagtcttgtctttaagtggctcatctcagctgggcactaccagccccctaggcctacagagagtttcaaggccgcatcctctatctacaatagaggttataagttctatttgaaaaaaaagggtggcactatggcatccaattcgctgttttcgactgttaccccatgtcagcagaattttttttgggatcccagcacaagccggcgatttagtccgccatcttccagtttgcagcccggtaagatgtcggatgtgagtccggtggtagctgcccagcagcaacagcagcagcaacaacagcaacagcagcagcaacagcagcagcaacagcagcagcagcaggaggctgccgcagccgctgccgcagctgcggctgctgccgctgccgctgccgctgtccctcgcctacgtccaccccatgacaaccgcaccatggtcgaaatcattgccgaccaccctgctgaactagttcgcacagattcgcccaatttcctctgctccgtgctaccaagccattggagatgtaataaaacacttccagttgccttcaaagttgtcgccctgggcgaagtgcctgacggtacagtggtcactgtgatggccggaaatgacgaaaattactcagcagaactgcggaacgctagcgcagttatgaaaaatcaggtcgctagatttaatgatttgagattcgtggggaggtcaggtaggggtaagagttttactttgacaatcaccgtgtttaccaacccccctcaggtagcaacgtatcacagagcaatcaaggtgactgtggacgggcctagggagccccgtcggcataggcagaaactggatgattccaagccatcactgtttagtgatcgcttgtcggatctgggacggatcccgcacccctccatgcgcgtcggcgtcccaccacagaatccacggccaagccttaacagcgccccttctccatttaatccccagggccagtcccaaatcaccgatccacggcaggctcaatcaagccctccctggtcctatgaccagtcttacccatcctatttgtctcagatgacctcgccttctatacactctaccacacccctatcaagcaccaggggaacaggccttcctgcaattacagacgtacccaggcgcatcagcgacgatgatacggccacatccgatttctgtctatggccgtccacgctgagcaagaagagccaggccggagctagcgaactgggccctttcagcgaccccagacaattcccctccatctccagcctgaccgagagcagattttctaaccccagaatgcattaccccgcaacatttacctatacccctcccgtcacctcgggcatgagcctcggaatgtctgcaacaactcactaccacacctacctgccgccaccctaccctggatcctcacaaagtcagtcaggaccatttcaaacaagctccaccccgtatctctattatggaacctcgagcggtagttatcagtttccgatggttcctgggggagaccgctctccatctcgcatgctgcccccatgtacaaccacatcaaatggcagcactcttctgaatcccaaccttcccaatcaaaacgacggcgtagacgctgacggctcccattcatctagtcctaccgtactaaattcctccggcaggatggacgagagcgtatggcgcccttactag

SEQ ID NO: 305532 - DNA, 1770 bp, Artificial Sequence
  derived and/or modified sequence
atgcttcattcgcctcacaaacaaccacagaaccacaagtgcggtgcaaactttctccaggaggacagcaagaagtctctggtttttaaatggttaatctccgcaggtcactaccagccaccgagaccaacagagtcatttaaggctgcaagcagtatttacaacagagggtacaagttctatctgaaaaaaaaaggagggactatggcatcaaacagcctcttcagcacagtgacaccatgtcagcaaaacttcttttgggatccgagcaccagccggcgcttcagccccccctccagcagcctgcagcccggcaaaatgagcgacgtgagcccggtggtggctgcgcaacagcagcagcaacagcagcagcagcaacagcagcagcagcagcagcaacagcagcagcagcagcaggaggcggcggcggcggctgcggcggcggcggcggctgcggcggcggcagctgcagtgccccggttgcggccgccccacgacaaccgcaccatggtggagatcatcgccgaccacccggccgaactcgtccgcaccgacagccccaacttcctgtgctcggtgctgccctcgcactggcgctgcaacaagaccctgcccgtggccttcaaggtggtagccctcggagaggtaccagatgggactgtggttactgtcatggcgggtaacgatgaaaattattctgctgagctccggaatgcctctgctgttatgaaaaaccaagtagcaaggttcaacgatctgagatttgtgggccggagtggacgaggcaagagtttcaccttgaccataaccgtcttcacaaatcctccccaagtagctacctatcacagagcaattaaagttacagtagatggacctcgggaacccagaaggcacagacagaagcttgatgactctaaacctagtttgttctctgaccgcctcagtgatttagggcgcattcctcatcccagtatgagagtaggtgtcccgcctcagaacccacggccctccctgaactctgcaccaagtccttttaatccacaaggacagagtcagattacagaccccaggcaggcacagtcttccccgccgtggtcctatgaccagtcttacccctcctacctgagccagatgacgtccccgtccatccactctaccaccccgctgtcttccacacggggcactgggcttcctgccatcaccgatgtgcctaggcgcatttcagatgatgacactgccacctctgacttctgcctctggccttccactctcagtaagaagagccaggcaggtgcttcagaactgggccctttttcagaccccaggcagttcccaagcatttcatccctcactgagagccgcttctccaacccacgaatgcactatccagccacctttacttacaccccgccagtcacctcaggcatgtccctcggtatgtccgccaccactcactaccacacctacctgccaccaccctaccccggctcttcccaaagccagagtggacccttccagaccagcagcactccatatctctactatggcacttcgtcaggatcctatcagtttcccatggtgccggggggagaccggtctccttccagaatgcttccgccatgcaccaccacctcgaatggcagcacgctattaaatccaaatttgcctaaccagaatgatggtgttgacgctgatggaagccacagcagttccccaactgttttgaattctagtggcagaatggatgaatctgtttggcgaccatattga

SEQ ID NO: 305533 - DNA, 5698 bp, Artificial Sequence
  derived and/or modified sequence
caaactttctccaggaggacagcaagaagtctctggtttttaaatggttaatctccgcaggtcactaccagccaccgagaccaacagagtcagtgagtgctctctaaccacagtctatgcagtaatagtaggtccttcaaatatttgctcattctctttttgttttgtttctttgcttttcacatgttaccagctacataatttcttgacagaaaaaaataaatataaagtctatgtactccaggcatactgtaaaactaaaacaaggtttgggtatggtttgtattttcagtttaaggctgcaagcagtatttacaacagagggtacaagttctatctgaaaaaaaaaggagggactatggcatcaaacagcctcttcagcacagtgacaccatgtcagcaaaacttcttttgggatccgagcaccagccggcgcttcagccccccctccagcagcctgcagcccggcaaaatgagcgacgtgagcccggtggtggctgcgcaacagcagcagcaacagcagcagcagcaacagcagcagcagcagcagcaacagcagcagcagcagcaggaggcggcggcggcggctgcggcggcggcggcggctgcggcggcggcagctgcagtgccccggttgcggccgccccacgacaaccgcaccatggtggagatcatcgccgaccacccggccgaactcgtccgcaccgacagccccaacttcctgtgctcggtgctgccctcgcactggcgctgcaacaagaccctgcccgtggccttcaaggtggtagccctcggagaggtaccagatgggactgtggttactgtcatggcgggtaacgatgaaaattattctgctgagctccggaatgcctctgctgttatgaaaaaccaagtagcaaggttcaacgatctgagatttgtgggccggagtggacgaggcaagagtttcaccttgaccataaccgtcttcacaaatcctccccaagtagctacctatcacagagcaattaaagttacagtagatggacctcgggaacccagaaggcacagacagaagcttgatgactctaaacctagtttgttctctgaccgcctcagtgatttagggcgcattcctcatcccagtatgagagtaggtgtcccgcctcagaacccacggccctccctgaactctgcaccaagtccttttaatccacaaggacagagtcagattacagaccccaggcaggcacagtcttccccgccgtggtcctatgaccagtcttacccctcctacctgagccagatgacgtccccgtccatccactctaccaccccgctgtcttccacacggggcactgggcttcctgccatcaccgatgtgcctaggcgcatttcagatgatgacactgccacctctgacttctgcctctggccttccactctcagtaagaagagccaggcaggtgcttcagaactgggccctttttcagaccccaggcagttcccaagcatttcatccctcactgagagccgcttctccaacccacgaatgcactatccagccacctttacttacaccccgccagtcacctcaggcatgtccctcggtatgtccgccaccactcactaccacacctacctgccaccaccctaccccggctcttcccaaagccagagtggacccttccagaccagcagcactccatatctctactatggcacttcgtcaggatcctatcagtttcccatggtgccggggggagaccggtctccttccagaatgcttccgccatgcaccaccacctcgaatggcagcacgctattaaatccaaatttgcctaaccagaatgatggtgttgacgctgatggaagccacagcagttccccaactgttttgaattctagtggcagaatggatgaatctgtttggcgaccatattgaaattcctcagcagtggcccagtggtatctgggggccacatcccacacgtatcaatatatacatatatagagagagtgcatatatatgtatatcgattagctatctacaaagtgcctattttttagaagatttttcattcactcactcagtcatgatcttgcagccataagagggtagatattgagaagcagaaggctcaagagagacaattgcaatcgagcttcagattgtttactatttaagatgtacttttacaaaggaacaaagaagggaaaaggtatttttgtttttgttgtttggtctgttatcatcaataacctgttcatatgccaattcagagaggtggactccaggttcaggagggagaagagcaaagccgcttcctctctgtgctttgaaacttcacaccctcacggtggcagctgtgtatggaccagtgccctccgcagacagctcacaaaaccagttgaggtgcactaaagggacatgaggtagaatggatgcttccatcacagtaccatcattcagaataactcttccaatttctgctttcagacatgctgcaggtcctcatctgaactgttgggttcgtttttttttttttttttcctgctccaagaaagtgacttcaaaaataactgatcaggatagattattttattttactttttaacactccttctccccttttcccactgaaccaaaaagaaatcccatccctaaaacctgccttctccttttatgcaaaactgaaaatggcaatacattattatagccataatggtatagatagtgattgcgtttggctatgtgttgttttctttttttttaaattatgaatatgtgtaaaatctgaggtaacttgctaacgtgaatggtcatataactttaaagatatatttataattatttaatgacatttggacccttgaaacatttcttagtgtattgatatgttgacttcggtctctaaaagtgctctttattaaataacaaatttcttcagtggtctagagccatatctgaaatattgctaagcaatttcagttcatccaggcacaatgtgattttaaaaaatacttccatctccaaatattttagatatagattgtttttgtgatgtatgaaggaaatgttatgtttagttctttcagatctttgaatgcctctaacacagctttgccttctaaagcggtaattagggatttaaaaaacaacctttagccctttatcagcatgaaatgctggagtgatgtggttttctaatttctttggggtaattatgactcttgtcatattaaaaagacaagcacaagtaaatcattgaactacagaaaaatgttctgtggtttcatagttaagcaaaactctaaatcgccaggcttcatagcaaagacatagtcagctaaaagccgcacatgtggatagagggttcaattatgagacacctagtacaggagagcaaaattgcaccagagattcttaaccaaccagccttaccaaacaacacaacaggggaaccccaatctgccttacccaaggccccactggcagctttccacagaatttgcatttagaggagcagaatgacatcactgtcctttgggagtaggtcctctgaaaaggcagcaggttccagcaggtagctgagctgagaggacatatggcccacggggacctacagacagcctttgacatttgtatttcttacaatggagggccaaggagggcaaggggctgtggagtttggtgtctactagtgtgtatgaatttgagctagagtccttctgtggcatgcactttgaccactcctggcagtcacatggcagatttccaagtgcaaatccttaatccaaacaaggatcatctaatgacaccaccaggccaatccctgctctcctccccgaaaagtcagggtcccttcattggaatcctccacccacccaagcagaatttagcagagatttgccttcaaaccctaacggcccccttgttctctggtccttctcaaacccacctttgtaggccacccagcattgcaggacagcgtgtggggcagctggacctgtgcttcctgcctgggagtctcccttggaattcatcctgactccttctaataaaaatggatgggaaagcaaaacactttgccttctaaaggccgtataccaagtatgcttagataaataagccacttttctattacttaagtaagaaggaagtagtaattgatactatttattgtttgtgtgtggtagcttgaagcacaccactgtccatttatttgtaagtgtaaaatatgtgtgtttgtttcagcagcacttaaaaaagccagtgtctggttacacatttcaattttaattaattgacataaaaatgctaccgccagtgccagctgcatcctatttaattaaaaaggtactatatttgtacattattttttaatgttaaaagggcttttttaagtttacagtacacataccgagtgactttagggatgcttttgtgttgaaatgttactatagtggctgcaggcagcaacccagaaacactttagaagctttttttccttgggaaaaattcaagcacttcttccctccaccctcactccaaccaccccaatgggggtaattcacatttcttagaacaaattctgcccttttttggtctagggattaaaattttgtttttctttctttctttttttttttttttcactgaacccttaatttgcactgggtcatgtgtttgatttgtgatttcaagaccaaagcaaagtcttactactactgtggaaccatgtactagttcctgggaattaaaatagcgtggttctctttgtagcacaaacattgctggaatttgcagtcttttcaatgcagccacatttttatccatttcagttgtctcacaaattttaacccatatcagagttccagaacaggtaccacagctttggttttagattagtggaataacattcagcccagaactgagaaactcaacagattaactatcgtttgctctttagacggtctcactgcctctcacttgccagagccctttcaaaatgagcagagaagtccacaccattagggaccatctgtgataaattcagaagggaggagatgtgtgtacagctttaaggattccctcaattccgaggaaagggactggcccagaatccaggttaatacatggaaacacgaagcattagcaaaagtaataattatacctatggtatttgaaagaacaataataaaagacacttcttccaaaccttgaatttgttgtttttagaaaacgaatgcatttaaaaatattttctatgtgagaattttttagatgtgtgtttacttcatgtttacaaataactgtttgctttttaatgcagtactttgaaatatatcagccaaaaccataacttacaataatttcttaggtattctgaataaaattccatttcttttggatatgctttaccattcttaggtttctgtggaacaaaaatatttgtagcattttgtgtaaatacaagctttcatttttattttttccaattgctattgcccaagaattgctttccatgcacatattgtaaaaattccgctttgtgccacaggtcatgattgtggatgagtttactcttaacttcaaagggactatttgtattgtatgttgcaactgtaaattgaattatttggcatttttctcatgattgtaatattaatttgaagtttgaatttaattttcaataaaatggcttttttggttttg

SEQ ID NO: 305534 - DNA, 5544 bp, Artificial Sequence
  derived and/or modified sequence
atgcttcattcgcctcacaaacaaccacagaaccacaagtgcggtgcaaactttctccaggaggacagcaagaagtctctggtttttaaatggttaatctccgcaggtcactaccagccaccgagaccaacagagtcatttaaggctgcaagcagtatttacaacagagggtacaagttctatctgaaaaaaaaaggagggactatggcatcaaacagcctcttcagcacagtgacaccatgtcagcaaaacttcttttgggatccgagcaccagccggcgcttcagccccccctccagcagcctgcagcccggcaaaatgagcgacgtgagcccggtggtggctgcgcaacagcagcagcaacagcagcagcagcaacagcagcagcagcagcagcaacagcagcagcagcagcaggaggcggcggcggcggctgcggcggcggcggcggctgcggcggcggcagctgcagtgccccggttgcggccgccccacgacaaccgcaccatggtggagatcatcgccgaccacccggccgaactcgtccgcaccgacagccccaacttcctgtgctcggtgctgccctcgcactggcgctgcaacaagaccctgcccgtggccttcaaggtggtagccctcggagaggtaccagatgggactgtggttactgtcatggcgggtaacgatgaaaattattctgctgagctccggaatgcctctgctgttatgaaaaaccaagtagcaaggttcaacgatctgagatttgtgggccggagtggacgaggcaagagtttcaccttgaccataaccgtcttcacaaatcctccccaagtagctacctatcacagagcaattaaagttacagtagatggacctcgggaacccagaaggcacagacagaagcttgatgactctaaacctagtttgttctctgaccgcctcagtgatttagggcgcattcctcatcccagtatgagagtaggtgtcccgcctcagaacccacggccctccctgaactctgcaccaagtccttttaatccacaaggacagagtcagattacagaccccaggcaggcacagtcttccccgccgtggtcctatgaccagtcttacccctcctacctgagccagatgacgtccccgtccatccactctaccaccccgctgtcttccacacggggcactgggcttcctgccatcaccgatgtgcctaggcgcatttcagatgatgacactgccacctctgacttctgcctctggccttccactctcagtaagaagagccaggcaggtgcttcagaactgggccctttttcagaccccaggcagttcccaagcatttcatccctcactgagagccgcttctccaacccacgaatgcactatccagccacctttacttacaccccgccagtcacctcaggcatgtccctcggtatgtccgccaccactcactaccacacctacctgccaccaccctaccccggctcttcccaaagccagagtggacccttccagaccagcagcactccatatctctactatggcacttcgtcaggatcctatcagtttcccatggtgccggggggagaccggtctccttccagaatgcttccgccatgcaccaccacctcgaatggcagcacgctattaaatccaaatttgcctaaccagaatgatggtgttgacgctgatggaagccacagcagttccccaactgttttgaattctagtggcagaatggatgaatctgtttggcgaccatattgaaattcctcagcagtggcccagtggtatctgggggccacatcccacacgtatcaatatatacatatatagagagagtgcatatatatgtatatcgattagctatctacaaagtgcctattttttagaagatttttcattcactcactcagtcatgatcttgcagccataagagggtagatattgagaagcagaaggctcaagagagacaattgcaatcgagcttcagattgtttactatttaagatgtacttttacaaaggaacaaagaagggaaaaggtatttttgtttttgttgtttggtctgttatcatcaataacctgttcatatgccaattcagagaggtggactccaggttcaggagggagaagagcaaagccgcttcctctctgtgctttgaaacttcacaccctcacggtggcagctgtgtatggaccagtgccctccgcagacagctcacaaaaccagttgaggtgcactaaagggacatgaggtagaatggatgcttccatcacagtaccatcattcagaataactcttccaatttctgctttcagacatgctgcaggtcctcatctgaactgttgggttcgtttttttttttttttttcctgctccaagaaagtgacttcaaaaataactgatcaggatagattattttattttactttttaacactccttctccccttttcccactgaaccaaaaagaaatcccatccctaaaacctgccttctccttttatgcaaaactgaaaatggcaatacattattatagccataatggtatagatagtgattgcgtttggctatgtgttgttttctttttttttaaattatgaatatgtgtaaaatctgaggtaacttgctaacgtgaatggtcatataactttaaagatatatttataattatttaatgacatttggacccttgaaacatttcttagtgtattgatatgttgacttcggtctctaaaagtgctctttattaaataacaaatttcttcagtggtctagagccatatctgaaatattgctaagcaatttcagttcatccaggcacaatgtgattttaaaaaatacttccatctccaaatattttagatatagattgtttttgtgatgtatgaaggaaatgttatgtttagttctttcagatctttgaatgcctctaacacagctttgccttctaaagcggtaattagggatttaaaaaacaacctttagccctttatcagcatgaaatgctggagtgatgtggttttctaatttctttggggtaattatgactcttgtcatattaaaaagacaagcacaagtaaatcattgaactacagaaaaatgttctgtggtttcatagttaagcaaaactctaaatcgccaggcttcatagcaaagacatagtcagctaaaagccgcacatgtggatagagggttcaattatgagacacctagtacaggagagcaaaattgcaccagagattcttaaccaaccagccttaccaaacaacacaacaggggaaccccaatctgccttacccaaggccccactggcagctttccacagaatttgcatttagaggagcagaatgacatcactgtcctttgggagtaggtcctctgaaaaggcagcaggttccagcaggtagctgagctgagaggacatatggcccacggggacctacagacagcctttgacatttgtatttcttacaatggagggccaaggagggcaaggggctgtggagtttggtgtctactagtgtgtatgaatttgagctagagtccttctgtggcatgcactttgaccactcctggcagtcacatggcagatttccaagtgcaaatccttaatccaaacaaggatcatctaatgacaccaccaggccaatccctgctctcctccccgaaaagtcagggtcccttcattggaatcctccacccacccaagcagaatttagcagagatttgccttcaaaccctaacggcccccttgttctctggtccttctcaaacccacctttgtaggccacccagcattgcaggacagcgtgtggggcagctggacctgtgcttcctgcctgggagtctcccttggaattcatcctgactccttctaataaaaatggatgggaaagcaaaacactttgccttctaaaggccgtataccaagtatgcttagataaataagccacttttctattacttaagtaagaaggaagtagtaattgatactatttattgtttgtgtgtggtagcttgaagcacaccactgtccatttatttgtaagtgtaaaatatgtgtgtttgtttcagcagcacttaaaaaagccagtgtctggttacacatttcaattttaattaattgacataaaaatgctaccgccagtgccagctgcatcctatttaattaaaaaggtactatatttgtacattattttttaatgttaaaagggcttttttaagtttacagtacacataccgagtgactttagggatgcttttgtgttgaaatgttactatagtggctgcaggcagcaacccagaaacactttagaagctttttttccttgggaaaaattcaagcacttcttccctccaccctcactccaaccaccccaatgggggtaattcacatttcttagaacaaattctgcccttttttggtctagggattaaaattttgtttttctttctttctttttttttttttttcactgaacccttaatttgcactgggtcatgtgtttgatttgtgatttcaagaccaaagcaaagtcttactactactgtggaaccatgtactagttcctgggaattaaaatagcgtggttctctttgtagcacaaacattgctggaatttgcagtcttttcaatgcagccacatttttatccatttcagttgtctcacaaattttaacccatatcagagttccagaacaggtaccacagctttggttttagattagtggaataacattcagcccagaactgagaaactcaacagattaactatcgtttgctctttagacggtctcactgcctctcacttgccagagccctttcaaaatgagcagagaagtccacaccattagggaccatctgtgataaattcagaagggaggagatgtgtgtacagctttaaggattccctcaattccgaggaaagggactggcccagaatccaggttaatacatggaaacacgaagcattagcaaaagtaataattatacctatggtatttgaaagaacaataataaaagacacttcttccaaaccttgaatttgttgtttttagaaaacgaatgcatttaaaaatattttctatgtgagaattttttagatgtgtgtttacttcatgtttacaaataactgtttgctttttaatgcagtactttgaaatatatcagccaaaaccataacttacaataatttcttaggtattctgaataaaattccatttcttttggatatgctttaccattcttaggtttctgtggaacaaaaatatttgtagcattttgtgtaaatacaagctttcatttttattttttccaattgctattgcccaagaattgctttccatgcacatattgtaaaaattccgctttgtgccacaggtcatgattgtggatgagtttactcttaacttcaaagggactatttgtattgtatgttgcaactgtaaattgaattatttggcatttttctcatgattgtaatattaatttgaagtttgaatttaattttcaataaaatggcttttttggttttg

SEQ ID NO: 305535 - protein, 567 aa, Artificial Sequence
  derived and/or modified sequence
MLHSPHKQPQNHKCGANFLQEDSKKSLVFKWLISAGHYQPPRPTESFKAASSIYNRGYKFYLKKKGGTMASNSLFSTVTPCQQNFFWDPSTSRRFSPPSSSLQPGKMSDVSPVVAAQQQQQQQQQQQQQQQQQQQQQQQEAAAAAAAAAAAAAAAAAVPRLRPPHDNRTMVEIIADHPAELVRTDSPNFLCSVLPSHWRCNKTLPVAFKVVALGEVPDGTVVTVMAGNDENYSAELRNASAVMKNQVARFNDLRFVGRSGRGKSFTLTITVFTNPPQVATYHRAIKVTVDGPREPRRHRQKLDDSKPSLFSDRLSDLGRIPHPSMRVGVPPQNPRPSLNSAPSPFNPQGQSQITDPRQAQSSPPWSYDQSYPSYLSQMTSPSIHSTTPLSSTRGTGLPAITDVPRRISGASELGPFSDPRQFPSISSLTESRFSNPRMHYPATFTYTPPVTSGMSLGMSATTHYHTYLPPPYPGSSQSQSGPFQTSSTPYLYYGTSSGSYQFPMVPGGDRSPSRMLPPCTTTSNGSTLLNPNLPNQNDGVDADGSHSSSPTVLNSSGRMDESVWRPY

SEQ ID NO: 305536 - DNA, 1704 bp, Artificial Sequence
  derived and/or modified sequence
atgctgcacagcccccacaagcagccccagaaccacaagtgcggcgccaacttcctgcaggaggacagcaagaagagcctggtgttcaagtggctgatcagcgccggccactaccagccccccagacccaccgagagcttcaaggccgccagcagcatctacaacagaggctacaagttctacctgaagaagaagggcggcaccatggccagcaacagcctgttcagcaccgtgaccccctgccagcagaacttcttctgggaccccagcaccagcagaagattcagcccccccagcagcagcctgcagcccggcaagatgagcgacgtgagccccgtggtggccgcccagcagcagcagcagcagcagcagcagcagcagcagcagcagcagcagcagcagcagcagcagcagcaggaggccgccgccgccgccgccgccgccgccgccgccgccgccgccgccgccgccgtgcccagactgagacccccccacgacaacagaaccatggtggagatcatcgccgaccaccccgccgagctggtgagaaccgacagccccaacttcctgtgcagcgtgctgcccagccactggagatgcaacaagaccctgcccgtggccttcaaggtggtggccctgggcgaggtgcccgacggcaccgtggtgaccgtgatggccggcaacgacgagaactacagcgccgagctgagaaacgccagcgccgtgatgaagaaccaggtggccagattcaacgacctgagattcgtgggcagaagcggcagaggcaagagcttcaccctgaccatcaccgtgttcaccaaccccccccaggtggccacctaccacagagccatcaaggtgaccgtggacggccccagagagcccagaagacacagacagaagctggacgacagcaagcccagcctgttcagcgacagactgagcgacctgggcagaatcccccaccccagcatgagagtgggcgtgcccccccagaaccccagacccagcctgaacagcgcccccagccccttcaacccccagggccagagccagatcaccgaccccagacaggcccagagcagccccccctggagctacgaccagagctaccccagctacctgagccagatgaccagccccagcatccacagcaccacccccctgagcagcaccagaggcaccggcctgcccgccatcaccgacgtgcccagaagaatcagcggcgccagcgagctgggccccttcagcgaccccagacagttccccagcatcagcagcctgaccgagagcagattcagcaaccccagaatgcactaccccgccaccttcacctacaccccccccgtgaccagcggcatgagcctgggcatgagcgccaccacccactaccacacctacctgccccccccctaccccggcagcagccagagccagagcggccccttccagaccagcagcaccccctacctgtactacggcaccagcagcggcagctaccagttccccatggtgcccggcggcgacagaagccccagcagaatgctgcccccctgcaccaccaccagcaacggcagcaccctgctgaaccccaacctgcccaaccagaacgacggcgtggacgccgacggcagccacagcagcagccccaccgtgctgaacagcagcggcagaatggacgagagcgtgtggagaccctactag

SEQ ID NO: 305537 - DNA, 1704 bp, Artificial Sequence
  derived and/or modified sequence
atgctccattccccccacaagcagccccagaaccataagtgtggcgcaaatttcctccaagaggattcaaaaaagagcttagtgtttaagtggctgatttccgcaggacattatcaacccccacgacccacagaatcctttaaggctgcatctagcatttataataggggatataaattctacctgaagaagaagggaggaactatggcctcaaactcactgttcagtacagtaacgccctgtcaacaaaactttttctgggatccaagtactagcaggcgcttcagcccaccttcttcctccttgcagccaggtaagatgtcagatgtctcccccgtggtggctgctcagcaacagcaacagcagcagcagcagcagcaacagcagcagcagcagcagcagcaacagcagcagcaggaggccgccgcagctgccgccgccgcagccgccgccgccgctgctgccgcagctgtgccccggctgaggcccccacacgacaatagaacaatggtggagataatcgccgatcacccagcagagctggtaagaacagactctccgaacttcctgtgctccgtcttgccctcccactggaggtgtaacaaaactctacctgtcgctttcaaagtcgtagctttgggcgaggtgcccgatggcacagtggtgactgtgatggctggaaacgatgagaattacagtgccgagttgaggaatgccagcgccgtgatgaagaatcaggtggcacggttcaacgatcttcggtttgtgggccggagcggaagaggaaagtcatttaccctgaccatcacagtgttcacaaatcctcctcaagtggccacctaccatcgagccataaaggtgaccgtggatggcccgcgcgaaccacggagacacaggcaaaagcttgacgacagtaaaccttcgctgttttcagacagactgtcagatcttgggaggatccctcacccctcaatgcgcgtgggagtccccccccagaatcctcgtccctccctgaactctgctcctagtccgtttaatccgcaagggcagagccagataacagatcctcgccaggcacagtcctctccgccttggagttatgaccagtcttaccccagttatttatcgcagatgacgtctccctccattcacagtacaacaccactctctagtacgaggggaacagggctgcctgccatcactgacgtgcccaggagaattagcggagcgtctgagctcggaccattcagcgacccaagacaatttcccagcataagttctcttaccgaaagccgcttttctaacccacgtatgcactatcccgccacttttacctacacacctcccgtcactagcggcatgagcctcggcatgtcggccaccacacactaccacacctatttgcctcccccctaccctggcagtagccagtcacagtcaggcccctttcaaacttcttccaccccctacctctactatgggacaagctccggctcttatcagttccccatggtcccaggcggagataggtcacccagccgtatgttgcctccctgcacgaccacgtcaaacggcagcaccttgctgaacccaaatttgccaaatcaaaacgacggcgttgacgcggatggatcacacagctcctcccccactgttctgaacagctccgggcgtatggacgagagtgtgtggcggccctactag

SEQ ID NO: 305538 - DNA, 1704 bp, Artificial Sequence
  derived and/or modified sequence
atgctgcacagcccccacaagcagccccagaaccacaagtgtggggccaacttcctgcaggaggacagcaagaagagcctggtgttcaagtggctgatctctgctggccactaccagcccccccggcccacagagagcttcaaggccgccagcagcatctacaacagaggctacaagttctacctgaagaagaagggcggcaccatggccagcaacagcctcttcagcacagtgaccccctgccagcagaacttcttctgggaccccagcaccagccgccgcttcagcccccccagcagcagcctgcagcccgggaagatgtctgatgtgtcccctgtggtggccgcccagcagcagcagcagcagcagcagcagcagcagcagcagcagcagcagcagcagcagcagcagcagcaggaggccgctgctgctgctgctgctgctgctgctgctgctgctgctgctgctgctgtgccccggctgcggccccctcatgacaacagaaccatggtggagatcatcgctgaccaccctgctgagctggtgaggacagacagccccaacttcctgtgcagcgtgctgcccagccactggcgctgcaacaagaccctgcctgtggccttcaaggtggtggccctgggggaggtgcctgatggcaccgtggtgacagtgatggctggaaatgatgagaactacagcgctgagctgagaaatgccagcgctgtgatgaagaaccaggtggcccgcttcaatgacctgcgctttgtgggccgcagcggccggggcaagagcttcaccctgaccatcaccgtcttcaccaaccccccccaggtggccacctaccaccgggccatcaaggtgacagtggatggcccccgggagccccggcggcaccggcagaagctggatgacagcaagcccagcctcttcagtgaccggctgagtgacctgggccgcatcccccaccccagcatgagggtgggcgtgcccccccagaacccccggcccagcctgaacagcgcccccagccccttcaacccccagggccagagccagatcacagacccccggcaggcccagagcagccccccctggagctatgaccagagctaccccagctacctgagccagatgaccagccccagcatccacagcaccacccccctgagcagcacccggggcaccggcctgcctgccatcacagatgtgccccggcgcatcagcggggccagcgagctgggccccttcagtgacccccggcagttccccagcatcagcagcctgacagagagccgcttcagcaaccccaggatgcactacccagccaccttcacctacaccccacctgtgaccagcggcatgagcctgggcatgtctgccaccacccactaccacacctacctgcccccaccctacccaggcagcagccagagccagagcggccccttccagaccagcagcaccccctacctgtactacggcaccagcagcggcagctaccagttccccatggtgcctggaggagacaggagccccagcaggatgctgcccccctgcaccaccaccagcaatggcagcaccctgctgaaccccaacctgcccaaccagaatgatggagtggatgctgatggcagccacagcagcagccccaccgtgctgaacagcagcggccgcatggatgagagcgtgtggaggccctactag

SEQ ID NO: 305539 - DNA, 1704 bp, Artificial Sequence
  derived and/or modified sequence
atgctgcacagcccccacaagcagccccagaaccacaagtgcggcgcaaacttcctccaggaggactccaaaaagagcctggtctttaagtggcttatttccgccggccattatcagcctccacgccctacagagagttttaaggctgcgtcctctatatataacagggggtataagttttacctcaaaaagaagggcggaacaatggcctcaaactcgctgttttcgaccgtgaccccatgtcagcagaattttttctgggatccttccacctctaggagatttagcccccctagcagctcattgcaacctggaaagatgtcggatgtgtcccctgtggtagccgcgcagcaacagcagcagcagcagcagcagcagcagcagcagcaacagcagcaacaacagcaacagcaacaggaagccgccgctgccgctgcggccgccgctgcggcagccgccgcggccgctgcggtccccaggctccgcccccctcatgataacagaacaatggtagagattatcgcggatcaccctgctgaactagtcagaaccgattctccgaatttcttatgctctgttctccctagccattggcgttgtaacaaaaccctgcctgtggcatttaaggtcgtagctctgggcgaggttccagacggtacggtcgttactgtaatggctggtaatgacgagaactacagtgcggaactgcggaacgcatctgccgtgatgaagaaccaggtagctcgcttcaacgacctccgattcgtcggtcgtagcggacgtgggaagagtttcacacttacaatcaccgtatttaccaaccctcctcaggtcgcaacctaccacagggccatcaaagtcaccgtggacggcccgagagaaccacgtcgtcaccgtcagaaacttgatgatagtaagcccagcctgttctctgatcggcttagcgacctgggcaggatccctcatccctcaatgcgggttggagtgcccccccagaacccacgacctagcctaaacagcgcgccttctccattcaaccctcaaggccagtcgcagatcactgatccgaggcaggcacagagtagcccaccctggtcatatgatcagtcgtatccgtcatatctttcccaaatgacatccccctccatccactcaaccacgccgctgagctccaccaggggtaccgggctgcctgcaattaccgacgtcccccgtcggatcagcggagcctcagaactgggaccattcagcgatcctcgacagttcccgagcattagctctttaactgagtcacgcttctcaaaccctcgcatgcactatccagcaaccttcacttacacaccgccagtgacgtcgggtatgtccctcggtatgagtgctacaacacactatcatacctacctgccccctccttacccggggtccagccaaagccagagtgggccattccagacgtcaagtactccttacctgtattacggaacatcaagtggatcctaccagttcccgatggtgcccgggggcgacaggtcgccgagtagaatgctgcccccatgtacaacgacaagtaatggtagtaccttgctgaaccccaacctccccaatcagaatgatggtgtggatgcagatgggtctcactcctcatcaccaaccgtgctaaactcgtcggggcggatggacgaatcagtgtggaggccctactag

SEQ ID NO: 305540 - DNA, 1704 bp, Artificial Sequence
  derived and/or modified sequence
atgttgcatagcccccacaagcaaccccagaatcacaagtgtggcgctaattttttacaagaagacagcaagaaatcccttgtgtttaaatggctcatctcagcaggacactatcagccccctcggcctactgagtcctttaaggccgcttcctcaatatataaccggggttataaattctacctcaaaaagaaggggggaaccatggcttccaacagcctgttctctactgtcactccttgccagcagaactttttttgggatccatcaacctctaggcgtttcagcccaccaagcagcagtctccaacccggaaagatgtctgatgtgtctcctgtggtggccgctcaacaacagcaacagcagcagcagcaacaacaacaacaacagcaacagcaacagcagcagcagcaacaggaagcagccgctgctgctgctgctgcagctgctgccgctgccgctgcggcagccgtgcctcgcctgcgacccccacacgataaccgcactatggtggagattattgcagatcatcctgccgaactggtgcgtactgattcacccaatttcttatgttccgtgctcccttctcactggaggtgcaacaagaccctgccggtcgcatttaaggtggtggcattaggcgaggtaccagatgggacagtcgtgaccgtgatggcgggtaacgatgagaattacagtgcagagttgcggaacgctagtgccgtcatgaaaaaccaggtggcccgattcaacgacctgagatttgtcggtcgatccggcagggggaagagttttaccctgacaatcacggtatttacaaacccgcctcaggtcgctacttatcacagagccattaaagtaacggtggacggccctcgcgaaccaaggcgccatagacagaaactcgacgactctaaaccaagcctgttctccgacaggctgtccgatctcggccgaatcccacacccaagtatgagggttggtgtccccccacaaaacccacggcctagtctgaacagcgccccatccccctttaacccgcagggtcagtctcagattaccgacccgcgtcaggcccagagcagccctccttggtcgtatgatcagtcctaccccagctacctctcccagatgacctctccttctatacactcaaccacccccctaagctctacgcggggtaccggactgcctgcaattacggatgttcccaggagaatttctggggcaagtgagttggggccattctcggatccaagacagtttccgagcatctcctcacttacagaaagtcgcttttccaaccctaggatgcactacccggcaacttttacctacaccccgcctgtcacctcgggcatgtctctgggaatgtcggcaacaacacactatcatacctacctgccccctccgtatcccggatccagccaaagccagtccgggccttttcagactagcagtaccccctacctctactatggcacatcctctggaagctatcagttccctatggtgcctggtggtgaccgctccccctccagaatgcttccgccttgcaccactacatcaaatggttctactctgctgaatcccaaccttcccaatcaaaatgacggcgtggacgccgacggctctcacagttcatcccctacggtactcaattcttccgggaggatggacgagagtgtctggcgtccatattag

SEQ ID NO: 305541 - DNA, 1704 bp, Artificial Sequence
  derived and/or modified sequence
atgcttcattcgcctcacaaacaaccacagaaccacaagtgcggtgcaaactttctccaggaggacagcaagaagtctctggtttttaaatggttaatctccgcaggtcactaccagccaccgagaccaacagagtcatttaaggctgcaagcagtatttacaacagagggtacaagttctatctgaaaaaaaaaggagggactatggcatcaaacagcctcttcagcacagtgacaccatgtcagcaaaacttcttttgggatccgagcaccagccggcgcttcagccccccctccagcagcctgcagcccggcaaaatgagcgacgtgagcccggtggtggctgcgcaacagcagcagcaacagcagcagcagcaacagcagcagcagcagcagcaacagcagcagcagcagcaggaggcggcggcggcggctgcggcggcggcggcggctgcggcggcggcagctgcagtgccccggttgcggccgccccacgacaaccgcaccatggtggagatcatcgccgaccacccggccgaactcgtccgcaccgacagccccaacttcctgtgctcggtgctgccctcgcactggcgctgcaacaagaccctgcccgtggccttcaaggtggtagccctcggagaggtaccagatgggactgtggttactgtcatggcgggtaacgatgaaaattattctgctgagctccggaatgcctctgctgttatgaaaaaccaagtagcaaggttcaacgatctgagatttgtgggccggagtggacgaggcaagagtttcaccttgaccataaccgtcttcacaaatcctccccaagtagctacctatcacagagcaattaaagttacagtagatggacctcgggaacccagaaggcacagacagaagcttgatgactctaaacctagtttgttctctgaccgcctcagtgatttagggcgcattcctcatcccagtatgagagtaggtgtcccgcctcagaacccacggccctccctgaactctgcaccaagtccttttaatccacaaggacagagtcagattacagaccccaggcaggcacagtcttccccgccgtggtcctatgaccagtcttacccctcctacctgagccagatgacgtccccgtccatccactctaccaccccgctgtcttccacacggggcactgggcttcctgccatcaccgatgtgcctaggcgcatttcaggtgcttcagaactgggccctttttcagaccccaggcagttcccaagcatttcatccctcactgagagccgcttctccaacccacgaatgcactatccagccacctttacttacaccccgccagtcacctcaggcatgtccctcggtatgtccgccaccactcactaccacacctacctgccaccaccctaccccggctcttcccaaagccagagtggacccttccagaccagcagcactccatatctctactatggcacttcgtcaggatcctatcagtttcccatggtgccggggggagaccggtctccttccagaatgcttccgccatgcaccaccacctcgaatggcagcacgctattaaatccaaatttgcctaaccagaatgatggtgttgacgctgatggaagccacagcagttccccaactgttttgaattctagtggcagaatggatgaatctgtttggcgaccatattga

SEQ ID NO: 305542 - DNA, 558 bp, Artificial Sequence
  derived and/or modified sequence
atgcacggcctgtgcatggtgcccagcccccacggccaccccggcatctccggtacctgctgcgccccaggccaggcacccgatcgccatcccctcagcctgtgcgccccaacccctggccgcaagcgtcagcaccacctcgtggcctggcagccctgtccagccccttcttgtctgtggcctcattggactcagcccccttcacgggaagcctttggctgccgggctggggcgggaagggctcaccctgtagccgggggcacgcaggaaccatggctccacctctgttctagacgaacatgtgggcagctgacactgcagcaggggagtggtcctaagtctctgacacatagagtccttagccctgatcgagcagtcgacagctttccattccacccaggtacatgctggcaggaactgcccgggcctcatcctggcgcggccaccccagccccgccggccacccctgggcatgaaaaggtgcaaaactcttctggaccatcgcacaattttctcgaactgcgtgactcttttctgagcaccaacggtgttcggtag

SEQ ID NO: 305543 - DNA, 588 bp, Artificial Sequence
  derived and/or modified sequence
atgaacagcgtgttccggcagcccggcagcaacttcagcttccccatctatcaaccctccgcctctgtgacccacggattgagcttcttttgcgaagtgtccccacagatgctcacaccacaggactacagaggcaaacagcagggccatcgcgggtgtcctggttgtatggttgcaatggacacatggccggccgtgttacccgaactgcccgggttctggggcgaaggcagcggtggccaagcctggggcgctcgaggcgaacctctgctacagaaggccaattgcctgctggaggccgtgcgtttatttctaaattataggccactaggggccgagggcggggagttaacttttggcaaaagactactggtgccaacagccgttagttgtgcttacgactgtgtcagtagcagcgccttcctgggaatccagctcctgggcgacccaacacgctcaccaggccattgttacaggcaggatttcaacggtaccctccgcttacgagaggggaaaggactagtacagtcccacactggaaccctgtgggccggccccctccaggaggggacccagggccagacctag

SEQ ID NO: 305544 - DNA, 372 bp, Artificial Sequence
  derived and/or modified sequence
atgcagagcgagaagccccagggcctgttcctgcagctgaaccccaacgctagttctacagaaacccagctcctggtgccggcgctggaatcgagggacacccttcccccaactcactgtttcatggcaggtaccgagtctccactcggaaacccctggcccctgtccctacccccaccttgttggaccggttgcctgctcccagcaccaaggggacaaaggaaacccggccccctcggactctcaatttttatcagcctgggcaacaagcgtcatcggtccggaaatcatgtggtgcgcgagtcagagcaaccgctttctcagggaaatccccaccaggggtggggacccgatacccgtaaggggagatag

SEQ ID NO: 305545 - protein, 273 aa, Artificial Sequence
  derived and/or modified sequence
MSPACRVNSKTKPTTIFMAAAWTGRRNSSPDRMWLTTERRKGDAGSPMTLLHRPSGLTSQPQVLYQNNGLYSSHGFGTRPLDPGTAGPRVWYRPIPSHMPSLHNIPVPETNYLGNTPTMPFSSLPPTDESIKYTIYNSTGIQIGAYNYMEIGGTSSSLLDSTNTNFKEEPAAKYQAIFDNTTSLTDKHLDPIRENLGKHWKNCARKLGFTQSQIDEIDHDYERDGLKEKVYQMLQKWVMREGIKGATVGKLAQALHQCSRIDLLSSLIYVSQN

SEQ ID NO: 305546 - DNA, 132 bp, Artificial Sequence
  derived and/or modified sequence
atgaactacctggacagatacctgagctgcgtgcccaccagaaaggcccagctgcagctgctgggcgccgtgtgcatgctgctggccagcaagctgagagagaccacccccctgaccatcgagaagctgtag

SEQ ID NO: 305547 - DNA, 132 bp, Artificial Sequence
  derived and/or modified sequence
atgaactacctggaccgttacctgtcgtgcgtgccaacaaggaaagcacagctgcagctgctcggtgcggtctgcatgttgctggctagcaaattacgcgagactactcccctgaccattgagaaactttag

SEQ ID NO: 305548 - DNA, 132 bp, Artificial Sequence
  derived and/or modified sequence
atgaactacctggaccgctacctgagctgtgtgcccaccaggaaggcccagctgcagctgctgggcgctgtgtgcatgctgctggccagcaagctgcgggagaccacccccctgaccatcgagaagctgtag

SEQ ID NO: 305549 - DNA, 132 bp, Artificial Sequence
  derived and/or modified sequence
atgaactacctggaccggtacctgagctgcgtgcccacccggaaggcccagctgcagttgctgggggctgtgtgcatgcttctggccagcaagttacgtgaaaccacaccgttgactatagaaaagctctag

SEQ ID NO: 305550 - DNA, 132 bp, Artificial Sequence
  derived and/or modified sequence
atgaattatctggatcgatacttatcgtgcgtccccacacgcaaagcccagcttcagctgctgggggcagtatgcatgctgctggcctcgaaattgcgcgaaaccacccccctgacgatcgaaaagttgtag

SEQ ID NO: 305551 - DNA, 141 bp, Artificial Sequence
  derived and/or modified sequence
atgctgagccggaacgacgacatctgcatctacggcggcctgggccttgggggactattgctcttggctgtggtgcttcttagcgcatgcctgtgttggctgcacagaagggaacattgccttgcactggagcccctctag

SEQ ID NO: 305552 - protein, 164 aa, Artificial Sequence
  derived and/or modified sequence
  misc_feature (1)..(1): Xaa can be any naturally occurring amino acid
XKKHQVETAFERLQQELEQQRCLLLARLRELEQQIWKERDEYITKVSEEVTRLGAQVKELEEKCQQPASELLQDVRVNQSRCEMKTFVSPEAISPDLVKKIRDFHRKILTLPEMMRMFSENLAHHLEIDSDRQPEPGSLGRQEVSEVHPAEEEPARQPPALRRP

SEQ ID NO: 305553 - DNA, 495 bp, Artificial Sequence
  derived and/or modified sequence
tgaaagaagcaccaggtggagaccgccttcgagagactgcagcaggagctggagcagcagagatgcctgctgctggccagactgagagagctggagcagcagatctggaaggagagagacgagtacatcaccaaggtgagcgaggaggtgaccagactgggcgcccaggtgaaggagctggaggagaagtgccagcagcccgccagcgagctgctgcaggacgtgagagtgaaccagagcagatgcgagatgaagaccttcgtgagccccgaggccatcagccccgacctggtgaagaagatcagagacttccacagaaagatcctgaccctgcccgagatgatgagaatgttcagcgagaacctggcccaccacctggagatcgacagcgacagacagcccgagcccggcagcctgggcagacaggaggtgagcgaggtgcaccccgccgaggaggagcccgccagacagccccccgccctgagaagaccctag

SEQ ID NO: 305554 - DNA, 495 bp, Artificial Sequence
  derived and/or modified sequence
tgaaaaaaacatcaggtggaaacggctttcgagcgcctacagcaggagctggaacagcaaagatgcttattgctggcaaggttacgagagctggagcaacagatctggaaggagcgcgatgagtatattaccaaggtgtctgaggaagtgacaaggcttggcgcacaggttaaggaattagaagaaaagtgtcagcagcccgcctcggagctactgcaggatgtgagggtgaatcaatcacggtgcgagatgaaaacttttgtctctcctgaggcaatctcacctgacctggttaaaaagatccgagactttcacaggaagattctcactctacctgagatgatgagaatgtttagtgagaacctggcccaccacctggagatcgactccgatcggcagcccgaacccggatccctgggccggcaggaggtcagcgaagtccatcctgctgaggaagaaccggcccggcagccacccgcacttagacgaccttag

SEQ ID NO: 305555 - DNA, 495 bp, Artificial Sequence
  derived and/or modified sequence
tagaagaagcatcaagtagagacagcttttgagagactgcagcaggagcttgaacagcagagatgcctgctgctggctcgccttcgggagttggaacaacaaatctggaaagagcgagacgaatatattacaaaggttagcgaagaagtcacaagactgggtgcccaggtgaaggagctcgaggagaagtgtcaacaacctgcttctgagctgctacaggacgtgcgtgtgaatcagtctcgctgtgagatgaaaactttcgtgagtcctgaagcaatcagccccgatctggtaaagaagatcagggattttcatagaaagatcctgacacttcccgaaatgatgcgaatgttttcagagaatctggctcaccatctggagatcgactctgacaggcagccagagcctgggagcctcggcaggcaggaagtttccgaggtgcaccccgctgaggaggagccagcccggcagccccccgcactccgacggccctag

SEQ ID NO: 305556 - DNA, 495 bp, Artificial Sequence
  derived and/or modified sequence
taaaagaaacaccaggtggagacagctttcgaaagactccagcaggagctggagcagcaacgctgcctgctgcttgcccgactgcgcgaactggagcagcagatttggaaagaaagagacgaatacatcactaaggttagtgaagaagttacacgactgggagcccaggtcaaggaattggaggagaaatgccagcagccagcgagtgagttacttcaggatgtcagagtgaaccagtcacggtgcgaaatgaagacatttgtgtctcccgaggcaatctcacccgatctggtgaagaaaattagagacttccatcggaagattctgacactgcctgaaatgatgagaatgtttagcgaaaatctggcccatcatcttgaaatcgattcagatcgccagccagagccaggcagcctgggccggcaagaggtaagcgaggtgcatcccgccgaagaagagccagctaggcagccacctgccctgcgtcgcccttag

SEQ ID NO: 305557 - DNA, 495 bp, Artificial Sequence
  derived and/or modified sequence
tgaaaaaagcaccaagtagagacagccttcgagaggctgcagcaagaacttgagcagcagaggtgtttacttctcgcacggttaagggaactggagcagcagatttggaaggagagggatgaatatatcaccaaagtcagcgaagaggtgacccgtctcggcgctcaggtgaaagaattggaagaaaagtgccagcagccagcgtctgaactactgcaggatgttcgtgtcaaccagagccggtgtgagatgaaaacattcgtgtcaccagaggcgataagtccggatctcgtgaaaaaaatcagggactttcatcgtaagatcctgaccttgcctgagatgatgcgtatgttcagcgagaatctagcgcatcacctggagatcgacagcgatcgccaacctgaacctggctctctgggcagacaggaagtctccgaagtgcaccccgccgaggaggagcccgcccgccagccaccggctctgaggaggccatag

SEQ ID NO: 305558 - DNA, 495 bp, Artificial Sequence
  derived and/or modified sequence
taaaaaaagcatcaggtggagaccgcatttgagaggttacaacaggaattagagcaacagcgttgtcttctcctggctcgcctccgggagctagaacagcagatatggaaggagcgggatgagtatatcactaaagtatctgaggaagtgaccaggctgggcgcccaggtgaaggagctggaagaaaagtgtcagcaacccgctagcgaactgctgcaggacgtgcgtgtcaaccaatcgaggtgcgagatgaagactttcgtgagccccgaggcaatttctcccgacctggttaaaaagatccgagactttcacagaaagatactcactttgcccgaaatgatgagaatgttcagtgaaaaccttgcccaccacctggaaatagatagcgatcgccagccagaaccaggctcactcggccggcaggaagtctccgaggtccaccctgccgaggaagagccagcccgacaaccaccagctctccggcggccttag

SEQ ID NO: 305559 - DNA, 495 bp, Artificial Sequence
  derived and/or modified sequence
tgaaaaaagcaccaggtggagaccgctttcgaaagattgcagcaggagctcgaacagcagagatgcttgctcctggccagactccgtgagctagagcaacaaatctggaaagagagggacgagtatatcacaaaagtgagcgaagaggtaacccggttgggagcacaggtgaaagagctggaagagaaatgtcagcagccggcctccgagttgttgcaggacgttagagtaaaccaaagccggtgcgagatgaagacatttgtgtctccagaagccatatcgcctgatctggtgaagaaaatccgtgatttccacaggaaaatcctgactctgccggaaatgatgcgaatgttttcggagaacttagcacaccatttagagatagactcagaccgccagcccgaaccaggttctctggggcgacaggaagtctccgaggtgcacccggcagaggaggagcctgcgcggcagcccccggccctgcgacggccttag

SEQ ID NO: 305560 - DNA, 495 bp, Artificial Sequence
  derived and/or modified sequence
tgaaaaaaacaccaagtggagacggcttttgagcggctccagcaggaactggaacagcaaaggtgccttctgctagcacgcctgcgcgagctggaacagcagatatggaaggaacgcgatgagtatataaccaaagtgtcagaagaggtaacaaggctgggagcgcaggtcaaggaattagaggagaaatgtcagcaacccgcttccgagctgcttcaggacgttagggtgaaccaaagccggtgtgagatgaaaactttcgtgagcccggaggctatctcacccgatttggtaaaaaagataagggacttccacaggaaaatcttaacccttcccgaaatgatgagaatgttttctgagaacctcgcccatcatctagagatcgattccgacaggcagcctgagccagggtccctgggcagacaggaagtcagtgaggtacaccctgccgaagaagagccagctagacagccacccgcccttcgaaggccgtag

SEQ ID NO: 305561 - DNA, 495 bp, Artificial Sequence
  derived and/or modified sequence
tagaaaaaacaccaggtggagacggcatttgaacgactgcaacaggagctagagcagcagcggtgtctgctccttgcccgtctgcgggaactagaacagcagatttggaaggaacgcgacgagtatattactaaggtgtctgaggaagtcacccgcctcggcgcccaggttaaggaactcgaggaaaagtgtcagcagccagcctcggagctgctgcaagatgtgagggtgaaccaaagtagatgtgagatgaaaaccttcgtgtctccagaggccatttctccggatctggtaaaaaagatccgggacttccataggaagatcttaactttgcccgagatgatgcgcatgttctctgaaaacctagcacaccacctggaaattgactccgatcggcaaccagagcctggaagcctgggccgccaagaagtgtcggaagtgcacccggcagaagaggaacccgcgcggcagcctcccgccctgcgtaggccctag

SEQ ID NO: 305562 - DNA, 495 bp, Artificial Sequence
  derived and/or modified sequence
tgaaagaagcaccaggtggagacagcctttgagcggctgcagcaggagctggagcagcagcgctgcctgctgctggcccggctgcgggagctggagcagcagatctggaaggagagagatgagtacatcaccaaggtgtctgaggaggtgacccggctgggcgcccaggtgaaggagctggaggagaagtgccagcagcctgccagcgagctgctgcaggatgtgcgggtgaaccagagccgctgtgagatgaagacctttgtgtccccagaggccatcagcccagacctggtgaagaagatccgggacttccacaggaagatcctgaccctgcctgagatgatgaggatgttttctgagaacctggcccaccacctggagattgacagcgaccggcagcctgagcccggcagcctgggccggcaggaggtgtctgaggtgcaccctgctgaggaggagcccgcccggcagcccccagccctgcggcggccctag

SEQ ID NO: 305563 - DNA, 495 bp, Artificial Sequence
  derived and/or modified sequence
tgaaagaagcaccaggtggagaccgccttcgagcggctgcagcaggaactcgagcagcagcgctgtttactgctggcaaggctgagagaactggaacaacagatatggaaggagagggacgagtatatcaccaaagtgtctgaggaggttacaagactgggggcccaggtaaaggagctcgaggagaagtgccagcaacccgctagcgagctactccaggatgtgcgggttaaccagagccggtgcgaaatgaagactttcgtgtcacctgaggccatttccccagatctggtcaagaaaataagagatttccatcgcaaaatcctaacactgcctgagatgatgcgtatgtttagcgaaaatctggcccaccacctcgaaatcgattccgacagacaacccgaaccgggctccctcggcagacaagaggtgtccgaggttcacccggcagaagaagagcccgctcgccagcctccagccctgagaaggccttag

SEQ ID NO: 305564 - DNA, 495 bp, Artificial Sequence
  derived and/or modified sequence
tgaaagaagcaccaggtggagaccgccttcgagcggctgcagcaggaactggagcagcagcgctgtctcttgctcgcccgtttgagggagttggagcagcagatctggaaggagcgtgatgaatacatcactaaagtgtcagaggaggtcactaggttgggtgctcaggtgaaagaacttgaagagaagtgtcagcagcctgcatcggagctgctacaagatgtccgcgttaatcaatctcggtgcgagatgaaaacatttgtgagccctgaggcaatctcacctgatctggtaaagaagattagagactttcacaggaagatactgaccctgccagagatgatgaggatgttcagtgaaaatctggcgcatcatctcgagattgatagcgatcggcagcctgagccgggctctctgggtcgccaggaggtgagcgaggtgcaccccgccgaagaggagccggctagacagccacctgctctgcgacggccatag

SEQ ID NO: 305565 - DNA, 495 bp, Artificial Sequence
  derived and/or modified sequence
tgaaagaagcaccaggtggagaccgccttcgagcggctgcagcaggaactggaacagcaacgttgcctgctgcttgcccgcctccgagaactcgagcagcagatctggaaggaaagagatgagtatattaccaaggtctctgaagaagtgacaagattgggggcgcaggtgaaggaactggaagaaaagtgtcagcagccggccagcgaattgctgcaggacgttagggttaaccaatcccgatgtgagatgaaaaccttcgtgagtcccgaggccatatctcctgatcttgttaaaaaaatccgcgacttccaccgtaagatcctgacgcttcccgagatgatgaggatgttcagcgaaaacctcgcacatcacctagaaattgatagcgaccgtcaacccgaaccgggctccctgggacgccaggaggtctctgaagttcaccccgccgaggaggaaccagcaagacagcctcctgccctgagaagaccgtag

SEQ ID NO: 305566 - DNA, 495 bp, Artificial Sequence
  derived and/or modified sequence
tgaaagaagcaccaggtggagaccgccttcgagcggctgcagcaggaattggagcagcagcggtgcctgttgcttgctagattgagagagcttgagcagcagatctggaaggaaagagatgaatacattactaaagtcagcgaagaggtcacccgtctaggtgcccaagtgaaagagctggaggaaaagtgtcagcagccagcctccgagctgctccaggacgtacgggtgaaccaatcacgttgcgagatgaaaactttcgtgtcacctgaagcgatttccccagatttagttaagaagatcagggacttccaccgcaaaatacttacactgccagaaatgatgagaatgttttccgagaatttggcacatcacctggagattgacagtgacaggcagcctgagcctggcagtctgggacgtcaagaagtgtccgaggttcaccccgcagaggaggagccagcgcggcagcctccagcactacgaagaccttag

SEQ ID NO: 305567 - DNA, 495 bp, Artificial Sequence
  derived and/or modified sequence
tgaaagaagcaccaggtggagaccgccttcgagcggctgcagcaggagctggagcagcaacgatgtctgctgttggcaaggctgcgtgagctggaacagcaaatttggaaggaacgagacgagtacatcacaaaagtaagcgaggaagttactcggctgggcgcccaggtcaaggaactggaggaaaagtgccaacagcctgcctctgagctgctgcaggatgtgagggtcaaccaatcccgctgtgagatgaagacatttgtgagtccagaggcaattagtcctgacctggtaaaaaagattagggacttccatcgtaaaatcctgacactgcccgaaatgatgaggatgttcagtgaaaacctggctcatcatctcgagattgacagcgacagacagccggagccaggctctctcggacgacaggaggtgtccgaggtgcacccagcagaggaggagcccgccaggcagcctcccgcactcaggcgtccctag

SEQ ID NO: 305568 - DNA, 495 bp, Artificial Sequence
  derived and/or modified sequence
tgaaagaagcaccaggtggagaccgccttcgagcggctgcagcaggaactcgaacagcagaggtgtctcctgttggctcggctccgggagctcgaacagcagatctggaaggagagagatgagtatatcacaaaggtctcagaggaggttacccgcctcggagcgcaggtgaaggagctggaagaaaagtgtcagcagcctgcctctgaactcctgcaggacgtccgggtcaaccagtctcggtgtgaaatgaagacgttcgtctccccagaagccatttcacctgatctggtgaaaaagattcgggattttcatcgtaaaatcttaacactgcccgaaatgatgagaatgttctctgaaaacttggcacaccaccttgagattgacagtgaccggcaaccagaacccggcagccttggcagacaggaggtgtccgaggtgcatcccgccgaagaggagcctgctcgacagccacccgcactgcgtcgcccttag

SEQ ID NO: 305569 - DNA, 495 bp, Artificial Sequence
  derived and/or modified sequence
tgaaagaagcaccaggtggagaccgccttcgagcggctgcagcaggagcttgagcagcagaggtgtctcctgcttgcccgactgcgggaattggagcagcagatttggaaagaacgcgacgagtatatcactaaggtctcagaggaggtgaccagactcggggcccaggtgaaggagttggaagagaaatgccagcagccagctagcgaacttttacaggatgtacgagtcaatcagtcacgctgtgagatgaaaactttcgtaagccccgaggccatttcacccgacctggtgaaaaaaatccgggatttccataggaaaatccttactctccccgaaatgatgagaatgtttagcgagaatctggcacatcacctggaaatagattccgataggcagcccgagcccggttccctaggaagacaggaggtcagtgaggtccatccggcagaagaggagcctgctagacagccacccgcccttcggcgcccctag

SEQ ID NO: 305570 - DNA, 495 bp, Artificial Sequence
  derived and/or modified sequence
tgaaagaagcaccaggtggagaccgccttcgagcggctgcagcaggagctggagcaacagagatgtctgctcctggcaaggcttcgcgagcttgaacaacaaatatggaaggaaagggacgaatacataacaaaggtgtctgaagaggtaacacggcttggagcgcaagtcaaagagttagaagaaaaatgtcaacagcctgcttctgaactgctgcaagatgttcgggttaatcaatctcgatgcgagatgaaaaccttcgtgagccctgaggcaatcagtccagacctggtgaaaaaaatacgtgacttccataggaagatactgactctgcccgagatgatgagaatgttcagcgagaacttggcccatcatctggagatagattcggatcggcaacctgaaccagggtctttgggaaggcaggaggtatcggaggtccaccctgctgaggaggagccagcccgacaaccacccgctttgaggcgaccttag

SEQ ID NO: 305571 - DNA, 495 bp, Artificial Sequence
  derived and/or modified sequence
tagaagaaacatcaggtggagacagccttcgaacgtctccagcaggaactagagcagcagagatgtctgctgttagcacgcctcagagagcttgaacagcaaatttggaaggagcgagacgagtacattactaaggtgagcgaagaggtcacccgccttggagcccaagtgaaggagcttgaagaaaagtgccagcagcctgcttcggaactgcttcaagacgtgcgtgtgaaccagtcaagatgcgagatgaaaacctttgtgtccccggaggccatttctccggatctggtgaagaagatcagggacttccacaggaaaatcctgacactgcccgagatgatgcgcatgtttagtgagaatctggcacaccatctggagattgattcagaccggcagccagagcccggtagtcttggacgccaggaggtttccgaggttcatcctgcagaggaggaacccgctaggcagccacctgcattacggcgaccctag

SEQ ID NO: 305572 - DNA, 495 bp, Artificial Sequence
  derived and/or modified sequence
taaaaaaagcaccaggtcgaaactgcattcgaaagactgcaacaagagctggagcagcagaggtgcctcctactcgcccgtcttcgtgaactcgaacagcagatctggaaggagcgtgacgagtacatcactaaggtgtccgaggaagtcacacgactgggagcacaggtgaaggaactcgaggaaaaatgtcagcaaccagctagtgagttgcttcaagacgtgagagtcaaccagtctcgctgcgaaatgaaaactttcgtgtctccagaagcaattagtcctgacctagtgaaaaaaattcgggacttccataggaagattctgacattacccgagatgatgcgcatgttctccgaaaatctggcccaccacctagagatcgactctgatagacagcctgagcccggaagcctcggaaggcaggaagtctccgaagtccaccctgccgaggaggaacctgcacgacagcctccggctttgaggcgtccttag

SEQ ID NO: 305573 - DNA, 495 bp, Artificial Sequence
  derived and/or modified sequence
taaaagaagcaccaggttgagacagccttcgagcggctgcagcaggagttagagcagcagcggtgcctcctgctagcccgtcttcgggaactcgagcaacaaatctggaaagaaagggatgaatacatcacaaaggtgtctgaggaagtgaccagactgggggcacaggtgaaggaactggaggagaaatgtcaacagcccgcaagcgagctcctgcaggatgtgcgtgtgaaccaatcccggtgtgagatgaaaaccttcgtgtccccagaagccatcagcccagacctggtaaaaaaaatacgggacttccaccgaaaaatcttgacacttcctgaaatgatgcggatgtttagcgagaatttagcacaccacctagaaattgatagtgaccggcagccagagccagggtctttaggtagacaagaggtgtctgaagtgcaccccgcagaagaggaacctgccagacaacccccagctctgcggaggccatag

SEQ ID NO: 305574 - DNA, 495 bp, Artificial Sequence
  derived and/or modified sequence
taaaagaagcatcaggttgagactgcgttcgagcgtcttcaacaggagttggaacagcagaggtgcttgctgctcgcaaggttacgggaactggaacaacagatatggaaggagcgagacgagtacattacaaaggtgagcgaagaggtcacccggctgggagctcaagtgaaggagctggaagagaaatgccagcagccagcctcagaacttttacaggacgtgcgcgttaaccagtctcgatgcgaaatgaagactttcgttagtccagaagctattagtcccgacttggtcaaaaagattagggattttcatcggaaaattcttacactgccggaaatgatgcggatgtttagtgaaaacctagcccaccacctagaaatagactcggaccgccaaccagagccaggcagcctaggacgccaggaggtgtctgaagtgcacccagccgaggaagaaccagctcgccagccgccagccctcagaagaccatag

SEQ ID NO: 305575 - DNA, 495 bp, Artificial Sequence
  derived and/or modified sequence
tgaaaaaagcaccaggtcgagacagctttcgaacgcctgcagcaagagctggaacagcaaagatgcctcctcctcgcacgtctccgtgaactcgagcagcagatctggaaagagagggatgaatacataaccaaggtctcggaagaagttactcgtttgggcgcacaagtcaaagagttagaagaaaaatgccaacaacctgcttctgaactgctgcaggatgtgagggtgaatcaatcaaggtgcgaaatgaaaacatttgtttcacctgaggctatttcacctgatttagtaaagaagatcagggacttccaccggaaaatcctgacgctgccagagatgatgcggatgttcagcgaaaacttggcacatcacctggagatagacagtgataggcaacccgagccagggtctctaggcagacaagaagtaagcgaggtccatcctgccgaggaggaacccgctcgacagccacctgccttacggcgaccttag

SEQ ID NO: 305576 - DNA, 495 bp, Artificial Sequence
  derived and/or modified sequence
tgaaagaaacaccaggtggaaaccgcctttgagcgcctgcagcaggagctggagcagcagaggtgtttgctgctagcaaggctgagggagctagaacagcagatttggaaagagcgcgacgaatatatcacaaaggtcagcgaagaggtgaccaggctcggcgcacaggttaaggaactggaggagaagtgtcagcagcccgctagcgagctcctccaggacgtgagagtgaatcagtctaggtgtgaaatgaaaacatttgtttcccccgaagcaatcagtcctgacttggtaaaaaaaatcagagatttccatcgtaaaatcttgactctgcccgagatgatgcgcatgttctccgagaacttagctcatcatcttgaaattgactcggatcgacaacctgaacctggcagcctggggcgtcaggaagtctccgaagtacacccagcggaagaagagccagccagacaacccccagccctaagacggccttag

SEQ ID NO: 305577 - DNA, 495 bp, Artificial Sequence
  derived and/or modified sequence
tgaaagaagcaccaggttgaaactgccttcgagcgtctacagcaggagcttgagcagcagcgatgcctgctgctggcccgtttaagagaactcgagcagcagatttggaaggagcgcgacgaatacattacaaaggttagcgaagaggtcactcgccttggcgcacaggttaaggagcttgaggagaaatgccaacagccagcctctgaactgctgcaagatgtgagagtaaaccagtcacgttgtgagatgaaaacttttgtctcacccgaggccatcagtccagaccttgtgaaaaaaatacgcgatttccacagaaagatattaactttgcctgaaatgatgaggatgtttagcgaaaacttggcgcaccatctcgagatagacagtgacagacagccagaacccggatccctgggaaggcaggaggtttccgaggtgcacccggcagaagaggaaccggcaagacaaccccctgcactgagacgtccctag

SEQ ID NO: 305578 - DNA, 495 bp, Artificial Sequence
  derived and/or modified sequence
tgaaagaaacatcaggtggagaccgccttcgagagactgcagcaggagctggaacagcagaggtgtctcctactcgctcgcctgagggaactggagcagcagatatggaaggagcgggacgaatatatcaccaaagtgagcgaggaggtcacacggctgggcgctcaagtgaaggaactggaggagaaatgccagcagcccgcatctgagctattacaggacgtccgcgttaaccagtcacgctgtgagatgaaaacattcgtaagtcccgaagcgatatctcccgatctggtcaagaagatcagggactttcaccgcaaaattctaacgctgcctgagatgatgaggatgttctctgagaatctggctcatcacctcgagatagatagcgaccgccaaccagaacctggcagtttgggtcgccaagaggtaagtgaagtgcatccagcagaggaggagccagctcgccaaccccctgcgctccggcgaccctag

SEQ ID NO: 305579 - protein, 506 aa, Artificial Sequence
  derived and/or modified sequence
MPAAAVQEAVGVCSYGMQLSWDINDPQMPQELALFDQFREWPDGYVRFIYSSDEKKAQRHLSGWAMRNTNNHNGHILKKSCLGVVVCTQACTLPDGSRLQLRPAICDKARLKQQKKACPNCHSALELIPCRGHSGYPVTNFWRLDGNAIFFQAKGVHDHPRPESKSETEARRSAIKRQMASFYQPQKKRIRESEAEENQDSSGHFSNIPPLENPEDFDIVTETSFPIPGQPCPSFPKSDVYKATCDLATFQGDKMPPFQKYSSPRIYLPRPPCSYELANPGYTNSSPYPTLYKDSTSIPNDTDWVHLNTLQCNVNSYSSYERSFDFTNKQHGWKPALGKPSLVERTNHGQFQAMATRPYYNPELPCRYLTTPPPGAPALQTVITTTTKVSYQAYQPPAMKYSDSVREVKSLSSCNYAPEDTGMSVYPEPWGPPVTVTRAASPSGPPPMKIAGDCRAIRPTVAIPHEPVSSRTDEAETWDVCLSGLGSAVSYSDRVGPFFTYNNEDF

SEQ ID NO: 305580 - DNA, 1521 bp, Artificial Sequence
  derived and/or modified sequence
atgccagccgcagctgtgcaggaggccgttggggtctgctcttacggaatgcagctgagttgggatattaacgacccgcagatgccgcaggaactcgctctgttcgaccagtttcgggaatggcctgatggttacgtgcgattcatttattcgagcgatgagaagaaggcacaacgacatctctcaggatgggcaatgagaaacaccaacaatcacaacggccacattctaaagaagagctgcctcggtgtcgtcgtgtgtactcaggcgtgtacgctgccagatggatctcggttacagctgagaccagcaatctgtgataaggcaagattgaagcagcaaaagaaagcttgcccaaactgtcattccgcgctcgagctgattccatgccgggggcacagtgggtatcctgttacgaacttctggcgattggacggaaacgctattttcttccaggccaagggtgttcacgaccaccctcggcctgaatccaagtccgagaccgaagcgagacgaagcgccatcaagcgccagatggcatcattctaccagccacaaaagaagcgaattagggaaagcgaggcagaggaaaatcaggactcctctgggcacttcagcaacatccctccattagagaaccccgaagatttcgacattgtgaccgagacaagtttccctatcccagggcagccgtgtccttccttccctaagtctgatgtttataaggcgacatgcgacctggctacctttcagggtgacaaaatgccgcctttccaaaaatactcaagccccaggatttatcttccccgcccaccttgttcgtatgaactggcaaaccctggatatactaactcaagtccttatcctacactatataaagactccactagcatacctaacgacactgattgggtccacctaaacacactgcagtgtaacgtcaatagctacagttcttacgagcgatcttttgacttcaccaataagcagcatggctggaaacccgcattgggcaagccatcactggttgaaagaaccaaccatggtcagttccaggccatggctacaagaccctactacaatccagaactgccatgtcgctacctgacgacgccaccccccggggcaccagctctacaaactgtcattaccaccacaacaaaagttagttatcaagcatatcagccaccggcgatgaagtacagtgactcagtgagggaagttaagtctctctcttcctgcaactacgcccctgaagacacaggcatgagtgtgtatcctgagccttggggaccccctgtgaccgtgactcgcgccgccagtcccagtgggccaccacctatgaaaattgccggggactgtcgggctataaggccgactgtagcaatcccgcatgagcccgtgtcttcacggactgatgaagccgagacctgggacgtgtgtctgagcgggctggggtccgcagtgagctattctgatcgggtgggtcccttttttacctacaataatgaagacttctag

SEQ ID NO: 305581 - DNA, 1521 bp, Artificial Sequence
  derived and/or modified sequence
atgcctgctgctgctgtgcaggaggccgtgggcgtgtgcagctatggcatgcagctgtcctgggacatcaatgacccccagatgccccaggagctggccctgtttgaccagttccgggagtggccagatggctacgtgcgcttcatctacagcagtgatgagaagaaggcccagaggcacctgagcggctgggccatgaggaacaccaacaaccacaacggccacatcctgaagaagagctgcctgggcgtggtggtgtgcacccaggcctgcaccctgcctgatggcagccggctgcagctgcggcctgccatctgtgacaaggcccggctgaagcagcagaagaaggcctgccccaactgccacagcgccctggagctgatcccctgccggggccacagcggctaccctgtgaccaacttctggaggctggatggaaatgccatcttcttccaggccaagggcgtgcatgaccaccccaggcctgagagcaagtcagaaacagaggccaggagaagtgccatcaagaggcagatggccagcttctaccagccccagaagaagaggatccgggagagcgaggccgaggagaaccaggacagcagcggccacttcagcaacatcccccccctggagaacccagaagattttgatattgtgacagagaccagcttccccatccctggccagccctgccccagcttccccaagagtgatgtgtacaaggccacctgtgacctggccaccttccagggcgacaagatgccacccttccagaagtacagcagcccccgcatctacctgcccaggcctccctgcagctatgagctggccaaccctggctacaccaacagcagcccctaccccaccctgtacaaggacagcaccagcatccccaatgacacagactgggtgcacctgaacaccctgcagtgcaatgtgaacagctacagcagctatgaaagaagctttgacttcaccaacaagcagcacggctggaagccagccctgggcaagcccagcctggtggagaggaccaaccacggccagttccaggccatggccacccggccctactacaaccctgagctgccctgccgctacctgaccaccccacctcctggggccccagccctgcagaccgtcatcaccaccaccaccaaggtgtcctaccaggcctaccagcccccagccatgaagtacagcgacagcgtgcgggaggtgaagagcctgagcagctgcaactatgcccctgaggacaccggcatgtctgtgtacccagagccctggggcccccctgtgacagtgaccagggctgccagccccagcggccccccacccatgaagattgctggggactgccgggccatccggcccaccgtggccatcccccatgagcctgtgagcagcaggacagatgaagctgagacctgggatgtgtgcctgagcggcctgggcagcgctgtgtcctacagcgacagagtgggccccttcttcacctacaacaatgaagacttctag

SEQ ID NO: 305582 - DNA, 1521 bp, Artificial Sequence
  derived and/or modified sequence
atgcccgccgccgccgtgcaggaggccgtgggcgtgtgcagctacggaatgcagctctcctgggacatcaacgatccccagatgcctcaggagctcgccttgtttgatcagttcagagagtggccggacgggtacgtgcggtttatttattcgtctgatgaaaaaaaggcccagcgacatctgagcggctgggctatgaggaacaccaataatcacaatgggcatatccttaagaagtcttgtctcggtgtggtggtctgcacacaggcttgtaccctccctgatggatccagactgcagttacgaccggctatatgtgacaaggcgcgccttaagcagcagaaaaaggcctgcccaaactgccatagtgcactggagctgattccgtgccgtggtcatagcggctacccagtgacgaatttttggaggctggacggcaatgccatcttctttcaggccaagggcgtacacgaccatccccggccagagtcgaagtctgagacagaggcccgccgctcagccatcaagcgccagatggcatctttctaccagccacaaaaaaagcgcattagagagagcgaagccgaagagaaccaagatagttccgggcacttctccaacattccaccactggaaaatcctgaggattttgatatcgttactgaaacatcctttcctattccaggccagccttgccctagcttcccaaagagcgacgtctacaaagctacttgcgacttggcaactttccaaggagacaaaatgcctccttttcagaaatattcttcgcccagaatctacttaccccgacccccttgttcatacgaattggctaatcccggctataccaactccagtccttatccgacgctgtataaagacagtacctccatacccaacgataccgactgggttcacctgaataccctccagtgtaacgtgaatagctattcctcttacgagcggtcgtttgatttcactaacaagcagcatgggtggaaaccggcgctgggcaagcctagtttggttgagcggactaatcacggtcagttccaagcaatggctacaaggccctactataatcctgagctaccatgtcgttacctgaccacgccccccccaggtgccccggccctgcagacagtaataaccactaccaccaaggtgtcataccaggcctatcagcctcctgcaatgaaatactccgacagtgtgcgggaagtcaagagcctctccagttgcaactatgccccagaagacacaggtatgtctgtctaccctgagccctggggccctcccgtcacagtcacacgcgcggcctccccgtctggcccgccacctatgaagatcgcaggggactgccgcgccatcaggcctacagtggccatacctcacgagcccgtaagctccaggacagacgaggctgagacctgggacgtgtgtctctcaggccttggcagtgcggtctcatacagtgatcgggtgggcccatttttcacgtataataacgaggacttctag

SEQ ID NO: 305583 - DNA, 1521 bp, Artificial Sequence
  derived and/or modified sequence
atgcctgccgcagctgtacaggaggccgtgggggtgtgctcgtatgggatgcagttaagctgggatataaatgatccgcagatgcctcaggaactggcccttttcgatcaattcagagaatggccagatggatatgtgcgatttatctatagctcagacgagaagaaggctcaaaggcatctgagtggctgggccatgagaaacactaataatcataatggacatattctaaaaaagagttgtttaggcgttgttgtatgtacacaggcctgcactctccccgatggttctagacttcagctccgccctgcaatttgtgacaaggctaggctgaaacagcagaagaaagcatgcccaaattgccatagtgcactcgaactgattccatgtcgcggacactccggataccctgtgacaaacttttggcgactggatggcaatgcaatcttttttcaggctaagggagtccacgaccatccacgacccgaatccaaatctgagacagaggctcgtcggtctgccatcaaacggcaaatggcttccttctaccagcctcagaagaagcgcattagagagagcgaagcagaggagaatcaggattcgtccggacattttagcaatattcctccccttgaaaaccctgaggatttcgatatagtgacagagactagtttccccattccgggtcagccgtgcccaagcttcccaaagtcagatgtctataaggccacctgcgatctggctacctttcaaggagataaaatgcccccatttcagaaatactcatccccacggatttacctgccgcgtccaccatgcagctacgagctcgctaaccctggctacacaaacagcagtccttacccaaccctgtacaaggactcaacaagtatccccaatgatacagactgggtacacctgaataccctccaatgcaatgtaaacagttacagctcatacgagcgcagttttgatttcacaaacaagcagcacggttggaaacctgcactgggcaagccctccctggtcgagcgcactaaccatggtcagttccaagcaatggcaaccagaccatactataacccagaactgccatgtcgatacctgacaactccgccaccgggtgcccctgccttgcagacagtaataaccacaacaacgaaggtatcctaccaggcttaccagccacccgcaatgaagtactccgattcagtgcgcgaagtgaagagcctttcatcttgtaattacgcccctgaagacaccggtatgagcgtttacccagagccatggggccctcctgttactgtcacccgtgccgcttccccttccgggcctccacctatgaaaattgcaggcgattgtagagcaatccggccaactgtggcgattccccatgagcccgtgagctctcggaccgacgaggccgagacttgggacgtgtgtctgagcggcctggggtctgccgtgagctacagcgatcgggtggggccttttttcacttacaacaacgaggatttttag

SEQ ID NO: 305584 - DNA, 2441 bp, Artificial Sequence
  derived and/or modified sequence
cctctctctctttctctctctctgcacctccccttcacacaccccactttcttctttaaagagaagaaaaaaaacccacctggcgcacctgtccttttttcttctatttttcagaaccctgggcggaaagcgcgagcgagttgggcagatgccggcggccgcggtgcaggaagcggtcggcgtgtgctcctacgggatgcagctcagctgggacatcaacgatccgcagatgcctcaggagctggccctctttgaccaattccgagagtggcctgacggctatgtgcgcttcatctacagcagcgatgagaagaaggcacagcgtcacctgagcggctgggccatgcgcaacaccaacaaccacaatggccacatcctcaagaagtcgtgcctgggtgtggtggtgtgtacacaggcctgcaccctgcccgacggttcccgcctgcagctgaggccggccatctgcgacaaggcacggctgaaacagcagaagaaggcatgccctaactgtcattctgctttggagttgattccttgtcgagggcacagcggataccccgtaaccaacttttggcggcttgatggcaacgcgatcttttttcaggccaagggagttcatgatcatccaagaccagagagcaaatcagagacagaagctagaagaagcgccatcaagagacaaatggcctctttctaccaaccccagaaaaagagaattcgagaatccgaggcagaagaaaatcaagacagcagtggtcatttcagcaacatacctcccttggaaaatccagaagactttgatatagttactgaaaccagcttccctattccagggcagccttgcccttccttcccaaagtctgatgtttacaaagctacctgtgacctagccacctttcaaggagacaaaatgccacccttccagaaatactcaagcccaagaatctatttgcctaggccaccttgcagctatgaattggcaaaccctggttatacaaattcaagcccatatcccaccctttataaggattccaccagtatccctaatgacacagactgggttcatctgaacacactacaatgtaatgtcaattcatacagcagctatgagagaagctttgatttcaccaacaaacagcatggctggaaaccagctcttggaaaacccagccttgtggaaaggactaaccatgggcagtttcaggccatggccactcgcccttattataacccagagcttccctgcaggtacctcacgactccaccaccaggtgcccctgccctacaaaccgtgatcaccaccaccactaaagtgtcctaccaggcctaccagccccctgctatgaaatacagtgacagtgtgcgagaggtgaagagcctttcgagctgtaactatgctcctgaagatactgggatgtctgtctatccagaaccctggggtcctccggtgacagtcaccagggcagcctctccttcagggccacctcctatgaaaattgcaggagattgccgggccatcagacccactgtggctattccccacgagccagtttcctctaggacagatgaagcagagacttgggatgtgtgtctgtctgggctgggctccgcagtcagttactcagacagagtgggtcccttctttacctacaacaatgaggatttttgaaagacaatccaggggacataatagcagtgtgcatgcaggcaggaggcagggaaatgtgaaatggcaatgatctcttattgagttgggagattcaccttgtgtgcaaagaaacacagatagtagtaaaaattctgagtaactgagaaaataatcagttggaaatgattagataatatgggaaatttcacacagcattttgaaactggctacaatacatagaagtagtgaggaaagtgtgagtctctcaaatgaacaaataagcaaactgtaggaggttaaatactgacctaagttcacttagcttattagcaggagtagaagtcaaggattctggttcttattctaggacttttcccattagagcaccttagggaatttcacatccctagaggctgccaaaatagcttcaggaagaaatttttacaatcttatcacctgagtcatttcatgaaatttttgtttagcatttagaacctgttaaactagcttcaggaagtaattttgattgttttatctccaacgtgtgtatctacagcttttcaaaaaatctctagcaatggtaaagttcagttgtttttaaaagattcaatattagcttttcataacatgatagtttcctaaccttttcataaccttttcataacatgatagtttccataacagagacagcctaacaatgatgagttgtatttaatggattaccattgtactaaatacattttttttctgattaggtttcagaattataattaaaatgttttgctgaaataca

SEQ ID NO: 305585 - DNA, 1521 bp, Artificial Sequence
  derived and/or modified sequence
atgcccgccgccgccgtgcaggaggccgtgggcgtgtgcagctacggcatgcagctgagctgggacatcaacgacccccagatgccccaggagctggccctgttcgaccagttcagagagtggcccgacggctacgtgagattcatctacagcagcgacgagaagaaggcccagagacacctgagcggctgggccatgagaaacaccaacaaccacaacggccacatcctgaagaagagctgcctgggcgtggtggtgtgcacccaggcctgcaccctgcccgacggcagcagactgcagctgagacccgccatctgcgacaaggccagactgaagcagcagaagaaggcctgccccaactgccacagcgccctggagctgatcccctgcagaggccacagcggctaccccgtgaccaacttctggagactggacggcaacgccatcttcttccaggccaagggcgtgcacgaccaccccagacccgagagcaagagcgagaccgaggccagaagaagcgccatcaagagacagatggccagcttctaccagccccagaagaagagaatcagagagagcgaggccgaggagaaccaggacagcagcggccacttcagcaacatcccccccctggagaaccccgaggacttcgacatcgtgaccgagaccagcttccccatccccggccagccctgccccagcttccccaagagcgacgtgtacaaggccacctgcgacctggccaccttccagggcgacaagatgccccccttccagaagtacagcagccccagaatctacctgcccagacccccctgcagctacgagctggccaaccccggctacaccaacagcagcccctaccccaccctgtacaaggacagcaccagcatccccaacgacaccgactgggtgcacctgaacaccctgcagtgcaacgtgaacagctacagcagctacgagagaagcttcgacttcaccaacaagcagcacggctggaagcccgccctgggcaagcccagcctggtggagagaaccaaccacggccagttccaggccatggccaccagaccctactacaaccccgagctgccctgcagatacctgaccacccccccccccggcgcccccgccctgcagaccgtgatcaccaccaccaccaaggtgagctaccaggcctaccagccccccgccatgaagtacagcgacagcgtgagagaggtgaagagcctgagcagctgcaactacgcccccgaggacaccggcatgagcgtgtaccccgagccctggggcccccccgtgaccgtgaccagagccgccagccccagcggccccccccccatgaagatcgccggcgactgcagagccatcagacccaccgtggccatcccccacgagcccgtgagcagcagaaccgacgaggccgagacctgggacgtgtgcctgagcggcctgggcagcgccgtgagctacagcgacagagtgggccccttcttcacctacaacaacgaggacttctag

SEQ ID NO: 305586 - protein, 591 aa, Artificial Sequence
  derived and/or modified sequence
MLVGSQSFSPGGPNGIIRSQSFAGFSGLQERRSRCNSFIENSSALKKPQAKLKKMHNLGHKNNNPPKEPQPKRVEEVYRALKNGLDEYLEVHQTELDKLTAQLKDMKRNSRLGVLYDLDKQIKTIERYMRRLEFHISKVDELYEAYCIQRRLQDGASKMKQAFATSPASKAARESLTEINRSFKEYTENMCTIEVELENLLGEFSIKMKGLAGFARLCPGDQYEIFMKYGRQRWKLKGKIEVNGKQSWDGEETVFLPLIVGFISIKVTELKGLATHILVGSVTCETKELFAARPQVVAVDINDLGTIKLNLEITWYPFDVEDMTASSGAGNKAAALQRRMSMYSQGTPETPTFKDHSFFSNLPDDIFENGKAAEEKMPLSLSFSDLPNGDCALTSHSTGSPSNSTNPEITITPAEFNLSSLASQNEGMDDTSSASSRNSLGEGQEPKSHLKEEDPEEPRKPASAPSEACRRQSSGAGAEHLFLENDVAEALLQESEEASELKPVELDTSEGNITKQLVKRLTSAEVPMATDRLLSEGSVGGESEGCRSFLDGSLEDAFNGLLLALEPHKEQYKEFQDLNQEVMNLDDILKK

SEQ ID NO: 305587 - DNA, 5471 bp, Artificial Sequence
  derived and/or modified sequence
ccggggtccccttcacccaagtgagccagctcaggctgtctgcaaagccggaggtgcgggcagctccgggcattgcattggtgcggaggcttttatatgccagagaaccctgagtgtgcccctgacatgacaaggagccgtcgtcgttaggactaccgaccagactcccggaaatcatgttggtaggatcccagtctttttcgcctggagggcccaatgggatcattagaagccagtcctttgcgggtttcagcggcctccaggaaaggcgatccaggtgtaactccttcattgaaaattcctccgctctcaagaagcctcaggccaaactgaagaaaatgcacaatttaggccacaaaaacaacaatccccccaaagagcctcagcctaaaagggtggaagaagtctacagggccttgaaaaatggacttgatgaatatctggaggttcaccagacggagctggacaagttgacagctcagttaaaagatatgaaaagaaactctcgcctgggtgtactgtatgacctagacaagcaaattaaaacaattgaaagatacatgagacgcctggagtttcatataagtaaggtagatgaactctatgaagcttattgtatccagcgacgcctccaggatggtgccagcaaaatgaagcaagccttcgcaacatcccctgccagcaaagctgcccgggagagtctgacagagatcaatcggagcttcaaggagtacacagagaatatgtgcaccattgaagtggagctagagaatctgctgggagaattctccatcaagatgaaaggtctggctggctttgcacgcctctgtcctggagatcaatatgaaattttcatgaagtatggccggcagcggtggaaactgaaaggcaaaatagaagtaaatggcaagcagagctgggatggagaagaaacagtttttctgcccctgatagttgggttcatctccatcaaggtcacggagctcaaagggctagcaactcacatcctggtaggtagcgtgacctgtgagaccaaagagctgtttgcagcccgacctcaggtagtggctgtcgacatcaatgaccttggtaccatcaaactgaacctggaaatcacctggtatccatttgacgtggaggacatgaccgcatcctcaggcgctgggaacaaggcagcagcccttcagaggagaatgtccatgtacagccagggtaccccggaaacgcccaccttcaaagaccactccttctttaggtggctgcatccttccccagacaagcccaggcggctgtctgtcttgagtgccttgcaagacactttctttgccaagctgcaccgcagccgctccttcagtgacctgccctccctcaggccgagtcccaaggccgtgctagagctctattcaaatctacctgatgacatctttgaaaatggaaaggcagccgaggagaaaatgccactgtcgctcagcttcagtgacctgcccaacggggactgcgccctcacctcccactcaacaggctccccttccaactcaacaaatccagaaattaccatcacccctgcggagtttaacctcagcagcttggcctcccagaatgagggtatggatgacaccagctcagcatcttccaggaactccctgggagaaggccaagagccaaagtcacacctgaaggaggaagacccagaggagcccagaaaacctgcctcggccccatctgaggcttgccgccgacagtcctcaggtgctggggctgagcacctgttccttgagaatgatgttgcagaagcacttctgcaagagtctgaggaggcctctgagctcaagcctgtggaactggacacttcggaaggaaacatcacaaagcagctggtcaagaggctcacatctgcagaggtgccaatggccacagacaggctgctctctgagggttctgttggtggagaatctgaaggctgcagatcctttctagatggaagcttagaggatgcttttaatgggcttttacttgcattagaaccacataaagagcagtataaagagtttcaggatctgaaccaagaagtcatgaatttggatgatattctaaaatgcaagccagcagtaagccgcagcaggtcttccagtttaagtctcacagttgaaagtgctttagaaagctttgatttcctgaacacctctgattttgacgaggaggaggatggtgatgaggtttgtaatgttggcggaggtgctgactcagtattttcagacactgagactgagaaacacagttacaggtcggttcacccagaagccagggggcatctcagtgaagcgctcactgaagacacaggagttgggaccagtgtggcaggaagtcctctcccactgaccacaggcaacgagagcctggacatcaccatcgtcaggcacctccagtactgcacccaactcgtgcagcaaattgttttctcaagcaaaaccccatttgtggcaagaagtctcttagagaagctttctaggcagatccaagtgatggagaaactcgcagctgtcagtgatgagaacataggaaatatcagttctgttgtggaagccataccagaatttcacaaaaagctgtctttgctgtcattctggaccaagtgctgcagccctgttggtgtctaccacagcccagcggacagagtgatgaagcagctggaggccagctttgccagaactgtcaacaaagaatatccaggacttgcagacccagtgtttcgaaccctggtgtcccaaattctggaccgggctgagcctctgctttcctccagcctgtcctcggaagtcgtcactgttttccagtattacagttacttcaccagccacggcgtcagtgacctggagagttacctgagccagctggccaggcaagtttccatggttcagactctgcaatcactaagagatgaaaaactgctacaaaccatgagtgaccttgctcccagcaacctcctggcccagcaggaagtactcaggactctggctctgctattaaccagagaggacaacgaagttagtgaggctgtgacgctttacttggcagcagcctccaaaaatcagcatttcagggaaaaggccttgctctattactgtgaagcactaacaaagacaaacctccagctccagaaagcagcttgcctggctctgaaaatccttgaggctactgaaagcattaaaatgctggtgacattgtgtcaatctgatactgaagaaatcagaaatgtggcctcagaaaccctcttgtctctgggagaagatgggcggctggcatatgaacaattggacaaatttcctcgagactgtgttaaagtcggaggtcgtcatggaactgaagttgccacagccttttaattacaggttaactgcctaacagctgtcttaatatctggcccttttcatcaggatggtgctgtggtttgggctggaaattgtttagagcctgagagacacgacaactgaaataaaaatgtaggccaggtgcagtggctcatgcctgtaatcccagtactttgggaggccaacgcaggagaattgcttaagcccaggaggttcaagaccaacctgggcaacatagcaaggccctgtctctacaaaaaaaatagtttaattagtcaggcgtggtggcatgcacctgtagtcccagctacttgggaggctaaggtgggaggattgcttgagcccagaagattcaggctgcagtgagccataattgccccactgcactccagactgggtgacagagcaaaaccctgtctcaaaaaacaaaacaacaacaacaactaaaaaaacatgttatagaaagaattcagagtctcgtttcacagtacctatctacttttcctttggccaatatagaatagggctatggtataattcaaatatattacatcgtcgattgtgtctaataatactcagtgaaagagtccatcttatcttaatatgtatgaaatttaaaaatagccatctttgtacttttttgcaagtttctctataagcttgaaatagtcatgtgatacttcgacaaacatcatatgccttgcagtttttctcggtcgtgttctcagggttgagtagtccccttagctacctaactttactttcaatacaaagcacaaaaaagaatatcttcaaataaaagtttgcctgcagaacctggcaaaatgacccattaggagagtttagatgttttaattttatgtgctcccagctactctggagtctgaggtgggaggatcacttgaggcagaggttgcagtaagctgagattacactactgcactccagcccatgtgacagaggaatgagagccagtctcaaaaaaaaaaacaaaaaactcccataatttattttgtttcttttccccatcctgaaaattcccaaatcatgtttccattatggaaaaatgataagtaaatgactaagaactacattaagattatgcctatacacttaaacaaaaaactcaaagcttatgcttttttttttttaattaatgagagctattttttatgatattcttaccataggggtgttttgctgctaagacaaatcaaaaccaaaagctgtagattcacaaacctgtgatgctctttgaggtggaggaacctagaagtcagagaaatcctaatggagtaggagtggaggaacatttaaagtggtccctccttctgtaaaaatgaccgtgggattagaaagaaggacatcctgaggggtggttactgcccccagggaaatcactcactggtaggattccctggccaaatagttcaaacatcaggtcccattattgcttcagtatcagagatgcaagttcattaagcaaagtacaagaccattcagtagctcttattaaaatatcttttcttcctctaaagagtgtacaaggtggggtatgccaaggtatcaaaacaatatatgtgagtgtaatttaaactgtggaatatcaactgtactatggacgtgtttgtatcatttagatgtcattttaaatatttacattttagcaagacttttaaaaaggactcatttcatttcaaagtgcaaattgtttgccaggcttctggcaaatggttctttcaactgtgaacttatcgtgtacatatctgtatatttataaatattatatatattcatacatccttcactttaaaggtacattgtacagtctgtagttaggaggtatagcctatagcttatgttaaatggttgaaatggttctttttatagaaagtcaaacacagatgttacaggattttgtgtttggtttgtcatttttttattttttattttgactattgcatgagtaattaattccagatcttttgtattcacttctgtattttatgtttggttgaggggtgcttttagttgtgtggcatttgtattcattgatctttcagtcatgtaagttaaaataaaaattatttttgaattactagc

SEQ ID NO: 305588 - protein, 1027 aa, Artificial Sequence
  derived and/or modified sequence
MRVSHTFPVVDCTAACCDLSSCDLAWWFEGRCYLVSCPHKENCEPKKMGPIRSYLTFVLRPVQRPAQLLDYGDMMLNRGSPSGIWGDSPEDIRKDLTFLGKDWGLEEMSEYSDDYRELEKDLLQPSGKQEPRGSAEYTDWGLLPGSEGAFNSSVGDSPAVPAETQQDPELHYLNESASTPAPKLPERSVLLPLPTTPSSGEVLEKEKASQLQEQSSNSSGKEVLMPSHSLPPASLELSSVTVEKSPVLTVTPGSTEHSIPTPPTSAAPSESTPSELPISPTTAPRTVKELTVSAGDNLIITLPDNEVELKAFVAPAPPVETTYNYEWNLISHPTDYQGEIKQGHKQTLNLSQLSVGLYVFKVTVSSENAFGEGFVNVTVKPARRVNLPPVAVVSPQLQELTLPLTSALIDGSQSTDDTEIVSYHWEEINGPFIEEKTSVDSPVLRLSNLDPGNYSFRLTVTDSDGATNSTTAALIVNNAVDYPPVANAGPNHTITLPQNSITLNGNQSSDDHQIVLYEWSLGPGSEGKHVVMQGVQTPYLHLSAMQEGDYTFQLKVTDSSRQQSTAVVTVIVQPENNRPPVAVAGPDKELIFPVESATLDGSSSSDDHGIVFYHWEHVRGPSAVEMENIDKAIATVTGLQVGTYHFRLTVKDQQGLSSTSTLTVAVKKENNSPPRARAGGRHVLVLPNNSITLDGSRSTDDQRIVSYLWIRDGQSPAAGDVIDGSDHSVALQLTNLVEGVYTFHLRVTDSQGASDTDTATVEVQPDPRKSGLVELTLQVGVGQLTEQRKDTLVRQLAVLLNVLDSDIKVQKIRAHSDLSTVIVFYVQSRPPFKVLKAAEVARNLHMRLSKEKADFLLFKVLRVDTAGCLLKCSGHGHCDPLTKRCICSHLWMENLIQRYIWDGESNCEWSIFYVTVLAFTLIVLTGGFTWLCICCCKRQKRTKIRKKTKYTILDNMDEQERMELRPKYGIKHRSTEHNSSLMVSESEFDSDQDTIFSREKMERGNPKVSMNGSIRNGASFSYCSKDR

SEQ ID NO: 305589 - DNA, 99 bp, Artificial Sequence
  derived and/or modified sequence
atggccagcagaattggcctgaggatgcagctgatgagggagcaggcccagcaggaggagcagcgggagaggatgcagcagcaggccgtgatgcactag

SEQ ID NO: 305590 - DNA, 6620 bp, Artificial Sequence
  derived and/or modified sequence
agtagcttcagcctgtcttgggcttggtccagattcgctcctctggggctacgtcccggggaagaggaagcgaggattttgctggggtggggctgtacctcttaacagcaggtgcgcgcgcgagggtgtgaacgtgtgtgtgtgtgtgtgtgtgtgtgtgtgtgtgtgtgtgtgtgtgtgtaagacctgcgatgacgacgaggaggaacaagtgggacggcgagtgatgctcagggccagcagcaacgcatggggcgagcttcagtgtcgccagcagtgaccacaggtacggtatctacttcccagagcgcctggccgagaaataggaaagagggcagccagtaggcaggccaatacccaacaaaagtagaatcgagacgccctgagttcagaaggttgtgcccgtaagcagtgcagcgaggggaggacatattccaatgcagtcatttcacctaacttggaaaccaccagaatcatgcgggtgtctcacaccttccctgtcgtagactgcacggccgcttgctgtgacctgtccagctgtgacctggcctggtggttcgagggccgctgctacctggtgagctgcccccacaaagagaactgtgagcccaagaagatgggccccatcaggtcttatctcacttttgtgctccggcctgttcagaggcctgcacagctgctggactatggggacatgatgctgaacaggggctccccctcggggatctggggggactcacctgaggatatcagaaaggacttgacctttctaggcaaagattggggcctagaggagatgtctgagtactcagatgactaccgggagctggagaaggacctcttgcaacccagtggcaagcaggagcccagagggagtgccgagtacacggactggggcctactgccgggcagcgagggggccttcaactcctctgttggagacagtcctgcggtgccagcggagacgcagcaggaccctgagctccattacctgaatgagtcggcttcaacccctgccccaaaactccctgagagaagtgtgttgcttcccttgccgactactccatcttcaggagaggtgttggagaaagaaaaggcttctcagctccaggaacaatccagcaacagctctggaaaagaggttctaatgccttcccatagtcttcctccggcaagcctggagctcagctcagtcaccgtggagaaaagcccagtgctcacagtcaccccggggagtacagagcacagcatcccaacacctcccactagcgcagccccctctgagtccaccccatctgagctacccatatctcctaccactgctcccaggacagtgaaagaacttacggtatcggctggagataacctaattataactttacccgacaatgaagttgaactgaaggcctttgttgcgccagcgccacctgtagaaacaacctacaactatgaatggaatttaataagccaccccacagactaccaaggtgaaataaaacaaggacacaagcaaactcttaacctctctcaattgtccgtcggactttatgtcttcaaagtcactgtttctagtgaaaacgcctttggagaaggatttgtcaatgtcactgttaagcctgccagaagagtcaacctgccacctgtagcagttgtttctccccaactgcaagagctcactttgcctttgacgtcagccctcattgatggcagccaaagtacagatgatactgaaatagtgagttatcattgggaagaaataaacgggcccttcatagaagagaagacttcagttgactctcccgtcttacgcttgtctaaccttgatcctggtaactatagtttcaggttgactgttacagactcggacggagccactaactctacaactgcagccctaatagtgaacaatgctgtggactacccaccagttgctaatgcaggaccaaatcacaccataactttgccccaaaactccatcactttgaatggaaaccagagcagtgacgatcaccagattgtcctctatgagtggtccctgggtcctgggagtgagggcaaacatgtggtcatgcagggagtacagacgccataccttcatttatctgcaatgcaggaaggagattatacatttcagctgaaggtgacagattcttcaaggcaacagtctactgctgtggtgactgtgattgtccagcctgaaaacaatagacctccagtggctgtggccggccctgataaagagctgatcttcccagtggaaagtgctaccctggatgggagcagcagcagcgatgaccacggcattgtcttctaccactgggagcacgtcagaggccccagtgcagtggagatggaaaatattgacaaagcaatagccactgtgactggtctccaggtggggacctaccacttccgtttgacagtgaaagaccagcagggactgagcagcacgtccaccctcactgtggctgtgaagaaggaaaataatagtcctcccagagcccgggctggtggcagacatgttcttgtgcttcccaataattccattactttggatggttcaaggtctactgatgaccaaagaattgtgtcctatctgtggatccgggatggccagagtccagcagctggagatgtcatcgatggctctgaccacagtgtggctctgcagcttacgaatctggtggagggggtgtacactttccacttgcgagtcaccgacagtcagggggcctcggacacagacactgccactgtggaagtgcagccagaccctaggaagagtggcctggtggagctgaccctgcaggttggtgttgggcagctgacagagcagcggaaggacacccttgtgaggcagctggctgtgctgctgaacgtgctggactcggacattaaggtccagaagattcgggcccactcggatctcagcaccgtgattgtgttttatgtacagagcaggccgcctttcaaggttctcaaagctgctgaagtggcccgaaatctgcacatgcggctctcaaaggagaaggctgacttcttgcttttcaaggtcttgagggttgatacagcaggttgccttctgaagtgttctggccatggtcactgcgaccccctcacaaagcgctgcatttgctctcacttatggatggagaaccttatacagcgttatatctgggatggagagagcaactgtgagtggagtatattctatgtgacagtgttggcttttactcttattgtgctaacaggaggtttcacttggctttgcatctgctgctgcaaaagacaaaaaaggactaaaatcaggaaaaaaacaaagtacaccatcctggataacatggatgaacaggaaagaatggaactgaggcccaaatatggtatcaagcaccgaagcacagagcacaactccagcctgatggtatccgagtctgagtttgacagtgaccaggacacaatcttcagccgagaaaagatggagagagggaatccaaaggtttccatgaatggttccatcagaaatggagcttccttcagttattgctcaaaggacagataatggcgcagttcattgtaaagtggaaggaccccttgaatccaagaccagtcagtgggagttacagcacaaaacccactcttttagaatagttcattgaccttcttccccagtgggttagatgtgtatccccacgtactaaaagaccggtttttgaaggcacaaaacaaaaactttgctcttttaactgagatgcttgttaatagaaataaaggctgggtaaaactctaaggtatatacttaaaagagttttgagtttttgtagctggcacaatctcatattaaagatgaacaacgatttctatctgtagaaccttagagaaggtgaatgaaacaaggttttaaaaagggatgatttctgtcttagctgctgtgattgcctctaaggaacagcattctaaacacggtttctcttgtaggacctgcagtcagatggctgtgtatgttaaaatagcttgtctaagaggcacgggccatctgtggaggtacggagtcttgcatgtagcaagctttctgtgctgacggcaacactcgcacagtgccaagccctcctggtttttaattctgtgctatgtcaatggcagttttcatctctctcaagaaagcagctgttggccattcaagagctaaggaagaatcgtattctaaggactgaggcaatagaaaggggaggaggagcttaatgccgtgcaggttgaaggtagcattgtaacattatcttttctttctctaagaaaaactacactgactcctctcggtgttgtttagcagtatagttctctaatgtaaacggatccccagtttacattaaatgcaatagaagtgattaattcattaagcatttattatgttctgtaggctgtgcgtttggactgccatagatagggataacgactcagcaattgtgtatatattccaaaactctgaaatacagtcagtcttaacttggatggcgtggttatgatactctggtccccgacaggtactttccaaaataacttgacatagatgtattcacttcatatgtttaaaaatacatttaagtttttctaccgaataaatcttatttcaaacatgaaagacaattaaaacattcccacccacaaagcagtactcccgagcaattaactggagttaattgtagcctgctacgttgactggttcagggtagttccccatccacccttggtcctgaggctggtggccttggtggtgcccttggcattttttgtgggaagattagaatgagagatagaaccagtgttgtggtaccaagtgtgagcacacctaaacaatatcctgttgcacaatgcttttttaacacatgggaaaactaggaatgcattgctgatgaagaagcaaggtatttaaacaccagggcaggagtgccagagaaaatgtttccccatgggttcttaaaaaaaattcagcttttaggtgcttttgtcatctcccgcagtattcatcctcatgggaccatcttatttttacttattgtaatttactggggaaaggcagaactaaaaagtgtgtcattttatttttaaaataattgctttgcttatgcctacactttctgtataactagccaattcaatactgtctatagtgttagaaggaaaatgtgatttttttttttaaccagtattgagcttcataagcctagaatctgccttatcaggtgaccagggttatggttgtttgcatgcaaatgtgaatttctggcataggggacagcagcccaaatgtaaagtcatcgggcgtaatgaggaagaagggagtgaacatttaccgctttatgtacataacatatgcagtttacatactcatttgatccttataatcaaccttgaagaggagatactatcattcttatgttgcagatagccctctgaaggcccagagaggttaaataacttcccagaggtcatggccaagaagtagtggctccaagaactgaatgcaaattttttaaactgtagagttctgctttccactaaacaaagaactcctgccttgatggatggagggcaaattctggtggaacttttgggccacctgaaagttctattcccaggactaagaggaatttcttttaatggatccagagagccaaggtcagagggagagatggcctgcatagtctcctgtggatcacacccgggccacccctccctctaggtttacagtggacttcttctgcccctcctccttttctgtccttggccatctcagcctggcctctctgatccttccatcacagaaggatcttgaatctctgggaaatcaaacatcacagtagtgatcagaaagtgagtcctgtcttgtcaccccatttctcatcagaacaaagcacgagatggaatgaccaaccagcattcttcatggtggactgcttatcattgaggatctttgggagataaagcacgctaagagctctggacagagaaaaacaggccctagaatatgggagtgggtgtttgtagggctcacaggctaacaagcactttagttgctggtttacattcaatgaaggaggattcatacccatggcattacaaggctaagcatgtgtatgactaaggaactatctgaaaaacatgcagcaaggtaagaaaatgtaccactcaacaagccagtgatgccaccttttgtgcgcggggaggagagtgactaccattgttttttgtgtgacaaagctatcatggactattttaatcttggttttattgcttaaaatatattatttttccctatgtgttgacaaggtatttctaatatcacactattaaatatatgcactaatctaaataaaggtgtctgtattttctgtaatgcttatttttagggggaaatttgttttctttatgcttcagggtagagggatttcccttgagtataggtcagcaaactgtggcctacagcctgtgtgtgcacgccccatgagccgaaaagtgggtcttatgttttcaaatggttaaaaataaataaaaaaatttgaaacatgtgaactatatgacattcagatttgtgttcataaataaagttttattggaacatatcc

SEQ ID NO: 305591 - protein, 480 aa, Artificial Sequence
  derived and/or modified sequence
MEREKFQQKALKQTKQKKSKSAEFLMVKEDREATEGTGNPAFNMSSPDLSACQTAEKKVIRHDMPDRTLAAHQQKFRLPASAEPKGNEYGRNYFDPLMDEEINPRQCATEVSREVCLMAKGEKAESGVDNTAGLSEKETQKNPRAPMDEADVKSAAHSSQGSIPKKIGPCSMDYDPNLLEEDDELHSQGDSLTDHSVKGKSTVWRIGEAEDYSQDISYLEELEEHRFSVCCSSVADSRYGDFFKHLHFVLVSASSELQLSQWQSQGFWYIILLMFFLWFLRLYLHYLGQWLFLQAISTPVTKFHFSLHIVELCYPTSSLHIGEELPVVVMGPLMLNAILLLLVLIRWGCQLLFASCPDVLSKLIITMGLWTILDPLAVFILDTLLGRLTDNEETPVADAAKLYWMFVRTVQPGILGVVITVLLYILLFVISSLILYLYCLRLHNDSWILDAFQRIHSEETKFFIPYDLEISNQELSYIVK

SEQ ID NO: 305592 - DNA, 1443 bp, Artificial Sequence
  derived and/or modified sequence
atggaacgagaaaaatttcagcagaaagctttgaaacaaactaaacagaaaaagtccaagtccgctgaatttttgatggtgaaggaggacagggaggccacagagggcactggaaaccccgccttcaatatgagctctcccgatctgtctgcctgccaaactgctgagaaaaaagtgatcaggcatgacatgccagacagaacgctcgctgcccaccagcagaaattccggctccccgctagcgctgaaccaaaaggaaatgaatatgggaggaactactttgatccattgatggatgaggagataaatccccgccagtgtgctacggaggtatcacgggaagtctgtctcatggcaaagggagaaaaggccgaaagcggagttgataacactgccggcctgtcagagaaggagacccaaaagaatccacgcgctcccatggatgaggctgatgtcaagagcgccgctcacagctcgcaaggatccatcccaaaaaagatcggaccttgctctatggattatgaccctaacctcctggaggaagatgacgaactacactcacaaggcgattctttgaccgatcacagcgtcaagggtaaatctaccgtgtggcgtatcggagaagctgaagattattcccaagacatctcttacttggaggagctggaagagcatagattttcagtgtgttgctcctcagtcgccgattccagatatggagacttctttaaacatcttcactttgtgctggtctcagcctcttctgagctgcagctgagtcagtggcagagccaggggttctggtacataattttgctgatgttcttcctgtggttcctcagattatacctgcactatctggggcaatggctatttctccaggctatatctacgcctgtgacaaaattccacttctctcttcacatcgtcgaactctgctacccaacatcatccctgcatatcggagaggagctgcccgttgtggtgatgggaccccttatgctgaatgcaatacttctcctgctcgtgttgataaggtggggctgccagcttctttttgcttcgtgccccgatgtgctttccaagctgatcatcactatggggctatggacgatccttgatcccctggcggttttcatcctagacacccttctggggcgcctgacagacaacgaggagacccccgtggccgacgctgcaaagctatactggatgttcgttagaaccgtccagcctggaatcctgggggtggttatcacggtcctgctttacattttgctgttcgtgattagtagcctgatcctgtacctatattgcctgcgtctgcataatgactcttggatactggacgccttccaacgaattcactccgaagagacaaaattcttcatcccttacgacctggagatatcgaaccaagaattatcatatatcgtgaaatag

SEQ ID NO: 305593 - DNA, 1443 bp, Artificial Sequence
  derived and/or modified sequence
atggagcgggagaagttccagcagaaggccctgaagcagaccaagcagaagaagagcaagtctgctgagttcctgatggtgaaggaggaccgggaggccacagagggcactggaaatcctgccttcaacatgagcagcccagacctgagcgcctgccagacagctgagaagaaggtgatcagacatgacatgccagacaggaccctggccgcccaccagcagaagttccggctgcctgccagcgctgagcccaagggaaatgaatatggaagaaactactttgaccccctgatggatgaggagatcaacccccggcagtgtgccacagaggtgtcccgggaggtgtgcctgatggccaagggggagaaggccgagagcggcgtggacaacacagctggcctgtctgagaaggagacccagaagaacccccgggcccccatggatgaagcagatgtgaagtctgctgcccacagcagccagggcagcatccccaagaagattggcccctgcagcatggactatgaccccaacctgctggaggaggatgatgagctgcacagccagggcgacagcctgacagaccacagcgtgaagggcaagagcacagtgtggagaattggagaggccgaggactacagccaggacatctcctacctggaggagctggaggagcaccgcttctctgtgtgctgcagctctgtggccgacagccgctatggagacttcttcaagcacctgcactttgtgctggtgtctgccagcagcgagctgcagctgagccagtggcagagccagggcttctggtacatcatcctgctgatgttcttcctgtggttcctgcggctgtacctgcactacctgggccagtggctgttcctgcaggccatcagcacccctgtgaccaagttccacttcagcctgcacatcgtggagctgtgctaccccaccagcagcctgcacatcggggaggagctgcctgtggtggtgatgggccccctgatgctgaatgccatcctgctgctgctggtgctgatccgctggggctgccagctgctgtttgccagctgcccagatgtgctgagcaagctgatcatcaccatgggcctgtggaccatcctggaccccctggccgtgttcatcctggacaccctgctgggccgcctgacagacaatgaggagacccctgtggctgatgctgccaagctgtactggatgtttgtgaggacagtgcagcccggcatcctgggcgtggtgatcaccgtgctgctgtacatcctgctcttcgtcatcagcagcctcatcctgtacctgtactgcctgcggctgcacaatgacagctggatcctggatgccttccagaggatccacagcgaggagaccaagttcttcatcccctatgacctggagatcagcaaccaggagctgagctacatcgtgaagtag

SEQ ID NO: 305594 - DNA, 1443 bp, Artificial Sequence
  derived and/or modified sequence
atggagcgggagaagttccagcagaaggccctgaagcagaccaagcagaaaaaaagcaagtccgctgaattccttatggttaaggaggatcgtgaggcgaccgagggaacaggtaaccccgccttcaatatgagtagcccagacctttccgcctgtcagaccgccgaaaagaaagtgatccgacacgatatgcctgaccgtactcttgccgcacaccaacaaaaatttcggcttccagcctccgcagagccaaaggggaatgagtacggtcgcaattacttcgatcctctgatggacgaagaaatcaaccctcgccaatgcgcaacagaggtctcgagggaggtctgcttgatggccaagggggaaaaggctgaatcgggggtcgataacaccgcagggctgagtgagaaggagactcagaagaaccctcgcgcacctatggatgaagcagacgtaaagagcgcggcccacagctcacaaggatccattccgaaaaagattggcccctgtagcatggactacgatccaaatctactggaagaagacgacgaactgcactcgcagggggactctttaacagaccattcagtgaagggcaagtctaccgtatggcggataggagaagctgaggattacagtcaggatattagttaccttgaggagctggaagagcaccgcttttctgtgtgctgctcctccgtggcggacagccggtacggcgattttttcaagcacctgcactttgtgctggtatcagccagcagtgaactccagctgtcccagtggcagtcccagggcttctggtatatcatcctgctgatgttcttcctgtggtttcttaggctctacctgcactatctgggccaatggttgtttctgcaagctatcagcacccccgtcaccaagttccatttctcgctgcacatagtggagctgtgttacccaaccagtagcctgcacattggcgaggaactgccagtggtagtgatgggccccctaatgctcaatgctattctactgctgctggtcctgattagatgggggtgccagctcctgtttgcaagctgtcccgatgtgttgtcaaagctgatcatcacaatggggctgtggaccatcctggatcctctggccgtcttcattctagacacgcttttgggacggcttacagacaacgaggaaacaccagtggcagacgcagctaaactgtattggatgttcgttcgcactgtgcagcctgggatccttggcgtcgtcatcactgtgctgctatacattctccttttcgtcatctcaagcctgattctctacctgtattgccttaggctgcacaacgatagttggatcctggacgcgttccaacgtatacactctgaggagacaaaattcttcatcccatacgacctggagatcagcaaccaagagctctcgtatatcgtgaagtag

SEQ ID NO: 305595 - DNA, 1489 bp, Artificial Sequence
  derived and/or modified sequence
agagactggattgaaatctgtgcattgccaagggcaagaagctgagaacatggagagagagaagtttcagcagaaggctctgaagcaaactaagcagaagaaatccaagtcggctgaatttctgatggttaaagaagatagagaagctacagaaggcactggaaatccagcttttaacatgagcagtccagatctctcagcatgtcagactgcagaaaagaaagttattagacacgacatgccggatcgcacccttgcagctcaccaacaaaaattcaggctgccagcctctgcagaaccaaaaggaaatgaatacggcagaaattactttgacccactgatggatgaggaaataaacccaaggcagtgtgcgacggaggtcagcagagaagtttgtctaatggctaaaggagagaaagcagaatcaggagtggataatacagctggcctttcagagaaggaaacacagaagaatcctcgtgcaccaatggatgaggcagacgttaaatccgcagcacactcttctcaggggagcattcctaaaaaaatcggtccctgttctatggactatgatcccaatctcttagaagaagacgatgaactacactctcagggagatagcctgacggatcattctgtgaaaggaaaatcaactgtttggagaattggagaagctgaagattattcacaggacatatcttacttggaggaactggaggaacaccgattttctgtttgctgttcttcagttgctgatagtagatatggagacttcttcaagcatctccattttgtgctggtatcagcgtcttcagaacttcagttatctcaatggcaaagccagggcttctggtacattatactgctgatgttttttctctggttcctgaggctctacctgcattacttgggccagtggcttttcctccaggccatttcaactcctgttacaaaattccatttttctcttcacatcgttgagctttgctacccaacttcctcacttcacattggagaagagcttcccgtggttgtgatggggcctttaatgctgaatgcaatcctgcttcttttggttttgatcagatggggctgtcagctactctttgcctcctgtcctgatgtcttgtcaaagttaatcattaccatgggactatggacaattctggacccattggcagtgtttatactggatactctcctggggcggcttacagataatgaggagactcctgtggcggatgccgcgaagctctactggatgtttgtaagaaccgtgcagccaggcattcttggcgtggtgatcacagtgctgctttacatcctcctgttcgtcatttcttctttgattttatatttatattgtcttaggttgcacaatgactcttggatattagatgcttttcagcgcatccacagtgaagaaaccaagttcttcataccgtatgacttggagatttccaatcaggagctaagttatatagtgaaa

SEQ ID NO: 305596 - DNA, 1443 bp, Artificial Sequence
  derived and/or modified sequence
atggaacgagagaagtttcagcaaaaggccctaaaacagacaaagcagaaaaaatccaaatccgcagagtttctgatggtgaaggaggaccgcgaagccacagaaggaacaggtaacccagccttcaacatgagtagccccgacttgagcgcctgtcaaaccgccgaaaagaaagtgattcgccatgatatgcccgaccggacactggctgcacaccagcagaagtttcggctcccagcaagcgccgaaccaaaaggcaatgaatatggtagaaactacttcgacccgctgatggacgaagagattaaccccagacagtgcgccacagaggtgagtcgggaggtgtgtttaatggcaaagggggagaaagcagagagcggagtagacaacacggcagggttgagcgagaaagagacacaaaaaaatcccagggcgccaatggatgaagccgatgtgaaatctgctgcgcattcttcgcaaggttctatccctaagaaaattggcccttgcagtatggactatgacccgaatttattggaggaagacgatgagctccactctcaaggcgatagtctaaccgatcatagtgtgaagggtaagagcacagtgtggaggataggtgaggctgaagattatagccaggatattagttatctagaggagctcgaagaacaccgattcagcgtctgctgttccagcgtagccgatagccggtatggcgacttcttcaagcacctgcacttcgtcctggtgtccgcaagctctgagctccagctaagccagtggcagtcccaggggttttggtacattatccttttaatgttcttcttatggtttcttcgattgtatctgcactatctgggacaatggctgtttctgcaggcaattagcaccccggtgaccaagtttcatttctcactgcacatcgtggaactctgctaccccaccagtagtctccacattggggaggagctgccagtcgttgtgatggggcctctgatgctcaatgcaatactgttgctgctggtgctgatcaggtggggatgtcagctgctgtttgcgagctgtccagacgtcttaagcaagctcatcataacaatgggattgtggacaattttagatccactcgcagtgtttattctggacactttgctggggaggctaaccgataacgaagaaactcctgtagccgatgccgctaagttatattggatgtttgtacgcacagtccagccagggatactaggagtcgtgattacggtactgctatacatcctcctattcgtgatcagcagcctgatactttacttgtactgccttcgccttcacaatgactcttggatcttggatgcttttcagcgcatccattcagaggaaaccaagttttttatcccttatgacttggaaatctcaaaccaggagctaagttacatagtgaagtag

SEQ ID NO: 305597 - DNA, 1443 bp, Artificial Sequence
  derived and/or modified sequence
atggagagagagaagttccagcagaaggccctgaagcagaccaagcagaagaagagcaagagcgccgagttcctgatggtgaaggaggacagagaggccaccgagggcaccggcaaccccgccttcaacatgagcagccccgacctgagcgcctgccagaccgccgagaagaaggtgatcagacacgacatgcccgacagaaccctggccgcccaccagcagaagttcagactgcccgccagcgccgagcccaagggcaacgagtacggcagaaactacttcgaccccctgatggacgaggagatcaaccccagacagtgcgccaccgaggtgagcagagaggtgtgcctgatggccaagggcgagaaggccgagagcggcgtggacaacaccgccggcctgagcgagaaggagacccagaagaaccccagagcccccatggacgaggccgacgtgaagagcgccgcccacagcagccagggcagcatccccaagaagatcggcccctgcagcatggactacgaccccaacctgctggaggaggacgacgagctgcacagccagggcgacagcctgaccgaccacagcgtgaagggcaagagcaccgtgtggagaatcggcgaggccgaggactacagccaggacatcagctacctggaggagctggaggagcacagattcagcgtgtgctgcagcagcgtggccgacagcagatacggcgacttcttcaagcacctgcacttcgtgctggtgagcgccagcagcgagctgcagctgagccagtggcagagccagggcttctggtacatcatcctgctgatgttcttcctgtggttcctgagactgtacctgcactacctgggccagtggctgttcctgcaggccatcagcacccccgtgaccaagttccacttcagcctgcacatcgtggagctgtgctaccccaccagcagcctgcacatcggcgaggagctgcccgtggtggtgatgggccccctgatgctgaacgccatcctgctgctgctggtgctgatcagatggggctgccagctgctgttcgccagctgccccgacgtgctgagcaagctgatcatcaccatgggcctgtggaccatcctggaccccctggccgtgttcatcctggacaccctgctgggcagactgaccgacaacgaggagacccccgtggccgacgccgccaagctgtactggatgttcgtgagaaccgtgcagcccggcatcctgggcgtggtgatcaccgtgctgctgtacatcctgctgttcgtgatcagcagcctgatcctgtacctgtactgcctgagactgcacaacgacagctggatcctggacgccttccagagaatccacagcgaggagaccaagttcttcatcccctacgacctggagatcagcaaccaggagctgagctacatcgtgaagtag

SEQ ID NO: 305598 - protein, 519 aa, Artificial Sequence
  derived and/or modified sequence
MDADEGQDMSQVSGKESPPVSDTPDEGDEPMPIPEDLSTTSGGQQSSKSDRVVASNVKVETQSDEENGRACEMNGEECAEDLRMLDASGEKMNGSHRDQGSSALSGVGGIRLPNGKLKCDICGIICIGPNVLMVHKRSHTGERPFQCNQCGASFTQKGNLLRHIKLHSGEKPFKCHLCNYACRRRDALTGHLRTHSVGKPHKCGYCGRSYKQRSSLEEHKERCHNYLESMGLPGTLYPVIKEETNHSEMAEDLCKIGSERSLVLDRLASNVAKRKSSMPQKFLGDKGLSDTPYDSSASYEKENEMMKSHVMDQAINNAINYLGAESLRPLVQTPPGGSEVVPVISPMYQLHKPLAEGTPRSNHSAQDSAVENLLLLSKAKLVPSEREASPSNSCQDSTDTESNNEEQRSGLIYLTNHIAPHARNGLSLKEEHRAYDLLRAASENSQDALRVVSTSGEQMKVYKCEHCRVLFLDHVMYTIHMGCHGFRDPFECNMCGYHSQDRYEFSSHITRGEHRFHMS

SEQ ID NO: 305599 - DNA, 6202 bp, Artificial Sequence
  derived and/or modified sequence
gaattccggcgtcgcggacgcatcccagtctgggcgggacgctcggccgcggcgaggcgggcaagcctggcagggcagagggagccccggctccgaggttgctcttcgcccccgaggatcagtcttggccccaaagcgcgacgcacaaatccacataacctgaggaccatggatgctgatgagggtcaagacatgtcccaagtttcagggaaggaaagcccccctgtaagcgatactccagatgagggcgatgagcccatgccgatccccgaggacctctccaccacctcgggaggacagcaaagctccaagagtgacagagtcgtggccagtaatgttaaagtagagactcagagtgatgaagagaatgggcgtgcctgtgaaatgaatggggaagaatgtgcggaggatttacgaatgcttgatgcctcgggagagaaaatgaatggctcccacagggaccaaggcagctcggctttgtcgggagttggaggcattcgacttcctaacggaaaactaaagtgtgatatctgtgggatcatttgcatcgggcccaatgtgctcatggttcacaaaagaagccacactggagaacggcccttccagtgcaatcagtgcggggcctcattcacccagaagggcaacctgctccggcacatcaagctgcattccggggagaagcccttcaaatgccacctctgcaactacgcctgccgccggagggacgccctcactggccacctgaggacgcactccgttggtaaacctcacaaatgtggatattgtggccgaagctataaacagcgaagctctttagaggaacataaagagcgctgccacaactacttggaaagcatgggccttccgggcacactgtacccagtcattaaagaagaaactaatcacagtgaaatggcagaagacctgtgcaagataggatcagagagatctctcgtgctggacagactagcaagtaacgtcgccaaacgtaagagctctatgcctcagaaatttcttggggacaagggcctgtccgacacgccctacgacagcagcgccagctacgagaaggagaacgaaatgatgaagtcccacgtgatggaccaagccatcaacaacgccatcaactacctgggggccgagtccctgcgcccgctggtgcagacgcccccgggcggttccgaggtggtcccggtcatcagcccgatgtaccagctgcacaagccgctcgcggagggcaccccgcgctccaaccactcggcccaggacagcgccgtggagaacctgctgctgctctccaaggccaagttggtgccctcggagcgcgaggcgtccccgagcaacagctgccaagactccacggacaccgagagcaacaacgaggagcagcgcagcggtctcatctacctgaccaaccacatcgccccgcacgcgcgcaacgggctgtcgctcaaggaggagcaccgcgcctacgacctgctgcgcgccgcctccgagaactcgcaggacgcgctccgcgtggtcagcaccagcggggagcagatgaaggtgtacaagtgcgaacactgccgggtgctcttcctggatcacgtcatgtacaccatccacatgggctgccacggcttccgtgatccttttgagtgcaacatgtgcggctaccacagccaggaccggtacgagttctcgtcgcacataacgcgaggggagcaccgcttccacatgagctaaagccctcccgcgcccccaccccagaccccgagccaccccaggaaaagcacaaggactgccgccttctcgctcccgccagcagcatagactggactggaccagacaatgttgtgtttggatttgtaactgttttttgttttttgtttgagttggttgattggggtttgatttgcttttgaaaagatttttatttttagaggcagggctgcattgggagcatccagaactgctaccttcctagatgtttccccagaccgctggctgagattccctcacctgtcgcttcctagaatccccttctccaaacgattagtctaaattttcagagagaaatagataaaacacgccacagcctgggaaggagcgtgctctaccctgtgctaagcacggggttcgcgcaccaggtgtctttttccagtccccagaagcagagagcacagcccctgctgtgtgggtctgcaggtgagcagacaggacaggtgtgccgccacccaagtgccaagacacagcagggccaacaacctgtgcccaggccagcttcgagctacatgcatctagggcggagaggctgcacttgtgagagaaaatactatttcaagtcatattctgcgtaggaaaatgaattggttggggaaagtcgtgtctgtcagactgccctgggtggagggagacgccgggctagagcctttgggatcgtcctggattcactggctttgcggaggctgctcagatggcctgagcctcccgaggcttgctgccccgtaggaggagactgtcttcccgtgggcatatctggggagccctgttccccgctttttcactcccatacctttaatggcccccaaaatctgtcactacaatttaaacaccagtcccgaaatttggatcttctttctttttgaatctctcaaacggcaacattcctcagaaaccaaagctttatttcaaatctcttccttccctggctggttccatctagtaccagaggcctcttttcctgaagaaatccaatcctagccctcattttaattatgtacatctgtttgtagccacaagcctgaatttctcagtgttggtaagtttctttacctaccctcactatatattattctcgttttaaaacccataaaggagtgatttagaacagtcattaattttcaactcaatgaaatatgtgaagcccagcatctctgttgctaacacacagagctcacctgtttgaaaccaagctttcaaacatgttgaagctctttactgtaaaggcaagccagcatgtgtgtccacacatacataggatggctggctctgcacctgtaggatattggaatgcacagggcaattgagggactgagccagaccttcggagagtaatgccaccagatcccctaggaaagaggaggcaaatggcactgcaggtgagaaccccgcccatccgtgctatgacatggaggcactgaagcccgaggaaggtgtgtggagattctaatcccaacaagcaagggtctccttcaagattaatgctatcaatcattaaggtcattactctcaaccacctaggcaatgaagaatataccatttcaaatatttacagtacttgtcttcaccaacactgtcccaaggtgaaatgaagcaacagagaggaaattgtacataagtacctcagcatttaatccaaacaggggttcttagtctcagcactatgacattttgggctgactacttatttgttaggcgggagctctcctgtgcattgtaggataattagcagtatccctggtggctacccaatagacgccagtagcaccccgaattgacaacccaaactctccagacatcaccaactgtcccctgcgaggagaaatcactcctgggggagaaccactgacccaaatgaattctaaaccaatcaaatgtctgggaagccctccaagaaaaaaaatagaaaagcacttgaagaatattcccaatattcccggtcagcagtatcaaggctgacttgtgttcatgtggagtcattataaattctataaatcaattattccccttcggtcttaaaaatatatttcctcataaacatttgagttttgttgaaaagatggagtttacaaagataccattcttgagtcatggatttctctgctcacagaagggtgtggcatttggaaacgggaataaacaaaattgctgcaccaatgcactgagtgaaggaagagagacagaggatcaagggctttagacagcactccttcaatatgcaatcacagagaaagatgcgccttatccaagttaatatctctaaggtgagagccttcttagagtcagtttgttgcaaatttcacctactctgttcttttccatccatccccctgagtcagttggttgaagggagttattttttcaagtggaattcaaacaaagctcaaaccagaactgtaaatagtgattgcaggaattcttttctaaactgctttgccctttcctctcactgccttttatagccaatataaatgtctctttgcacaccttttgttgtggttttatattgtaacaccatttttctttgaaactattgtatttaaagtaaggtttcatattatgtcagcaagtaattaacttatgtttaaaaggtggccatatcatgtaccaaaagttgctgaagtttctcttctagctggtaaagtaggagtttgcatgacttcacactttttttgcgtagtttcttctgttgtatgatggcgtgagtgtgtgtcttgggtaccgctgtgtactactgtgtgcctagattccatgcactctcgttgtgtttgaagtaaatattggagaccggagggtaacaggttggcctgttgattacagctagtaatcgctgtgtcttgttccgccccctccctgacaccccagcttcccaggatgtggaaagcctggatctcagctccttgccccatatcccttctgtaatttgtacctaaagagtgtgattatcctaattcaagagtcactaaaactcatcacattatcattgcatatcagcaaagggtaaagtcctagcaccaattgcttcacataccagcatgttccatttccaatttagaattagccacataataaaatcttagaatcttccttgagaaagagctgcctgagatgtagttttgttatatggttccccaccgaccatttttgtgcttttttcttgttttgttttgttttgactgcactgtgagttttgtagtgtcctcttcttgccaaaacaaacgcgagatgaactggacttatgtagacaaatcgtgatgccagtgtatccttcctttcttcagttccagcaataatgaatggtcaacttttttaaaatctagatctctctcattcatttcaatgtatttttactttaagatgaaccaaaattattagacttatttaagatgtacaggcatcagaaaaaagaagcacataatgcttttggtgcgatggcactcactgtgaacatgtgtaaccacatattaatatgcaatattgtttccaatactttctaatacagttttttataatgttgtgtgtggtgattgttcaggtcgaatctgttgtatccagtacagctttaggtcttcagctgcccttctggcgagtacatgcacaggattgtaaatgagaaatgcagtcatatttccagtctgcctctatgatgatgttaaattattgctgtttagctgtgaacaagggatgtaccactggaggaatagagtatccttttgtacacattttgaaatgcttcttctgtagtgatagaacaaataaatgcaacgaatactctgtctgccctatcccgtgaagtccacactggcgtaagagaaggcccagcagagcaggaatctgcctagactttctcccaatgagatcccaatatgagagggagaagagatgggcctcaggacagctgcaataccacttgggaacacatgtggtgtcttgatgtggccagcgcagcagttcagcacaacgtacctcccatctacaacagtgctggacgtgggaattctaagtcccagtcttgagggtgggtggagatggagggcaacaagagatacatttccagttctccactgcagcatgcttcagtcattctgtgagtggccgggcccagggccctcacaatttcactaccttgtcttttacatagtcataagaattatcctcaacatagccttttgacgctgtaaatcttgagtattcatttacccttttctgatctcctggaaacagctgcctgcctgcattgcacttctcttcccgaggagtggggtaaatttaaaagtcaagttatagtttggatgttagtatagaattttgaaattgggaattaaaaatcaggactggggactgggagaccaaaaatttctgatcccatttctgatggatgtgtcacaccttttctgtcaaaataaaatgtcttggaggttatgactccttggtgaaa

SEQ ID NO: 305600 - DNA, 6189 bp, Artificial Sequence
  derived and/or modified sequence
cgcggcgcatcccagcctgggcgggacgctcggccgcggcgaggcgggcaagcctggcagggcagagggagccccggctccgaggttgctcttcgcacccgaggatcagtcttggccccaaagcgcgacgcacaaatccacataacctgaggaccatggatgctgatgagggtcaagacatgtcccaagtttcagggaaggaaagcccccctgtaagcgatactccagatgagggcgatgagcccatgccgatccccgaggacctctccaccacctcgggaggacagcaaagctccaagagtgacagagtcgtggccagtaatgttaaagtagagactcagagtgatgaagagaatgggcgtgcctgtgaaatgaatggggaagaatgtgcggaggatttacgaatgcttgatgcctcgggagagaaaatgaatggctcccacagggaccaaggcagctcggctttgtcgggagttggaggcattcgacttcctaacggaaaactaaagtgtgatatctgtgggatcatttgcatcgggcccaatgtgctcatggttcacaaaagaagccacactggagaacggcccttccagtgcaatcagtgcggggcctcattcacccagaagggcaacctgctccggcacatcaagctgcattccggggagaagcccttcaaatgccacctctgcaactacgcctgccgccggagggacgccctcactggccacctgaggacgcactccgttggtaaacctcacaaatgtggatattgtggccgaagctataaacagcgaagctctttagaggaacataaagagcgctgccacaactacttggaaagcatgggccttccgggcacactgtacccagtcattaaagaagaaactaatcacagtgaaatggcagaagacctgtgcaagataggatcagagagatctctcgtgctggacagactagcaagtaacgtcgccaaacgtaagagctctatgcctcagaaatttcttggggacaagggcctgtccgacacgccctacgacagcagcgccagctacgagaaggagaacgaaatgatgaagtcccacgtgatggaccaagccatcaacaacgccatcaactacctgggggccgagtccctgcgcccgctggtgcagacgcccccgggcggttccgaggtggtcccggtcatcagcccgatgtaccagctgcacaagccgctcgcggagggcaccccgcgctccaaccactcggcccaggacagcgccgtggagaacctgctgctgctctccaaggccaagttggtgccctcggagcgcgaggcgtccccgagcaacagctgccaagactccacggacaccgagagcaacaacgaggagcagcgcagcggtctcatctacctgaccaaccacatcgccccgcacgcgcgcaacgggctgtcgctcaaggaggagcaccgcgcctacgacctgctgcgcgccgcctccgagaactcgcaggacgcgctccgcgtggtcagcaccagcggggagcagatgaaggtgtacaagtgcgaacactgccgggtgctcttcctggatcacgtcatgtacaccatccacatgggctgccacggcttccgtgatccttttgagtgcaacatgtgcggctaccacagccaggaccggtacgagttctcgtcgcacataacgcgaggggagcaccgcttccacatgagctaaagccctcccgcgcccccaccccagaccccgagccaccccaggaaaagcacaaggactgccgccttctcgctcccgccagcagcatagactggactggaccagacaatgttgtgtttggatttgtaactgttttttgttttttgtttgagttggttgattggggtttgatttgcttttgaaaagatttttatttttagaggcagggctgcattgggagcatccagaactgctaccttcctagatgtttccccagaccgctggctgagattccctcacctgtcgcttcctagaatccccttctccaaacgattagtctaaattttcagagagaaatagataaaacacgccacagcctgggaaggagcgtgctctaccctgtgctaagcacggggttcgcgcaccaggtgtctttttccagtccccagaagcagagagcacagcccctgctgtgtgggtctgcaggtgagcagacaggacaggtgtgccgccacccaagtgccaagacacagcagggccaacaacctgtgcccaggccagcttcgagctacatgcatctagggcggagaggctgcacttgtgagagaaaatactatttcaagtcatattctgcgtaggaaaatgaattggttggggaaagtcgtgtctgtcagactgccctgggtggagggagacgccgggctagagcctttgggatcgtcctggattcactggctttgcggaggctgctcagatggcctgagcctcccgaggcttgctgccccgtaggaggagactgtcttcccgtgggcatatctggggagccctgttccccgctttttcactcccatacctttaatggcccccaaaatctgtcactacaatttaaacaccagtcccgaaatttggatcttctttctttttgaatctctcaaacggcaacattcctcagaaaccaaagctttatttcaaatctcttccttccctggctggttccatctagtaccagaggcctcttttcctgaagaaatccaatcctagccctcattttaattatgtacatctgtttgtagccacaagcctgaatttctcagtgttggtaagtttctttacctaccctcactatatattattctcgttttaaaacccataaaggagtgatttagaacagtcattaattttcaactcaatgaaatatgtgaagcccagcatctctgttgctaacacacagagctcacctgtttgaaaccaagctttcaaacatgttgaagctctttactgtaaaggcaagccagcatgtgtgtccacacatacataggatggctggctctgcacctgtaggatattggaatgcacagggcaattgagggactgagccagaccttcggagagtaatgccaccagatcccctaggaaagaggaggcaaatggcactgcaggtgagaaccccgcccatccgtgctatgacatggaggcactgaagcccgaggaaggtgtgtggagattctaatcccaacaagcaagggtctccttcaagattaatgctatcaatcattaaggtcattactctcaaccacctaggcaatgaagaatataccatttcaaatatttacagtacttgtcttcaccaacactgtcccaaggtgaaatgaagcaacagagaggaaattgtacataagtacctcagcatttaatccaaacaggggttcttagtctcagcactatgacattttgggctgactacttatttgttaggcgggagctctcctgtgcattgtaggataattagcagtatccctggtggctacccaatagacgccagtagcaccccgaattgacaacccaaactctccagacatcaccaactgtcccctgcgaggagaaatcactcctgggggagaaccactgacccaaatgaattctaaaccaatcaaatgtctgggaagccctccaagaaaaaaaatagaaaagcacttgaagaatattcccaatattcccggtcagcagtatcaaggctgacttgtgttcatgtggagtcattataaattctataaatcaattattccccttcggtcttaaaaatatatttcctcataaacatttgagttttgttgaaaagatggagtttacaaagataccattcttgagtcatggatttctctgctcacagaagggtgtggcatttggaaacgggaataaacaaaattgctgcaccaatgcactgagtgaaggaagagagacagaggatcaagggctttagacagcactccttcaatatgcaatcacagagaaagatgcgccttatccaagttaatatctctaaggtgagagccttcttagagtcagtttgttgcaaatttcacctactctgttcttttccatccatccccctgagtcagttggttgaagggagttattttttcaagtggaattcaaacaaagctcaaaccagaactgtaaatagtgattgcaggaattcttttctaaactgctttgccctttcctctcactgccttttatagccaatataaatgtctctttgcacaccttttgttgtggttttatattgtaacaccatttttctttgaaactattgtatttaaagtaaggtttcatattatgtcagcaagtaattaacttatgtttaaaaggtggccatatcatgtaccaaaagttgctgaagtttctcttctagctggtaaagtaggagtttgcatgacttcacactttttttgcgtagtttcttctgttgtatgatggcgtgagtgtgtgtcttgggtaccgctgtgtactactgtgtgcctagattccatgcactctcgttgtgtttgaagtaaatattggagaccggagggtaacaggttggcctgttgattacagctagtaatcgctgtgtcttgttccgccccctccctgacaccccagcttcccaggatgtggaaagcctggatctcagctccttgccccatatcccttctgtaatttgtacctaaagagtgtgattatcctaattcaagagtcactaaaactcatcacattatcattgcatatcagcaaagggtaaagtcctagcaccaattgcttcacataccagcatgttccatttccaatttagaattagccacataataaaatcttagaatcttccttgagaaagagctgcctgagatgtagttttgttatatggttccccaccgaccatttttgtgcttttttcttgttttgttttgttttgactgcactgtgagttttgtagtgtcctcttcttgccaaaacaaacgcgagatgaactggacttatgtagacaaatcgtgatgccagtgtatccttcctttcttcagttccagcaataatgaatggtcaacttttttaaaatctagatctctctcattcatttcaatgtatttttactttaagatgaaccaaaattattagacttatttaagatgtacaggcatcagaaaaaagaagcacataatgcttttggtgcgatggcactcactgtgaacatgtgtaaccacatattaatatgcaatattgtttccaatactttctaatacagttttttataatgttgtgtgtggtgattgttcaggtcgaatctgttgtatccagtacagctttaggtcttcagctgcccttctggcgagtacatgcacaggattgtaaatgagaaatgcagtcatatttccagtctgcctctatgatgatgttaaattattgctgtttagctgtgaacaagggatgtaccactggaggaatagagtatccttttgtacacattttgaaatgcttcttctgtagtgatagaacaaataaatgcaacgaatactctgtctgccctatcccgtgaagtccacactggcgtaagagaaggcccagcagagcaggaatctgcctagactttctcccaatgagatcccaatatgagagggagaagagatgggcctcaggacagctgcaataccacttgggaacacatgtggtgtcttgatgtggccagcgcagcagttcagcacaacgtacctcccatctacaacagtgctggacgtgggaattctaagtcccagtcttgagggtgggtggagatggagggcaacaagagatacatttccagttctccactgcagcatgcttcagtcattctgtgagtggccgggcccagggccctcacaatttcactaccttgtcttttacatagtcataagaattatcctcaacatagccttttgacgctgtaaatcttgagtattcatttacccttttctgatctcctggaaacagctgcctgcctgcattgcacttctcttcccgaggagtggggtaaatttaaaagtcaagttatagtttggatgttagtatagaattttgaaattgggaattaaaaatcaggactggggactgggagaccaaaaatttctgatcccatttctgatggatgtgtcacaccttttctgtcaaaataaaatgtcttggaggttatgactccttggtgaaa

SEQ ID NO: 305601 - protein, 477 aa, Artificial Sequence
  derived and/or modified sequence
MDADEGQDMSQVSGKESPPVSDTPDEGDEPMPIPEDLSTTSGGQQSSKSDRVVASNVKVETQSDEENGRACEMNGEECAEDLRMLDASGEKMNGSHRDQGSSALSGVGGIRLPNGKLKCDICGIICIGPNVLMVHKRSHTGERPFQCNQCGASFTQKGNLLRHIKLHSGEKPFKCHLCNYACRRRDALTGHLRTHSVIKEETNHSEMAEDLCKIGSERSLVLDRLASNVAKRKSSMPQKFLGDKGLSDTPYDSSASYEKENEMMKSHVMDQAINNAINYLGAESLRPLVQTPPGGSEVVPVISPMYQLHKPLAEGTPRSNHSAQDSAVENLLLLSKAKLVPSEREASPSNSCQDSTDTESNNEEQRSGLIYLTNHIAPHARNGLSLKEEHRAYDLLRAASENSQDALRVVSTSGEQMKVYKCEHCRVLFLDHVMYTIHMGCHGFRDPFECNMCGYHSQDRYEFSSHITRGEHRFHMS

SEQ ID NO: 305602 - protein, 226 aa, Artificial Sequence
  derived and/or modified sequence
MDADEGQDMSQVSGKESPPVSDTPDEGDEPMPIPEDLSTTSGGQQSSKSDRVVASNVKVETQSDEENGRACEMNGEECAEDLRMLDASGEKMNGSHRDQGSSALSGVGGIRLPNGKLKCDICGIICIGPNVLMVHKRSHTGERPFQCNQCGASFTQKGNLLRHIKLHSGEKPFKCHLCNYACRRRDALTGHLRTHSVIKEETNHSEMAEDLCKIGSEISRAGQTSK

SEQ ID NO: 305603 - DNA, 3487 bp, Artificial Sequence
  derived and/or modified sequence
cgcggcgcatcccagcctgggcgggacgctcggccgcggcgaggcgggcaagcctggcagggcagagggagccccggctccgaggttgctcttcgcacccgaggatcagtcttggccccaaagcgcgacgcacaaatccacataacctgaggaccatggatgctgatgagggtcaagacatgtcccaagtttcagggaaggaaagcccccctgtaagcgatactccagatgagggcgatgagcccatgccgatccccgaggacctctccaccacctcgggaggacagcaaagctccaagagtgacagagtcgtggccagtaatgttaaagtagagactcagagtgatgaagagaatgggcgtgcctgtgaaatgaatggggaagaatgtgcggaggatttacgaatgcttgatgcctcgggagagaaaatgaatggctcccacagggaccaaggcagctcggctttgtcgggagttggaggcattcgacttcctaacggaaaactaaagtgtgatatctgtgggatcatttgcatcgggcccaatgtgctcatggttcacaaaagaagccacactggagaacggcccttccagtgcaatcagtgcggggcctcattcacccagaagggcaacctgctccggcacatcaagctgcattccggggagaagcccttcaaatgccacctctgcaactacgcctgccgccggagggacgccctcactggccacctgaggacgcactccgtcattaaagaagaaactaatcacagtgaaatggcagaagacctgtgcaagataggatcagagagatctctcgtgctggacagactagcaagtaacgtcgccaaacgtaagagctctatgcctcagaaatttcttggggacaagggcctgtccgacacgccctacgacagcagcgccagctacgagaaggagaacgaaatgatgaagtcccacgtgatggaccaagccatcaacaacgccatcaactacctgggggccgagtccctgcgcccgctggtgcagacgcccccgggcggttccgaggtggtcccggtcatcagcccgatgtaccagctgcacaagccgctcgcggagggcaccccgcgctccaaccactcggcccaggacagcgccgtggagaacctgctgctgctctccaaggccaagttggtgccctcggagcgcgaggcgtccccgagcaacagctgccaagactccacggacaccgagagcaacaacgaggagcagcgcagcggtctcatctacctgaccaaccacatcgccccgcacgcgcgcaacgggctgtcgctcaaggaggagcaccgcgcctacgacctgctgcgcgccgcctccgagaactcgcaggacgcgctccgcgtggtcagcaccagcggggagcagatgaaggtgtacaagtgcgaacactgccgggtgctcttcctggatcacgtcatgtacaccatccacatgggctgccacggcttccgtgatccttttgagtgcaacatgtgcggctaccacagccaggaccggtacgagttctcgtcgcacataacgcgaggggagcaccgcttccacatgagctaaagccctcccgcgcccccaccccagaccccgagccaccccaggaaaagcacaaggactgccgccttctcgctcccgccagcagcatagactggactggaccagacaatgttgtgtttggatttgtaactgttttttgttttttgtttgagttggttgattggggtttgatttgcttttgaaaagatttttatttttagaggcagggctgcattgggagcatccagaactgctaccttcctagatgtttccccagaccgctggctgagattccctcacctgtcgcttcctagaatccccttctccaaacgattagtctaaattttcagagagaaatagataaaacacgccacagcctgggaaggagcgtgctctaccctgtgctaagcacggggttcgcgcaccaggtgtctttttccagtccccagaagcagagagcacagcccctgctgtgtgggtctgcaggtgagcagacaggacaggtgtgccgccacccaagtgccaagacacagcagggccaacaacctgtgcccaggccagcttcgagctacatgcatctagggcggagaggctgcacttgtgagagaaaatactatttcaagtcatattctgcgtaggaaaatgaattggttggggaaagtcgtgtctgtcagactgccctgggtggagggagacgccgggctagagcctttgggatcgtcctggattcactggctttgcggaggctgctcagatggcctgagcctcccgaggcttgctgccccgtaggaggagactgtcttcccgtgggcatatctggggagccctgttccccgctttttcactcccatacctttaatggcccccaaaatctgtcactacaatttaaacaccagtcccgaaatttggatcttctttctttttgaatctctcaaacggcaacattcctcagaaaccaaagctttatttcaaatctcttccttccctggctggttccatctagtaccagaggcctcttttcctgaagaaatccaatcctagccctcattttaattatgtacatctgtttgtagccacaagcctgaatttctcagtgttggtaagtttctttacctaccctcactatatattattctcgttttaaaacccataaaggagtgatttagaacagtcattaattttcaactcaatgaaatatgtgaagcccagcatctctgttgctaacacacagagctcacctgtttgaaaccaagctttcaaacatgttgaagctctttactgtaaaggcaagccagcatgtgtgtccacacatacataggatggctggctctgcacctgtaggatattggaatgcacagggcaattgagggactgagccagaccttcggagagtaatgccaccagatcccctaggaaagaggaggcaaatggcactgcaggtgagaaccccgcccatccgtgctatgacatggaggcactgaagcccgaggaaggtgtgtggagattctaatcccaacaagcaagggtctccttcaagattaatgctatcaatcattaaggtcattactctcaaccacctaggcaatgaagaatataccatttcaaatatttacagtacttgtcttcaccaacactgtcccaaggtgaaatgaagcaacagagaggaaattgtacataagtacctcagcatttaatccaaacaggggttcttagtctcagcactatgacattttgggctgactacttatttgttaggcgggagctctcctgtgcattgtaggataattagcagtatccctggtggctacccaatagacgccagtagcaccccgaattgacaacccaaactctccagacatcaccaactgtcccctgcgaggagaaatcactcctgggggagaaccactgacccaaatgaattc

SEQ ID NO: 305604 - DNA, 3572 bp, Artificial Sequence
  derived and/or modified sequence
gtgtgaaggcagcagaggaaccttttggaggaggaagaggacacagaggccctgtagccaggcaccaagatccctcccaggtggctgggtctgaggggaactccgagcagccctaggtcctcaaagtctggatttgtgtggaaaaggcagctctcacttggccttggcgaggcctcggttggttgataacctgaggaccatggatgctgatgagggtcaagacatgtcccaagtttcagggaaggaaagcccccctgtaagcgatactccagatgagggcgatgagcccatgccgatccccgaggacctctccaccacctcgggaggacagcaaagctccaagagtgacagagtcgtggccagtaatgttaaagtagagactcagagtgatgaagagaatgggcgtgcctgtgaaatgaatggggaagaatgtgcggaggatttacgaatgcttgatgcctcgggagagaaaatgaatggctcccacagggaccaaggcagctcggctttgtcgggagttggaggcattcgacttcctaacggaaaactaaagtgtgatatctgtgggatcatttgcatcgggcccaatgtgctcatggttcacaaaagaagccacactggagaacggcccttccagtgcaatcagtgcggggcctcattcacccagaagggcaacctgctccggcacatcaagctgcattccggggagaagcccttcaaatgccacctctgcaactacgcctgccgccggagggacgccctcactggccacctgaggacgcactccgtcattaaagaagaaactaatcacagtgaaatggcagaagacctgtgcaagataggatcagagagatctctcgtgctggacagactagcaagtaacgtcgccaaacgtaagagctctatgcctcagaaatttcttggggacaagggcctgtccgacacgccctacgacagcagcgccagctacgagaaggagaacgaaatgatgaagtcccacgtgatggaccaagccatcaacaacgccatcaactacctgggggccgagtccctgcgcccgctggtgcagacgcccccgggcggttccgaggtggtcccggtcatcagcccgatgtaccagctgcacaagccgctcgcggagggcaccccgcgctccaaccactcggcccaggacagcgccgtggagaacctgctgctgctctccaaggccaagttggtgccctcggagcgcgaggcgtccccgagcaacagctgccaagactccacggacaccgagagcaacaacgaggagcagcgcagcggtctcatctacctgaccaaccacatcgccccgcacgcgcgcaacgggctgtcgctcaaggaggagcaccgcgcctacgacctgctgcgcgccgcctccgagaactcgcaggacgcgctccgcgtggtcagcaccagcggggagcagatgaaggtgtacaagtgcgaacactgccgggtgctcttcctggatcacgtcatgtacaccatccacatgggctgccacggcttccgtgatccttttgagtgcaacatgtgcggctaccacagccaggaccggtacgagttctcgtcgcacataacgcgaggggagcaccgcttccacatgagctaaagccctcccgcgcccccaccccagaccccgagccaccccaggaaaagcacaaggactgccgccttctcgctcccgccagcagcatagactggactggaccagacaatgttgtgtttggatttgtaactgttttttgttttttgtttgagttggttgattggggtttgatttgcttttgaaaagatttttatttttagaggcagggctgcattgggagcatccagaactgctaccttcctagatgtttccccagaccgctggctgagattccctcacctgtcgcttcctagaatccccttctccaaacgattagtctaaattttcagagagaaatagataaaacacgccacagcctgggaaggagcgtgctctaccctgtgctaagcacggggttcgcgcaccaggtgtctttttccagtccccagaagcagagagcacagcccctgctgtgtgggtctgcaggtgagcagacaggacaggtgtgccgccacccaagtgccaagacacagcagggccaacaacctgtgcccaggccagcttcgagctacatgcatctagggcggagaggctgcacttgtgagagaaaatactatttcaagtcatattctgcgtaggaaaatgaattggttggggaaagtcgtgtctgtcagactgccctgggtggagggagacgccgggctagagcctttgggatcgtcctggattcactggctttgcggaggctgctcagatggcctgagcctcccgaggcttgctgccccgtaggaggagactgtcttcccgtgggcatatctggggagccctgttccccgctttttcactcccatacctttaatggcccccaaaatctgtcactacaatttaaacaccagtcccgaaatttggatcttctttctttttgaatctctcaaacggcaacattcctcagaaaccaaagctttatttcaaatctcttccttccctggctggttccatctagtaccagaggcctcttttcctgaagaaatccaatcctagccctcattttaattatgtacatctgtttgtagccacaagcctgaatttctcagtgttggtaagtttctttacctaccctcactatatattattctcgttttaaaacccataaaggagtgatttagaacagtcattaattttcaactcaatgaaatatgtgaagcccagcatctctgttgctaacacacagagctcacctgtttgaaaccaagctttcaaacatgttgaagctctttactgtaaaggcaagccagcatgtgtgtccacacatacataggatggctggctctgcacctgtaggatattggaatgcacagggcaattgagggactgagccagaccttcggagagtaatgccaccagatcccctaggaaagaggaggcaaatggcactgcaggtgagaaccccgcccatccgtgctatgacatggaggcactgaagcccgaggaaggtgtgtggagattctaatcccaacaagcaagggtctccttcaagattaatgctatcaatcattaaggtcattactctcaaccacctaggcaatgaagaatataccatttcaaatatttacagtacttgtcttcaccaacactgtcccaaggtgaaatgaagcaacagagaggaaattgtacataagtacctcagcatttaatccaaacaggggttcttagtctcagcactatgacattttgggctgactacttatttgttaggcgggagctctcctgtgcattgtaggataattagcagtatccctggtggctacccaatagacgccagtagcaccccgaattgacaacccaaactctccagacatcaccaactgtcccctgcgaggagaaatcactcctgggggagaaccactgacccaaatgaattctaaaccaatcaaatgtctgggaagccctccaagaaaaaaaa

SEQ ID NO: 305605 - DNA, 3485 bp, Artificial Sequence
  derived and/or modified sequence
cgcggcgcatcccagcctgggcgggacgctcggccgcggcgaggcgggcaagcctggcagggcagagggagccccggctccgaggttgctcttcgcacccgaggatcagtcttggccccaaagcgcgacgcacaaatccacataacctgaggaccatggatgctgatgagggtcaagacatgtcccaagtttcagggaaggaaagcccccctgtaagcgatactccagatgagggcgatgagcccatgccgatccccgaggacctctccaccacctcgggaggacagcaaagctccaagagtgacagagtcgtggccagtaatgttaaagtagagactcagagtgatgaagagaatgggcgtgcctgtgaaatgaatggggaagaatgtgcggaggatttacgaatgcttgatgcctcgggagagaaaatgaatggctcccacagggaccaaggcagctcggctttgtcgggagttggaggcattcgacttcctaacggaaaactaaagtgtgatatctgtgggatcatttgcatcgggcccaatgtgctcatggttcacaaaagaagccacactggagaacggcccttccagtgcaatcagtgcggggcctcattcacccagaagggcaacctgctccggcacatcaagctgcattccggggagaagcccttcaaatgccacctctgcaactacgcctgccgccggagggacgccctcactggccacctgaggacgcactccgtcattaaagaagaaactaatcacagtgaaatggcagaagacctgtgcaagataggatcagagatctctcgtgctggacagactagcaagtaacgtcgccaaacgtaagagctctatgcctcagaaatttcttggggacaagggcctgtccgacacgccctacgacagcagcgccagctacgagaaggagaacgaaatgatgaagtcccacgtgatggaccaagccatcaacaacgccatcaactacctgggggccgagtccctgcgcccgctggtgcagacgcccccgggcggttccgaggtggtcccggtcatcagcccgatgtaccagctgcacaagccgctcgcggagggcaccccgcgctccaaccactcggcccaggacagcgccgtggagaacctgctgctgctctccaaggccaagttggtgccctcggagcgcgaggcgtccccgagcaacagctgccaagactccacggacaccgagagcaacaacgaggagcagcgcagcggtctcatctacctgaccaaccacatcgccccgcacgcgcgcaacgggctgtcgctcaaggaggagcaccgcgcctacgacctgctgcgcgccgcctccgagaactcgcaggacgcgctccgcgtggtcagcaccagcggggagcagatgaaggtgtacaagtgcgaacactgccgggtgctcttcctggatcacgtcatgtacaccatccacatgggctgccacggcttccgtgatccttttgagtgcaacatgtgcggctaccacagccaggaccggtacgagttctcgtcgcacataacgcgaggggagcaccgcttccacatgagctaaagccctcccgcgcccccaccccagaccccgagccaccccaggaaaagcacaaggactgccgccttctcgctcccgccagcagcatagactggactggaccagacaatgttgtgtttggatttgtaactgttttttgttttttgtttgagttggttgattggggtttgatttgcttttgaaaagatttttatttttagaggcagggctgcattgggagcatccagaactgctaccttcctagatgtttccccagaccgctggctgagattccctcacctgtcgcttcctagaatccccttctccaaacgattagtctaaattttcagagagaaatagataaaacacgccacagcctgggaaggagcgtgctctaccctgtgctaagcacggggttcgcgcaccaggtgtctttttccagtccccagaagcagagagcacagcccctgctgtgtgggtctgcaggtgagcagacaggacaggtgtgccgccacccaagtgccaagacacagcagggccaacaacctgtgcccaggccagcttcgagctacatgcatctagggcggagaggctgcacttgtgagagaaaatactatttcaagtcatattctgcgtaggaaaatgaattggttggggaaagtcgtgtctgtcagactgccctgggtggagggagacgccgggctagagcctttgggatcgtcctggattcactggctttgcggaggctgctcagatggcctgagcctcccgaggcttgctgccccgtaggaggagactgtcttcccgtgggcatatctggggagccctgttccccgctttttcactcccatacctttaatggcccccaaaatctgtcactacaatttaaacaccagtcccgaaatttggatcttctttctttttgaatctctcaaacggcaacattcctcagaaaccaaagctttatttcaaatctcttccttccctggctggttccatctagtaccagaggcctcttttcctgaagaaatccaatcctagccctcattttaattatgtacatctgtttgtagccacaagcctgaatttctcagtgttggtaagtttctttacctaccctcactatatattattctcgttttaaaacccataaaggagtgatttagaacagtcattaattttcaactcaatgaaatatgtgaagcccagcatctctgttgctaacacacagagctcacctgtttgaaaccaagctttcaaacatgttgaagctctttactgtaaaggcaagccagcatgtgtgtccacacatacataggatggctggctctgcacctgtaggatattggaatgcacagggcaattgagggactgagccagaccttcggagagtaatgccaccagatcccctaggaaagaggaggcaaatggcactgcaggtgagaaccccgcccatccgtgctatgacatggaggcactgaagcccgaggaaggtgtgtggagattctaatcccaacaagcaagggtctccttcaagattaatgctatcaatcattaaggtcattactctcaaccacctaggcaatgaagaatataccatttcaaatatttacagtacttgtcttcaccaacactgtcccaaggtgaaatgaagcaacagagaggaaattgtacataagtacctcagcatttaatccaaacaggggttcttagtctcagcactatgacattttgggctgactacttatttgttaggcgggagctctcctgtgcattgtaggataattagcagtatccctggtggctacccaatagacgccagtagcaccccgaattgacaacccaaactctccagacatcaccaactgtcccctgcgaggagaaatcactcctgggggagaaccactgacccaaatgaattc

SEQ ID NO: 305606 - protein, 432 aa, Artificial Sequence
  derived and/or modified sequence
MDADEGQDMSQVSGKESPPVSDTPDEGDEPMPIPEDLSTTSGGQQSSKSDRVVGERPFQCNQCGASFTQKGNLLRHIKLHSGEKPFKCHLCNYACRRRDALTGHLRTHSVGKPHKCGYCGRSYKQRSSLEEHKERCHNYLESMGLPGTLYPVIKEETNHSEMAEDLCKIGSERSLVLDRLASNVAKRKSSMPQKFLGDKGLSDTPYDSSASYEKENEMMKSHVMDQAINNAINYLGAESLRPLVQTPPGGSEVVPVISPMYQLHKPLAEGTPRSNHSAQDSAVENLLLLSKAKLVPSEREASPSNSCQDSTDTESNNEEQRSGLIYLTNHIAPHARNGLSLKEEHRAYDLLRAASENSQDALRVVSTSGEQMKVYKCEHCRVLFLDHVMYTIHMGCHGFRDPFECNMCGYHSQDRYEFSSHITRGEHRFHMS

SEQ ID NO: 305607 - DNA, 5928 bp, Artificial Sequence
  derived and/or modified sequence
cgcggcgcatcccagcctgggcgggacgctcggccgcggcgaggcgggcaagcctggcagggcagagggagccccggctccgaggttgctcttcgcacccgaggatcagtcttggccccaaagcgcgacgcacaaatccacataacctgaggaccatggatgctgatgagggtcaagacatgtcccaagtttcagggaaggaaagcccccctgtaagcgatactccagatgagggcgatgagcccatgccgatccccgaggacctctccaccacctcgggaggacagcaaagctccaagagtgacagagtcgtgggagaacggcccttccagtgcaatcagtgcggggcctcattcacccagaagggcaacctgctccggcacatcaagctgcattccggggagaagcccttcaaatgccacctctgcaactacgcctgccgccggagggacgccctcactggccacctgaggacgcactccgttggtaaacctcacaaatgtggatattgtggccgaagctataaacagcgaagctctttagaggaacataaagagcgctgccacaactacttggaaagcatgggccttccgggcacactgtacccagtcattaaagaagaaactaatcacagtgaaatggcagaagacctgtgcaagataggatcagagagatctctcgtgctggacagactagcaagtaacgtcgccaaacgtaagagctctatgcctcagaaatttcttggggacaagggcctgtccgacacgccctacgacagcagcgccagctacgagaaggagaacgaaatgatgaagtcccacgtgatggaccaagccatcaacaacgccatcaactacctgggggccgagtccctgcgcccgctggtgcagacgcccccgggcggttccgaggtggtcccggtcatcagcccgatgtaccagctgcacaagccgctcgcggagggcaccccgcgctccaaccactcggcccaggacagcgccgtggagaacctgctgctgctctccaaggccaagttggtgccctcggagcgcgaggcgtccccgagcaacagctgccaagactccacggacaccgagagcaacaacgaggagcagcgcagcggtctcatctacctgaccaaccacatcgccccgcacgcgcgcaacgggctgtcgctcaaggaggagcaccgcgcctacgacctgctgcgcgccgcctccgagaactcgcaggacgcgctccgcgtggtcagcaccagcggggagcagatgaaggtgtacaagtgcgaacactgccgggtgctcttcctggatcacgtcatgtacaccatccacatgggctgccacggcttccgtgatccttttgagtgcaacatgtgcggctaccacagccaggaccggtacgagttctcgtcgcacataacgcgaggggagcaccgcttccacatgagctaaagccctcccgcgcccccaccccagaccccgagccaccccaggaaaagcacaaggactgccgccttctcgctcccgccagcagcatagactggactggaccagacaatgttgtgtttggatttgtaactgttttttgttttttgtttgagttggttgattggggtttgatttgcttttgaaaagatttttatttttagaggcagggctgcattgggagcatccagaactgctaccttcctagatgtttccccagaccgctggctgagattccctcacctgtcgcttcctagaatccccttctccaaacgattagtctaaattttcagagagaaatagataaaacacgccacagcctgggaaggagcgtgctctaccctgtgctaagcacggggttcgcgcaccaggtgtctttttccagtccccagaagcagagagcacagcccctgctgtgtgggtctgcaggtgagcagacaggacaggtgtgccgccacccaagtgccaagacacagcagggccaacaacctgtgcccaggccagcttcgagctacatgcatctagggcggagaggctgcacttgtgagagaaaatactatttcaagtcatattctgcgtaggaaaatgaattggttggggaaagtcgtgtctgtcagactgccctgggtggagggagacgccgggctagagcctttgggatcgtcctggattcactggctttgcggaggctgctcagatggcctgagcctcccgaggcttgctgccccgtaggaggagactgtcttcccgtgggcatatctggggagccctgttccccgctttttcactcccatacctttaatggcccccaaaatctgtcactacaatttaaacaccagtcccgaaatttggatcttctttctttttgaatctctcaaacggcaacattcctcagaaaccaaagctttatttcaaatctcttccttccctggctggttccatctagtaccagaggcctcttttcctgaagaaatccaatcctagccctcattttaattatgtacatctgtttgtagccacaagcctgaatttctcagtgttggtaagtttctttacctaccctcactatatattattctcgttttaaaacccataaaggagtgatttagaacagtcattaattttcaactcaatgaaatatgtgaagcccagcatctctgttgctaacacacagagctcacctgtttgaaaccaagctttcaaacatgttgaagctctttactgtaaaggcaagccagcatgtgtgtccacacatacataggatggctggctctgcacctgtaggatattggaatgcacagggcaattgagggactgagccagaccttcggagagtaatgccaccagatcccctaggaaagaggaggcaaatggcactgcaggtgagaaccccgcccatccgtgctatgacatggaggcactgaagcccgaggaaggtgtgtggagattctaatcccaacaagcaagggtctccttcaagattaatgctatcaatcattaaggtcattactctcaaccacctaggcaatgaagaatataccatttcaaatatttacagtacttgtcttcaccaacactgtcccaaggtgaaatgaagcaacagagaggaaattgtacataagtacctcagcatttaatccaaacaggggttcttagtctcagcactatgacattttgggctgactacttatttgttaggcgggagctctcctgtgcattgtaggataattagcagtatccctggtggctacccaatagacgccagtagcaccccgaattgacaacccaaactctccagacatcaccaactgtcccctgcgaggagaaatcactcctgggggagaaccactgacccaaatgaattctaaaccaatcaaatgtctgggaagccctccaagaaaaaaaatagaaaagcacttgaagaatattcccaatattcccggtcagcagtatcaaggctgacttgtgttcatgtggagtcattataaattctataaatcaattattccccttcggtcttaaaaatatatttcctcataaacatttgagttttgttgaaaagatggagtttacaaagataccattcttgagtcatggatttctctgctcacagaagggtgtggcatttggaaacgggaataaacaaaattgctgcaccaatgcactgagtgaaggaagagagacagaggatcaagggctttagacagcactccttcaatatgcaatcacagagaaagatgcgccttatccaagttaatatctctaaggtgagagccttcttagagtcagtttgttgcaaatttcacctactctgttcttttccatccatccccctgagtcagttggttgaagggagttattttttcaagtggaattcaaacaaagctcaaaccagaactgtaaatagtgattgcaggaattcttttctaaactgctttgccctttcctctcactgccttttatagccaatataaatgtctctttgcacaccttttgttgtggttttatattgtaacaccatttttctttgaaactattgtatttaaagtaaggtttcatattatgtcagcaagtaattaacttatgtttaaaaggtggccatatcatgtaccaaaagttgctgaagtttctcttctagctggtaaagtaggagtttgcatgacttcacactttttttgcgtagtttcttctgttgtatgatggcgtgagtgtgtgtcttgggtaccgctgtgtactactgtgtgcctagattccatgcactctcgttgtgtttgaagtaaatattggagaccggagggtaacaggttggcctgttgattacagctagtaatcgctgtgtcttgttccgccccctccctgacaccccagcttcccaggatgtggaaagcctggatctcagctccttgccccatatcccttctgtaatttgtacctaaagagtgtgattatcctaattcaagagtcactaaaactcatcacattatcattgcatatcagcaaagggtaaagtcctagcaccaattgcttcacataccagcatgttccatttccaatttagaattagccacataataaaatcttagaatcttccttgagaaagagctgcctgagatgtagttttgttatatggttccccaccgaccatttttgtgcttttttcttgttttgttttgttttgactgcactgtgagttttgtagtgtcctcttcttgccaaaacaaacgcgagatgaactggacttatgtagacaaatcgtgatgccagtgtatccttcctttcttcagttccagcaataatgaatggtcaacttttttaaaatctagatctctctcattcatttcaatgtatttttactttaagatgaaccaaaattattagacttatttaagatgtacaggcatcagaaaaaagaagcacataatgcttttggtgcgatggcactcactgtgaacatgtgtaaccacatattaatatgcaatattgtttccaatactttctaatacagttttttataatgttgtgtgtggtgattgttcaggtcgaatctgttgtatccagtacagctttaggtcttcagctgcccttctggcgagtacatgcacaggattgtaaatgagaaatgcagtcatatttccagtctgcctctatgatgatgttaaattattgctgtttagctgtgaacaagggatgtaccactggaggaatagagtatccttttgtacacattttgaaatgcttcttctgtagtgatagaacaaataaatgcaacgaatactctgtctgccctatcccgtgaagtccacactggcgtaagagaaggcccagcagagcaggaatctgcctagactttctcccaatgagatcccaatatgagagggagaagagatgggcctcaggacagctgcaataccacttgggaacacatgtggtgtcttgatgtggccagcgcagcagttcagcacaacgtacctcccatctacaacagtgctggacgtgggaattctaagtcccagtcttgagggtgggtggagatggagggcaacaagagatacatttccagttctccactgcagcatgcttcagtcattctgtgagtggccgggcccagggccctcacaatttcactaccttgtcttttacatagtcataagaattatcctcaacatagccttttgacgctgtaaatcttgagtattcatttacccttttctgatctcctggaaacagctgcctgcctgcattgcacttctcttcccgaggagtggggtaaatttaaaagtcaagttatagtttggatgttagtatagaattttgaaattgggaattaaaaatcaggactggggactgggagaccaaaaatttctgatcccatttctgatggatgtgtcacaccttttctgtcaaaataaaatgtcttggaggttatgactccttggtgaaa

SEQ ID NO: 305608 - DNA, 1748 bp, Artificial Sequence
  derived and/or modified sequence
agtgtgaaggcagcagaggaaccttttggaggaggaagaggacacagaggccctgtagccaggcaccaagatccctcccaggtggctgggtctgaggggaactccgagcagccctaggtcctcaaagtctggatttgtgtggaaaaggcagctctcacttggccttggcgaggcctcggttggttgataacctgaggaccatggatgctgatgagggtcaagacatgtcccaagtttcagggaaggaaagcccccctgtaagcgatactccagatgagggcgatgagcccatgccgatccccgaggacctctccaccacctcgggaggacagcaaagctccaagagtgacagagtcgtgggagaacggcccttccagtgcaatcagtgcggggcctcattcacccagaagggcaacctgctccggcacatcaagctgcattccggggagaagcccttcaaatgccacctctgcaactacgcctgccgccggagggacgccctcactggccacctgaggacgcactccgttggtaaacctcacaaatgtggatattgtggccgaagctataaacagcgaagctctttagaggaacataaagagcgctgccacaactacttggaaagcatgggccttccgggcacactgtacccagtcattaaagaagaaactaatcacagtgaaatggcagaagacctgtgcaagataggatcagagagatctctcgtgctggacagactagcaagtaacgtcgccaaacgtaagagctctatgcctcagaaatttcttggggacaagggcctgtccgacacgccctacgacagcagcgccagctacgagaaggagaacgaaatgatgaagtcccacgtgatggaccaagccatcaacaacgccatcaactacctgggggccgagtccctgcgcccgctggtgcagacgcccccgggcggttccgaggtggtcccggtcatcagcccgatgtaccagctgcacaagccgctcgcggagggcaccccgcgctccaaccactcggcccaggacagcgccgtggagaacctgctgctgctctccaaggccaagttggtgccctcggagcgcgaggcgtccccgagcaacagctgccaagactccacggacaccgagagcaacaacgaggagcagcgcagcggtctcatctacctgaccaaccacatcgccccgcacgcgcgcaacgggctgtcgctcaaggaggagcaccgcgcctacgacctgctgcgcgccgcctccgagaactcgcaggacgcgctccgcgtggtcagcaccagcggggagcagatgaaggtgtacaagtgcgaacactgccgggtgctcttcctggatcacgtcatgtacaccatccacatgggctgccacggcttccgtgatccttttgagtgcaacatgtgcggctaccacagccaggaccggtacgagttctcgtcgcacataacgcgaggggagcaccgcttccacatgagctaaagccctcccgcgcccccaccccagaccccgagccaccccaggaaaagcacaaggactgccgccttctcgctcccgccagcagcatagactggactggaccagacaatgttgtgtttggatttgtaactgttttttgttttttgtttgagttggttgattggggtttgatttgcttttgaaaagatttttatttttagaggcagggctgcattgggagcatccagaactgctaccttcctagatgtttcc

SEQ ID NO: 305609 - protein, 249 aa, Artificial Sequence
  derived and/or modified sequence
MEEQGHSEMEIIPSESHPHIQLLKSNRELLVTHIRNTQCLVDNLLKNDYFSAEDAEIVCACPTQPDKVRKILDLVQSKGEEVSEFFLYLLQQLADAYVDLRPWLLEIGFSPSLLTQSKVVVNTDPVSRYTQQLRHHLGRDSKFVLCYAQKEELLLEEIYMDTIMELVGFSNESLGSLNSLACLLDHTTGILNEQAASRKVTGCVCRTCSSSTTATQSGTPRRCLPSCCASPTWPSSPSMAWTSCTRTWT

SEQ ID NO: 305610 - protein, 60 aa, Artificial Sequence
  derived and/or modified sequence
MEEQGHSEMEIIPSESHPHIQLLKSNRELLVTHIRNTQCLVDNLLKNDYFSAEDAEIVCA

SEQ ID NO: 305611 - protein, 45 aa, Artificial Sequence
  derived and/or modified sequence
MEEQGHSEMEIIPSESHPHIQLLKSNRELLVTHIRNTQCLVDNLL

SEQ ID NO: 305612 - protein, 779 aa, Artificial Sequence
  derived and/or modified sequence
MEEQGHSEMEIIPSESHPHIQLLKSNRELLVTHIRNTQCLVDNLLKNDYFSAEDAEIVCACPTQPDKVRKILDLVQSKGEEVSEFFLYLLQQLADAYVDLRPWLLEIGFSPSLLTQSKVVVNTDPVSRYTQQLRHHLGRDSKFVLCYAQKEELLLEEIYMDTIMELVGFSNESLGSLNSLACLLDHTTGILNEQGETIFILGDAGVGKSMLLQRLQSLWATGRLDAGVKFFFHFRCRMFSCFKESDRLCLQDLLFKHYCYPERDPEEVFAFLLRFPHVALFTFDGLDELHSDLDLSRVPDSSCPWEPAHPLVLLANLLSGKLLKGASKLLTARTGIEVPRQFLRKKVLLRGFSPSHLRAYARRMFPERALQDRLLSQLEANPNLCSLCSVPLFCWIIFRCFQHFRAAFEGSPQLPDCTMTLTDVFLLVTEVHLNRMQPSSLVQRNTRSPVETLHAGRDTLCSLGQVAHRGMEKSLFVFTQEEVQASGLQERDMQLGFLRALPELGPGGDQQSYEFFHLTLQAFFTAFFLVLDDRVGTQELLRFFQEWMPPAGAATTSCYPPFLPFQCLQGSGPAREDLFKNKDHFQFTNLFLCGLLSKAKQKLLRHLVPAAALRRKRKALWAHLFSSLRGYLKSLPRVQVESFNQVQAMPTFIWMLRCIYETQSQKVGQLAARGICANYLKLTYCNACSADCSALSFVLHHFPKRLALDLDNNNLNDYGVRELQPCFSRLTVLRLSVNQITDGGVKVLSEELTKYKIVTYLGLWKSVDTICFKKQGLLK

SEQ ID NO: 305613 - DNA, 183 bp, Artificial Sequence
  derived and/or modified sequence
atggaggagcagggccacagcgagatggagatcatccccagcgagagccacccccacatccagctgctgaagagcaacagagagctgctggtgacccacatcagaaacacccagtgcctggtggacaacctgctgaagaacgactacttcagcgccgaggacgccgagatcgtgtgcgcctag

SEQ ID NO: 305614 - DNA, 750 bp, Artificial Sequence
  derived and/or modified sequence
atggaggagcagggccacagcgagatggagatcatccccagcgagagccacccccacatccagctgctgaagagcaacagagagctgctggtgacccacatcagaaacacccagtgcctggtggacaacctgctgaagaacgactacttcagcgccgaggacgccgagatcgtgtgcgcctgccccacccagcccgacaaggtgagaaagatcctggacctggtgcagagcaagggcgaggaggtgagcgagttcttcctgtacctgctgcagcagctggccgacgcctacgtggacctgagaccctggctgctggagatcggcttcagccccagcctgctgacccagagcaaggtggtggtgaacaccgaccccgtgagcagatacacccagcagctgagacaccacctgggcagagacagcaagttcgtgctgtgctacgcccagaaggaggagctgctgctggaggagatctacatggacaccatcatggagctggtgggcttcagcaacgagagcctgggcagcctgaacagcctggcctgcctgctggaccacaccaccggcatcctgaacgagcaggccgccagcagaaaggtgaccggctgcgtgtgcagaacctgcagcagcagcaccaccgccacccagagcggcacccccagaagatgcctgcccagctgctgcgccagccccacctggcccagcagccccagcatggcctggaccagctgcaccagaacctggacctag

SEQ ID NO: 305615 - DNA, 2340 bp, Artificial Sequence
  derived and/or modified sequence
atggaggagcagggccacagcgagatggagatcatccccagcgagagccacccccacatccagctgctgaagagcaacagagagctgctggtgacccacatcagaaacacccagtgcctggtggacaacctgctgaagaacgactacttcagcgccgaggacgccgagatcgtgtgcgcctgccccacccagcccgacaaggtgagaaagatcctggacctggtgcagagcaagggcgaggaggtgagcgagttcttcctgtacctgctgcagcagctggccgacgcctacgtggacctgagaccctggctgctggagatcggcttcagccccagcctgctgacccagagcaaggtggtggtgaacaccgaccccgtgagcagatacacccagcagctgagacaccacctgggcagagacagcaagttcgtgctgtgctacgcccagaaggaggagctgctgctggaggagatctacatggacaccatcatggagctggtgggcttcagcaacgagagcctgggcagcctgaacagcctggcctgcctgctggaccacaccaccggcatcctgaacgagcagggcgagaccatcttcatcctgggcgacgccggcgtgggcaagagcatgctgctgcagagactgcagagcctgtgggccaccggcagactggacgccggcgtgaagttcttcttccacttcagatgcagaatgttcagctgcttcaaggagagcgacagactgtgcctgcaggacctgctgttcaagcactactgctaccccgagagagaccccgaggaggtgttcgccttcctgctgagattcccccacgtggccctgttcaccttcgacggcctggacgagctgcacagcgacctggacctgagcagagtgcccgacagcagctgcccctgggagcccgcccaccccctggtgctgctggccaacctgctgagcggcaagctgctgaagggcgccagcaagctgctgaccgccagaaccggcatcgaggtgcccagacagttcctgagaaagaaggtgctgctgagaggcttcagccccagccacctgagagcctacgccagaagaatgttccccgagagagccctgcaggacagactgctgagccagctggaggccaaccccaacctgtgcagcctgtgcagcgtgcccctgttctgctggatcatcttcagatgcttccagcacttcagagccgccttcgagggcagcccccagctgcccgactgcaccatgaccctgaccgacgtgttcctgctggtgaccgaggtgcacctgaacagaatgcagcccagcagcctggtgcagagaaacaccagaagccccgtggagaccctgcacgccggcagagacaccctgtgcagcctgggccaggtggcccacagaggcatggagaagagcctgttcgtgttcacccaggaggaggtgcaggccagcggcctgcaggagagagacatgcagctgggcttcctgagagccctgcccgagctgggccccggcggcgaccagcagagctacgagttcttccacctgaccctgcaggccttcttcaccgccttcttcctggtgctggacgacagagtgggcacccaggagctgctgagattcttccaggagtggatgccccccgccggcgccgccaccaccagctgctacccccccttcctgcccttccagtgcctgcagggcagcggccccgccagagaggacctgttcaagaacaaggaccacttccagttcaccaacctgttcctgtgcggcctgctgagcaaggccaagcagaagctgctgagacacctggtgcccgccgccgccctgagaagaaagagaaaggccctgtgggcccacctgttcagcagcctgagaggctacctgaagagcctgcccagagtgcaggtggagagcttcaaccaggtgcaggccatgcccaccttcatctggatgctgagatgcatctacgagacccagagccagaaggtgggccagctggccgccagaggcatctgcgccaactacctgaagctgacctactgcaacgcctgcagcgccgactgcagcgccctgagcttcgtgctgcaccacttccccaagagactggccctggacctggacaacaacaacctgaacgactacggcgtgagagagctgcagccctgcttcagcagactgaccgtgctgagactgagcgtgaaccagatcaccgacggcggcgtgaaggtgctgagcgaggagctgaccaagtacaagatcgtgacctacctgggcctgtggaagagcgtggacaccatctgcttcaagaagcagggcctgctgaagtag

SEQ ID NO: 305616 - DNA, 183 bp, Artificial Sequence
  derived and/or modified sequence
atggaagagcaggggcacagcgagatggagattatcccctccgaatcccatccacatatacagctgctcaaatccaatagggagctgcttgtaactcacattaggaatacgcagtgtctggtcgacaatctgttgaagaacgactacttttctgctgaagacgctgagattgtttgcgcctag

SEQ ID NO: 305617 - DNA, 183 bp, Artificial Sequence
  derived and/or modified sequence
atggaggagcagggtcatagcgagatggagattatcccttctgagtcgcatccgcacattcagctgcttaaaagcaatcgcgagctgctggttacacacattcggaacacacagtgcttggtcgataatctcctgaagaatgactacttttctgccgaagatgccgaaatagtatgcgcatag

SEQ ID NO: 305618 - DNA, 183 bp, Artificial Sequence
  derived and/or modified sequence
atggaggagcagggccatagtgaaatggagattataccctctgaatctcacccccacatccagcttttgaaatccaatagagagttgctcgtaacccacatccgcaatacccagtgtctggtggacaaccttctcaagaatgactatttctccgcagaggacgctgaaatcgtttgcgcctag

SEQ ID NO: 305619 - DNA, 750 bp, Artificial Sequence
  derived and/or modified sequence
atggaggagcagggacattccgagatggagattattcccagtgaaagccacccacacatccaactcttgaagtcaaatcgagagctcctggtaacccatattagaaacacccagtgtcttgtggataatctgctgaagaacgattatttcagcgctgaagatgctgagatcgtttgcgcctgtccaacccaacctgataaagtgcgcaagatcctcgacctggtccagtctaaaggcgaggaagtgagcgagttttttctgtacctgttgcaacagctggcggacgcatacgtggatctcagaccctggttgctggagatcggatttagtcctagcttgctcacccaaagcaaggtggtcgtcaacacagaccctgtgtcccgctatacccaacagttacgccaccacttagggcgggacagcaagttcgtgctgtgttacgcacagaaagaagagctcctactggaagaaatttatatggataccatcatggagctcgtggggtttagcaacgaatcgttggggtcactgaactcactggcgtgtctgttggatcacacaaccggcatcctcaatgaacaagcagccagcaggaaagtgacaggttgcgtgtgccgaacatgttccagttctacgactgcaacccagtcggggacaccccgacgttgtctgccctcatgctgtgctagccctacctggcccagctctcccagcatggcttggacatcctgcacacgtacctggacctag

SEQ ID NO: 305620 - DNA, 2340 bp, Artificial Sequence
  derived and/or modified sequence
atggaggaacaggggcacagcgaaatggaaatcattccctctgaatcccatcctcatatccagttgctcaagtcgaatcgggaactgttggtgactcacatccggaacacacagtgtctggtcgacaacctgctgaaaaatgactatttcagcgccgaagacgcggaaattgtttgcgcctgcccaacccagcccgataaagtacggaagatccttgatcttgtccagtccaagggtgaggaagtttccgaatttttcctgtacctcctgcagcaactcgctgacgcatacgtcgatctaagaccatggttattggaaatcggatttagcccaagcctgttaacgcaaagtaaggtggtagtgaatactgatccggtgtcacggtacacacagcagctgcgtcaccatctcgggcgcgacagcaagtttgtgctctgctacgcacagaaggaggagctgctcctggaagaaatatatatggacacaattatggagctagttggtttttctaatgagagccttggcagcctgaacagcttggcctgtctcttggaccatacgaccggcatcttaaacgaacagggggagaccatcttcattctgggcgacgcaggcgtgggtaaatctatgctcctgcagagactgcaaagcctctgggcaactggccgactcgacgccggggtcaagtttttctttcacttccgctgccgaatgttctcatgttttaaggaatctgatagattgtgcctgcaagacctgctatttaaacattactgttatccagagagagatcccgaagaagtgttcgcctttctgctgcgatttccccacgttgcccttttcaccttcgatgggctcgacgagctgcacagcgatttggacctaagccgagttccagattcttcttgtccctgggaaccagctcacccgctggtacttctggctaacctgcttagcggcaaattgttgaaaggtgcctcgaaactgttgacagctagaacggggatagaagtgccccggcaattccttcgaaagaaggtgctcctccgggggttttctccgagccatttacgtgcctacgcaagaagaatgtttcccgagagagccctgcaggatcgcctccttagtcagttggaggctaaccctaatttatgctccctgtgttcagtcccactgttctgttggatcatctttcggtgttttcagcatttcagagcagccttcgaaggaagcccccaattaccagattgcaccatgaccctaactgatgtgttcttgcttgtcaccgaggtgcacctgaatcgcatgcaaccctctagcctggtgcaacgtaataccaggtccccagtggagaccctccacgcaggccgggacacactatgttctttgggccaggtggcacacagggggatggagaagtctctcttcgtgtttacccaggaggaagttcaagcctccggactgcaggagcgcgacatgcagctgggctttctccgagcacttcccgagttggggcctggtggcgaccagcaaagctatgagttttttcaccttactctgcaagctttctttaccgcgtttttcttagttctcgacgatcgtgtggggacccaagagttactgagattctttcaagaatggatgccacccgctggtgcggcaacaacaagttgttaccccccattcctgccctttcaatgcctgcaggggtccggcccagcgcgggaggatttattcaagaacaaggatcatttccagttcaccaatttattcctgtgcggactactgtcaaaagctaaacagaaactcctgcgccacctggtgcccgcagctgccctgagacgcaaacgcaaggctctatgggcccacctcttttcctccctgcgtggatatctaaaatcccttccaagagtgcaggtcgaaagctttaatcaggtgcaagccatgcccacgtttatatggatgctacggtgcatttacgaaacacagagccagaaggtcgggcagttagccgcaagagggatttgcgccaattacctgaagctgacttattgtaatgcgtgtagtgcggactgttctgccttgtcttttgtcctgcatcacttcccaaagcgtctggcattggacttggataacaacaacctgaacgactacggagtccgggagctgcaaccttgcttttctagactgacggtgctgcggctgtctgtgaatcaaattactgacggcggggtgaaggttctatccgaggaattgacaaagtataaaattgtgacctatctcggattatggaaaagcgtggatactatttgctttaagaaacagggcctgctgaaatag

SEQ ID NO: 305621 - DNA, 183 bp, Artificial Sequence
  derived and/or modified sequence
atggaggagcagggccacagcgagatggagatcatccccagcgagagccacccccacatccagctgctgaagagcaaccgggagctgctggtgacccacatccggaacacccagtgcctggtggacaacctgctgaagaatgactacttcagcgcagaagatgctgagatcgtgtgtgcctag

SEQ ID NO: 305622 - DNA, 750 bp, Artificial Sequence
  derived and/or modified sequence
atggaggagcagggccacagcgagatggagatcatccccagcgagagccacccccacatccagctgctgaagagcaaccgggagctgctggtgacccacatccggaacacccagtgcctggtggacaacctgctgaagaatgactacttcagcgcagaagatgctgagatcgtgtgtgcctgccccacccagcctgacaaggtgaggaagatcctggacctggtgcagagcaagggggaggaggtgtctgagttcttcctgtacctgctgcagcagctggctgatgcctacgtggacctgcggccctggctgctggagatcggcttcagccccagcctgctgacccagagcaaggtggtggtgaacacagatcctgtgagccgctacacccagcagctgcggcaccacctgggccgggacagcaagtttgtgctgtgctacgcccagaaggaggagctgctgctggaggagatctacatggacaccatcatggagctggtgggcttcagcaatgaaagcctgggcagcctgaacagcctggcctgcctgctggaccacaccaccggcatcctgaatgagcaggccgccagcaggaaggtgacaggctgtgtgtgcaggacctgcagcagcagcaccacagccacccagagcggcaccccccggcgctgcctgcccagctgctgtgccagccccacctggcccagcagccccagcatggcctggaccagctgcaccaggacctggacctag

SEQ ID NO: 305623 - DNA, 2340 bp, Artificial Sequence
  derived and/or modified sequence
atggaggagcagggccacagcgagatggagatcatccccagcgagagccacccccacatccagctgctgaagagcaaccgggagctgctggtgacccacatccggaacacccagtgcctggtggacaacctgctgaagaatgactacttcagcgcagaagatgctgagatcgtgtgtgcctgccccacccagcctgacaaggtgaggaagatcctggacctggtgcagagcaagggggaggaggtgtctgagttcttcctgtacctgctgcagcagctggctgatgcctacgtggacctgcggccctggctgctggagatcggcttcagccccagcctgctgacccagagcaaggtggtggtgaacacagatcctgtgagccgctacacccagcagctgcggcaccacctgggccgggacagcaagtttgtgctgtgctacgcccagaaggaggagctgctgctggaggagatctacatggacaccatcatggagctggtgggcttcagcaatgaaagcctgggcagcctgaacagcctggcctgcctgctggaccacaccaccggcatcctgaatgagcagggcgagaccatcttcatcctgggagatgctggggtgggcaagtccatgctgctgcagaggctgcagagcctgtgggccaccggccgcctggatgctggggtgaagttcttcttccacttccgctgcaggatgttcagctgcttcaaggagagtgaccggctgtgcctgcaggacctgctcttcaagcactactgctacccagagcgggaccctgaggaggtgtttgccttcctgctgcgcttcccccacgtggccctcttcacctttgatggcctggatgagctgcacagcgacctggacctgagccgggtgcctgacagcagctgcccctgggagcccgcccaccccctggtgctgctggccaacctgctgagcggcaagctgctgaagggggccagcaagctgctgacagccaggacaggcatcgaggtgccccggcagttcctgaggaagaaggtgctgctgcggggcttcagccccagccacctgcgggcctatgcccggaggatgtttcctgagcgggccctgcaggaccggctgctgagccagctggaggccaaccccaacctgtgcagcctgtgcagcgtgcccctcttctgctggatcatcttccgctgcttccagcacttccgggccgcctttgagggcagcccccagctgcctgactgcaccatgaccctgacagatgtgttcctgctggtgacagaggtgcacctgaacaggatgcagcccagcagcctggtgcagaggaacaccaggagccctgtggagaccctgcatgctggccgggacaccctgtgcagcctgggccaggtggcccaccggggcatggagaagagcctgtttgtgttcacccaggaggaggtgcaggccagcggcctgcaggagcgggacatgcagctgggcttcctgcgggccctgcctgagctgggccctggaggagaccagcagagctatgagttcttccacctgaccctgcaggccttcttcaccgccttcttcctggtgctggatgacagagtgggcacccaggagctgctgcgcttcttccaggagtggatgcctcctgctggagctgccaccaccagctgctacccacccttcctgcccttccagtgcctgcagggcagcggccctgcccgggaggacctcttcaagaacaaggaccacttccagttcaccaacctcttcctgtgtggcctgctgagcaaggccaagcagaagctgctgcggcacctggtgcctgctgctgccctgcggaggaagaggaaggccctgtgggcccacctgttcagcagcctgcggggctacctgaagagcctgccccgggtgcaggtggagagcttcaaccaggtgcaggccatgcccaccttcatctggatgctgcgctgcatctatgagacccagagccagaaggtgggccagctggccgcccggggcatctgtgccaactacctgaagctgacctactgcaatgcctgcagcgctgactgcagcgccctgagctttgtgctgcaccacttccccaagaggctggccctggacctggacaacaacaacctgaatgactatggagtgcgggagctgcagccctgcttcagccggctgactgtgctgcggctgtctgtgaaccagatcacagatggcggcgtgaaggtgctgtctgaggagctgaccaagtacaagatcgtgacctacctgggcctgtggaagtctgtggacaccatctgcttcaagaagcagggcctgctgaagtag

SEQ ID NO: 305624 - DNA, 183 bp, Artificial Sequence
  derived and/or modified sequence
atggaggagcagggccacagcgagatggagatcatccccagcgagagccacccgcacattcagctactcaagagcaaccgcgaactcctagtgacccacattcggaacacacagtgtttggtcgataatcttttgaaaaacgattatttcagcgccgaggacgcagaaattgtgtgcgcctag

SEQ ID NO: 305625 - DNA, 183 bp, Artificial Sequence
  derived and/or modified sequence
atggaggagcagggccacagcgagatggagatcatccccagcgagtcacacccgcatattcaactgctcaaatccaaccgtgaactgctggtgacccacattcggaacacccagtgccttgtggacaacctgctcaagaatgactatttttctgccgaggatgctgaaatcgtgtgcgcctag

SEQ ID NO: 305626 - DNA, 183 bp, Artificial Sequence
  derived and/or modified sequence
atggaggagcagggccacagcgagatggagatcatccccagcgagagccaccctcatatccagttgcttaagagtaaccgtgagcttctcgttacacacattcgcaatacgcagtgtctggtggacaatctcctcaaaaacgactacttctcagccgaggatgctgagattgtctgcgcctag

SEQ ID NO: 305627 - DNA, 750 bp, Artificial Sequence
  derived and/or modified sequence
atggaggagcagggccacagcgagatggagatcatccccagcgagtctcacccccatatccagctattaaaatctaatagggagctcctggttacccacatccgaaatacccagtgtctagtggacaacctcctgaaaaacgactattttagcgctgaagacgccgagatcgtctgtgcctgccccacacagccagataaagttcgaaagattctggatttggtgcagagcaagggagaagaagtctcagaattttttctgtacctcttacagcagttagctgatgcctatgtcgacctgagaccttggcttctggagatcggcttttccccatctctgctcacccagtcaaaggttgtggtcaatactgatcccgtgtctcgttatacacagcaactgagacaccacctgggcagagactccaaattcgtcctctgttacgctcagaaggaggaattactgcttgaggagatctacatggacactatcatggagttggtcgggttctccaatgagagtctagggtcactgaactctctagcttgcctcctggatcataccaccggaatactcaacgagcaagcggcctccagaaaagtgactggttgcgtctgtaggacctgctcatcttcaaccactgcgacccagtctggaacccctcgcaggtgtctcccaagctgctgcgcatcgccgacatggcccagctccccgtcaatggcatggacttcctgtaccaggacctggacctag

SEQ ID NO: 305628 - DNA, 2340 bp, Artificial Sequence
  derived and/or modified sequence
atggaggagcagggccacagcgagatggagatcatccccagcgagtcccacccacacattcagttgctcaaatccaaccgggagctgcttgtgacgcacatccgtaatactcagtgccttgtggacaatctactaaagaacgactacttttcagccgaagacgccgaaatcgtttgtgcttgccctacacagccagacaaggttaggaaaatactggatctggtgcagtctaaaggagaggaggtctctgagttttttctatatctccttcagcagctggctgacgcatacgtggacctcagaccctggttgctggaaattggctttagtccaagcctgctcacgcagtccaaggtcgttgtcaataccgaccccgtgagtcgatacactcagcagctacgacaccacttaggtagggacagcaaatttgtattatgctacgcacagaaagaggaactattactggaggagatctatatggatacaataatggagctggtaggattttcaaacgagagcctcgggtctctcaatagcttggcatgtctcctggatcacaccactgggatccttaatgagcagggcgagactatttttatcttaggcgatgccggcgttggcaaatcaatgctgcttcagcgactccaatcactttgggccacgggcagactcgacgcaggcgtgaagttcttctttcacttcaggtgccggatgttttcctgtttcaaggagtccgatcgtctttgcctgcaggatctgctgttcaaacattattgttatcccgagagagatccagaagaagtgtttgctttcctcctgaggttcccccatgtggcattgttcacattcgatggactggatgagttgcacagcgacctagatctgagtcgggtgcccgattcaagctgcccttgggaaccggctcatcctctcgtcctcctcgccaatctactgagcggcaagcttctaaagggcgcctccaaactgctgactgcccgcactggcatcgaagtgccaagacaatttctacggaagaaggttctcttaagaggcttctctcctagtcacctcagggcatatgcacggcgcatgtttcccgaaagggcattacaggaccgccttctgtcacagcttgaggctaacccaaacttgtgttctctctgttctgtgccgctcttctgttggattattttccgttgtttccagcactttcgtgcggcattcgagggctcccctcagttacccgactgcaccatgacattgacagatgtgtttttactggtaacagaagtacacctgaaccgaatgcagccttcctctctcgtacagagaaacacgagaagccctgtcgagacactccacgccggaagagacacattgtgctcactcggtcaggtcgcccaccgcgggatggagaagagcctatttgtttttacgcaggaagaagtgcaagccagcgggcttcaggagagggatatgcagctcggcttcttgcgagctttacccgagctcgggcctgggggcgaccagcagagttatgagttctttcatctaacgttgcaggcttttttcacggctttcttcctagtcctggacgatcgagtcggcacacaggaactgttgaggttttttcaggaatggatgccccccgcgggggctgccacaacctcttgttacccaccatttttgccatttcaatgtctgcagggcagcggtccagcccgggaggatttgtttaaaaataaagatcacttccagttcacaaatctatttttatgtggccttttatcaaaagcaaagcagaaactcctgagacatctggtccccgccgcggctcttcggcggaagcggaaggcactttgggctcatttgttctcatccctgcggggttacctgaaatccttgcccagggtgcaggtggagtcattcaatcaggtgcaggctatgcccacttttatctggatgctgcgctgcatctacgaaactcaatcgcagaaggtgggccaattggctgcccgggggatttgtgcaaactacttgaagttgacttactgtaatgcctgcagtgccgactgttctgcattgtccttcgtgcttcatcattttcccaagagattggccctcgacctagataataacaacctgaacgattacggtgtgagggagctccagccctgcttctccagactaaccgtgttgagactcagcgttaatcaaattaccgacgggggcgttaaggtactgtcagaggagctgacgaaatataaaatagtcacgtacttgggtttgtggaagagcgtggacacgatatgtttcaagaagcagggattgctgaaatag

SEQ ID NO: 305629 - DNA, 794 bp, Artificial Sequence
  derived and/or modified sequence
actgcgggagcagcgtcctcccgggccacggcgcttcccggccccggcgtccccggaccatggcgctctccgggctcttctctagctctcagcggctgcgaagtctgtaaacctggtggccaaggacagtcagttgcatgtcacacaaggggcctcctttgatttatccaaaaggtctgacctggtttctggaaaaactctttagcgcatcaaatactcgttgagggcaagtgttgtttctaaacttgactcttgtggtgagaggtgattgtaagtcaggagactttccttcggtttctgcctttgatggcaagaggtggagattgtggcggcgattacagaaaacatctgggaagacaagttgctgtttttatgggaatcgcaggcttggaagagacagaagcaattccagaaataaattggaaattgaagatttaaacaatgttgttttaaaatattctaacttcaaagaatgatgccagaaacttaaaaaggggctgcgcagagtagcaggggccctggagggcgcggcctgaatcctgattgcccttctgctgagaggacacacgcagctgaagatgaatttgggaaaagtagccgcttgctactttaactatggaagagcagggccacagtgagatggaaataatcccatcagagtctcacccccacattcaattactgaaaagcaatcgggaacttctggtcactcacatccgcaatactcagtgtctggtggacaacttgctgaagaatgactacttctcggccgaagatgcggagattgtgtgtgc

SEQ ID NO: 305630 - DNA, 637 bp, Artificial Sequence
  derived and/or modified sequence
cggctgcgaagtctgtaaacctggtggccaaaagccaagtcatccagaagccagcttctgcagctccaaagagggccttagcagttacaaagaaacacaagataacggtgattgtaagtcaggagactttccttcggtttctgcctttgatggcaagaggtggagattgtggcggcgattacagaaaacatctgggaagacaagttgctgtttttatgggaatcgcaggcttggaagagacagaagcaattccagaaataaattggaaattgaagatttaaacaatgttgttttaaaatattctaacttcaaagaatgatgccagaaacttaaaaaggggctgcgcagagtagcaggggccctggagggcgcggcctgaatcctgattgcccttctgctgagaggacacacgcagctgaagatgaatttgggaaaagtagccgcttgctactttaactatggaagagcagggccacagtgagatggaaataatcccatcagagtctcacccccacattcaattactgaaaagcaatcgggaacttctggtcactcacatccgcaatactcagtgtctggtggacaacttgctgaagaatgactacttctcggccgaagatgcggagattgtgtgtgc

SEQ ID NO: 305631 - DNA, 578 bp, Artificial Sequence
  derived and/or modified sequence
agttcccgttccgggcccgcgaggcagccgccccggtcctgcccctccctcgcgctactgcgggagcagcgtcctcccgggccacggcgcttcccggccccggcgtccccggaccatggcgctctccgggctcttctctagctctcagcggctgcgaagtctgtaaacctggtggccaagtgattgtaagtcaggagactttccttcggtttctgcctttgatggcaagaggtggagattgtggcggcgattacagaaaacatctgggaagacaagttgctgtttttatgggaatcgcaggcttggaagagacagaagcagggctgcgcagagtagcaggggccctggagggcgcggcctgaatcctgattgcccttctgctgagaggacacacgcagctgaagatgaatttgggaaaagtagccgcttgctactttaactatggaagagcagggccacagtgagatggaaataatcccatcagagtctcacccccacattcaattactgaaaagcaatcgggaacttctggtcactcacatccgcaatactcagtgtctggtggacaacttgctgaa

SEQ ID NO: 305632 - DNA, 757 bp, Artificial Sequence
  derived and/or modified sequence
ccctccctcgcgctactgcgggagcagcgtcctcccgggccacggcgcttcccggccccggcgtccccggaccatggcgctctccgggctcttctctagctctcagcggctgcgaagtctgtaaacctggtggccaacatctcagttataagaaatgcacatctccgctcaaggtcccctgggacagtgcaaggaaagaaagaagcctgcggtgaaagtgacactgagtgattgtaagtcaggagactttccttcggtttctgcctttgatggcaagaggtggagattgtggcggcgattacagaaaacatctgggaagacaagttgctgtttttatgggaatcgcaggcttggaagagacagaagcaattccagaaataaattggaaattgaagatttaaacaatgttgttttaaaatattctaacttcaaagaatgatgccagaaacttaaaaaggggctgcgcagagtagcaggggccctggagggcgcggcctgaatcctgattgcccttctgctgagaggacacacgcagctgaagatgaatttgggaaaagtagccgcttgctactttaactatggaagagcagggccacagtgagatggaaataatcccatcagagtctcacccccacattcaattactgaaaagcaatcgggaacttctggtcactcacatccgcaatactcagtgtctggtggacaacttgctgaagaatgactacttctcggccgaagatgcggagattgtgtgtgc

SEQ ID NO: 305633 - DNA, 4610 bp, Artificial Sequence
  derived and/or modified sequence
ccctcgcgctactgcgggagcagcgtcctcccgggccacggcgcttcccggccccggcgtccccggaccatggcgctctccgggctcttctctagctctcagcggctgcgaagtctgtaaacctggtggccaagtgattgtaagtcaggagactttccttcggtttctgcctttgatggcaagaggtggagattgtggcggcgattacagaaaacatctgggaagacaagttgctgtttttatgggaatcgcaggcttggaagagacagaagcaattccagaaataaattggaaattgaagatttaaacaatgttgttttaaaatattctaacttcaaagaatgatgccagaaacttaaaaaggggctgcgcagagtagcaggggccctggagggcgcggcctgaatcctgattgcccttctgctgagaggacacacgcagctgaagatgaatttgggaaaagtagccgcttgctactttaactatggaagagcagggccacagtgagatggaaataatcccatcagagtctcacccccacattcaattactgaaaagcaatcgggaacttctggtcactcacatccgcaatactcagtgtctggtggacaacttgctgaagaatgactacttctcggccgaagatgcggagattgtgtgtgcctgccccacccagcctgacaaggtccgcaaaattctggacctggtacagagcaagggcgaggaggtgtccgagttcttcctctacttgctccagcaactcgcagatgcctacgtggacctcaggccttggctgctggagatcggcttctccccttccctgctcactcagagcaaagtcgtggtcaacactgacccagtgagcaggtatacccagcagctgcgacaccatctgggccgtgactccaagttcgtgctgtgctatgcccagaaggaggagctgctgctggaggagatctacatggacaccatcatggagctggttggcttcagcaatgagagcctgggcagcctgaacagcctggcctgcctcctggaccacaccaccggcatcctcaatgagcagggtgagaccatcttcatcctgggtgatgctggggtgggcaagtccatgctgctacagcggctgcagagcctctgggccacgggccggctagacgcaggggtcaaattcttcttccactttcgctgccgcatgttcagctgcttcaaggaaagtgacaggctgtgtctgcaggacctgctcttcaagcactactgctacccagagcgggaccccgaggaggtgtttgccttcctgctgcgcttcccccacgtggccctcttcaccttcgatggcctggacgagctgcactcggacttggacctgagccgcgtgcctgacagctcctgcccctgggagcctgcccaccccctggtcttgctggccaacctgctcagtgggaagctgctcaagggggctagcaagctgctcacagcccgcacaggcatcgaggtcccgcgccagttcctgcggaagaaggtgcttctccggggcttctcccccagccacctgcgcgcctatgccaggaggatgttccccgagcgggccctgcaggaccgcctgctgagccagctggaggccaaccccaacctctgcagcctgtgctctgtgcccctcttctgctggatcatcttccggtgcttccagcacttccgtgctgcctttgaaggctcaccacagctgcccgactgcacgatgaccctgacagatgtcttcctcctggtcactgaggtccatctgaacaggatgcagcccagcagcctggtgcagcggaacacacgcagcccagtggagaccctccacgccggccgggacactctgtgctcgctggggcaggtggcccaccggggcatggagaagagcctctttgtcttcacccaggaggaggtgcaggcctccgggctgcaggagagagacatgcagctgggcttcctgcgggctttgccggagctgggccccgggggtgaccagcagtcctatgagtttttccacctcaccctccaggccttctttacagccttcttcctcgtgctggacgacagggtgggcactcaggagctgctcaggttcttccaggagtggatgccccctgcgggggcagcgaccacgtcctgctatcctcccttcctcccgttccagtgcctgcagggcagtggtccggcgcgggaagacctcttcaagaacaaggatcacttccagttcaccaacctcttcctgtgcgggctgttgtccaaagccaaacagaaactcctgcggcatctggtgcccgcggcagccctgaggagaaagcgcaaggccctgtgggcacacctgttttccagcctgcggggctacctgaagagcctgccccgcgttcaggtcgaaagcttcaaccaggtgcaggccatgcccacgttcatctggatgctgcgctgcatctacgagacacagagccagaaggtggggcagctggcggccaggggcatctgcgccaactacctcaagctgacctactgcaacgcctgctcggccgactgcagcgccctctccttcgtcctgcatcacttccccaagcggctggccctagacctagacaacaacaatctcaacgactacggcgtgcgggagctgcagccctgcttcagccgcctcactgttctcagactcagcgtaaaccagatcactgacggtggggtaaaggtgctaagcgaagagctgaccaaatacaaaattgtgacctatttgggactttggaaatcagtagacaccatatgcttcaaaaaacaggggctattaaaatgacatcaggagccagaaagtctcatggctgtgctttctcttgaagtttatacaacaaccagatcaccgatgtcggagccagactgggaaaaaacaaaataacaagtgaaggagggaagtatctcgccctggctgtgaagaacagcaaatcaatctctgaggttgggatgtggggcaatcaagttggggatgaaggagcaaaagccttcgcagaggctctgcggaaccaccccagcttgaccaccctgagtcttgcgtccaacggcatctccacagaaggaggaaagagccttgcgagggccctgcagcagaacacgtctctagaaatactgtggctgacccaaaatgaactcaacgatgaagtggcagagagtttggcagaaatgttgaaagtcaaccagacgttaaagcatttatggcttatccagaatcagatcacagctaaggggactgcccagctggcagatgcgttacagagcaacactggcataacagagatttgaacttgtttggaacttgtcataaaatcgatcagtttggtgaattgcaaccaacaatatttaaaaagaaaacagaacagaacaaaatatcaggatgcaatgtgcatgcctaaatggaaacctgataaaaccagaggaggccaaagtctatgaagatgagaagcggattatctgtttctgagaggatgctttcctgttcatggggtttttgccctggagcctcagcagcaaatgccactctgggcagtcttttgtgtcagtgtcttaaaggggcctgcgcaggcgggactatcaggagtccactgcctccatgatgcaagccagcttcctgtgcagaaggtctggtcggcaaactccctaagtacccgctacaattctgcagaaaaagaatgtgtcttgcgagctgttgtagttacagtaaatacactgtgaagagactttattgcctattataattatttttatctgaagctagaggaataaagctgtgagcaaacagaggaggccagcctcacctcattccaacacctgccatagggaccaacgggagcgagttggtcaccgctcttttcattgaagagttgaggatgtggcacaaagttggtgccaagcttcttgaataaaacgtgtttgatggattagtattatacctgaaatattttcttccttctcagcactttcccatgtattgatactggtcccacttcacagctggagacaccggagtatgtgcagtgtgggatttgactcctccaaggttttgtggaaagttaatgtcaaggaaaggatgcaccacgggcttttaattttaatcctggagtctcactgtctgctggcaaagatagagaatgccctcagctcttagctggtctaagaatgacgatgccttcaaaatgctgcttccactcagggcttctcctctgctaggctaccctcctctagaaggctgagtaccatgggctacagtgtctggccttgggaagaagtgattctgtccctccaaagaaatagggcatggcttgcccctgtggccctggcatccaaatggctgcttttgtctcccttacctcgtgaagaggggaagtctcttcctgcctcccaagcagctgaagggtgactaaacgggcgccaagactcaggggatcggctgggaactgggccagcagagcatgttggacaccccccaccatggtgggcttgtggtggctgctccatgagggtgggggtgatactactagatcacttgtcctcttgccagctcatttgttaataaaatactgaaaacactc

SEQ ID NO: 305634 - DNA, 183 bp, Artificial Sequence
  derived and/or modified sequence
atggaagaacagggtcattctgaaatggaaataattcctagcgaaagccacccacacatccaactcctcaagagcaaccgcgagcttctggtaacccacatacgaaatacgcagtgcctggtggataacttgctgaagaatgactatttttccgccgaggacgccgaaatcgtttgcgcatag

SEQ ID NO: 305635 - DNA, 183 bp, Artificial Sequence
  derived and/or modified sequence
atggaagaacaaggccactcggagatggagattattccatccgaatcccatccacacattcagttgctgaaatcaaatcgagagctgctggtgacccacatcagaaacacacagtgcctggtggataatctgctaaagaacgactatttcagcgcagaagatgccgaaatagtatgtgcatag

SEQ ID NO: 305636 - DNA, 183 bp, Artificial Sequence
  derived and/or modified sequence
atggaggaacaaggacactccgagatggagattatccctagtgagagccacccacatatccagctgcttaagagtaaccgagagctgctggttactcatattcggaatacccaatgccttgtcgacaacctgctgaagaatgattatttctccgctgaagacgctgaaattgtgtgtgcatag

SEQ ID NO: 305637 - DNA, 750 bp, Artificial Sequence
  derived and/or modified sequence
atggaagagcaaggccacagcgaaatggagattatcccaagcgagtctcatccacatatccagctcctgaaatcaaatcgtgagctcctggtaactcacattcgaaacacacaatgcctggtggataatctgttaaaaaatgattatttttccgcagaggacgctgaaatcgtgtgcgcttgccctacccagcctgataaggtcaggaagattctggatttggtgcagtctaaaggagaggaagttagtgagttcttcctttacctcctgcaacagcttgcagacgcttacgtggatcttaggccctggctgctggagattgggttcagtccctctctgctgacccagagcaaagtcgttgttaacaccgatcctgttagccggtacactcagcagttacggcaccatctcggtagagacagtaagttcgtgctctgttacgcgcagaaggaagagttgctcctggaggaaatctatatggacacaatcatggagctggtcggattctcaaacgaatctctaggttcactaaattccctcgcctgcctattggaccacaccacaggcatcctgaacgagcaggctgcaagccggaaagttacaggatgtgtgtgcaggacatgttcctcctccaccacggccacccagagcggaaccccccgtcgctgtctgccatcctgctgtgcttcaccaacctggccgagctccccctctatggcttggacatcttgtactaggacatggacttag

SEQ ID NO: 305638 - DNA, 2340 bp, Artificial Sequence
  derived and/or modified sequence
atggaggaacaagggcacagtgaaatggagattattcccagcgaaagtcaccctcacattcagttgttgaagtctaacagagagctgctggtgacccacattcggaacacccagtgtcttgttgataatctgctgaagaacgattacttctcggcggaggacgccgaaattgtgtgtgcatgccccacccagcccgataaggtgagaaagattttagacctggtgcaaagcaaaggggaggaggtgtctgagttcttcctgtacctgctccagcagttagccgacgcctatgttgacctgcggccatggttactggaaatcgggttctcgccttcgttgctcacccaaagtaaagtggttgtgaacaccgaccccgtcagcagatatactcagcaattgagacaccatctgggcagagattcaaagttcgtactatgttatgctcaaaaggaggagctacttctcgaggaaatttacatggatactatcatggagctggtaggatttagcaacgagagcttggggtctctgaatagcctggcatgcttgctggaccatactacaggcatcctgaacgagcagggcgagacgattttcatcctgggcgatgccggagtcggtaagtctatgcttttgcagagactgcagtccctgtgggccaccggccgactcgacgccggtgttaaattcttcttccacttccggtgtcgaatgttctcttgctttaaagaatcagatcggctgtgtctgcaggacctcctgttcaagcattactgctacccggagagagaccccgaggaggtcttcgcctttctcctgcgctttccacacgtggcacttttcacgttcgacggcttggacgagctccacagcgacctagatctgagcagggtgccggacagtagctgcccctgggagcccgcacacccactggtactgctggctaatctgctatccggtaaattattgaaaggagcgtctaagctgctcactgcccgaaccggtattgaagtgcccagacagttcttgaggaagaaagtactcctaagaggcttttcgccatcccacttgagggcctatgcacgcaggatgtttccagaaagagcgctgcaggatcggctgctcagccagctggaggccaatccaaacctttgttccctttgctcagttccgttgttttgctggatcatcttccgctgcttccagcactttagagccgcttttgagggctcaccgcagcttcccgactgcaccatgactctcaccgatgttttcctccttgtcactgaagtccacctgaatcgcatgcagccgagtagtttagtgcagcgaaatactcggagtcctgtagaaaccctgcacgccggtcgggacaccctttgcagcctgggtcaggttgcccaccggggtatggagaagagcttgttcgtctttacacaagaggaagtccaggccagcggcttacaggagagggatatgcaactgggctttctcagggctcttcccgaattaggtcccggtggtgaccaacaaagttacgagttctttcacctgaccctgcaggccttttttaccgcattcttcctagtgctcgacgatagagttggcactcaggaattactgcgatttttccaagaatggatgccccctgccggagccgctactacgtcgtgttatcctcccttccttccttttcagtgtctgcaaggttccggccctgcacgggaagatctgttcaaaaacaaggaccatttccagttcacaaatttatttttgtgcgggctgctgtccaaggcaaaacagaaactgctaagacacttagtccccgcagccgctcttaggcggaagagaaaagccctgtgggcccatctgttcagctccttgcgcggatatttaaaaagcctacctcgcgttcaagttgaaagtttcaaccaggttcaggcgatgcctacttttatttggatgttacggtgtatctacgagacccagtcccagaaagtggggcagctcgctgcgcgaggtatttgcgcgaattacctgaaattaacatattgtaatgcgtgtagcgccgattgtagtgcactgagtttcgtgctccaccacttcccaaaacggttggcattggatcttgataataataatcttaacgactatggtgtccgggaacttcagccatgttttagtcgccttacggttctccgcctcagtgttaaccaaatcacggatggaggggtgaaggttctgtcggaggagctcacaaaatacaaaattgtcacttacctcggcctctggaagtccgtggatactatttgcttcaaaaagcagggacttctcaaatag

SEQ ID NO: 305639 - DNA, 1446 bp, Artificial Sequence
  derived and/or modified sequence
atggcagcctcttctaatagtagtctgagtggaagcagcgtgtcttccgtctatagcgagccacgtagccccagggaactgcccaagtatgcagaggaataccagcctcccatttggaaatcatacctgtatcagctgcagcaggaggcgccacgcccaaaaaggattatctgccctcgggaagttgagaataggccaaagtactatggtcgagagtttcatggtatcatatctcgagagcaggcagacgagctacttggtggggtcgagggggcctacatattaagagagagtcagcgacaacctgggtgctatacactcgcactcagattcggcaaccagacactgaattatagactgtttcacgacggcaagcacttcgttggtgagaaaaggttcgagtctatccacgacctggttactgatggactgattacactgtatattgaaacaaaggccgcagagtatataagcaagatgaccacgaatcctatctacgagcacattgggtacgccaccctactgcgagaaaaggtctctaggaggctctccagaagcaaaaacgaaccacgcaaaacaaacgtcacacatgaggagcataccgctgtagagaaaatcagcagtctggtgcgcagagccgccctcacccataacgacaatcatttcaattacgagaagacacacaacttcaaagtgcacacattcagagggccgcactggtgcgagtattgcgccaactttatgtgggggttaattgcacagggggtgcgctgctccgactgtggtctcaacgtgcataagcagtgctctaagcatgttcctaacgattgtcagccagaccttaagagaataaaaaaagtttactgctgcgacctgaccacactggtgaaggcccacaatacccagagacctatggtggttgacatctgcattagggaaattgaggcacgcggcctgaaaagcgagggactgtaccgggtgagcggtttcacggaacacattgaagacgtgaagatggcctttgatcgcgacggggaaaaggctgatatcagtgctaacgtgtatccggatatcaatatcattactggggcactgaagctctatttccgcgacctgccaattcccgtaatcacttatgacacctattccaaattcatcgacgcagcaaagattagcaatgcggacgagcgccttgaagcagttcacgaggtgcttatgttgctaccccctgcacactacgagaccctgcggtatctcatgattcacctcaaaaaggttactatgaatgaaaaagacaattttatgaatgcagagaatctggggattgtctttgggccaacactcatgagacctccagaagattctactctgacgactcttcacgacatgcgctatcagaagctcattgtgcagatcctcattgagaacgaggatgtgctgttctag

SEQ ID NO: 305640 - DNA, 1446 bp, Artificial Sequence
  derived and/or modified sequence
atggccgccagcagcaacagcagcctgagcggcagctctgtgtcctctgtgtacagcgagcccaggagcccccgggagctgcccaagtatgcagaggagtaccagccccccatctggaagagctacctgtaccagctgcagcaggaggccccccggcccaagaggatcatctgcccccgggaggtggagaaccggcccaagtactacggccgggagttccacggcatcatcagccgggagcaggctgatgagctgctgggcggcgtggagggcgcctacatcctgcgggagagccagaggcagcccggctgctacaccctggccctgcgctttggaaaccagaccctgaactaccgcctcttccatgatggcaagcactttgtgggggagaagagatttgagagcatccatgacctggtgacagatggcctcatcaccctgtacatcgagaccaaggctgctgagtacatcagcaagatgaccaccaaccccatctatgagcacatcggctacgccaccctgctgcgggagaaggtgtcccggcggctgagccgcagcaagaatgagcccaggaagaccaacgtgacccatgaggagcacacagctgtggagaagatcagcagcctggtgagaagagctgccctgacccacaatgacaaccacttcaactatgagaagacccacaacttcaaggtgcacaccttccggggcccccactggtgtgagtactgtgccaacttcatgtggggcctcatcgcccagggcgtgcgctgcagcgactgtggcctgaatgtgcacaagcagtgcagcaagcacgtgcccaatgactgccagcctgacctgaagaggatcaagaaggtgtactgctgtgacctgaccaccctggtgaaggcccacaacacccagaggcccatggtggtggacatctgcatccgggagattgaggcccggggcctgaagtctgagggcctgtacagagtgtctggcttcacagagcacattgaagatgtgaagatggcctttgacagagatggagagaaggctgacatcagcgccaacgtgtacccagacatcaacatcatcaccggggccctgaagctgtacttccgggacctgcccatccctgtgatcacctatgacacctacagcaagttcattgatgctgccaagatcagcaatgctgatgagcggctggaggccgtgcatgaggtgctgatgctgctgcccccagcccactatgagaccctgcgctacctgatgatccacctgaagaaggtgaccatgaatgagaaggacaacttcatgaatgctgagaacctgggcatcgtgtttggccccaccctgatgaggcccccagaggacagcaccctgaccaccctgcatgacatgagataccagaagctgattgtgcagatcctgattgaaaatgaagatgtgctcttctag

SEQ ID NO: 305641 - DNA, 1446 bp, Artificial Sequence
  derived and/or modified sequence
atggccgccagcagcaacagcagcctgagcggcagcagcgtgagctctgtctactccgagccgcgtagtccgcgagagctgcctaaatacgctgaggagtatcagccgcccatatggaaaagctacctgtatcagctacagcaggaggcaccgagaccgaagagaattatttgcccccgggaggtggagaacaggccaaaatattatgggcgggagtttcacggaataataagcagagagcaggctgatgagcttttaggaggggtcgagggagcatacatcttacgcgagtcacagagacagcccgggtgctacacactggccctgagatttggaaatcagaccttgaattatagactgtttcacgacggcaagcatttcgttggggagaagcgctttgagtccatacacgatctggtaactgacggcctgatcacactgtacattgagacaaaggcggctgagtatatctctaagatgacaaccaaccccatttatgagcatattggatacgccaccctgctaagagagaaggtgtcccgcagactctcacgcagcaaaaacgaacctagaaagaccaacgtgacccacgaggaacacacagctgttgagaagattagctctcttgtgcgccgagctgccctgacccacaacgataatcacttcaactacgagaagactcacaactttaaagtccacacatttcgcggaccacattggtgtgagtactgtgccaactttatgtggggactgattgcccagggtgtgaggtgctctgactgtggcctcaacgtgcacaagcaatgcagcaaacatgtacctaacgactgccagcccgatctcaagagaattaagaaggtgtactgttgcgacctgaccactctcgtgaaggctcacaacacacagcgcccaatggttgtggacatatgcataagggagatcgaggcgaggggcctcaaatcagaaggcctgtaccgcgtcagcggatttacagagcatattgaggacgtcaagatggcttttgatcgagatggcgaaaaggccgacatatctgcgaatgtttatcctgacatcaatataatcactggggcccttaagctatactttagagacctcccgattccagtgattacttatgacacctattctaagttcattgacgcagccaaaatttccaatgccgatgagagattagaggctgtccatgaagttctgatgttactgccacccgcccactacgagacgctgcgctacctgatgattcatctgaaaaaggtcacaatgaacgagaaagataattttatgaacgcagaaaatctcggcatcgtattcgggcctaccctgatgcgacctcccgaggacagcaccttgaccactctgcacgatatgcgataccagaagctgatcgtgcagatcctgatcgagaacgaagacgtccttttttag

SEQ ID NO: 305642 - DNA, 1446 bp, Artificial Sequence
  derived and/or modified sequence
atggctgcctcctcaaattcatccctgagcggatcttctgtgtcttccgtgtattcagaacctcgctccccgagggaactccccaaatatgctgaagaataccaacccccaatttggaagagctatctgtaccaactgcaacaagaggctccacggcctaagcggattatttgtcctagggaggtggaaaatcggccaaagtattatggcagagagttccacggaataatctctcgcgagcaggcagatgaactgctgggtggcgtggagggagcatacatcctgcgcgaaagtcagcgtcagccaggttgttataccctcgcattgcgctttggaaaccaaacgctcaattaccggctgtttcatgatgggaaacactttgttggagagaagagattcgagagtatccatgaccttgttacagatggacttatcacgctgtacattgaaaccaaagccgctgaatacattagtaaaatgactactaacccaatttatgaacatataggttatgccaccctgcttcgggaaaaggtatctaggcggctgtctagatcaaagaacgaaccacggaagactaacgtaacgcacgaggagcacaccgctgttgagaagatcagttcactagttagaagggccgcactgacacataatgataaccacttcaattacgaaaagacccacaatttcaaggtgcacacattccggggaccccattggtgcgagtactgtgccaactttatgtggggactcattgcccagggtgtccggtgctctgactgcggcttgaatgtgcacaagcagtgctcaaaacatgtccctaacgactgtcaacctgacctgaagaggataaaaaaggtgtattgttgtgacctgactaccctcgtcaaggctcataatacacagcggccaatggtggtggacatttgtattcgagagatcgaggccaggggcctcaaatccgaaggactgtaccgcgtaagcggatttaccgagcatattgaagacgtcaagatggcatttgatagggatggggaaaaggctgacatcagtgctaacgtgtatcctgacatcaatatcattacaggcgctctgaagctgtacttccgcgatctgccaatcccagtaattacgtacgacacatactctaagttcatagacgcagccaagatctcaaacgccgacgaaaggctcgaagccgttcatgaggtgttgatgctcctcccacccgctcattatgagaccctcagatacttgatgattcatctgaagaaagtgaccatgaacgaaaaggacaactttatgaacgccgagaatttagggattgtcttcgggcctaccctgatgagacctccagaggactcaacattgacgacactgcacgatatgaggtaccaaaagctcatcgtgcagatcctgatcgagaatgaagatgtgctcttctag

SEQ ID NO: 305643 - DNA, 1516 bp, Artificial Sequence
  derived and/or modified sequence
gcgaggggcgcgcggagatggcagcgtccagcaactccagcctgtccggctcgtcggtgtcctccgtctattctgaacccagaagcccgagagagcttccaaaatatgctgaagaataccagcctcctatatggaaatcatacttatatcagttacagcaagaggcacctcgtcccaagagaatcatttgtcctcgggaggtggaaaacagaccaaaatattatggaagagagtttcatgggatcatctctcgggagcaggcggatgagcttcttggaggcgtggagggtgcctacatccttagagaaagccagcggcaaccaggatgctacacgctggctctcaggtttggaaaccagaccttaaactacaggctcttccacgacgggaaacactttgtgggtgagaagaggtttgagtcgattcatgatctggtgacagatggcttgataacactgtacatagaaacaaaagctgccgagtacatttcaaaaatgacaactaaccccatctatgaacacattggatatgccaccctactcagagaaaaagtatccagaaggctgagcaggtctaaaaatgaaccaagaaaaacaaacgtcacacatgaagaacacacagcggtggaaaagatctcctccctggttcgaagggctgccctcacacacaacgacaaccacttcaattatgagaagacacacaactttaaggtccacacgttccgaggcccacactggtgtgaatattgtgccaatttcatgtgggggctcatcgcccaaggggtccggtgctcagactgtggattgaacgtacacaaacagtgttccaagcacgttcccaatgactgccaacctgatctcaagaggatcaagaaagtgtactgttgtgacctcacaacacttgtgaaggctcacaacactcagagacccatggtggtagacatatgcattcgggaaattgaagcaagaggattaaaatcggaaggcctttacagagtctctgggttcactgaacacattgaagatgtcaaaatggcatttgacagagatggtgaaaaggccgatatatctgccaatgtctatccagacataaacatcatcactggagcccttaaactgtatttcagagacttacccatccctgtcatcacatatgatacctattccaaatttatagatgcagcaaaaatctccaatgcagatgagaggctggaagccgtccatgaagtgctgatgctgctgcctcctgcccactatgaaaccctccggtacctaatgatccacctcaaaaaggttactatgaatgaaaaagacaatttcatgaatgcagaaaatctggggatcgtgtttgggcccactctgatgaggccccctgaggacagcaccctgaccaccctgcatgatatgcggtaccaaaagctgattgtgcagattttaatagaaaacgaagacgttttattctaatccatcagggaaatgagctgaatggccccagcaccatccaagttgacacagct

SEQ ID NO: 305644 - DNA, 1446 bp, Artificial Sequence
  derived and/or modified sequence
atggccgccagcagcaacagcagcctgagcggcagcagcgtgagcagcgtgtacagcgagcccagaagccccagagagctgcccaagtacgccgaggagtaccagccccccatctggaagagctacctgtaccagctgcagcaggaggcccccagacccaagagaatcatctgccccagagaggtggagaacagacccaagtactacggcagagagttccacggcatcatcagcagagagcaggccgacgagctgctgggcggcgtggagggcgcctacatcctgagagagagccagagacagcccggctgctacaccctggccctgagattcggcaaccagaccctgaactacagactgttccacgacggcaagcacttcgtgggcgagaagagattcgagagcatccacgacctggtgaccgacggcctgatcaccctgtacatcgagaccaaggccgccgagtacatcagcaagatgaccaccaaccccatctacgagcacatcggctacgccaccctgctgagagagaaggtgagcagaagactgagcagaagcaagaacgagcccagaaagaccaacgtgacccacgaggagcacaccgccgtggagaagatcagcagcctggtgagaagagccgccctgacccacaacgacaaccacttcaactacgagaagacccacaacttcaaggtgcacaccttcagaggcccccactggtgcgagtactgcgccaacttcatgtggggcctgatcgcccagggcgtgagatgcagcgactgcggcctgaacgtgcacaagcagtgcagcaagcacgtgcccaacgactgccagcccgacctgaagagaatcaagaaggtgtactgctgcgacctgaccaccctggtgaaggcccacaacacccagagacccatggtggtggacatctgcatcagagagatcgaggccagaggcctgaagagcgagggcctgtacagagtgagcggcttcaccgagcacatcgaggacgtgaagatggccttcgacagagacggcgagaaggccgacatcagcgccaacgtgtaccccgacatcaacatcatcaccggcgccctgaagctgtacttcagagacctgcccatccccgtgatcacctacgacacctacagcaagttcatcgacgccgccaagatcagcaacgccgacgagagactggaggccgtgcacgaggtgctgatgctgctgccccccgcccactacgagaccctgagatacctgatgatccacctgaagaaggtgaccatgaacgagaaggacaacttcatgaacgccgagaacctgggcatcgtgttcggccccaccctgatgagaccccccgaggacagcaccctgaccaccctgcacgacatgagataccagaagctgatcgtgcagatcctgatcgagaacgaggacgtgctgttctag

SEQ ID NO: 305645 - protein, 453 aa, Artificial Sequence
  derived and/or modified sequence
MDAEEYQPPIWKSYLYQLQQEAPRPKRIICPREVENRPKYYGREFHGIISREQADELLGGVEGAYILRESQRQPGCYTLALRFGNQTLNYRLFHDGKHFVGEKRFESIHDLVTDGLITLYIETKAAEYISKMTTNPIYEHIGYATLLREKVSRRLSRSKNEPRKTNVTHEEHTAVEKISSLVRRAALTHNDNHFNYEKTHNFKVHTFRGPHWCEYCANFMWGLIAQGVRCSDCGLNVHKQCSKHVPNDCQPDLKRIKKVYCCDLTTLVKAHNTQRPMVVDICIREIEARGLKSEGLYRVSGFTEHIEDVKMAFDRDGEKADISANVYPDINIITGALKLYFRDLPIPVITYDTYSKFIDAAKISNADERLEAVHEVLMLLPPAHYETLRYLMIHLKKVTMNEKDNFMNAENLGIVFGPTLMRPPEDSTLTTLHDMRYQKLIVQILIENEDVLF

SEQ ID NO: 305646 - DNA, 1407 bp, Artificial Sequence
  derived and/or modified sequence
atggccgccagcagcaacagcagcctgagcggcagcagcgtgagcagcgacgccgaggagtaccagccccccatctggaagagctacctgtaccagctgcagcaggaggcccccagacccaagagaatcatctgccccagagaggtggagaacagacccaagtactacggcagagagttccacggcatcatcagcagagagcaggccgacgagctgctgggcggcgtggagggcgcctacatcctgagagagagccagagacagcccggctgctacaccctggccctgagattcggcaaccagaccctgaactacagactgttccacgacggcaagcacttcgtgggcgagaagagattcgagagcatccacgacctggtgaccgacggcctgatcaccctgtacatcgagaccaaggccgccgagtacatcagcaagatgaccaccaaccccatctacgagcacatcggctacgccaccctgctgagagagaaggtgagcagaagactgagcagaagcaagaacgagcccagaaagaccaacgtgacccacgaggagcacaccgccgtggagaagatcagcagcctggtgagaagagccgccctgacccacaacgacaaccacttcaactacgagaagacccacaacttcaaggtgcacaccttcagaggcccccactggtgcgagtactgcgccaacttcatgtggggcctgatcgcccagggcgtgagatgcagcgactgcggcctgaacgtgcacaagcagtgcagcaagcacgtgcccaacgactgccagcccgacctgaagagaatcaagaaggtgtactgctgcgacctgaccaccctggtgaaggcccacaacacccagagacccatggtggtggacatctgcatcagagagatcgaggccagaggcctgaagagcgagggcctgtacagagtgagcggcttcaccgagcacatcgaggacgtgaagatggccttcgacagagacggcgagaaggccgacatcagcgccaacgtgtaccccgacatcaacatcatcaccggcgccctgaagctgtacttcagagacctgcccatccccgtgatcacctacgacacctacagcaagttcatcgacgccgccaagatcagcaacgccgacgagagactggaggccgtgcacgaggtgctgatgctgctgccccccgcccactacgagaccctgagatacctgatgatccacctgaagaaggtgaccatgaacgagaaggacaacttcatgaacgccgagaacctgggcatcgtgttcggccccaccctgatgagaccccccgaggacagcaccctgaccaccctgcacgacatgagataccagaagctgatcgtgcagatcctgatcgagaacgaggacgtgctgttctag

SEQ ID NO: 305647 - DNA, 1407 bp, Artificial Sequence
  derived and/or modified sequence
atggccgcgtccagcaatagttcacttagcggttccagtgtgtctagcgacgctgaggaataccagccgccgatttggaaatcctacctttaccagctgcagcaggaggcccctaggccgaaaagaattatttgcccgagagaggtggaaaaccggcccaagtattatgggcgtgagtttcatggcatcatctctcgtgaacaagccgacgagctcctgggcggagttgagggtgcatacatcctgcgcgagtcccagcggcagcccggttgctatacccttgcattacggttcgggaatcagacactcaactaccgcctcttccacgatgggaaacattttgtgggagaaaaacggtttgaaagcattcacgatcttgtgaccgacggactcattactctctatatcgagaccaaagctgccgagtacatctccaaaatgacaaccaatccgatctatgagcacatcgggtacgctactttgttgagagaaaaggtgtctcgccgtctctctcgatcgaaaaatgagcctaggaaaaccaatgtaactcacgaagaacatactgctgtcgaaaaaatcagttccctggttcgaagggcagctttgactcataacgataaccacttcaactatgagaagacgcataatttcaaggtgcacaccttccgcggaccacattggtgtgaatactgcgcaaatttcatgtggggcctgattgcacagggcgtccgctgcagtgattgcggtctcaatgtgcataagcagtgttccaaacatgtgcccaacgactgccagccagacttgaaacggattaaaaaagtgtattgctgcgacctgacgacgcttgtaaaagcccacaacacacagcgaccgatggtggtggatatttgcatccgggagatagaggcgcgcgggctgaagtctgagggactatacagggtctccgggttcaccgagcatatcgaagatgtgaaaatggcattcgatcgagatggagaaaaagcagatatctcagccaacgtctatcccgatataaatatcatcactggcgctttaaagctatattttcgggacctccctatcccagtcattacctacgacacatactcaaagttcattgatgctgccaagatctccaatgctgatgaacgccttgaagcagttcatgaggtcttgatgcttcttcctccagcccattatgaaaccctacgatatctcatgatccacctgaagaaagtcacgatgaacgagaaggacaactttatgaacgctgaaaatctcggaattgttttcggaccgacgctcatgcggccgcctgaggactcaactcttaccaccttgcacgacatgcgataccaaaagctgatagtgcaaattctgatagaaaacgaggacgtccttttctag

SEQ ID NO: 305648 - DNA, 1407 bp, Artificial Sequence
  derived and/or modified sequence
atggccgccagcagcaacagcagcctgagcggcagctctgtgtccagtgatgctgaggagtaccagccccccatctggaagagctacctgtaccagctgcagcaggaggccccccggcccaagaggatcatctgcccccgggaggtggagaaccggcccaagtactacggccgggagttccacggcatcatcagccgggagcaggctgatgagctgctgggcggcgtggagggcgcctacatcctgcgggagagccagaggcagcccggctgctacaccctggccctgcgcttcggcaaccagaccctgaactaccgcctcttccatgatggcaagcactttgtgggggagaagagatttgagagcatccatgacctggtgacagatggcctcatcaccctgtacatcgagaccaaggctgctgagtacatcagcaagatgaccaccaaccccatctatgagcacatcggctacgccaccctgctgcgggagaaggtgtcccggcggctgagccgcagcaagaatgagcccaggaagaccaacgtgacccatgaggagcacacagctgtggagaagatcagcagcctggtgcggcgggccgccctgacccacaatgacaaccacttcaactatgagaagacccacaacttcaaggtgcacaccttccggggcccccactggtgtgagtactgtgccaacttcatgtggggcctgattgcccagggcgtgcgctgcagcgactgtggcctgaatgtgcacaagcagtgcagcaagcacgtgcccaatgactgccagcctgacctgaagaggatcaagaaggtgtactgctgtgacctgaccaccctggtgaaggcccacaacacccagaggcccatggtggtggacatctgcatccgggagattgaggcccggggcctgaagtctgagggcctgtacagagtgtctggcttcacagagcacattgaagatgtgaagatggcctttgacagagatggagagaaggctgacatcagcgccaacgtgtacccagacatcaacatcatcactggagccctgaagctgtacttccgggacctgcccatccctgtgatcacctatgacacctacagcaagttcattgatgctgccaagatcagcaatgctgatgagcggctggaggccgtgcatgaggtgctgatgctgctgcccccagcccactatgagaccctgcgctacctgatgatccacctgaagaaggtgaccatgaatgagaaggacaacttcatgaatgctgagaacctgggcatcgtgtttggccccaccctgatgaggcctcctgaggacagcaccctgaccaccctgcatgacatgagataccagaagctgattgtgcagatcctgattgaaaatgaagatgtgctcttctag

SEQ ID NO: 305649 - DNA, 1407 bp, Artificial Sequence
  derived and/or modified sequence
atggccgccagcagcaacagcagcctgagcggcagcagcgtgagcagtgacgccgaggagtatcagccgccaatttggaaatcttacctgtatcaattgcagcaagaggccccgcgccccaagcggattatctgccctagagaagtggaaaatagacctaagtattacggccgcgaatttcacggaattataagccgtgagcaggcagatgaactactggggggagtggaaggggcctacattctgagggagtcacaaagacagcccggctgttatacactggcactccggtttggaaaccagactctgaactataggctctttcatgacggtaagcacttcgttggggagaagaggttcgagagtatccatgacttggtgacggatgggctgatcacactgtatatagagaccaaggcagcagagtacattagcaaaatgacaactaacccaatttacgagcacattggctatgcaaccttgctgcgggaaaaggtctcccgacgtctgagccgaagcaaaaacgagccccgaaagactaacgtgacccacgaggagcatactgcagtcgagaagatttcttcgctggtgcgtagggctgccctaacacataatgataaccatttcaactatgagaaaacgcataactttaaggtacacacattccgtggaccccattggtgtgaatattgtgccaactttatgtggggcctaatcgcacaaggcgttagatgctctgattgcgggctgaatgtgcataagcaatgttctaagcacgttccgaacgattgtcagcccgacttgaaaaggatcaaaaaggtgtattgctgcgacctgaccaccctagtaaaagcacataatacacagcgaccaatggtggttgatatctgcatccgggagatcgaggcccgagggctgaaaagcgaagggctctacagagtgtctggatttactgaacacatagaagacgtaaagatggcctttgatcgtgatggggagaaggcagatatctccgcaaatgtgtacccggacatcaacattataaccggcgctctgaagctctactttcgtgatttgccaataccggtgatcacttatgacacttactcaaaattcatcgacgctgccaagatcagcaatgcagacgagcgccttgaggccgttcatgaagtcctgatgcttctcccacccgcacactatgaaaccctgcgatatctcatgatccacttgaagaaggtgaccatgaacgagaaagacaattttatgaacgcggaaaatctggggatagtgttcggacctaccttgatgagacccccggaagattccactctcaccactctgcacgacatgagataccagaaactgatagtgcagatacttattgagaacgaggacgttctgttctag

SEQ ID NO: 305650 - DNA, 1407 bp, Artificial Sequence
  derived and/or modified sequence
atggctgcatcctccaacagctccctgagcggttcatccgtgagctccgatgccgaggaataccagccgcctatctggaagagctatttgtatcagctgcagcaggaggcccctagacccaaacgaatcatttgtcccagggaagttgaaaataggccaaaatattacgggagggagttccatgggattatttccagagaacaagccgatgaactgctaggtggggttgaaggggcttacatcctgcgagaatctcagcgccaacccggatgctatacccttgcactacggtttggcaatcagaccctgaattaccgtttgttccacgacggcaaacacttcgtcggagaaaagcggttcgagtcaattcatgatctcgtgacagacggcctgattacgttatatatagagaccaaagccgcagaatatatatcaaagatgacaactaaccccatctacgaacacattggttatgcaactcttctccgcgagaaagtgtccaggagactctcccggtctaaaaacgagccacggaagaccaacgtaacacacgaggaacacacagctgtggaaaagattagtagtctggttagacgggctgcccttacccacaatgataatcacttcaactacgaaaaaactcataattttaaggtgcatacatttagagggcctcattggtgtgaatactgtgcaaactttatgtggggcctcattgcccagggtgtgcggtgtagtgactgcgggcttaacgtgcacaagcagtgctctaagcatgtgcctaatgactgccaacctgacttgaaaagaatcaagaaagtgtactgctgcgacctcacaaccctggtcaaagcccataacacacagagaccgatggttgttgatatctgcattagagaaatcgaagcacgcggactgaaaagtgaaggactttacagagtctccggatttaccgaacacatcgaagacgtaaagatggcctttgaccgagacggcgagaaggccgatatctccgctaacgtctatccggatattaacatcattaccggggctctgaagctctacttccgggatctgccaatcccagttattacttacgacacgtactcgaagttcatcgatgctgcgaagatttctaatgcagacgaaagattggaagctgtacatgaggtcctaatgcttctgccacctgcgcactatgagacactcaggtacctaatgatacaccttaaaaaggttaccatgaatgagaaggacaattttatgaacgctgagaaccttggaatagtctttggcccaaccttaatgcgacccccagaagattccactttgactacacttcatgatatgagataccagaagctgatcgtgcagatcctaatcgaaaatgaggatgtcctgttctag

SEQ ID NO: 305651 - DNA, 3530 bp, Artificial Sequence
  derived and/or modified sequence
ttcttcctttgtgtgtgcgcgagcggagttggggcggagggagaagggggaggtcgctctgtctgtccgtctcccgccgcctctgcccggtctactcgaagtgcggcgggagaggcgggagcccaggagagggtgcgggagctggcggggcggctcggagctgccaggacgccctggtcccagccgcgcacaggggagcgtggacggcagaggggctcggcgggagccgagatccgcccgtcccggctgcccctcggcctccctctgctcccacctaccccctgacacccatagaaaagcgtgcaaaggcgcggagcgggacggaaaccacaaataaatagcggcggcggcagcgcgtcatctggtggagcaggaagtgcaggcagagtccggaggctggtgctttctgcgcgtccccaggactttgccatgggctgggggccgcggaggctgcgagcggccgggcgagggcagcggcggcggcgtccgcaccggggctgagcgagcagcgacgcgaggggcgcgcggagatggcagcgtccagcaactccagcctgtccggctcgtcggtgtcctccgatgctgaagaataccagcctcctatatggaaatcatacttatatcagttacagcaagaggcacctcgtcccaagagaatcatttgtcctcgggaggtggaaaacagaccaaaatattatggaagagagtttcatgggatcatctctcgggagcaggcggatgagcttcttggaggcgtggagggtgcctacatccttagagaaagccagcggcaaccaggatgctacacgctggctctcaggtttggaaaccagaccttaaactacaggctcttccacgacgggaaacactttgtgggtgagaagaggtttgagtcgattcatgatctggtgacagatggcttgataacactgtacatagaaacaaaagctgccgagtacatttcaaaaatgacaactaaccccatctatgaacacattggatatgccaccctactcagagaaaaagtatccagaaggctgagcaggtctaaaaatgaaccaagaaaaacaaacgtcacacatgaagaacacacagcggtggaaaagatctcctccctggttcgaagggctgccctcacacacaacgacaaccacttcaattatgagaagacacacaactttaaggtccacacgttccgaggcccacactggtgtgaatattgtgccaatttcatgtgggggctcatcgcccaaggggtccggtgctcagactgtggattgaacgtacacaaacagtgttccaagcacgttcccaatgactgccaacctgatctcaagaggatcaagaaagtgtactgttgtgacctcacaacacttgtgaaggctcacaacactcagagacccatggtggtagacatatgcattcgggaaattgaagcaagaggattaaaatcggaaggcctttacagagtctctgggttcactgaacacattgaagatgtcaaaatggcatttgacagagatggtgaaaaggccgatatatctgccaatgtctatccagacataaacatcatcactggagcccttaaactgtatttcagagacttacccatccctgtcatcacatatgatacctattccaaatttatagatgcagcaaaaatctccaatgcagatgagaggctggaagccgtccatgaagtgctgatgctgctgcctcctgcccactatgaaaccctccggtacctaatgatccacctcaaaaaggttactatgaatgaaaaagacaatttcatgaatgcagaaaatctggggatcgtgtttgggcccactctgatgaggccccctgaggacagcaccctgaccaccctgcatgatatgcggtaccaaaagctgattgtgcagattttaatagaaaacgaagacgttttattctaatccatcagggaaatgagctgaatggccccagcaccatccaagttgacacagctaaaggaataaaaacatttcttaccacttgatttgttttccaagcaagtgctagaatttcctggactgcagaggatcgctgagtggggtactgtgtctcatagacatgcgccacctccacgtgagaacaagggtgaaggtgagggaagcccctcaccttgggtcttttgctgtgcctcctatgtatgtctggtttgctggaagagtgattaatacatctttaatttattaaaaaacaatgtagacctttaaacttcagtcttattggtaataaaagggaacttaattcatacaggtacttgatacagttatacattttccacttacaaaaagaagacaattctgttaaatgaaacgtgtatcgtaaaatgtatttttattttacccacgagaatgttgttatttttagcaaatagaactcaatgcagtgcattggttattaccctgtgtaccttgtccctcattttgctgtgacaccctgaaaaagctgaccacaaatgcagtattatcttgacatacctctgtcctcctcagtgctttttaatgaaatttcacctgccccttgtgttcctgctttggatagtttttgctcttaagcattggcattcttctattgtatggtatgtatttatagcaattgtaggatggtctgaaatgtccacacactttctatgcatacaaattttgtgaattcccaaagtatgctttggaattggtcatagtcttttcgtatcatgagtgtgtatcccagaagatacagaatgcggtcattttacctgaaattatttgagaacactggatgtatctggtctgtgtaaaaagttagcacttaccctcttttcttcctggccaagccctctgaattcatctgttaatatcaaattgtatttttgccacatttctgtattggtgaaaagcgaatctgcagaataactgtcaacgtttttcattcttgttttacaaacctattttttaaagtgagaataaggttggtttttaccaaatatttgttcctccttgacaaaagtagctctgtgtggataatatgattttattactacagttccagtcacttggttatatttatcttagcatgagcctttcacaccaagatttctatattttgtaacataggtgaaatatttaaaacatcaaaaactgtaaatctagatttttaaaaaatccaactgcaatgtcttttcctttgattgagatgatttgtgtaaactcaccagtcttgctttggagtgagcagaagagaatgactattttacgtggagcatcattgtgtgactgttgacctggacagtcccaagggctatgcagatggactccattggcacagggaggtttgacctcttccctgctattatccctcctcccaactgtacagatttgtttgttgtagtttatgtacttcttgatactgtcaaaaaattatctggaaatggttttattttgtgaagtgaacaatactttgtaatttatgatagtgtaaatggaaggcaaagcatcacatgtattaaattcttctgtctatta

SEQ ID NO: 305652 - protein, 324 aa, Artificial Sequence
  derived and/or modified sequence
MAASSNSSLSGSSVSSDAEEYQPPIWKSYLYQLQQEAPRPKRIICPREISSLVRRAALTHNDNHFNYEKTHNFKVHTFRGPHWCEYCANFMWGLIAQGVRCSDCGLNVHKQCSKHVPNDCQPDLKRIKKVYCCDLTTLVKAHNTQRPMVVDICIREIEARGLKSEGLYRVSGFTEHIEDVKMAFDRDGEKADISANVYPDINIITGALKLYFRDLPIPVITYDTYSKFIDAAKISNADERLEAVHEVLMLLPPAHYETLRYLMIHLKKVTMNEKDNFMNAENLGIVFGPTLMRPPEDSTLTTLHDMRYQKLIVQILIENEDVLF

SEQ ID NO: 305653 - DNA, 2076 bp, Artificial Sequence
  derived and/or modified sequence
atgagcgcattactgcaggatcctatgattgcaggacaggtctcaaaacctttgctcagcgtcaggagcgaaatgaatgctgaactaaggggagaagacaaggcagctactagtgatagcgagttaaacgaaccgctgctcgctccagtagaatcaaacgatagtgaggacacgcccagtaaactcttcggggctcgcggtaaccccgctctgtctgaccccggtaccccggaccagcaccaggcctcccagacacatcctcccttcccagttggcccgcagcctctgcttaccgcccaacagctggcttcagccgtggctggcgtcatgccgggggggccaccagctctcaaccagcctattttaataccctttaacatggccggccaattagggggccaacagggcctggtgctcactttgccaaccgccaacctaacaaacatccagggtctggtggcggccgctgccgcaggcgggatcatgacattacccctccagaatctccaggctaccagctcccttaacagccagttacagcagctacagctgcagttgcagcaacagcagcaacagcaacagcagcagcccccacccagcacaaaccaacaccctcagcccgcacctcaggccccaagccagtctcaacagcaaccactgcagcccaccccgccccagcagccccccccagcttctcaacagcctcctgctcccacgtcccaactccagcaggccccccagccccagcaacaccagccccactcccatagccagaatcagaatcaaccgagcccgacacagcagtctagcagccccccacagaaaccttctcaaagccctgggcatggcctgcctagtcctctgacccccccgaatcccctgcaactcgtgaataaccccttggcctcccaggccgctgcggctgccgctgcgatgtcctccattgcaagctctcaggcattcgggaacgcgctctcgtctctgcagggggtgactggtcagctggtcaccaacgctcaaggccagataattggcaccattcctctaatgcccaaccctggcccctccagccaggcggcctctgggacccagggcctacaggtgcagccgatcacgccccagctgctaacgaacgcccaggggcagattatcgccactgtgatcggtaatcagatcctgccagtgataaacactcagggaatcaccctgtctcctataaagccagggcagcagcttcaccagccgtcacagacgtcagtagggcaggccgcaagtcaaggcaatctcctccacctagctcatagtcaagcctccatgagccagtccccagtccggcaggccagttcgtccagcagcagcagttcatcatccagcgccctttcggtgggacagctggtatcaaatccccaaacggccgctggcgaagtcgacggggtgaacctcgaagagatcagagaatttgcaaaggctttcaaaataagacgtttgtctcttggactgacacagactcaggtcggccaggcactaagtgcaacagagggcccagcatactctcagtcagccatctgccggcacacgattctgagaagtcattttttcctgccacaagaggcacaagaaaacaccattgcttccagtctgactgctaagctcaaccccgggctgctgtaccccgcccgattcgaaaaactcgacataacccctaaatcagcacagaaaataaagccagtcctggagaggtggatggccgaagcagaagccagacacagagcagggatgcagaatctgactgaatttattggaagcgagccaagcaagaaacgtaaaagacggacaagttttactccccaagcgttagaaatcttgaacgcccacttcgaaaagaatactcacccttcagggcaggaaatgaccgagatcgcagagaagctgaactatgaccgagaggtggtgagagtgtggttttgcaacaagcggcaggctctaaagaataccattaagagactgaaacagcacgagccagccaccgcggtgcccctagaacctctgacagatagcttggaggaaaattcctag

SEQ ID NO: 305654 - DNA, 2076 bp, Artificial Sequence
  derived and/or modified sequence
atgtctgccctgctgcaggaccccatgattgctggccaggtgtccaagcccctgctgtctgtgcgctctgagatgaatgctgagctgcggggggaggacaaggccgccaccagtgacagcgagctgaatgagcccctgctggcccctgtggagagcaatgattctgaggacacccccagcaagctgtttggagcccggggcaacccagccctgagtgaccccggcaccccagaccagcaccaggccagccagacccacccccccttccctgtgggcccccagcccctgctgacagcccagcagctggccagcgctgtggccggcgtgatgcctgggggccccccagccctgaaccagcccatcctgatccccttcaacatggccggccagctgggcggccagcagggcctggtgctgaccctgcccacagccaacctgaccaacatccagggcctggtggccgctgctgctgctgggggcatcatgaccctgcccctgcagaacctgcaggccaccagcagcctgaacagccagctgcagcagctgcagctgcagctgcagcagcagcagcagcagcagcagcagcagcccccacccagcaccaaccagcacccccagcctgccccccaggcccccagccagagccagcagcagcccctgcagcccaccccaccccagcagcccccaccagccagccagcagcccccagcccccaccagccagctgcagcaggccccccagccccagcagcaccagccccacagccacagccagaaccagaaccagcccagccccacccagcagagcagcagccccccccagaagcccagccagagccctggccacggcctgcccagccccctgaccccacccaaccccctgcagctggtgaacaaccccctggccagccaggccgctgctgctgctgctgccatgagcagcatcgccagcagccaggcctttggaaatgccctgagcagcctgcagggcgtgacaggccagctggtgaccaatgcccagggccagatcatcggcaccatccccctgatgcccaaccctggccccagcagccaggccgccagcggcacccagggcctgcaggtgcagcccatcaccccccagctgctgaccaatgcccagggccagatcatcgccaccgtcatcggcaaccagatcctgcccgtcatcaacacccagggcatcaccctgagccccatcaagccaggccagcagctgcaccagcccagccagacctctgtgggccaggccgccagccagggcaacctgctgcacctggcccacagccaggcctccatgagccagagccctgtgcggcaggccagcagcagcagcagcagcagcagcagcagcagcgccctgtctgtgggccagctggtgagcaacccccagacagctgctggggaggtggatggagtgaacctggaggagatccgggagtttgccaaggccttcaagatccggcggctgagcctgggcctgacccagacccaggtgggccaggccctgagcgccacagagggccctgcctacagccagagcgccatctgccgccacaccatcctgcggagccacttcttcctgccccaggaggcccaggagaacaccatcgccagcagcctgacagccaagctgaaccctggcctgctgtacccagccaggtttgagaagctggacatcacccccaagagcgcccagaagatcaagcctgtgctggagcgctggatggccgaggccgaggcccggcacagagctggcatgcagaacctgacagagttcatcggcagcgagcccagcaagaagaggaagaggaggaccagcttcaccccccaggccctggagatcctgaatgcccactttgagaagaacacccaccccagcggccaggagatgacagaaattgctgagaagctgaactatgaccgggaggtggtgcgggtgtggttctgcaacaagaggcaggccctgaagaacaccatcaagaggctgaagcagcacgagcccgccacagctgtgcccctggagcccctgacagacagcctggaggagaacagctag

SEQ ID NO: 305655 - DNA, 2076 bp, Artificial Sequence
  derived and/or modified sequence
atgagcgccctgctgcaggaccccatgatcgccggccaggtgagcaagcccctcctgtccgtgaggtccgagatgaatgccgagctgcgcggagaagataaggccgctacgtcagattcggagttgaatgagccactgctggcccccgtcgaatctaacgacagtgaagataccccttcaaagctgttcggcgctcgcggaaacccggcccttagcgaccccggtacgcctgatcaacatcaggcttcccagacacatccgccatttccggtgggcccacagcccctcttgacagctcaacagctcgcctccgccgtggccggcgtcatgccaggagggccaccagccttgaaccagcccatcttgatcccattcaatatggcagggcagttgggagggcagcagggcctggtattgacacttcccactgccaacctgactaacattcaggggttagtggccgcggctgctgcaggaggcattatgactctcccccttcaaaacctccaggctaccagcagtctgaattcccagctgcagcagctgcagctgcaactgcagcagcagcagcagcagcagcagcaacaacctccaccatcaaccaatcaacacccacaacccgccccccaggcacccagccagagccaacaacagcccctgcaacctactcctcctcagcagccaccaccagcatcacagcagccacctgcccccacctcccaactgcagcaggcacctcaaccccagcagcaccagcctcattctcattcccaaaaccagaaccaacccagtccaacacaacaatcatcttcacctcctcagaagccatcacagtctcctgggcacggcctgccatctcctctgacccctcctaacccactccagcttgtcaataatccccttgcgtcacaggccgctgccgccgccgccgccatgagcagcatcgcatcaagtcaggctttcggtaacgcgctgtcctcactacaaggagtgacaggccagctcgtgaccaatgctcagggacagataattgggactatccccctcatgcctaatccaggcccctcaagccaggcggcgtccgggacacagggcttgcaggtacagccaataaccccacagttactgacaaacgcccagggccagattatagccaccgtcattggcaatcagatccttcctgtcattaatacccaagggattactttaagccccataaaacctggccagcagctccaccagccatctcagacctccgtgggacaagcagcgagtcagggtaatctgctgcatcttgcacactctcaggcaagtatgagtcagtcccctgtgagacaagcttcatcaagttcgagctcttcttcaagttcctctgcattgagtgttggccagctcgtctctaatcctcaaacagctgcaggggaagtggacggggtcaacctggaagagatcagggagttcgccaaggccttcaagataagacgtctgtctctggggctcacacagacgcaggtgggtcaggcgctttccgcaaccgagggtccagcttatagtcaatctgccatctgccggcacacaatcctgcgcagtcatttcttcttgcctcaagaagctcaggaaaatacaattgcctcctcgctcactgctaagctgaaccctggattgctataccccgcgcgttttgaaaaactggacatcactccaaagtccgctcagaagattaaacccgtcctggagcggtggatggcagaggcagaggcccgccaccgagctggcatgcaaaatctcacagagttcattggatccgaacccagcaagaaaaggaaacgacggaccagcttcactccccaggccttagagatcctgaatgctcacttcgaaaagaatacacacccaagtggccaagaaatgaccgaaattgctgagaaactcaactacgatcgggaagtagtccgtgtttggttctgcaacaaaaggcaggccctcaaaaacaccatcaagagactgaaacagcatgagcctgctacagcagtcccgttggagcccctcactgatagcctcgaggaaaatagctag

SEQ ID NO: 305656 - DNA, 2335 bp, Artificial Sequence
  derived and/or modified sequence
gatggattgctatctctcagcgcagcaggacacggggaccatgcaagctgtaattggtcaggcatgaactctcttgggttgtgttaccctgtttgctgtttactgtcaagatgctgaaagaatgttcttataatgatccaagaggaagtggcaaatgagtgctcttcttcaggatccaatgatagctggacaagtcagtaagcccttgctgtcagtgcggagtgaaatgaatgcggagttgagaggtgaggacaaggctgctacttcagacagcgagctgaatgagcccctgcttgcgcctgtggaatcaaatgacagcgaggacactcccagcaagctcttcggggctagaggaaacccagcattatcagacccaggcactcctgaccaacaccaggccagtcagacccaccccccatttccagttgggccacagccacttctgacggcacagcagttagcttctgctgtggccggcgtgatgccgggaggccccccagccctcaaccagccaatcctcattcccttcaacatggcgggacagctaggaggccagcaaggactggttctcacactgccaacagcgaatctcaccaacatccaagggctggtggcagcagctgcagccggaggcattatgactctgccactgcaaaatctacaagctacctcatccctgaactcccagctccagcagctccagctccagctccagcagcagcagcagcagcagcagcagcagcctcccccgtcaaccaaccagcacccgcaaccagccccacaggcgccctcgcagtcccagcagcagccgctgcagcccaccccaccccagcagccaccacccgcctctcagcagccgccagctcctacatctcagctgcaacaggcgcctcagccccagcagcaccaaccccactcccactcccagaaccagaaccaaccatctccaacccagcagagctccagccccccgcagaaacctagtcagtctccaggacatggcctgccttcaccgctcacgccacccaatcctctacagctggttaataatccactagcaagtcaggctgcagcggctgcagcagccatgagctccatagcaagctcacaggcctttggcaatgccctctccagtcttcagggggtcacaggtcaactagttactaatgcacaaggacagattatcgggaccattccactgatgcctaatccagggccatcgagccaagcagcaagcggcactcagggcttgcaagtgcagccaatcaccccccagctcctcacaaacgcccagggccagatcatcgccacagtcattgggaaccagatcctgcccgtgatcaacacccagggcatcacgctgtcacccatcaagcccggccagcagctccaccaaccctcccagacgtcagtgggtcaagcagcctcccaaggcaaccttctgcacctggctcacagccaagcatccatgtctcaaagtcccgtccggcaggcttcctcttcttcctcctcatcctcctcttcttcagctttgagcgtgggccagttagtcagcaatcctcaaacggcagcgggtgaggtggatggggttaatctggaggagatccgagaatttgccaaagcttttaaaatccggcgcctgtcccttggcctgacccagactcaggtgggacaggctctcagtgctacagagggccccgcgtacagccagtcggccatctgcagacacaccatcctgagaagccactttttcctaccacaggaagcccaagagaacactatagctagcagtctgacagccaaactgaaccctggccttttgtatcctgccaggtttgaaaagctggacatcacccctaaaagtgcccagaagatcaagccggtgcttgagcggtggatggctgaggctgaggcccgccatcgagcaggtatgcagaacctgaccgagtttatcgggagtgaaccatccaaaaagcgcaagcggcgcacctccttcacaccccaggcccttgagatcctcaatgcccactttgagaagaacacacacccttctgggcaggaaatgaccgaaattgctgagaagctgaactatgaccgagaagtagttagagtttggttctgcaataagaggcaagccctgaagaacacaattaaacgcttaaaacagcacgagccggccacggcagtccctttggagcccttaacagactctctggaagaaaactcctaaagagatgcccacccataatcagaagcaaaattcacagaaactaaactccacccttgggactccacaacaacaacaacaacaaaatttaatttaatttaaaaatag

SEQ ID NO: 305657 - DNA, 2076 bp, Artificial Sequence
  derived and/or modified sequence
atgagtgccttacttcaggatccaatgatcgccggtcaagtgtctaaacccctgctatctgtgcgatctgaaatgaacgccgagctgcggggagaggataaagcagccacgagcgacagcgaacttaatgagcccctcctagccccagtggagagcaatgacagcgaggacacacccagtaaactgttcggcgctcgaggaaacccagcactgtcggatccgggaacacctgaccagcatcaagcgtctcagacccaccctccatttccagtcggccctcagccgctgctgacagcacagcaactggccagcgctgtggccggagtgatgcccggaggcccacctgctctcaaccagcctatcttgattccctttaatatggctggacagctgggtggccagcagggtctggttcttacacttcctaccgccaatctgaccaacatccaaggcttggtagccgcagccgctgccggagggatcatgacgctccccctacagaatctgcaggccacttcatccctgaacagccagctccagcagctgcaactccagttacagcagcaacagcaacagcagcagcagcaaccacctcccagcaccaaccagcatcctcagcctgcaccccaggcccctagccagtcccagcaacagcccctccagcctaccccgcctcagcagccaccacccgcttctcagcaaccacccgcacccacgagccagctgcagcaggcacctcagccacaacaacaccagccacactctcactcacagaaccagaatcaaccatcccctacacagcaatcttcctcaccaccccaaaaaccatctcagtcacccggacacggcctcccttctccactcactccacctaaccccctgcagctggtgaacaacccattggcttcacaagcggcagccgcagctgcggctatgtcttccatagcaagcagccaggcctttgggaatgcactgagctctctgcaaggggttaccggccagctggtgaccaacgcgcagggccagatcattggaaccatacccctaatgcccaacccgggaccctcctctcaagccgctagtggtactcaggggttacaggttcagccaatcacgcctcagctcctgactaacgcccaggggcaaataatcgccaccgtgatcggaaatcagatacttcctgtcattaacacccagggcattacgttgtcccctatcaagcctggccagcagcttcaccagccatcccaaacttctgtgggacaggctgcttcgcaaggaaaccttctccacctcgctcatagccaggcttctatgagccagtctcccgttagacaggcctcttcctcgtcttccagcagcagttcaagcagcgccttaagcgtggggcaattagtgtccaatccccaaacagctgccggagaagtcgacggggttaatcttgaagagatcagagagttcgccaaggcctttaaaataaggagattgagccttgggcttacccagacccaagttggacaagctctctctgctacagaggggccagcgtatagccagtccgccatttgtaggcatactatcctgaggagccactttttccttccccaagaggcacaagagaacacgatcgcaagctctctgacggctaagctgaacccaggcttgctctacccagcaaggttcgagaaactcgacataactcctaagtcggcgcaaaagatcaaacctgtcttggaaaggtggatggccgaagccgaagcacggcacagggccggtatgcagaatctgacggaatttattggaagcgagccgtctaagaaacgcaaacgacggacctcttttacacctcaggccctcgagatactgaacgcccactttgagaaaaatactcacccttcggggcaagagatgacggagatagccgagaaattgaactacgatcgggaggtggtgagggtgtggttttgcaacaagagacaggccctgaagaatacaattaaacggcttaaacagcacgagcccgctacagccgtgcccttagaaccccttaccgatagcctggaggaaaactcctag

SEQ ID NO: 305658 - DNA, 2076 bp, Artificial Sequence
  derived and/or modified sequence
atgagcgccctgctgcaggaccccatgatcgccggccaggtgagcaagcccctgctgagcgtgagaagcgagatgaacgccgagctgagaggcgaggacaaggccgccaccagcgacagcgagctgaacgagcccctgctggcccccgtggagagcaacgacagcgaggacacccccagcaagctgttcggcgccagaggcaaccccgccctgagcgaccccggcacccccgaccagcaccaggccagccagacccacccccccttccccgtgggcccccagcccctgctgaccgcccagcagctggccagcgccgtggccggcgtgatgcccggcggcccccccgccctgaaccagcccatcctgatccccttcaacatggccggccagctgggcggccagcagggcctggtgctgaccctgcccaccgccaacctgaccaacatccagggcctggtggccgccgccgccgccggcggcatcatgaccctgcccctgcagaacctgcaggccaccagcagcctgaacagccagctgcagcagctgcagctgcagctgcagcagcagcagcagcagcagcagcagcagcccccccccagcaccaaccagcacccccagcccgccccccaggcccccagccagagccagcagcagcccctgcagcccacccccccccagcagcccccccccgccagccagcagccccccgcccccaccagccagctgcagcaggccccccagccccagcagcaccagccccacagccacagccagaaccagaaccagcccagccccacccagcagagcagcagccccccccagaagcccagccagagccccggccacggcctgcccagccccctgaccccccccaaccccctgcagctggtgaacaaccccctggccagccaggccgccgccgccgccgccgccatgagcagcatcgccagcagccaggccttcggcaacgccctgagcagcctgcagggcgtgaccggccagctggtgaccaacgcccagggccagatcatcggcaccatccccctgatgcccaaccccggccccagcagccaggccgccagcggcacccagggcctgcaggtgcagcccatcaccccccagctgctgaccaacgcccagggccagatcatcgccaccgtgatcggcaaccagatcctgcccgtgatcaacacccagggcatcaccctgagccccatcaagcccggccagcagctgcaccagcccagccagaccagcgtgggccaggccgccagccagggcaacctgctgcacctggcccacagccaggccagcatgagccagagccccgtgagacaggccagcagcagcagcagcagcagcagcagcagcagcgccctgagcgtgggccagctggtgagcaacccccagaccgccgccggcgaggtggacggcgtgaacctggaggagatcagagagttcgccaaggccttcaagatcagaagactgagcctgggcctgacccagacccaggtgggccaggccctgagcgccaccgagggccccgcctacagccagagcgccatctgcagacacaccatcctgagaagccacttcttcctgccccaggaggcccaggagaacaccatcgccagcagcctgaccgccaagctgaaccccggcctgctgtaccccgccagattcgagaagctggacatcacccccaagagcgcccagaagatcaagcccgtgctggagagatggatggccgaggccgaggccagacacagagccggcatgcagaacctgaccgagttcatcggcagcgagcccagcaagaagagaaagagaagaaccagcttcaccccccaggccctggagatcctgaacgcccacttcgagaagaacacccaccccagcggccaggagatgaccgagatcgccgagaagctgaactacgacagagaggtggtgagagtgtggttctgcaacaagagacaggccctgaagaacaccatcaagagactgaagcagcacgagcccgccaccgccgtgcccctggagcccctgaccgacagcctggaggagaacagctag

SEQ ID NO: 305659 - protein, 524 aa, Artificial Sequence
  derived and/or modified sequence
MAGVVHVSLAALLLLPMAPAMHSDCIFKKEQAMCLEKIQRANELMGFNDSSPGCPGMWDNITCWKPAHVGEMVLVSCPELFRIFNPDQVWETETIGESDFGDSNSLDLSDMGVVSRNCTEDGWSEPFPHYFDACGFDEYESETGDQDYYYLSVKALYTVGYSTSLVTLTTAMVILCRFRKLHCTRNFIHMNLFVSFMLRAISVFIKDWILYAEQDSNHCFISTVECKAVMVFFHYCVVSNYFWLFIEGLYLFTLLVETFFPERRYFYWYTIIGWGTPTVCVTVWATLRLYFDDTGCWDMNDSTALWWVIKGPVVGSIMVNFVLFIGIIVILVQKLQSPDMGGNESSIYLTNLSPRVPKKAREDPLPVPSDQHSLPFLSCVQKCYCKPQRAQQHSCKMSELSTITLRLARSTLLLIPLFGIHYTVFAFSPENVSKRERLVFELGLGSFQGFVVAVLYCFLNGEVQAEIKRKWRSWKVNRYFAVDFKHRHPSLASSGVNGGTQLSILSKSSSQIRMSGLPADNLAT

SEQ ID NO: 305660 - DNA, 1575 bp, Artificial Sequence
  derived and/or modified sequence
atggctggtgtggtccacgtttccttggcagctctgcttctgctgcctatggcgcccgcaatgcactccgattgtatttttaagaaggaacaagcaatgtgtctagagaagatccagcgggccaatgaactcatgggattcaatgactctagccccggctgccctggcatgtgggacaatatcacctgttggaaaccagcgcacgtaggcgagatggtcctggtgtcatgcccagagttgtttcggatctttaacccagatcaggtctgggaaactgaaacaataggagagtcagattttggcgacagcaattccttggacctctctgatatgggagttgtgtcccgtaactgcactgaggatggttggtctgagccctttccccactattttgatgcatgcggattcgatgaatatgagagcgaaaccggcgaccaggattattattacttatctgtgaaggccctgtacacagtcgggtactccactagcttagtgactctgaccacagcaatggttatcctgtgcagatttcggaagcttcattgtacaagaaattttattcatatgaatctgttcgtgtctttcatgcttcgcgccatcagtgtattcatcaaggactggatcttgtacgctgaacaagacagtaaccactgctttatctcaaccgtagaatgcaaggctgtgatggtattcttccattattgtgtagtgagcaactatttttggctattcattgagggattatatctctttaccttactggttgaaactttcttccctgaacggaggtatttttactggtatacaatcattggatggggcaccccaaccgtgtgtgtgactgtgtgggcaaccctgaggctctatttcgacgatactggctgctgggacatgaatgattcaacagccttgtggtgggtaataaaaggaccagttgtaggaagcatcatggtgaatttcgtgctgttcattggaatcatagtaattctggtgcaaaaacttcaaagtccagacatggggggcaacgagtcatcaatttaccttactaatctgtcacccagagttcctaagaaggccagggaagatcccctgccagtgccctcggatcagcacagtcttcctttcctcagctgcgtgcagaaatgctattgcaagccgcagcgtgcccagcagcattcctgcaagatgagtgaactgtcaaccattaccttgagacttgcgcgctctacactcttgctgataccactgttcgggattcactacactgtctttgcattttccccagagaatgtctctaagagagagcgattggtgtttgaattaggactggggtcctttcaggggtttgtcgtcgccgttctttactgctttttgaatggcgaagtgcaggctgagattaagcggaagtggaggagctggaaggtcaacagatactttgcagtggactttaagcaccggcacccatcactggcttcaagcggagtcaacggcggtacccagttatccatcctgtccaaatcttcaagtcagatccgcatgagcggcctgcccgccgataacctcgctacatag

SEQ ID NO: 305661 - DNA, 2395 bp, Artificial Sequence
  derived and/or modified sequence
acacggaccccggccgccagccggccacacaggcgcggagacccggctcggcgcgcgctcctcggcgcacacgctccccatccccgcgccgcgcgggccgcggacttgcaggctgcgcgtcctttgcggagtctgccccggccccacggacaggccccgcagtgagcagcccagagacacattggggctgacctgccgctgctgtcagtgggaggccagtggtgctggccaagaagtgtcatggctggtgtcgtgcacgtttccctggctgctctcctcctgctgcctatggcccctgccatgcattctgactgcatcttcaagaaggagcaagccatgtgcctggagaagatccagagggccaatgagctgatgggcttcaatgattcctctccaggctgtcctgggatgtgggacaacatcacgtgttggaagcccgcccatgtgggtgagatggtcctggtcagctgccctgagctcttccgaatcttcaacccagaccaagtctgggagaccgaaaccattggagagtctgattttggtgacagtaactccttagatctctcagacatgggagtggtgagccggaactgcacggaggatggctggtcggaacccttccctcattactttgatgcctgtgggtttgatgaatatgaatctgagactggggaccaggattattactacctgtcagtgaaggccctctacacggttggctacagcacatccctcgtcaccctcaccactgccatggtcatcctttgtcgcttccggaagctgcactgcacacgcaacttcatccacatgaacctgtttgtgtcgttcatgctgagggcgatctccgtcttcatcaaagactggattctgtatgcggagcaggacagcaaccactgcttcatctccactgtggaatgtaaggccgtcatggttttcttccactactgtgttgtgtccaactacttctggctgttcatcgagggcctgtacctcttcactctgctggtggagaccttcttccctgaaaggagatacttctactggtacaccatcattggctgggggaccccaactgtgtgtgtgacagtgtgggctacgctgagactctactttgatgacacaggctgctgggatatgaatgacagcacagctctgtggtgggtgatcaaaggccctgtggttggctctatcatggttaactttgtgctttttattggcattatcgtcatccttgtgcagaaacttcagtctccagacatgggaggcaatgagtccagcatctacttaacaaatttaagcccgcgagtccccaagaaagcccgagaggaccccctgcctgtgccctcagaccagcattcactccctttcctcagctgcgtgcagaaatgctactgcaagccacagcgggctcagcagcactcttgcaagatgtcagaactgtccaccattactctgcgactggcccggtccaccctgctgctcatcccactattcggaatccactacacagtatttgccttctccccagagaatgtcagcaaaagggaaagactcgtgtttgagctggggctgggctccttccagggctttgtggtggctgttctctactgttttctgaatggtgaggtacaagcggagatcaagcgaaaatggcgaagctggaaggtgaaccgttacttcgctgtggacttcaagcaccgacacccgtctctggccagcagtggggtgaatgggggcacccagctctccatcctgagcaagagcagctcccaaatccgcatgtctggcctccctgctgacaatctggccacctgagccatgctcccctcctcctcctctcctccatccacaggctgggaccgcaggcaggtgccagcccacgcatgtttgcgcctcttccctccccttgggcaggccctgggctggaagcttggctcctgaggggggagaaggaggcagggcacagactggaattgtcccctccttgttttggtactggtcccacccactgtggtcccctgggccctgaccccagacatgtaaatactcctcaaatttggaaaagttgtcccatcccttccccctttgccccagtgtccctgctcacttccagtcaggtctcagctccaccccactgtttcttggtcagcctcagtgatggcctgaccccagctgtgaggccttgtgagctaaggctgaagagaccttgcctgtgggagctggggtggtacctgccccaacagccccccatcatctgattttgggtgtgacccctcgagtgtgcatgccaccctggggctcttctcagtcctgggcccaagtccctgaagcctagcagagggccagctcgggtggccagaacaccccttggtgcaggcctcctggcactcgcctg

SEQ ID NO: 305662 - DNA, 1761 bp, Artificial Sequence
  derived and/or modified sequence
gccagtggtgctggccaagaagtgtcatggctggtgtcgtgcacgtttccctggctgctctcctcctgctgcctatggcccctgccatgcattctgactgcatcttcaagaaggagcaagccatgtgcctggagaagatccagagggccaatgagctgatgggcttcaatgattcctctccaggctgtcctgggatgtgggacaacatcacgtgttggaagcccgcccatgtgggtgagatggtcctggtcagctgccctgagctcttccgaatcttcaacccagaccaagtctgggagaccgaaaccattggagagtctgattttggtgacagtaactccttagatctctcagacatgggagtggtgagccggaactgcacggaggatggctggtcggaacccttccctcattactttgatgcctgtgggtttgatgaatatgaatctgagactggggaccaggattattactacctgtcagtgaaggccctctacacggttggctacagcacatccctcgtcaccctcaccactgccatggtcatcctttgtcgcttccggaagctgcactgcacacgcaacttcatccacatgaacctgtttgtgtcgttcatgctgagggcgatctccgtcttcatcaaagactggattctgtatgcggagcaggacagcaaccactgcttcatctccactgtggaatgtaaggccgtcatggttttcttccactactgtgttgtgtccaactacttctggctgttcatcgagggcctgtacctcttcactctgctggtggagaccttcttccctgaaaggagatacttctactggtacaccatcattggctgggggaccccaactgtgtgtgtgacagtgtgggctacgctgagactctactttgatgacacaggctgctgggatatgaatgacagcacagctctgtggtgggtgatcaaaggccctgtggttggctctatcatggttaactttgtgctttttattggcattatcgtcatccttgtgcagaaacttcagtctccagacatgggaggcaatgagtccagcatctacttaacaaatttaagcccgcgagtccccaagaaagcccgagaggaccccctgcctgtgccctcagaccagcattcactccctttcctcagctgcgtgcagaaatgctactgcaagccacagcgggctcagcagcactcttgcaagatgtcagaactgtccaccattactctgcgactggcccggtccaccctgctgctcatcccactattcggaatccactacacagtatttgccttctccccagagaatgtcagcaaaagggaaagactcgtgtttgagctggggctgggctccttccagggctttgtggtggctgttctctactgttttctgaatggtgaggtacaagcggagatcaagcgaaaatggcgaagctggaaggtgaaccgttacttcgctgtggacttcaagcaccgacacccgtctctggccagcagtggggtgaatgggggcacccagctctccatcctgagcaagagcagctcccaaatccgcatgtctggcctccctgctgacaatctggccacctgagccatgctcccctcctcctcctctcctccatccacaggctgggaccgcaggcaggtgccagcccacgcatgtttgcgcctcttccctccccttgggcaggccctgggctggaagcttggctcctgaggggggagaaggaggcagggcacagactggaatt

SEQ ID NO: 305663 - DNA, 1575 bp, Artificial Sequence
  derived and/or modified sequence
atggccggcgtggtgcacgtgtccctggccgccctgctgctgctgcccatggccccagccatgcacagcgactgcatcttcaagaaggagcaggccatgtgcctggagaagatccagagggccaatgagctgatgggcttcaatgacagcagccctggctgccccggcatgtgggacaacatcacctgctggaagccagcccacgtgggggagatggtgctggtgtcctgcccagagctgttccgcatcttcaacccagaccaggtgtgggagacagagaccatcggggagagtgactttggagacagcaacagcctggacctgagtgacatgggcgtggtgtccaggaactgcacagaagatggctggagcgagcccttcccccactactttgatgcctgtggctttgatgaatatgaaagtgaaacaggagaccaggactactactacctgtctgtgaaggccctgtacacagtgggctacagcaccagcctggtgaccctgaccacagccatggtgatcctgtgccgcttcaggaagctgcactgcaccaggaacttcatccacatgaacctgtttgtgtccttcatgctgcgggccatcagcgtcttcatcaaggactggatcctgtatgcagagcaggacagcaaccactgcttcatcagcacagtggagtgcaaggctgtgatggtgttcttccactactgtgtggtgagcaactacttctggctgttcatcgagggcctgtacctgttcaccctgctggtggagaccttcttccctgagcggcgctacttctactggtacaccatcatcggctggggcacccccaccgtgtgtgtgacagtgtgggccaccctgcggctgtactttgatgacaccggctgctgggacatgaatgacagcacagccctgtggtgggtgatcaagggccctgtggtgggcagcatcatggtgaactttgtgctcttcatcggcatcatcgtcatcctggtgcagaagctgcagagcccagacatgggcggcaatgaaagcagcatctacctgaccaacctgagcccccgggtgcccaagaaggcccgggaggaccccctgcctgtgcccagcgaccagcacagcctgcccttcctgagctgtgtgcagaagtgctactgcaagccccagagggcccagcagcacagctgcaagatgtctgagctgagcaccatcaccctgcggctggcccggagcaccctgctgctgatccccctgtttggcatccactacacagtgtttgccttctccccagaaaatgtgtccaagcgggagcggctggtgtttgagctgggcctgggcagcttccagggctttgtggtggccgtgctgtactgcttcctgaatggagaggtgcaggccgagatcaagaggaagtggaggtcctggaaggtgaaccgctactttgctgtggacttcaagcaccgccaccccagcctggccagcagcggcgtgaatggaggcacccagctgagcatcctgagcaagagcagcagccagatccgcatgagcggcctgcctgctgacaacctggccacctag

SEQ ID NO: 305664 - DNA, 1575 bp, Artificial Sequence
  derived and/or modified sequence
atggccggcgtggtgcacgtgagcctggccgccctgctgctgctgcccatggcacctgcaatgcacagtgactgcatcttcaagaaagaacaggcaatgtgtttggagaaaattcagcgggccaacgagctgatgggattcaatgactcgtctccgggatgtccagggatgtgggataacataacctgttggaagcctgcccacgtgggcgaaatggttctggtgagctgcccagagctgtttagaattttcaacccagaccaggtctgggagacggagactattggcgagagtgactttggagatagcaatagcctggatctcagcgacatgggcgttgtgagcaggaattgcacagaagatggttggtctgaaccttttccccattacttcgacgcatgtggcttcgacgagtacgagagcgaaacaggtgatcaagattattactacttatctgttaaagctctctatactgtgggctacagtactagcctggtgacactgaccacagcaatggtgatactctgtaggttccgcaagcttcactgcacacgtaacttcatccacatgaacctgtttgtatcttttatgctacgggccattagcgtgtttatcaaggactggattttatacgcagaacaggattccaatcactgcttcatatcaaccgttgaatgcaaagcggtgatggtcttttttcactattgtgtggtgtccaactatttctggctgttcattgaaggtctgtatctcttcacccttctggtcgagactttctttcctgagagacgatatttttactggtacaccatcataggttggggaacacctaccgtgtgcgttaccgtttgggccaccctgaggctatacttcgatgacaccggctgttgggacatgaacgattcaacagccctctggtgggttatcaaagggccagtcgtggggtctatcatggtgaacttcgtgctgtttattggcattattgtgatcctggtgcaaaagctacagagccctgatatggggggcaatgagagttcaatttacctgactaatctctcgcctagggttcccaagaaggccagggaagatcccttgcccgtcccctctgaccagcatagcctgccatttctgagttgcgtgcagaaatgctattgtaaaccccagcgggctcaacaacacagctgtaagatgtccgaactctctactattactctccgcttggcacgtagcactcttttactgattcctctttttgggatccattacacagtgttcgcttttagccctgaaaacgtgagcaagcgtgagcggctcgtattcgaacttgggctcggtagcttccagggttttgtggttgcggtattatactgctttttgaacggagaggtacaggcagagatcaagagaaaatggagaagctggaaagtgaatcgatacttcgctgtggatttcaagcaccggcatcccagcctggccagctccggggtgaatggaggtacgcaactctcaattcttagtaagagcagtagccaaattcgcatgtcaggcctgcctgctgacaatttggccacatag

SEQ ID NO: 305665 - DNA, 1575 bp, Artificial Sequence
  derived and/or modified sequence
atggcaggggttgttcacgtctcactggctgccctcctacttcttcccatggctccggctatgcattcggactgcatctttaaaaaagagcaggcgatgtgtttagaaaagattcagagagccaacgagctgatggggttcaacgactcttctccgggttgtcccggtatgtgggataacattacctgttggaagcccgctcacgtaggggaaatggtcctggtgtcctgcccggaactgtttagaatcttcaaccccgatcaggtttgggagacagagacaattggggaatcagacttcggggatagcaactccctggatctcagcgacatgggtgtggtcagcagaaattgcacagaggacggctggtctgagccgttcccccactacttcgatgcctgcggctttgatgaatacgaatccgagaccggtgaccaagactactactacttgtccgttaaggcgctctatacagtcggttactcgacttcacttgttacactgaccacagccatggtaatcctgtgtagatttcgcaaactccactgtaccagaaacttcatccacatgaacctcttcgtatccttcatgctgcgcgctattagtgtgtttattaaagattggattctgtacgctgaacaggactctaaccattgctttatcagcacagtggagtgcaaagcggtgatggtgttctttcattattgtgtagtgtctaattatttttggctcttcatcgagggtctgtatctgtttacgttgcttgtggagacattttttccagagcgaagatacttctactggtataccatcattggttgggggactccgacagtgtgtgtaactgtgtgggctaccctgcgcctatacttcgatgacacagggtgctgggatatgaatgatagcaccgctctgtggtgggttatcaaaggtcctgtggttggcagcatcatggttaactttgtcttgttcatcggtatcattgtcattctcgtccagaagctgcagagtcccgatatgggcggtaatgaaagttccatctacttaacgaatttaagccctagagtgccgaagaaggccagagaagatccgctcccagtgccttcagaccagcattcactgccgttcctgagctgtgttcagaagtgctactgcaaaccccagagggcacagcagcacagctgcaaaatgagcgagctgtctaccatcacactgaggctggctagatcaacccttttgctgatccccctgttcgggattcactacactgtcttcgctttctcgcctgaaaacgtgtccaaacgcgaaaggctcgtgtttgaactcggtctaggttctttccaggggtttgtcgtggccgtgctgtattgtttcctgaacggcgaagttcaggcggagattaaacggaagtggcgcagctggaaggtgaataggtattttgcagtggactttaagcatcgccacccgtctctggcctcctcgggcgtgaatggaggtactcagctgagcatcctcagcaaaagctcatcacagatacgcatgtcaggactgccggcagataaccttgctacctag

SEQ ID NO: 305666 - DNA, 1575 bp, Artificial Sequence
  derived and/or modified sequence
atggccggcgtggtgcacgtgagcctggccgccctgctgctgctgcccatggcccccgccatgcacagcgactgcatcttcaagaaggagcaggccatgtgcctggagaagatccagagagccaacgagctgatgggcttcaacgacagcagccccggctgccccggcatgtgggacaacatcacctgctggaagcccgcccacgtgggcgagatggtgctggtgagctgccccgagctgttcagaatcttcaaccccgaccaggtgtgggagaccgagaccatcggcgagagcgacttcggcgacagcaacagcctggacctgagcgacatgggcgtggtgagcagaaactgcaccgaggacggctggagcgagcccttcccccactacttcgacgcctgcggcttcgacgagtacgagagcgagaccggcgaccaggactactactacctgagcgtgaaggccctgtacaccgtgggctacagcaccagcctggtgaccctgaccaccgccatggtgatcctgtgcagattcagaaagctgcactgcaccagaaacttcatccacatgaacctgttcgtgagcttcatgctgagagccatcagcgtgttcatcaaggactggatcctgtacgccgagcaggacagcaaccactgcttcatcagcaccgtggagtgcaaggccgtgatggtgttcttccactactgcgtggtgagcaactacttctggctgttcatcgagggcctgtacctgttcaccctgctggtggagaccttcttccccgagagaagatacttctactggtacaccatcatcggctggggcacccccaccgtgtgcgtgaccgtgtgggccaccctgagactgtacttcgacgacaccggctgctgggacatgaacgacagcaccgccctgtggtgggtgatcaagggccccgtggtgggcagcatcatggtgaacttcgtgctgttcatcggcatcatcgtgatcctggtgcagaagctgcagagccccgacatgggcggcaacgagagcagcatctacctgaccaacctgagccccagagtgcccaagaaggccagagaggaccccctgcccgtgcccagcgaccagcacagcctgcccttcctgagctgcgtgcagaagtgctactgcaagccccagagagcccagcagcacagctgcaagatgagcgagctgagcaccatcaccctgagactggccagaagcaccctgctgctgatccccctgttcggcatccactacaccgtgttcgccttcagccccgagaacgtgagcaagagagagagactggtgttcgagctgggcctgggcagcttccagggcttcgtggtggccgtgctgtactgcttcctgaacggcgaggtgcaggccgagatcaagagaaagtggagaagctggaaggtgaacagatacttcgccgtggacttcaagcacagacaccccagcctggccagcagcggcgtgaacggcggcacccagctgagcatcctgagcaagagcagcagccagatcagaatgagcggcctgcccgccgacaacctggccacctag

SEQ ID NO: 305667 - protein, 197 aa, Artificial Sequence
  derived and/or modified sequence
MVFFHYCVVSNYFWLFIEGLYLFTLLVETFFPERRYFYWYTIIGWGTPTVCVTVWATLRLYFDDTGCWDMNDSTALWWVIKGPVVGSIMVNFVLFIGIIVILVQKLQSPDMGGNESSIYLTNLSPRVPKKAREDPLPVPSDQHSLPFLSCVQKCYCKPQRAQQHSCKMSELSTITLRLARSTLLLIPLFGIHYTVFA

SEQ ID NO: 305668 - DNA, 594 bp, Artificial Sequence
  derived and/or modified sequence
atggtattctttcactactgtgtagtctccaattacttctggctgtttattgagggactgtatctgttcactctactggtcgaaacttttttccctgagagacggtatttctactggtatacgattattggatggggtacacccacggtctgcgtgaccgtgtgggcaactctgcgcctctatttcgatgatactggatgttgggatatgaatgactctaccgccttgtggtgggtgatcaaggggcccgtggtgggctccatcatggttaactttgtgctctttatcggcatcatcgttatcttagttcagaagctgcagagcccagatatgggcggcaatgagtctagcatctatctgactaacctcagccccagagtgcccaagaaggcaagggaggatcccttgccagttccctctgatcaacacagtcttccttttctttcctgcgtacagaagtgctactgcaaaccacaaagggcacaacaacacagttgtaaaatgtctgagctgagcacgatcaccctgcgcctggctaggagcactctgttgctgatcccccttttcgggatacactacacggtttttgcctag

SEQ ID NO: 305669 - DNA, 594 bp, Artificial Sequence
  derived and/or modified sequence
atggtgttcttccactactgtgtggtgagcaactacttctggctgttcatcgagggcctgtacctgttcaccctgctggtggagaccttcttccctgagcggcgctacttctactggtacaccatcatcggctggggcacccccaccgtgtgtgtgacagtgtgggccaccctgcggctgtactttgatgacaccggctgctgggacatgaatgacagcacagccctgtggtgggtgatcaagggccctgtggtgggcagcatcatggtgaactttgtgctcttcatcggcatcatcgtcatcctggtgcagaagctgcagagcccagacatgggcggcaatgaaagcagcatctacctgaccaacctgagcccccgggtgcccaagaaggcccgggaggaccccctgcctgtgcccagcgaccagcacagcctgcccttcctgagctgtgtgcagaagtgctactgcaagccccagagggcccagcagcacagctgcaagatgtctgagctgagcaccatcaccctgcggctggcccggagcaccctgctgctgatccccctgtttggcatccactacacagtgtttgcctag

SEQ ID NO: 305670 - DNA, 594 bp, Artificial Sequence
  derived and/or modified sequence
atggtgttcttccactactgcgtggtgagcaactacttctggctgttcattgaagggctgtatctgttcactctcctggtcgagactttcttcccagagcgaagatatttctactggtacactatcatcggctggggcacgcctactgtttgtgttaccgtgtgggcaaccctccgcctgtacttcgatgatactggctgttgggacatgaatgattccacagctctgtggtgggtgatcaagggacctgtcgtgggctctattatggttaattttgttttgtttattggcatcattgtgatattggtccaaaaattacaatcacctgacatggggggcaatgaaagcagtatctatctgacaaatctctctcctcgagtccctaaaaaagccagggaagacccgctgcctgtgcccagcgaccagcacagccttccgttcctgtcctgcgtccagaagtgttattgcaagcctcagcgggcccaacagcactcctgcaaaatgtcagaactttctacaattactttaagactggccagaagtaccctccttttgatacccctgttcggcatacactatacagtgtttgcttag

SEQ ID NO: 305671 - DNA, 594 bp, Artificial Sequence
  derived and/or modified sequence
atggttttctttcattactgcgtggtctctaactatttctggttgtttatcgagggcttgtacctgttcactttgctcgtcgagaccttttttcccgagcgcagatacttctactggtacaccatcattgggtggggaacgccgacagtttgtgtcacggtctgggccaccctgaggctgtattttgacgacacaggttgttgggatatgaatgactctacagccctgtggtgggttattaagggcccagttgttggcagcattatggtcaatttcgtcctatttattggaatcattgtgatcctcgtgcagaagctgcagagccccgacatgggtggaaacgagtcgtcaatctacttgactaatctgtcccctcgggttccgaagaaagccagggaagatcccctgcccgtcccttcagaccagcattcgctgccgttcctgagttgcgtgcagaagtgttattgtaaaccccagcgggcacagcagcattcttgcaagatgtccgaactgtctaccatcacgctccgtctcgcaagaagcactctgttactcattcccttgtttggcatacactataccgtcttcgcttag

SEQ ID NO: 305672 - DNA, 594 bp, Artificial Sequence
  derived and/or modified sequence
atggtgttcttccactactgcgtggtgagcaactacttctggctgttcatcgagggcctgtacctgttcaccctgctggtggagaccttcttccccgagagaagatacttctactggtacaccatcatcggctggggcacccccaccgtgtgcgtgaccgtgtgggccaccctgagactgtacttcgacgacaccggctgctgggacatgaacgacagcaccgccctgtggtgggtgatcaagggccccgtggtgggcagcatcatggtgaacttcgtgctgttcatcggcatcatcgtgatcctggtgcagaagctgcagagccccgacatgggcggcaacgagagcagcatctacctgaccaacctgagccccagagtgcccaagaaggccagagaggaccccctgcccgtgcccagcgaccagcacagcctgcccttcctgagctgcgtgcagaagtgctactgcaagccccagagagcccagcagcacagctgcaagatgagcgagctgagcaccatcaccctgagactggccagaagcaccctgctgctgatccccctgttcggcatccactacaccgtgttcgcctag

SEQ ID NO: 305673 - protein, 295 aa, Artificial Sequence
  derived and/or modified sequence
MRNTSKELQGATHRYAPCDWYYHVPVKRSEKAVDAPPASQIPGLSNLGDSHSENLPGTRRYWIKETDSEYVKLAKQGGRPDLLKHFAPGTRKGSPVAYSLPDWYIHHSKPPTASQQEVRAVSMPDYMVHEEFNPDQANGSYASRRGPFDFDMKTVWQREAEELEKEKKKLRLPAIDSKYLSKAGTPLGPKNPAGSRLSFPPVPGQKNSSPTNFSKLISNGYKDEWLQQQQRADSDKRTPKTSRASVLSQSPRDLEGPQDAARLQDAEASEGPEDTPESSQSPEESVSASTPAELK

SEQ ID NO: 305674 - protein, 295 aa, Artificial Sequence
  derived and/or modified sequence
MRNTSKELQGATHRYAPCDWYYHVPVKRSEKAVDAPPASQIPGLSNLGDSHSENLPGTRRYWIKETDSEYVKLAKQGGRPDLLKHFAPGTRKGSPVAYSLPDWYIHHSKPPTASQQEVRAVSMPDYMVHEEFNPDQANGSYASRRGPFDFDMKTVWQREAEELEKEKKKLRLPAIDSKYLSKAGTPLGPKNPAGSRLSFPPVPGQKNSSPTNFSKLISNGYKDEWLQQQQRADSDKRTPKTSRASVLSQSPRDLEGPQDAARLQDAEASEGPEDTPESNTCPEESVSASTPAELK

SEQ ID NO: 305675 - DNA, 888 bp, Artificial Sequence
  derived and/or modified sequence
atgagaaacaccagcaaggagctgcagggcgccacccacagatacgccccctgcgactggtactaccacgtgcccgtgaagagaagcgagaaggccgtggacgccccccccgccagccagatccccggcctgagcaacctgggcgacagccacagcgagaacctgcccggcaccagaagatactggatcaaggagaccgacagcgagtacgtgaagctggccaagcagggcggcagacccgacctgctgaagcacttcgcccccggcaccagaaagggcagccccgtggcctacagcctgcccgactggtacatccaccacagcaagccccccaccgccagccagcaggaggtgagagccgtgagcatgcccgactacatggtgcacgaggagttcaaccccgaccaggccaacggcagctacgccagcagaagaggccccttcgacttcgacatgaagaccgtgtggcagagagaggccgaggagctggagaaggagaagaagaagctgagactgcccgccatcgacagcaagtacctgagcaaggccggcacccccctgggccccaagaaccccgccggcagcagactgagcttcccccccgtgcccggccagaagaacagcagccccaccaacttcagcaagctgatcagcaacggctacaaggacgagtggctgcagcagcagcagagagccgacagcgacaagagaacccccaagaccagcagagccagcgtgctgagccagagccccagagacctggagggcccccaggacgccgccagactgcaggacgccgaggccagcgagggccccgaggacacccccgagagcagccagagccccgaggagagcgtgagcgccagcacccccgccgagctgaagtag

SEQ ID NO: 305676 - DNA, 888 bp, Artificial Sequence
  derived and/or modified sequence
atgagaaacaccagcaaggagctgcagggcgccacccacagatacgccccctgcgactggtactaccacgtgcccgtgaagagaagcgagaaggccgtggacgccccccccgccagccagatccccggcctgagcaacctgggcgacagccacagcgagaacctgcccggcaccagaagatactggatcaaggagaccgacagcgagtacgtgaagctggccaagcagggcggcagacccgacctgctgaagcacttcgcccccggcaccagaaagggcagccccgtggcctacagcctgcccgactggtacatccaccacagcaagccccccaccgccagccagcaggaggtgagagccgtgagcatgcccgactacatggtgcacgaggagttcaaccccgaccaggccaacggcagctacgccagcagaagaggccccttcgacttcgacatgaagaccgtgtggcagagagaggccgaggagctggagaaggagaagaagaagctgagactgcccgccatcgacagcaagtacctgagcaaggccggcacccccctgggccccaagaaccccgccggcagcagactgagcttcccccccgtgcccggccagaagaacagcagccccaccaacttcagcaagctgatcagcaacggctacaaggacgagtggctgcagcagcagcagagagccgacagcgacaagagaacccccaagaccagcagagccagcgtgctgagccagagccccagagacctggagggcccccaggacgccgccagactgcaggacgccgaggccagcgagggccccgaggacacccccgagagcaacacctgccccgaggagagcgtgagcgccagcacccccgccgagctgaagtag

SEQ ID NO: 305677 - DNA, 2125 bp, Artificial Sequence
  derived and/or modified sequence
gttccgcggcgcgctgggagtttgggtttggttggctgcagccagccagccgtgtaaaaactccaacgccgggcgccgcgggcagcacccacggagacccgcggggagctgctgcagctcctggcaactggtcaagcaggcagcgtccagcgcacccgcgaacaccaggtccggcagcatctgtcttttcccgcagcgtgcagcgcctgaccatgaggaacacaagcaaggaacttcagggcgccacgcaccgctacgctccctgcgattggtattaccacgtcccagtgaagcgctctgagaaggccgtggatgccccaccagcgtcccagatcccaggtctcagcaatttgggagactcacacagcgagaacctgcctgggactcggagatactggataaaagaaacagattcggaatatgtgaagctcgcgaaacaaggtggcaggcccgatttgttgaagcactttgcccctggaaccaggaaaggctctccagtggcctactccctgccagactggtatatccaccacagcaagccaccgacagccagccagcaagaagtgcgggctgtctccatgccggattacatggttcatgaagaatttaaccccgatcaagccaatggtagctatgcatccagaagagggcccttcgacttcgacatgaaaacagtttggcaaagagaggctgaggaacttgaaaaggagaaaaaaaagctgaggctaccggccattgactcaaagtatctgagcaaagcaggcaccccacttggccctaagaatcctgcaggaagtagactctccttcccccccgtgcctggtcaaaaaaacagttcacctaccaatttttccaaactcattagcaatggttataaggatgagtggttgcagcagcagcagcgagctgactcagacaagaggaccccgaagacctccagggcatcagtgttatctcagtccccacgagacctggaaggtccccaggatgcagccaggctccaggatgcagaggcttctgaaggtcctgaggacaccccagagtcttctcaaagcccagaagaatctgtatctgcatcaacaccagcagagctcaaataaatcctgatgcaatatgtatttaggataatttttaaatggctaaatatgacatgactgtattatagctatatttctgaggctttttttgtattttattaatatagactctcattgaataatttaccttgcagcagatttgacattgctgcatagaaggggcaggtgttggtttttgtttcttgcatttctctgggatgtgaaacacttggctaacaaacacaactaaggcctctggtaccctctgccctgctggcctggtgatgtcccagtgtctcagaactgatcacttgctcctcctattgtgtgaaccactcttagcaggcattgctactggattcttaactagagaaaacttacagaacaggtgttaagccttttccaatatttagtattgtagtcttcatagaaatcatttctagttacagaaaaatttaactccagaatatggtgatacagtttatgttaagaaacatattttaatttattatgccatgaatttataaacatttaatataaaacattataacatttgctgttttaaaatttttgctattttttcacaaactgatattcaaaatattaaacatttgttattttgtataaacctttaagtaaaaatatgctgttttaatatttaatttagtagaattaacaaaaactttttaatagtcaaactgaattaccttgttttataaatgttaaattgtttatatttaagtaattagcttaaaaatatagttttatgttttgtacattaattgattaataaaataataattttatgtgagaatgttttcaaaaagccaaataaagtcacagatattttagcttctttcccagaataaacttatcatgcatttgcttacctaaaatttaagtttcaaattagttctctatatgagatacttaatcgagcatatatatttatattcattgatcaaactgatatgctacaggagaatgtatgcaatgtgtaaaaaatgcaaatggctgtatgcattgaataaaaataatatacaattaga

SEQ ID NO: 305678 - DNA, 2122 bp, Artificial Sequence
  derived and/or modified sequence
gttccgcggcgcgctgggagtttgggtttggttggctgcagccagccagccgtgtaaaaactccaacgccgggcgccgcgggcagcacccacggagacccgcggggagctgctgcagctcctggcaactggtcaagcaggcagcgtccagcgcacccgcgaacaccaggtccggcagcatctgtcttttcccgcagcgtgcagcgcctgaccatgaggaacacaagcaaggaacttcagggcgccacgcaccgctacgctccctgcgattggtattaccacgtcccagtgaagcgctctgagaaggccgtggatgccccaccagcgtcccagatcccaggtctcagcaatttgggagactcacacagcgagaacctgcctgggactcggagatactggataaaagaaacagattcggaatatgtgaagctcgcgaaacaaggtggcaggcccgatttgttgaagcactttgcccctggaaccaggaaaggctctccagtggcctactccctgccagactggtatatccaccacagcaagccaccgacagccagccagcaagaagtgcgggctgtctccatgccggattacatggttcatgaagaatttaaccccgatcaagccaatggtagctatgcatccagaagagggcccttcgacttcgacatgaaaacagtttggcaaagagaggctgaggaacttgaaaaggagaaaaaaaagctgaggctaccggccattgactcaaagtatctgagcaaagcaggcaccccacttggccctaagaatcctgcaggaagtagactctccttcccccccgtgcctggtcaaaaaaacagttcacctaccaatttttccaaactcattagcaatggttataaggatgagtggttgcagcagcagcagcgagctgactcagacaagaggaccccgaagacctccagggcatcagtgttatctcagtccccacgagacctggaaggtccccaggatgcagccaggctccaggatgcagaggcttctgaaggtcctgaggacaccccagagagtaatacatgcccagaagaatctgtatctgcatcaacaccagcagagctcaaataaatcctgatgcaatatgtatttaggataatttttaaatggctaaatatgacatgactgtattatagctatatttctgaggctttttttgtattttattaatatagactctcattgaataatttaccttgcagcagatttgacattgctgcatagaaggggcaggtgttggtttttgtttcttgcatttctctgggatgtgaaacacttggctaacaaacacaactaaggcctctggtaccctctgccctgctggcctggtgatgtcccagtgtctcagaactgatcacttgctcctcctattgtgtgaaccactcttagcaggcattgctactggattcttaactagagaaaacttacagaacaggtgttaagccttttccaatatttagtattgtagtcttcatagaaatcatttctagttacagaaaaatttaactccagaatatggtgatacagtttatgttaagaaacatattttaatttattatgccatgaatttataaacatttaatataaaacattataacatttgctgttttaaaatttttgctattttttcacaaactgatattcaaaatattaaacatttgttattttgtataaacctttaagtaaaaatatgctgttttaatatttaatttagtagaattaacaaaaactttttaatagtcaaactgaattaccttgttttataaatgttaaattgtttatatttaagtaattagcttaaaaatatagttttatgttttgtacattaattgattaataaaataataattttatgtgagaatgttttcaaaaagccaaataaagtcacagatattttagcttctttcccagaataaacttatcatgcatttgcttacctaaaatttaagtttcaaattagttctctatatgagatacttaatcgagcatatatatttatattcattgatcaaactgatatgctacaggagaatgtatgcaatgtgtaaaaaatgcaaatggctgtatgcattgaataaaaataatatacaatt

SEQ ID NO: 305679 - DNA, 888 bp, Artificial Sequence
  derived and/or modified sequence
atgcgaaatacaagcaaggaattacagggggccacgcacagatatgccccttgcgactggtactaccacgttcctgtgaaacggagtgaaaaggctgtggatgccccccctgcctctcaaattcccggcttatctaatctgggggattcccacagcgagaatctgcccggcaccaggcggtactggattaaggaaacggactcagaatatgtcaaactggcaaagcagggaggaagacctgacttactcaaacactttgcacctggtactcgaaaagggagcccggttgcatatagcctaccagattggtatatccaccattcaaagcctcccaccgcctcacagcaagaagtcagggctgtttccatgccagactatatggtccacgaggagttcaacccggatcaggcaaatggatcttatgccagtcggaggggacccttcgactttgacatgaagaccgtgtggcagagggaagccgaggagctcgagaaggagaaaaagaagctgagactgcctgcaatcgactccaaatatctctctaaggccggaaccccactcggccccaaaaatccggcagggtcccgactgtcattccctccggtgcccggccagaaaaattctagcccgacaaacttcagcaagttaatcagtaatggctataaggacgaatggctccagcaacagcagcgggctgactctgataaacgtaccccaaaaacgtcccgcgcctccgtgctctcacaaagtccacgggacctggaaggcccgcaagacgccgcacgactccaagatgcggaggcaagtgagggacctgaggacacaccagagagctcacagagtcctgaagagagcgtgagtgcgagcacaccggccgagttaaagtag

SEQ ID NO: 305680 - DNA, 888 bp, Artificial Sequence
  derived and/or modified sequence
atgaggaatacatccaaagaactgcagggggccacacatagatacgctccctgtgactggtattatcatgtgcctgtgaagagatctgagaaagccgtggatgcgcctccagcgtcccagatcccagggctgtctaacctgggagactcccattccgagaacctacctgggacgagaaggtactggatcaaggaaaccgacagcgaatacgtgaagcttgcgaagcagggggggcgacctgacttgctcaaacatttcgcccctggcacacggaaagggagccctgtggcgtactcccttcccgactggtatatacatcactctaagccaccgacagcatctcagcaagaagtgcgcgccgtttctatgccagattacatggtgcatgaggagttcaatcctgatcaggcgaatggctcttacgcctctaggcggggacccttcgatttcgacatgaaaaccgtttggcagcgcgaggcggaagagttggagaaggaaaagaagaaactccgcctgcccgccattgattcaaagtacctctcaaaagccggaacgcccctcggtccaaagaatcccgcaggatcaaggctgagtttcccaccggttccgggccagaaaaactcaagcccaacaaatttctccaaactgatctccaacggttacaaagacgaatggcttcagcaacagcagagggcagattccgataaacgcaccccgaaaactagccgcgccagcgttctgtcccagagccctcgagacttagagggccctcaggacgcagccagactccaggatgccgaagcatccgaagggccagaggatacgccagaatctaacacgtgccctgaagaatctgtaagcgctagcacacccgccgagttgaagtag

SEQ ID NO: 305681 - DNA, 888 bp, Artificial Sequence
  derived and/or modified sequence
atgaggaacaccagcaaggagctgcagggcgccacccacagatatgccccctgtgactggtactaccacgtgcctgtgaagaggtctgagaaggctgtggatgcccccccagccagccagatccctggcctgagcaacctgggggacagccacagcgagaacctgcccggcacccggcgctactggatcaaggagacagacagtgaatatgtgaagctggccaagcagggcggccgcccagacctgctgaagcactttgcccctggcaccaggaagggcagccctgtggcctacagcctgcctgactggtacatccaccacagcaagccacccacagccagccagcaggaggtgcgggctgtgtccatgccagactacatggtgcatgaggagttcaacccagaccaggccaacggcagctatgccagccggcggggcccctttgattttgacatgaagacagtgtggcagcgggaggccgaggagctggagaaggagaagaagaagctgcggctgcctgccatcgacagcaagtacctgagcaaggccggcacccccctgggccccaagaacccagctggcagccggctgtccttcccccctgtgcccggccagaagaacagcagccccaccaacttcagcaagctgatcagcaatggctacaaggatgagtggctgcagcagcagcagagagctgacagcgacaagaggacccccaagaccagccgggcctctgtgctgagccagagcccccgggacctggagggcccccaggatgctgcccggctgcaggatgctgaggccagcgagggccctgaggacaccccagagagcagccagagccctgaggagagcgtgtctgccagcaccccagctgagctgaagtag

SEQ ID NO: 305682 - DNA, 888 bp, Artificial Sequence
  derived and/or modified sequence
atgaggaacaccagcaaggagctgcagggcgccacccacagatatgccccctgtgactggtactaccacgtgcctgtgaagaggtctgagaaggctgtggatgcccccccagccagccagatccctggcctgagcaacctgggggacagccacagcgagaacctgcccggcacccggcgctactggatcaaggagacagacagtgaatatgtgaagctggccaagcagggcggccgcccagacctgctgaagcactttgcccctggcaccaggaagggcagccctgtggcctacagcctgcctgactggtacatccaccacagcaagccacccacagccagccagcaggaggtgcgggctgtgtccatgccagactacatggtgcatgaggagttcaacccagaccaggccaacggcagctatgccagccggcggggcccctttgattttgacatgaagacagtgtggcagcgggaggccgaggagctggagaaggagaagaagaagctgcggctgcctgccatcgacagcaagtacctgagcaaggccggcacccccctgggccccaagaacccagctggcagccggctgtccttcccccctgtgcccggccagaagaacagcagccccaccaacttcagcaagctgatcagcaatggctacaaggatgagtggctgcagcagcagcagagagctgacagcgacaagaggacccccaagaccagccgggcctctgtgctgagccagagcccccgggacctggagggcccccaggatgctgcccggctgcaggatgctgaggccagcgagggccctgaggacaccccagagagcaacacctgcccagaggagagcgtgtctgccagcaccccagctgagctgaagtag

SEQ ID NO: 305683 - DNA, 888 bp, Artificial Sequence
  derived and/or modified sequence
atgcggaacaccagcaaggagctgcagggcgccacccaccggtacgcaccgtgcgactggtactaccacgtccccgtgaaacggtctgagaaagcagttgatgcaccacccgcatcccaaattcccggcctgagcaacctgggtgattctcacagcgagaaccttcccggaacccgccgctactggattaaagaaaccgattccgagtatgtcaagttggctaaacagggtggaaggccagatctgctgaagcactttgccccaggtacacgaaaagggagtccggtggcgtacagtctccccgactggtacattcatcattccaaaccacctaccgcatctcagcaagaggtccgggccgtgtccatgcccgactacatggtccacgaggaatttaatcctgaccaggccaatggctcatatgcttcccgacgcggcccattcgattttgacatgaaaaccgtgtggcagcgtgaggcagaggagctcgaaaaggagaagaaaaaactccgcctccctgcaatagacagtaagtacctgtctaaagccggaacccctctggggcctaagaatcctgctggaagtagattaagctttccccccgtacccgggcaaaaaaacagttctcctactaacttctctaaacttatctccaacggctataaagatgagtggctccagcaacagcaaagggctgatagcgataaacgcacgccgaaaacctcaagggctagcgtactcagccaatctccccgcgatctggaaggcccccaggacgcagctcgcctgcaggacgcagaagcctctgaaggcccagaagatacgcctgaatcgagccagtctcctgaggagagtgtaagcgcatccacccctgctgagctcaagtag

SEQ ID NO: 305684 - DNA, 888 bp, Artificial Sequence
  derived and/or modified sequence
atgcggaacaccagcaaggagctgcagggcgccacccaccggtacgcaccctgtgattggtattatcatgtgcctgtaaagaggagcgaaaaagctgtcgatgccccaccagccagtcagatcccgggtctcagtaacctgggtgactcacactccgagaacctgcccggcacccgccggtattggatcaaagaaactgatagcgagtatgtgaagttagccaagcagggaggacggcctgatttgcttaaacacttcgcccccgggacgcgaaagggctcacccgtggcatattccctgccggactggtatatccaccattcgaagccgcctaccgcgagccagcaggaggtgcgcgcggtcagtatgcctgattacatggtccacgaagaattcaatcccgatcaggctaacgggtcgtacgcgagccggcgggggcctttcgatttcgacatgaagaccgtttggcaacgcgaggccgaagagctggagaaagaaaaaaagaaactgaggctgccagcaattgatagcaaatacctatccaaggctgggacgccactcggtccgaagaatcctgccggtagcagactgtcgtttccaccagtacccggccaaaagaactcatctcccaccaacttttccaagctgatcagcaatggatataaggacgagtggctgcagcagcagcagcgtgctgacagcgacaagaggactcctaaaacgagtagggcctctgtgttatcccagagcccaagggatctggaaggtccccaggatgccgctcgattgcaggacgcagaagcctctgagggcccagaggatacacccgaatcaaatacttgccccgaggagagtgtcagcgcctcaacccccgccgaacttaaatag

SEQ ID NO: 305685 - DNA, 888 bp, Artificial Sequence
  derived and/or modified sequence
atgagaaacacttccaaagagctccagggtgcaacacacagatacgccccatgcgattggtattatcacgtccctgtgaagcgttccgaaaaagctgttgacgcacccccagcatcccagattccaggtttatccaacctgggtgacagccactccgaaaacctgcccggaacaaggaggtattggatcaaagaaactgattcggagtatgtgaaactggcaaagcagggagggaggccagatctgttgaagcattttgcaccgggtacccgtaagggatccccagtggcctattctcttccagactggtacatccaccacagcaaacctccaaccgccagtcagcaagaggtgcgggcagttagcatgcccgattacatggttcacgaagaatttaacccagaccaggcaaatggtagctatgcgtctaggcgtggccctttcgacttcgatatgaaaaccgtgtggcagcgtgaggctgaagagctagaaaaggagaagaaaaagcttaggctaccagcaattgacagcaagtatttgtccaaggccggaacacccttgggtcctaaaaaccctgccggaagccgcctctcatttccaccagtccccggacaaaaaaattcctcaccaacaaatttttccaaactgataagtaacggctacaaagatgagtggctgcagcagcagcaacgcgcagatagcgataaacggaccccaaagacctccagagcaagtgttctgagccagtcgcccagagaccttgaggggccacaggacgcagctcggctgcaggacgccgaagcttctgagggtcctgaggatacaccagagtcctcccagagccccgaggagtcagtgtctgcatctacaccagcagagttaaagtag

SEQ ID NO: 305686 - DNA, 888 bp, Artificial Sequence
  derived and/or modified sequence
atgagaaatacctccaaggaactacaaggggcaactcacaggtacgctccatgcgattggtactaccatgttcctgtgaagagatccgagaaggctgtcgatgcaccccctgcttcacagattcctggccttagcaatttaggagattcccattctgaaaacctgccagggacacggcgatactggataaaagaaactgactcggagtatgttaagttagctaaacaaggcggtagacctgacttgctaaaacacttcgcccctgggactagaaagggcagcccggtagcctactctttgcctgattggtacatccatcattctaaacctcctactgcatcccagcaggaagtcagagccgtttctatgcctgactatatggtccatgaagaatttaaccctgatcaggccaatgggagttatgcttctagacgagggcctttcgattttgacatgaaaacagtttggcagcgggaggctgaggaattagagaaggagaaaaagaaattgcgcttgccggcaatcgactccaaatatttatccaaagcaggcacgcccctcggccctaagaatcccgcaggctcacgattgagctttccccctgtgcccggacagaaaaactcctcccctaccaacttttctaaactcatatctaatggctataaagatgagtggttgcagcagcaacagagggccgattcagataagaggactcccaagacatctcgggcatctgtcctgagtcagagcccacgcgatcttgaagggcctcaagacgccgcacgcctgcaggatgctgaggcaagtgagggacccgaggacactcccgagagcaatacgtgtcctgaggaaagtgtaagcgcctctacaccagctgagctcaagtag

SEQ ID NO: 305687 - protein, 153 aa, Artificial Sequence
  derived and/or modified sequence
MPDYMVHEEFNPDQANGSYASRRGPFDFDMKTVWQREAEELEKEKKKLRLPAIDSKYLSKAGTPLGPKNPAGSRLSFPPVNGYKDEWLQQQQRADSDKRTPKTSRASVLSQSPRDLEGPQDAARLQDAEASEGPEDTPGPEESVSASTPAELK

SEQ ID NO: 305688 - DNA, 1925 bp, Artificial Sequence
  derived and/or modified sequence
gatgttgtggttccgcggcgcgctgggagtttgggtttggttggctgcagccagccagccgtgtaaaaactccaacgccgggcgccgcgggcagcacccacggagacccgcggggagctgattggtattaccacgtcccagtgaagcgctctgagaaggccgtggatgccccaccagcgtcccagatcccaggtctcagcaatttgggagactcacacagcgagaacctgcctgggactcggagatactggataaaagaaacagattcggaatatgtgaagctcgcgaaacaaggtggcaggcccgatttgttgaagcactttgcccctggaaccaggaaaggctctccagtggcctactccctgccagactggtatatccaccacagcaagccaccgacagccagccagcaagaagtgcgggctgtctccatgccggattacatggttcatgaagaatttaaccccgatcaagccaatggtagctatgcatccagaagagggcccttcgacttcgacatgaaaacagtttggcaaagagaggctgaggaacttgaaaaggagaaaaaaaagctgaggctaccggccattgactcaaagtatctgagcaaagcaggcaccccacttggccctaagaatcctgcaggaagtagactctccttcccccccgtcaatggttataaggatgagtggttgcagcagcagcagcgagctgactcagacaagaggaccccgaagacctccagggcatcagtgttatctcagtccccacgagacctggaaggtccccaggatgcagccaggctccaggatgcagaggcttctgaaggtcctgaggacaccccaggcccagaagaatctgtatctgcatcaacaccagcagagctcaaataaatcctgatgcaatatgtatttaggataatttttaaatggctaaatatgacatgactgtattatagctatatttctgaggctttttttgtattttattaatatagactctcattgaataatttaccttgcagcagatttgacattgctgcatagaaggggcaggtgttggtttttgtttcttgcatttctctgggatgtgaaacacttggctaacaaacacaactaaggcctctggtaccctctgccctgctggcctggtgatgtcccagtgtctcagaactgatcacttgctcctcctattgtgtgaaccactcttagcaggcattgctactggattcttaactagagaaaacttacagaacaggtgttaagccttttccaatatttagtattgtagtcttcatagaaatcatttctagttacagaaaaatttaactccagaatatggtgatacagtttatgttaagaaacatattttaatttattatgccatgaatttataaacatttaatataaaacattataacatttgctgttttaaaatttttgctattttttcacaaactgatattcaaaatattaaacatttgttattttgtataaacctttaagtaaaaatatgctgttttaatatttaatttagtagaattaacaaaaactttttaatagtcaaactgaattaccttgttttataaatgttaaattgtttatatttaagtaattagcttaaaaatatagttttatgttttgtacattaattgattaataaaataataattttatgtgagaatgttttcaaaaagccaaataaagtcacagatattttagcttctttcccagaataaacttatcatgcatttgcttacctaaaatttaagtttcaaattagttctctatatgagatacttaatcgagcatatatatttatattcattgatcaaactgatatgctacaggagaatgtatgcaatgtgtaaaaaatgcaaatggctgtatgcattgaataaaaataatatacaattagagtaagaa

SEQ ID NO: 305689 - protein, 370 aa, Artificial Sequence
  derived and/or modified sequence
MDAALLHSLLEANCSLALAEELLLDGWGPPLDPEGPYSYCNTTLDQIGTCWPRSAAGALVERPCPEYFNGVKYNTTRNAYRECLENGTWASKINYSQCEPILDDKQRKYDLHYRIALVVNYLGHCVSVAALVAAFLLFLALRSIRCLRNVIHWNLITTFILRNVMWFLLQLVDHEVHESNEVWCRCITTIFNYFVVTNFFWMFVEGCYLHTAIVMTYSTERLRKCLFLFIGWCIPFPIIVAWAIGKLYYENEQCWFGKEPGDLVDYIYQGPIILVLLINFVFLFNIVRILMTKLRASTTSETIQYRKAVKATLVLLPLLGITYMLFFVNPGEDDLSQIMFIYFNSFLQSFQGFFVSVFYCFFNGEGLEPV

SEQ ID NO: 305690 - DNA, 1113 bp, Artificial Sequence
  derived and/or modified sequence
atggatgcagcgcttctgcatagcctgctggaggctaattgtagcctggccctggcagaagagctattgctggatggttggggccccccactcgacccggaaggaccttatagttattgtaataccacactggaccagatcggcacttgctggccaagatccgctgccggcgctttagtggaacggccatgtcccgagtacttcaacggggtaaaatataacaccacacgtaacgcttaccgcgagtgtctggagaacgggacctgggcaagcaaaatcaactattctcagtgcgaacccattctggacgacaaacaacgcaaatatgatctgcattacaggatcgccctggtggtgaattacttggggcattgcgtctctgtggcagctctggtcgctgcctttttactgttccttgctctgcggtcgatcagatgcctgcggaacgtcatccactggaacttgatcaccacgtttattctccgaaatgtgatgtggtttctactgcagctggttgatcacgaagtccatgaatccaacgaggtgtggtgtaggtgtatcaccaccatcttcaactactttgtggtcacgaattttttctggatgtttgtagaggggtgctatctacacaccgcgatcgttatgacctactctaccgagagactgcgcaagtgtctattcctgttcatcggctggtgtatcccatttcctatcattgtggcctgggccatcggtaaactctattacgaaaacgaacagtgttggttcggaaaagaaccaggagacctagttgactatatttaccagggcccaatcattctggttctattaatcaacttcgtgtttctcttcaacattgtccggatcctcatgacaaaactgagagccagtacgacctctgaaactatccagtatcgcaaagccgtgaaggccactctggtgttactccccttgctggggatcacatacatgctgttcttcgtaaaccccggggaggatgatctgtcccagattatgtttatctatttcaatagtttcctacagtcgtttcagggatttttcgtatccgttttttactgtttctttaatggagaaggactggagccagtatag

SEQ ID NO: 305691 - DNA, 1113 bp, Artificial Sequence
  derived and/or modified sequence
atggatgctgccctgctgcacagcctgctggaggccaactgcagcctggccctggccgaggagctgctgctggatggctggggcccccccctggaccctgagggcccctacagctactgcaacaccaccctggaccagatcggcacctgctggcccaggtctgctgctggggccctggtggagcggccctgcccagagtacttcaatggagtgaagtacaacaccaccagaaatgcctaccgggagtgcctggagaatggcacctgggccagcaagatcaactacagccagtgtgagcccatcctggatgacaagcagaggaaatatgacctgcactacagaattgccctggtggtgaactacctgggccactgtgtgtctgtggccgccctggtggccgccttcctgctcttcctggccctgcggagcatccgctgcctgagaaatgtcatccactggaacctgatcaccaccttcatcctgagaaatgtgatgtggttcctgctgcagctggtggaccacgaggtgcatgagagcaatgaggtgtggtgccgctgcatcaccaccatcttcaactactttgtggtgaccaacttcttctggatgtttgtggagggctgctacctgcacacagccatcgtgatgacctacagcacagagcggctgaggaagtgcctcttcctgttcatcggctggtgcatccccttccccatcatcgtggcctgggccatcggcaagctgtactatgaaaatgagcagtgctggtttgggaaggagcccggggacctggtggactacatctaccagggccccatcatcctggtgctgctgatcaactttgtgttcctgttcaacatcgtgcgcatcctgatgaccaagctgcgggccagcaccaccagcgagaccatccagtacaggaaggctgtgaaggccaccctggtgctgctgcccctgctgggcatcacctacatgctgttctttgtgaaccctggagaagatgacctgagccagatcatgttcatctacttcaacagcttcctgcagagcttccagggcttctttgtgtctgtgttctactgcttcttcaatggagagggcctggagcctgtgtag

SEQ ID NO: 305692 - DNA, 1113 bp, Artificial Sequence
  derived and/or modified sequence
atggacgccgccctgctgcacagcctgctggaggccaactgcagcttagctctggctgaggagctcctcctggatggttggggccccccgctcgaccccgagggaccttactcttactgtaatactaccctggatcagataggcacatgttggccccgcagtgctgcaggcgctttggttgaaagaccatgtcctgaatattttaatggtgtcaagtataatacaacaaggaacgcctacagggagtgtctggaaaatggaacgtgggcctccaagatcaactatagccagtgtgaacccatactggatgacaaacaaaggaagtatgatctccattaccggattgcactcgttgtaaactatctgggccactgcgtctccgtggccgcgctcgtagctgccttcttgcttttcttagctcttcgttctattcggtgcttgcggaatgtgattcactggaacctcatcaccacatttatcctccgcaacgtgatgtggtttcttcttcagctcgtcgatcatgaggtgcacgagtcaaacgaagtgtggtgtcgctgtatcactacaatattcaattacttcgtagtaacaaacttcttctggatgttcgttgaagggtgctacctgcacacagctattgtgatgacttatagcaccgaacggctccggaaatgtctttttctgtttatcgggtggtgcataccgtttccaattatcgtcgcctgggctatcggcaagctgtactacgagaacgagcagtgctggttcgggaaggagccaggcgacttggtggattatatctatcagggaccaataatcctggtgttgctgattaattttgtgttcttgtttaacattgtcaggatactcatgactaaactgagagcgagcactacatcagagaccattcaataccgcaaggcagttaaagcgaccctggtgctgcttcccctcctgggaattacgtacatgctgttctttgtgaatccaggcgaggacgacctctctcagataatgtttatttactttaacagctttttgcagagtttccaaggcttttttgtttcagtcttctactgcttctttaacggcgaaggattagaacccgtctag

SEQ ID NO: 305693 - DNA, 1113 bp, Artificial Sequence
  derived and/or modified sequence
atggacgcagcccttttacatagtctccttgaggcaaactgtagtctggcactcgcagaagaactgctccttgacggctggggcccacccctggatcccgaggggccatatagctattgtaatacgacactggatcaaattggaacatgctggcctcgctccgctgccggagctctggttgaaagaccatgtccagaatactttaatggtgtgaaatacaatactacccgcaacgcctatcgcgagtgcctggaaaatgggacatgggcctcaaagatcaactatagccagtgtgagcctattctcgatgataagcagaggaaatacgatctgcattatcgcattgcactagtggttaactatctggggcattgcgtgagcgttgcagcactggtggctgcgtttctcctgttcctagccctgcgtagtatcagatgcctgagaaacgtgatccactggaacctgattacaactttcatcctgaggaacgtgatgtggtttttgctgcagctggtggaccatgaggtccatgagtccaatgaagtctggtgcaggtgcattactacaatcttcaactactttgtggtgacgaattttttttggatgttcgtggagggatgttacctccacaccgccatcgtgatgacatattctaccgaacgattgcgcaagtgtctttttctgttcataggctggtgcattcccttcccaatcattgtggcttgggcaatcggcaagctgtactacgagaacgaacagtgttggtttggaaaagaacccggagacctggtcgattatatataccagggaccgatcatcttggtgctcctgattaatttcgtgtttttattcaacattgtgcggattctcatgactaaactgcgtgcatctacaacttctgaaacaattcagtacagaaaggctgttaaggccacactggtcctgctccccttgttgggcatcacctatatgctgttttttgtgaatcctggagaggacgatctgtcccagatcatgttcatctatttcaactcttttcttcagagctttcagggtttctttgtaagtgtgttctactgcttctttaatggggagggtcttgagcctgtttag

SEQ ID NO: 305694 - DNA, 1420 bp, Artificial Sequence
  derived and/or modified sequence
atggacgcggcactgctccacagcctgctggaggccaactgcagcctggcgctggctgaagagctgctcttggacggctgggggccacccctggaccccgagggtccctactcctactgcaacacgaccttggaccagatcggaacgtgctggccccgcagcgctgccggagccctcgtggagaggccgtgccccgagtacttcaacggcgtcaagtacaacacgacccggaatgcctatcgagaatgcttggagaatgggacgtgggcctcaaagatcaactactcacagtgtgagcccattttggatgacaagcagaggaagtatgacctgcactaccgcatcgcccttgtcgtcaactacctgggccactgcgtatctgtggcagccctggtggccgccttcctgcttttcctggccctgcggagcattcgctgtctgcggaatgtgattcactggaacctcatcaccacctttatcctgcgaaatgtcatgtggttcctgctgcagctcgttgaccatgaagtgcacgagagcaatgaggtctggtgccgctgcatcaccaccatcttcaactacttcgtggtgaccaacttcttctggatgtttgtggaaggctgctacctgcacacggccattgtcatgacctactccactgagcgcctgcgcaagtgcctcttcctcttcatcggatggtgcatccccttccccatcatcgtcgcctgggccatcggcaagctctactatgagaatgaacagtgctggtttggcaaggagcctggcgacctggtggactacatctaccaaggccccatcattctcgtgctcctgatcaatttcgtatttctgttcaacatcgtcaggatcctaatgacaaagttacgcgcgtccaccacatccgagacaatccagtacaggaaggcagtgaaggccaccctggtgctcctgcccctcctgggcatcacctacatgctcttcttcgtcaatcccggggaggacgacctgtcacagatcatgttcatctatttcaactccttcctgcagtcgttccagggtttcttcgtgtctgtcttctactgcttcttcaatggagaggggctggagccagtttagaaggtcaactatgcagccccgaaataacatgccagcaccccacatgtgcactcagagctgggtgagcaaggaagcccaggccgcagggcctcatggaagagagaagccagagcagaggtggtgacagaaggaagcttccagaaagagatgtgtgccaagcaatcaggtgcgctcagccgtgaggaagaggtggcaccgctggcaggaccatcactcccttcgagtccccatggcccgggccatgtccatccctacatcacccacacggatcagcttccacagcatcaagcagacggccgctgtgtga

SEQ ID NO: 305695 - DNA, 1113 bp, Artificial Sequence
  derived and/or modified sequence
atggacgccgccctgctgcacagcctgctggaggccaactgcagcctggccctggccgaggagctgctgctggacggctggggcccccccctggaccccgagggcccctacagctactgcaacaccaccctggaccagatcggcacctgctggcccagaagcgccgccggcgccctggtggagagaccctgccccgagtacttcaacggcgtgaagtacaacaccaccagaaacgcctacagagagtgcctggagaacggcacctgggccagcaagatcaactacagccagtgcgagcccatcctggacgacaagcagagaaagtacgacctgcactacagaatcgccctggtggtgaactacctgggccactgcgtgagcgtggccgccctggtggccgccttcctgctgttcctggccctgagaagcatcagatgcctgagaaacgtgatccactggaacctgatcaccaccttcatcctgagaaacgtgatgtggttcctgctgcagctggtggaccacgaggtgcacgagagcaacgaggtgtggtgcagatgcatcaccaccatcttcaactacttcgtggtgaccaacttcttctggatgttcgtggagggctgctacctgcacaccgccatcgtgatgacctacagcaccgagagactgagaaagtgcctgttcctgttcatcggctggtgcatccccttccccatcatcgtggcctgggccatcggcaagctgtactacgagaacgagcagtgctggttcggcaaggagcccggcgacctggtggactacatctaccagggccccatcatcctggtgctgctgatcaacttcgtgttcctgttcaacatcgtgagaatcctgatgaccaagctgagagccagcaccaccagcgagaccatccagtacagaaaggccgtgaaggccaccctggtgctgctgcccctgctgggcatcacctacatgctgttcttcgtgaaccccggcgaggacgacctgagccagatcatgttcatctacttcaacagcttcctgcagagcttccagggcttcttcgtgagcgtgttctactgcttcttcaacggcgagggcctggagcccgtgtag

SEQ ID NO: 305696 - DNA, 109 bp, Artificial Sequence
  derived and/or modified sequence
tatagttgaatgaacacacatacacacacacatgccacaaaacaaaaacaaagttatcctcacacacaggatagaaaccaaaccaaatcccaacacatggcaagatgat

SEQ ID NO: 305697 - protein, 788 aa, Artificial Sequence
  derived and/or modified sequence
MGLFMVRPLATEYPPLRLTPGHYQRAETYFFRKNSSCWRTDPFSHPEFQDSCGCLKCPNRSASAPYLTNHLGHTLLNLSGFNMEEYLLAPSEKPRLGGWSFGLKIPSEAGGANGNISKPPTLAKVWYNQKGFHSLPSYLNHLNNLILWQHLPPTVDWRQYGITLYSHPYGGALLNKDKILESIRQCGVALCIVLGFSILSASIGSSVVRDRVIGAKRLQHISGLGYRMYWFTNFLYDMLFYLVSVCLCVAVIVAFQLTAFTFRKNLAATALLLSLFGYATLPWMYLMSRIFSSSDVAFISYVSLNFIFGLCTMLITIMPRLLAIISKAKNLQNIYDVLKWVFTIFPQFCLGQGLVELCYNQIKYDLTHNFGIDSYVSPFEMNFLGWIFVQLASQGTVLLLLRVLLHWDLLRWPRGHSTLQGTVKSSKDTDVEKEEKRVFEGRTNGDILVLYNLSKHYRRFFQNIIAVQDISLGIPKGECFGLLGVNGAGKSTTFKMLNGEVSLTSGHAIIRTPMGDAVDLSSAGTAGVLIGYCPQQDALDELLTGWEHLYYYCSLRGIPRQCIPEVAGDLIRRLHLEAHADKPVATYSGGTKRKLSTALALVGKPDILLLDEPSSGMDPCSKRYLWQTIMKEVREGCAAVLTSHSMEECEALCTRLAIMVNGSFKCLGSPQHIKNRFGDGYTVKVWLCKEANQHCTVSDHLKLYFPGIQFKGQHLNLLEYHVPKRWGCLADLFKVIENNKTFLNIKHYSINQTTLEQVFINFASEQQQTLQSTLDPSTDSHHTHHLPI

SEQ ID NO: 305698 - DNA, 2367 bp, Artificial Sequence
  derived and/or modified sequence
atgggcctgttcatggtgcgacccttggcgaccgagtacccacccctgcgacttacccccgggcactaccagagggctgagacctacttctttcgcaagaattctagctgttggaggaccgaccccttttctcaccccgaatttcaggatagctgtgggtgcttaaagtgtcccaacaggtccgctagcgctccttaccttaccaatcatctgggtcacacactccttaatctttctggatttaatatggaggaatacttattggcccccagtgagaagccccggctgggagggtggtcatttggattgaagatccccagtgaggcaggcggagcaaatggtaatatttctaaacctccaaccctcgccaaagtgtggtacaatcagaaaggcttccacagtctcccctcttacctgaaccacctgaacaatctcattttgtggcagcacttaccccccaccgtcgactggcgacaatacgggatcacactatatagccatccatatgggggggcattattgaacaaggataagatcctcgaatctatacggcaatgcggcgtcgctctgtgtattgtgctggggttctccatcctgagcgctagtatcggatcaagtgtcgtcagagaccgggtgattggcgcaaaacggctgcagcatatctctggcttgggctaccgcatgtactggttcaccaacttcctctacgatatgctgttctacttggtgtcagtgtgcttgtgcgtggctgtcatcgtggcgttccagctgacagccttcacctttcgcaaaaatctagccgctaccgcattgcttctctcactttttggctacgcaaccttgccttggatgtatttgatgtctcggatcttttcctcttctgacgtggctttcatcagctatgtgagtctcaactttatttttggattatgcacgatgttgattacaattatgccccgactgcttgctataatcagcaaagcgaaaaatctgcagaacatctacgatgtcctgaagtgggtctttacgattttcccccagttttgcctggggcaagggctagtggaactttgctataaccagatcaaatatgatctcacgcacaacttcgggattgattcatatgtttctccattcgagatgaattttctcggttggatttttgtgcagcttgcatctcaaggaactgttctgctactcctgagagtgctgctccactgggatctgctccggtggccacgaggccattctacactacagggaacggtgaagagctcgaaggacacagacgtcgaaaaagaagagaaacgagttttcgagggtcggacaaatggcgatatcctcgtgctgtataacctctccaaacattaccggagattcttccaaaacattattgctgtccaggacatatctttgggaatcccaaaaggcgagtgcttcgggttgttgggcgtgaacggagccggaaagtctactacattcaaaatgcttaacggggaagtgagtctgacctctggccacgctatcatacgcactcctatgggcgacgccgtcgacttaagtagcgcaggcacagctggcgtgctgattggatactgcccacaacaggacgcactggacgagttgctgacagggtgggagcacctgtattactactgctctctgcgggggatccctcgccaatgtatcccagaggtggcgggcgacctcatccggcggctacatctggaggctcacgccgataagccagtggctacatacagcgggggcacaaaacgtaaactgtccaccgcactcgccctggttggcaaacccgatatcttgctcctggatgagccatcgtccggtatggacccttgctcgaagagatatctctggcagacaatcatgaaggaggtccgggagggatgtgccgctgtactgacttcgcactccatggaagagtgtgaagcgctgtgtaccagactcgctatcatggtgaatggctcattcaagtgcctaggatctccacagcacattaagaacagatttggcgacggctacactgtgaaggtgtggctctgtaaggaggccaatcagcactgtaccgtctctgatcacctgaaactgtattttcccggaattcagtttaagggtcagcaccttaatctgctggagtaccacgtccccaaaaggtggggatgtcttgctgaccttttcaaagttatcgagaacaacaaaacatttctaaacattaagcattactctatcaatcagacaacactagaacaggtgttcatcaactttgctagcgagcagcagcagacactacagtcaaccttggaccccagcaccgacagtcatcacacccaccacctgccaatttag

SEQ ID NO: 305699 - DNA, 2367 bp, Artificial Sequence
  derived and/or modified sequence
atgggcctcttcatggtgcggcccctggccacagagtacccacccctgcggctgaccccaggccactaccagagagctgagacctacttcttcaggaagaacagcagctgctggaggacagaccccttcagccaccctgagttccaggacagctgtggctgcctgaagtgccccaacagaagtgccagcgccccctacctgaccaaccacctgggccacaccctgctgaacctgagcggcttcaacatggaggagtacctgctggcccccagcgagaagccccggctgggcggctggagctttggcctgaagatccccagcgaggccggcggggccaatggaaacatcagcaagccacccaccctggccaaggtgtggtacaaccagaagggcttccacagcctgcccagctacctgaaccacctgaacaacctgatcctgtggcagcacctgccccccaccgtggactggaggcagtatggcatcaccctgtacagccacccctatggaggagccctgctgaacaaggacaagatcctggagagcatccggcagtgtggggtggccctgtgcatcgtgctgggcttcagcatcctgagcgccagcatcggcagctctgtggtgcgggacagagtgattggagccaagaggctgcagcacatcagcggcctgggctacaggatgtactggttcaccaacttcctgtatgacatgctgttctacctggtgtctgtgtgcctgtgtgtggccgtcatcgtggccttccagctgacagccttcaccttcaggaagaacctggccgccacagccctgctgctgagcctgtttggctacgccaccctgccctggatgtacctgatgagccgcatcttcagcagcagtgatgtggccttcatctcctatgtgtccctgaacttcatcttcggcctgtgcaccatgctgatcaccatcatgccccggctgctggccatcatcagcaaggccaagaacctgcagaacatctatgatgtgctgaagtgggtgttcaccatcttcccccagttctgcctgggccagggcctggtggagctgtgctacaaccagatcaagtatgacctgacccacaactttggcatcgacagctatgtgagcccctttgagatgaacttcctgggctggatctttgtgcagctggccagccagggcaccgtgctgctgctgctgcgggtgctgctgcactgggacctgctgcgctggccccggggccacagcaccctgcagggcaccgtgaagagcagcaaggacacagatgtggagaaggaggagaagagggtgtttgagggccgcaccaacggggacatcctggtgctgtacaacctgagcaagcactaccgccgcttcttccagaacatcatcgctgtgcaggacatcagcctgggcatccccaagggggagtgcttcggcctgctgggcgtgaatggagctgggaagagcaccaccttcaagatgctgaatggagaggtgtccctgaccagcggccacgccatcatccgcacccccatgggagatgctgtggacctgagcagcgctggaacagctggggtgctgattggctactgcccccagcaggatgccctggatgagctgctgaccggctgggagcacctgtactactactgcagcctgcggggcatcccccggcagtgcatccctgaggtggccggggacctgatccggcggctgcacctggaggcccacgccgacaagcctgtggccacctacagcggcggcaccaagaggaagctgagcacagccctggccctggtgggcaagccagacatcctgctgctggatgagcccagcagcggcatggacccctgcagcaagcgctacctgtggcagaccatcatgaaggaggtgcgggagggctgtgccgctgtgctgaccagccacagcatggaggagtgtgaggccctgtgcacccggctggccatcatggtgaatggcagcttcaagtgcctgggcagcccccagcacatcaagaacagatttggagatggctacacagtgaaggtgtggctgtgcaaggaggccaaccagcactgcaccgtgtctgaccacctgaagctgtacttccctggcatccagttcaagggccagcacctgaacctgctggagtaccacgtgcccaagcgctggggctgcctggccgacctcttcaaggtgattgagaacaacaagaccttcctgaacatcaagcactacagcatcaaccagaccaccctggagcaggtgttcatcaactttgccagcgagcagcagcagaccctgcagagcaccctggaccccagcacagacagccaccacacccaccacctgcccatctag

SEQ ID NO: 305700 - DNA, 2367 bp, Artificial Sequence
  derived and/or modified sequence
atgggcctgttcatggtgcggcccctggccaccgagtacccccccctgcggctgacacccggtcactatcagagagccgagacatatttcttccggaagaattcaagttgctggcgcactgatcctttctctcaccctgagttccaggatagttgcggctgcctgaaatgtcccaaccgatcggcctcagctccatacctcaccaatcacctaggccataccttgttgaacctgtccggcttcaacatggaggaatatctcctggcccccagtgagaagccccgactcgggggatggagtttcgggctaaagatcccttccgaggctggcggtgctaatggaaatatcagtaaacctccaaccctagcgaaagtgtggtataatcagaaggggttccattctctgccttcttatttaaatcatctcaataacctgatcctctggcagcacctcccccctaccgtcgactggcgccaatatggcattacattgtacagtcatccttacgggggagcgttattaaacaaggataaaattttggagtctattcgacagtgtggagttgctctgtgtattgtgttgggatttagcatcttatccgcctcaattggttccagtgtcgttagagacagagtgattggagccaagaggctgcagcacatttctggactggggtacaggatgtactggtttacaaatttcctctatgatatgctgttttacctggtgtcagtgtgcctgtgcgtcgcagtcattgtagcattccagctcaccgctttcacctttcggaaaaacctcgccgccacagccttgctcctttctcttttcggctacgcaaccctgccatggatgtaccttatgagccgcatctttagttcctccgacgtcgcctttatatcctacgtgagtttaaatttcatatttggcctgtgtacaatgttaataaccatcatgcctcgtctactggccataatttctaaagcaaagaaccttcagaacatttacgatgtcttaaaatgggtatttactatcttccctcaattttgcctgggtcagggcctggtggagctctgttataaccagataaagtacgatttaacacataactttgggatagattcgtacgtgtccccatttgaaatgaactttctgggatggatcttcgtccagctcgcctcacagggtacagtcttgctgctgctgcgtgttctcctccattgggacctgctccgatggcccagagggcatagtactctgcagggaactgtcaagagcagtaaagataccgacgtggagaaggaggagaaacgggtgtttgaggggaggacaaatggggatatcctggtgctgtacaatctgtcaaaacactaccgaaggttctttcaaaacatcattgcggttcaggacatctcactcggcatccccaagggtgaatgttttggacttctcggagtgaatggcgctgggaaatctacaacatttaagatgcttaacggtgaagtatcactaacatctggacacgccatcattaggacccccatgggtgacgccgttgacctgtcctctgcaggcaccgctggagttctgattggatattgcccacaacaggacgctttagatgagttgctgacagggtgggaacatctgtactactactgctctttaagaggaatcccccgacaatgtatacctgaagtggcgggagacttgattcgccggttgcatttggaagcacatgccgacaaaccggtcgcgacctactccgggggaacaaaaaggaagttatccacagccctggctctagtgggaaagccagacattctgctcctggacgaaccttcctcagggatggacccctgttcaaagcggtacttgtggcagaccatcatgaaggaggtgcgcgaaggttgtgccgctgtgctaacttctcactccatggaggaatgtgaagcattgtgtacccgccttgcgattatggtgaacggttctttcaagtgcttaggctcaccccagcacatcaagaacaggttcggcgacggatacacagttaaggtgtggctatgcaaagaggccaatcagcactgtacggtatccgatcacttgaagctctacttcccagggatacagttcaagggccaacacctgaatctgctggagtatcatgtgccgaagcgctggggctgccttgctgatctgtttaaagtaatcgaaaacaataagacattccttaacatcaagcattactccataaatcagaccaccctcgagcaggtgttcattaactttgcaagcgagcaacagcaaactttgcagagtacactggaccctagcacagactcacatcatacgcatcacctcccgatctag

SEQ ID NO: 305701 - DNA, 2367 bp, Artificial Sequence
  derived and/or modified sequence
atgggcctgttcatggtaagacccttggctaccgaatacccgcctctgcgtcttacaccaggccactatcagcgggctgagacgtacttttttaggaaaaactctagttgctggagaaccgaccctttcagccaccccgaatttcaggattcatgcggatgtctgaagtgccccaatcgatctgccagtgcgccatacttgactaaccacctaggccacactctgctgaacctgtccgggttcaatatggaggaatatctgctggcaccatctgagaaacctaggctgggtggatggagtttcggactcaaaatccccagcgaagctggtggagccaacggtaatatctcaaagcccccaacgctggccaaagtttggtataaccagaaagggtttcatagcttgccttcatatcttaatcacctcaataatctgattctctggcaacacttaccccctacggtggattggcggcaatacgggattactttgtactcccacccctatggcggtgcgctgttaaataaggataagatcctagagagcattagacagtgtggcgtggccctgtgcatcgtcctgggcttctcaattttatcggccagtattggctcttccgtcgtgcgtgacagagtgatcggagccaagcgcctgcaacacatttccggtctgggatatagaatgtattggtttaccaatttcctgtacgacatgttattttatctcgtctccgtttgtctgtgcgtcgcggttatcgtcgcctttcagctcactgccttcacattccggaagaacttggccgctacagcgttgttgctgtctctgtttggatacgcgacattaccatggatgtatctaatgtccagaatattcagttccagtgatgtcgcatttatcagctatgttagtctgaactttatcttcggcctctgcactatgctaatcaccattatgccccgtctgctagctatcatctctaaagccaagaatctgcagaatatctacgacgtgcttaaatgggttttcactatatttccccagttttgcctggggcaggggctcgtggaactctgctacaatcagatcaagtatgacctcacccacaacttcgggatcgatagttacgtaagcccatttgagatgaacttccttggttggattttcgttcagctggcatctcagggcactgtgctcctactgttacgtgtactgctccattgggatctcctcagatggcctcggggtcattccaccctacaagggacagttaagagctcaaaggatacggacgttgagaaagaggagaagcgggtgtttgaaggcagaacaaatggtgatattcttgtgctgtacaacctgtcgaaacactacaggaggttctttcagaatattatagccgtgcaagatatttccctcggcatacctaagggtgagtgtttcggcctgctgggcgtcaatggggctggcaagtcaacaactttcaagatgctcaatggagaggtgtccctgacaagtgggcacgccattattagaacccccatgggtgatgcggtcgacctgagttcagcgggaaccgcaggcgtcctgattggatactgcccgcagcaggatgccctggacgagctgctcacaggatgggagcacctgtactactattgtagcctgcggggtatacctagacagtgtatccccgaggtcgccggtgatcttattagacgcctgcacctggaggcccatgccgataaaccggtcgccacctactccggcggaaccaagcggaagctctccacagccctcgccttggtgggaaaacctgacatcctgcttctcgatgaaccatccagtggaatggacccgtgttcaaaaaggtacctgtggcagactattatgaaggaggtaagagagggatgcgcagctgtacttacctctcatagcatggaggaatgcgaagccttgtgcactaggctggcgattatggttaacggctccttcaaatgcctgggctcaccacagcacatcaaaaaccgttttggggatggctatacagttaaggtctggctctgcaaggaggctaaccagcattgtacagtgtcagaccacctgaaactgtactttccgggaattcagtttaaggggcagcaccttaacctgctggagtaccatgtaccaaaaaggtggggctgcttggccgacctgtttaaagtgatcgagaataataagacttttctgaatatcaagcattatagtattaatcaaactaccctcgagcaagtgttcattaatttcgcctccgagcagcaacagaccttacagagtactctggatccgagcacggacagtcaccacacacaccatctgccaatctag

SEQ ID NO: 305702 - DNA, 4480 bp, Artificial Sequence
  derived and/or modified sequence
gtgcagggcgtccagctgctccgcgcacaagtggccgcgatcctggcccggaggctccgccgcacgctgcgcgccgggaagagcaccctcgccgacctgctgctgccagtcctcttcgtggccttggccatgggcttgttcatggtgagacccctggccaccgagtaccctcccctcagactcacacctggacattaccagcgggccgagacctactttttcaggaagaattcttcatgctggcgcacagatcccttttctcacccagaattccaggattcatgtggctgcctgaagtgtccaaatagaagtgctagtgctccctacctgaccaaccacctgggccacacactgttgaatctctcaggcttcaatatggaggagtacttgctggcaccatctgaaaaaccaaggcttggaggttggtcttttggattaaaaatccccagtgaagctggaggtgcaaatggaaacatatcaaaacccccaactctggcaaaggtgtggtataatcagaagggttttcattccctaccttcctacttaaatcatctaaacaaccttattttgtggcagcacctaccccctactgtggactggagacaatacggaataacactctacagccacccatatggaggggccttgctgaacaaggacaagatcctggagagcatccgtcagtgtggagtggccctctgcatcgtgctgggattctccatcctgtctgcatccatcggcagctctgtggtgagggacagggtgattggagccaaaaggttgcagcacataagtggccttggctacaggatgtactggttcacaaacttcctatatgacatgctcttttacttggtttccgtctgcctgtgtgttgccgttattgtcgccttccagttaacagcttttactttccgcaagaacttggcagccacggccctcctgctgtcacttttcggatatgcaactcttccatggatgtacctgatgtccagaatcttttccagttcggacgtggctttcatttcctatgtctcactaaacttcatctttggcctttgtaccatgctcataaccattatgccccggttgctagccatcatctccaaagctaagaatttacagaatatctatgatgtcctcaagtgggtctttactatttttcctcaattctgtcttggtcaaggactggtagaactctgctataatcagatcaaatatgacctgacccacaacttcggcattgattcctatgtgagtccctttgagatgaactttctgggctggatcttcgtgcaactggcctcgcagggcacagtacttctcctcttgagggttctgctacactgggaccttctgcgatggccaaggggtcattctactctccaaggcacagtcaaatcttctaaggatacagatgttgaaaaagaggaaaagagagtgtttgaaggaaggaccaatggagacattcttgtgttatacaaccttagtaaacattatcgacgctttttccagaatattattgctgtgcaagatattagtttgggcataccaaaaggagagtgctttggacttctaggggtgaatggagctgggaagagcacgactttcaaaatgctgaatggtgaagtttctctaacttcaggacatgctatcatcaggactcccatgggagacgccgtggacctgtcttctgctggcacggcaggcgtgctcattggctactgtccccagcaggatgccctggacgagcttctgactggttgggaacatctctattattactgtagcttacgcgggattccaaggcagtgcatccctgaggttgctggagacctcatcaggcgcttacacctcgaagcccacgcggacaaacctgtggccacctacagtgggggaaccaagcggaaactctctacagccctggccctggtggggaaacctgacattcttttattggatgagcccagctctgggatggatccctgctctaagcggtacctgtggcaaacaataatgaaggaggttcgggaaggctgtgctgcggtgctgacctcccacagcatggaggagtgtgaggctctttgcacaagactggccataatggttaacggcagcttcaaatgtcttggttctcctcagcacatcaaaaataggtttggtgatggttatacagtcaaagtttggctctgtaaggaagcaaatcaacattgcactgtttctgaccacttgaagctttattttccaggaattcagttcaagggacagcacctgaatttattagaatatcatgtgccaaaaagatggggatgcctagctgacttgttcaaagttatagagaacaataaaaccttcttgaatattaagcattattccattaaccaaaccactttggagcaggtatttattaattttgcttctgagcagcagcaaactctacaatctactcttgatccatccactgacagtcaccacacacatcacttgcccatctgagcactaaagaagtttccataaggaataaaaccttgtcttccattacaattaacagtcaaggataaaacaagcacgcgcacaatcaaggagctggaacacactctccaggccgtcaaattattctcttgttcattttctattttgaatctccttgttagttaataaccaccaaatggaaaggtcattctttctgcagacttttggggagctcctccaaaacatttgttctctttaccatgccagatggacaccagcttctttgtgacaaaggcatgaatgatttgacagtgtccaaactgagacattctggagctggaaagcctgtcacactagagtgtgtgtgacatgtccactctaaacatgtcacttttctgttaagaaaactgagccccctccccacaggttaaaaaactttagtaacttgtttgtatagaaaatagtaacaaggactattttctattgttgtcatctatttactagatacatgtttttaatgattttaatgtaagcttttattaatactgatgacattatatggtatgatatgaaaaaatcaccaattttttacatataaaagatacctttttaaaaaaataggttttaagagctcttttagtatacactttagcaaaattaattaaattgaactagttactctgtatcaattacagtagttctaccagaatctcccaggttataatttatgagggtagagaaataaaatgtagatgcattttctttttcttcatttggatgaataattactgttttttgttattctaagtcagtgtttttcaaagcgtagtggtccccatattagctgcattgccatcttctgggagcttgcaagaaatgtacattctcaggatccactccagacctattgaatctcaaattctggggcttaaacaagcacattccaagttaagaaccaatgacctaagggaatgtctggttacctcctagttatacaagcaaaatctgcatagtatgtagtcttttttatttatttattttttttttttgaggcggagtctcgctctgtcacccaggctggagtgcagtggcgcgatgtcggctcactgcaagctccgcctcctgggttcacgccattctcctgcctcagcctccccagcagctgggactacaggcacacatcgccacacccggctaatttttagtatttttagtagagacggggtttcaccgtgttagccaggatggtctctatctcctgaccttgtgatccgcccccctccacctcccaaagtgctgggattacaggcgtgagccaccgtgtccggccgtagtttattttaaaatatatttttaaaagctttgtaaaaattatgtcattctcagaattgttgtcttcaaagcattgtcagatgtagagtgctcagatgtggctcttaaagactatatacatctgaatttttcatcctatagttagtaagatgcataaaatcaatccactactgaaatagtttccagtcagacatttctgagttcagacatttctcaacattcttttaacaacatttttctgaatcctcaatagaaaatcacattaatcttattttaaaatttggcctttttcaacactaacgttgagtaccggtagcttgtgatcaaaggcatatacttccttatgagatttctttactaaagcaagatttcattaaatctctatttcctaaatatcattctatacaaaagatattttttaaacggtaaggattaagacaatcactgatagctttgttgtgagcaattttgattcccatgtatcacatgaattacacttccttaaataaattacagtttatggctgtatgatttattctctaattctaacatagtctagttgtcaaaaggaaatatgtaatctttttatgattgttgaatcaataaataccaatttgtgaaacatgaatgtgtttaaactgcagtgaataaatgagatgtgctttaatttaacccg

SEQ ID NO: 305703 - DNA, 2367 bp, Artificial Sequence
  derived and/or modified sequence
atgggcctgttcatggtgagacccctggccaccgagtacccccccctgagactgacccccggccactaccagagagccgagacctacttcttcagaaagaacagcagctgctggagaaccgaccccttcagccaccccgagttccaggacagctgcggctgcctgaagtgccccaacagaagcgccagcgccccctacctgaccaaccacctgggccacaccctgctgaacctgagcggcttcaacatggaggagtacctgctggcccccagcgagaagcccagactgggcggctggagcttcggcctgaagatccccagcgaggccggcggcgccaacggcaacatcagcaagccccccaccctggccaaggtgtggtacaaccagaagggcttccacagcctgcccagctacctgaaccacctgaacaacctgatcctgtggcagcacctgccccccaccgtggactggagacagtacggcatcaccctgtacagccacccctacggcggcgccctgctgaacaaggacaagatcctggagagcatcagacagtgcggcgtggccctgtgcatcgtgctgggcttcagcatcctgagcgccagcatcggcagcagcgtggtgagagacagagtgatcggcgccaagagactgcagcacatcagcggcctgggctacagaatgtactggttcaccaacttcctgtacgacatgctgttctacctggtgagcgtgtgcctgtgcgtggccgtgatcgtggccttccagctgaccgccttcaccttcagaaagaacctggccgccaccgccctgctgctgagcctgttcggctacgccaccctgccctggatgtacctgatgagcagaatcttcagcagcagcgacgtggccttcatcagctacgtgagcctgaacttcatcttcggcctgtgcaccatgctgatcaccatcatgcccagactgctggccatcatcagcaaggccaagaacctgcagaacatctacgacgtgctgaagtgggtgttcaccatcttcccccagttctgcctgggccagggcctggtggagctgtgctacaaccagatcaagtacgacctgacccacaacttcggcatcgacagctacgtgagccccttcgagatgaacttcctgggctggatcttcgtgcagctggccagccagggcaccgtgctgctgctgctgagagtgctgctgcactgggacctgctgagatggcccagaggccacagcaccctgcagggcaccgtgaagagcagcaaggacaccgacgtggagaaggaggagaagagagtgttcgagggcagaaccaacggcgacatcctggtgctgtacaacctgagcaagcactacagaagattcttccagaacatcatcgccgtgcaggacatcagcctgggcatccccaagggcgagtgcttcggcctgctgggcgtgaacggcgccggcaagagcaccaccttcaagatgctgaacggcgaggtgagcctgaccagcggccacgccatcatcagaacccccatgggcgacgccgtggacctgagcagcgccggcaccgccggcgtgctgatcggctactgcccccagcaggacgccctggacgagctgctgaccggctgggagcacctgtactactactgcagcctgagaggcatccccagacagtgcatccccgaggtggccggcgacctgatcagaagactgcacctggaggcccacgccgacaagcccgtggccacctacagcggcggcaccaagagaaagctgagcaccgccctggccctggtgggcaagcccgacatcctgctgctggacgagcccagcagcggcatggacccctgcagcaagagatacctgtggcagaccatcatgaaggaggtgagagagggctgcgccgccgtgctgaccagccacagcatggaggagtgcgaggccctgtgcaccagactggccatcatggtgaacggcagcttcaagtgcctgggcagcccccagcacatcaagaacagattcggcgacggctacaccgtgaaggtgtggctgtgcaaggaggccaaccagcactgcaccgtgagcgaccacctgaagctgtacttccccggcatccagttcaagggccagcacctgaacctgctggagtaccacgtgcccaagagatggggctgcctggccgacctgttcaaggtgatcgagaacaacaagaccttcctgaacatcaagcactacagcatcaaccagaccaccctggagcaggtgttcatcaacttcgccagcgagcagcagcagaccctgcagagcaccctggaccccagcaccgacagccaccacacccaccacctgcccatctag

SEQ ID NO: 305704 - protein, 498 aa, Artificial Sequence
  derived and/or modified sequence
MLQCRPAQEFSFGPRALKDALVSTDAALQQLYVSAFSPAERLFLAEAYNPQRTLFCTLLIRTGFDWLLSRPEAPEDFQTFHASLQHRKPRLARKHIYLQPIDLSEEPVGSSLLHQLCSCTEAFFLGLRVKCLPSVAAASIRCSSRPSRDSDRLQLHTDGILSFLKNNKPGDALCVLGLTLSDLYPHEAWSFTFSKFLPGHEVGVCSFARFSGEFPKSGPSAPDLALVEAAADGPEAPLQDRGWALCFSALGMVQCCKVTCHELCHLLGLGNCRWLRCLMQGALSLDEALRRPLDLCPICLRKLQHVLGFRLIERYQRLYTWTQAVVGTWPSQEAGEPSVWEDTPPASADSGMCCESDSEPGTSVSEPLTPDAGSHTFASGPEEGLSYLAASEAPLPPGGPAEAIKEHERWLAMCIQALQREVAEEDLVQVDRAVDALDRWEMFTGQLPATRQDPPSSRDSVGLRKVLGDKFSSLRRKLSARKLARAESAPRPWDGEES

SEQ ID NO: 305705 - DNA, 1497 bp, Artificial Sequence
  derived and/or modified sequence
atgctgcagtgcagacccgcccaggagttcagcttcggccccagagccctgaaggacgccctggtgagcaccgacgccgccctgcagcagctgtacgtgagcgccttcagccccgccgagagactgttcctggccgaggcctacaacccccagagaaccctgttctgcaccctgctgatcagaaccggcttcgactggctgctgagcagacccgaggcccccgaggacttccagaccttccacgccagcctgcagcacagaaagcccagactggccagaaagcacatctacctgcagcccatcgacctgagcgaggagcccgtgggcagcagcctgctgcaccagctgtgcagctgcaccgaggccttcttcctgggcctgagagtgaagtgcctgcccagcgtggccgccgccagcatcagatgcagcagcagacccagcagagacagcgacagactgcagctgcacaccgacggcatcctgagcttcctgaagaacaacaagcccggcgacgccctgtgcgtgctgggcctgaccctgagcgacctgtacccccacgaggcctggagcttcaccttcagcaagttcctgcccggccacgaggtgggcgtgtgcagcttcgccagattcagcggcgagttccccaagagcggccccagcgcccccgacctggccctggtggaggccgccgccgacggccccgaggcccccctgcaggacagaggctgggccctgtgcttcagcgccctgggcatggtgcagtgctgcaaggtgacctgccacgagctgtgccacctgctgggcctgggcaactgcagatggctgagatgcctgatgcagggcgccctgagcctggacgaggccctgagaagacccctggacctgtgccccatctgcctgagaaagctgcagcacgtgctgggcttcagactgatcgagagataccagagactgtacacctggacccaggccgtggtgggcacctggcccagccaggaggccggcgagcccagcgtgtgggaggacaccccccccgccagcgccgacagcggcatgtgctgcgagagcgacagcgagcccggcaccagcgtgagcgagcccctgacccccgacgccggcagccacaccttcgccagcggccccgaggagggcctgagctacctggccgccagcgaggcccccctgccccccggcggccccgccgaggccatcaaggagcacgagagatggctggccatgtgcatccaggccctgcagagagaggtggccgaggaggacctggtgcaggtggacagagccgtggacgccctggacagatgggagatgttcaccggccagctgcccgccaccagacaggacccccccagcagcagagacagcgtgggcctgagaaaggtgctgggcgacaagttcagcagcctgagaagaaagctgagcgccagaaagctggccagagccgagagcgcccccagaccctgggacggcgaggagagctag

SEQ ID NO: 305706 - DNA, 1497 bp, Artificial Sequence
  derived and/or modified sequence
atgctacaatgtcgacctgcacaggaattctcctttggtcccagggccttaaaagacgccctcgtgtctaccgacgcagcgctgcaacagttgtacgtctcagccttttcccctgcagagcgactgttcctggctgaagcctacaatcctcaaaggacgctcttctgcacgctcttaatacggactggatttgactggctgctgtctcgccccgaggccccggaggactttcagaccttccatgcttctctgcagcaccgcaagccacgtctggcacgaaagcacatttatctgcagcccatagatctgagtgaggagcccgtgggcagctcactcctgcatcagctgtgcagttgtactgaggccttcttcctgggcctccgcgtcaagtgcctacctagcgtggccgccgcctccattcgctgttcctctcgaccgtcacgcgactctgatcgcctgcagctgcatactgatggaatccttagttttttgaaaaataacaaacccggggacgcactgtgtgtgctgggtttgaccctgagcgacctttacccccacgaggcttggtccttcaccttctccaagtttctccccggccacgaggtgggggtatgctcctttgccaggttctctggggagttccctaagtctggcccgagcgcccccgacttagctctggtggaggctgccgcggatgggccagaggcgcccctgcaggatagagggtgggccctctgcttctcagctcttggaatggtgcaatgttgcaaggttacctgtcatgaactttgtcatctgctcggattaggtaattgtcgatggctgaggtgcctgatgcagggagcactaagcttggatgaggcccttcggagacccctggacctgtgcccgatctgtttacgcaaactgcagcatgtcttaggcttccgcctcattgaacggtaccagaggctgtatacctggactcaggccgtcgttggtacgtggccatcacaagaagcaggcgaaccctccgtgtgggaagacacgcctccagcaagcgccgatagcggaatgtgctgcgagtcagactccgaaccaggtacctccgtttccgagccgttaacacccgacgcgggcagccatactttcgcttccggtcctgaagaggggctctcctacttagcggcttcagaggcacccctcccgccagggggaccggcagaggcaataaaggagcacgagagatggctcgccatgtgcattcaggcattgcagcgagaagtggccgaagaggatctggtccaggtagatagggccgttgatgccctggatcggtgggaaatgtttacaggtcagctgcccgcaacacggcaggaccccccttccagtagggactctgtcggcttacggaaagtgcttggggacaagttttctagcctgaggcggaagctgtccgcgcggaagctggctcgggctgagagcgcgccgcgaccgtgggacggagaagagagttag

SEQ ID NO: 305707 - DNA, 1497 bp, Artificial Sequence
  derived and/or modified sequence
atgctgcagtgcaggcctgcccaggagttctcctttggcccccgggccctgaaggatgccctggtgtccacagatgctgccctgcagcagctgtatgtgtctgccttcagccctgctgagcggctcttcctggccgaggcctacaacccccagaggaccctcttctgcaccctgctgatcagaacaggctttgactggctgctgagcaggcctgaggcccctgaggacttccagaccttccacgccagcctgcagcacaggaagccccggctggccaggaagcacatctacctgcagcccatcgacctgtctgaggagcctgtgggcagcagcctgctgcaccagctgtgcagctgcacagaggccttcttcctgggcctgcgggtgaagtgcctgcccagcgtggccgccgccagcatccgctgcagcagccggcccagccgggacagcgaccggctgcagctgcacacagatggcatcctgtccttcctgaagaacaacaagccaggagatgccctgtgtgtgctgggcctgaccctgagtgacctgtacccccatgaggcctggagcttcaccttcagcaagttcctgcccggccacgaggtgggcgtgtgcagctttgcccgcttctctggagagttccccaagagcggccccagcgccccagacctggccctggtggaggccgctgctgatggccctgaggcccccctgcaggaccggggctgggccctgtgcttcagcgccctgggcatggtgcagtgctgcaaggtgacctgccacgagctgtgccacctgctgggcctgggcaactgccgctggctgcgctgcctgatgcagggcgccctgagcctggatgaggccctgcggcggcccctggacctgtgccccatctgcctgaggaagctgcagcacgtgctgggcttccgcctcatcgagcgctaccagaggctgtacacctggacccaggccgtggtgggcacctggcccagccaggaggccggggagcccagcgtgtgggaggacaccccaccagccagcgctgacagcggcatgtgctgtgagagtgacagcgagcccggcacctctgtgtctgagcccctgaccccagatgctggcagccacacctttgccagcggccctgaggagggcctgagctacctggccgccagcgaggcccccctgcccccaggcggccctgctgaggccatcaaggagcacgagcgctggctggccatgtgcatccaggccctgcagcgggaggtggccgaggaggacctggtgcaggtggacagagctgtggatgccctggaccgctgggagatgttcaccggccagctgcctgccacccggcaggacccccccagcagccgggacagcgtgggcctgaggaaggtgctgggggacaagttcagcagcctgcggaggaagctgagcgccaggaagctggcccgggcagagagcgccccccggccctgggatggagaggagagctag

SEQ ID NO: 305708 - DNA, 1497 bp, Artificial Sequence
  derived and/or modified sequence
atgctgcagtgccggcccgcccaggagttcagcttcggcccccgggcactgaaggacgccctggtcagcacagatgcagctctgcagcagctgtacgttagcgccttcagcccagcggagcgcctttttctggcggaggcctataaccctcagcgtacactgttttgcacgttgctgattcgaaccggatttgactggttactgtccaggcctgaagccccagaagacttccagacattccatgcatctttgcagcacagaaagccgcggttggctcggaaacacatctatctgcagcctattgacctgtccgaagaaccagtgggatcaagcctactccatcagctctgctcttgcacggaagccttctttctgggactcagggttaagtgcctgccctcggtggccgcagcctccatcaggtgttcaagtcgccctagtcgggattctgacaggcttcagctgcacaccgatggaattctttcctttctcaagaacaacaaacctggtgacgctctttgtgttctgggcctgactctgagtgatctttacccacacgaggcgtggtccttcacctttagcaagttcctgcctggccacgaagtaggcgtgtgctccttcgcacgcttcagtggagagttccctaagagcggaccttcggctcctgacctggccctggtggaagctgccgctgatggaccagaagccccccttcaggatcgcgggtgggctctctgtttttctgccctcggcatggtgcagtgctgtaaggttacgtgtcatgaactgtgccatttgcttgggctgggaaactgccggtggctgcgctgcctgatgcagggggccctgagtctggacgaggccctgaggcgacccctggacttgtgtcccatttgtttgagaaaactacaacacgtgctgggcttcagattaattgaaagatatcagagattatatacttggacacaggctgtggtggggacatggccaagccaagaagcaggcgagccttcagtgtgggaggacactcctccagctagcgctgactccggaatgtgctgtgagtccgattcagaaccgggcaccagcgtgtctgagccgttaactccagacgcgggctctcacacatttgcaagcggacctgaggagggcttgagctatctggccgcttctgaagccccactgcctccagggggacctgccgaggccatcaaagagcatgagcgatggctggccatgtgcatacaggcgttgcagcgcgaagtcgcggaggaggatctggtgcaagtcgacagagcggtcgacgctcttgacagatgggagatgttcactggtcaactgcccgctaccagacaggacccaccctccagtcgggacagcgtcggcctcagaaaagtgctaggcgacaagttcagcagcctgcgcagaaaactcagtgccagaaaactcgcgcgtgcagagtcggctccccggccctgggatggcgaagaatcctag

SEQ ID NO: 305709 - DNA, 5516 bp, Artificial Sequence
  derived and/or modified sequence
gattggtgctgtgacctgcggcagcacagccgcctgcgttgagcgcccacggtgggctggactttgcactaggtgctgacaggaccggcagaggtggccactgccctcgtccccagcctgcactcctgggcgaaggctgacgctgaacagggtgctgtgggcccagaagcgcccatgcctgagagcgtccaggaccaggcagagctgggccttaagggcccttggaccagtgtctgtctgcagggagcccccggtagccactcggatcagcccgagggaagattctggacgagaccgtggccgtcccccgggtggcccatggacagcagcaggggctcccaggagtggccaggccctgcccgcccaccatgctgcagtgtagacccgcacaggagttcagcttcgggccccgggccttgaaggacgctctggtctccactgacgcagccctgcagcagctgtatgtgtccgccttctcccctgccgagcggctcttcctggccgaggcctacaacccgcagaggacgctcttctgcaccctgctcatccgcacgggcttcgactggctcctgagccgacccgaggctcccgaggacttccagaccttccacgcctccctgcagcaccggaagccccgcctggctcggaagcacatctacctacagccgatagacctgagcgaggagccggtgggaagctccctgctgcaccagctgtgcagctgcacagaggccttcttcctgggcctgcgcgtcaagtgcctgccgtcggtggcagccgcgtccatccgctgctcctcgcggcccagccgggactctgacaggctccagctccacacagacggcatcctgtccttcttgaagaacaacaagccaggggacgcgctgtgtgtgctgggcctcacactgtctgacctgtacccccatgaggcctggagcttcaccttcagcaagttccttccagggcacgaagtgggcgtctgcagcttcgcccggttctcaggggaattcccgaagtcggggcccagcgcccctgatctggccctggtagaggcagcagcagacggccccgaggcccccctgcaggacaggggctgggccctgtgcttcagtgccctggggatggttcagtgctgcaaggtcacgtgccacgagctctgccaccttctgggcctggggaactgccgctggctccgctgcctcatgcagggtgcgctcagcctggacgaggccctgcggcggcccctggacctctgtcccatctgcctgaggaagctgcagcatgtcctgggtttcaggctcatcgagaggtaccagagactctacacctggactcaggcggtggtggggacgtggcccagccaggaggcgggggagccgtcagtgtgggaggacaccccgcctgccagcgccgactcgggcatgtgctgtgagagtgactcggagcccggcaccagtgtgtcggagcccctcacccctgatgccgggagtcacaccttcgcctcggggccagaggaagggctgagctacctggcagcctcagaggctccgctgccacctgggggccctgcggaggccatcaaggagcatgaacggtggctggccatgtgcatccaggccctgcagcgggaagtggcagaggaggacctggtgcaggtggacagagccgtggacgccctcgaccgctgggagatgttcacgggccagctcccggccaccaggcaggacccacccagcagcagggacagcgtggggctgcgcaaggtgctgggggacaagttctcctccctgaggaggaagctgagtgcccgaaaactcgccagagcagagtcggccccccgtccctgggatggggaagagagttagtacagcaggggctgccctacgtctccttccctaaggatgctggccagcactgtccagtagctgaggccactactgacctgccagggataaagaggaagggtctgcctgggtggtggctcaggcctgtcatcccatcactttgagaggccaggagtttgagaccagactgggcaacatggtgagactctgcctctacaaaagaaaaattaaaaaattagctggatgaagtggttcatgcctgtgttcccagctattcaggaggctgaggtgggaggattgcttgagcctaggaggtcgaggctgcagtgggatgtgatcataccactgtactgcagtctgggccacacagaaagactgtctccagaaaaaaaaaagttctttggagaagccacagaccacctgtcttcaggcgcctccttcaactcctgagtcccagccagccgctcccaggggcctgcacacatggagaggcctccctgatcctgggtgcttctcgtggagtacaagccggactgtgctgaggttgggacagagccccctcccctgcagaggcagaaggaagcagcgtgcgtcctgtctccttccaggctgtgggcctgcccttcagttatttatagctggagctggagaggctggctcagatgaggagtgaccccgggggcacacaggctccacactgccacccagcttccaaggctgagtctcctccctaacggggaagtgacggggttttgtctctatcatctcaggcgtcaaccacatgcacacacacactgtcacgttctgtggcgctaacagcatcctgatcctgacggacttcaccggggctctccaggcatctcttctgacaaacactgcaggaggtgagggtgtctgacgtgcactgagggcagaggcccccttattcctgaggcggctacagctcaccgtggggaagatcaactgtggtgatgtttttgggacagtttcttggcaaaggtggccgcgctgtcagtaccaagtagctggaggtggtgatcagatgatctgtctttcctttttttttcggtctagttctgtcagttgctgagagaggggtattattgccatggctgggcgtttgatctgtctccctttagttttgccggattttgcttcctgcactttgaagctcctttacgtccctgcacatttgattgttgtgtcttcctgaggaattgacccttttattgtcacacgtaccccctcagcctgtggtggagggtctctgggagagagacttccggttctgacagcggaatcccttcggagtgacgagggcggggtcacagctcgcgcaccctcatctggagagaggcaagaacagggcagcttggaccttttgtgggtgggtggctcacacggttatggagggcttctaagaaaaacaaaatacaaaactaaaactagaagggctatgcaggtgaggtgggctgaggcttccttgtgaatctgacattggtggaggccgactgaaggctcccggtcctggtcccactccgtgttgacttcagagaagcaaagatgcagctcagaagtagcattaggatcttcgtcccgttctcttttgcgtagcttcaaaaaggcgtaacagtgacctgggaggggagatgaagagctaggcctttcagaaagtgaccaatggaaggtgccggcagagcaccctgcagtaacagaaggtgaaagccggagcctggtggctgttgctgcaaacaaccacccaaaacttagtggcttaaaatcaccacagtctagctcatgaatctgtaacttgggcagagctcggtggagacggtttgcccctgtggctcgactggagtgttcgttcacacggctgccaagtggaatttggctgggaatctcaggccttggttcctgcccacgtgagactctccatggaggaggggcatcttcttaggaaggcagctgccataccgtgaggaaacccgacaaacagggcagccagagccagacagcaggctcctggtcccagtcccggaaaatgcaaagggacaagtatgtgttgatttcagagaagctcagatgtagcattaggaccttcatccatacccttctcttttgcatggcttctaaagggcatgacagtgacctgggaggtaactgtgccagaataaagaggggagacgaaaaaaagagggtcactttcagaaagggacctgggcttcctcacaatatggcggttgccctcctaaggtggacatcgggagggtcagatggaagctctgtggcctttcctaactcggcctcacgtcacagagcgtcacctttcctgcactccacggcggcagtgacaaggaccccaccccaggttcacggggaggggacgtggcagggaatgtgagacaacacaatattgctgtggccattcatgaacagtcagtcagccccactcggcgttcactgtggggatttggctggtgcacctgcgaggtggcctgacctgttttccgatttccttcatcttctgcaaaaggttaaccgctggagtgatgcgagattaaacagaggtgataaaaatagaatgcctggctcatgctgagggtgggagcccactggggttatgaccaaagcctcggcgctctctgtacccgtgtcctttgaccctcagctgtgatgtgtgtcccaaaaaagcgttttgaagtgggaaggagcaaaccactaaaaaaaactccttttatccgcagcgtttaccaacttgcagatgtcagtgaaattttttaagacagctgttagaaggactgttttgaaatgcaactttgaggaagagaaattggtttccctcctctcccccgtgttagccccaggttctgtctgtgctgtggtgaagagtgacttgggacagtcaccaggaaagacgcaaggcagaggagagagaatgagggctgccttctcgaggaaggtcacagctcacgaatctttctaaacttaagtgctgcagaagttgaactgagattaaatttagagatgatggtttccaagacacacagggccacggttctttcagtttttaaacacgtgcaaagtccactgaattgctttctcgtctcatctgtcagaagcccctgcattcacaaggatgggtcttccagcttgacgatgacctctcttcggagagcctcacccatcttggtaagccaagtcagcggggcctcatggagctaaaaatagtttcaggtcatgacagatgttatctgtattgctgtgtgtgcgatgagtctggggaagctaacacatgccttctgaagtggctagaatacacactcccacgtcacagccatgctatgatgaaggggtgagaagcagtgtcccctctgaggcaaatctctcttcaggcagccccgcagtcctcttccgaaatctcattcttttccctctcttcctccccaaaaagcccaaactcattgtcagagtggggagaggggagaagcagcatcctgactcctgtccatggtgtgaaccctgagggcacgggacagtgagtggagctctgccaccacccgtttccagagcatgggtgaggagggagggatgccgacctgttaatatttgcttcagacctttccccgatgaacgaaatctccaaaagccttaaacataaaatggcttagtcaa

SEQ ID NO: 305710 - DNA, 1497 bp, Artificial Sequence
  derived and/or modified sequence
atgctacaatgccggccagcgcaggaattttcttttgggccacgcgcactgaaagatgcccttgtaagcaccgatgccgcactacaacagctgtacgtgagcgctttctcgcccgcagagcgcttgtttctggcagaggcatataatccccagcgcacactgttctgtactttgctcattcggaccggctttgattggctgctgagccgaccggaagcccctgaggactttcagaccttccatgcaagtctgcagcacagaaagcctcggctagccaggaagcatatctatctccagcctatcgacctgagtgaggaacccgtgggctcttccctgttgcatcaactgtgttcctgtactgaggccttctttttggggctgcgagtgaaatgtctgcccagcgtggcggctgcttcaattcggtgcagttcacgcccaagtagagactctgatcggctgcagctacacactgacggcatcctgagctttctgaaaaacaataagccgggagatgccctctgcgttctggggttgacactgagcgatttatatcctcacgaggcatggtccttcacatttagcaagtttttgcctggtcacgaagtcggagtatgcagctttgcaagatttagtggtgagtttcctaagagtggcccaagcgcccctgaccttgctctggtggaggccgctgctgacggtcctgaggccccacttcaggatcggggatgggccctttgcttctcagccctcggtatggtgcagtgctgcaaggtgacctgtcacgaactctgccatcttttggggttgggtaactgcaggtggctcagatgtctgatgcagggcgcactctctttggacgaagccttgaggagacccctggatctgtgccccatctgcctcaggaagctgcagcacgtgctggggtttaggcttatagaacgttatcagaggctctatacctggacccaggcggtggtgggaacatggccaagccaggaggcaggagaaccgtctgtgtgggaggacacaccacctgcaagcgctgatagcgggatgtgctgtgaatctgactctgagccagggacgtctgtcagcgagccccttaccccagatgccggatctcacaccttcgcctccgggccagaggaaggactctcatatctggctgcatctgaggccccactgccgcctgggggtcccgctgaagccatcaaggagcacgaaagatggctcgctatgtgcattcaagctctgcagagggaagtagcagaggaagatttagtacaagtcgaccgggcagtggatgcactcgaccggtgggaaatgtttactggccagctgcctgccacgcgacaagatccgcctagttcgcgggacagtgtgggactgcggaaagtactaggagacaaattcagctccctgaggaggaagctctcagctcgcaaattagcccgagcggagtctgctccacgaccttgggacggtgaggaatcctag

SEQ ID NO: 305711 - protein, 796 aa, Artificial Sequence
  derived and/or modified sequence
MTNQEKWAHLSPSEFSQLQKYAEYSTKKLKDVLEEFHGNGVLAKYNPEGTIDFEGFKLFMKTFLEAELPDDFTAHLFMSFSNKFPHSSPMVKSKPALLSGGLRMNKGAITPPRTTSPANTCSPEVIHLKDIVCYLSLLERGRPEDKLEFMFRLYDTDGNGFLDSSELENIISQMMHVAEYLEWDVTELNPILHEMMEEIDYDHDGTVSLEEWIQGGMTTIPLLVLLGLENNVKDDGQHVWRLKHFNKPAYCNLCLNMLIGVGKQGLCCSFCKYTVHERCVARAPPSCIKTYVKSKRNTDVMHHYWVEGNCPTKCDKCHKTVKCYQGLTGLHCVWCQITLHNKCASHLKPECDCGPLKDHILPPTTICPVVLTLPTSGVSVPEERQSTVKKEKSGSQQPNKVIDKNKMQRANSVTVDGQGLQVTPVPGTHPLLVFVNPKSGGKQGERIYRKFQYLLNPRQVYSLSGNGPMPGLNFFRDVPDFRVLACGGDGTVGWVLDCIEKANVGKHPPVAILPLGTGNDLARCLRWGGGYEGENLMKILKDIENSTEIMLDRWKFEVIPNDKDEKGDPVPYSIINNYFSIGVDASIAHRFHIMREKHPEKFNSRMKNKFWYFEFGTSETFSATCKKLHESVEIECDGVQIDLINISLEGIAILNIPSMHGGSNLWGESKKRRSHRRIEKKGSDKRTTVTDAKELKFASQDLSDQLLEVVGLEGAMEMGQIYTGLKSAGRRLAQCSCVVIRTSKSLPMQIDGEPWMQTPCTIKITHKNQAPMLMGPPPKTGLFCSLVKRTRNRSKE

SEQ ID NO: 305712 - DNA, 2391 bp, Artificial Sequence
  derived and/or modified sequence
atgacgaaccaggaaaaatgggcgcatctgtcaccatccgaattctcccagcttcagaaatatgccgagtattctactaaaaagctcaaggacgtgcttgaggagttccatggtaatggcgttctcgctaagtataaccccgagggcaccatcgactttgaaggatttaagctgttcatgaagacattcctagaggccgagctgccggatgactttacggcccatctgttcatgtcattctctaacaagtttccccactcttctcccatggtgaaatcaaagcccgccctgctctcaggggggctccgcatgaacaagggcgccattactcccccacggactacaagtccagctaatacttgttccccggaggtgatccacctgaaagacatagtctgctatttgagcctccttgagcggggtagaccagaagacaaattggaattcatgtttaggttgtacgatacagatgggaatggcttcttagattcttccgagctcgagaatattattagccagatgatgcacgtagctgagtatctcgaatgggacgttaccgagcttaacccaatcctgcatgaaatgatggaggaaattgattacgaccatgatggaaccgtatcactggaggagtggatccagggtggaatgacaactatccccctccttgtgctgctgggtctagagaacaacgtcaaggacgacggccaacacgtgtggcgcctgaaacactttaataaacccgcatattgcaacttgtgtcttaacatgctgattggagttggcaaacagggtctgtgctgtagcttctgtaagtacacagttcacgaacgatgtgttgcccgcgccccccctagctgtataaagacttatgtcaagagcaagaggaataccgacgtgatgcatcactattgggtggaggggaactgccccaccaaatgcgataaatgccacaagaccgtcaagtgctaccaggggttaactggcctgcactgtgtatggtgtcagattacccttcacaacaagtgcgccagccacctgaagcctgaatgcgactgcggccctctgaaagatcacatcttaccacctaccaccatatgccctgtggtccttacactccctacctccggcgttagtgtgccagaggagaggcagtcaacagtgaaaaaggagaagtcagggtctcagcaacccaacaaggttattgacaaaaataagatgcagagagcgaatagcgttacagtcgatggacaggggctccaagtcacccctgtgcccgggacccatccactgttggtgttcgtcaatcctaagtccggaggcaaacagggggagagaatctacagaaaattccagtacctccttaacccccggcaagtgtactccctgtctggtaatggcccaatgcctgggctgaacttttttagagatgtgccggactttagggtgttggcctgtgggggagatgggacagtcgggtgggttctcgattgtatagagaaggcgaatgttggaaaacaccctcccgtcgctatacttcctctagggactggtaatgatctggcccggtgcctcagatggggggggggatacgagggcgaaaatcttatgaagatcctgaaggacatcgaaaattcaaccgagatcatgttagatcgatggaagtttgaggtaatcccgaacgataaggatgaaaagggtgaccccgtgccttactctataattaacaattacttcagcatcggagtcgatgcaagcatcgcccatcgttttcatattatgcgagagaaacatcctgagaaattcaattctcgcatgaagaataaattttggtacttcgagttcggcacttccgagactttttccgctacttgtaagaaactgcatgaatccgtcgaaatcgaatgcgacggcgtccaaattgacttgataaacatttcacttgaggggatagccattctgaacataccctcgatgcacgggggatccaatctgtggggtgagtctaagaaaaggaggagtcacagacggatcgaaaagaagggaagcgataagagaactacagtgactgacgccaaagagctaaaatttgcatcccaagatctctccgatcagctccttgaggttgtgggtctcgagggggccatggagatggggcagatctacaccggccttaagtcggccggcaggagattagcacagtgtagctgcgtagtcattaggacgtctaagtctctgccgatgcagattgacggagaaccctggatgcaaaccccatgtaccataaagattactcacaagaaccaagcccccatgctgatggggccaccaccaaaaacaggcctcttttgttctctggtgaaacgcacccggaatagatccaaggaatag

SEQ ID NO: 305713 - DNA, 2391 bp, Artificial Sequence
  derived and/or modified sequence
atgaccaaccaggagaagtgggcccacctgagccccagcgagttcagccagctgcagaagtatgcagagtacagcaccaagaagctgaaggatgtgctggaggagttccatggaaatggagtgctggccaagtacaaccctgagggcaccatcgactttgagggcttcaagctgttcatgaagaccttcctggaggccgagctgcctgatgacttcaccgcccacctgttcatgtccttcagcaacaagttcccccacagcagccccatggtgaagagcaagccagccctgctgagcggcggcctgaggatgaacaagggggccatcaccccacccaggaccaccagccctgccaacacctgcagccctgaggtgatccacctgaaggacatcgtgtgctacctgagcctgctggagcggggccggcctgaggacaagctggagttcatgttccggctgtatgacacagatggaaatggcttcctggacagcagcgagctggagaacatcatcagccagatgatgcacgtggccgagtacctggagtgggatgtgacagagctgaaccccatcctgcacgagatgatggaggagattgattatgaccatgatggcaccgtgtccctggaggagtggatccagggcggcatgaccaccatccccctgctggtgctgctgggcctggagaacaacgtgaaggatgatggccagcacgtgtggaggctgaagcacttcaacaagccagcctactgcaacctgtgcctgaacatgctgattggagtgggcaagcagggcctgtgctgcagcttctgcaagtacacagtgcatgagcgctgtgtggcccgggccccacccagctgcatcaagacctacgtgaagagcaagaggaacacagatgtgatgcaccactactgggtggagggcaactgccccaccaagtgtgacaagtgccacaagacagtgaagtgctaccagggcctgaccggcctgcactgtgtgtggtgccagatcaccctgcacaacaagtgtgccagccacctgaagccagaatgtgactgtggccccctgaaggaccacatcctgccccccaccaccatctgccctgtggtgctgaccctgcccaccagcggcgtgtctgtgcctgaggagcggcagagcacagtgaagaaggagaagagcggcagccagcagcccaacaaggtgattgacaagaacaagatgcagagggccaacagcgtgacagtggatggccagggcctgcaggtgacccctgtgcccggcacccaccccctgctggtgtttgtgaaccccaagagcggcggcaagcagggcgagcgcatctacaggaagttccagtacctgctgaacccccggcaggtgtacagcctgtctggaaatggccccatgcctggcctgaacttcttcagagatgtgcctgacttccgggtgctggcctgtggaggagatggcaccgtgggctgggtgctggactgcatcgagaaggccaacgtgggcaagcacccccctgtggccatcctgcccctgggcactggaaatgacctggcccgctgcctgcgctggggcggcggctatgaaggagagaacctgatgaagatcctgaaggacatcgagaacagcacagagatcatgctggaccgctggaagtttgaggtgatccccaatgacaaggatgagaagggggaccctgtgccctacagcatcatcaacaactacttcagcattggagtggatgccagcatcgcccaccgcttccacatcatgagggagaagcaccctgagaagttcaacagcaggatgaagaacaagttctggtactttgaatttggcaccagcgagaccttcagcgccacctgcaagaagctgcatgaatctgtggagattgaatgtgatggagtgcagattgacctgatcaacatcagcctggagggcatcgccatcctgaacatccccagcatgcacggcggcagcaacctgtggggcgagagcaagaagaggaggagccaccggcgcatcgagaagaagggcagtgacaagaggaccaccgtgacagatgccaaggagctgaagtttgccagccaggacctgagtgaccagctgctggaggtggtgggcctggagggcgccatggagatgggccagatctacacaggcctgaagtctgctggccggcggctggcccagtgcagctgtgtggtgatccgcaccagcaagagcctgcccatgcagattgatggagagccctggatgcagaccccctgcaccatcaagatcacccacaagaaccaggcccccatgctgatgggccccccacccaagacaggcctcttctgcagcctggtgaagaggaccaggaacagaagcaaggagtag

SEQ ID NO: 305714 - DNA, 2391 bp, Artificial Sequence
  derived and/or modified sequence
atgaccaaccaggagaagtgggcccacctgagccccagcgagttcagccaactgcaaaagtatgccgaatatagtaccaagaagctgaaagatgtcctcgaggagttccacggcaatggcgtccttgccaagtataatcccgaaggaacaattgattttgagggctttaagctgtttatgaaaacgttccttgaagcagagttgcctgacgacttcactgcccacttgtttatgtctttctctaacaagttccctcacagtagcccaatggtgaaatctaagccggcactgcttagtggtggccttaggatgaacaagggagctatcacacctccccgcacaacatctcccgccaacacctgcagccccgaggtgatccacctcaaggatatagtgtgctacctttctttgttggaaagaggcagacccgaagacaaactggagttcatgttcagactgtatgacactgacggaaacggcttcttggattcttcagagctggagaacatcatttcccagatgatgcacgtggctgagtacctggaatgggatgtgaccgagctgaatcctattctgcatgaaatgatggaggagattgattacgatcacgacggtacagtaagtctggaggagtggattcaaggtggaatgaccaccattcctctccttgtgttgcttggcctagagaataacgtgaaagacgacggacagcatgtctggcggcttaagcactttaataagcctgcgtactgtaacctctgcctgaacatgctgatcggcgtgggcaagcagggattatgttgcagcttctgtaagtataccgtgcacgagcgatgcgtggcccgggcaccgcctagctgcataaagacttatgtcaaatctaaacgcaataccgatgtgatgcaccattattgggttgaaggcaactgccccacgaagtgcgacaagtgtcacaagaccgtgaagtgttatcaggggttaaccggtttacattgtgtgtggtgccagattactctgcacaacaaatgcgccagccacctgaaacccgagtgcgactgcgggccccttaaggaccatatactcccacctacaacaatttgtcctgtagtgttaacattgcctactagcggtgtcagtgtccccgaggagcggcaaagtaccgtaaaaaaagagaagagtggatctcagcagccgaacaaggtcatcgacaagaacaagatgcagcgggccaatagcgtgaccgtggacggacagggactgcaggtgactccagtgcctgggacacacccactgctcgtgttcgtgaaccctaagtccggaggcaagcaaggcgagcgcatttaccggaagttccagtacctgctgaacccaaggcaggtgtattccttgagcgggaacgggcccatgcccggcctgaactttttccgggatgtgccagattttcgggtcctggcttgcgggggggacggaaccgtgggatgggtattggattgcattgagaaagcaaatgtggggaagcatccacccgtggctatcctccctcttggcacaggcaacgatttagccagatgtcttaggtggggtggcggttatgagggcgaaaatttaatgaagatactcaaagacattgaaaacagcacagaaatcatgctggacaggtggaagtttgaggtcattccaaacgacaaggatgagaaaggcgaccccgtcccgtattctattattaacaattacttctcaatcggtgtggatgcttctatcgcacatcggttccatatcatgagagagaagcaccctgaaaagttcaattccaggatgaagaataagttctggtattttgagttcggcacatcagaaacttttagcgccacgtgcaagaagttacatgaaagcgtcgagatcgagtgtgacggagtgcagatcgacctgatcaacatttctttagagggcattgccatactgaatatccccagtatgcacgggggaagtaacctgtggggagagtccaagaaacgtcggtcacatagacgcattgaaaaaaaaggtagcgacaagagaactaccgtgactgacgctaaggagcttaagttcgcatctcaagacctgtcagaccagctgctggaggtggtcgggttggagggggctatggaaatgggccagatatacacaggcctaaaaagtgccggccgaaggctcgcgcagtgctcttgcgtcgtcattcgaacctccaagagcctccctatgcagatcgacggtgagccatggatgcagacaccttgcacaattaagattactcacaagaaccaggctcccatgctgatgggaccgccacctaagaccggcctgttctgctccttggtaaagcgtactcgtaacagaagtaaagagtag

SEQ ID NO: 305715 - DNA, 2391 bp, Artificial Sequence
  derived and/or modified sequence
atgactaatcaggagaagtgggcacatcttagcccatccgagttcagccagcttcagaagtatgccgaatattccacgaaaaagctgaaggacgtgttagaggaatttcacggaaatggggtcctagcaaagtataatcccgaaggcacaatagacttcgaaggattcaaactgttcatgaaaacatttctggaggctgagctccccgatgatttcacagcccacctgtttatgtcattcagtaataaatttccacattccagccctatggtgaaaagtaagccagcccttctgtccggcggactccgtatgaataagggggctataacccctccccgaaccacaagccctgccaacacatgctctccagaagtgatccatctcaaagacattgtttgttatctgtctctcctcgaacgagggcgtcctgaagataagctggagtttatgtttcgtttatatgatacggacggaaatggttttctggactcctcggagctggagaacattatctctcagatgatgcatgtggcggagtatctcgagtgggatgtgactgagctcaacccaattctgcacgagatgatggaggagattgattacgaccatgacggtactgtgagcttggaagagtggatccagggcggtatgaccacaatcccgctattagtgctactggggcttgagaacaacgtgaaggatgacggccagcacgtgtggcggctgaagcacttcaacaaacccgcttactgcaacctctgcttgaatatgctgattggtgtggggaaacagggactgtgctgttcgttctgcaaatacacggtgcacgagaggtgcgtggctcgcgcacccccaagctgcatcaagacctacgtgaagagtaaaagaaataccgatgttatgcatcactactgggtggaaggcaattgtcctacaaagtgcgacaaatgccacaaaaccgtgaaatgttaccagggactcacaggcttgcactgcgtttggtgccagattaccctccataacaaatgtgcctcacacctaaaacccgagtgtgattgtgggccactgaaggaccacattctccctcctacaactatatgtccagtggtgctcacactacctacatcaggcgtgtccgtgcccgaagagagacagtctacagtgaaaaaggaaaagtccggcagtcagcaacccaacaaagtgattgataagaacaagatgcagagagccaacagcgtcaccgtggatggccaggggttgcaggtgacccctgtccctggcacccatcccttactggtgtttgtaaacccaaagtccggcggaaagcaaggcgagaggatctaccgcaagttccagtacttattgaacccaagacaggtctactcgttgtccggtaacggccctatgcccggattgaacttcttccgcgacgtgccggatttccgcgtgcttgcatgtggcggagacggcaccgtcggatgggttctggattgcatcgagaaggcaaacgtgggcaagcatcccccagtagctatcttgccccttggtacaggtaacgacctggcaaggtgtcttaggtggggtggcggttatgagggcgagaatctgatgaagattttgaaggatatcgaaaacagtacggaaatcatgttggatagatggaaatttgaagtgatacctaatgacaaagacgagaaaggcgacccggttccgtactccatcatcaacaattacttctctattggtgtcgacgcctcgatcgctcatagattccacatcatgagggagaagcatcctgagaagttcaattcacggatgaagaataagttttggtatttcgagtttggaacttccgaaacgtttagtgccacctgcaagaagcttcacgagtccgtggaaatcgagtgcgacggcgtacagattgatctgattaacatcagcctggaagggatagccatcctgaatatcccctctatgcatggcggatccaacctgtggggggagtcaaagaaaagacgcagccaccggaggattgagaaaaaggggtctgacaagagaacaaccgtcactgatgctaaggaactgaagttcgccagtcaggacctttccgatcagctcctagaagtggtgggtctggaaggggctatggagatgggccagatttataccgggctgaaatctgctggacgcagactagctcagtgcagttgtgtggtaattaggacaagcaagagcctgccaatgcagattgacggcgagccatggatgcaaacgccgtgcacaataaaaattacacataagaatcaggcacctatgctcatgggccctcccccaaagactgggctgttttgcagccttgtaaagaggacacggaataggagcaaagaatag

SEQ ID NO: 305716 - DNA, 2391 bp, Artificial Sequence
  derived and/or modified sequence
atgaccaaccaggagaagtgggcccacctgagccccagcgagttcagccagctgcagaagtacgccgagtacagcaccaagaagctgaaggacgtgctggaggagttccacggcaacggcgtgctggccaagtacaaccccgagggcaccatcgacttcgagggcttcaagctgttcatgaagaccttcctggaggccgagctgcccgacgacttcaccgcccacctgttcatgagcttcagcaacaagttcccccacagcagccccatggtgaagagcaagcccgccctgctgagcggcggcctgagaatgaacaagggcgccatcaccccccccagaaccaccagccccgccaacacctgcagccccgaggtgatccacctgaaggacatcgtgtgctacctgagcctgctggagagaggcagacccgaggacaagctggagttcatgttcagactgtacgacaccgacggcaacggcttcctggacagcagcgagctggagaacatcatcagccagatgatgcacgtggccgagtacctggagtgggacgtgaccgagctgaaccccatcctgcacgagatgatggaggagatcgactacgaccacgacggcaccgtgagcctggaggagtggatccagggcggcatgaccaccatccccctgctggtgctgctgggcctggagaacaacgtgaaggacgacggccagcacgtgtggagactgaagcacttcaacaagcccgcctactgcaacctgtgcctgaacatgctgatcggcgtgggcaagcagggcctgtgctgcagcttctgcaagtacaccgtgcacgagagatgcgtggccagagccccccccagctgcatcaagacctacgtgaagagcaagagaaacaccgacgtgatgcaccactactgggtggagggcaactgccccaccaagtgcgacaagtgccacaagaccgtgaagtgctaccagggcctgaccggcctgcactgcgtgtggtgccagatcaccctgcacaacaagtgcgccagccacctgaagcccgagtgcgactgcggccccctgaaggaccacatcctgccccccaccaccatctgccccgtggtgctgaccctgcccaccagcggcgtgagcgtgcccgaggagagacagagcaccgtgaagaaggagaagagcggcagccagcagcccaacaaggtgatcgacaagaacaagatgcagagagccaacagcgtgaccgtggacggccagggcctgcaggtgacccccgtgcccggcacccaccccctgctggtgttcgtgaaccccaagagcggcggcaagcagggcgagagaatctacagaaagttccagtacctgctgaaccccagacaggtgtacagcctgagcggcaacggccccatgcccggcctgaacttcttcagagacgtgcccgacttcagagtgctggcctgcggcggcgacggcaccgtgggctgggtgctggactgcatcgagaaggccaacgtgggcaagcacccccccgtggccatcctgcccctgggcaccggcaacgacctggccagatgcctgagatggggcggcggctacgagggcgagaacctgatgaagatcctgaaggacatcgagaacagcaccgagatcatgctggacagatggaagttcgaggtgatccccaacgacaaggacgagaagggcgaccccgtgccctacagcatcatcaacaactacttcagcatcggcgtggacgccagcatcgcccacagattccacatcatgagagagaagcaccccgagaagttcaacagcagaatgaagaacaagttctggtacttcgagttcggcaccagcgagaccttcagcgccacctgcaagaagctgcacgagagcgtggagatcgagtgcgacggcgtgcagatcgacctgatcaacatcagcctggagggcatcgccatcctgaacatccccagcatgcacggcggcagcaacctgtggggcgagagcaagaagagaagaagccacagaagaatcgagaagaagggcagcgacaagagaaccaccgtgaccgacgccaaggagctgaagttcgccagccaggacctgagcgaccagctgctggaggtggtgggcctggagggcgccatggagatgggccagatctacaccggcctgaagagcgccggcagaagactggcccagtgcagctgcgtggtgatcagaaccagcaagagcctgcccatgcagatcgacggcgagccctggatgcagaccccctgcaccatcaagatcacccacaagaaccaggcccccatgctgatgggccccccccccaagaccggcctgttctgcagcctggtgaagagaaccagaaacagaagcaaggagtag

SEQ ID NO: 305717 - DNA, 3651 bp, Artificial Sequence
  derived and/or modified sequence
atctttcagacactagttccaatgggccgggtgttctggaagggggtggcagtggggaggaggatgctgtgagcagagttcttgaagctccactcctctggggaagccgagctgtgtgggagccttcttactgtgccgggagcgtgtgaattggaaaggatcctgagaactggctagtcccagttcctctccggaaaagcagtggctctcgcttcagagatgcgctcagctttcgcctgcatcacactgcattctttaacacattattgaaattacaagcatccaaagcagtttcatgtggacagattgcatattttgaaagcctgaggtattttatcatgaaacatgccatgtggaatctttgaagcatagacctctgcgcaacacctgaataaagaatcttttacctggtatgtgacagagcttctcaccaccaccatgacaaaccaggaaaaatgggcccacctcagcccttcggaattttcccaacttcagaaatatgctgagtattctacaaagaaattaaaggatgttcttgaagaattccatggtaatggtgtgcttgcaaagtataatcctgaagggacaatagattttgaaggtttcaaactattcatgaagacattcctggaagccgagcttcctgatgatttcactgcacaccttttcatgtcatttagcaacaagtttcctcattctagtccaatggtaaaaagtaagcctgctctcctatcaggcggtctgagaatgaataaaggtgccatcacccctccccggactacttctcctgcaaatacgtgttccccagaagtaatccatctgaaggacattgtctgttacctgtctctgcttgaaagaggaagacctgaggataagcttgagtttatgtttcgcctttatgacacggatgggaatggcttcctggacagctcggagctagaaaatatcatcagtcagatgatgcatgttgcagaataccttgagtgggatgtcactgaacttaatccaatcctccatgaaatgatggaagaaattgactatgatcatgatggaaccgtgtctctggaggaatggattcaaggaggaatgacaacgattccacttcttgtgctcctgggcttagaaaataacgtgaaggatgatggacagcacgtgtggcgactgaagcactttaacaaacctgcctattgcaacctttgcctgaacatgctgattggcgtggggaagcagggcctctgctgttccttctgcaagtacacagtccatgagcgctgtgtggctcgagcacctccctcttgcatcaagacctatgtgaagtccaaaaggaacactgatgtcatgcaccattactgggttgaaggtaactgcccaaccaagtgtgataagtgccacaaaactgttaaatgttaccagggcctgacaggactgcattgtgtttggtgtcagatcacactgcataataaatgtgcttctcatctaaaacctgaatgtgactgtggacctttgaaggaccatattttaccacccacaacaatctgtccagtggtactgactctgcccacttcaggagtttcagttcctgaggaaagacaatcaacagtgaaaaaggaaaagagtggttcccagcagccaaacaaagtgattgacaagaataaaatgcaaagagccaactctgttactgtagatggacaaggcctgcaggtcactcctgtgcctggtactcacccacttttagtttttgtgaaccccaaaagtggtggaaaacaaggagaacgaatttacagaaaattccagtatctattaaatcctcgtcaggtttacagtctttctggaaatggaccaatgccagggttaaactttttccgtgatgttcctgacttcagagtgttagcctgtggtggagatggaaccgtgggctgggttttggattgcatagaaaaggccaatgtaggcaagcatcctccagttgcgattctgcctcttgggactggcaatgatctagcaagatgcctgcgatggggaggaggttacgaaggtgagaatctgatgaaaattctaaaagacattgaaaacagcacagaaatcatgttggacaggtggaagtttgaagtcatacctaatgacaaagatgagaaaggagacccagtgccttacagtatcatcaataattacttttccattggcgtggatgcctccattgcacacagattccacatcatgagagaaaaacacccagagaaattcaacagtagaatgaagaacaaattttggtattttgagtttggcacatctgaaactttctcagccacctgcaagaagctacatgaatctgtagaaatagaatgtgatggagtacagatagatttaataaacatctctctggaaggaattgctattttgaatataccaagcatgcatggaggatccaatctttggggagagtctaagaaaagacgaagccatcgacgaatagagaaaaaagggtctgacaaaaggaccaccgtcacagatgccaaagagttgaagtttgcaagtcaagatctcagtgaccagctgctggaggtggtcggcttggaaggagccatggagatggggcaaatatacacaggcctgaaaagtgctggccggcggctggctcagtgctcctgcgtggtcatcaggacgagcaagtctctgccaatgcaaattgatggggagccatggatgcagaccccatgcacaataaaaattacacacaagaaccaagccccaatgctgatgggcccgcctccaaaaaccggtttattctgctccctcgtcaaaaggacaagaaaccgaagcaaggaataatcctgtgttgtttcactcttagaaattgaattagcataattgggccatggaacacatatgctggaaatctttgaaccatttcaagtctcctgctcatgcaaaatcatggaagtggtttaacagtttttgttactaagctaatgtaaaattcagctattagaaaatttattgtctcagtttttataggcatctttgcatgaagaaagcagaagtttacctgaagtgatactgcatatttttggtgcatgcattcccatagatttttacatctcccacccaactcttccccaatttccttttactaacctgtgagaaaaacccgtgaaacatgaaaaaggaaataccatgggaaacgtgattctcagtgtgattccaattattacgaagcactaatcagtaacgctacaatgatcataattgcagattgctatacgtttcccttttagaatcagtgtatcagtgacctatgacttgaggagaaacttttaattcgaagattttattaaatagttgactacaataccttgctatatatacatagtttttcttcaacatcttaactcttctgagtggaaataaaaatatcaggcataaggttttctcatgctgaaaaatagaacgcggtttttattttgcttagttttctttttaattccagaaataagtgaaaacatgttacttgacagtcaagtgtggtaatatggcaagccttgttcctttctgcatgagaatctaggagagaattcataaccacaccaataacgaaatagaagttttaaactatgtgcctaatcaatgtgtttcccaccaaagattcagaaa

SEQ ID NO: 305718 - DNA, 228 bp, Artificial Sequence
  derived and/or modified sequence
atgaccaatcaggagaagtgggcccatcttagtccgtcagagttttcccagctgcagaaatacgctgagtactcgactaaaaaactgaaagacgtgctggaggagttccatgggaacggggtgttggccaaatacaatccagagggcaagcaggatattctgaatcagactatcgatttcgagggctttaagctgtttatgaagacctttctggaagcagagttgtag

SEQ ID NO: 305719 - DNA, 228 bp, Artificial Sequence
  derived and/or modified sequence
atgaccaaccaggagaagtgggcccacctgagccccagcgagttcagccagctgcagaagtatgcagagtacagcaccaagaagctgaaggatgtgctggaggagttccatggaaatggagtgctggccaagtacaaccctgagggcaagcaggacatcctgaaccagaccatcgactttgagggcttcaagctgttcatgaagaccttcctggaggccgagctgtag

SEQ ID NO: 305720 - DNA, 228 bp, Artificial Sequence
  derived and/or modified sequence
atgaccaaccaggagaagtgggcccacctgagccccagcgagttctctcaattacagaagtacgctgagtattcaacaaagaagttaaaggacgtcctggaagaattccacggcaatggagtgctcgccaagtataaccccgagggtaaacaagatatcctgaatcagactatcgactttgagggcttcaaactgttcatgaagacctttcttgaggcagagctctag

SEQ ID NO: 305721 - DNA, 228 bp, Artificial Sequence
  derived and/or modified sequence
atgacaaaccaggaaaagtgggcccacctgtctccctctgaatttagtcagttgcagaaatacgcggaatatagcaccaagaagctgaaggatgttctcgaagagtttcacggaaatggggtcctggccaagtataatccagaggggaagcaggacatccttaatcagacgatagattttgaaggatttaagctgttcatgaagacattcttggaagcagagctctag

SEQ ID NO: 305722 - DNA, 228 bp, Artificial Sequence
  derived and/or modified sequence
atgaccaaccaggagaagtgggcccacctgagccccagcgagttcagccagctgcagaagtacgccgagtacagcaccaagaagctgaaggacgtgctggaggagttccacggcaacggcgtgctggccaagtacaaccccgagggcaagcaggacatcctgaaccagaccatcgacttcgagggcttcaagctgttcatgaagaccttcctggaggccgagctgtag

SEQ ID NO: 305723 - DNA, 494 bp, Artificial Sequence
  derived and/or modified sequence
acataaattagtaccttactggctagggaatgttgaatcacagttggatgaagaaacaattcatgttaatgtttctctaaagttctttaacacattattgaaattacaagcatccaaagcagtttcatgtggacagattgcatattttgaaagcctgaggtattttatcatgaaacatgccatgtggaatctttgaagcatagacctctgcgcaacacctgaataaagaatcttttacctggtatgtgacagagcttctcaccaccaccatgacaaaccaggaaaaatgggcccacctcagcccttcggaattttcccaacttcagaaatatgctgagtattctacaaagaaattaaaggatgttcttgaagaattccatggtaatggtgtgcttgcaaagtataatcctgaagggaaacaagacattcttaaccaaacaatagattttgaaggtttcaaactattcatgaagacattcctggaagccgagctt

SEQ ID NO: 305724 - protein, 164 aa, Artificial Sequence
  derived and/or modified sequence
  misc_feature (1)..(1): Xaa can be any naturally occurring amino acid
XVGGPENPYLIDPENQNVTLNGPGGCGTREDCVLSLGRTRTEAHTALSRLRASMWIDRSTRAVSVHFTLYNPPTQLFTSVSLRVEILPTGSLVPSSLVESFSIFRSDSALQYHLMLPQLVFLALSLIHLCVQLYRMMDKGVLSYWRKPRNWLEVASLVSFSFEK

SEQ ID NO: 305725 - DNA, 495 bp, Artificial Sequence
  derived and/or modified sequence
taggtcggcggacccgagaatccttatctcattgaccctgagaatcagaatgtaacattgaacggcccaggggggtgcggcacccgggaagactgcgtcctgtctcttggccgcaccaggaccgaggcacacaccgccctgtctcgtctgcgcgcctccatgtggatcgaccgtagcactcgggctgtctctgtccattttaccttatacaacccgccgacacagctctttacaagcgtatccctgcgggtcgaaattcttcctaccggatctttagtgccgtcgtctctcgtggaatctttctctatattcagaagcgatagcgctctgcagtaccatcttatgttgccccagcttgtgtttctagccttgagtctcatccatttatgcgtgcagttatatcgtatgatggacaaaggcgtattgtcatactggcgaaaacctcggaattggttggaggtggcgtccctggtttccttttcctttgagaaatag

SEQ ID NO: 305726 - DNA, 495 bp, Artificial Sequence
  derived and/or modified sequence
tgagtgggcggccctgagaacccctacctgattgatcctgagaaccagaatgtgaccctgaatggacctgggggctgcggcacccgggaggactgtgtgctgagcctgggccgcaccaggacagaggcccacacagccctgagccggctgcgggcctccatgtggattgacaggagcaccagggctgtgtctgtgcacttcaccctgtacaacccccccacccagctgttcacctctgtgtccctgcgggtggagatcctgcccaccggcagcctggtgcccagcagcctggtggagagcttcagcatcttcagaagtgacagcgccctgcagtaccacctgatgctgccccagctggtgttcctggccctgagcctcatccacctgtgtgtgcagctgtacaggatgatggacaagggcgtgctgagctactggaggaagcccaggaactggctggaggtggccagcctggtgtccttctcctttgagaagtag

SEQ ID NO: 305727 - DNA, 495 bp, Artificial Sequence
  derived and/or modified sequence
tgagtgggcggccccgagaacccctacctgatcgaccccgagaaccagaacgtcactctgaatggtcccggcgggtgcggtacaagggaggactgcgtgctgagcctgggtcgtactcgaaccgaagcccataccgctctatcccggctgagggccagcatgtggattgaccgaagcacccgagctgtctcagtgcatttcactctgtataatcccccgactcagttgttcacatctgtgagccttcgcgtggaaatactacctaccggttcattggtgccaagctcccttgtggaatctttcagcatattccggagcgactccgctctccagtatcatttgatgctgccacagttggtgttcctggcgctgagtctcattcacctgtgtgtgcaactgtacagaatgatggacaaaggagtgctgagctactggcgcaagccaaggaattggctcgaagttgcctcccttgtgtccttctcgttcgagaaatag

SEQ ID NO: 305728 - DNA, 520 bp, Artificial Sequence
  derived and/or modified sequence
agttggaggccctgagaacccctacctgatagacccagagaaccaaaacgtgaccctgaatggtcctgggggctgtgggacaagggaggactgtgtgctcagcctgggcagaacaaggactgaagcccacacagccctgtcccgactcagggccagcatgtggattgaccgcagcaccagggctgtgtctgtgcacttcactctctataaccctccaacccaactcttcaccagcgtgtccctgagagtggagatcctccctacggggagtctcgtcccctcatccctggtggagtcattcagcatcttccgcagcgactcagccctgcagtaccacctcatgcttccccagctggtcttcctggcactcagcctgatccacctctgtgttcaactctaccgtatgatggacaagggcgtcctcagctactggcgaaagccaaggaactggctggaggtagcctctcttgtgtcattttcttttgaaaaataacaataaactgtttatatcttgaaaaaa

SEQ ID NO: 305729 - DNA, 495 bp, Artificial Sequence
  derived and/or modified sequence
taggtcgggggacctgagaatccttatctgattgacccggagaaccaaaacgtaacactgaatgggcctgggggatgtgggacgcgtgaggattgtgtcctaagcctggggcgaactcgcactgaggcacacaccgctttgtcacggctcagagctagcatgtggatcgaccgttctactcgtgcagtctctgtccattttaccctgtacaatcctcctacccagttgttcacgtctgtgagcttgagggttgagatcctgcctacgggttctctggttccaagcagtctggtagaaagtttttctatattcaggtccgatagtgctttgcagtatcatctaatgcttccacagctggtctttctggccctgagcttgatccacctgtgtgtgcagctttatagaatgatggacaagggtgtgctttcatattggcggaaacccagaaattggctggaagttgcatccttggtgagcttctcttttgaaaagtag

SEQ ID NO: 305730 - DNA, 495 bp, Artificial Sequence
  derived and/or modified sequence
tgagtgggcggccccgagaacccctacctgatcgaccccgagaaccagaacgtgaccctgaacggccccggcggctgcggcaccagagaggactgcgtgctgagcctgggcagaaccagaaccgaggcccacaccgccctgagcagactgagagccagcatgtggatcgacagaagcaccagagccgtgagcgtgcacttcaccctgtacaacccccccacccagctgttcaccagcgtgagcctgagagtggagatcctgcccaccggcagcctggtgcccagcagcctggtggagagcttcagcatcttcagaagcgacagcgccctgcagtaccacctgatgctgccccagctggtgttcctggccctgagcctgatccacctgtgcgtgcagctgtacagaatgatggacaagggcgtgctgagctactggagaaagcccagaaactggctggaggtggccagcctggtgagcttcagcttcgagaagtag

SEQ ID NO: 305731 - protein, 477 aa, Artificial Sequence
  derived and/or modified sequence
MDGFYDQQVPYMVTNSQRGRNCNEKPTNVRKRKFINRDLAHDSEELFQDLSQLQETWLAEAQVPDNDEQFVPDYQAESLAFHGLPLKIKKEPHSPCSEISSACSQEQPFKFSYGEKCLYNVSAYDQKPQVGMRPSNPPTPSSTPVSPLHHASPNSTHTPKPDRAFPAHLPPSQSIPDSSYPMDHRFRRQLSEPCNSFPPLPTMPREGRPMYQRQMSEPNIPFPPQGFKQEYHDPVYEHNTMVGSAASQSFPPPLMIKQEPRDFAYDSEVPSCHSIYMRQEGFLAHPSRTEGCMFEKGPRQFYDDTCVVPEKFDGDIKQEPGMYREGPTYQRRGSLQLWQFLVALLDDPSNSHFIAWTGRGMEFKLIEPEEVARRWGIQKNRPAMNYDKLSRSLRYYYEKGIMQKVAGERYVYKFVCDPEALFSMAFPDNQRPLLKTDMERHINEEDTVPLSHFDESMAYMPEGGCCNPHPYNEGYVY

SEQ ID NO: 305732 - protein, 123 aa, Artificial Sequence
  derived and/or modified sequence
MDGFYDQQVPYMVTNSQRGRNCNEKPTNVRKRKFINRDLAHDSEELFQDLSQLQETWLAEAQVPDNDEQFVPDYQAESLAFHGLPLKIKKEPHSPCSEISSACSQEQPFKFSYGEKCLYNVSA

SEQ ID NO: 305733 - DNA, 6824 bp, Artificial Sequence
  derived and/or modified sequence
aaggaaaccagcccaatagtggacctaacaccccaataatgggaactggcgactcgaaacacacggtttcagtatccccaggcgccttaacaataagcagcgggttacagaggaaatcgagtctctccgtggcgcttccaggctgaggacccagcgcctaccggccgagcaccccctagggcagaggggcgagggagacccgcgggaaggggcagcaagccgcctgattgacagcccgaaatctgatcttgtgaaagagacgcggagccaatgggaggcagcgatccatcagtttggattggaggcccctggaggagaagtagaggaaaaaccaccgaattgagctctgtcagaggcgctttcggcttccaagggggaagtgctgggctataattaatgtttttattaaatttggagggaagtttttgcagcctttcgcctagcgtggccttcagtcccgttaggtgcaaagcaagtctcgttgatcgccattgctagttttgcacacgtttgcgaatcagagctgcccggggtacaccgaccgcgcagggaaacatcgagagtgtaaataaatacatcgcctcttgttcggatttttgctactaccgaaaatatgtaaattgtgaactctgttggctctctttggatccaggttgatagaagtccagatcctgaggaaatctccagctaaatgctcaaaatataaaatactgagctgagatttgcgaagagcagcagcatggatggattttatgaccagcaagtgccttacatggtcaccaatagtcagcgtgggagaaattgtaacgagaaaccaacaaatgtcaggaaaagaaaattcattaacagagatctggctcatgattcagaagaactctttcaagatctaagtcaattacaggaaacatggcttgcagaagctcaggtacctgacaatgatgagcagtttgtaccagactatcaggctgaaagtttggcttttcatggcctgccactgaaaatcaagaaagaaccccacagtccatgttcagaaatcagctctgcctgcagtcaagaacagccctttaaattcagctatggagaaaagtgcctgtacaatgtcagtgcctatgatcagaagccacaagtgggaatgaggccctccaacccccccacaccatccagcacgccagtgtccccactgcatcatgcatctccaaactcaactcatacaccgaaacctgaccgggccttcccagctcacctccctccatcgcagtccataccagatagcagctaccccatggaccacagatttcgccgccagctttctgaaccctgtaactcctttcctcctttgccgacgatgccaagggaaggacgtcctatgtaccaacgccagatgtctgagccaaacatccccttcccaccacaaggctttaagcaggagtaccacgacccagtgtatgaacacaacaccatggttggcagtgcggccagccaaagctttccccctcctctgatgattaaacaggaacccagagattttgcatatgactcagaagtgcctagctgccactccatttatatgaggcaagaaggcttcctggctcatcccagcagaacagaaggctgtatgtttgaaaagggccccaggcagttttatgatgacacctgtgttgtcccagaaaaattcgatggagacatcaaacaagagccaggaatgtatcgggaaggacccacataccaacggcgaggatcacttcagctctggcagtttttggtagctcttctggatgacccttcaaattctcattttattgcctggactggtcgaggcatggaatttaaactgattgagcctgaagaggtggcccgacgttggggcattcagaaaaacaggccagctatgaactatgataaacttagccgttcactccgctattactatgagaaaggaattatgcaaaaggtggctggagagagatatgtctacaagtttgtgtgtgatccagaagcccttttctccatggcctttccagataatcagcgtccactgctgaagacagacatggaacgtcacatcaacgaggaggacacagtgcctctttctcactttgatgagagcatggcctacatgccggaagggggctgctgcaacccccacccctacaacgaaggctacgtgtattaacacaagtgacagtcaagcagggcgtttttgcgcttttccttttttctgcaagatacagagaattgctgaatctttgttttatttctgttgtttgtattttatttttaaataataatacacaaaaaggggcttttcctgttgcattattctatggtctgccatggactgtgcactttatttgagggtgggtgggagtaatctaaacatttattctgtgtaacaggaagctaatgggtgaatgggcagagggatttggggattactttttacttaggcttgggatggggtcctacaagttttgagtatgatgaaactatatcatgtctgtttgatttcataacaacataagataatgtttattttatcggggtatctatggtacagttaatttcacgttgtgtaaatatccacttggagactatttgccttgggcattttcccctgtcatttatgagtctctgcaggtgtacaaaaaaaccccaatctactgtaaatggcagtttaattgttagaaatgactgtttttgcaccacttgtaaaaaggtatttagcgattgcatttgctgtttgttgttttattttgctttatatatgacttgcagaggataaccataaaatgggtaattctctctgaagttgaataatcaccatgactgtaaatgaggggcacaattttggactctggcgccaaactgagtcataggccagtagcattacgtgtatctggtgccaccttgctgtttagatacaaatcataccgtcttttaaatattttgaagcccatttcagttaaataatgacatgtcatggtcctttggaatcttcatttaaatgttaaatctggaatcaaaatgaagcaaaaaatatctgtctccttttcactttcttcagtacataaatacattatttaatcaataagaattaactgtactaaatcatgtattatgctgttctagttacagcaaacactctttaagaaaaatatccaatacactaaataggtactatagtaatttttagacatggtacccattgatatgcatttaaaccttttactgctgtgttatgttgataacatatataaatattagataatgctaatgcttctgctgctgtcttttctgtaatattctctttcatgctgaatttactatgaccatttataagcagtgcagttaactacagatagcatttcaggacaaaatagatgactcaaaccatttattgcttaaaaaatagcttacgccatgctatgctataagcagcttttatgcacattgacaaatgaagagtaagcttcagcttgctaaaggaaactgtggaaccttttgtaacttttggtgatatggaaaattatttacaaaccgtcaaagaatatgaggaagttgctgtatgacatagtgctggcactgatattatccatcatctctttttggacacttctgtaaatgtgattggattgtttgaaagaagatttaaagtttcaaagttttttgttctgtttttgctttgcatttggagaaaatattgaaagcagggtatgttgtttcattcaccttgaaaaaaccatgagtaaatggggatatagaatctctgaatagctcgctaaaagattcaagcaagggacatgaattttgttccatctatcaataatatccagaagaacaacttttttaaagagtctatagcaaaaagcaaaaaaaaaaaaaaattctaaacacaaagtcaaaataaacctattgtaaaagcatttcgtgatgagcatgaaaaagattgtttaaagatgatccccccagctacccattttccaaaactacacagatcacagctcatttctctaagtggagcagttatcaagaaacccaaacaccaaaattgctactcttcacatttaatcctacaaaaagtactccaatttcaaaatatgtatgtaacctgcgatttcaatgattgttgttcatatacatcatgtattattttggcccattttgggcctaaaaaagaaaactatgccttaaaaatcagaaccttttctccccactatgcttatgtggccatctacagcacttagaataaaaacagatgttaaaatattcagtgaaagttttattggaaaaaggaattgagatatataattgagatttggtgaaattgaaggagaaaatttaagtgagtctttaaaatatattctgaatgaaaactgtattgaggattcatttttgttccttttttttctttttctcttttctcctttttcttctttttaatagtctagttttagtcagtcagtgaggaagaattgggccatgctaacgttatcacaagagaacaatggcagaaatggtattagttatataatatttaaggacaaactatatgttttgctgttttaacgtagtgactcactgaactaaatacataattgaccaacattaagtgtatttccaatacagaagggttgaaaatattacattataaactcttttgaaaaatgtatctaaaattttttaagttctgttttgattccactttttggttgagtttttatgtttttgttttcaggtagattaataaatctggcagctgatttctgcaagattcttgtgttttgaatttctcattgaattggctactcaaacatagaaatcatttgttaatgatgtaatgtcttctctcagcttttatcttcactgctgtttgctgtctcttgatgatgacatgttaatacccaatagattaattgcaacaaacacttatactcaaataactaagtaaaaataatttttcttgttatgtccatgaaaagtgcttcagaataaaaatccacaagactgacagtgcagaacatttttctcaaatcatgggcggatcttggaggtctagtttcccgtagatgctgtaaccaattaccacaacttcagtaatttacacaaatttatcttatagttctggaggcagaagttcaaaagaagccttaagagactaaaaccaagatgtccttaggtctggttccttctggaggctccaggggagattcttccagctttcacttctagagtctgctgacattccttggctcctggctacatcacttcaatctctgcttccatggtcacatactcttctactatagtcaaatttccttcctgcctcttataaggatgcttgtgattacatttaggggatgctcagataatccaggacaatctctccatctcaagatccttaacttaatgacgtgtgccaagtccctttggctagataattattcataggtcccagggattaggacatggatgtaaggggtgagggcagggctgttattcagaacaccgcacggaggaggaagactgtgtagcaaagactctaattgatttactcaggaacagtggagttctgctgagggatctaggatttgaaagtactagagtttgcttttatttaccactgagatattttccccttattctgcataaataattttgaaaactttctatattaaatttcaactattccactaaaatgtctggtaatcacatcaagcctttagattattcaaatccttccccagcccccaggaaaacactaagtcatgaaacagaaaaacagaaggtatgataataatagtaataacagttaaatcagtggtctaatccagattttattttttaatacatttcttttggtgttaatatgggttactatgtgatcttatcatttgctagtgattattacttattaggtaagaacaatgtgtaaaatatgtctattactcaaaagaacaattgcaaaatgagtcaacttatctttatataaccaggaaagaaatatattgccagaagctacagaattttgccagatgatagggatttctaaaatgagccactttgtctatcatgcagccttttcagagcttgtaatgagaaaacattacagaggagaaggtcatttggatgtttgttacttggaatcctagaaaacaaaaactaaaatttaaaaataagaagtgagtaagctattttccatttgcgatttggtatggagaagagaggaaatagaattattaaaaaaatacaaattgggtaaaagtgatggtggaaaaaatataaagaaggcaaatgtacatattaagcaattctactaagaattggaaaaatcaagtttcaaaaagatggtaatagttgggcatgatactagaaaatttcacccagtttattcagagctcaactagtacttttaggacttctttttttatatacatgagactcactttgacatacttaaaaaaaaaacagtttatggaaagtacagtttaagaggagaatttgattagactaagtggatatctttatagaaatattaatgatttcagaattttcagttacaagtgtatataccgtggctattgtttatggattcatatgtaaggtagggtcttttttgcatatagactccagtattagttactttcattctaaaattatatttatgcttctatggggaagaaaatttttaattcacttggttgtattaaaattatacttacggtttgagaaaacatgctatgaaaatcatgattatagcaaattaaatatgctcaaaatttaaatctaaaataaaagcccagaaactgaaaaaaaaaaaaaaaaaa

SEQ ID NO: 305734 - DNA, 1434 bp, Artificial Sequence
  derived and/or modified sequence
atggacggcttctacgaccagcaggtgccctacatggtgaccaacagccagagaggcagaaactgcaacgagaagcccaccaacgtgagaaagagaaagttcatcaacagagacctggcccacgacagcgaggagctgttccaggacctgagccagctgcaggagacctggctggccgaggcccaggtgcccgacaacgacgagcagttcgtgcccgactaccaggccgagagcctggccttccacggcctgcccctgaagatcaagaaggagccccacagcccctgcagcgagatcagcagcgcctgcagccaggagcagcccttcaagttcagctacggcgagaagtgcctgtacaacgtgagcgcctacgaccagaagccccaggtgggcatgagacccagcaacccccccacccccagcagcacccccgtgagccccctgcaccacgccagccccaacagcacccacacccccaagcccgacagagccttccccgcccacctgccccccagccagagcatccccgacagcagctaccccatggaccacagattcagaagacagctgagcgagccctgcaacagcttcccccccctgcccaccatgcccagagagggcagacccatgtaccagagacagatgagcgagcccaacatccccttccccccccagggcttcaagcaggagtaccacgaccccgtgtacgagcacaacaccatggtgggcagcgccgccagccagagcttccccccccccctgatgatcaagcaggagcccagagacttcgcctacgacagcgaggtgcccagctgccacagcatctacatgagacaggagggcttcctggcccaccccagcagaaccgagggctgcatgttcgagaagggccccagacagttctacgacgacacctgcgtggtgcccgagaagttcgacggcgacatcaagcaggagcccggcatgtacagagagggccccacctaccagagaagaggcagcctgcagctgtggcagttcctggtggccctgctggacgaccccagcaacagccacttcatcgcctggaccggcagaggcatggagttcaagctgatcgagcccgaggaggtggccagaagatggggcatccagaagaacagacccgccatgaactacgacaagctgagcagaagcctgagatactactacgagaagggcatcatgcagaaggtggccggcgagagatacgtgtacaagttcgtgtgcgaccccgaggccctgttcagcatggccttccccgacaaccagagacccctgctgaagaccgacatggagagacacatcaacgaggaggacaccgtgcccctgagccacttcgacgagagcatggcctacatgcccgagggcggctgctgcaacccccacccctacaacgagggctacgtgtactag

SEQ ID NO: 305735 - DNA, 63 bp, Artificial Sequence
  derived and/or modified sequence
atggacggcttctacgaccagcaggtgccctacatggtgaccaacagccagagaggcagatag

SEQ ID NO: 305736 - DNA, 1434 bp, Artificial Sequence
  derived and/or modified sequence
atggacggattttatgaccagcaggtgccatatatggttaccaattcccagagggggagaaactgcaatgagaagcccacgaatgtgaggaagcgcaaatttattaatcgcgacctggctcacgacagcgaagaactctttcaggacctgagccagctacaggagacatggttggccgaggcccaggtccctgataacgacgagcagttcgtgcctgattaccaagcggaaagcctggccttccatggtctgcctctgaagattaaaaaagagccgcactcaccatgcagtgagatctcatctgcgtgctctcaagagcaaccttttaagttcagttacggagaaaaatgtctgtacaacgtgagcgcctatgatcagaagccacaggtggggatgaggcctagtaacccccccaccccatcttccacacccgtctccccactgcaccatgcctctcctaacagtacgcacacccccaagcctgaccgggctttcccagctcacctgcccccatctcaatccattcccgacagctcctatcctatggatcatcgattccggagacaactttcagagccctgcaactcttttccgccattgccaactatgccacgggagggcaggcctatgtatcagcgtcagatgtccgagcctaacatcccattccctccacagggatttaagcaagagtaccatgacccagtgtacgagcacaatactatggtcgggagcgccgcaagccagtcattccctccccctttaatgatcaaacaggagccgagagacttcgcatacgattccgaagtaccctcctgtcactcaatttatatgcggcaggagggatttttagctcacccctcccgcactgaggggtgtatgttcgagaagggtccgaggcaattctatgatgacacatgcgtagtacccgagaaattcgatggcgacataaagcaggagcctggcatgtatagggagggacctacttatcagcggagagggtcattacaactctggcagttcttggttgccctactggacgatcctagtaactctcacttcatcgcttggacgggccggggaatggagttcaaattaatagagcctgaagaagtggcacgccgctgggggatccagaagaatcggccggccatgaattacgataagctatcccggagtcttcgatactattacgagaagggtattatgcagaaggtcgctggggaaaggtatgtgtataagtttgtctgtgatcctgaggcactgtttagtatggctttcccagacaatcaacgccctctcctgaagaccgatatggaacggcacattaatgaagaagacacggtacccctcagtcactttgatgagtcgatggcttacatgcctgaaggaggctgctgtaacccacacccttacaacgaagggtatgtgtactag

SEQ ID NO: 305737 - DNA, 1434 bp, Artificial Sequence
  derived and/or modified sequence
atggacggtttctacgaccagcaggttccatatatggtaacgaactctcagaggggtcgtaactgcaatgaaaaaccaaccaacgtgcggaaacgcaaatttatcaaccgggatctcgcgcacgatagcgaggagttattccaggacctttcgcagctgcaggaaacctggctggctgaagcccaggtgccagacaatgacgaacagtttgtgcctgattaccaggcagaaagtctggccttccacgggctacctcttaagatcaaaaaggaacctcattctccgtgttccgagatcagttccgcttgctcgcaagagcagcccttcaaattcagctacggcgaaaaatgcttgtacaacgtgtctgcttatgatcagaaacctcaggtcggaatgagacctagcaatcctcccaccccttccagtacacccgtgtctccactccaccatgcttcccccaactctactcacactccgaagcctgatagagcctttccagcccatctacccccaagccagagtatccctgattcctcctatcccatggatcataggttccgtagacagctctccgaaccttgtaactctttccccccattgccaacaatgccacgagagggccgtcctatgtatcagcgccagatgtcagagccgaacatacccttcccccctcagggcttcaagcaggaataccatgatcctgtgtatgagcacaacacgatggttggcagcgcagccagccagagttttccccccccgctcatgattaagcaggagccgcgggactttgcatacgactctgaggtgcctagctgccactcaatctacatgcgccaggagggtttcctcgcacaccctagccgaactgaggggtgcatgtttgagaaaggtcccaggcaattctacgatgacacctgtgtggtcccagagaagttcgacggtgacattaaacaggagcccggtatgtacagggaaggaccgacgtatcagcgcagggggtccctgcaattgtggcagttcctggttgctctccttgacgaccccagcaattcccatttcatcgcctggacagggcgcggcatggagtttaaacttatcgaacctgaggaggtcgccaggcgctggggaattcagaaaaaccggcccgctatgaactacgataagctgagccgttctctgagatactactacgagaagggcatcatgcaaaaggttgccggagagagatatgtctataagtttgtgtgcgatccagaggctctcttttccatggcctttcctgataaccagcggcccctgctgaagactgatatggaacgccacattaacgaagaagacactgtgccgttgtcccatttcgatgagagcatggcttatatgcctgaagggggctgctgcaacccacacccatacaatgaaggctacgtctactag

SEQ ID NO: 305738 - DNA, 63 bp, Artificial Sequence
  derived and/or modified sequence
atggacggtttttacgatcagcaggtgccatacatggtcactaattcacagcggggcaggtag

SEQ ID NO: 305739 - DNA, 3391 bp, Artificial Sequence
  derived and/or modified sequence
agtatccccaggcgccttaacaataagcagcgggttacagaggaaatcgagtctctccgtggcgcttccaggctgaggacccagcgcctaccggccgagcaccccctagggcagaggggcgagggagacccgcgggaaggggcagcaagccgcctgattgacagcccgaaatctgatcttgtgaaagagacgcggagccaatgggaggcagcgatccatcagtttggattggaggcccctggaggagaagtagaggaaaaaccaccgaattgagctctgtcagaggcgctttcggcttccaagggggaagtgctgggctataattaatgtttttattaaatttggagggaagtttttgcagcctttcgcctagcgtggccttcaggttgatagaagtccagatcctgaggaaatctccagctaaatgctcaaaatataaaatactgagctgagatttgcgaagagcagcagcatggatggattttatgaccagcaagtgccttacatggtcaccaatagtcagcgtgggagaaattgtaacgagaaaccaacaaatgtcaggaaaagaaaattcattaacagagatctggctcatgattcagaagaactctttcaagatctaagtcaattacaggaaacatggcttgcagaagctcaggtacctgacaatgatgagcagtttgtaccagactatcaggctgaaagtttggcttttcatggcctgccactgaaaatcaagaaagaaccccacagtccatgttcagaaatcagctctgcctgcagtcaagaacagccctttaaattcagctatggagaaaagtgcctgtacaatgtcagtgcctatgatcagaagccacaagtgggaatgaggccctccaacccccccacaccatccagcacgccagtgtccccactgcatcatgcatctccaaactcaactcatacaccgaaacctgaccgggccttcccagctcacctccctccatcgcagtccataccagatagcagctaccccatggaccacagatttcgccgccagctttctgaaccctgtaactcctttcctcctttgccgacgatgccaagggaaggacgtcctatgtaccaacgccagatgtctgagccaaacatccccttcccaccacaaggctttaagcaggagtaccacgacccagtgtatgaacacaacaccatggttggcagtgcggccagccaaagctttccccctcctctgatgattaaacaggaacccagagattttgcatatgactcagaagtgcctagctgccactccatttatatgaggcaagaaggcttcctggctcatcccagcagaacagaaggctgtatgtttgaaaagggccccaggcagttttatgatgacacctgtgttgtcccagaaaaattcgatggagacatcaaacaagagccaggaatgtatcgggaaggacccacataccaacggcgaggatcacttcagctctggcagtttttggtagctcttctggatgacccttcaaattctcattttattgcctggactggtcgaggcatggaatttaaactgattgagcctgaagaggtggcccgacgttggggcattcagaaaaacaggccagctatgaactatgataaacttagccgttcactccgctattactatgagaaaggaattatgcaaaaggtggctggagagagatatgtctacaagtttgtgtgtgatccagaagcccttttctccatggcctttccagataatcagcgtccactgctgaagacagacatggaacgtcacatcaacgaggaggacacagtgcctctttctcactttgatgagagcatggcctacatgccggaagggggctgctgcaacccccacccctacaacgaaggctacgtgtattaacacaagtgacagtcaagcagggcgtttttgcgcttttccttttttctgcaagatacagagaattgctgaatctttgttttatttctgttgtttgtattttatttttaaataataatacacaaaaaggggcttttcctgttgcattattctatggtctgccatggactgtgcactttatttgagggtgggtgggagtaatctaaacatttattctgtgtaacaggaagctaatgggtgaatgggcagagggatttggggattactttttacttaggcttgggatggggtcctacaagttttgagtatgatgaaactatatcatgtctgtttgatttcataacaacataagataatgtttattttatcggggtatctatggtacagttaatttcacgttgtgtaaatatccacttggagactatttgccttgggcattttcccctgtcatttatgagtctctgcaggtgtacaaaaaaaccccaatctactgtaaatggcagtttaattgttagaaatgactgtttttgcaccacttgtaaaaaggtatttagcgattgcatttgctgtttgttgttttattttgctttatatatgacttgcagaggataaccataaaatgggtaattctctctgaagttgaataatcaccatgactgtaaatgaggggcacaattttggactctggcgccaaactgagtcataggccagtagcattacgtgtatctggtgccaccttgctgtttagatacaaatcataccgtcttttaaatattttgaagcccatttcagttaaataatgacatgtcatggtcctttggaatcttcatttaaatgttaaatctggaatcaaaatgaagcaaaaaatatctgtctccttttcactttcttcagtacataaatacattatttaatcaataagaattaactgtactaaatcatgtattatgctgttctagttacagcaaacactctttaagaaaaatatccaatacactaaataggtactatagtaatttttagacatggtacccattgatatgcatttaaaccttttactgctgtgttatgttgataacatatataaatattagataatgctaatgcttctgctgctgtcttttctgtaatattctctttcatgctgaatttactatgaccatttataagcagtgcagttaactacagatagcatttcaggacaaaatagatgactcaaaccatttattgcttaaaaaatagcttacgccatgctatgctataagcagcttttatgcacattgacaaatgaagagtaagcttcagcttgctaaaggaaactgtggaaccttttgtaacttttggtgatatggaaaattatttacaaaccgtcaaagaatatgaggaagttgctgtatgacatagtgctggcactgatattatccatcatctctttttggacacttctgtaaatgtgattggattgtttgaaagaagatttaaagtttc

SEQ ID NO: 305740 - DNA, 6740 bp, Artificial Sequence
  derived and/or modified sequence
gtatccccaggcgccttaacaataagcagcgggttacagaggaaatcgagtctctccgtggcgcttccaggctgaggacccagcgcctaccggccgagcaccccctagggcagaggggcgagggagacccgcgggaaggggcagcaagccgcctgattgacagcccgaaatctgatcttgtgaaagagacgcggagccaatgggaggcagcgatccatcagtttggattggaggcccctggaggagaagtagaggaaaaaccaccgaattgagctctgtcagaggcgctttcggcttccaagggggaagtgctgggctataattaatgtttttattaaatttggagggaagtttttgcagcctttcgcctagcgtggccttcagtcccgttaggtgcaaagcaagtctcgttgatcgccattgctagttttgcacacgtttgcgaatcagagctgcccggggtacaccgaccgcgcagggaaacatcgagagtgtaaataaatacatcgcctcttgttcggatttttgctactaccgaaaatatgtaaattgtgaactctgttggctctctttggatccaggttgatagaagtccagatcctgaggaaatctccagctaaatgctcaaaatataaaatactgagctgagatttgcgaagagcagcagcatggatggattttatgaccagcaagtgccttacatggtcaccaatagtcagcgtgggagaaattgtaacgagaaaccaacaaatgtcaggaaaagaaaattcattaacagagatctggctcatgattcagaagaactctttcaagatctaagtcaattacaggaaacatggcttgcagaagctcaggtacctgacaatgatgagcagtttgtaccagactatcaggctgaaagtttggcttttcatggcctgccactgaaaatcaagaaagaaccccacagtccatgttcagaaatcagctctgcctgcagtcaagaacagccctttaaattcagctatggagaaaagtgcctgtacaatgtcagtgcctatgatcagaagccacaagtgggaatgaggccctccaacccccccacaccatccagcacgccagtgtccccactgcatcatgcatctccaaactcaactcatacaccgaaacctgaccgggccttcccagctcacctccctccatcgcagtccataccagatagcagctaccccatggaccacagatttcgccgccagctttctgaaccctgtaactcctttcctcctttgccgacgatgccaagggaaggacgtcctatgtaccaacgccagatgtctgagccaaacatccccttcccaccacaaggctttaagcaggagtaccacgacccagtgtatgaacacaacaccatggttggcagtgcggccagccaaagctttccccctcctctgatgattaaacaggaacccagagattttgcatatgactcagaagtgcctagctgccactccatttatatgaggcaagaaggcttcctggctcatcccagcagaacagaaggctgtatgtttgaaaagggccccaggcagttttatgatgacacctgtgttgtcccagaaaaattcgatggagacatcaaacaagagccaggaatgtatcgggaaggacccacataccaacggcgaggatcacttcagctctggcagtttttggtagctcttctggatgacccttcaaattctcattttattgcctggactggtcgaggcatggaatttaaactgattgagcctgaagaggtggcccgacgttggggcattcagaaaaacaggccagctatgaactatgataaacttagccgttcactccgctattactatgagaaaggaattatgcaaaaggtggctggagagagatatgtctacaagtttgtgtgtgatccagaagcccttttctccatggcctttccagataatcagcgtccactgctgaagacagacatggaacgtcacatcaacgaggaggacacagtgcctctttctcactttgatgagagcatggcctacatgccggaagggggctgctgcaacccccacccctacaacgaaggctacgtgtattaacacaagtgacagtcaagcagggcgtttttgcgcttttccttttttctgcaagatacagagaattgctgaatctttgttttatttctgttgtttgtattttatttttaaataataatacacaaaaaggggcttttcctgttgcattattctatggtctgccatggactgtgcactttatttgagggtgggtgggagtaatctaaacatttattctgtgtaacaggaagctaatgggtgaatgggcagagggatttggggattactttttacttaggcttgggatggggtcctacaagttttgagtatgatgaaactatatcatgtctgtttgatttcataacaacataagataatgtttattttatcggggtatctatggtacagttaatttcacgttgtgtaaatatccacttggagactatttgccttgggcattttcccctgtcatttatgagtctctgcaggtgtacaaaaaaaccccaatctactgtaaatggcagtttaattgttagaaatgactgtttttgcaccacttgtaaaaaggtatttagcgattgcatttgctgtttgttgttttattttgctttatatatgacttgcagaggataaccataaaatgggtaattctctctgaagttgaataatcaccatgactgtaaatgaggggcacaattttggactctggcgccaaactgagtcataggccagtagcattacgtgtatctggtgccaccttgctgtttagatacaaatcataccgtcttttaaatattttgaagcccatttcagttaaataatgacatgtcatggtcctttggaatcttcatttaaatgttaaatctggaatcaaaatgaagcaaaaaatatctgtctccttttcactttcttcagtacataaatacattatttaatcaataagaattaactgtactaaatcatgtattatgctgttctagttacagcaaacactctttaagaaaaatatccaatacactaaataggtactatagtaatttttagacatggtacccattgatatgcatttaaaccttttactgctgtgttatgttgataacatatataaatattagataatgctaatgcttctgctgctgtcttttctgtaatattctctttcatgctgaatttactatgaccatttataagcagtgcagttaactacagatagcatttcaggacaaaatagatgactcaaaccatttattgcttaaaaaatagcttacgccatgctatgctataagcagcttttatgcacattgacaaatgaagagtaagcttcagcttgctaaaggaaactgtggaaccttttgtaacttttggtgatatggaaaattatttacaaaccgtcaaagaatatgaggaagttgctgtatgacatagtgctggcactgatattatccatcatctctttttggacacttctgtaaatgtgattggattgtttgaaagaagatttaaagtttcaaagttttttgttctgtttttgctttgcatttggagaaaatattgaaagcagggtatgttgtttcattcaccttgaaaaaaccatgagtaaatggggatatagaatctctgaatagctcgctaaaagattcaagcaagggacatgaattttgttccatctatcaataatatccagaagaacaacttttttaaagagtctatagcaaaaagcaaaaaaaaaaaaaaattctaaacacaaagtcaaaataaacctattgtaaaagcatttcgtgatgagcatgaaaaagattgtttaaagatgatccccccagctacccattttccaaaactacacagatcacagctcatttctctaagtggagcagttatcaagaaacccaaacaccaaaattgctactcttcacatttaatcctacaaaaagtactccaatttcaaaatatgtatgtaacctgcgatttcaatgattgttgttcatatacatcatgtattattttggcccattttgggcctaaaaaagaaaactatgccttaaaaatcagaaccttttctccccactatgcttatgtggccatctacagcacttagaataaaaacagatgttaaaatattcagtgaaagttttattggaaaaaggaattgagatatataattgagatttggtgaaattgaaggagaaaatttaagtgagtctttaaaatatattctgaatgaaaactgtattgaggattcatttttgttccttttttttctttttctcttttctcctttttcttctttttaatagtctagttttagtcagtcagtgaggaagaattgggccatgctaacgttatcacaagagaacaatggcagaaatggtattagttatataatatttaaggacaaactatatgttttgctgttttaacgtagtgactcactgaactaaatacataattgaccaacattaagtgtatttccaatacagaagggttgaaaatattacattataaactcttttgaaaaatgtatctaaaattttttaagttctgttttgattccactttttggttgagtttttatgtttttgttttcaggtagattaataaatctggcagctgatttctgcaagattcttgtgttttgaatttctcattgaattggctactcaaacatagaaatcatttgttaatgatgtaatgtcttctctcagcttttatcttcactgctgtttgctgtctcttgatgatgacatgttaatacccaatagattaattgcaacaaacacttatactcaaataactaagtaaaaataatttttcttgttatgtccatgaaaagtgcttcagaataaaaatccacaagactgacagtgcagaacatttttctcaaatcatgggcggatcttggaggtctagtttcccgtagatgctgtaaccaattaccacaacttcagtaatttacacaaatttatcttatagttctggaggcagaagttcaaaagaagccttaagagactaaaaccaagatgtccttaggtctggttccttctggaggctccaggggagattcttccagctttcacttctagagtctgctgacattccttggctcctggctacatcacttcaatctctgcttccatggtcacatactcttctactatagtcaaatttccttcctgcctcttataaggatgcttgtgattacatttaggggatgctcagataatccaggacaatctctccatctcaagatccttaacttaatgacgtgtgccaagtccctttggctagataattattcataggtcccagggattaggacatggatgtaaggggtgagggcagggctgttattcagaacaccgcacggaggaggaagactgtgtagcaaagactctaattgatttactcaggaacagtggagttctgctgagggatctaggatttgaaagtactagagtttgcttttatttaccactgagatattttccccttattctgcataaataattttgaaaactttctatattaaatttcaactattccactaaaatgtctggtaatcacatcaagcctttagattattcaaatccttccccagcccccaggaaaacactaagtcatgaaacagaaaaacagaaggtatgataataatagtaataacagttaaatcagtggtctaatccagattttattttttaatacatttcttttggtgttaatatgggttactatgtgatcttatcatttgctagtgattattacttattaggtaagaacaatgtgtaaaatatgtctattactcaaaagaacaattgcaaaatgagtcaacttatctttatataaccaggaaagaaatatattgccagaagctacagaattttgccagatgatagggatttctaaaatgagccactttgtctatcatgcagccttttcagagcttgtaatgagaaaacattacagaggagaaggtcatttggatgtttgttacttggaatcctagaaaacaaaaactaaaatttaaaaataagaagtgagtaagctattttccatttgcgatttggtatggagaagagaggaaatagaattattaaaaaaatacaaattgggtaaaagtgatggtggaaaaaatataaagaaggcaaatgtacatattaagcaattctactaagaattggaaaaatcaagtttcaaaaagatggtaatagttgggcatgatactagaaaatttcacccagtttattcagagctcaactagtacttttaggacttctttttttatatacatgagactcactttgacatacttaaaaaaaaaacagtttatggaaagtacagtttaagaggagaatttgattagactaagtggatatctttatagaaatattaatgatttcagaattttcagttacaagtgtatataccgtggctattgtttatggattcatatgtaaggtagggtcttttttgcatatagactccagtattagttactttcattctaaaattatatttatgcttctatggggaagaaaatttttaattcacttggttgtattaaaattatacttacggtttgagaaaacatgctatgaaaatcatgattatagcaaattaaatatgctcaaaatttaaatctaaaataaaagcccagaaactgaaaat

SEQ ID NO: 305741 - DNA, 1434 bp, Artificial Sequence
  derived and/or modified sequence
atggatggcttctatgaccagcaggtgccctacatggtgaccaacagccagaggggcaggaactgcaatgagaagcccaccaacgtgaggaagaggaagttcatcaacagagacctggcccatgattctgaggagctgttccaggacctgagccagctgcaggagacctggctggccgaggcccaggtgcctgacaatgatgagcagtttgtgcctgactaccaggccgagagcctggccttccacggcctgcccctgaagatcaagaaggagccccacagcccctgcagcgagatcagcagcgcctgcagccaggagcagcccttcaagttctcctatggagagaagtgcctgtacaacgtgtctgcctatgaccagaagccccaggtgggcatgaggcccagcaacccccccacccccagcagcacccctgtgagccccctgcaccacgccagccccaacagcacccacacccccaagccagaccgggccttccctgcccacctgccccccagccagagcatcccagacagcagctaccccatggaccaccgcttccggcggcagctgtctgagccctgcaacagcttcccccccctgcccaccatgccccgggagggccggcccatgtaccagaggcagatgtctgagcccaacatccccttccccccccagggcttcaagcaggagtaccatgaccctgtgtatgagcacaacaccatggtgggcagcgctgccagccagagcttccccccacccctgatgatcaagcaggagccccgggactttgcctatgattctgaggtgcccagctgccacagcatctacatgaggcaggagggcttcctggcccaccccagcaggacagagggctgcatgtttgagaagggcccccggcagttctatgatgacacctgtgtggtgcctgagaagtttgatggagacatcaagcaggagcccggcatgtaccgggagggccccacctaccagaggcggggcagcctgcagctgtggcagttcctggtggccctgctggatgaccccagcaacagccacttcatcgcctggacaggccggggcatggagttcaagctgattgagcctgaggaggtggcccggcgctggggcatccagaagaacagacctgccatgaactatgacaagctgagccgcagcctgcgctactactatgagaagggcatcatgcagaaggtggccggggagcgctacgtgtacaagtttgtgtgtgaccctgaggccctcttctccatggccttcccagacaaccagaggcccctgctgaagacagacatggagcggcacatcaatgaagaagatactgtgcccctgagccactttgatgagagcatggcctacatgcctgagggcggctgctgcaacccccacccctacaatgaaggctacgtgtactag

SEQ ID NO: 305742 - DNA, 63 bp, Artificial Sequence
  derived and/or modified sequence
atggatggcttctatgaccagcaggtgccctacatggtgaccaacagccagaggggccgctag

SEQ ID NO: 305743 - DNA, 1434 bp, Artificial Sequence
  derived and/or modified sequence
atggacggcttctacgaccagcaggtgccctacatggtgaccaacagtcaacggggccgcaattgtaacgaaaagcctaccaacgtgaggaaaaggaagtttatcaatagagatctggcccatgactcagaggagctatttcaggatcttagccagttgcaagaaacttggttggccgaggctcaggtcccggacaatgatgaacagttcgtgcccgactatcaggcagaatccctcgccttccacggcctccctctcaagattaaaaaagaacctcatagcccctgttcagaaatctctagtgcctgtagccaggagcagcctttcaaatttagttacggcgagaaatgcttatacaacgtatcagcgtatgatcaaaaaccacaggtagggatgcggcctagcaacccaccaacccccagcagcacaccagtctcaccactgcatcacgcgtccccaaattcaactcatacacctaaacccgatcgggcgttcccagcacatttaccaccttcccagagcatccccgactcatcctatcccatggaccacaggtttcggcggcagctcagcgagccgtgtaatagttttccaccgctacccaccatgcccagagaaggtaggccaatgtaccagaggcagatgagcgaacctaatattccttttccaccacaggggttcaaacaggaatatcacgacccagtttatgagcataataccatggttgggagtgccgcgtctcagtctttcccaccccctcttatgatcaagcaggaaccacgtgacttcgcctacgattctgaagtgccatcctgtcattcaatttacatgagacaggaaggctttttagcccatccctcccggacggaaggctgtatgttcgaaaaagggccaagacaattttatgacgatacttgcgtcgttccggagaagttcgacggggacatcaagcaagagcccggcatgtaccgtgaaggtccaacataccagcgccgaggaagcctgcaattgtggcagtttctggtggcactcctcgacgatccgagcaatagccactttatcgcctggacaggacgtggcatggagtttaagcttattgagccggaagaagtggccaggaggtggggcattcaaaagaatcggcccgccatgaactatgataaactgtctcgatctctccgatactactacgagaaaggaatcatgcagaaagtggcgggcgaaaggtatgtctataaattcgtttgtgaccccgaggcactgtttagtatggcctttccagataaccagcgcccactcttaaaaacagatatggaacggcatatcaacgaagaagatactgtgcctctttctcatttcgacgaatctatggcctacatgcccgaaggaggttgttgtaacccacatccatataacgaaggatacgtctactag

SEQ ID NO: 305744 - DNA, 1434 bp, Artificial Sequence
  derived and/or modified sequence
atggacggcttctacgaccagcaggtgccctacatggtgaccaacagtcaacggggcagaaattgtaatgaaaaacccaccaatgtcaggaaacggaagtttatcaatcgcgacctagctcacgacagtgaggaactgtttcaggatctgtcgcagctccaggagacctggttggctgaagcccaggtaccagacaatgatgagcagttcgtgcctgactatcaggccgagtcactcgcgttccacggccttcctctcaaaatcaagaaggagccacattcgccatgtagcgaaatctcttctgcatgttcacaggagcaacccttcaaattttcgtacggggagaagtgtctctataatgtgtcagcttacgaccagaagccacaagtgggtatgagaccttccaatccacctacgccatcgagcacccctgtatccccgttgcaccacgcctcacccaatagtactcatactccaaagccagaccgtgccttccctgcccaccttccaccgtcccagagtatccctgacagttcctacccaatggaccaccgcttccggcgccaactgagcgaaccatgtaactccttcccccccctgccgactatgccacgggaaggtagacctatgtatcagcggcagatgagcgaacccaacattcctttcccgccccagggttttaaacaggagtatcatgacccggtatatgagcataataccatggtgggctcagctgcatctcagagtttccccccaccattgatgattaagcaggagcctcgcgattttgcttacgactccgaagttccaagttgtcattccatttacatgcgtcaggagggattcttagcccatccttcacgaactgagggctgtatgttcgagaaggggcctaggcagttctacgatgacacctgcgtggttcccgaaaagtttgatggggacatcaagcaggagccaggcatgtatcgcgaaggccccacctaccagagacgcggaagtctacaactatggcaattcctagtggctctgctggatgaccccagcaatagccatttcatcgcctggaccgggagaggcatggagttcaagctcatcgaaccggaggaagttgctcgtcggtggggaatacaaaaaaatagaccagccatgaactatgataagctgtcccgcagcctccgttactattatgagaagggaattatgcagaaggtcgctggtgaacgttacgtatacaagtttgtgtgtgatcctgaggcactcttctcaatggcctttcctgataatcagcggcccctgctcaaaaccgatatggaaagacatatcaatgaggaagatacggtgcctctaagccacttcgatgagtcgatggcgtatatgcctgagggtggctgttgtaaccctcacccttataacgagggatacgtttattag

SEQ ID NO: 305745 - DNA, 63 bp, Artificial Sequence
  derived and/or modified sequence
atggacggcttctacgaccagcaggtgccctacatggtgaccaacagccagcgaggacggtag

SEQ ID NO: 305746 - DNA, 1434 bp, Artificial Sequence
  derived and/or modified sequence
atggacggtttttacgaccagcaagtgccatatatggttactaacagtcagcggggtcgcaactgcaacgaaaagcccaccaacgtgcgaaagaggaaattcatcaatcgggatctcgctcacgattccgaagagctctttcaggatctctctcagctccaggaaacttggttggccgaggctcaggtaccggacaatgatgaacaattcgtcccagattatcaggccgagtcacttgccttccatgggctgccgctcaagataaaaaaggaaccacatagcccttgttcagagatttctagcgcctgttcccaagaacaaccattcaaattttcatacggggaaaaatgtctgtataatgtaagcgcgtatgatcagaagccacaggttggcatgcgaccctcaaacccccctaccccatctagcacgcctgtcagtcctttgcaccacgcctcgcccaattccacccacacccctaaacccgatcgcgcttttccggctcatttgcccccttcccagtcaattcccgatagcagttatccaatggaccacagatttagacggcagctttctgagccttgcaacagctttcctccattgcccacgatgccaagagaagggcgaccgatgtatcagcgccagatgtcagagcctaatatacccttccccccacaaggattcaagcaggagtaccatgacccggtctatgagcacaacactatggtcgggtcagccgcttcgcagtcctttcccccaccattaatgattaaacaagagccccgagatttcgcctatgattccgaagttccaagctgtcactcaatatatatgcgccaagaaggattcctggcgcaccccagccgcaccgaggggtgcatgttcgagaaggggcctcgtcaattctatgacgatacatgcgtggttccagagaaatttgacggggacatcaaacaggagcccggaatgtacagggaggggcctacgtaccagcgacgcggaagcttgcaactatggcaatttctcgtagctctgctggacgatccaagcaactctcatttcattgcttggacagggcgaggcatggaattcaaactaattgagccagaagaggtcgcacggaggtggggtatccagaagaacaggccggcaatgaattatgataagttgagccgcagcttgcggtattactatgagaaggggatcatgcagaaggtcgcgggagaacgttacgtgtataaatttgtatgcgacccggaggcactcttcagtatggccttccctgacaaccagcggcctctgttaaagactgatatggagcgccatatcaacgaggaggacaccgtgcccctatcccattttgacgaatctatggcttatatgcctgaaggcggttgctgcaatccccacccctataatgagggatacgtgtactag

SEQ ID NO: 305747 - DNA, 1434 bp, Artificial Sequence
  derived and/or modified sequence
atggacggattttatgaccagcaggttccatatatggtcaccaattcccagagaggccgaaattgtaatgagaagcccactaacgttaggaagaggaaattcattaatcgagacttggcacacgattcagaagagttgtttcaggatctgtcacaattgcaggagacctggcttgcagaggctcaggtaccggacaacgacgagcagttcgtcccagactaccaggcagaaagtctggcattccacgggttgccattaaagatcaagaaagagccacattctccttgctcagagatcagctcagcatgctcgcaggaacagccctttaaattttcctatggagagaagtgtctctacaatgtaagcgcctacgatcagaaaccacaagtggggatgcgcccttctaatcctcctacaccctctagcacacctgtgtctccattacaccacgcatcgcctaatagcacacatacaccgaagccagatagggcttttccggcacatctgccgccttctcagtccatccctgatagttcttatcccatggaccatcggttccgtcgccaactcagtgaaccctgtaatagcttcccgcctctgcctacaatgccacgagaagggcgtcccatgtaccagaggcagatgagcgagcccaacattccctttcctccacaggggttcaagcaggaatatcacgaccctgtttacgaacacaacacaatggtcgggtcggcagcaagccagagttttcctccaccactgatgatcaagcaggaacctcgcgacttcgcatacgactctgaagtgccttcctgtcactctatttacatgcggcaggagggctttctggcacatccaagccgcaccgagggttgcatgttcgaaaaggggcctaggcagttctatgatgatacatgcgtagtgccagaaaaatttgatggggatattaaacaggaacccggaatgtatagggaaggacctacttaccagcgtagagggagcttgcagctctggcagttcctggttgctcttctcgacgaccccagcaattctcacttcattgcttggaccgggcgtggaatggagttcaagctgatagaacctgaggaagtggccagacggtggggaatccagaaaaaccgcccagctatgaactacgacaagctatcccgatcccttcggtattactacgaaaagggcattatgcaaaaggtcgccggagagaggtacgtgtacaaattcgtttgtgatcccgaagccctgttctccatggccttccccgacaatcagcgacctctgctgaagaccgacatggagcggcacattaacgaagaagacacggtgccactgagccattttgacgaatccatggcctatatgccagaaggtggctgctgtaacccacacccctacaacgaaggatatgtctattag

SEQ ID NO: 305748 - DNA, 63 bp, Artificial Sequence
  derived and/or modified sequence
atggacggtttctatgatcagcaggtgccttatatggtaacaaacagtcagaggggccgttag

SEQ ID NO: 305749 - protein, 459 aa, Artificial Sequence
  derived and/or modified sequence
MDGFYDQQVPYMVTNSQRGRNCNEKPTNVRKRKFINRDLAHDSEELFQDLSQLQETWLAEVAFHGLPLKIKKEPHSPCSEISSACSQEQPFKFSYGEKCLYNVSAYDQKPQVGMRPSNPPTPSSTPVSPLHHASPNSTHTPKPDRAFPAHLPPSQSIPDSSYPMDHRFRRQLSEPCNSFPPLPTMPREGRPMYQRQMSEPNIPFPPQGFKQEYHDPVYEHNTMVGSAASQSFPPPLMIKQEPRDFAYDSEVPSCHSIYMRQEGFLAHPSRTEGCMFEKGPRQFYDDTCVVPEKFDGDIKQEPGMYREGPTYQRRGSLQLWQFLVALLDDPSNSHFIAWTGRGMEFKLIEPEEVARRWGIQKNRPAMNYDKLSRSLRYYYEKGIMQKVAGERYVYKFVCDPEALFSMAFPDNQRPLLKTDMERHINEEDTVPLSHFDESMAYMPEGGCCNPHPYNEGYVY

SEQ ID NO: 305750 - protein, 20 aa, Artificial Sequence
  derived and/or modified sequence
MDGFYDQQVPYMVTNSQRGR

SEQ ID NO: 305751 - DNA, 1380 bp, Artificial Sequence
  derived and/or modified sequence
atggacggcttctacgaccagcaggtgccctacatggtgaccaacagccagagaggcagaaactgcaacgagaagcccaccaacgtgagaaagagaaagttcatcaacagagacctggcccacgacagcgaggagctgttccaggacctgagccagctgcaggagacctggctggccgaggtggccttccacggcctgcccctgaagatcaagaaggagccccacagcccctgcagcgagatcagcagcgcctgcagccaggagcagcccttcaagttcagctacggcgagaagtgcctgtacaacgtgagcgcctacgaccagaagccccaggtgggcatgagacccagcaacccccccacccccagcagcacccccgtgagccccctgcaccacgccagccccaacagcacccacacccccaagcccgacagagccttccccgcccacctgccccccagccagagcatccccgacagcagctaccccatggaccacagattcagaagacagctgagcgagccctgcaacagcttcccccccctgcccaccatgcccagagagggcagacccatgtaccagagacagatgagcgagcccaacatccccttccccccccagggcttcaagcaggagtaccacgaccccgtgtacgagcacaacaccatggtgggcagcgccgccagccagagcttccccccccccctgatgatcaagcaggagcccagagacttcgcctacgacagcgaggtgcccagctgccacagcatctacatgagacaggagggcttcctggcccaccccagcagaaccgagggctgcatgttcgagaagggccccagacagttctacgacgacacctgcgtggtgcccgagaagttcgacggcgacatcaagcaggagcccggcatgtacagagagggccccacctaccagagaagaggcagcctgcagctgtggcagttcctggtggccctgctggacgaccccagcaacagccacttcatcgcctggaccggcagaggcatggagttcaagctgatcgagcccgaggaggtggccagaagatggggcatccagaagaacagacccgccatgaactacgacaagctgagcagaagcctgagatactactacgagaagggcatcatgcagaaggtggccggcgagagatacgtgtacaagttcgtgtgcgaccccgaggccctgttcagcatggccttccccgacaaccagagacccctgctgaagaccgacatggagagacacatcaacgaggaggacaccgtgcccctgagccacttcgacgagagcatggcctacatgcccgagggcggctgctgcaacccccacccctacaacgagggctacgtgtactag

SEQ ID NO: 305752 - DNA, 1380 bp, Artificial Sequence
  derived and/or modified sequence
atggacggtttctatgaccaacaggtcccctatatggtgacgaattcccagagaggaaggaattgcaacgagaagcctaccaacgtgcgcaaacgcaaattcatcaaccgcgaccttgctcacgattcggaagagttattccaggatctgtctcagctccaagagacatggctggccgaggtcgctttccacggactccctttgaaaatcaaaaaggagcctcactccccctgttccgaaattagctccgcgtgttcccaggaacagccttttaaattctcatatggagaaaagtgcctgtataatgtgagtgcatacgaccaaaagcctcaggtgggaatgcgccctagtaatccaccgaccccatctagtaccccagtgtctcctctgcatcacgcctcacctaacagcactcacactccgaagcccgaccgggcctttcccgcgcatttgcctccctcccagtccataccagattcttcctatccaatggatcatcgattcaggcggcagctgagcgagccctgcaactccttcccacctctgcccaccatgccccgggaagggcggcccatgtatcagaggcaaatgtccgagcccaacatccctttcccaccccaggggtttaaacaggaataccatgatcccgtgtacgaacacaacaccatggttggaagcgcggcctcacagtcttttccaccccccctcatgataaagcaggagcctcgcgacttcgcatacgattctgaagttccctcctgccattccatctacatgcggcaagaagggttcctcgctcacccaagccggacggaagggtgtatgttcgaaaagggccccagacagttctacgacgacacatgtgtggtgccggagaaatttgatggagatattaaacaggagcccggcatgtacagggaaggccccacatatcagcgccgaggtagccttcaactttggcagttccttgtggcattgttggacgacccctccaatagtcactttattgcatggacgggcaggggcatggagtttaagctgattgaaccggaagaggtcgctaggaggtgggggatccagaagaacagaccagcaatgaattatgataagctgtcccgttcattgcgctactattacgaaaaagggatcatgcagaaagtggcaggagagagatatgtttacaagttcgtgtgcgaccccgaagcattattcagtatggcttttccagataatcagaggcccctcctgaagactgatatggaacgccacatcaacgaggaggacacggtgcctctatctcatttcgacgagtccatggcttatatgccagagggcgggtgttgtaatcctcatccctacaatgaagggtacgtatactag

SEQ ID NO: 305753 - DNA, 1380 bp, Artificial Sequence
  derived and/or modified sequence
atggacggtttttacgaccagcaggtaccctatatggtgaccaattcccagcgagggcgcaactgcaacgaaaagccaacgaatgtacgcaaacggaaatttattaatcgagacttagcccatgactctgaggaactgtttcaggatctttcacagctccaggaaacgtggttagccgaggttgcgtttcacgggctgcccctgaaaatcaagaaagaaccccacagcccttgtagcgaaatctcaagcgcctgttcccaggagcaacccttcaaattcagttatggagagaaatgtctgtacaacgtgtccgcatacgaccagaagccacaagtagggatgcgcccctctaacccacctacaccaagctcgacaccagtttctcctttgcaccacgcctcacctaattctacccacactcccaagccggatcgtgcgtttcctgcgcacttgcccccctctcagtcgatccccgacagtagctacccaatggaccataggttccgtcggcagcttagtgaaccctgcaattctttcccccccctgccgactatgccgagggaaggacggccaatgtaccagcggcagatgtccgaacctaatatcccctttccaccccaggggttcaaacaggagtaccatgaccccgtgtatgagcacaacactatggtgggcagtgccgcatcacagtctttccccccacccctaatgatcaaacaggaaccgagggactttgcgtacgactccgaagtaccatcctgtcattcgatttatatgaggcaggaaggattcttagcccatccaagtagaacggaaggatgcatgtttgagaaggggccgaggcagttctacgacgatacttgcgttgtgccagagaaattcgatggcgatatcaaacaggagccaggaatgtatcgggagggacctacataccagagacgaggttcactccaactgtggcagtttctcgtcgctctgctcgatgacccctctaacagtcactttatcgcctggaccgggagaggcatggaattcaagttgatcgagcccgaggaggtggccagacgatggggcattcagaaaaatcgaccggctatgaattatgacaagcttagtaggagtctccgctactactacgaaaagggaatcatgcagaaggtcgccggagaacgctatgtctataagttcgtgtgcgaccctgaagcactgttctctatggcctttcccgacaaccagagacccctgctgaagacggatatggaaagacacatcaatgaggaggacactgttccactgtcacattttgacgaatccatggcttacatgcccgaagggggctgctgcaatcctcacccatataatgaggggtatgtgtactag

SEQ ID NO: 305754 - DNA, 1380 bp, Artificial Sequence
  derived and/or modified sequence
atggacggcttctatgatcagcaggtcccttatatggttactaattcacagcgaggtcggaactgtaatgaaaaaccaacaaatgttaggaaacgaaaattcataaatagagaccttgctcacgattcggaagagttattccaggacttaagtcagctccaagagacttggttggccgaagtggcgttccacggccttccactaaagatcaagaaggaacctcactctccatgcagtgaaatctctagcgcctgtagccaggaacagcccttcaaatttagttatggagagaagtgcctatacaatgtttccgcatacgatcagaagccccaagtgggtatgcgtccctccaatccacctacaccatcttccacaccggtgtcacccctgcaccatgccagccctaactccactcacacccctaaaccagacagagcctttcctgctcacctgcctccaagccagtccattcccgattcaagctaccccatggatcatcggtttagacgccagctgagtgaaccatgcaacagttttccacctctgcccacaatgcctcgcgaaggaagaccgatgtaccagaggcagatgtcagaaccgaacatcccgtttccacctcagggcttcaaacaagagtatcatgatcctgtgtatgagcataatactatggttggatctgctgcatctcaaagtttccctccccctctgatgatcaaacaggagccacgcgacttcgcatacgatagcgaagtgccttcctgccactccatctatatgcggcaagaaggtttcttggcacatcccagcaggaccgagggctgcatgttcgaaaaaggtccccggcaattttatgacgatacctgtgtcgtacccgagaagtttgatggtgatataaaacaggagcctgggatgtacagggagggccctacctaccaacgaagaggctcattgcaactgtggcaattcctagtagctctgctggacgatccaagcaattcacattttatcgcttggacagggcgggggatggagtttaagctgattgagcctgaagaggtggctcgccggtggggtatccagaagaatagacccgccatgaactacgataaattatctcgcagcctgaggtattattacgagaagggtattatgcaaaaggtcgccggtgagcggtatgtgtataaatttgtgtgtgatccggaggccctttttagtatggcttttcccgacaaccagcggcctctcctgaagactgacatggagagacacataaatgaggaggacactgtgcctttatctcactttgacgaatctatggcctacatgcccgaaggcggatgttgcaatccccacccctataacgaggggtacgtgtattag

SEQ ID NO: 305755 - DNA, 6348 bp, Artificial Sequence
  derived and/or modified sequence
cgttattggctgcgggaagaacctcgccgggacctaacccgaagctccgccccctcgcggttaccctggatacccgtcaggctcgggctgcagagaaggaggatcagggcaagtggcttcagagatgcagccctcactgcttaacgtcctagttattgtccttgaaacccgagccatctcaccgctcgcccccaaccctgggctctggctgtttaaaagctggagaggaagtgaaagcgtcaagtacagttgatagaagtccagatcctgaggaaatctccagctaaatgctcaaaatataaaatactgagctgagatttgcgaagagcagcagcatggatggattttatgaccagcaagtgccttacatggtcaccaatagtcagcgtgggagaaattgtaacgagaaaccaacaaatgtcaggaaaagaaaattcattaacagagatctggctcatgattcagaagaactctttcaagatctaagtcaattacaggaaacatggcttgcagaagtggcttttcatggcctgccactgaaaatcaagaaagaaccccacagtccatgttcagaaatcagctctgcctgcagtcaagaacagccctttaaattcagctatggagaaaagtgcctgtacaatgtcagtgcctatgatcagaagccacaagtgggaatgaggccctccaacccccccacaccatccagcacgccagtgtccccactgcatcatgcatctccaaactcaactcatacaccgaaacctgaccgggccttcccagctcacctccctccatcgcagtccataccagatagcagctaccccatggaccacagatttcgccgccagctttctgaaccctgtaactcctttcctcctttgccgacgatgccaagggaaggacgtcctatgtaccaacgccagatgtctgagccaaacatccccttcccaccacaaggctttaagcaggagtaccacgacccagtgtatgaacacaacaccatggttggcagtgcggccagccaaagctttccccctcctctgatgattaaacaggaacccagagattttgcatatgactcagaagtgcctagctgccactccatttatatgaggcaagaaggcttcctggctcatcccagcagaacagaaggctgtatgtttgaaaagggccccaggcagttttatgatgacacctgtgttgtcccagaaaaattcgatggagacatcaaacaagagccaggaatgtatcgggaaggacccacataccaacggcgaggatcacttcagctctggcagtttttggtagctcttctggatgacccttcaaattctcattttattgcctggactggtcgaggcatggaatttaaactgattgagcctgaagaggtggcccgacgttggggcattcagaaaaacaggccagctatgaactatgataaacttagccgttcactccgctattactatgagaaaggaattatgcaaaaggtggctggagagagatatgtctacaagtttgtgtgtgatccagaagcccttttctccatggcctttccagataatcagcgtccactgctgaagacagacatggaacgtcacatcaacgaggaggacacagtgcctctttctcactttgatgagagcatggcctacatgccggaagggggctgctgcaacccccacccctacaacgaaggctacgtgtattaacacaagtgacagtcaagcagggcgtttttgcgcttttccttttttctgcaagatacagagaattgctgaatctttgttttatttctgttgtttgtattttatttttaaataataatacacaaaaaggggcttttcctgttgcattattctatggtctgccatggactgtgcactttatttgagggtgggtgggagtaatctaaacatttattctgtgtaacaggaagctaatgggtgaatgggcagagggatttggggattactttttacttaggcttgggatggggtcctacaagttttgagtatgatgaaactatatcatgtctgtttgatttcataacaacataagataatgtttattttatcggggtatctatggtacagttaatttcacgttgtgtaaatatccacttggagactatttgccttgggcattttcccctgtcatttatgagtctctgcaggtgtacaaaaaaaccccaatctactgtaaatggcagtttaattgttagaaatgactgtttttgcaccacttgtaaaaaggtatttagcgattgcatttgctgtttgttgttttattttgctttatatatgacttgcagaggataaccataaaatgggtaattctctctgaagttgaataatcaccatgactgtaaatgaggggcacaattttggactctggcgccaaactgagtcataggccagtagcattacgtgtatctggtgccaccttgctgtttagatacaaatcataccgtcttttaaatattttgaagcccatttcagttaaataatgacatgtcatggtcctttggaatcttcatttaaatgttaaatctggaatcaaaatgaagcaaaaaatatctgtctccttttcactttcttcagtacataaatacattatttaatcaataagaattaactgtactaaatcatgtattatgctgttctagttacagcaaacactctttaagaaaaatatccaatacactaaataggtactatagtaatttttagacatggtacccattgatatgcatttaaaccttttactgctgtgttatgttgataacatatataaatattagataatgctaatgcttctgctgctgtcttttctgtaatattctctttcatgctgaatttactatgaccatttataagcagtgcagttaactacagatagcatttcaggacaaaatagatgactcaaaccatttattgcttaaaaaatagcttacgccatgctatgctataagcagcttttatgcacattgacaaatgaagagtaagcttcagcttgctaaaggaaactgtggaaccttttgtaacttttggtgatatggaaaattatttacaaaccgtcaaagaatatgaggaagttgctgtatgacatagtgctggcactgatattatccatcatctctttttggacacttctgtaaatgtgattggattgtttgaaagaagatttaaagtttcaaagttttttgttctgtttttgctttgcatttggagaaaatattgaaagcagggtatgttgtttcattcaccttgaaaaaaccatgagtaaatggggatatagaatctctgaatagctcgctaaaagattcaagcaagggacatgaattttgttccatctatcaataatatccagaagaacaacttttttaaagagtctatagcaaaaagcaaaaaaaaaaaaaaattctaaacacaaagtcaaaataaacctattgtaaaagcatttcgtgatgagcatgaaaaagattgtttaaagatgatccccccagctacccattttccaaaactacacagatcacagctcatttctctaagtggagcagttatcaagaaacccaaacaccaaaattgctactcttcacatttaatcctacaaaaagtactccaatttcaaaatatgtatgtaacctgcgatttcaatgattgttgttcatatacatcatgtattattttggcccattttgggcctaaaaaagaaaactatgccttaaaaatcagaaccttttctccccactatgcttatgtggccatctacagcacttagaataaaaacagatgttaaaatattcagtgaaagttttattggaaaaaggaattgagatatataattgagatttggtgaaattgaaggagaaaatttaagtgagtctttaaaatatattctgaatgaaaactgtattgaggattcatttttgttccttttttttctttttctcttttctcctttttcttctttttaatagtctagttttagtcagtcagtgaggaagaattgggccatgctaacgttatcacaagagaacaatggcagaaatggtattagttatataatatttaaggacaaactatatgttttgctgttttaacgtagtgactcactgaactaaatacataattgaccaacattaagtgtatttccaatacagaagggttgaaaatattacattataaactcttttgaaaaatgtatctaaaattttttaagttctgttttgattccactttttggttgagtttttatgtttttgttttcaggtagattaataaatctggcagctgatttctgcaagattcttgtgttttgaatttctcattgaattggctactcaaacatagaaatcatttgttaatgatgtaatgtcttctctcagcttttatcttcactgctgtttgctgtctcttgatgatgacatgttaatacccaatagattaattgcaacaaacacttatactcaaataactaagtaaaaataatttttcttgttatgtccatgaaaagtgcttcagaataaaaatccacaagactgacagtgcagaacatttttctcaaatcatgggcggatcttggaggtctagtttcccgtagatgctgtaaccaattaccacaacttcagtaatttacacaaatttatcttatagttctggaggcagaagttcaaaagaagccttaagagactaaaaccaagatgtccttaggtctggttccttctggaggctccaggggagattcttccagctttcacttctagagtctgctgacattccttggctcctggctacatcacttcaatctctgcttccatggtcacatactcttctactatagtcaaatttccttcctgcctcttataaggatgcttgtgattacatttaggggatgctcagataatccaggacaatctctccatctcaagatccttaacttaatgacgtgtgccaagtccctttggctagataattattcataggtcccagggattaggacatggatgtaaggggtgagggcagggctgttattcagaacaccgcacggaggaggaagactgtgtagcaaagactctaattgatttactcaggaacagtggagttctgctgagggatctaggatttgaaagtactagagtttgcttttatttaccactgagatattttccccttattctgcataaataattttgaaaactttctatattaaatttcaactattccactaaaatgtctggtaatcacatcaagcctttagattattcaaatccttccccagcccccaggaaaacactaagtcatgaaacagaaaaacagaaggtatgataataatagtaataacagttaaatcagtggtctaatccagattttattttttaatacatttcttttggtgttaatatgggttactatgtgatcttatcatttgctagtgattattacttattaggtaagaacaatgtgtaaaatatgtctattactcaaaagaacaattgcaaaatgagtcaacttatctttatataaccaggaaagaaatatattgccagaagctacagaattttgccagatgatagggatttctaaaatgagccactttgtctatcatgcagccttttcagagcttgtaatgagaaaacattacagaggagaaggtcatttggatgtttgttacttggaatcctagaaaacaaaaactaaaatttaaaaataagaagtgagtaagctattttccatttgcgatttggtatggagaagagaggaaatagaattattaaaaaaatacaaattgggtaaaagtgatggtggaaaaaatataaagaaggcaaatgtacatattaagcaattctactaagaattggaaaaatcaagtttcaaaaagatggtaatagttgggcatgatactagaaaatttcacccagtttattcagagctcaactagtacttttaggacttctttttttatatacatgagactcactttgacatacttaaaaaaaaaacagtttatggaaagtacagtttaagaggagaatttgattagactaagtggatatctttatagaaatattaatgatttcagaattttcagttacaagtgtatataccgtggctattgtttatggattcatatgtaaggtagggtcttttttgcatatagactccagtattagttactttcattctaaaattatatttatgcttctatggggaagaaaatttttaattcacttggttgtattaaaattatacttacggtttgagaaaacatgctatgaaaatcatgattatagcaaattaaatatgctcaaaatttaaatctaaaataaaagcccagaaactg

SEQ ID NO: 305756 - DNA, 6752 bp, Artificial Sequence
  derived and/or modified sequence
aaggaaaccagcccaatagtggacctaacaccccaataatgggaactggcgactcgaaacacacggtttcagtatccccaggcgccttaacaataagcagcgggttacagaggaaatcgagtctctccgtggcgcttccaggctgaggacccagcgcctaccggccgagcaccccctagggcagaggggcgagggagacccgcgggaaggggcagcaagccgcctgattgacagcccgaaatctgatcttgtgaaagagacgcggagccaatgggaggcagcgatccatcagtttggattggaggcccctggaggagaagtagaggaaaaaccaccgaattgagctctgtcagaggcgctttcggcttccaagggggaagtgctgggctataattaatgtttttattaaatttggagggaagtttttgcagcctttcgcctagcgtggccttcagtcccgttaggtgcaaagcaagtctcgttgatcgccattgctagttttgcacacgtttgcgaatcagagctgcccggggtacaccgaccgcgcagggaaacatcgagagtgtaaataaatacatcgcctcttgttcggatttttgctactaccgaaaatatgtaaattgtgaactctgttggctctctttggatccaggttgatagaagtccagatcctgaggaaatctccagctaaatgctcaaaatataaaatactgagctgagatttgcgaagagcagcagcatggatggattttatgaccagcaagtgccttacatggtcaccaatagtcagcgtgggagaaattgtaacgagaaaccaacaaatgtcaggaaaagaaaattcattaacagagatctggctcatgattcagaagaactctttcaagatctaagtcaattacaggaaacatggcttgcagaagtggcttttcatggcctgccactgaaaatcaagaaagaaccccacagtccatgttcagaaatcagctctgcctgcagtcaagaacagccctttaaattcagctatggagaaaagtgcctgtacaatgtcagtgcctatgatcagaagccacaagtgggaatgaggccctccaacccccccacaccatccagcacgccagtgtccccactgcatcatgcatctccaaactcaactcatacaccgaaacctgaccgggccttcccagctcacctccctccatcgcagtccataccagatagcagctaccccatggaccacagatttcgccgccagctttctgaaccctgtaactcctttcctcctttgccgacgatgccaagggaaggacgtcctatgtaccaacgccagatgtctgagccaaacatccccttcccaccacaaggctttaagcaggagtaccacgacccagtgtatgaacacaacaccatggttggcagtgcggccagccaaagctttccccctcctctgatgattaaacaggaacccagagattttgcatatgactcagaagtgcctagctgccactccatttatatgaggcaagaaggcttcctggctcatcccagcagaacagaaggctgtatgtttgaaaagggccccaggcagttttatgatgacacctgtgttgtcccagaaaaattcgatggagacatcaaacaagagccaggaatgtatcgggaaggacccacataccaacggcgaggatcacttcagctctggcagtttttggtagctcttctggatgacccttcaaattctcattttattgcctggactggtcgaggcatggaatttaaactgattgagcctgaagaggtggcccgacgttggggcattcagaaaaacaggccagctatgaactatgataaacttagccgttcactccgctattactatgagaaaggaattatgcaaaaggtggctggagagagatatgtctacaagtttgtgtgtgatccagaagcccttttctccatggcctttccagataatcagcgtccactgctgaagacagacatggaacgtcacatcaacgaggaggacacagtgcctctttctcactttgatgagagcatggcctacatgccggaagggggctgctgcaacccccacccctacaacgaaggctacgtgtattaacacaagtgacagtcaagcagggcgtttttgcgcttttccttttttctgcaagatacagagaattgctgaatctttgttttatttctgttgtttgtattttatttttaaataataatacacaaaaaggggcttttcctgttgcattattctatggtctgccatggactgtgcactttatttgagggtgggtgggagtaatctaaacatttattctgtgtaacaggaagctaatgggtgaatgggcagagggatttggggattactttttacttaggcttgggatggggtcctacaagttttgagtatgatgaaactatatcatgtctgtttgatttcataacaacataagataatgtttattttatcggggtatctatggtacagttaatttcacgttgtgtaaatatccacttggagactatttgccttgggcattttcccctgtcatttatgagtctctgcaggtgtacaaaaaaaccccaatctactgtaaatggcagtttaattgttagaaatgactgtttttgcaccacttgtaaaaaggtatttagcgattgcatttgctgtttgttgttttattttgctttatatatgacttgcagaggataaccataaaatgggtaattctctctgaagttgaataatcaccatgactgtaaatgaggggcacaattttggactctggcgccaaactgagtcataggccagtagcattacgtgtatctggtgccaccttgctgtttagatacaaatcataccgtcttttaaatattttgaagcccatttcagttaaataatgacatgtcatggtcctttggaatcttcatttaaatgttaaatctggaatcaaaatgaagcaaaaaatatctgtctccttttcactttcttcagtacataaatacattatttaatcaataagaattaactgtactaaatcatgtattatgctgttctagttacagcaaacactctttaagaaaaatatccaatacactaaataggtactatagtaatttttagacatggtacccattgatatgcatttaaaccttttactgctgtgttatgttgataacatatataaatattagataatgctaatgcttctgctgctgtcttttctgtaatattctctttcatgctgaatttactatgaccatttataagcagtgcagttaactacagatagcatttcaggacaaaatagatgactcaaaccatttattgcttaaaaaatagcttacgccatgctatgctataagcagcttttatgcacattgacaaatgaagagtaagcttcagcttgctaaaggaaactgtggaaccttttgtaacttttggtgatatggaaaattatttacaaaccgtcaaagaatatgaggaagttgctgtatgacatagtgctggcactgatattatccatcatctctttttggacacttctgtaaatgtgattggattgtttgaaagaagatttaaagtttcaaagttttttgttctgtttttgctttgcatttggagaaaatattgaaagcagggtatgttgtttcattcaccttgaaaaaaccatgagtaaatggggatatagaatctctgaatagctcgctaaaagattcaagcaagggacatgaattttgttccatctatcaataatatccagaagaacaacttttttaaagagtctatagcaaaaagcaaaaaaaaaaaaaaattctaaacacaaagtcaaaataaacctattgtaaaagcatttcgtgatgagcatgaaaaagattgtttaaagatgatccccccagctacccattttccaaaactacacagatcacagctcatttctctaagtggagcagttatcaagaaacccaaacaccaaaattgctactcttcacatttaatcctacaaaaagtactccaatttcaaaatatgtatgtaacctgcgatttcaatgattgttgttcatatacatcatgtattattttggcccattttgggcctaaaaaagaaaactatgccttaaaaatcagaaccttttctccccactatgcttatgtggccatctacagcacttagaataaaaacagatgttaaaatattcagtgaaagttttattggaaaaaggaattgagatatataattgagatttggtgaaattgaaggagaaaatttaagtgagtctttaaaatatattctgaatgaaaactgtattgaggattcatttttgttccttttttttctttttctcttttctcctttttcttctttttaatagtctagttttagtcagtcagtgaggaagaattgggccatgctaacgttatcacaagagaacaatggcagaaatggtattagttatataatatttaaggacaaactatatgttttgctgttttaacgtagtgactcactgaactaaatacataattgaccaacattaagtgtatttccaatacagaagggttgaaaatattacattataaactcttttgaaaaatgtatctaaaattttttaagttctgttttgattccactttttggttgagtttttatgtttttgttttcaggtagattaataaatctggcagctgatttctgcaagattcttgtgttttgaatttctcattgaattggctactcaaacatagaaatcatttgttaatgatgtaatgtcttctctcagcttttatcttcactgctgtttgctgtctcttgatgatgacatgttaatacccaatagattaattgcaacaaacacttatactcaaataactaagtaaaaataatttttcttgttatgtccatgaaaagtgcttcagaataaaaatccacaagactgacagtgcagaacatttttctcaaatcatgggcggatcttggaggtctagtttcccgtagatgctgtaaccaattaccacaacttcagtaatttacacaaatttatcttatagttctggaggcagaagttcaaaagaagccttaagagactaaaaccaagatgtccttaggtctggttccttctggaggctccaggggagattcttccagctttcacttctagagtctgctgacattccttggctcctggctacatcacttcaatctctgcttccatggtcacatactcttctactatagtcaaatttccttcctgcctcttataaggatgcttgtgattacatttaggggatgctcagataatccaggacaatctctccatctcaagatccttaacttaatgacgtgtgccaagtccctttggctagataattattcataggtcccagggattaggacatggatgtaaggggtgagggcagggctgttattcagaacaccgcacggaggaggaagactgtgtagcaaagactctaattgatttactcaggaacagtggagttctgctgagggatctaggatttgaaagtactagagtttgcttttatttaccactgagatattttccccttattctgcataaataattttgaaaactttctatattaaatttcaactattccactaaaatgtctggtaatcacatcaagcctttagattattcaaatccttccccagcccccaggaaaacactaagtcatgaaacagaaaaacagaaggtatgataataatagtaataacagttaaatcagtggtctaatccagattttattttttaatacatttcttttggtgttaatatgggttactatgtgatcttatcatttgctagtgattattacttattaggtaagaacaatgtgtaaaatatgtctattactcaaaagaacaattgcaaaatgagtcaacttatctttatataaccaggaaagaaatatattgccagaagctacagaattttgccagatgatagggatttctaaaatgagccactttgtctatcatgcagccttttcagagcttgtaatgagaaaacattacagaggagaaggtcatttggatgtttgttacttggaatcctagaaaacaaaaactaaaatttaaaaataagaagtgagtaagctattttccatttgcgatttggtatggagaagagaggaaatagaattattaaaaaaatacaaattgggtaaaagtgatggtggaaaaaatataaagaaggcaaatgtacatattaagcaattctactaagaattggaaaaatcaagtttcaaaaagatggtaatagttgggcatgatactagaaaatttcacccagtttattcagagctcaactagtacttttaggacttctttttttatatacatgagactcactttgacatacttaaaaaaaaaacagtttatggaaagtacagtttaagaggagaatttgattagactaagtggatatctttatagaaatattaatgatttcagaattttcagttacaagtgtatataccgtggctattgtttatggattcatatgtaaggtagggtcttttttgcatatagactccagtattagttactttcattctaaaattatatttatgcttctatggggaagaaaatttttaattcacttggttgtattaaaattatacttacggtttgagaaaacatgctatgaaaatcatgattatagcaaattaaatatgctcaaaatttaaatctaaaataaaagcccagaaactg

SEQ ID NO: 305757 - DNA, 1603 bp, Artificial Sequence
  derived and/or modified sequence
accccctgcttggttgcaccctcagatagtacccatgagcttcactgttcagcctcggggcccaggcgcttcctggaatctctccttggccggggttaaaatgcagttcccgctcaaaatgcttataggttgatagaagtccagatcctgaggaaatctccagctaaatgctcaaaatataaaatactgagctgagatttgcgaagagcagcagcatggatggattttatgaccagcaagtgccttacatggtcaccaatagtcagcgtgggagaaattgtaacgagaaaccaacaaatgtcaggaaaagaaaattcattaacagagatctggctcatgattcagaagaactctttcaagatctaagtcaattacaggaaacatggcttgcagaagtggcttttcatggcctgccactgaaaatcaagaaagaaccccacagtccatgttcagaaatcagctctgcctgcagtcaagaacagccctttaaattcagctatggagaaaagtgcctgtacaatgtcagtgcctatgatcagaagccacaagtgggaatgaggccctccaacccccccacaccatccagcacgccagtgtccccactgcatcatgcatctccaaactcaactcatacaccgaaacctgaccgggccttcccagctcacctccctccatcgcagtccataccagatagcagctaccccatggaccacagatttcgccgccagctttctgaaccctgtaactcctttcctcctttgccgacgatgccaagggaaggacgtcctatgtaccaacgccagatgtctgagccaaacatccccttcccaccacaaggctttaagcaggagtaccacgacccagtgtatgaacacaacaccatggttggcagtgcggccagccaaagctttccccctcctctgatgattaaacaggaacccagagattttgcatatgactcagaagtgcctagctgccactccatttatatgaggcaagaaggcttcctggctcatcccagcagaacagaaggctgtatgtttgaaaagggccccaggcagttttatgatgacacctgtgttgtcccagaaaaattcgatggagacatcaaacaagagccaggaatgtatcgggaaggacccacataccaacggcgaggatcacttcagctctggcagtttttggtagctcttctggatgacccttcaaattctcattttattgcctggactggtcgaggcatggaatttaaactgattgagcctgaagaggtggcccgacgttggggcattcagaaaaacaggccagctatgaactatgataaacttagccgttcactccgctattactatgagaaaggaattatgcaaaaggtggctggagagagatatgtctacaagtttgtgtgtgatccagaagcccttttctccatggcctttccagataatcagcgtccactgctgaagacagacatggaacgtcacatcaacgaggaggacacagtgcctctttctcactttgatgagagcatggcctacatgccggaagggggctgctgcaacccccacccctacaacgaaggctacgtgtattaacacaagtg

SEQ ID NO: 305758 - DNA, 1380 bp, Artificial Sequence
  derived and/or modified sequence
atggatggcttctatgaccagcaggtgccctacatggtgaccaacagccagaggggcaggaactgcaatgagaagcccaccaacgtgaggaagaggaagttcatcaacagagacctggcccatgattctgaggagctgttccaggacctgagccagctgcaggagacctggctggccgaggtggccttccacggcctgcccctgaagatcaagaaggagccccacagcccctgcagcgagatcagcagcgcctgcagccaggagcagcccttcaagttctcctatggagagaagtgcctgtacaacgtgtctgcctatgaccagaagccccaggtgggcatgaggcccagcaacccccccacccccagcagcacccctgtgagccccctgcaccacgccagccccaacagcacccacacccccaagccagaccgggccttccctgcccacctgccccccagccagagcatcccagacagcagctaccccatggaccaccgcttccggcggcagctgtctgagccctgcaacagcttcccccccctgcccaccatgccccgggagggccggcccatgtaccagaggcagatgtctgagcccaacatccccttccccccccagggcttcaagcaggagtaccatgaccctgtgtatgagcacaacaccatggtgggcagcgctgccagccagagcttccccccacccctgatgatcaagcaggagccccgggactttgcctatgattctgaggtgcccagctgccacagcatctacatgaggcaggagggcttcctggcccaccccagcaggacagagggctgcatgtttgagaagggcccccggcagttctatgatgacacctgtgtggtgcctgagaagtttgatggagacatcaagcaggagcccggcatgtaccgggagggccccacctaccagaggcggggcagcctgcagctgtggcagttcctggtggccctgctggatgaccccagcaacagccacttcatcgcctggacaggccggggcatggagttcaagctgattgagcctgaggaggtggcccggcgctggggcatccagaagaacagacctgccatgaactatgacaagctgagccgcagcctgcgctactactatgagaagggcatcatgcagaaggtggccggggagcgctacgtgtacaagtttgtgtgtgaccctgaggccctcttctccatggccttcccagacaaccagaggcccctgctgaagacagacatggagcggcacatcaatgaagaagatactgtgcccctgagccactttgatgagagcatggcctacatgcctgagggcggctgctgcaacccccacccctacaatgaaggctacgtgtactag

SEQ ID NO: 305759 - DNA, 1380 bp, Artificial Sequence
  derived and/or modified sequence
atggacggcttctacgaccagcaggtgccctacatggtgaccaactcccagaggggcagaaactgcaacgagaaacctacgaacgtccgcaaaagaaaattcatcaacagagatttagcccatgactccgaagaactgttccaggacctgagtcagctccaggagacatggctggctgaggtcgctttccacggcttgcctttaaagataaaaaaggagccccattccccatgcagcgaaatttcgagcgcgtgtagccaagaacaaccattcaaattttcttacggagagaaatgtctgtacaatgtgtctgcgtacgatcagaaaccacaggtcggtatgcgtccaagcaaccctcctactcctagcagcacacctgtatctccgctacatcacgcttcccccaacagcacacatactcccaaacctgatcgggccttccccgcgcacctaccaccgagtcagagtattcctgactcatcttatccaatggatcacagatttcgccggcagctgtccgagccatgtaactcctttccaccactgcctacgatgcccagggagggcaggcctatgtatcagagacaaatgtccgagccaaacatccccttccctccacaagggtttaagcaggaataccacgaccctgtatacgagcacaacacaatggtgggaagcgcagcttctcagtccttcccaccccctctgatgataaaacaagaaccccgggactttgcctatgacagcgaggtgcctagctgccattccatctacatgcggcaggaaggcttccttgcccatccttcgcggaccgaagggtgcatgttcgagaaaggcccacggcagttctatgacgatacctgcgtagtgcctgagaagtttgacggcgacattaagcaggaacccggaatgtaccgcgaagggcccacttatcagcgtagaggctctctgcagctctggcaattccttgtggccttattagacgatccgagcaacagtcatttcattgcatggaccgggagaggcatggaattcaagctgatcgagcccgaggaggttgcaagaagatggggcatccagaaaaacaggcccgccatgaattacgacaagctgagtcggtctctcagatattattatgagaagggcatcatgcagaaggtcgccggggagcgatatgtgtacaaattcgtttgcgaccctgaggccctcttctcaatggcattccccgacaaccagcgccctctgcttaagacagatatggaacgccacataaacgaagaagacactgtgcctctgtctcacttcgacgagtccatggcgtatatgccggagggcgggtgttgtaatccccacccttataatgagggttacgtttattag

SEQ ID NO: 305760 - DNA, 1380 bp, Artificial Sequence
  derived and/or modified sequence
atggacggcttctacgaccagcaggtgccctacatggtgaccaacagccagcgggggcgcaactgcaatgagaaacccaccaatgtgagaaaaaggaagtttattaaccgcgatttggctcatgatagcgaggaactttttcaagatctgagtcaactccaggagacttggctggctgaggtggcctttcacggactgccactcaagataaagaaggagccgcactcaccatgctcagaaataagcagcgcatgttcgcaggagcagccttttaagttttcttacggagaaaagtgcttgtacaatgtgtccgcttatgaccaaaagccacaagtgggcatgcgaccaagcaacccccctactccttccagtacccccgttagcccactgcatcacgctagccctaatagtacccacacacctaagccggacagagcttttcctgcccacctaccaccgtcacaaagtataccggacagctcatatcctatggatcatcgctttcggcggcagctgtcagagccctgtaactcattccctccgctgcccacaatgccccgggaaggacgcccaatgtaccaacgtcagatgagtgaacccaacatccctttccccccacagggatttaaacaggagtaccatgatcctgtctacgagcacaataccatggtgggctcagcagcttcacagtcctttcctccccccctgatgatcaagcaagagcctagagattttgcctacgatagtgaggtccctagttgccactctatctatatgagacaggagggcttccttgcccatccctcccggacagaaggatgcatgttcgagaaggggccgaggcagttctacgacgatacatgcgtggtgcctgagaagttcgacggcgatatcaagcaggaacccggcatgtatcgggaaggtccaacgtatcagcggcggggaagtctgcagttgtggcagttcctcgtagcgttattagacgacccctctaattcacacttcatcgcgtggacgggtagaggcatggaattcaaactgattgagcctgaggaggtggctcgacgttgggggattcaaaagaatcgcccggcgatgaactacgacaagctttcacggtcactgaggtactactacgagaagggcattatgcaaaaagtggccggtgagcgatatgtgtacaaatttgtgtgcgatcctgaagccctgttttctatggcctttcctgataaccagcgccctctgctgaagactgacatggaacgccacataaacgaggaagataccgtccccctatcccacttcgatgagagcatggcttatatgcctgagggtggatgctgtaatccacacccatataacgagggctacgtgtactag

SEQ ID NO: 305761 - DNA, 1380 bp, Artificial Sequence
  derived and/or modified sequence
atggacggcttctacgaccagcaggtgccctacatggtgaccaactcccagcgaggccggaactgtaacgagaagcccacaaacgttcgcaagcgaaaatttatcaatcgggacttggctcacgattctgaggagctgtttcaggacctcagccaactgcaggagacttggttagctgaagtcgcttttcatggtcttccattaaaaatcaaaaaggaacctcactcgccatgctccgagattagcagcgcctgttctcaggaacagccattcaagttctcctacggcgaaaaatgtttatataacgttagtgcttatgatcagaagcctcaagtgggaatgaggcctagtaaccctcccacgccatcctctacaccagtgagtcccttgcatcatgctagcccaaactccacgcacactcctaaaccagacagggcatttccggcccacttacccccgtcgcagtcgatccctgactccagttatcccatggaccatcgatttagacgtcagttatccgaaccctgcaattctttccctcctctccctactatgccccgcgagggtagacccatgtatcagagacagatgtctgaaccgaacattcctttccctccccaagggtttaagcaagagtatcacgaccctgtgtacgagcacaacacaatggtaggctctgccgcctcgcagtcgttccctccacctctgatgatcaaacaggagccgcgcgattttgcttacgactctgaggtacccagctgtcactcgatatacatgcggcaggaagggtttctcgctcatccatcaagaacggaaggctgtatgtttgagaaaggccctcgacagttctacgatgacacatgtgtcgtgccggaaaagttcgatggggacattaagcaggagcctgggatgtaccgggaagggcctacctaccagcgcagagggagtctccagttatggcaattcctggttgcactccttgatgatcctagcaactcccatttcattgcttggaccggcagagggatggagtttaagctgatagaaccagaggaggtggcccgcaggtggggcattcagaagaaccgtcccgccatgaattatgataaactgtcccgttcactccggtactactacgagaaagggatcatgcagaaagtggccggagagcgctacgtgtacaaatttgtgtgtgaccccgaagccctattcagcatggcttttcctgataatcagaggccactcctcaaaaccgatatggaacgccacataaatgaggaggacactgtccctttgtctcacttcgatgaaagcatggcctacatgcccgaaggtggatgctgcaatcctcacccgtataatgagggatacgtttattag

SEQ ID NO: 305762 - DNA, 1380 bp, Artificial Sequence
  derived and/or modified sequence
atggacgggttctatgatcaacaggttccgtacatggtgaccaacagccagcggggtcgcaattgtaatgaaaagccgacaaatgtgaggaaacgtaagttcattaatagagacctggcacacgacagcgaggaattgtttcaggatctttcccagctgcaggagacttggctcgccgaggtggcatttcatgggttgccactgaagataaagaaagaaccacactccccatgcagcgaaatttcatctgcttgtagccaagagcagccctttaagttttcatatggggagaagtgcctttacaacgtatcagcctacgaccagaaacctcaagtcggcatgcggccatccaacccccctactccctccagtacccctgtctccccccttcaccacgcctcccctaatagcactcatacacccaaaccagacagggcattccctgctcacctgccgccttctcagtcaattcctgactccagttacccaatggaccatcgctttcgtagacaactaagcgaaccctgcaattcattcccccctctgcctacaatgccaagagagggtagacctatgtaccagcggcagatgtccgaaccaaacattccttttccaccgcaggggtttaaacaggaatatcatgaccccgtttatgaacataataccatggtgggatccgcagcctcccagagcttccctcccccacttatgataaaacaagaaccaagggacttcgcatacgactccgaggtacctagttgtcactcgatctatatgaggcaggagggtttcctggcgcatccttctagaacggagggctgtatgtttgaaaagggcccaaggcagttttacgacgacacatgcgtagttccagaaaagttcgatggcgacatcaagcaagagcctggtatgtatcgggaagggccaacataccagcgcagaggatcactccagctctggcagttccttgttgccctcctggatgatccaagcaatagccatttcattgcctggacaggacgcggtatggagtttaaattgattgaacccgaggaagtcgcgagaagatggggcattcagaaaaacaggccagctatgaattacgacaagctgagcaggtccctccgctattattacgagaaaggaatcatgcagaaggttgctggggagcgttacgtctacaagttcgtgtgtgaccccgaggcactgttttctatggctttcccagacaatcagagacccctgcttaagacagatatggagcgccacatcaatgaggaagacactgtgcccttgtctcactttgacgaaagtatggcttacatgccggaggggggatgttgtaatcctcacccatacaatgaaggctacgtatactag

SEQ ID NO: 305763 - DNA, 1380 bp, Artificial Sequence
  derived and/or modified sequence
atggatggcttttacgatcagcaggtgccatatatggttaccaacagccaacgcggaaggaattgcaatgagaagccaacaaacgttagaaagaggaaatttattaatagggacctcgctcacgacagtgaggaactgtttcaggacttatcgcaactgcaagaaacgtggttggcggaggtggccttccatgggctaccacttaaaataaaaaaggaaccacattccccctgtagtgaaattagcagcgcatgtagtcaggaacagccgtttaaattttcgtacggggaaaagtgtctgtacaacgtctcggcctatgaccagaaaccacaggtgggaatgagaccatccaatcctccaaccccatcttcgactcccgtgagtccgctacaccacgcctctccgaactccacacatacgccaaagccagatagagccttcccggcacatttgccacctagccagtctatcccagactcatcatatccgatggaccatcggtttaggagacagctgagtgaaccatgtaacagttttcctcctctgccaacaatgcctcgggaagggagacctatgtaccagaggcaaatgagtgagccaaacattccatttccaccccagggctttaaacaagagtaccatgatcctgtgtacgagcataacacaatggtggggtctgccgcttcacagagctttcccccacccttgatgattaaacaggaaccgcgagattttgcctatgacagcgaagttccttcctgccatagtatctacatgcgtcaagaagggttcctggcacaccccagccgcaccgaaggatgtatgttcgaaaaaggccctcggcagttctacgacgatacatgcgtggtgccagaaaagtttgacggtgatataaagcaagagccagggatgtaccgcgagggccctacataccagaggcgaggatcactgcagctttggcagtttctggtcgcattgctcgatgacccttccaacagtcacttcatcgcatggacaggtaggggaatggaatttaaactcattgagccagaagaggtcgccagacgctgggggatccaaaaaaaccgcccagccatgaactatgacaaactgtctcggagtctaaggtactactacgagaagggaattatgcagaaagtggccggtgaacgctacgtgtacaaatttgtctgtgatcctgaggcattgttctcaatggcgttcccagataatcagcggcctctcctgaagactgatatggaaaggcacatcaatgaggaggatacagtcccgctgtctcattttgatgagagcatggcatatatgccagagggcggatgttgtaatcctcacccctacaatgaggggtatgtctattag

SEQ ID NO: 305764 - DNA, 1380 bp, Artificial Sequence
  derived and/or modified sequence
atggatggtttctacgaccaacaggttccatacatggtgacgaatagtcagcgaggacgtaactgcaatgagaagcctaccaatgtaagaaaaagaaagtttatcaatcgcgatctagctcacgacagtgaagaactgtttcaagatctgagccagctgcaggagacgtggctggctgaggtcgccttccacggactgccccttaagattaaaaaagaaccacacagtccctgctctgaaataagcagtgcttgcagtcaggagcagccatttaagttcagctatggcgaaaaatgcctgtacaacgtgagtgcttatgatcagaaacctcaagtgggtatgagaccctcaaatcctcctacacccagttccacacccgtctcccccctgcatcacgcttctcccaatagtactcacactcctaaaccagaccgcgctttcccagctcatctgcccccatcacagagcatcccagactctagttacccaatggaccataggtttcggagacagctcagtgagccttgcaattcgttcccacctctcccaaccatgccacgtgaaggccgtccaatgtaccaaagacagatgtcagagccaaacataccctttccacctcaggggttcaagcaggagtatcatgatcctgtgtatgagcacaacaccatggtaggaagcgcagcctcccaatcattcccccctccccttatgattaaacaggagccacgggatttcgcctatgattcagaggttccttcgtgtcactctatctatatgagacaggaggggttcctggcccacccctccaggaccgaagggtgcatgtttgaaaagggcccaagacaattttacgatgatacatgcgtcgttcccgagaagttcgacggcgatatcaagcaggagcccggaatgtatagggaggggccaacctaccaaagaagagggtctttgcagctgtggcagttcctggtggctctactggacgatcccagcaactctcacttcattgcttggactggccgtggaatggagttcaaactgatcgagcccgaagaggtggctaggaggtggggtattcaaaaaaaccgaccagccatgaactacgacaagctgagccgatctcttcggtattactatgagaaaggtattatgcaaaaggtggctggggagagatatgtttacaagttcgtctgcgacccagaggcactcttttccatggcgtttccagataatcagaggccacttctgaaaactgatatggaacgtcatatcaatgaagaggatactgtccctctgtcacactttgatgagagtatggcatacatgcccgaaggtggctgctgcaatccccacccttataacgaaggatacgtgtattag

SEQ ID NO: 305765 - protein, 170 aa, Artificial Sequence
  derived and/or modified sequence
MPGGACVLVIALMFLAWGEAQECSPGGHQFLRSPYRSVRFDSWHLQQSAVQDLICDHSLSPGWYRFLILDRPAEMPTKCVEMNHCGTQAPIWLSLRDSETLPSPGEIKQLTACATWQFLFSTTKDCCLFQIPVSVRNCGNFSVYLLQPTQGCMGYCAEGFFAKIVKSPHT

SEQ ID NO: 305766 - DNA, 1401 bp, Artificial Sequence
  derived and/or modified sequence
atggccaccagcctgctgggcgaggagcccagactgggcagcacccccctggccatgctggccgccacctgcaacaagatcggcagccccagccccagccccagcagcctgagcgacagcagcagcagcttcggcaagggcttccacccctggaagagaagcagcagcagcagcagcgccagctgcaacgtggtgggcagcagcctgagcagcttcggcgtgagcggcgccagcagaaacggcggcagcagcagcgccgccgccgccgccgccgccgccgccgccgccgccgccgccctggtgagcgacagcttcagctgcggcggcagccccggcagcagcgccttcagcctgaccagcagcggcggcagcagcgcccacagccaggacggcagccaccagcccgtgttcatcagcaaggtgcacaccagcgtggacggcctgcagggcatctaccccagagtgggcatggcccacccctacgagagctggttcaagcccagccaccccggcctgggcgccgccggcgaggtgggcagcgccggcgccagcagctggtgggacgtgggcgccggctggatcgacgtgcagaaccccaacagcgccgccgccctgcccggcagcctgcaccccgccgccggcggcctgcagaccagcctgcacagccccctgggcggctacaacagcgactacagcggcctgagccacagcgccttcagcagcggcgccagcagccacctgctgagccccgccggccagcacctgatggacggcttcaagcccgtgctgcccggcagctaccccgacagcgcccccagccccctggccggcgccggcggcagcatgctgagcgccggccccagcgcccccctgggcggcagccccagaagcagcgccagaagatacagcggcagagccacctgcgactgccccaactgccaggaggccgagagactgggccccgccggcgccagcctgagaagaaagggcctgcacagctgccacatccccggctgcggcaaggtgtacggcaagaccagccacctgaaggcccacctgagatggcacaccggcgagagacccttcgtgtgcaactggctgttctgcggcaagagattcaccagaagcgacgagctgcagagacacctgagaacccacaccggcgagaagagattcgcctgccccgtgtgcaacaagagattcatgagaagcgaccacctgagcaagcacgtgaagacccacagcggcggcggcggcggcggcggcagcgccggcagcggcagcggcggcaagaagggcagcgacaccgacagcgagcacagcgccgccggcagccccccctgccacagccccgagctgctgcagccccccgagcccggccacagaaacggcctggagtag

SEQ ID NO: 305767 - DNA, 1473 bp, Artificial Sequence
  derived and/or modified sequence
atgctggccgccacctgcaacaagatcggcagccccagccccagccccagcagcctgagcgacagcagcagcagcttcggcaagggcttccacccctggaagagaagcagcagcagcagcagcgccagctgcaacgtggtgggcagcagcctgagcagcttcggcgtgagcggcgccagcagaaacggcggcagcagcagcgccgccgccgccgccgccgccgccgccgccgccgccgccgccctggtgagcgacagcttcagctgcggcggcagccccggcagcagcgccttcagcctgaccagcagcagcgccgccgccgccgccgccgccgccgccgccgccgccagcagcagccccttcgccaacgactacagcgtgttccaggcccccggcgtgagcggcggcagcggcggcggcggcggcggcggcggcggcggcagcagcgcccacagccaggacggcagccaccagcccgtgttcatcagcaaggtgcacaccagcgtggacggcctgcagggcatctaccccagagtgggcatggcccacccctacgagagctggttcaagcccagccaccccggcctgggcgccgccggcgaggtgggcagcgccggcgccagcagctggtgggacgtgggcgccggctggatcgacgtgcagaaccccaacagcgccgccgccctgcccggcagcctgcaccccgccgccggcggcctgcagaccagcctgcacagccccctgggcggctacaacagcgactacagcggcctgagccacagcgccttcagcagcggcgccagcagccacctgctgagccccgccggccagcacctgatggacggcttcaagcccgtgctgcccggcagctaccccgacagcgcccccagccccctggccggcgccggcggcagcatgctgagcgccggccccagcgcccccctgggcggcagccccagaagcagcgccagaagatacagcggcagagccacctgcgactgccccaactgccaggaggccgagagactgggccccgccggcgccagcctgagaagaaagggcctgcacagctgccacatccccggctgcggcaaggtgtacggcaagaccagccacctgaaggcccacctgagatggcacaccggcgagagacccttcgtgtgcaactggctgttctgcggcaagagattcaccagaagcgacgagctgcagagacacctgagaacccacaccggcgagaagagattcgcctgccccgtgtgcaacaagagattcatgagaagcgaccacctgagcaagcacgtgaagacccacagcggcggcggcggcggcggcggcagcgccggcagcggcagcggcggcaagaagggcagcgacaccgacagcgagcacagcgccgccggcagccccccctgccacagccccgagctgctgcagccccccgagcccggccacagaaacggcctggagtag

SEQ ID NO: 305768 - DNA, 1401 bp, Artificial Sequence
  derived and/or modified sequence
atggcaacctctctgctaggcgaggagcccagactggggtccacacctctcgctatgctcgccgcaacttgcaataagatcggctcgccctcaccatctccttcatcgctgagcgattctagtagttcttttggtaagggttttcatccctggaagaggtcttcctccagcagcagcgcctcgtgtaacgtggttggatcttccctgagtagctttggtgtgtccggggcaagtcgcaacggaggcagctcttccgcagcggccgcggccgcagccgccgcagccgcagccgccgccctggtgtcggattcattctcttgcggggggagtccgggaagctccgctttctccctcaccagttcgggtggaagctcagcccactcccaagacggcagtcatcaacctgtcttcatctcaaaggtgcacacgtctgtcgacggactccaggggatataccccagagtgggaatggcgcatccttacgagagctggttcaagccatcacatccgggcctcggtgctgccggggaggttggatccgccggagcaagcagttggtgggatgtcggcgctgggtggattgatgtccagaaccctaattccgccgcagccttgcctggctctctgcatccagctgccggtgggctccagacatcactccatagccctttaggcggttacaactctgactactcagggctgtcccactcggctttctcctctggggcttcttcccatctgctgtctcccgccggtcaacacctcatggacggctttaagcccgtccttcccggctcttaccccgatagcgctccaagtccactggcaggagcgggtggctctatgctgtccgccggaccgtccgcccccctgggaggatcaccacgctcttcagctaggcgctactcaggcagggccacctgtgattgccctaactgccaagaggcggagagactgggccctgccggcgcgtctttgcgtcgaaaaggattgcactcctgtcacatccccggttgcgggaaggtttatggaaagactagtcacctcaaggcccatctgcggtggcatacaggggagcgcccttttgtatgcaactggctattttgcgggaaacggttcactcgcagcgacgagctacagagacatctccgcacacataccggcgagaagcgtttcgcttgccccgtgtgcaataaaagatttatgagaagtgaccacctcagcaaacatgtcaagacccactccggaggaggcggtggcggggggagcgccggctctgggagcggcggaaaaaaaggaagcgataccgacagcgaacattctgcagccggctctcctccatgccactctcccgagttattgcagcctcccgagcccggacaccgcaacggccttgaatag

SEQ ID NO: 305769 - DNA, 1473 bp, Artificial Sequence
  derived and/or modified sequence
atgctcgccgcaacttgtaacaaaatcggtagccctagccctagcccatcctcactgtccgactctagtagctctttcgggaaaggattccatccctggaagcgctctagctcaagttcttccgcttcttgcaatgtggtgggatcctccctttcaagctttggagtgagcggggcctcccgcaacggagggagtagctccgcagctgcagccgctgcagcagcggctgccgctgcagctgccctggttagcgatagtttcagctgcgggggctcccctgggtccagcgcattttccctcacttcctccagcgcagctgctgcggccgctgccgcagctgccgctgcctcaagttctccttttgccaacgactattcggtgttccaggcgcctggagtgtccggaggctctggcggtgggggcggcggcgggggcggcggctctagtgcacattcccaggatggatctcatcaacccgtcttcatctcaaaggtgcacacctctgttgatggactgcaggggatctatcctagggtgggcatggcccacccttacgagagctggttcaagccctcccaccccggattgggcgccgctggcgaagtcgggtctgccggagctagcagctggtgggacgtgggggcaggttggatcgacgttcagaatcccaatagtgctgctgctctgccaggcagtctccaccctgccgccggtggacttcaaacctccctccattccccccttggcggatataactcagattattcgggtctgagccactctgccttctcatcgggcgcaagctcccatctgctgtcacccgccggccaacacctcatggacggattcaagcctgttctgcccggctcttaccccgattccgctccgagccccctggcaggcgcagggggctcaatgcttagcgccgggcccagcgcccctctgggaggcagtcctcgctccagtgcccggcgctatagcggtagggccacgtgcgactgtcctaattgccaggaggccgaacgtctcgggccggcaggagccagcttacgtagaaaagggttacacagctgccatattccgggatgcggtaaagtgtacggcaagacctcccacctcaaagcccaccttcggtggcacacgggtgagaggccgttcgtgtgcaactggctgttttgtggtaagcgttttacaaggtccgatgagctccagcggcaccttaggacccatactggcgagaaacgtttcgcgtgtcccgtctgtaacaagcggttcatgcggagtgatcatctgtctaagcacgtgaagactcattcaggaggtggagggggggggggtagcgccggtagcgggagcggtggcaaaaaaggttctgacaccgacagtgagcatagcgcagcggggtcccctccatgtcattctccagagctccttcagcctcccgaaccagggcaccgaaatggcctggagtag

SEQ ID NO: 305770 - DNA, 1401 bp, Artificial Sequence
  derived and/or modified sequence
atggccaccagcctgctgggggaggagccccggctgggcagcacccccctggccatgctggccgccacctgcaacaagattggcagccccagccccagccccagcagcctgagtgacagcagcagcagctttgggaagggcttccacccctggaagaggagcagcagcagcagcagcgccagctgcaatgtggtgggcagcagcctgagcagctttggagtgtctggggccagcagaaatggaggcagcagcagcgctgctgctgctgctgctgctgctgctgctgctgctgctgccctggtgtctgacagcttcagctgtggcggcagccctggcagcagcgccttcagcctgaccagcagcggcggcagcagcgcccacagccaggacggcagccaccagcctgtgttcatcagcaaggtgcacacctctgtggatggcctgcagggcatctacccccgggtgggcatggcccacccctatgaatcctggttcaagcccagccaccctggcctgggcgctgctggggaggtgggcagcgctggggccagctcctggtgggatgtgggcgccggctggattgatgtgcagaaccccaacagcgctgctgccctgcccggcagcctgcaccctgctgctgggggcctgcagaccagcctgcacagccccctgggcggctacaacagcgactacagcggcctgagccacagcgccttcagcagcggggccagcagccacctgctgagccctgctggccagcacctgatggatggcttcaagcctgtgctgcccggcagctacccagacagcgcccccagccccctggccggggccggcggctccatgctgtctgctggccccagcgcccccctgggcggcagccccaggagcagcgcccggcgctacagcggccgggccacctgtgactgccccaactgccaggaggccgagcggctgggccctgctggggccagcctgcggaggaagggcctgcacagctgccacatccctggctgcggcaaggtgtatggcaagaccagccacctgaaggcccacctgcgctggcacactggagagcggccctttgtgtgcaactggctgttctgtgggaagcgcttcaccaggagtgatgagctgcagaggcacctgcggacccacactggagagaagagatttgcctgccctgtgtgcaacaagcgcttcatgagaagtgaccacctgagcaagcacgtgaagacccacagcggcggcggcggcggcggcggcagcgctggcagcggcagcggcggcaagaagggcagtgacacagacagcgagcacagcgctgctggcagccccccctgccacagccctgagctgctgcagcccccagagcccggccacagaaatggcctggagtag

SEQ ID NO: 305771 - DNA, 1473 bp, Artificial Sequence
  derived and/or modified sequence
atgctggccgccacctgcaacaagattggcagccccagccccagccccagcagcctgagtgacagcagcagcagctttgggaagggcttccacccctggaagaggagcagcagcagcagcagcgccagctgcaatgtggtgggcagcagcctgagcagctttggagtgtctggggccagcagaaatggaggcagcagcagcgctgctgctgctgctgctgctgctgctgctgctgctgctgccctggtgtctgacagcttcagctgtggcggcagccctggcagcagcgccttcagcctgaccagcagcagcgctgctgctgctgctgctgctgctgctgctgctgccagcagcagcccctttgccaatgactacagcgtcttccaggcccctggggtgtctgggggcagcggcggcggcggcggcggcggcggcggcggcagcagcgcccacagccaggacggcagccaccagcctgtgttcatcagcaaggtgcacacctctgtggatggcctgcagggcatctacccccgggtgggcatggcccacccctatgaatcctggttcaagcccagccaccctggcctgggcgctgctggggaggtgggcagcgctggggccagctcctggtgggatgtgggcgccggctggattgatgtgcagaaccccaacagcgctgctgccctgcccggcagcctgcaccctgctgctgggggcctgcagaccagcctgcacagccccctgggcggctacaacagcgactacagcggcctgagccacagcgccttcagcagcggggccagcagccacctgctgagccctgctggccagcacctgatggatggcttcaagcctgtgctgcccggcagctacccagacagcgcccccagccccctggccggggccggcggctccatgctgtctgctggccccagcgcccccctgggcggcagccccaggagcagcgcccggcgctacagcggccgggccacctgtgactgccccaactgccaggaggccgagcggctgggccctgctggggccagcctgcggaggaagggcctgcacagctgccacatccctggctgcggcaaggtgtatggcaagaccagccacctgaaggcccacctgcgctggcacactggagagcggccctttgtgtgcaactggctgttctgtgggaagcgcttcaccaggagtgatgagctgcagaggcacctgcggacccacactggagagaagagatttgcctgccctgtgtgcaacaagcgcttcatgagaagtgaccacctgagcaagcacgtgaagacccacagcggcggcggcggcggcggcggcagcgctggcagcggcagcggcggcaagaagggcagtgacacagacagcgagcacagcgctgctggcagccccccctgccacagccctgagctgctgcagcccccagagcccggccacagaaatggcctggagtag

SEQ ID NO: 305772 - DNA, 1401 bp, Artificial Sequence
  derived and/or modified sequence
atggccaccagcctgctgggcgaggagccccggctgggcagcaccccgctggctatgcttgccgccacctgcaacaagatcggcagtccgtcaccttctccctcaagtttgagcgactccagctcgtccttcgggaaaggctttcatccctggaagaggtcctcttcttcatcgagcgcttcctgcaatgtcgtcggaagttcactgtcttcatttggagtgtctggcgccagtcgaaacgggggctccagctctgctgcggccgctgctgccgccgccgcagcagcagctgcagcactggtgtctgacagcttttcatgcggcggtagcccagggtcctctgctttcagcttgacctcatccggaggctcctcagctcatagccaggacggatcacaccagcctgtgttcatctctaaagtgcatacatccgtcgacgggctgcaaggcatctaccctcgcgtaggtatggctcacccttatgagtcttggtttaagccatcccatcccggtctgggggccgccggcgaggttggctccgccggggcctccagctggtgggacgtgggcgctgggtggatcgacgtgcagaatccaaacagcgctgccgctttgcccggtagcttacaccctgcagccggcggccttcagacctctctgcattcgcccctcgggggctataactcggattactcaggtctttcccactccgcgtttagcagtggtgcttcctcccacctactgagccctgccggtcagcacctcatggacgggtttaagccagtgctgcctggatcttatcccgactctgccccttcacctctggccggggccgggggatcaatgctgtccgccggtccatctgccccgctcggagggagcccacggtccagcgccaggcgttatagtggtagagccacgtgcgattgtcccaactgccaggaagctgaaaggctggggcctgccggcgcttcccttaggcgcaagggacttcactcctgccatattcccggctgcggcaaagtgtacggtaagacatcacacctaaaggcccacttacggtggcacactggcgaacgccccttcgtctgtaattggctcttctgcggaaagcggtttacccggtcagacgagcttcagaggcatctgagaacacatactggcgaaaagagatttgcatgccctgtgtgcaacaaaaggttcatgcggtcggaccaccttagcaaacatgtgaaaactcatagcggcggtggcgggggtgggggaagcgcaggcagcgggtcagggggcaagaaaggctctgatactgattccgaacattctgccgcggggtctccaccatgccactctcccgagctgttgcaaccaccagaacccgggcatagaaacggactcgaatag

SEQ ID NO: 305773 - DNA, 1473 bp, Artificial Sequence
  derived and/or modified sequence
atgctggccgccacctgcaacaagatcggcagccccagccccagcccttcatccctaagtgactcgagttccagctttggcaaagggtttcatccatggaagaggtcgagctctagcagtagcgcatcatgcaatgtggtgggcagctccttaagcagttttggcgtgagcggcgcctcccggaatggcggatcctccagcgctgcggctgctgccgcagccgccgcggcagctgccgccgccctggttagcgatagtttttcctgtggcggcagtccagggagctccgctttctcactgaccagttcatcagcagcagcggctgcggcagctgccgcggctgccgccagttcctcacccttcgctaacgattattcagtgtttcaagctcctggcgtttccggcggatccgggggcgggggaggcgggggagggggaggatcctccgcccactctcaggacgggtcacaccagccggtgttcatttctaaagtacacacatctgtagatgggcttcagggaatctacccacgcgtaggaatggcacacccctacgaatcctggtttaaaccctcgcacccgggtctcggcgccgccggagaggtgggaagcgctggcgcctcatcatggtgggacgtcggtgcgggctggatcgatgtccagaatccaaattccgccgcagccttgcctggaagtttgcaccctgcggcaggggggctgcagacgtcactgcatagccccctcgggggctataattcagattactctgggttgagtcattcagcttttagctcaggtgctagttcccacctgctgagtccggccggccagcacttgatggacggctttaaacccgttcttccaggctcctatcccgactctgctccctctccactggctggcgctgggggctccatgttgtcagctggtccatctgcccccttgggaggaagcccacggtcgagtgcacgtcgatactcgggccgggccacctgcgactgtccgaactgccaggaggcagagaggctggggccagcgggcgcttcactccgaaggaagggattgcattcctgtcatataccgggctgtggcaaagtgtacggaaaaacgtcacatctcaaggcccacctgcgctggcacaccggcgaaaggccctttgtctgtaactggctgttttgcggtaaaaggtttactcgctcagatgagctccagcgccaccttaggactcataccggcgaaaaacgttttgcatgtccagtctgcaacaaacggtttatgcgcagcgatcatctctcaaagcacgtcaaaacccactctggcggcggtggtggtggaggttccgctgggagtgggtctggtggcaaaaaaggtagcgacacagacagcgaacactcagccgccggaagccccccctgtcattcccctgagctcttgcagccgccggagccgggtcataggaacggcctggaatag

SEQ ID NO: 305774 - DNA, 1401 bp, Artificial Sequence
  derived and/or modified sequence
atggccacatccctcttgggcgaagaaccacggcttggctctaccccattggctatgctggcggcaacatgtaataagatcgggtccccaagtccctcccccagcagcttgagcgactcctctagctcctttggcaaagggtttcacccatggaagaggtccagttcctcttcctcggcctcctgtaatgttgtgggaagctccctgtcttccttcggggtaagcggggctagccggaatgggggttccagcagcgctgcggcagctgccgctgctgcagctgctgctgccgcagccttggtgagtgactccttcagctgcggcggatcgcctggctctagtgctttcagcctgactagttcagggggttccagcgctcatagtcaagacggatctcaccagccggtttttattagcaaggtgcatacttctgtggatgggctgcaaggtatttacccgagggtggggatggcccacccgtacgaaagctggttcaaaccgagccacccaggattgggagccgctggcgaggtggggtccgccggagccagctcatggtgggacgtgggcgctggctggatcgacgtgcagaatccaaattcggcggctgccctcccgggatccctacatcccgctgccggtggactacagaccagcctccactcaccgctcggtgggtacaatagtgactactccgggcttagtcatagcgccttctcctcaggggcatctagccatcttttgtctcccgcaggtcaacatctcatggacggattcaagccagtattgccgggttcgtatcctgatagcgcgccaagccctctggctggggcaggtggcagcatgcttagtgccggtccttccgcccctctcggcggttccccaaggtcgtccgcacgccgatactctgggcgtgcgacatgtgattgtcctaactgccaggaagccgagcggcttgggccagcgggagccagtctgaggaggaagggcctgcattcgtgtcatatccctgggtgcggaaaagtgtacgggaagacctctcatttaaaagcccacctgaggtggcataccggtgagcgaccatttgtatgcaactggctgttctgcgggaagagattcactcgaagcgatgaactacagaggcatttacgcacacataccggagagaagcgttttgcatgtccggtctgcaacaaaagatttatgaggtcagaccacctctccaagcacgtcaagactcactctggcggagggggtgggggagggtcggcaggctccggttccgggggtaaaaaggggtctgatactgacagtgagcactcagcagcaggtagccctccttgtcactcgcccgaattacttcagccaccggagcctggccaccgaaacggactcgagtag

SEQ ID NO: 305775 - DNA, 1473 bp, Artificial Sequence
  derived and/or modified sequence
atgttggctgctacatgcaacaaaatcgggtccccaagtccatctccctcgagtctatcagatagctccagcagtttcggaaaaggatttcatccctggaaacgttcatcttcatcctccagcgcctcctgcaatgtggttggcagcagcctgagcagcttcggggtatcaggcgcaagtagaaatgggggatctagctctgctgccgctgcggctgctgctgctgctgctgccgcagctgccctggtgtcggacagcttcagctgtggtgggtcgccaggctcctctgcttttagcctcacatccagcagcgccgctgcggcagcagccgctgccgctgccgctgctagcagtagtccctttgcaaatgattacagtgtgtttcaggcccctggcgtaagtggaggtagtggtggcggaggaggcggtggaggcggaggatccagcgcccatagccaagacggatctcatcagccagtgtttatatcaaaagtccacaccagcgtggatggcttgcagggaatctaccctcgcgttggcatggcccacccatatgagtcctggttcaagccatcccacccaggcctaggcgcagctggagaggttggttctgccggtgcgagctcttggtgggatgtaggagccggttggatcgatgtccaaaaccccaatagcgctgccgcactgccaggatctcttcaccctgcggctgggggtctgcaaacatcccttcactcacccctcggagggtacaattctgattatagcggcctgagtcactcagcattttcatccggtgcgtctagccacctgcttagcccggcaggccagcatcttatggatggcttcaagcctgtcctgccagggagttatcctgactccgctccaagccctctcgcgggagcgggagggagcatgttgagcgcaggaccaagcgctccactagggggaagccctaggagttccgcaaggagatactccggcagagctacctgtgactgcccgaactgccaagaggccgaacgtctcggacctgccggtgcaagtctgagacgtaagggcctacactcatgtcacattcctgggtgtggcaaagtgtatggcaagacctcccacttaaaggcccatctgcgatggcacacaggagagcgaccttttgtctgcaactggcttttttgcggcaagcggttcacgcggtctgacgagctgcaacgacacctgagaacccacactggcgagaagcgctttgcatgccccgtgtgtaataagcggttcatgcgtagcgatcatttaagcaaacatgtgaagactcatagtgggggaggcggtggaggaggctccgccggatccgggtctgggggaaagaaggggtccgacacagatagcgagcacagtgccgctggctccccaccgtgccattcgccagagttgctccaaccccctgaacccggacatcggaatggccttgagtag

SEQ ID NO: 305776 - DNA, 3495 bp, Artificial Sequence
  derived and/or modified sequence
attgtattgcacacctctaaaaaaaacactgcctctgatttatcaatataaaaaagatcctctgagaggaggagggcacttttgtgtgatggcaacttcacttctaggggaagaaccgaggttgggatcgactcctctggccatgcttgccgctacctgtaataagataggcagccccagcccgtctccctcctccctctcggacagctcttcttccttcggcaaaggcttccacccctggaaacgctcctcgtcctcttcttccgccagctgcaacgtagtgggttccagtctctcaagcttcggcgtgtccggggcctccaggaacggcggctcgtcctcggcggctgcggcggccgcggcagcagccgcggctgccgcggccctggtgtccgactcgttcagctgcggcggctcgcctggctccagcgccttctccctcacctccagcggcggctcctccgcgcactcgcaggacggctcccaccagccggtgttcatctccaaggtgcacacctctgtggacgggctgcagggcatctacccgcgggtgggcatggcgcacccgtacgagtcgtggtttaagccctcgcacccgggcctgggtgctgcgggcgaggtgggctcggccggcgcctccagctggtgggacgtgggggccggctggatcgacgtgcagaacccgaacagcgcggctgcgctgcccggctcgctgcaccctgccgccggggggctccaaacctcgctgcactcgccgctcggaggctacaactcggattactcgggcctgagtcactcggccttcagcagcggcgcctcctcgcacctgctcagccccgccgggcagcacctcatggacggcttcaagccagtgctacccggctcctacccggactcggccccgtcgccgctggccggcgcggggggctccatgttgagcgctgggccttcggcgccgctggggggctccccgcgctcctcagctcgccgctactccggccgcgccacctgcgactgccccaactgccaggaggcagagcggctgggccctgccggggcgagcttgcggcgcaagggcctgcacagctgccacatcccgggctgcggcaaggtgtacggcaagacttcgcacctcaaggcgcacctgcgctggcacacgggcgagcggcccttcgtgtgcaactggcttttctgcggcaagcgcttcacgcgctccgacgagctgcagcggcacctgcggacccacaccggcgagaagcgcttcgcctgtccagtttgcaacaagcgcttcatgcgcagcgaccacctcagcaagcacgtgaagacgcacagtggcggcggcggcggcggcggctcggcgggctcgggcagcggcggcaagaagggcagcgacaccgacagcgagcacagcgccgcgggcagcccgccctgccactccccagagctgctgcagccccccgagcccgggcaccgcaacggcctagagtgacgcccaccctgcgcccgcccctctccccgacctcctcccaccaagtcctcttgggccctgtctgtccggacttcaactccagcctttccctattgcatccgactcgctctctgtctctttctgtttctgcccctcttccttcttccttctgtgacttaactttgtaaaggggatatggacaagtaagtaacacgcatcgctgtcccgggccctggctttccctttccacgggtaacgctgcctgaacccgttgcagccggaacccgcgcctcgtcgggcctttatttctcgttctctcttccttgtcctcccctcctccaccccccaggttgtgaagggcgtaacttttagagggaacggccactggaggtagagctggactaatccagtgcctggtagacagcgggcctcgcgcgggcaggagcggctcggctgacaagcctgagcggagcggtggagagggagaggctggaggcctgggcagaacagcgccgcccgggcagacggctgcttggttccagagccgctgtactgagcacctcggcttcggagcaccctgccaggcccctgggcatcgccggacgtcctactcaggctgtcggggcttggtgggggtgacttttggcagcccgagacccagagtttgtagagtttagatctcccaatgtcagtctgcctctttttctttgttccctgaggtggaaccgatgcaagtttcagcaaagggcagtcttgtcgaatcgctgcagcagctttctttcatctttatagcatatattttatttttaaaaaaactagggggaaaatagcaaccttccatttggtttcccttctataatagttttttcctctaacggggagcaatctttctctcgaaactgctaatattgatcccaaagttactttgactgcattaacttaacttacggggtgggggcgggggtgagggtaggtgcttttttcttatgcaaaaatactcctttccggtgagaccagattaactatctccatgtttgtccttttctacctcgttttttcaccactcccaaacataacctcccaatcttttttgttagtccggccgtcaattgtatagtaccaatttcgtaaattctctcaattcatgaagatcgtagggttaaacttttttgtgtgtgatttaaacttacaaacaagtgaagaagctatcgtttatttcagacgaggctgtagtttaaataccaaaagagggaaaataaaaaagaacctttgtaaaatatatctgaacctaatggtttgtacaactggagaatcgttctagattagttaccaattaaatataactccgccagtgtaagggtgtgaggtgcagttgtccaggagacgattttgtatagtatttttcttgtacattacttccagtaaatatttgaaaatatattgaagtaaacttgattttttttttttgtcacaagaaaatattaagagttattgttgcagttctgatgagctgcaggttttttgaactcacttctggaggtgcagagccacaaacgcactttcggggcctagttttgctcgaatatgaatttagataggtatcaagctgtaactaagacaatattgataaatgttggatgacatttaatttaatggagcatgtacttatttgcatttgctggcagttcaggcatagttaaagtgagagttctcctatatttcataataagtggtctgccaaaacccatgtattaaataaattgtccaagtgaaactcgactaactttggcctttgtgtatttcctgaaggtaatattgttaactgttaataaatacttctgacactacatttaaatgtttgcagattctgcaaactaattgctcattgtaatgttgaaataatttggatatttcacattgaaatgaaaagcctttctctggagcattttagatttgcattttaaatgcatgaaatgtaattgatttatttgtaatattttaaatggtataataaactcagataaaag

SEQ ID NO: 305777 - protein, 570 aa, Artificial Sequence
  derived and/or modified sequence
MAYCLGVNFVPSRFCYQLHRLLLRCTFRFPSTAIKIQFTSLYHKEEAPASPLRPLYPQISPLKIHIPEPDLRSMVSPVPSPTGTISVPNSCPASPRGAGSSSYRFVQNVTSDLQLAAEFAAKAASEQQADTSGGDSPKDESKPPFSYAQLIVQAISSAQDRQLTLSGIYAHITKHYPYYRTADKGWQNSIRHNLSLNRYFIKVPRSQEEPGKGSFWRIDPASEAKLVEQAFRKRRQRGVSCFRTPFGPLSSRSAPASPTHPGLMSPRSGGLQTPECLSREGSPIPHDPEFGSKLASVPEYRYSQSAPGSPVSAQPVIMAVPPRPSSLVAKPVAYMPASIVTSQQPAGHAIHVVQQAPTVTMVRVVTTSANSANGYILTSQGAAGGSHDAAGAAVLDLGSEARGLEEKPTIAFATIPAAGGVIQTVASQMAPGVPGHTVTILQPATPVTLGQHHLPVRAVTQNGKHAVPTNSLAGNAYALTSPLQLLATQASSSAPVVVTRVCEVGPKEPAAAVAATATTTPATATTASASASSTGEPEVKRSRVEEPSGAVTTPAGVIAAAGPQGPGTGE

SEQ ID NO: 305778 - DNA, 1713 bp, Artificial Sequence
  derived and/or modified sequence
atggcctactgcctgggcgtgaacttcgtgcccagcagattctgctaccagctgcacagactgctgctgagatgcaccttcagattccccagcaccgccatcaagatccagttcaccagcctgtaccacaaggaggaggcccccgccagccccctgagacccctgtacccccagatcagccccctgaagatccacatccccgagcccgacctgagaagcatggtgagccccgtgcccagccccaccggcaccatcagcgtgcccaacagctgccccgccagccccagaggcgccggcagcagcagctacagattcgtgcagaacgtgaccagcgacctgcagctggccgccgagttcgccgccaaggccgccagcgagcagcaggccgacaccagcggcggcgacagccccaaggacgagagcaagccccccttcagctacgcccagctgatcgtgcaggccatcagcagcgcccaggacagacagctgaccctgagcggcatctacgcccacatcaccaagcactacccctactacagaaccgccgacaagggctggcagaacagcatcagacacaacctgagcctgaacagatacttcatcaaggtgcccagaagccaggaggagcccggcaagggcagcttctggagaatcgaccccgccagcgaggccaagctggtggagcaggccttcagaaagagaagacagagaggcgtgagctgcttcagaacccccttcggccccctgagcagcagaagcgcccccgccagccccacccaccccggcctgatgagccccagaagcggcggcctgcagacccccgagtgcctgagcagagagggcagccccatcccccacgaccccgagttcggcagcaagctggccagcgtgcccgagtacagatacagccagagcgcccccggcagccccgtgagcgcccagcccgtgatcatggccgtgccccccagacccagcagcctggtggccaagcccgtggcctacatgcccgccagcatcgtgaccagccagcagcccgccggccacgccatccacgtggtgcagcaggcccccaccgtgaccatggtgagagtggtgaccaccagcgccaacagcgccaacggctacatcctgaccagccagggcgccgccggcggcagccacgacgccgccggcgccgccgtgctggacctgggcagcgaggccagaggcctggaggagaagcccaccatcgccttcgccaccatccccgccgccggcggcgtgatccagaccgtggccagccagatggcccccggcgtgcccggccacaccgtgaccatcctgcagcccgccacccccgtgaccctgggccagcaccacctgcccgtgagagccgtgacccagaacggcaagcacgccgtgcccaccaacagcctggccggcaacgcctacgccctgaccagccccctgcagctgctggccacccaggccagcagcagcgcccccgtggtggtgaccagagtgtgcgaggtgggccccaaggagcccgccgccgccgtggccgccaccgccaccaccacccccgccaccgccaccaccgccagcgccagcgccagcagcaccggcgagcccgaggtgaagagaagcagagtggaggagcccagcggcgccgtgaccacccccgccggcgtgatcgccgccgccggcccccagggccccggcaccggcgagtag

SEQ ID NO: 305779 - DNA, 1470 bp, Artificial Sequence
  derived and/or modified sequence
atggtgagccccgtgcccagccccaccggcaccatcagcgtgcccaacagctgccccgccagccccagaggcgccggcagcagcagctacagattcgtgcagaacgtgaccagcgacctgcagctggccgccgagttcgccgccaaggccgccagcgagcagcaggccgacaccagcggcggcgacagccccaaggacgagagcaagccccccttcagctacgcccagctgatcgtgcaggccatcagcagcgcccaggacagacagctgaccctgagcggcatctacgcccacatcaccaagcactacccctactacagaaccgccgacaagggctggcagaacagcatcagacacaacctgagcctgaacagatacttcatcaaggtgcccagaagccaggaggagcccggcaagggcagcttctggagaatcgaccccgccagcgaggccaagctggtggagcaggccttcagaaagagaagacagagaggcgtgagctgcttcagaacccccttcggccccctgagcagcagaagcgcccccgccagccccacccaccccggcctgatgagccccagaagcggcggcctgcagaccccccccatcccccacgaccccgagttcggcagcaagctggccagcgtgcccgagtacagatacagccagagcgcccccggcagccccgtgagcgcccagcccgtgatcatggccgtgccccccagacccagcagcctggtggccaagcccgtggcctacatgcccgccagcatcgtgaccagccagcagcccgccggccacgccatccacgtggtgcagcaggcccccaccgtgaccatggtgagagtggtgaccaccagcgccaacagcgccaacggctacatcctgaccagccagggcgccgccggcggcagccacgacgccgccggcgccgccgtgctggacctgggcagcgaggccagaggcctggaggagaagcccaccatcgccttcgccaccatccccgccgccggcggcgtgatccagaccgtggccagccagatggcccccggcgtgcccggccacaccgtgaccatcctgcagcccgccacccccgtgaccctgggccagcaccacctgcccgtgagagccgtgacccagaacggcaagcacgccgtgcccaccaacagcctggccggcaacgcctacgccctgaccagccccctgcagctgctggccacccaggccagcagcagcgcccccgtggtggtgaccagagtgtgcgaggtgggccccaaggagcccgccgccgccgtggccgccaccgccaccaccacccccgccaccgccaccaccgccagcgccagcgccagcagcaccggcgagcccgaggtgaagagaagcagagtggaggagcccagcggcgccgtgaccacccccgccggcgtgatcgccgccgccggcccccagggccccggcaccggcgagtag

SEQ ID NO: 305780 - DNA, 1713 bp, Artificial Sequence
  derived and/or modified sequence
atggcgtactgcctgggtgtgaattttgtgccctcacgattttgctatcagctgcatcggctgctgttgaggtgcacttttcgtttcccatctactgctatcaagatacagtttacatcactgtaccacaaagaggaagctccagccagccctctccgccctctctatcctcagatttcaccactgaagatacacattccagagccggaccttaggtcgatggtgtcccccgtcccttcaccaaccggcactatcagtgtccctaactcttgtcctgccagccccaggggcgccggctcatctagctataggttcgtgcagaatgtgacaagtgaccttcagctcgctgccgagtttgcagctaaggccgcctctgaacagcaggctgatacctctggcggggatagtcctaaagacgaatctaagccccccttttcttacgctcaacttatcgtccaggccatttcatccgcccaggatcgccagctcacgttatcggggatctacgcccacataacaaagcattatccatattatcgaacggcagataagggatggcagaatagcatcagacataatttgtctttaaatcggtacttcattaaggttccaaggtcacaggaagaaccaggaaaaggaagtttttggcgtatcgacccagcctctgaggctaagctcgttgagcaagcttttaggaaaagacggcagagaggcgtgagttgttttcgcaccccttttggacctttatcaagccgaagtgctcctgctagtccaactcaccccggtcttatgtccccacgctcaggcggcctccagacaccagaatgtctcagtcgcgaagggagcccaataccacatgatcccgagttcggatccaaactagccagcgtgcctgagtatcggtatagccagagcgccccaggctctcctgtaagcgcccagcccgtaattatggctgtacccccgcgaccatccagtctagtggcaaagcccgtggcctacatgccagcctcaattgtgactagccagcagccagctggccatgctatccatgtggtgcaacaagcgccaaccgtcacaatggtgagggtggtgaccaccagtgccaactctgccaatggatatattctgacctcccagggtgccgccggcgggtcacacgatgcagctggcgccgcggttttagacctaggctctgaagcccgggggttagaagaaaaacctacaattgctttcgctacaatacctgctgccggcggagttatacaaactgtggctagccagatggcccccggagtgccggggcacacagtgaccatccttcagcctgcgacacctgtaactctcggccagcatcatttgccggtccgcgcagtcactcagaatggaaagcatgcggtgcctacgaattctctggcgggcaacgcatacgccctaacatccccgctgcagctgctggccacccaggcttcttcctcagctcccgtggtggtgacccgcgtctgtgaggttggaccaaaagagccggccgcagcggtcgccgccaccgcaactactacccccgctacagctacaacagcaagtgcctccgcgtcgagtacaggcgagcccgaggtgaagcgctctcgcgtggaagaaccaagcggggccgtgacaactccagctggagttattgctgcagccggaccgcagggaccaggaaccggcgagtag

SEQ ID NO: 305781 - DNA, 1470 bp, Artificial Sequence
  derived and/or modified sequence
atggtctctccagtacctagtcctacaggcacaatatctgtaccaaattcatgccccgcaagccctaggggagcgggcagctctagttacagattcgtgcagaatgtgaccagcgatctccagttagccgcagaattcgcggccaaagctgctagcgaacagcaggccgataccagtggtggagacagtcctaaagacgagtctaaacctccattcagttacgcgcagctcatcgtgcaggctatttcctctgctcaggatcgccaactgacactatcagggatttatgcccacataaccaagcactatccttactatcgcactgcagacaagggatggcagaacagcataaggcacaatctgagtctcaatcgctattttataaaggtgcctagatcccaggaagaacctggaaagggctcattttggcgcatagaccctgcaagcgaggctaaactcgttgaacaggccttccggaagcgtcggcagcgcggcgtaagctgtttccgcaccccgtttggacctttgtcgtctcggtcggccccagccagtccgacccatcctggtctcatgtccccgcgcagcgggggtctgcaaacaccgcccattccccacgatcccgagtttggttcaaagctcgcatccgttcctgaataccgctattcacagtccgcacctggctcccctgtgtcagctcagccagtcatcatggccgtcccgcctcgcccttcctcactggtggccaagcccgtggcatacatgcccgcctcgattgtcacatcccagcagcctgccggccatgcaattcacgtggttcagcaggcgccaaccgtgacaatggttagagtcgtgaccacatccgctaactccgcgaatggctatattctgacttcacagggagcagcgggtggcagccacgatgcagccggggcggcagtgttagatttgggcagcgaggctagaggactggaagagaagcccaccatcgctttcgcaacaatccctgccgccggtggcgtgattcagactgttgcctcccaaatggctccaggagtcccaggtcatacggtcacaatcttgcagcccgctactcctgtaactctgggacagcatcacctccccgtgagagctgttactcagaacgggaaacatgccgtgcctacaaattcactggccggcaatgcatatgcactaacgagtccacttcaacttctcgccacacaggcctccagctcagctccagtagtggttacccgggtgtgcgaagttggccccaaggaaccagcagctgcagtggccgcgactgccacaaccacaccagctaccgcaacgacagcttccgcttctgcctcgagcactggcgagccagaggtaaagaggtcccgtgtagaggagcccagcggagctgtgaccactccagctggagtgatagcagccgccggcccgcaaggacctggcactggggaatag

SEQ ID NO: 305782 - DNA, 2032 bp, Artificial Sequence
  derived and/or modified sequence
cagcactttgggaggccgaggctggcggatcacgaggtcaggagatcgagaccatcctggctaacacggcaggagtgcagatgtgatctcggcacaccgcaacctctgcctcttggattcaagcaattctcctgcctcagcctcccaagtggctgggattacaggcatgcgccaccacgcccagggtttggcaaatggattctgcagagtcagatgccttaacttcgtgtagtggtcttgtggatggcttactgccttggagttaatttcgttccttctcgtttctgctaccagcttcacaggcttctgctaaggtgtaccttccggtttcccagcacggccatcaagatccagttcacgtcgctctatcacaaagaagaggccccagcctccccgctgcggccactgtacccccagatctcccctctgaagatccacatcccggagccggacctccggagcatggtcagccccgtcccctccccgacgggcaccatcagtgtccccaactcctgcccagccagtccacgcggtgccggctcctccagttaccgctttgtgcagaacgtgacctcggacctgcagctggcagcagagtttgcagcaaaggccgcgtcggagcagcaggcagacacgtctggaggagacagccccaaggatgagtcaaagccgccgttctcctacgcgcagctgatcgtgcaggccatctcctccgcccaggaccggcagctgaccctgagcgggatctacgcccacatcaccaagcattacccctactaccggacggccgacaaaggctggcagaattctatccggcacaacctctctttgaaccgttactttatcaaagtcccacgttcccaggaggagcctgggaaggggtccttttggcgaatagaccctgcctctgaagccaagctcgtggaacaggcattccggaaacggaggcagaggggtgtctcctgcttccgcacccccttcgggcctctgtcctcaaggagcgctccagcttcgcccacacaccccgggctgatgtcccctcgctccggcggcctgcagaccccagagtgcctgtctcgggagggctcccccattccacacgaccctgagtttgggtccaagttagcttctgtcccagagtaccggtattcccaaagcgcacccggctcccccgtcagcgcccagccagtgatcatggccgtgcctccccgaccgtccagcctcgtggccaagcccgtggcctacatgcccgcctccatcgtaacctcacagcagcccgcgggccacgccatccacgtcgtgcagcaggcccccaccgtcaccatggtcagggtggtcaccacatctgccaactcggccaacggatacatcctcaccagccagggcgcggcggggggctcccatgatgcggcgggcgcagccgtgctggacctgggcagcgaggccagaggcctggaggagaaacccaccattgcgtttgccacaatccccgcggctggtggagtcatccagacggtggccagccagatggcccccggggtccccggacacacggtcaccatcctgcagcccgccacacccgtgaccctcgggcagcaccaccttccagtccgggccgtgacccagaacggaaagcatgcggttcccacgaacagtttagccggcaacgcttacgccctcaccagccctttgcagctccttgcgacccaagcgagttcatccgcgccggtggtggtcacccgggtgtgcgaggtggggcccaaggagccagcagcagccgtcgcggccacggccaccaccaccccagccactgccaccaccgcctctgcctccgcctcttccactggagagcccgaggtcaaaaggtcccgggtggaggagcccagtggtgctgtaaccacaccggctggagtgatcgcagctgccggcccccaggggccaggcaccggggagtgaggtcacctgcaacgcgggggagtgggactcacccagcggcgaccccgaagctggacccggcagctcaggcggccgc

SEQ ID NO: 305783 - DNA, 1713 bp, Artificial Sequence
  derived and/or modified sequence
atggcctactgcctgggcgtgaactttgtgcccagccgcttctgctaccagctgcaccggctgctgctgcgctgcaccttccgcttccccagcacagccatcaagatccagttcaccagcctgtaccacaaggaggaggccccagccagccccctgcggcccctgtacccccagatcagccccctgaagatccacatccctgagccagacctgcgctccatggtgtcccctgtgcccagccccaccggcaccatctctgtgcccaacagctgcccagccagccccaggggggccggcagcagcagctacagatttgtgcagaatgtgaccagtgacctgcagctggccgctgagtttgctgccaaggccgccagcgagcagcaggccgacaccagcggcggggacagccccaaggatgagagcaagccacccttctcctatgcccagctgattgtgcaggccatcagcagcgcccaggaccggcagctgaccctgagcggcatctatgcccacatcaccaagcactacccctactacagaacagctgacaagggctggcagaacagcatccgccacaacctgagcctgaaccgctacttcatcaaggtgcccaggagccaggaggagcccgggaagggcagcttctggagaattgatcctgccagcgaggccaagctggtggagcaggccttcaggaagaggcggcagaggggcgtgtcctgcttccgcacccccttcggccccctgagcagccgcagcgccccagccagccccacccaccctggcctgatgagccccaggtctgggggcctgcagaccccagaatgtctgagccgggagggcagccccatcccccatgaccctgagtttggcagcaagctggcctctgtgcctgagtaccgctacagccagagcgcccctggcagccctgtgtctgcccagcctgtgatcatggctgtgcccccccggcccagcagcctggtggccaagcctgtggcctacatgcctgccagcatcgtgaccagccagcagcctgctggccacgccatccacgtggtgcagcaggcccccaccgtgaccatggtgcgggtggtgaccaccagcgccaacagcgccaacggctacatcctgaccagccagggcgctgctgggggcagccatgatgctgctggagctgctgtgctggacctgggcagcgaggcccggggcctggaggagaagcccaccatcgcctttgccaccatcccagctgctgggggcgtcatccagacagtggccagccagatggcccctggggtgcccggccacacagtgaccatcctgcagcctgccacccctgtgaccctgggccagcaccacctgcctgtgcgggctgtgacccagaatggcaagcatgctgtgcccaccaacagcctggccggaaatgcctatgccctgaccagccccctgcagctgctggccacccaggccagcagcagcgcccctgtggtggtgaccagggtgtgtgaggtgggccccaaggagcctgctgctgctgtggccgccacagccaccaccaccccagccacagccaccacagccagcgccagcgccagcagcactggagagcctgaggtgaagaggagccgggtggaggagcccagcggggctgtgaccaccccagctggggtgattgctgctgctggcccccagggccctggcaccggggagtag

SEQ ID NO: 305784 - DNA, 1470 bp, Artificial Sequence
  derived and/or modified sequence
atggtgtcccctgtgcccagccccaccggcaccatctctgtgcccaacagctgcccagccagccccagaggagctggcagcagcagctacagatttgtgcagaatgtgaccagtgacctgcagctggccgctgagtttgctgccaaggccgccagcgagcagcaggccgacaccagcggcggggacagccccaaggatgagagcaagccacccttctcctatgcccagctgattgtgcaggccatcagcagcgcccaggaccggcagctgaccctgagcggcatctatgcccacatcaccaagcactacccctactacagaacagctgacaagggctggcagaacagcatccgccacaacctgagcctgaaccgctacttcatcaaggtgcccaggagccaggaggagcccgggaagggcagcttctggagaattgatcctgccagcgaggccaagctggtggagcaggccttcaggaagaggcggcagaggggcgtgtcctgcttccgcaccccatttggccccctgagcagccgcagcgccccagccagccccacccaccctggcctgatgagccccaggtctgggggcctgcagaccccacccatcccccatgaccctgagtttggcagcaagctggcctctgtgcctgagtaccgctacagccagagcgcccctggcagccctgtgtctgcccagcccgtcatcatggctgtgcccccccggcccagcagcctggtggccaagcctgtggcctacatgcctgccagcatcgtgaccagccagcagcctgctggccacgccatccacgtggtgcagcaggcccccaccgtgaccatggtgcgggtggtgaccaccagcgccaacagcgccaacggctacatcctgaccagccagggcgccgccggcggcagccatgatgctgctggagctgctgtgctggacctgggcagcgaggcccggggcctggaggagaagcccaccatcgcctttgccaccatcccagctgctggaggagtcatccagacagtggccagccagatggcccctggggtgcccggccacacagtgaccatcctgcagcctgccacccctgtgaccctgggccagcaccacctgcctgtgcgggctgtgacccagaatggcaagcatgctgtgcccaccaacagcctggccggaaatgcctatgccctgaccagccccctgcagctgctggccacccaggccagcagcagcgcccctgtggtggtgaccagggtgtgtgaggtgggccccaaggagcctgctgctgctgtggccgccacagccaccaccaccccagccacagccaccacagccagcgccagcgccagcagcactggagagcctgaggtgaagaggagccgggtggaggagcccagcggggctgtgaccaccccagctggggtgattgctgctgctggcccccagggccctggcactggagagtag

SEQ ID NO: 305785 - DNA, 1713 bp, Artificial Sequence
  derived and/or modified sequence
atggcctactgcctgggcgtgaacttcgtgcccagccggttctgctatcagctgcaccgtctgctcctgcgttgtacttttcgcttccctagtacggccattaagattcagtttacatctttataccacaaagaagaggcccctgcaagtcctctcagacctctctacccacaaatctccccactgaaaattcatatcccggagcccgatttacgctctatggtctcacccgtgccgtcccctaccggcacgatcagtgtccctaactcatgccctgcctccccccgaggcgctggttccagtagttaccggtttgtccaaaacgtgacaagtgacttacagctcgcggcagaattcgctgctaaagccgcaagtgaacagcaagccgacacctctggcggagattcacccaaggatgaatctaagcctcctttcagctacgcccagttgattgttcaggccatttcctccgcccaggacagacagctgactttaagcggcatctacgctcacataacaaagcactacccttactaccggaccgcagacaagggctggcagaacagcataagacataatcttagcctgaaccgctatttcatcaaggtaccccgaagccaagaggaacccgggaaaggaagcttttggagaatcgacccagctagcgaggctaagctggtggaacaggcctttaggaagagaagacagagaggagtctcctgcttccgcacacctttcggccctctatctagcaggtccgcgcctgcttccccaactcaccctggcctgatgtccccacgctctggaggactgcagacccccgagtgtctatcaagagaaggttcaccgatcccccatgatcctgagttcggatctaagctagcttccgtccctgaatatcgatactctcagtccgcccctggaagcccagttagtgcccagcccgtgattatggctgtcccacctcgcccaagcagtcttgtcgctaagcctgttgcatacatgcctgcctccattgttacctcccagcagccggctgggcacgccattcatgtggtgcagcaggctcccacagtaacaatggtcagggtagtgactacatccgccaattccgctaacggttatatacttacaagtcagggcgcggcggggggctctcacgatgcagcgggtgcggcagtgctggatctcggctcggaggcgagagggctggaggagaaacctaccatcgcattcgctacgatccctgcggcaggcggagtgatccagacggttgccagccagatggcaccaggggtccctggacacacggtcacgatactccaaccagcgactcccgtgacactgggacagcaccatttgccggtgagggccgtgacccaaaacggcaaacatgctgtgcctacaaactctctggcgggtaacgcatacgccttaacatcacccctccagctcctcgccacccaggccagttcttcagcgccagtggtcgtgacacgcgtctgtgaggtcggtcccaaggagccagccgccgctgttgccgccaccgccaccacaactccagccaccgctacgacagcgagtgcaagcgcatcttcaacgggcgagccagaggtgaagcgatcgagggtcgaagaaccaagcggcgctgttaccaccccagccggtgtgattgccgctgccggccctcaggggcccggaactggcgagtag

SEQ ID NO: 305786 - DNA, 1470 bp, Artificial Sequence
  derived and/or modified sequence
atggtgagccccgtgcccagccccaccggcaccatcagcgtgcccaacagctgtcccgcaagccctaggggtgcaggttctagttcttaccggttcgttcagaacgttactagcgacctccagttggctgcagaattcgcagctaaggccgcaagcgagcagcaagccgacacatcaggcggggattctccaaaggatgagtctaaacctcccttttcctatgctcagctgatcgtccaggccattagctccgctcaggaccgacagctcaccctttccggcatatatgcccacattaccaagcactatccctattacaggactgcggacaaaggttggcagaacagcatcagacataacctatctttaaatcgctacttcatcaaggtgccaaggagtcaggaggaaccgggaaaagggtccttttggaggatcgacccagcctccgaggctaaactcgtggaacaagcctttagaaagaggagacagaggggcgtatcctgctttagaacaccttttggtcccttgtcctcccgatccgctcccgcctctcctactcaccccggactgatgtctcctcgttcagggggtttgcagaccccccctattcctcacgacccagagtttggctccaaacttgccagcgtgcccgagtacagatactctcagtcggcaccaggttcacctgtaagtgcgcagcctgtgattatggctgtccctcctcgacccagctcactggtggcaaaacctgttgcctatatgcctgcaagcatcgttacgtcccagcagccagcaggacatgcaattcatgtggtccagcaagctcctacagtgactatggttagagtcgtgactacttccgccaattctgccaatggatacatattaacatctcaaggagccgcgggcggtagtcacgacgccgctggcgctgcggtcctggatcttggctccgaggctaggggactcgaggaaaaacccaccattgcattcgctaccatacccgccgctgggggcgtaatccagactgttgccagtcagatggcgccaggcgtgcctggtcatactgtcactatcctacaacctgccaccccagtcaccctagggcagcaccacctgccagtccgggctgtcactcagaacgggaaacacgcggtccctactaactcactggcgggtaacgcatacgctctgacgtctcccctgcaactcctggctacccaggcctcctccagcgctcctgtggtggtcacccgcgtgtgtgaagtgggccccaaagagccagccgctgccgtggccgcgacagctaccactactcccgcaacggctacaactgcaagcgcctctgcaagctccactggagagcccgaggtcaagcgctccagggttgaggagcccagtggagcggtgaccaccccggctggagtcattgcggccgccggaccacagggcccaggtaccggcgaatag

SEQ ID NO: 305787 - DNA, 1713 bp, Artificial Sequence
  derived and/or modified sequence
atggcctactgtctgggtgtaaattttgttccaagtaggttttgctaccagcttcatcgcttgctcctgcgctgtacgttccgttttccaagcaccgctatcaaaatccagtttacttccctttaccataaggaagaggcacccgcttccccactccgacctctgtacccccagatttcaccactgaaaatacacatccctgagcctgacctgagatctatggtgtcaccagttcccagccctactggtactatctctgtaccaaacagttgtcccgcaagcccaaggggagcagggtcaagcagctatcgttttgtacagaacgtgacatcagacctccagctggctgccgagtttgcggctaaagcagcttcagagcaacaggcagacacatccggtggggacagtccaaaagacgaatcaaaacctcctttttcatacgcccagctgatagtccaggctatcagttcggcacaggaccgtcaactgacattaagtggaatctatgcccatatcaccaagcactacccttattacagaacggcagacaagggctggcagaatagtatccggcataaccttagcttgaaccggtattttattaaagtgccacggtctcaggaagagccaggtaaggggagtttctggcggatcgaccctgccagtgaagccaagttagtggaacaggctttcaggaagaggcggcaaaggggcgtgagttgcttccgcaccccgttcggtcccctaagctcccggtctgcccctgctagccccacacaccccggactcatgtctccacgtagcggcggactgcagaccccagagtgcctgtcaagggaggggtctccaattccccacgaccctgaatttggctctaagctggcctcagtgccggaatatcggtacagtcagagcgccccagggagcccagtctcggcccaaccggtgattatggccgtccccccacgccctagttccctggtcgcaaaacctgtggcatacatgcccgcttctatcgtgacctctcagcagcctgccggacatgctattcacgttgtgcagcaggctccgacggttacgatggtgcgggtggtgactacaagtgctaacagtgctaacggatacatactgacttcacaaggggctgctggcggaagccatgacgcggcaggtgccgctgtcttggacctgggatccgaggctagaggactcgaggagaagccgaccattgcgttcgcaactattccggcagcgggtggcgttattcagactgtagccagccaaatggcccctggcgtgccgggacatactgtcacaattctacaacccgctacacccgtgactctagggcagcatcatctgccggtgagagccgtcactcagaatggtaagcatgccgtacctactaactcactggcaggaaacgcgtatgcactgacaagcccactccagctgctggcaacacaagcttcgagcagtgcaccagtggtggtgacacgtgtgtgcgaagttgggcctaaagagcccgctgccgctgtggctgctacggcaacaacgacccctgcaacagcaactaccgcctctgcttctgctagcagtacaggagagcccgaagtgaagagatctcgtgtggaagagccctctggagcggtgacgacacccgcaggtgttattgcggcagccggaccgcagggtcccggaacgggcgaatag

SEQ ID NO: 305788 - DNA, 1470 bp, Artificial Sequence
  derived and/or modified sequence
atggtcagtcccgtcccatcccccacaggtaccatctccgtccctaacagctgtcctgcctccccgcgaggtgctgggtcttcctcctataggttcgtccagaatgtaaccagcgatctccaattagccgctgagttcgcagccaaggccgctagcgagcaacaagcagatacaagcggtggagactctccgaaggatgaaagcaagcccccattcagttatgcacagttgattgtgcaggccatcagctctgcccaagatcgccagctgacattgtctggaatctacgcgcacataacaaagcattacccatactatcgcactgctgacaaaggctggcagaactccatacgacataatttgtccctgaacagatactttataaaagtgccacgctcgcaagaggagcccggaaagggatccttttggcggatcgaccccgcaagtgaggccaagctcgtggaacaggccttccgcaaaagaagacagcgcggtgtgtcctgtttccgtaccccatttgggccactgtcttctaggagtgcacccgcttctcctacccacccagggttgatgtcacctcgttctggcggtctgcagaccccacctattccgcacgaccctgagttcggctcaaaactggccagcgtgccagaatacaggtactcccaatccgctccgggtagcccagtgtcagctcagccggtcatcatggccgttccccctaggccaagttctctggttgccaaaccagtggcttatatgccagcaagcattgtgacgtctcagcagccagcgggacacgcaatccatgtggtgcagcaggcgcctacggtgactatggttagggttgtgaccaccagcgccaattcagccaatggatacatcctgaccagccagggagcggcaggcggaagccacgacgcggctggagccgcagtgctggatcttggttcagaggctcgaggactggaggaaaagcccacaatcgcttttgccactattcctgcagccggaggagtgattcagaccgtggcaagccagatggctccaggtgtacccggacacactgtcaccatcttacagccggcaacaccggtaacactgggccagcaccacctacctgtgcgcgctgtgacccaaaatggaaaacatgcagtgcctaccaattccctggccggaaacgcatacgcattgacatcccctctgcagctgcttgctacgcaagcgtcctcttcagcacccgtggtcgtgacccgcgtgtgcgaagtcggcccaaaggagccagcagcggcagtggcagccacagccacaacaactcctgccaccgccacgacagcctcagcatcggctagcagcaccggggaacccgaggtaaagaggtcccgcgttgaggagccgtccggggctgtgaccaccccagccggagtgatcgccgcagcaggtcctcaaggccctggtactggcgaatag

SEQ ID NO: 305789 - protein, 129 aa, Artificial Sequence
  derived and/or modified sequence
MADSGDAGSSGPWWKSLTNSRKKSKEAAVGVPPPAQPAPGEPTPPAPPSPDWTSSSRENQHPNLLGGAGEPPKPDKLYGDKSGSSRRNLKISRSGRFKEKRKVRATLLPEAGRSPEEAGFPGDPHEDKQ

SEQ ID NO: 305790 - protein, 18 aa, Artificial Sequence
  derived and/or modified sequence
MADSGDAGSSGPWWKSLT

SEQ ID NO: 305791 - DNA, 390 bp, Artificial Sequence
  derived and/or modified sequence
atggccgacagcggcgacgccggcagcagcggcccctggtggaagagcctgaccaacagcagaaagaagagcaaggaggccgccgtgggcgtgcccccccccgcccagcccgcccccggcgagcccaccccccccgccccccccagccccgactggaccagcagcagcagagagaaccagcaccccaacctgctgggcggcgccggcgagccccccaagcccgacaagctgtacggcgacaagagcggcagcagcagaagaaacctgaagatcagcagaagcggcagattcaaggagaagagaaaggtgagagccaccctgctgcccgaggccggcagaagccccgaggaggccggcttccccggcgacccccacgaggacaagcagtag

SEQ ID NO: 305792 - DNA, 57 bp, Artificial Sequence
  derived and/or modified sequence
atggccgacagcggcgacgccggcagcagcggcccctggtggaagagcctgacctag

SEQ ID NO: 305793 - DNA, 390 bp, Artificial Sequence
  derived and/or modified sequence
atggcagacagcggagatgctgggtcctcaggcccctggtggaagtctttgacaaactccaggaagaagtcgaaggaagccgcagtgggggtgcccccgccagcccagcccgccccgggggaacccactccccccgcccctccttcaccagactggacaagtagctccagagaaaatcagcaccctaatttattgggcggggccggtgaacctccaaaaccagacaagctgtacggtgacaagagcggctcctcacggcgaaacctgaagatcagcaggtcgggccggttcaaggaaaaacgaaaggttcgcgccactctgttgcccgaggcaggcagatcccctgaagaggccggcttccctggcgacccacatgaagataagcagtag

SEQ ID NO: 305794 - DNA, 57 bp, Artificial Sequence
  derived and/or modified sequence
atggccgatagcggggatgccggatctagcgggccatggtggaagtcactaacatag

SEQ ID NO: 305795 - DNA, 390 bp, Artificial Sequence
  derived and/or modified sequence
atggctgacagcggagatgctggcagcagcggcccctggtggaagagcctgaccaacagcaggaagaagagcaaggaggccgctgtgggcgtgcccccaccagcccagcctgcccctggagagcccaccccaccagccccacccagcccagactggaccagcagcagccgggagaaccagcaccccaacctgctgggcggggccggggagccccccaagccagacaagctgtatggagacaagagcggcagcagcagaagaaacctgaagatcagccgcagcggccgcttcaaggagaagaggaaggtgcgggccaccctgctgcctgaggccggccgcagccctgaggaggccggcttccctggggacccccatgaggacaagcagtag

SEQ ID NO: 305796 - DNA, 57 bp, Artificial Sequence
  derived and/or modified sequence
atggctgacagcggagatgctggcagcagcggcccctggtggaagagcctgacctag

SEQ ID NO: 305797 - DNA, 390 bp, Artificial Sequence
  derived and/or modified sequence
atggccgacagcggcgacgccggcagcagcggcccctggtggaagtcacttactaactcgaggaaaaaaagcaaggaagctgcggtaggcgtgcctccacctgcacagccagccccgggcgaacctactccccccgcaccaccgtcacccgactggacaagcagtagtcgagaaaaccagcaccccaatctcctgggcggcgcgggagaacccccaaaaccagataagctgtacggcgataagagcggctcttcaaggcgtaacctgaagatctctcggtctggaagatttaaagagaaaagaaaggtgagggccacgctcctcccagaggctggcaggagtccggaggaagccggatttcctggtgaccctcacgaagacaaacaatag

SEQ ID NO: 305798 - DNA, 57 bp, Artificial Sequence
  derived and/or modified sequence
atggccgacagcggcgacgccggcagcagcggcccctggtggaagtccctgacctag

SEQ ID NO: 305799 - DNA, 390 bp, Artificial Sequence
  derived and/or modified sequence
atggcggactctggtgatgctggctcctccgggccttggtggaagagtttgacaaattcacggaagaagagcaaagaagccgcagtgggggtcccacctccggcacaaccagcgcctggtgagcctacgcctccagcacccccatcaccagattggacaagctcttctcgcgaaaatcaacacccgaatctcctggggggagcgggagagcctccaaagcccgacaagttgtatggggataagagcggatcttcgcggcgtaacctcaagattagtcggtcaggcagatttaaagagaaacgtaaggtcagagctaccctgctgcccgaagccggaagatccccagaggaggctggcttcccgggagatccacacgaagataagcagtag

SEQ ID NO: 305800 - DNA, 57 bp, Artificial Sequence
  derived and/or modified sequence
atggccgactcaggagatgctggatcgtcagggccttggtggaaaagtctgacttag

SEQ ID NO: 305801 - DNA, 1678 bp, Artificial Sequence
  derived and/or modified sequence
gtggcagcggtgaccgcctcctgggttattttcttttctcccccagctgccccagggttctggtttcccgaatcacttggcaaataaccagcaggtgggcagatgtcttttttgcgttcctacggacgcgtaggcaagttcgatgcgccggagtgaacagccagggtcccatctctcagccggctcccgggcggtgctagcagggaagagggacgcgccggcgaatgaaacactactagcccggaaagccgccctggaccttccacccgggcagcgagtctggcggcccctcgccgccgccccctccgaccagaacagactgcgctgcgagccccgggcttccgccgcagcgcgcagcaattggaggtgccagaggagaccagcagcagcacttgatttagctgggctgcgggaattccgacctgtacactttccagaagcctgatctctccaagtccgcgcccagggactcgagccccggcttccaggttgacccgagcgcgcccccttcgtgctctcggccgcgttcaccgcgcgaggcctccgggtcctgttaagcccgagcagcacaggccgctgcctcagcatccaccccgcagcccacgtgtggcaagccggggaaggggtggagtgaacggccggagaccacgtggagaaaggggccgctttggcccttccatctgggtgccgggagcccctaggccctccggccatggccgacagcggcgatgctggcagctccggcccctggtggaaatcgctcaccaacagcagaaagaaaagcaaggaagccgcagtgggggtgccgcctcccgcccagcccgctcccggggagcccacgccacctgcgccgcccagcccggactggaccagcagctcccgggagaaccagcaccccaatctcctcgggggcgccggcgagccccccaaaccagacaagttatacggggacaaatccggcagcagccgccgcaatttgaagatctcgcgctccggccgctttaaggagaagaggaaagtgcgcgccacgctgctcccggaggcgggcaggtccccggaggaggcaggctttcctggtgacccccacgaggacaagcagtagccccaatagcctgcgcgctccaggactgcctacccagcactaccccaaacccccagttccaaacccgagacttcaggcccgcccccttacgcgttgtctcattccaccaaattcagaatatttacacaatgccttcatgattttatttttctggaaattgaagtgtcaattgggttctcaatatttcatgactccaaggatgcattaaatatttatttgtggtaagagaagatacctgccgcggaggagggtggcataattatttttttttcaaaaagctattctggggccctggccccctggctcctgtcacagctcagcttgaactctgtagcctctcaaatgaagaaggtggctgttatttaggactctgtggaaagcaaatcacagtgctgtttttaatgcctgagaaatgcactttaggggtagacttataccttaagtgaaggagtgggggaggaagaagcattcttaagtagaagcattttaaaataaggcaggattgcttttaatgttaaactacaaaactgtacagcctattttagtgtggactattaaaacccttgcactgtaagg

SEQ ID NO: 305802 - DNA, 503 bp, Artificial Sequence
  derived and/or modified sequence
agtaaaaggaagaattaggatggcggttttcaagggaagttaagtctagacatgcttctttgaaagtcacaaggcagaagtggtcaaaagtagaatttaaaagaaccaaaacaaatatcataagcttgtccttctctcctactgggatataaattctcctaagtatctcatcgaaaaggctcctgggacgaaagtcgatgggggcaaatcttggagggaaatttcgtgactgtttgaccatggactaattaataccgttcacctgtagagaggatgcacttggttcccagcgccctcctcccagcacaggccgctgcctcagcatccaccccgcagcccacgtgtggcaagccggggaaggggtggagtgaacggccggagaccacgtggagaaaggggccgctttggcccttccatctgggtgccgggagcccctaggccctccggccatggccgacagcggcgatgctggcagctccggcccctggtggaaatcgctcacc

SEQ ID NO: 305803 - DNA, 423 bp, Artificial Sequence
  derived and/or modified sequence
atggactgcaagagccccaagcgggccaacatctgcccccacctgccaggaggaggcctgttctcaacccctccttcccaagcggcttggagaacactgcttacagcactctgttttcctggcccaacttgtacgggcccgatgcgagaaggaccaagagcagtatataatcctccacgggcccataggaacagctccgataattgcgtgatgaagcacctcttatgtgctggagacaaaaacggcacaaggcgacacgctctgccttctcccctggagggctcattccagccaggtcgccaaatccctcctcctcagacaccctcaaccgatccccaaacacttcccctgtcctttcggagcctgttgcgctgtcaccagctatgcgcggcgtctctgcctccatcactcaagctgccatag

SEQ ID NO: 305804 - protein, 1606 aa, Artificial Sequence
  derived and/or modified sequence
MFHICPAENLYQNRFLGLAAMASPSRNSQSRRRCKEPLRYSYNPDQFHNMDLRGGPHDGVTIPRSTSDTDLVTSDSRSTLMVSSSYYSIGHSQDLVIHWDIKEEVDAGDWIGMYLIDEVLSENFLDYKNRGVNGSHRGQIIWKIDASSYFVEPETKICFKYYHGVSGALRATTPSVTVKNSAAPIFKSIGADETVQGQGSRRLISFSLSDFQAMGLKKGMFFNPDPYLKISIQPGKHSIFPALPHHGQERRSKIIGNTVNPIWQAEQFSFVSLPTDVLEIEVKDKFAKSRPIIKRFLGKLSMPVQRLLERHAIGDRVVSYTLGRRLPTDHVSGQLQFRFEITSSIHPADDEEISLSTEPESAQIQDSPMNNLMESGSGEPRSEAPESSESWKPEQLGEGSVPDGPGNQSIELSRPAEEAAVITEAGDQGMVSVGPEGAGELLAQVQKDIQPAPSAEELAEQLDLGEEASALLLEDGEAPASTKEEPLEEEATTQSRAGREEEEKEQEEEGDVSTLEQGEGRLQLRASVKRKSRPCSLPVSELETVIASACGDPETPRTHYIRIHTLLHSMPSAQGGSAAEEEDGAEEESTLKDSSEKDGLSEVDTVAADPSALEEDREEPEGATPGTAHPGHSGGHFPSLANGAAQDGDTHPSTGSESDSSPRQGGDHSCEGCDASCCSPSCYSSSCYSTSCYSSSCYSASCYSPSCYNGNRFASHTRFSSVDSAKISESTVFSSQDDEEEENSAFESVPDSMQSPELDPESTNGAGPWQDELAAPSGHVERSPEGLESPVAGPSNRREGECPILHNSQPVSQLPSLRPEHHHYPTIDEPLPPNWEARIDSHGRVFYVDHVNRTTTWQRPTAAATPDGMRRSGSIQQMEQLNRRYQNIQRTIATERSEEDSGSQSCEQAPAGGGGGGGSDSEAESSQSSLDLRREGSLSPVNSQKITLLLQSPAVKFITNPEFFTVLHANYSAYRVFTSSTCLKHMILKVRRDARNFERYQHNRDLVNFINMFADTRLELPRGWEIKTDQQGKSFFVDHNSRATTFIDPRIPLQNGRLPNHLTHRQHLQRLRSYSAGEASEVSRNRGASLLARPGHSLVAAIRSQHQHESLPLAYNDKIVAFLRQPNIFEMLQERQPSLARNHTLREKIHYIRTEGNHGLEKLSCDADLVILLSLFEEEIMSYVPLQAAFHPGYSFSPRCSPCSSPQNSPGLQRASARAPSPYRRDFEAKLRNFYRKLEAKGFGQGPGKIKLIIRRDHLLEGTFNQVMAYSRKELQRNKLYVTFVGEEGLDYSGPSREFFFLLSQELFNPYYGLFEYSANDTYTVQISPMSAFVENHLEWFRFSGRILGLALIHQYLLDAFFTRPFYKALLRLPCDLSDLEYLDEEFHQSLQWMKDNNITDILDLTFTVNEEVFGQVTERELKSGGANTQVTEKNKKEYIERMVKWRVERGVVQQTEALVRGFYEVVDSRLVSVFDARELELVIAGTAEIDLNDWRNNTEYRGGYHDGHLVIRWFWAAVERFNNEQRLRLLQFVTGTSSVPYEGFAALRGSNGLRRFCIEKWGKITSLPRAHTCFNRLDLPPYPSYSMLYEKLLTAVEETSTFGLE

SEQ ID NO: 305805 - DNA, 4821 bp, Artificial Sequence
  derived and/or modified sequence
atgtttcacatctgccctgcagaaaacctgtaccagaatagatttttaggactcgcagctatggcctcgccatctcgaaactctcagtctcgaaggagatgcaaagaaccactccgatactcttacaaccctgatcagttccataatatggatctcaggggcggtcctcatgacggcgtgaccattcccaggtcaactagtgacactgatcttgttacctcagatagccggagtacacttatggtctcatcatcatattacagcattggccacagtcaggacctggtgatacattgggatattaaagaggaggtggacgcaggggattggattgggatgtatctcatcgacgaggtcctgagtgagaacttcttggattataaaaaccgaggcgtgaacggctcccaccgcggccagattatttggaagatcgatgccagctcctatttcgttgagccagaaaccaaaatttgctttaagtattaccacggggtctcaggagcacttcgggcaaccaccccatctgtgactgtcaagaacagcgccgcaccgatctttaagagtattggcgctgacgaaactgttcaaggccagggatcccggcgcctaatttccttttccctttctgacttccaggccatgggtctcaagaaggggatgtttttcaatcctgacccctatctgaagatttccatccagccaggaaagcactctatcttcccagctctcccccaccacggccaagagagaagatctaagataatcggcaatacagtgaaccctatatggcaggcagagcagttctcctttgtcagcttgcccacagacgtgctggaaattgaagtaaaagacaagttcgccaagagcaggcctatcatcaagcgatttctgggaaagctgagcatgccagtgcagagattgttggaaagacatgcgatcggcgatcgggtggtgtcatacacgttaggcagaaggctacccactgaccacgttagcggtcagctgcaatttcgtttcgaaatcaccagtagcatccaccctgcagatgacgaggagatttctttgtctacagaacccgagtctgcacaaattcaggacagtcccatgaacaatctcatggaaagtggctccggtgaacctcgttcagaggctcctgaatctagcgagtcttggaaaccagagcaattgggagagggaagcgttccagacggaccaggtaaccagtccatcgagctgagtaggcccgccgaggaggctgccgtgattaccgaggccggtgatcagggcatggtgagcgtagggcccgagggtgctggcgagctcttagctcaagtgcaaaaggatatacagcctgccccatctgctgaggagctggcagagcagctggatctcggagaagaggccagcgccctgctgctagaagacggtgaagcgcccgcgtccactaaggaagagccccttgaggaagaagcaaccactcaaagtcgagcaggaagagaagaggaagaaaaggagcaggaggaggagggagacgtttctacattggagcaaggagagggcagacttcagcttagggcttcagtaaaacgcaaaagcaggccttgcagtctgcctgtctccgagctagaaactgtgatcgctagcgcttgcggcgaccctgagacaccaaggacacactatattaggatccataccctgctccattccatgccatcagcacaaggaggctccgccgctgaggaagaagacggtgcggaagaagagagcactttaaaagattcctcggaaaaggatgggctcagtgaggtggatacggttgctgctgacccaagcgccctcgaggaggatcgcgaagaacccgagggcgcgacccccggcacggcacaccccggccacagtggaggccacttcccttccctggcaaatggggccgctcaggacggggatacccacccttcaacaggcagtgagtctgactcgtctccacgtcagggcggggaccatagctgcgaggggtgtgacgcttcgtgctgtagtccctcttgttactcttccagttgttacagcacctcctgttactcctcttcctgctacagcgccagttgttactcgccgagttgctataatgggaataggttcgcttcccacacgcggtttagtagtgttgattctgccaagatctcggagtctacagtcttcagcagccaggatgatgaggaggaagagaatagtgcctttgagtcagtgcccgacagtatgcagtctcctgagttggatccagaatcgactaacggcgctgggccgtggcaggatgagcttgctgcgccttccggtcatgtcgaaaggtcccccgagggtttggaatccccagtggctggcccatctaaccgtagagagggtgagtgtcctattttgcacaattcgcaacccgtctcacagttgccctcactgaggcctgaacaccatcattacccaacaattgacgagcctttaccgcccaactgggaagcacgcatcgactctcacggcagggtcttctatgtagaccacgtgaataggaccaccacatggcaaaggcccactgccgccgcaactcctgatgggatgcgccggtctggctctatccagcaaatggagcagctgaaccggcgttatcagaatatccagcgcactatcgccaccgaaaggtccgaagaggactccggtagtcagtcctgcgagcaagcccctgcggggggaggaggcggaggaggatcagattccgaggcagagtcatcccagtcaagtctcgacctccgtagagagggctcactgtcccctgttaattcacagaagattaccctgctcctgcagagtccggcagtgaaatttatcacaaatccggaattcttcaccgtgttgcatgccaattatagtgcctatagggtttttacttcctctacttgcctgaagcacatgatcctgaaagtccgcagagacgcccgaaatttcgagaggtatcagcacaatcgggatctggttaactttattaatatgttcgcagacacgcgcctagagcttcctcgaggctgggagattaaaaccgaccagcaaggtaagtctttttttgtggaccacaatagtagagcgacaacgttcattgatcctaggatcccattgcaaaacggcagactgcctaaccatttgacacacagacagcaccttcaacgtctacgaagttacagcgccggtgaggcgtcggaggtgtccaggaacaggggcgcatcgttgctggccaggccaggccatagtctggtggccgcgattcgctcccagcatcagcatgaatctctgcctcttgcctataatgacaagatcgtggcttttctaaggcagccaaacattttcgagatgctacaggaaaggcaaccgtccctagcccgtaatcacacgctgagggagaaaatccactacattcgcacggaaggcaatcatggtttagagaaactctcctgtgatgcagaccttgtgatactgctgagcctttttgaagaggaaattatgtcttacgtgcccctgcaggcagccttccaccctggctacagcttcagccccagatgtagtccttgtagcagcccacaaaacagtcccggccttcaaagggcctctgcccgcgccccgtccccttatagaagagatttcgaagccaagctccggaacttttatcggaagctggaagctaaaggcttcggccagggacctgggaagattaaactcattattaggcgggaccatttactcgagggaaccttcaaccaggtaatggcttacagccgaaaggaactgcagagaaataagctttacgtgaccttcgtgggtgaagaaggcctcgattactctggccctagccgggaatttttttttctactgtctcaggaacttttcaacccttattacggactgttcgagtactctgcaaatgatacctacactgtgcagatcagcccaatgagcgcgttcgttgagaatcatctggaatggttccgcttctctggcaggattcttgggttagccctcatccaccagtacctcctggacgccttcttcacacgacctttctataaggctctgctgcgcttgccatgtgacctgtccgatctggaatacctggacgaggagtttcaccagagcctgcagtggatgaaggataacaacattactgacattttagatctgaccttcaccgtcaacgaagaggtcttcggccaagtcaccgagagggagctaaaatctggtggagccaacacccaggtcactgaaaagaacaagaaggaatacatcgagcgcatggtcaaatggcgcgtcgaaaggggcgtggttcaacaaacagaggccctagtccgagggttttacgaagtagtggactctcggctggtgtcggtctttgacgcccgcgagttagagttagtgattgccggcaccgcagagatcgacctcaatgattggcgcaacaacaccgagtatcggggaggctatcacgatggccacctcgtgataagatggttttgggcggcagttgagaggttcaacaacgagcagagacttcggttgctccagtttgtgactggaaccagtagcgtgccatacgagggcttcgccgcgctgagaggaagtaatggcctgcgacgtttctgtatcgagaaatggggcaagatcacaagcctgccgagggctcacacctgcttcaacaggctcgatctccccccatacccatcctattccatgctgtatgagaagctgctaactgcagtcgaagagacttcaactttcggactggagtag

SEQ ID NO: 305806 - DNA, 4821 bp, Artificial Sequence
  derived and/or modified sequence
atgttccacatctgcccagctgagaacctgtaccagaaccgcttcctgggcctggccgccatggccagccccagcaggaacagccagagcagaagacgctgcaaggagcccctgcgctacagctacaacccagaccagttccacaacatggacctgcggggcggcccccatgatggagtgaccatccccaggagcaccagtgacacagacctggtgaccagtgacagccgcagcaccctgatggtgagcagcagctactacagcatcggccacagccaggacctggtgatccactgggacatcaaggaggaggtggatgctggggactggattggcatgtacctgattgatgaggtgctgtctgagaacttcctggactacaagaacagaggagtgaatggcagccaccggggccagatcatctggaagattgatgccagcagctactttgtggagcctgagaccaagatctgcttcaagtactaccatggagtgtctggggccctgcgggccaccaccccatctgtgacagtgaagaacagcgctgcccccatcttcaagagcattggagcagatgagaccgtgcagggccagggcagcagaagactcatctccttcagcctgagtgacttccaggccatgggcctgaagaagggcatgttcttcaacccagacccctacctgaagatcagcatccagcccgggaagcacagcatcttccctgccctgccccaccacggccaggagcggcgcagcaagatcatcggcaacacagtgaaccccatctggcaggccgagcagttctcctttgtgtccctgcccacagatgtgctggagattgaggtgaaggacaagtttgccaagagccggcccatcatcaagcgcttcctgggcaagctgtccatgcctgtgcagaggctgctggagagacatgccatcggggacagagtggtgtcctacaccctgggccggcggctgcccacagaccacgtgtctggccagctgcagttccgctttgagatcaccagcagcatccacccagcagatgatgaggagatcagcctgagcacagagcctgagagcgcccagatccaggacagccccatgaacaacctgatggagagcggcagcggggagcccaggtctgaggcccctgagagcagcgagagctggaagccagagcagctgggggagggctctgtgcctgatggccctggcaaccagagcattgagctgagcaggcctgctgaggaggccgccgtcatcacagaagctggggaccagggcatggtgtctgtgggccctgagggcgctggggagctgctggcccaggtgcagaaggacatccagcctgcccccagcgctgaggagctggccgagcagctggacctgggggaggaggccagcgccctgctgctggaggatggagaggccccagccagcaccaaggaggagcccctggaggaggaggccaccacccagagcagagctggccgggaggaggaggagaaggagcaggaggaggagggagatgtgtccaccctggagcagggcgagggccgcctgcagctgcgggcctctgtgaagaggaagagccggccctgcagcctgcctgtgtctgagctggagaccgtcatcgccagcgcctgtggggaccctgagacccccaggacccactacatccgcatccacaccctgctgcacagcatgcccagcgcccagggcggcagcgctgctgaggaggaggatggagctgaggaggagagcaccctgaaggacagcagcgagaaggatggcctgtctgaggtggacacagtggccgctgaccccagcgccctggaggaggaccgggaggagcctgagggcgccaccccaggcacagcccaccctggccacagcggcggccacttccccagcctggccaacggggccgcccaggatggagacacccaccccagcacaggcagcgagagtgacagcagcccccggcagggcggggaccacagctgtgagggctgtgatgccagctgctgcagccccagctgctacagcagcagctgctacagcaccagctgctacagcagcagctgctacagcgccagctgctacagccccagctgctacaatggaaacagatttgccagccacacccgcttcagctctgtggacagcgccaagatcagcgagagcacagtgttcagcagccaggatgatgaggaggaggagaacagcgcctttgagagcgtgcctgacagcatgcagagccctgagctggaccctgagagcaccaacggggccggcccctggcaggatgagctggccgcccccagcggccacgtggagaggagccctgagggcctggagagccctgtggccggccccagcaacagaagagaaggagaatgtcccatcctgcacaacagccagcctgtgtcccagctgcccagcctgcggcctgagcaccaccactaccccaccattgatgagcccctgccccccaactgggaggccagaattgacagccacggccgggtcttctacgtggaccacgtgaacagaaccaccacctggcagaggcccacagctgctgccaccccagatggcatgaggaggagcggcagcatccagcagatggagcagctgaacagacgctaccagaacatccagaggaccatcgccacagagaggagtgaagaagattctggcagccagagctgtgagcaggccccagctgggggcggcggcggcggcggcagtgacagcgaggccgagagcagccagagcagcctggacctgcggcgggagggcagcctgagccctgtgaacagccagaagatcaccctgctgctgcagagccctgctgtgaagttcatcaccaaccctgagttcttcaccgtgctgcacgccaactacagcgcctacagagtcttcaccagcagcacctgcctgaagcacatgatcctgaaggtgagaagagatgccaggaactttgagcgctaccagcacaacagagacctggtgaacttcatcaacatgtttgctgacacccggctggagctgccccggggctgggagatcaagacagaccagcagggcaagagcttctttgtggaccacaacagccgggccaccaccttcatcgacccccgcatccccctgcagaatggccgcctgcccaaccacctgacccaccggcagcacctgcagaggctgcggagctacagcgctggggaggccagcgaggtgtccaggaacagaggagccagcctgctggcccggcccggccacagcctggtggccgccatccgcagccagcaccagcacgagagcctgcccctggcctacaatgacaagatcgtggccttcctgcggcagcccaacatctttgagatgctgcaggagcggcagcccagcctggccaggaaccacaccctgcgggagaagatccactacatcagaacagagggcaaccacggcctggagaagctgagctgtgatgctgacctggtgatcctgctgagcctgtttgaggaggagatcatgtcctatgtgcccctgcaggccgccttccaccctggctacagcttcagcccccgctgcagcccctgcagcagcccccagaacagccctggcctgcagagggccagcgcccgggcccccagcccctaccgccgggactttgaggccaagctgaggaacttctacaggaagctggaggccaagggcttcggccagggccctgggaagatcaagctgatcatcagaagagaccacctgctggagggcaccttcaaccaggtgatggcctacagcaggaaggagctgcagaggaacaagctgtatgtgacctttgtgggggaggagggcctggactacagcggccccagccgggagttcttcttcctgctgagccaggagctgttcaacccctactacggcctgtttgagtacagcgccaatgacacctacacagtgcagatcagccccatgtctgcctttgtggagaaccacctggagtggttccgcttcagcggccgcatcctgggcctggccctgatccaccagtacctgctggatgccttcttcacccggcccttctacaaggccctgctgcggctgccctgtgacctgagtgacctggagtacctggatgaggagttccaccagagcctgcagtggatgaaggacaacaacatcacagacatcctggacctgaccttcaccgtgaatgaggaggtgtttggccaggtgacagagcgggagctgaagagcggcggggccaacacccaggtgacagagaagaacaagaaggagtacatcgagaggatggtgaagtggagggtggagcggggcgtggtgcagcagacagaggccctggtgcggggcttctatgaggtggtggacagccggctggtgtctgtgtttgatgcccgggagctggagctggtgattgctggaacagctgagattgacctgaatgactggaggaacaacacagagtacagaggaggctaccatgatggccacctggtgatccgctggttctgggccgctgtggagcgcttcaacaatgagcagaggctgcggctgctgcagtttgtgacaggcaccagctctgtgccctatgagggctttgctgccctgcggggcagcaatggcctgcggcgcttctgcatcgagaagtggggcaagatcaccagcctgccccgggcccacacctgcttcaaccggctggacctgcccccctaccccagctacagcatgctgtatgagaagctgctgacagctgtggaggagaccagcaccttcggcctggagtag

SEQ ID NO: 305807 - DNA, 4821 bp, Artificial Sequence
  derived and/or modified sequence
atgttccacatctgccccgccgagaacctgtaccagaaccggttcctgggacttgccgcaatggctagcccgagccgcaactcccagtcccggagaaggtgcaaggagccactgaggtactcttacaaccctgatcagtttcacaatatggatttgcggggaggaccccacgacggggttactatccctcgctcaacgagcgacactgacttagtaacttctgactctcgctccacccttatggttagtagttcttactactctataggccattctcaggatctagtcattcactgggacatcaaagaggaggtggacgccggagactggatagggatgtatctgatcgatgaagtgctttctgaaaattttcttgactacaaaaatcgcggagtaaatgggtctcaccgtggccaaattatatggaaaatcgacgctagttcttatttcgtggagccagaaacaaagatctgcttcaaatactatcacggggtaagcggggccttgcgggcaacgacccccagtgtaacggtgaagaattcagccgcccctatatttaagtcgatcggcgccgatgaaactgtccaaggacaagggagccgaagactcatttcattttctctgtccgacttccaggccatgggcctgaagaaaggaatgtttttcaatccagacccgtatttgaagattagcatccagcccggaaagcactccattttcccggccttgccccaccatgggcaggagaggcgatcaaaaattatagggaacactgtcaaccctatctggcaggctgaacagtttagtttcgtctcacttcctaccgacgtcttggagattgaagttaaggataaatttgccaaaagtagaccaataataaagaggttcctgggtaaactgagcatgcccgttcaaagactccttgagcgtcatgccataggagacagagtggttagttatacactcggccgccgtctgcctacagaccatgtgagtggccagttgcagttcaggttcgagattactagcagcatacacccagccgatgacgaagagatctctctgtccactgaacctgaatccgcacagatccaggacagccccatgaataacttgatggaaagcggcagtggcgagccccggagcgaggctccagaaagttctgaatcatggaagccagagcagctaggggaaggctctgtgcctgacggccctggtaaccagagcatcgagctgtcgaggccagccgaggaggctgcagtcatcactgaggctggagaccaggggatggtcagcgtggggccagaaggggccggcgagctcctcgcccaagtgcagaaagacattcagcctgcgccttcagccgaggagctggcagagcaacttgacttgggagaggaggcaagtgcactgctgttggaagacggagaggcccccgcttcaaccaaggaggaaccactagaagaggaggccacaacacagtcaagagctggaagggaagaagaggagaaggaacaggaggaggaaggtgacgtgtccacactggaacaaggcgagggtcgactgcaactgcgcgcctcagttaagagaaagtcacgaccgtgctcacttcctgtctcagagctggaaacggtgattgcctcagcgtgcggcgaccccgagacgccacggacgcactacatcaggatacataccttactccattcaatgccgtccgcacagggaggaagcgccgctgaggaagaggacggggcagaagaagaatctacacttaaggactctagcgagaaagacggactgtctgaggtagacaccgtggccgctgacccttccgctcttgaggaggatagggaagaaccagaaggcgctactcctggaaccgctcaccctgggcactctgggggacactttcccagcctggctaacggagctgcgcaggatggcgatacacacccgagtactggttcagagtctgactccagccccaggcagggaggtgaccactcatgcgaggggtgtgatgcaagctgctgtagtccctcttgctatagctcatcttgctactccaccagctgctatagttcttcctgctattcagctagctgctatagtccatcctgctacaacgggaataggttcgctagccataccaggttctcaagcgttgacagtgctaaaatatccgagagcaccgtgttctctagtcaggatgatgaagaggaggagaatagcgcgtttgaatctgtgccagatagtatgcaatcgccagagttggatcccgagtccaccaatggtgccggtccatggcaagatgagcttgcagcccccagcgggcatgttgagcgaagccccgaaggtctcgagagccccgtcgctggtccctcaaacagacgggagggagagtgtcccatattgcacaattcccagcctgtgtcccagctcccgtcactgcgtcctgagcaccatcattaccccactatcgatgagccacttcctccaaattgggaagctagaattgatagtcacgggcgggtgttctacgtggaccacgtgaaccgaaccaccacctggcagaggcccactgctgccgcaactcctgacgggatgcggagatccggtagcatacagcagatggaacagttgaacagacgatatcagaacatccagcgtaccatcgctacggaacgaagcgaggaggatagcggaagccagagttgcgaacaggctccagccgggggtgggggcggagggggatcggacagtgaggcagagagtagtcagtcttctttggacctgaggcgggagggcagcttgtcacctgtgaattcccagaagatcactctcctcctgcagtcccctgccgtgaagttcatcacaaaccccgaattcttcaccgtccttcatgctaactactccgcctaccgcgtcttcacgagcagcacctgtctcaagcacatgatattaaaggtccgaagagacgcccgaaatttcgagcgctaccagcacaacagggacctggtgaattttatcaacatgttcgcagataccaggctggaactgccaagaggttgggaaatcaagaccgaccagcaaggcaagtctttttttgtggatcataactccagggccaccacattcatagaccctaggattcctttacagaacggccggttacccaatcacctgacacacaggcaacacctccagcgactgcgaagttattccgcgggagaggcatccgaggtcagcaggaatcggggggccagtttgctcgcccgccccgggcacagcctggtggcggccattcgtagccagcatcagcacgagagtctacctttagcctacaacgacaagatcgtagcctttctgcgtcagcctaatatcttcgaaatgctacaggagagacagccctccctggcaaggaatcacaccctcagagagaaaatccactacattcggacagaggggaaccatgggctagagaagctgtcttgcgatgccgacctggtgatacttttgtcgctgttcgaggaagagattatgtcctacgtcccacttcaagcagcgtttcatccggggtactccttttcacccaggtgttccccctgtagttcgccccagaactcccccgggctccaacgcgcttcagctagggccccatccccatatagaagagatttcgaggcaaagctgcgcaacttttacaggaagctagaggccaagggattcggccaggggcccggcaagatcaagcttatcatacggcgcgatcacctgttagaaggtacgtttaatcaagtgatggcctactccaggaaagagttacagagaaataagttgtatgtgaccttcgtgggcgaagaaggcctcgattattcaggacctagccgagaattcttctttctgctatcccaggagctctttaacccctattatggcctgtttgagtactccgcgaacgacacttacaccgtacagatctcacctatgagtgcttttgtcgagaaccatctggagtggtttaggttctctggtaggatcctgggcctcgctctcatccatcagtatctgttagatgccttttttacacggccattctataaggccctacttagactgccctgtgacctttcagatttggaatacctggacgaagaattccatcagagcttgcaatggatgaaggacaacaacatcactgatatcctggaccttactttcactgtgaacgaagaagtgttcggccaggtcaccgaaagggaattaaagtccgggggggcaaacacccaggttactgagaaaaataagaaagagtatatcgagcgtatggttaaatggagagttgagcgaggcgtggtgcagcagacggaggccctagtaaggggcttttacgaagtggttgactctagactggttagtgttttcgacgctagggagcttgagctggtcatcgccggaacagctgagatagacctgaacgactggcgtaataataccgagtataggggaggataccacgatgggcacttggtcatccgctggttttgggccgcagtggagagatttaacaacgagcagcgcttgagattgctacagttcgtgactgggacaagcagtgtgccctatgagggtttcgccgcactgcgtggctcaaacggactacgccgattttgtatcgagaaatggggaaaaattacctcactcccaagggcacacacctgttttaacaggctggatctgccaccctatcctagctactccatgctgtacgaaaaactgctcactgccgtcgaagaaacttccactttcggcctggagtag

SEQ ID NO: 305808 - DNA, 4821 bp, Artificial Sequence
  derived and/or modified sequence
atgttccacatctgcccagccgaaaacctgtatcaaaatagatttctcgggcttgccgcaatggcctccccttcacgaaactcccagagcagacgccgttgtaaagagcctctgcgctactcttacaatccagatcagtttcataatatggatcttcggggagggcctcacgacggcgtcacaattcctcgcagcacctcagacacagacctcgtcacatccgactcacgatctaccctcatggtgtccagctcttactacagcatcggccatagtcaggacctggttattcattgggacatcaaagaagaggtggatgccggtgattggatcggtatgtacctcattgacgaggtgctgtccgagaatttcctcgactataagaataggggcgttaacggctctcataggggccaaattatttggaagatcgacgcatcttcttatttcgtggagcccgaaacaaaaatttgttttaaatattaccatggggttagcggggctttgagggccacaactcctagtgtgacggttaaaaactccgcggcaccaattttcaagtccatcggcgcagacgagaccgtgcagggtcaaggctcacgcagactgatcagcttcagtcttagcgattttcaagctatgggtcttaaaaaggggatgttttttaaccctgatccttaccttaagatcagcatccagccagggaaacactccatcttccccgcactgcctcaccacggtcaggagaggcgaagcaaaataatcggtaatactgtgaaccccatatggcaggcagaacagttttcgtttgttagtctgcctaccgatgtcttggagatcgaggtgaaggataagtttgctaagagcaggcccattattaaacgctttttgggaaaactgtccatgcccgtccagcgactgctggaaaggcacgcgatcggggatcgggtcgtttcttacacactcgggagacgcctgcctacagatcacgtgtccggccagttacaattcaggtttgaaattacatcatctatccatccggcagacgatgaagagatttccctgagtacagagcccgagagcgcccagattcaggactcccctatgaataacctgatggaaagcggatctggagagccgaggagcgaggccccagagagttcggaatcgtggaagcctgagcagctgggcgagggtagcgtgccagacgggcctgggaatcagtctatagaactgtctagacccgctgaggaagcggcagtcattacagaggctggagaccagggtatggtgtctgtggggcctgaaggggctggagagctgttagcccaggtacagaaggacatacaacccgctcccagcgccgaggagctggcagaacaactagacttgggcgaggaggcttcggctctgttgttagaggacggagaggctccagcttctacaaaggaagaaccactggaagaagaggcgactacgcagagccgggctggccgagaggaggaggagaaagagcaggaagaagaaggagacgtttctacactggagcagggcgagggtaggctgcagctcagagcctccgtcaagaggaagtctcgcccatgcagcctgccagtaagtgagctggaaacagttatcgctagcgcatgcggggaccctgaaaccccccgaacccattacatacggattcacaccttgctgcactcaatgccctccgctcagggcggatccgccgctgaagaagaagatggcgctgaagaggagtcgacactgaaggactccagcgaaaaggatggactttccgaggtcgataccgtagctgctgacccatccgccttggaagaggatcgcgaagagcccgaaggcgctacccctggcacggctcacccgggtcactcaggaggacattttccaagtcttgccaatggagccgctcaagatggagacacccacccctccactggttctgaatcagacagctccccccgacaagggggagaccattcctgtgaggggtgcgatgcatcatgttgctcgcctagttgctattcttcctcctgttacagtacttcatgctactcgtcctcatgctacagcgccagctgctacagcccgtcctgttacaacggcaatagatttgctagccacactcgctttagtagcgtcgatagtgcaaagatcagtgagtccactgttttttctagccaagacgatgaggaggaggaaaatagtgccttcgaatctgtcccagacagcatgcaatcacccgagctcgacccagagtcaactaacggagccggtccttggcaagatgaactggccgctccttccggtcatgttgagagaagccctgaagggctggagagtcctgtagctgggccaagcaacaggagagagggagaatgcccaatcttgcataatagtcagcccgtgtcacagctccccagcctacgacctgagcatcaccactatcctacgattgacgagcccttaccgcctaattgggaggcgaggattgactcacacggaagggtattttacgtggatcacgtcaatagaacgacgacatggcaacggcctacagctgccgcaacaccagacggaatgaggcggtcgggatccatacaacagatggagcagcttaatagacggtatcagaatatccagcggaccatcgcaactgaaagaagcgaggaggacagcgggtctcagtcgtgtgagcaagcacccgctggaggaggcggagggggaggctctgattcagaagccgagagttcccaatcaagtctggacctcaggagagagggaagcctctctccagtcaatagccagaaaattaccctgctgctgcagtcacctgccgtaaaattcatcacgaatccagaatttttcacggtcctgcatgctaactacagtgcatatagggtgttcacctcttctacctgtctaaagcacatgattctgaaagtgcggagggacgctcgcaacttcgaacgatatcagcacaatagggaccttgttaacttcataaatatgtttgcggatacgaggctcgagttgccacgcggatgggaaattaaaacagaccagcaaggcaaaagtttttttgtggaccacaactccagagcaaccacattcattgaccccagaatccccctacagaacggtcgtctgcccaaccacctgacccacagacagcacctccagcgcctacgcagctactcagccggagaggcgtcagaggtgagccggaacaggggcgcaagtctgctggcacgccctggacacagcctcgtggcagcaattaggtcacaacaccagcacgagtctctccccctagcttataatgacaagatcgtggcttttctgagacagccgaacatctttgagatgcttcaggaacggcagccatcactggcgagaaaccacacgctccgagagaaaatacactatatcagaacggagggcaaccatggccttgagaaattatcatgtgatgccgatctggtgatcctgctatcgttgtttgaggaagaaatcatgagctatgtccccctgcaagccgcattccatcccggttactcgttcagtccacggtgcagcccatgctctagtccacaaaacagtcctggattacaacgggcaagcgcgagagccccatcgccgtatcgccgagacttcgaggccaaactgagaaacttctacagaaaactggaggcaaagggatttgggcaggggccagggaagatcaagctgataattagacgggaccacctgctcgaggggacttttaatcaggtgatggcttacagccgtaaggagctgcagcgtaataaactctatgttacgtttgtgggagaggagggcctggactatagcggcccttctagggaattcttcttcctgctgtcccaggaactgtttaacccttactacggcctgttcgaatacagcgcgaacgacacttatacggtccagatttcgcctatgtcagcctttgtggagaaccaccttgagtggtttcggttctccggcagaatcctggggctcgccctcattcatcagtacttacttgatgccttttttacgcgacccttctacaaggccctgctgagacttccctgtgacctgtccgatttggagtatttagatgaagaatttcatcagtctctgcagtggatgaaggacaataacattacagacattctcgatctgaccttcacggtcaacgaggaggttttcggacaagtgacagaaagggagttgaaaagcgggggtgccaacacacaggtcactgagaagaataaaaaggagtatatcgagagaatggtgaaatggagagtcgagcggggtgtggtccagcagactgaggcccttgttcggggattctatgaagtggtagactccaggctggtatctgtgttcgacgcacgggagctggaacttgtgatcgccggaacagctgaaatcgaccttaatgactggcgaaataacacagagtacagaggtgggtaccatgacggacatctcgtaatccgttggttctgggcagcggtcgagagatttaacaatgaacagcgtttgagattgctgcagtttgtgactggtacttctagcgtcccttatgagggcttcgccgctctgcgtgggtcaaatggcctcaggagattctgtatcgaaaaatggggcaagataacctcactgcctagagcacatacttgcttcaacaggttagatctgccaccttatcctagttatagcatgttgtatgaaaaactgctcaccgccgtcgaggaaacgtccacattcgggctcgagtag

SEQ ID NO: 305809 - DNA, 6234 bp, Artificial Sequence
  derived and/or modified sequence
atgtttcatatctgcccagcagagaatctgtaccagaacaggtttttaggcctggccgccatggcgtctccttctagaaactcccagagccgacgccggtgcaaggagccgctccgatacagctacaaccccgaccagttccacaacatggacctcaggggcggcccccacgatggcgtcaccattccccgctccaccagcgacactgacctggtcacctcggacagccgctccacgctcatggtcagcagctcctactattccatcgggcactctcaggacctggtcatccactgggacataaaggaggaagtggacgctggggactggattggcatgtacctcattgatgaggtcttgtccgaaaactttctggactataaaaaccgtggagtcaatggttctcatcggggccagatcatctggaagatcgatgccagctcgtactttgtggaacctgaaactaagatctgcttcaaatactaccatggagtgagtggggccctgcgagcaaccacccccagtgtcacggtcaaaaactcggcagctcctatttttaaaagcattggtgctgatgagaccgtccaaggacaaggaagtcggaggctgatcagcttctctctctcagatttccaagccatggggttgaagaaagggatgtttttcaacccagacccttatctgaagatttccattcagcctgggaaacacagcatcttccccgccctccctcaccatggacaggagaggagatccaagatcataggcaacaccgtgaaccccatctggcaggccgagcaattcagttttgtgtccttgcccactgacgtgctggaaattgaggtgaaggacaagtttgccaagagccgccccatcatcaagcgcttcttgggaaagctgtcgatgcccgttcaaagactcctggagagacacgccataggggatagggtggtcagctacacacttggccgcaggcttccaacagatcatgtgagtggacagctgcaattccgatttgagatcacttcctccatccacccagcagatgatgaggagatttccctgagtaccgagcctgagtcagcccaaattcaggacagccccatgaacaacctgatggaaagcggcagtggggaacctcggtctgaggcaccagagtcctctgagagctggaagccagagcagctgggtgagggcagtgtccccgatggtccagggaaccaaagcatagagctttccagaccagctgaggaagcagcagtcatcacggaggcaggagaccagggcatggtctctgtgggacctgaaggggctggggagctcctggcccaggtgcaaaaggacatccagcctgcccccagtgcagaagagctggccgagcagctggacctgggtgaggaggcatcagcactgctgctggaagacggtgaagccccagccagcaccaaggaggagcccttggaggaggaagcaacgacccagagccgggctggaagggaagaagaggagaaggagcaggaggaggagggagatgtgtctaccctggagcagggagagggcaggctgcagctgcgggcctcggtgaagagaaaaagcaggccctgctccttgcctgtgtccgagctggagacggtgatcgcgtcagcctgcggggaccccgagaccccgcggacacactacatccgcatccacaccctgctgcacagcatgccctccgcccagggcggcagcgcggcagaggaggaggacggcgcggaggaggagtccaccctcaaggactcctcggagaaggatgggctcagcgaggtggacacggtggccgctgacccgtctgccctggaagaggacagagaagagcccgagggggctactccaggcacggcgcaccctggccactccgggggccacttccccagcctggccaatggcgcggcccaggatggcgacacgcaccccagcaccgggagcgagagcgactccagccccaggcaaggcggggaccacagttgcgagggctgtgacgcgtcctgctgcagcccctcgtgctacagctcctcgtgctacagcacgtcctgctacagcagctcgtgctacagcgcctcgtgctacagcccctcctgctacaacggcaacaggttcgccagccacacgcgcttctcctccgtggacagcgccaagatctccgagagcacggtcttctcctcgcaagacgacgaggaggaggagaacagcgcgttcgagtcggtacccgactccatgcagagccctgagctggacccggagtccacgaacggcgctgggccgtggcaagacgagctggccgcccctagcgggcacgtggaaagaagcccggaaggtctggaatcccccgtggcaggtccaagcaatcggagagaaggtgaatgtcctatactccataattcccagccagtaagccagcttccttccctgaggcctgaacatcatcactacccaacaatcgatgagcctcttccaccaaactgggaagctcgaattgacagccacgggcgggtcttttatgtggaccacgtgaaccgcacaaccacctggcagcgtccgacggcagcagccaccccggatggcatgcggagatcggggtccatccagcagatggagcaactcaacaggcggtatcaaaacattcagcgaaccattgcaacagagaggtccgaagaagattctggcagccaaagctgcgagcaagccccagcaggaggaggcggaggtggagggagtgactcagaagccgaatcttcccagtccagcttagatctaaggagagaagggtcactttctccagtgaactcacaaaaaatcaccttgctgctgcagtccccagcggtcaagttcatcaccaaccccgagttcttcactgtgctacatgccaattatagtgcctaccgagtcttcaccagtagcacctgcttaaagcacatgattctgaaagtccgacgggatgctcgcaattttgaacgctaccagcacaaccgggacttggtgaatttcatcaacatgttcgcagacactcggctggaactgccccggggctgggagatcaaaacggaccagcagggaaagtcttttttcgtggaccacaacagtcgagctaccactttcattgacccccgaatccctcttcagaacggtcgtcttcccaatcatctaactcaccgacagcacctccagaggctccgaagttacagcgctggagaggcctcagaagtttctagaaacagaggagcctctttactggccaggccaggacacagcttagtagctgctattcgaagccaacatcaacatgagtcattgccactggcatataatgacaagattgtggcatttcttcgccagccaaacatttttgaaatgctgcaagagcgtcagccaagcttagcaagaaaccacacactcagggagaaaatccattacattcggactgagggtaatcacgggcttgagaagttgtcctgtgatgcggatctggtcattttgctgagtctctttgaagaagagattatgtcctacgtccccctgcaggctgccttccaccctgggtatagcttctctccccgatgttcaccctgttcttcacctcagaactccccaggtttacagagagccagtgcaagagccccttccccctaccgaagagactttgaggccaagctccgcaatttctacagaaaactggaagccaaaggatttggtcagggtccggggaaaattaagctcattattcgccgggatcatttgttggagggaaccttcaatcaggtgatggcctattcgcggaaagagctccagcgaaacaagctctacgtcacctttgttggagaggagggcctggactacagtggcccctcgcgggagttcttcttccttctgtctcaggagctcttcaacccttactatggactctttgagtactcggcaaatgatacttacacggtgcagatcagccccatgtccgcatttgtagaaaaccatcttgagtggttcaggtttagcggtcgcatcctgggtctggctctgatccatcagtaccttcttgacgctttcttcacgaggcccttctacaaggcactcctgagactgccctgtgatttgagtgacctggaatatttggatgaggaattccaccagagtttgcagtggatgaaggacaacaacatcacagacatcttagacctcactttcactgttaatgaagaggtttttggacaggtcacggaaagggagttgaagtctggaggagccaacacacaggtgacggagaaaaacaagaaggagtacatcgagcgcatggtgaagtggcgggtggagcgcggcgtggtacagcagaccgaggcgctggtgcgcggcttctacgaggttgtagactcgaggctggtgtccgtgtttgatgccagggagctggagctggtgatagctggcaccgcggaaatcgacctaaatgactggcggaataacactgagtaccggggaggttaccacgatgggcatcttgtgatccgctggttctgggctgcggtggagcgcttcaataatgagcagaggctgagattactgcagtttgtcacgggaacatccagcgtgccctacgaaggcttcgcagccctccgtgggagcaatgggcttcggcgcttctgcatagagaaatgggggaaaattacttctctccccagggcacacacatgcttcaaccgactggatcttccaccgtatccctcgtactccatgttgtatgaaaagctgttaacagcagtagaggaaaccagcacctttggacttgagtgaggacatggaacctcgcctgacattttcctggccagtgacatcacccttcctgggatgatccccttttccctttcccttaatcaactctcctttgattttggtattccatgatttttattttcaaaccaaatcaggattgacaaaagctgtgcatgaagaactgccttcttctaagatctaaccttcaggcttctctcctctgttttcaatgaactgctagcctgtatgcaatattaaaaaacagctgtctcaaggtctgtgtatatctccacatacctccattactaacaatgaaatatgaatgcaagttaagctacacttgaccaaatggtaataaatgtttacttccatttctatcattgaagggaaaatgtgagcattaagcactccaggctttcatatgcccatgtcttctgagcagagccaccattttttataatttctaataaccaactccagaactaggagctgatcaactctttgttttcctctccatctacttttccctgtgcataatatccatccaaaggacaacagtggcaaagctgaaatttttatacattcaactcatgattcacatgtggcatcagtcccatcagccggaactagcctagacatacggtgcaaatatgacacttctaacgattaacaacagcaagaaaacacctgctgctgatgcaatgcaatgcatcccaatggttgtggggattgtgggctcaactcaagagaagtttaggagggggagcatccctagtgaatactcacaccacaagaaggacaaacttgtgcacatgtccaagaaagaaagcttcttgattgaggtagcatgaaggatgaggcttcagcccccattgtcttatgtagaatgtggcaatgccaactggagaaagggaagaaggacatattaccttggtttgaatccctgagttctgtactgttctgttttgtttagtctagccacagttcttcacaaaggaaaaaaaaatgtgtagatgataccatgacttttgttaaagccatgacttttgtttgcttggcagacaaaccctttttttaaaactttgatatttttttttcacatttttttttccttttcctttcttaatcatggagttcaagttcctttgcattcgattgtccatcgggaccacactaggaagctgcagagagtgatggtgcttgttagggatcaagggcaacatagtacttctccttcacccatagtaatcctcctggggcagaaacataacaccccaaaggcacgttgatttgtatcaaaataaatatccagtttcttttagcattcagtgaaaacatatctcagaaaacttcatgttgtcagaaaaacagctgcaggctccaaagacagcctaacctctcaactacatttgaaataaacccaaccataatggt

SEQ ID NO: 305810 - DNA, 4821 bp, Artificial Sequence
  derived and/or modified sequence
atgttccacatctgccccgccgagaacctgtaccagaacagattcctgggcctggccgccatggccagccccagcagaaacagccagagcagaagaagatgcaaggagcccctgagatacagctacaaccccgaccagttccacaacatggacctgagaggcggcccccacgacggcgtgaccatccccagaagcaccagcgacaccgacctggtgaccagcgacagcagaagcaccctgatggtgagcagcagctactacagcatcggccacagccaggacctggtgatccactgggacatcaaggaggaggtggacgccggcgactggatcggcatgtacctgatcgacgaggtgctgagcgagaacttcctggactacaagaacagaggcgtgaacggcagccacagaggccagatcatctggaagatcgacgccagcagctacttcgtggagcccgagaccaagatctgcttcaagtactaccacggcgtgagcggcgccctgagagccaccacccccagcgtgaccgtgaagaacagcgccgcccccatcttcaagagcatcggcgccgacgagaccgtgcagggccagggcagcagaagactgatcagcttcagcctgagcgacttccaggccatgggcctgaagaagggcatgttcttcaaccccgacccctacctgaagatcagcatccagcccggcaagcacagcatcttccccgccctgccccaccacggccaggagagaagaagcaagatcatcggcaacaccgtgaaccccatctggcaggccgagcagttcagcttcgtgagcctgcccaccgacgtgctggagatcgaggtgaaggacaagttcgccaagagcagacccatcatcaagagattcctgggcaagctgagcatgcccgtgcagagactgctggagagacacgccatcggcgacagagtggtgagctacaccctgggcagaagactgcccaccgaccacgtgagcggccagctgcagttcagattcgagatcaccagcagcatccaccccgccgacgacgaggagatcagcctgagcaccgagcccgagagcgcccagatccaggacagccccatgaacaacctgatggagagcggcagcggcgagcccagaagcgaggcccccgagagcagcgagagctggaagcccgagcagctgggcgagggcagcgtgcccgacggccccggcaaccagagcatcgagctgagcagacccgccgaggaggccgccgtgatcaccgaggccggcgaccagggcatggtgagcgtgggccccgagggcgccggcgagctgctggcccaggtgcagaaggacatccagcccgcccccagcgccgaggagctggccgagcagctggacctgggcgaggaggccagcgccctgctgctggaggacggcgaggcccccgccagcaccaaggaggagcccctggaggaggaggccaccacccagagcagagccggcagagaggaggaggagaaggagcaggaggaggagggcgacgtgagcaccctggagcagggcgagggcagactgcagctgagagccagcgtgaagagaaagagcagaccctgcagcctgcccgtgagcgagctggagaccgtgatcgccagcgcctgcggcgaccccgagacccccagaacccactacatcagaatccacaccctgctgcacagcatgcccagcgcccagggcggcagcgccgccgaggaggaggacggcgccgaggaggagagcaccctgaaggacagcagcgagaaggacggcctgagcgaggtggacaccgtggccgccgaccccagcgccctggaggaggacagagaggagcccgagggcgccacccccggcaccgcccaccccggccacagcggcggccacttccccagcctggccaacggcgccgcccaggacggcgacacccaccccagcaccggcagcgagagcgacagcagccccagacagggcggcgaccacagctgcgagggctgcgacgccagctgctgcagccccagctgctacagcagcagctgctacagcaccagctgctacagcagcagctgctacagcgccagctgctacagccccagctgctacaacggcaacagattcgccagccacaccagattcagcagcgtggacagcgccaagatcagcgagagcaccgtgttcagcagccaggacgacgaggaggaggagaacagcgccttcgagagcgtgcccgacagcatgcagagccccgagctggaccccgagagcaccaacggcgccggcccctggcaggacgagctggccgcccccagcggccacgtggagagaagccccgagggcctggagagccccgtggccggccccagcaacagaagagagggcgagtgccccatcctgcacaacagccagcccgtgagccagctgcccagcctgagacccgagcaccaccactaccccaccatcgacgagcccctgccccccaactgggaggccagaatcgacagccacggcagagtgttctacgtggaccacgtgaacagaaccaccacctggcagagacccaccgccgccgccacccccgacggcatgagaagaagcggcagcatccagcagatggagcagctgaacagaagataccagaacatccagagaaccatcgccaccgagagaagcgaggaggacagcggcagccagagctgcgagcaggcccccgccggcggcggcggcggcggcggcagcgacagcgaggccgagagcagccagagcagcctggacctgagaagagagggcagcctgagccccgtgaacagccagaagatcaccctgctgctgcagagccccgccgtgaagttcatcaccaaccccgagttcttcaccgtgctgcacgccaactacagcgcctacagagtgttcaccagcagcacctgcctgaagcacatgatcctgaaggtgagaagagacgccagaaacttcgagagataccagcacaacagagacctggtgaacttcatcaacatgttcgccgacaccagactggagctgcccagaggctgggagatcaagaccgaccagcagggcaagagcttcttcgtggaccacaacagcagagccaccaccttcatcgaccccagaatccccctgcagaacggcagactgcccaaccacctgacccacagacagcacctgcagagactgagaagctacagcgccggcgaggccagcgaggtgagcagaaacagaggcgccagcctgctggccagacccggccacagcctggtggccgccatcagaagccagcaccagcacgagagcctgcccctggcctacaacgacaagatcgtggccttcctgagacagcccaacatcttcgagatgctgcaggagagacagcccagcctggccagaaaccacaccctgagagagaagatccactacatcagaaccgagggcaaccacggcctggagaagctgagctgcgacgccgacctggtgatcctgctgagcctgttcgaggaggagatcatgagctacgtgcccctgcaggccgccttccaccccggctacagcttcagccccagatgcagcccctgcagcagcccccagaacagccccggcctgcagagagccagcgccagagcccccagcccctacagaagagacttcgaggccaagctgagaaacttctacagaaagctggaggccaagggcttcggccagggccccggcaagatcaagctgatcatcagaagagaccacctgctggagggcaccttcaaccaggtgatggcctacagcagaaaggagctgcagagaaacaagctgtacgtgaccttcgtgggcgaggagggcctggactacagcggccccagcagagagttcttcttcctgctgagccaggagctgttcaacccctactacggcctgttcgagtacagcgccaacgacacctacaccgtgcagatcagccccatgagcgccttcgtggagaaccacctggagtggttcagattcagcggcagaatcctgggcctggccctgatccaccagtacctgctggacgccttcttcaccagacccttctacaaggccctgctgagactgccctgcgacctgagcgacctggagtacctggacgaggagttccaccagagcctgcagtggatgaaggacaacaacatcaccgacatcctggacctgaccttcaccgtgaacgaggaggtgttcggccaggtgaccgagagagagctgaagagcggcggcgccaacacccaggtgaccgagaagaacaagaaggagtacatcgagagaatggtgaagtggagagtggagagaggcgtggtgcagcagaccgaggccctggtgagaggcttctacgaggtggtggacagcagactggtgagcgtgttcgacgccagagagctggagctggtgatcgccggcaccgccgagatcgacctgaacgactggagaaacaacaccgagtacagaggcggctaccacgacggccacctggtgatcagatggttctgggccgccgtggagagattcaacaacgagcagagactgagactgctgcagttcgtgaccggcaccagcagcgtgccctacgagggcttcgccgccctgagaggcagcaacggcctgagaagattctgcatcgagaagtggggcaagatcaccagcctgcccagagcccacacctgcttcaacagactggacctgcccccctaccccagctacagcatgctgtacgagaagctgctgaccgccgtggaggagaccagcaccttcggcctggagtag

SEQ ID NO: 305811 - protein, 1343 aa, Artificial Sequence
  derived and/or modified sequence
MDAPRASAAKPPTGRKMKARAPPPPGKAATLHVHSDQKPPHDGALGSQQNLVRMKEALRASTMDVTVVLPSGLEKRSVLNGSHAMMDLLVELCLQNHLNPSHHALEIRSSETQQPLSFKPNTLIGTLNVHTVFLKEKVPEEKVKPGPPKVPEKSVRLVVNYLRTQKAVVRVSPEVPLQNILPVICAKCEVSPEHVVLLRDNIAGEELELSKSLNELGIKELYAWDNRRETFRKSSLGNDETDKEKKKFLGFFKVNKRSNSKAEQLVLSGADSDEDTSRAAPGRGLNGCLTTPNSPSMHSRSLTLGPSLSLGSISGVSVKSEMKKRRAPPPPGSGPPVQDKASEKVSLGSQIDLQKKKRRAPAPPPPQPPPPSPLIPNRTEDKEENRKSTMGGGRQVPQKPPRGTARGPPQLVLPPPPPYPPPDTDVVEPLSFPGEGAGSEASDPIPKLSLPLGSGSHCSPDGAPQVLSEAEETVSVGSCFASEDTTEDSGVMSSPSDIVSLDSQQDSMKYKDKWATDQEDCSDQDLAGTPDLGPQKSPLWEKNGSENSHLRTEKAVTASNDEEDLLIAGEFRKTLAELDEDLEEMEDSYETDTSSLTSSIHGASNHCPQDAMIPHGDTDAIPVTFIGEVSDDPVDSGLFSNRNNNAGSFDSEGVASRRDSLAPLQAEHSQPHEKAREEVPALHPASHDVGKGIRVALSNISKDGNLMETAPRVTSFASNLHTDNLNAKVKDKVYGCADGERTQATERVNSQPVNEKDSNDKNAALAPTSWHQRGQNPGKSYRLKHGLTTYKIIPPKSEMRCYDRDVSLSTGAIKIDELGNLVSPHATGIRIISLSSSVPEAESQPIGKVREFWRCNSVEKHLGRPSESSARGPPSTPVPTQTQNPESRLQADPKPISPQQKSAHHEGRNPLGEGRNQPPTMGMGHVRVPAAHTTEVTFLKPQRRTSSQYVASAIAKRIGAPKVHADVVRPHGYAEKGYAGKAPVLAAPPVTVKDDRTSSPHSETQGWKDGAQWPCVTPPNNHGEDLAVGAPPRGEVIGPHRKLSTQDRPAAIHRSSCFSLVQSSQRDRVSVGQSCGFSGKQSTSSQEASSASEPRRAPDGTDPPPPHTSDTQACSRELVNGSVRAPGHGEPSHPPGGSGTESHILLEREEKPSVFSTDGNETDSIWPPSIFGPKKKFKPVVQRPVPKDTSLHSALMEAIHSAGGKDRLRKTAEHTGEGRPAKLSYTEAEGERSALLAAIRGHSGTCSLRKVASSASEELQSFRDAALSAQGSESPLLEDLGLLSPPAIPPPPPPPSQALSAPRTASRFSTGTLSNTADARQALMDAIRSGTGAARLRKVPLLV

SEQ ID NO: 305812 - protein, 1146 aa, Artificial Sequence
  derived and/or modified sequence
LRDNIAGEELELSKSLNELGIKELYAWDNRRETFRKSSLGNDETDKEKKKFLGFFKVNKRSNSKAEQLVLSGADSDEDTSRAAPGRGLNGCLTTPNSPSMHSRSLTLGPSLSLGSISGVSVKSEMKKRRAPPPPGSGPPVQDKASEKVSLGSQIDLQKKKRRAPAPPPPQPPPPSPLIPNRTEDKEENRKSTMGGGRQVPQKPPRGTARGPPQLVLPPPPPYPPPDTDVVEPLSFPGEGAGSEASDPIPKLSLPLGSGSHCSPDGAPQVLSEAEETVSVGSCFASEDTTEDSGVMSSPSDIVSLDSQQDSMKYKDKWATDQEDCSDQDLAGTPDLGPQKSPLWEKNGSENSHLRTEKAVTASNDEEDLLIAGEFRKTLAELDEDLEEMEDSYETDTSSLTSSIHGASNHCPQDAMIPHGDTDAIPVTFIGEVSDDPVDSGLFSNRNNNAGSFDSEGVASRRDSLAPLQAEHSQPHEKAREEVPALHPASHDVGKGIRVALSNISKDGNLMETAPRVTSFASNLHTDNLNAKVKDKVYGCADGERTQATERVNSQPVNEKDSNDKNAALAPTSWHQRGQNPGKSYRLKHGLTTYKIIPPKSEMRCYDRDVSLSTGAIKIDELGNLVSPHATGIRIISLSSSVPEAESQPIGKVREFWRCNSVEKHLGRPSESSARGPPSTPVPTQTQNPESRLQADPKPISPQQKSAHHEGRNPLGEGRNQPPTMGMGHVRVPAAHTTEVTFLKPQRRTSSQYVASAIAKRIGAPKVHADVVRPHGYAEKGYAGKAPVLAAPPVTVKDDRTSSPHSETQGWKDGAQWPCVTPPNNHGEDLAVGAPPRGEVIGPHRKLSTQDRPAAIHRSSCFSLVQSSQRDRVSVGQSCGFSGKQSTSSQEASSASEPRRAPDGTDPPPPHTSDTQACSRELVNGSVRAPGHGEPSHPPGGSGTESHILLEREEKPSVFSTDGNETDSIWPPSIFGPKKKFKPVVQRPVPKDTSLHSALMEAIHSAGGKDRLRKTAEHTGEGRPAKLSYTEAEGERSALLAAIRGHSGTCSLRKVASSASEELQSFRDAALSAQGSESPLLEDLGLLSPPAIPPPPPPPSQALSAPRTASRFSTGTLSNTADARQALMDAIRSGTGAARLRKVPLLV
